United States Patent Application Publication US 2004/0031072 A1 - sequence listing, part 33

SEQ ID NO: 165978 - protein, 262 aa, Glycine max
  Clone ID: PAT_MRT3847_120894C.1.pep
HASDKIKAVFKLQFQATQVPNMKKSVLMVALVPDNVGKPTVKLEKVAVQDGTCLWENPIFESVKLVKDTKSGKLQEKIYHFVVSTGSSKSGFLGESSIDFADFAAETEPLTVSLPLKFANSGAILHVTIQNVEGVHRDQSSFRNGEDNWNGSSRHLLSICSTDEGSHNADKDFPQLLPPLRQNSMPSRGTIETIATRAQMHHMGPTGSASDRSLGDYWRKSLEDTLPRERLQEPSDNVTENLKSEVASLKRKVEESEHELQS

SEQ ID NO: 165979 - protein, 450 aa, Glycine max
  unsure (1)..(450): unsure at all Xaa locations
  Clone ID: PAT_MRT3847_120895C.1.pep
RKLDLWENVVVGGAGSGAEAIFDSGVVPSSLVEIAPILRVANEVEKTHPRVAYLCRCYAFEKAHRLDPTSSGRDVRQFKTALLQRLERENDPTLKGRVKKSDAHEMQSFYQHYYKKYIQALQNAADKADRAQLTKAYQTANVLFEVXLKAVNMTQSMEVDREILETQDKVAEKTEILVPYNILPLYPDSANQAIMRFPEIQAAVYALHNTRGLAWPKDYKKKKDEDILDWLGVLFGFQKHNVSNQREHLILLLANVHIRQFPKPDQQPKGRGEEGIXHLIISILLDERALTEVMKKLFKNYKKWCKYLGRNSSLWLPTIQQEVQQRKLLYMGLYLLIWGEAANLRFIPECLCYIYHHMXFELYGMLAGNVSPMTGENVKPAYGGEDEAFLRKLXRSKKGRSKHSQWRNYDDLNEYFWSADCFQLGWPMRADADFFCLPVEQLNFDKSNGT

SEQ ID NO: 165980 - protein, 140 aa, Glycine max [sequence omitted]

SEQ ID NO: 165981 - protein, 209 aa, Glycine max
  Clone ID: PAT_MRT3847_120897C.1.pep
MRTFFTAESCKEAHHSALNPQSWLQVERGKLPRLSSQSSSASIESLIKVPQSPILPFFKPVDYVEVLAQIHEELESCPPQEQSNLFLLQYQVFKGLGDVKLMRRSLRSAWQRANTVHEKIIFGAWLKYEKQGEELVAQLLTACGKCEKEFGPIDVESHIPFDENVSSQDRASMNGNDASEYVIFKIGDEKIVWDRQKISELSAPFHAMP

SEQ ID NO: 165982 - protein, 52 aa, Glycine max
  Clone ID: PAT_MRT3847_120898C.1.pep
YCTSERVNKNPFECKNFELLRIVAPMALLPDEGIRKIKLKPAAPPPTVLAHL

SEQ ID NO: 165983 - protein, 97 aa, Glycine max
  unsure (1)..(97): unsure at all Xaa locations
  Clone ID: PAT_MRT3847_120899C.1.pep
PLTSFTQLVPXGVIFVPHGYPFGGGKFXFKKVKGCPPXGAGTYXGNGSRQPSXLEMAQAFPQGKAFAGIAKKVQGFPWFLSPLKKPPHILCPIKLDV

SEQ ID NO: 165984 - protein, 44 aa, Glycine max
  Clone ID: PAT_MRT3847_12089C.1.pep
FMTHSDLDWIYSSLFLYQYSQKWVSICMWVSNLVTSFTRSAIQM

SEQ ID NO: 165985 - protein, 412 aa, Glycine max
  Clone ID: PAT_MRT3847_1208C.1.pep
MGVCLSTQIKAGLNSKHVSADAKDHSSPISNKITKDVSTPISKVSEVSVPQTPRIEGEILQSSNLKNFSLTELTAATRNFRKDSVLGGEGDFGSVFKGWIDNQSLAAAKPGTGVVVAVKRLSLDSFQGQKDWLDEVNYLGQLSHPHLVKLIGYCFEDEDRLLVYEFMPRGSLEYHLFMRGSYFQPLSWGLRLKVALGAAKGLAFLHSAETKVIYRDFKTSNVLLDSNYNAKLADLGLAKDRPTREKSHVSTRVMGTYGYAAPEYQTTGNLSAKSDVFSFGVVLLEMLSGRRAVDKNRPSGQHNLVEWAKPYLANKHKLLRVLDNRLEGQYALDEACKVATLSLRCLATESKLRPTMDEVVTDLEQLQVPHVNQNRSVNASRGRRKSADDFTHGRIATASVSPLSHDIANTRP

SEQ ID NO: 165986 - protein, 191 aa, Glycine max
  Clone ID: PAT_MRT3847_120900C.1.pep
MNKTMEENEKAFNVNGREVIPLLAPFKMGKFNLSHRIVLAPLTRTRSYNFMAQPHAALYYSQRTTKGGFLIGEASGVSDTAQGYPNTPGIWTREQVEAWKPIVRAVHENGGIFFCQLWHAGRVSNYVYQPNGEPPISSTNKAVQGSSTQYPPPRRLRTDEIPEIVNDFRMAVKNAIEACFDGVDIHGANGY

SEQ ID NO: 165987 - protein, 72 aa, Glycine max
  Clone ID: PAT_MRT3847_120901C.1.pep
LELLVSLLIKGISYHVFGDRLKYNVSPSRFSKISLDLGHNLTPIRSPTTLVLLFSPSQSRGSLLHTHLAAHN

SEQ ID NO: 165988 - protein, 55 aa, Glycine max
  Clone ID: PAT_MRT3847_120902C.1.pep
AAYVTLEFTRSLTSIILTDHHIRKKSYTVGEPTLIQISAHLQTHINTHYKPYSNP

SEQ ID NO: 165989 - protein, 138 aa, Glycine max
  Clone ID: PAT_MRT3847_120903C.1.pep
MPINRIALGSHQEVYHPGALKAAFAEFISTLIFVFAGQGSGMAFSKLTGGGPTTPAGLIAAAVAHAFALFVAVSVGANISGGHVNPAVTFGAFVGGNITLFRGLLYWVAQLLGSTVACFLLRFSTGGQATGTFGLTGV

SEQ ID NO: 165990 - protein, 69 aa, Glycine max
  Clone ID: PAT_MRT3847_120905C.1.pep
EFNFPYFSPTYGVGYVRMGMTYSKVAKLAEGACNMQGFLKKNAVLQSEFMMSELVPFVMPTTPAFFWRG

SEQ ID NO: 165991 - protein, 77 aa, Glycine max
  Clone ID: PAT_MRT3847_120906C.1.pep
WRGWRLHTRWLVSNTRSLHIMHLLRLTAFCSQYTDRRDSMSLIIYFCLYANTDIELQDIPLRSLALALRRTIDSKGL

SEQ ID NO: 165992 - protein, 98 aa, Glycine max
  unsure (1)..(98): unsure at all Xaa locations
  Clone ID: PAT_MRT3847_120907C.1.pep
NGAGPPWRQEALKKTAFEKSPAPARTGPPAQRSGIEKAFAPPGFPPRTSQASQRRRLCLXETSHSPSNPGFWGGRSPEFEGVRQPGPPPGLEGGNNPS

SEQ ID NO: 165993 - protein, 58 aa, Glycine max
  Clone ID: PAT_MRT3847_120908C.1.pep
CINGVMHLCACAGKACIKDHVNNVNDAYAKSAPGDKVYNGVHKLGFCVFHVQVRFLIQ

SEQ ID NO: 165994 - protein, 121 aa, Glycine max
  Clone ID: PAT_MRT3847_120909C.1.pep
EFGTRDTYSFGVVLLELLTGRTPVQPLEQGGDLVTWVRNHIRDHNNTLTPEMLDSRVDLEDQTTVNHMLPVLKLALLCTSVSPTKRPSMREVVLMLIESNEREGNLTLTQTYHDLPSKDGM

SEQ ID NO: 165995 - protein, 58 aa, Glycine max
  Clone ID: PAT_MRT3847_12090C.1.pep
SCKMYPNLSYTESTTTYTLVMGMAPIKAQLESAEMRVFAKNDGCKCRANCTCNPCTCK

SEQ ID NO: 165996 - protein, 104 aa, Glycine max
  unsure (1)..(104): unsure at all Xaa locations
  Clone ID: PAT_MRT3847_120910C.1.pep
CXLXXAAEHXTSISXRXIXTXRNLXWXXLYXXXXXXXXXKHTXSXECXXNXANKNSPITXISKXXXXVYQKLLXXXXARNDXRDDFXWYXPIXXXVEXXXXXXX

SEQ ID NO: 165997 - protein, 269 aa, Glycine max
  Clone ID: PAT_MRT3847_120911C.1.pep
VRIPGSTHASADSAETTKDKGQGSLDEGSLDLGICDSIGSVKKRKLKGYQDAQTYSPGNPCLQESKTSEHEFSNSRKEKKAKNSKYEGKESNASKGSGRSDKKVSHTKTQKFRQKPESSLSQRSLDGLDCSKRDLGSVQASVAATSSSSKVSGSHKTKASFQEVKGSPVESVSSSPIRISNADKFTNKEIIGKDDSHDIAAADSPRRCSGREDDGENDRSGTARKDKSFTISHRSDFQDKGVNHLSDTKLKAQQLVIVPGGDTIVPDGT

SEQ ID NO: 165998 - protein, 74 aa, Glycine max
  Clone ID: PAT_MRT3847_120912C.1.pep
LSSLQEQYNLSFDSCCNFKISACCYALLNLLVGTQLISFCNWLASYKMSKSNRSKEKHGKSHWLSEHNCDEESA

SEQ ID NO: 165999 - protein, 245 aa, Glycine max
  unsure (1)..(245): unsure at all Xaa locations
  Clone ID: PAT_MRT3847_120913C.1.pep
MPLRLEIKRKLAQRSERVKCVDLHPTEPWILASLYSGTVCIWNYQSQTMAKSFEVTELPVRSAKFIARKQWVVAGADDMFIRVYNYNTMDKVKVFEAHTDYIRCVAVHPTLPYVLSSSDDMLIKLWDWEKGWICTQIFEGHSHYVMQVTFNPKDTNTFASASLDRTIKIWNLGSPDPNFTLDAHQKGVNCVDYFTGGDKPYLITGSDDHTAKVWDYQTXSCVQTLEGHTHNVSAVCFHPELPIII

SEQ ID NO: 166000 - protein, 566 aa, Glycine max
  Clone ID: PAT_MRT3847_120914C.1.pep
MPLRLEIKRKLAQRSERVKSVDLHPTEPWILASLYSGTVCIWNYQSQTMAKSFEVTELPVRSAKFIARKQWVVAGADDMFIRVYNYNTMDKVKVFEAHTDYIRCVAVHPTLPYVLSSSDDMLIKLWDWEKGWICTQIFEGHSHYVMQVTFPRVRTNTFASASLDRTIKIWNLGSPDPNFTLDAHQKGVNCVDYFTGGDKPYLITGSDDHTAKVWDYQTKSCVQTLEGHTHNVSAVCFHPELPIIITGSEDGTVRIWHSTTYRLENTLNYGLERVWAIGYLKGSRRVVIGYDEGTIMVKLGREEPVASMDNSGKIIWAKHNEIQTVNIRSVRADVEIADGERLPLAVKELGTCDLYPQSLRHNPNGRFVVVCGDGEYIIYTGLAWRNRSFGSALEFVWSSDGEYAVRESTSKVKIFSKNFQEKKSIRPTFSAERIFGGTVLAMCSNDFICFYDWAECRLIRRIDVNVKNLYWADSGDLVTIASDTSFYILKYNHDVVASYLDSGGPVDEQGVEDAFELLHEMNERVRTGIWVGDCFIYSNSSWRLNYYVGGEGTTRNHLDRDIDLLQ

SEQ ID NO: 166001 - protein, 49 aa, Glycine max
  Clone ID: PAT_MRT3847_120915C.1.pep
APISLRYVSLSFNLFQSFPIFVVDFFYFFDIYVDNIVSHLFIIFSILII

SEQ ID NO: 166002 - protein, 46 aa, Glycine max
  Clone ID: PAT_MRT3847_120916C.1.pep
CFYSFGDYFSLGLQDPFQILTPFLGGGALINFVPIKTHHGLFPPFP

SEQ ID NO: 166003 - protein, 85 aa, Glycine max
  Clone ID: PAT_MRT3847_120917C.1.pep
TVLEVNTQERRLLEQTDQWLTLTFRWKLNKQRCVFERMRETRMSILSISFSIVTVVYNNGINLKILMSHNNSFQNCPMYGVACQC

SEQ ID NO: 166004 - protein, 84 aa, Glycine max
  Clone ID: PAT_MRT3847_120918C.1.pep
FGSESEEDMGGGLYSDEDGDLNEEYSFRKNKGNKGDPCRQNKGNRHDSGRRNFTKDRKSGSIGGRRANMLSDDFAGSSQQSYRN

SEQ ID NO: 166005 - protein, 51 aa, Glycine max
  unsure (1)..(51): unsure at all Xaa locations
  Clone ID: PAT_MRT3847_120919C.1.pep
RSXILRAVVNSLIIPHPPRTGAIMMSFYPYIKSLPLLAPIAAVPYSRFSQP

SEQ ID NO: 166006 - protein, 67 aa, Glycine max
  Clone ID: PAT_MRT3847_12091C.1.pep
LVFCESVNTCHSRLRRTFVHLPCCCIYCEQLLTCGHLWLLHGLCQCTTSWRHKCPWVGFWRSHCIKG

SEQ ID NO: 166007 - protein, 93 aa, Glycine max
  Clone ID: PAT_MRT3847_120920C.1.pep
ITNGSGESAETGLVSAPSPLRLVLLQIPDLRAPASLPPPRRRSRTASLRLVGDRPSRVKKHEVVGLVGQTLMNALINTGLVEPESHRLEEIDA

SEQ ID NO: 166008 - protein, 74 aa, Glycine max
  Clone ID: PAT_MRT3847_120921C.1.pep
IGQWAPPDFIFVKSPLRPPRLFHLCFRGRKFWGILIGFPFSPGSGFVPGFPLLKKNSFYGKLVRLQVPVLNFQG

SEQ ID NO: 166009 - protein, 108 aa, Glycine max
  unsure (1)..(108): unsure at all Xaa locations
  Clone ID: PAT_MRT3847_120922C.1.pep
VQARSAVQALLVRGERSYYRHLSTAGIVEHRHHHGGXAFVSSHWRRMSTLPXVKDQHSXTNXNEANDTTDSGVTSXWGITTPKVRNEDCTDWPSNCFMPWDCYHSVVS

SEQ ID NO: 166010 - protein, 75 aa, Glycine max
  unsure (1)..(75): unsure at all Xaa locations
  Clone ID: PAT_MRT3847_120923C.1.pep
EGFPHVLSRKNGEEGIRGFISGDGEEMTLIPGTSVKEAYNKRIVKLEKSVPTLIEHECPKAVKLPXRRKIFDQPK

SEQ ID NO: 166011 - protein, 84 aa, Glycine max
  Clone ID: PAT_MRT3847_120924C.1.pep
LLYKIQSSKHRIRRSSLTPRLQSLRLSAATNVLLDLPLKMAHVLERQVDSKLHHQPNYHQTHHEIVLAVRAEVVNVFNILGHRH

SEQ ID NO: 166012 - protein, 49 aa, Glycine max
  Clone ID: PAT_MRT3847_120925C.1.pep
LANLFVRFSTCHFSRCICSIVYSLLYQLDIGYMLCHFLPYLYSIWICML

SEQ ID NO: 166013 - protein, 56 aa, Glycine max
  Clone ID: PAT_MRT3847_120926C.1.pep
QTKRIIWSITSCMNEIYFLCNMADNRTEFIRLMHPVRTGLKRYRLPNSHGEDICVL

SEQ ID NO: 166014 - protein, 82 aa, Glycine max
  Clone ID: PAT_MRT3847_120927C.1.pep
RLWVCTSDGGSAASGEGHSHGIGCHLYPSVADILVWGQILPLIHQSGFCYHNVTEPQRCLCSHFIQSKSNAIRHFTWLQKGC

SEQ ID NO: 166015 - protein, 458 aa, Glycine max
  Clone ID: PAT_MRT3847_120928C.1.pep
FGSDLRNNNLTGKIPQMGTLLNQGPTAFSGNPGLCGFPLQSACPEAQKPGIFANPEDGFPQNPNALHPDGNYERVKQHGGGSVAVLVISGLSVAVGAVSLSLWVFRRRWGGEEGKLVGPKLEDNVDAGEGQEGKFAVVDEGFELELEDLLRASAYVVGKSRSGIVYKVVGVGKGLSSAAANVVAVRRLSEGDATWRFKEFESEVEAIARVRHPNVVPLRAYYFARDEKLIITDFIRNGSLHTALHGGPSNSLPPLSWAVRLKIAQEAARGLMYIHEFSGRKYIHGNIKSTKILLDDELHPYVSGFGLTRLGLGPTKSATMAPKRNSLNQSSITTAMSSKVAASLNHYLAPEVRNTGGKFTQKCDVYSFGIVLLELLTGRMPDFGAENDHKVLESFVRKAFKEEKPLSDIIDPALIPEVYAKKQVIVAFHIALNCTELDPELRPRMKTVSENLDHIKIQ

SEQ ID NO: 166016 - protein, 65 aa, Glycine max
  Clone ID: PAT_MRT3847_120929C.1.pep
KKKKKKIKKKKKKKKKKKKKKKKKKKKKKKKNKKKKKKKKIQKKKRKKNKKEKRKRGRLLYGYQM

SEQ ID NO: 166017 - protein, 215 aa, Glycine max
  Clone ID: PAT_MRT3847_12092C.1.pep
GHGSDASVTVQNWEGRGYSVVNVQCKDRTKLLFDIVCNLTDMEYVVFHATINTDGDRAYLEFYISTAARRRQKGEPERQRVIQCLKAAVERRASEGVRLELCTEDRQGLLAEVVRTFRENGLNVTRAEISTIGNMAKNIFYVTDAIGNPADSKIIESVRQKIGLSNLEVKELPLINHQEAEREDQAVGMGGAVLLSIGSLVRRNLYHLGLIKSCS

SEQ ID NO: 166018 - protein, 162 aa, Glycine max
  Clone ID: PAT_MRT3847_120930C.1.pep
MLWIGPQRFDIALGTARGLAYIHEECLECILLCDVKPQSILLDSNYHLKVADFGMSKLIMRNRNDTSTYSNISRIRGSRGYVAHEWVFNLSITSKVDVYSYGMVVLQMVTAKSVTKDVDATDNGVENLHLSMVAWLKEKDKNGSGCVSEILRPTSRRRLCRG

SEQ ID NO: 166019 - protein, 155 aa, Glycine max
  Clone ID: PAT_MRT3847_120931C.1.pep
MTFTNGDAAAASLNKVPTVNFTKLFIGGHFVHSVSGKTFETIDPRTGDVIARISEGDKEDIDIAVKAARHAFDNGPWPRLPGSERGRILLKWAELIEENAEELAALDAIDAGKLYHMCRNLEVPAAANTLRYYAGASDKIHGEVLKMSGDFHAYT

SEQ ID NO: 166020 - protein, 87 aa, Glycine max
  unsure (1)..(87): unsure at all Xaa locations
  Clone ID: PAT_MRT3847_120932C.1.pep
FSHFRSALHKKTADGTILITELLGKYLTEGKFRARADEHHSHRMIGTRKTAATGESPGNTGLXLAYTMNHSFWRGAICDVNTLRSHD

SEQ ID NO: 166021 - protein, 50 aa, Glycine max
  Clone ID: PAT_MRT3847_120933C.1.pep
KGDMLVSKLVLTCIPPSPRDGSKLYKTDQDMRSHLIKLCGEAEGHLQSLY

SEQ ID NO: 166022 - protein, 65 aa, Glycine max
  Clone ID: PAT_MRT3847_120934C.1.pep
PFVHCVFPTPQFSLWGHQQSHGDQNFIQHLRIRGIRLRLAGNDLAFFPANLMLQTPNQDAHKPPP

SEQ ID NO: 166023 - protein, 112 aa, Glycine max
  Clone ID: PAT_MRT3847_120935C.1.pep
AKFEAFPHKSAQIGEIQEKVASKFPQEEFLTARSTQVRPATTLEADGCPYPYAMVHDSSVSTIPGDPVIGAKATTINNMCAYGLNPGMSGSRFLGTIPQAISHRTVWNEMAT

SEQ ID NO: 166024 - protein, 205 aa, Glycine max
  Clone ID: PAT_MRT3847_120936C.1.pep
MMQRLSSATTTTTTRSALLRYGGGALRRDVLAPISSSHLAAKSQAGENDTKAARWFSIMSSDRSTFDSSNLKRDLFFGKRYESTAAESSSSAAAERYEYQAEVSRLMDLIVNSLYSNKEVFLRELISNASDALDKLRFLSVTEPGLLKEAVDFDIRIQADKDNGIISITDTGIGMTRQELVDCLGTIAQSGTAKFLKALKDSKDA

SEQ ID NO: 166025 - protein, 68 aa, Glycine max
  Clone ID: PAT_MRT3847_120937C.1.pep
GVLKIKLFWIFSHDLTLFSYSKHFKNYGLLSSSFNEINASLDISCLKEANTQLCHGVQEKILIKGVYN

SEQ ID NO: 166026 - protein, 90 aa, Glycine max
  Clone ID: PAT_MRT3847_120938C.1.pep
HSQINPQPRAASFSFAQARTATFAGTLHNNSRARTDAGSEPTCLRSTAESTKNPGVRVFFFKPGWLLDGPRIRWPHLNSKDFRVVEASQL

SEQ ID NO: 166027 - protein, 97 aa, Glycine max
  Clone ID: PAT_MRT3847_120939C.1.pep
EQTYYLCLHISQVTVINQCSRCRRRLPHGWHLRRCSLIFHRLMERRRRLYHLGLAMRRTLHSFFFCSFGKQSFELVLLFENLFYLFVFLVNVMNING

SEQ ID NO: 166028 - protein, 242 aa, Glycine max
  Clone ID: PAT_MRT3847_12093C.1.pep
LGNMPWESAPNFRKLLDLFNAMGSMYAAVLLIGIKNANAVQPVVAVERTVFYREKAAGMYSALPYAFAQVLIELPYVLVQAVVYGIIIYAMIGFEWTVTKVFWYLFFMYFTFLTFTYYGMMSVAVTPNQHISSIVSSAFYAVWNLFSGFIVPRPRIPVWWRWCSWANPVAWSLYGLVASQYGDIKQSMESSDGRTTVEGFVRSYFGFKHDFLGVVAAVIVAFPVVFALVFAISVKMFNFQRR

SEQ ID NO: 166029 - protein, 163 aa, Glycine max
  Clone ID: PAT_MRT3847_120940C.1.pep
MPENMSENIYSDGGRYLIPRQDPLTAVNMTDWAANNARIAGPSQSHLNTGDFIDHHWFPADHQVRGGGWNGSDGGGLSSQSLGTGASADQSLFSILSECDQLHSGTPRVNTVAPPASHPLDYFTGREAPSGLVPDDMAWMSLPRQNSSIHDQMGKPYLRSWNR

SEQ ID NO: 166030 - protein, 515 aa, Glycine max
  Clone ID: PAT_MRT3847_120941C.1.pep
MSSECEPQEQNEDNVTSGSELQDQGEDNVDSGDELQDHVNNGGLNDQPYLKEDEHSFSLYPVYRSQNISYVRGDDEFNRMSVDSERNILLSKSNNTSSISGDHEFNRMNVDSEKNLLLSKSNNTSLNKDEYSRNMNTQDVSIDEEAPFTSSGDVWQGVEMPHSYYDSAVTHEYAASGLSLANPQVSQEQPTRMIDLEADLRREETGKELLSRQLDNGTFSSYQSQDRSVLLQSLFKGEGLLPYHHDQKEAELDIQTSNNVMMGGGQFSSHFKEPLQTSLTLDQGRRRATEVYMPENMSENIYSDEGRYLIPRQDPLIPRQDPLIPTQDPLIPRQDPLIPRQDPLVPRQDPLAAVNMTDWAANNARIAGPSQSHLNTGDFIGHHWFPADHQVRGGGWNGSDGGGLSNQSLGPGASSDQSLFSILSECDQLHSGSLYDSVRNTDQFLAPRTYGLVDAGTPRVNTVAPPASRPLDYFTRREAPSGLVPDDTVWMSLPPHQNSSLHDQIRKPYLRSWNR

SEQ ID NO: 166031 - protein, 72 aa, Glycine max
  Clone ID: PAT_MRT3847_120942C.1.pep
FYSVILISSYNSAYYCQQGSVCSEHRYDRLNYKLGMMLSHIVDFLEFCDYSCYRSFIDPSVVFSPRADSARV

SEQ ID NO: 166032 - protein, 165 aa, Glycine max
  Clone ID: PAT_MRT3847_120943C.1.pep
MPENMSENIYSDGGRYLIPRQDPLTAVNMTDWAANNARIAGPSQSHLNTGDFIDHHWFPADHQVRGGGWNGSDGGGLSSQSLGTGARADQSLFSILSECDQLHSGSPYDSVRNTNQFLAPRTYGLADAGTPRVNTVAPPASHPLDYFTRREAPSGLVPDDTVWMS

SEQ ID NO: 166033 - protein, 127 aa, Glycine max
  unsure (1)..(127): unsure at all Xaa locations
  Clone ID: PAT_MRT3847_120944C.1.pep
KPLPQVLVLHGHYGGSVGELPIYEAYTIDGPYFIRIYKMVEIETAKDILELELELKIPVKGTHLYAXTEHGKDLRSTNVVKGTSTKLXIRLNHDLSYYQGKKLDTKRPDYYGYDISRTVLLFFFIGD

SEQ ID NO: 166034 - protein, 63 aa, Glycine max
  unsure (1)..(63): unsure at all Xaa locations
  Clone ID: PAT_MRT3847_120945C.1.pep
KTLYVGKXXKGSXQHSSFLGGGATSSAGRLVXENGVLKAVWPHSGHYRPTEEXXXDYSSFRRT

SEQ ID NO: 166035 - protein, 75 aa, Glycine max
  Clone ID: PAT_MRT3847_120946C.1.pep
HFTRESVCVCAYVVPEKWFQNLVVEWMMEGLGAELGLSEHHPPFLLKLIPTVGSHLLSTLLWSGLCLLILEFIVM

SEQ ID NO: 166036 - protein, 64 aa, Glycine max
  Clone ID: PAT_MRT3847_120947C.1.pep
AFRPHNYISRCLPVCSSQLELVAPLVANASAFTSPFLARSYSASCVSSSVRSLDVCSQMIIEAI

SEQ ID NO: 166037 - protein, 123 aa, Glycine max
  Clone ID: PAT_MRT3847_120948C.1.pep
MTESAGPSVSLKLVVLVAILVVSALLILLLIFFLCFRKKRNLAAKHSSGSIPLVSKEITMVKASDPKKMEEAEVKVEIGGAQHHQSSELVSGEDPDIGWGRWYTIWEVELATHGFAKGNVIGR

SEQ ID NO: 166038 - protein, 54 aa, Glycine max
  Clone ID: PAT_MRT3847_120949C.1.pep
RDLLLFATIFCLSLKIKRKPVKAIFKKSEMNHTLFDSRIIFRKKNVFYPLSFEI

SEQ ID NO: 166039 - protein, 154 aa, Glycine max
  Clone ID: PAT_MRT3847_12094C.1.pep
MGSGKPRGLGAARKLRNYRRVQRWNDKNYAKANLGYAYKANPLGGSSHAKGIVLEKLGIESKQPNSAVRKAVRVQLIKNGKKITAFVPRDGCLNYIDENDEVLIAGFGRKGHAVGDIPGVRFKVVKVSNVALSALYRGKKEKPRSYINYLACAK

SEQ ID NO: 166040 - protein, 53 aa, Glycine max
  Clone ID: PAT_MRT3847_120950C.1.pep
NSSCSSRYSFFNYLKFSEAHPQIISVLGQIGLSSDQNNLQSGGKQGAESHRGK

SEQ ID NO: 166041 - protein, 38 aa, Glycine max
  Clone ID: PAT_MRT3847_120951C.1.pep
VLLCYGDSSACTHRMIDINPNVIVDIALLQPSINVVIT

SEQ ID NO: 166042 - protein, 99 aa, Glycine max
  unsure (1)..(99): unsure at all Xaa locations
  Clone ID: PAT_MRT3847_120952C.1.pep
MLLSLVLLLLMFSVCICFYSHLKISCHSGNCGCGSSCKCRNGCXCCKMXPDLSYTESTNSETLVMGVVPVKAQFEGAEIGVPAENDRCKCGADCTXNPC

SEQ ID NO: 166043 - protein, 90 aa, Glycine max
  Clone ID: PAT_MRT3847_120953C.1.pep
DSRLHFYTQCAAVRSELLFQTLHKVIRKRISSFCASRETPVDFNLASGSIYMIHPQICHQTINTPRFFKQSTMTKSDKINLEPIRLELEP

SEQ ID NO: 166044 - protein, 173 aa, Glycine max
  Clone ID: PAT_MRT3847_120954C.1.pep
NSARGRAAVWENFKDNPLFDISTEHPTTYYEDMQRAVFCLCPLGWAPWSPRLVEAVVFGCIPVIIADDIVLPFADAIPWEEIGVFVDEKDVPQLDTILTSIPPEVILRKQRLLANPSMKQAMLFPQPAQPGDAFHQVLNGLARKLPHDRSVFLKPGEKALNWTAGPVGDLKPW

SEQ ID NO: 166045 - protein, 49 aa, Glycine max
  unsure (1)..(49): unsure at all Xaa locations
  Clone ID: PAT_MRT3847_120955C.1.pep
IICKNCWXGPPPPSNWSYGKPCIPDFNFSSIAQSRAFSPEHPPLTEPAQ

SEQ ID NO: 166046 - protein, 34 aa, Glycine max
  Clone ID: PAT_MRT3847_120956C.1.pep
SYQPQACSPLHICLRPRAIIDPSARTMKQLPSLG

SEQ ID NO: 166047 - protein, 78 aa, Glycine max
  Clone ID: PAT_MRT3847_120957C.1.pep
TLATVLCMKPTLPGLEESQEQIHEIRITLSSRARLKPSRTRVAAWFIVHKSSASRFKDLLRSPLKVFTLLATITPVVE

SEQ ID NO: 166048 - protein, 60 aa, Glycine max
  unsure (1)..(60): unsure at all Xaa locations
  Clone ID: PAT_MRT3847_120958C.1.pep
LILLSFCWQQEVNYLGQLQHVNLVKPNGXCLESKNRLLVYEFMQKGSLENHLFRSKYISL

SEQ ID NO: 166049 - protein, 72 aa, Glycine max
  Clone ID: PAT_MRT3847_120959C.1.pep
KPLILGEFTNYGHSCKAKLYQNCTKIWHIANLNTCAKDSMINLQLCLSFTAELSSTSLWVCEFTFIVKKKRF

SEQ ID NO: 166050 - protein, 78 aa, Glycine max
  Clone ID: PAT_MRT3847_12095C.1.pep
VSMDMPPHGHALASDGEMELNSNPGPTIPQVECLVTGHESVSPQEKLTQPPSPLLMEHSSDDKTLHALYHQCGVYGQF

SEQ ID NO: 166051 - protein, 67 aa, Glycine max
  unsure (1)..(67): unsure at all Xaa locations
  Clone ID: PAT_MRT3847_120960C.1.pep
HKWGPRRSHNNNSSDLHPHKHHSHEQHPHGHHPHAHHPHEHDTHRQHPHGHHPXGNHPHGHTPHGQH

SEQ ID NO: 166052 - protein, 160 aa, Glycine max
  Clone ID: PAT_MRT3847_120961C.1.pep
TRPPTRPAALGNSRFPGKAVGVNLPAGSAPAAAAPADEAEDDDDLDLFGDETEEDKKAADERAAAAKASSKKKESGKSSVLMDVKPWDDETDMKKLEEAVRSVQMEGLTWGASKLVPVGYGIKKMTIMLTIVDDLVSIDTLIEDHLTQEPINEYVQSCDI

SEQ ID NO: 166053 - protein, 58 aa, Glycine max
  Clone ID: PAT_MRT3847_120962C.1.pep
HYKRAMTLHARDGKLESYRPTAVFLRFYSIQSPNVIVPYQINTCRQCLYRQWSMSRSH

SEQ ID NO: 166054 - protein, 64 aa, Glycine max
  unsure (1)..(64): unsure at all Xaa locations
  Clone ID: PAT_MRT3847_120963C.1.pep
VRFHVLEXTAPRAARTTPGRRRLCAPGSEANQMLCQNAREIPSNDWWRSSVSMTLLRLMSKASA

SEQ ID NO: 166055 - protein, 245 aa, Glycine max
  Clone ID: PAT_MRT3847_120964C.1.pep
MEMESKDYAFSGKIMLIAIVVLFIVIIIMLCLHVYVRRRLVNARRRPQLRRSNRPQFVFYMDPAARIALTRRGLHPSVISTLPMFTFSATNNPTECAVCLSEFENGETGRVLPKCNHSFHTECIDMWFQSHATCPLCREPVEAIPERETRSEVAVIVCDTEPVREEVNRSGPVGASSSAAATSLHIENLGCEDGCESESSFRSPVSRILSFKRILSREKKGSVVGVCSSMTELDVEQRGECDSVS

SEQ ID NO: 166056 - protein, 123 aa, Glycine max
  Clone ID: PAT_MRT3847_120965C.1.pep
REFRTHLISIPRCRRHQLTESHSRRCSTSKSVMELHPPPTLSFFSLLRTLLNDNIRLTGKRNDDPDSHPDSHPKLSICNEAAEGEEEAPTGPDRFTSSRTGSLSHTITATSDRVSRSGIASTG

SEQ ID NO: 166057 - protein, 43 aa, Glycine max
  Clone ID: PAT_MRT3847_120966C.1.pep
FLSFECKKHIMCDYILKDSWINLRKKLVFFDPRNCVPLVPLFP

SEQ ID NO: 166058 - protein, 94 aa, Glycine max
  Clone ID: PAT_MRT3847_120967C.1.pep
MASLSSLVLLLAALILSPQVLANYENPPVYKPSTEKPPVYKPPIGKPSCYQPSSGNPPIYKPSIEKPPMYKPPSGKPPMVQPPIEKPPMCKPPI

SEQ ID NO: 166059 - protein, 117 aa, Glycine max
  Clone ID: PAT_MRT3847_120968C.1.pep
SQRTSSSKPNQTMQGFVSTTMGITTTPQSTPIPPGFILITHTSSSMVSDLISQPFLAVIRPPPQLGTSIPFTPGPSALQPFNPFHFYITTKTSHYHQPISLFFLYPKSPPLTITSFI

SEQ ID NO: 166060 - protein, 153 aa, Glycine max
  Clone ID: PAT_MRT3847_120969C.1.pep
MDEQLRILKVIVVQGKRLVIRDFKSSDPYVVVKLGNQTAKTRVIRCCLNPVWNEELNFTLTEPLGVLNLEVFDKDLWKADDKMGNSYLNLQPLISAARLRDILKVSSGETTLRKVTPDSENCLARESSINCVNGEVLQNVWLRLRGVESGELN

SEQ ID NO: 166061 - protein, 118 aa, Glycine max
  unsure (1)..(118): unsure at all Xaa locations
  Clone ID: PAT_MRT3847_12096C.1.pep
FPQGKRGLPFLRGSLPIPVHRVFWPKKLSLHLFXGFLWSVQPPAPLVVNPFLSRPPLKISFSTSNAQYWLLPTYFVEVXRISRGDGASVLVLLKNGSSFLAPYSGLKACSINGSVFIN

SEQ ID NO: 166062 - protein, 94 aa, Glycine max
  Clone ID: PAT_MRT3847_120970C.1.pep
MDTQKSQPEKQSSSTATAPSVTSCRKKKNEEAAFLDDLKDHIDEFINASMDEHKTCFKKTIQKMFGMSKAVAEGQSNASKEVESSLPLQTTVQD

SEQ ID NO: 166063 - protein, 78 aa, Glycine max
  Clone ID: PAT_MRT3847_120971C.1.pep
WEIPISTPPNSFPEFRSDGSSNCSYPNVPFSLFSPSGWKCFCKKGFQGNPFKQKGCKFVGLAPFFPTRSPPLPHNFVY

SEQ ID NO: 166064 - protein, 97 aa, Glycine max
  unsure (1)..(97): unsure at all Xaa locations
  Clone ID: PAT_MRT3847_120972C.1.pep
LKPKEQLLQQHLLRVMRILEALDEKGCRIPLTSGDSELAEKLARISRKLRRSGSELSRVVQVLLSVSHVKAKNNGLGISVXRPGSSIIHEQSLGDLC

SEQ ID NO: 166065 - protein, 141 aa, Glycine max
  unsure (1)..(141): unsure at all Xaa locations
  Clone ID: PAT_MRT3847_120973C.1.pep
MAFFIFLTYPTLPFFLLLTSASIYTLIEFDEYYTTHQLGPFRQPHKCHTEFQQEQHLIACQQCIRQQLAVSPFSXNHCGSQHCPTLLKQCCNELYQEDQVCLFPTLKQASKSFMVHVQHXPYQSTRIYQIAKNFXNFCNIK

SEQ ID NO: 166066 - protein, 153 aa, Glycine max
  Clone ID: PAT_MRT3847_120974C.1.pep
SMLTRTLERKYMFLICNAILALLAMSPHFDLRVSEEPLGAFRLLENAPLMVEEEAKRHEEYPDQHISQAEENEGRLVSKVSNAEEEGAGGGTGSSTGVIVAQDDDELVAETAVEMETNEELANTDELNRKIEEFIRKMKEEMRIEAQKQPIAV

SEQ ID NO: 166067 - protein, 182 aa, Glycine max
  Clone ID: PAT_MRT3847_120975C.1.pep
MGNCQAVDTATLVIQQPNGKVERLYWPVSASEVMKTNPDHYVALLISTTLCSSKDNENRSNKSDNTNTTNPVRLTRIKLLKPTDTLVLGQVYRLISAQEVMKGLWAKKQAKMKRNLSDSAQKPNLMKERTDKSARGSEPEDNQETKAERHGSRTASTNNASSATAKSRTWQPSLQSISEAAS

SEQ ID NO: 166068 - protein, 80 aa, Glycine max
  Clone ID: PAT_MRT3847_120976C.1.pep
IIYSCFLLLFYQSLLSSNQGWTSDGDVYRHVSPEDGGAPNLHVLAVDDSTPAPEGDRPGAQNVASPSDIGGNWKEVSTVS

SEQ ID NO: 166069 - protein, 218 aa, Glycine max
  Clone ID: PAT_MRT3847_120977C.1.pep
MAVADAFDEQCDYLFKAVLIGDSGVGKSNLISRFAKDEFRLDSKPTIGVEFAYRNIKVRDKLIKAQIWDTAGQERFRAITSSYYRGALGAMLVYDITKRATFVNVGKWLHELREFGGEDMVVVLVGNKSDLDQSRQVEREEGKVFAETEELCFMETSALQNLNVDEAFLEMITKIHDIISQKSLETKMNGTALNLPSGKEIHIADEVTATKQAKYCCS

SEQ ID NO: 166070 - protein, 56 aa, Glycine max
  Clone ID: PAT_MRT3847_120978C.1.pep
KNPGGGEQKGGPPPFFFFFFFFFFFFFFFWIFFFFFLTQHACIYYFFQTNTYNAVP

SEQ ID NO: 166071 - protein, 299 aa, Glycine max
  Clone ID: PAT_MRT3847_120979C.1.pep
DARRHAISPLLTFITRLPSPAGKTQYVKWAWQEGVGLSSSNDSFFFDPSIRSYFKNYVKTILTRKNTITGIEYRNDPTIFGWELINEPRCLTDPSGDTLQDWIEEMSAFVKLIDKRHLVTVGLEGFYGPNDPKRLTVNPEDWASRLGSDFIRNSKISNIDFTSVHIYPDHWFHHQVFEDYMKFVSKWMLSHIEDGDKILNKPVLFSEYGLSDINFTMPERKTMYKTILDISYKSAKRNRSGAGALVWQFLVGGMQEFTDDFGIIPWEKTPIPSLFVEQSCRLTKVKGWPHKDTSFKQFC

SEQ ID NO: 166072 - protein, 70 aa, Glycine max
  Clone ID: PAT_MRT3847_12097C.1.pep
PRVRPRVRACVRTDKGIPKAQTGRVHEDKCWQPTHDETSIGNKTVDESSREERQTKHDLQRRVRYTGRMD

SEQ ID NO: 166073 - protein, 74 aa, Glycine max
  unsure (1)..(74): unsure at all Xaa locations
  Clone ID: PAT_MRT3847_120980C.1.pep
SYXPXXXKHFFTLRPSPISPDLFLKAYIRLFIPTPTNHNSFSSLKKTSSIPLITKTLPFYPFHFFNPPHSITSN

SEQ ID NO: 166074 - protein, 60 aa, Glycine max
  Clone ID: PAT_MRT3847_120981C.1.pep
MAFSKAMFLAAVMSVLVAVISAAEAPAPSPTSPAAAVSPSFVAGVLAAGAALAFGSALRI

SEQ ID NO: 166075 - protein, 36 aa, Glycine max
  Clone ID: PAT_MRT3847_120982C.1.pep
FGSRSVISFIVRFGLCLGVLSHYCFSCLSSFCEVYI

SEQ ID NO: 166076 - protein, 60 aa, Glycine max
  Clone ID: PAT_MRT3847_120983C.1.pep
FEQDSNAQIGFCWGIGVDGFVVIFGILGEPAKSSCANIICTISNWLCKFAPFLSLCYRVV

SEQ ID NO: 166077 - protein, 121 aa, Glycine max
  Clone ID: PAT_MRT3847_120984C.1.pep
IIVSVIAYIDKYLTNTHSASIHYSITSNTATLVHIYSFMMHIYILNTLVLNKHLIFNFHPGQVCHSPCEGCNGDYTPHSLYVRQIQVFHTSFEGFGGDHYHQIHYPVLISHPILAPISSYL

SEQ ID NO: 166078 - protein, 31 aa, Glycine max
  Clone ID: PAT_MRT3847_120985C.1.pep
LGHCERPTSSQYLCDDKNQDIAQHLHLYSSR

SEQ ID NO: 166079 - protein, 72 aa, Glycine max
  Clone ID: PAT_MRT3847_120986C.1.pep
VCYKRFTHSHSHRQFDALTLTRSWCRSGKRTDSTRTVRVNGQTGVAGLPLRGDAGVHGEGLQLRRQRGADRG

SEQ ID NO: 166080 - protein, 90 aa, Glycine max
  Clone ID: PAT_MRT3847_120987C.1.pep
LPWLSSALSYFTVECMVLYPTPKWGYTRPYPFYSQSFLPVMHFPLVSLLAVLFRGQNFKCILAVLVGFQSSITRTPAPANTSPPPPPSRR

SEQ ID NO: 166081 - protein, 62 aa, Glycine max
  Clone ID: PAT_MRT3847_120988C.1.pep
PTLLSQFKHSKPSNVTNINCIQHYQIYPKGTKKQPFLYQKCISFPCCLPFTFNEKLKNHPTS

SEQ ID NO: 166082 - protein, 90 aa, Glycine max
  Clone ID: PAT_MRT3847_120989C.1.pep
SNNNPKLPPNEPKNSGGTRKPRPQKKPKMPQLPQGPPKPGTKLFTFLNPRAAQTKNCGKKTFFHPKGLGGEKPKSGAPKNPHPPFENRIF

SEQ ID NO: 166083 - protein, 41 aa, Glycine max
  Clone ID: PAT_MRT3847_12098C.1.pep
SCLFLAFLAYISYHRRTISRGSVRFCEQDVNRSCEALISRF

SEQ ID NO: 166084 - protein, 74 aa, Glycine max
  Clone ID: PAT_MRT3847_120990C.1.pep
PSWTPTVTRLSSPPVSKPARSPSKVGARTLCPSQAKGKSLSTISPSGDGRGAQNMWTLQNIKASLVFECAKRTM

SEQ ID NO: 166085 - protein, 222 aa, Glycine max
  unsure (1)..(222): unsure at all Xaa locations
  Clone ID: PAT_MRT3847_120991C.1.pep
MNPSPSSSSLSSTLTSLNNLITLSNHVLSLTPSPPTLNSNLIQCPFNPHHLLPPPSLFLHHLRCPSSPRPLPDLNPSPSLTYPKTLHNSPSDQLSFYLDSLSNFFYRDSPAVVAFSHADSLTRTASLTLPSFLSLQCADTYTHSIPESASFHAPILPSQYFSIARELDCWNDFPATYSSSVLRAILGLGIANDRDLTDWMIANSPRYGVVIDTSMQHHIXLL

SEQ ID NO: 166086 - protein, 76 aa, Glycine max
  Clone ID: PAT_MRT3847_120992C.1.pep
AIILNCALAIILMIFHRFKKIYSHHSFCLCWLCIIFIGINLNENINSSFITTRFCMIGMRLIIGALRLCKNPISQL

SEQ ID NO: 166087 - protein, 111 aa, Glycine max
  unsure (1)..(111): unsure at all Xaa locations
  Clone ID: PAT_MRT3847_120993C.1.pep
XXYDVXXXXXXXXXXXXXXXXXXXXXXXXAXTXXXXAXPGXLXXDXLXHXXXWXXDXXXXAXXLRXXRDXXXAXXXSXTKXFXVRPMXLXHEXXRXXXXXXXAEXRAYVXX

SEQ ID NO: 166088 - protein, 52 aa, Glycine max
  Clone ID: PAT_MRT3847_120994C.1.pep
LLKTFIYITLSHFILFQLIFNSFSHFIYPSYLHINLLLPFTQNILLIQIFKL

SEQ ID NO: 166089 - protein, 133 aa, Glycine max
  unsure (1)..(133): unsure at all Xaa locations
  Clone ID: PAT_MRT3847_120995C.1.pep
MGTGLGSFQHGGIHTLGKKSGPLLPVWFGWGSVGGGSSVEIARAVLKTHGSTLVGGPKFGGGNITPFNDWDITWSRTGPYCFRACXWGLRDLFIVKPLHDSESIGNQELGGSLNELFISANKPVFLYDHFSSF

SEQ ID NO: 166090 - protein, 50 aa, Glycine max
  Clone ID: PAT_MRT3847_120996C.1.pep
LGFPVLGGGIGGFAGAPPALFVGGKFFSEGFCTDRVIAVPVGWGSFNWRS

SEQ ID NO: 166091 - protein, 145 aa, Glycine max
  Clone ID: PAT_MRT3847_120997C.1.pep
WLCSNYCHLGAHFGQRSSLSSRYTAPSPHNLSTRFNLRPPPYPLIAIARSYNTLLRGYLPKRYLAYHLQGSRFSFVYSPNPPYNCAPPICTHLLLACRPHPSLFLASPSSIHRTYPSSPLVYPPPPPPPPKTGGRHTVMTGNLPW

SEQ ID NO: 166092 - protein, 53 aa, Glycine max
  Clone ID: PAT_MRT3847_120998C.1.pep
GRVPPHQVNPFVCPLTTLFWGPGLNPTAFTKFFFFPKSSLCFCQKACISSRIG

SEQ ID NO: 166093 - protein, 49 aa, Glycine max
  Clone ID: PAT_MRT3847_120999C.1.pep
KSMFAIQVEKPGAPLGLSNPLFSEPHECYCRTLFMCPPPSSLELCFMIA

SEQ ID NO: 166094 - protein, 71 aa, Glycine max
  Clone ID: PAT_MRT3847_12099C.1.pep
IHPSLKEGVFCVVTLSFLLPPRSALFPSCARVNFVHKIIFFKFKRYSYENRPCDDLVLGLRHDLNHLSLTS

SEQ ID NO: 166095 - protein, 185 aa, Glycine max
  Clone ID: PAT_MRT3847_1209C.1.pep
MVQTKKFRGVRQRQWGSWVSEIRHPLLKRRVWLGTFETAEAAARAYDQAAILMNGQNAKTNFPTSKNQAEADDNNNTDTFLSPKALSELLSTKLRKYCKDPAPSLTCLRLDADNSHIGVWQKGAGPHSGSNWVMRLELGKKQITEEGSESTESPQSSTNGATENNEVEEEDRVALQMIEELLNWN

SEQ ID NO: 166096 - protein, 58 aa, Glycine max
  Clone ID: PAT_MRT3847_120C.1.pep
TSPSLTSSRKSTLPLEANPPYWQLFFLSWTALPSLSTIPSQSLNYLLNCISPSAGYNR

SEQ ID NO: 166097 - protein, 77 aa, Glycine max
  Clone ID: PAT_MRT3847_121000C.1.pep
LGIAQRPIQGYTCSCPGRTATLLPRNARNAALAPTDDTRALVGSRGSPRLISVDQRPPRLRRCPGLNSESSDTIARV

SEQ ID NO: 166098 - protein, 190 aa, Glycine max
  unsure (1)..(190): unsure at all Xaa locations
  Clone ID: PAT_MRT3847_121001C.1.pep
GTTPLLPPLFSVRKTVFLDLDETLVHSHPSPPGERFXFVVRPVIDGEPMDFYVLKRPGVDEFLESLAAKYEVVVFTAALKEYASMVLDRLDRNRFISHRLYRDSCRNIDGKLVKDLNETGRDLKRVVIVDDNPNSFANQPENAILIRPFVDDILDRELWKLRSFFNGSDCCECDDMRDAVKHYVTVQHRR

SEQ ID NO: 166099 - protein, 311 aa, Glycine max
  Clone ID: PAT_MRT3847_121002C.1.pep
MGEVGKILYIVVVEDSEKKESFRYSRPVLQSTLQLMGCKARHAFKISQRVFEQTRKENSTDILKLEVEALSGFDAFKKNFVKKDGRSVPFELYKRRTSAFVRRETFLDIACDALAEYKYVGPNQRADLVLACRIRERKESVTVLLCGTSGCGKSTLSALLGSRLGITTVVSTDSIRHMMRSFANEKENPLLWASTYHAGECLDPVAVAEAKARRKAKKLAGVSHSVSKEDVTEGHNSSKSDVRTLEMSSGPTELLSPKQMAIEGFKAQSEMVIDSLDRLITAWEERKESVVVEGVHLSLNFCMGLMKEHPS

SEQ ID NO: 166100 - protein, 223 aa, Glycine max
  unsure (1)..(223): unsure at all Xaa locations
  Clone ID: PAT_MRT3847_121003C.1.pep
MGSEGPTTPTTTIHVTGFKKFHGVSENPTETIANNLTEYMNKKGLPKGLVIGSCSILETAGQGALVPLYQRLQSAVIAKDTESSNSNRIIWLHFGVNSGATRFAIXENQAVNEANFRCPDEMGWKPQKVPIVPSDGGISRTRETTLPVVEITKALTEKGYEVMVSDDAGRFVCNYVYYHSLRFAEQNGIKSLFVHVPLFVTINEETQMQFAASLLEVLASIPQ

SEQ ID NO: 166101 - protein, 80 aa, Glycine max
  Clone ID: PAT_MRT3847_121004C.1.pep
MGEVGKILYIVVVEDSEKKESFRYSRPVLQSTLQLMGCKARHAFKISQRVFEQTRKENSTDILNLEVKALSGFDAFKKNL

SEQ ID NO: 166102 - protein, 377 aa, Glycine max
  unsure (1)..(377): unsure at all Xaa locations
  Clone ID: PAT_MRT3847_121005C.1.pep
MATLSFNPVRIKSPTFKHSKLTTPSKRITIPCTTPSNSHPKLLHFRPRSVSESTQKEAPEAVLGEEEEEEEDDDDDPSAELSYVDPETDPESITEWELDFCSRPILDVRGKKIWELVVCDKTLSLQYTKYFPNNVINSITLKDAIVAVSDQLGVPLPRNIRFFRSQMQTIITNACNELRIRPVPSKRCVSIILWLEERYETVYKKHPGFQEGSKPLLALDNPFXTELPDILYGERWAFVQLPYSAVREEISTFERGVCGSGLDLDLLGLDIDDKTLIPGLSVASSNSTALAALINGLEVCAVEADTARARLILSSGISTRYIYSTYKKTPETTSEAEAWEAAKKACGGLHFLAVQPDLDSEDCVGFFLLLDLPFPPV

SEQ ID NO: 166103 - protein, 218 aa, Glycine max
  unsure (1)..(218): unsure at all Xaa locations
  Clone ID: PAT_MRT3847_121006C.1.pep
GSLEEFQEEFKDINQEEQISRLHKMLAPHLLRRVKKDVMKELPPKKELILRIELSSKQKEYYKAILTRNYQILTRRGGAQISLINVVMELRKLCCHPYMLEGVEPDIDDAKEAFKQLLESSGKLQLLDKMMVKLREQGHRVLIYSQFQHMLDLLEDYCAYKNWQYERIDGKVGGAERQVRIDRFNAKNSSRFCFLLSTRAXGGLEINLATADTAIIYD

SEQ ID NO: 166104 - protein, 121 aa, Glycine max
  Clone ID: PAT_MRT3847_121007C.1.pep
VCGSGLDLELLGLDIDDKTLIPGLSVASSNATALAALINGLEVSPVEADAPRARLILSAGISTRYIYSTYKKTPETTSEAEAWEAAKKACGGLHFIAVQPDLDSEDCVGFFLLLDLPFPPV

SEQ ID NO: 166105 - protein, 77 aa, Glycine max
  Clone ID: PAT_MRT3847_121008C.1.pep
KFSCYLVHPNPQREKPNCLSFCLKAEKPGENPKGGFSWMIEYVECLVFSESYTSLYSLVILSVLQIKMNGHGTRIYQ

SEQ ID NO: 166106 - protein, 201 aa, Glycine max
  Clone ID: PAT_MRT3847_121009C.1.pep
MAFQDFDMITERRRNEQRLKMKKKILISVVSAVLLACVVGAAAFVVVQRTGTNAKHATPMPQNTATPHVDQNSRMVKMICGSAEYKEKCESTLEEALKKDPKLAQPKDLIMVSMILAEKEVTNAFDGTAKMMGNASEEEKGAYEDCKGLFKDAKEELELSITEVGDNDADKLSTKGAELNNWLSAVMSYQQTCIDGFPEGR

SEQ ID NO: 166107 - protein, 68 aa, Glycine max
  Clone ID: PAT_MRT3847_12100C.1.pep
RVRVKQKLHFRGLTKKLMVYTLFRKNGDESIFCMQKILTHIVNVLSALGMFYRNRMLIILVRRCFSKV

SEQ ID NO: 166108 - protein, 58 aa, Glycine max
  Clone ID: PAT_MRT3847_121010C.1.pep
KLVNEILNLFFNFNFRILPLTNYQSEWTSNRPDNYLFSILQFLLFVFKLEFVHHSISR

SEQ ID NO: 166109 - protein, 325 aa, Glycine max
  Clone ID: PAT_MRT3847_121011C.1.pep
AEGVSSMVLIKMREIAEAYLETPVENAVVTVPAYFNDSQRKATIDAGAIAGLNVMRIINEPTAAAIAYGLDKRTDCVEERNIFIFDLGGGTFDVSLLTIKDKVFQVKATAGNTHLGGEDFDNRMVNYFVQEFKRKNKVDISGNPRALRRLRSACERAKRILSYAVTTNIEVDALFQGVDFCSSITRAKFEEINMELFEECMETVDRCLSDANMDKSSVHDVVLVGGSSRIPKVQELLQGFFDGKVLCKSINPDEAVAYGAAVQAALLSKGIVNVPNLVLLDITPLSLGVSVQGDLMSVVIPRNTTIPVRRTKTYVTTEDNQSAVM

SEQ ID NO: 166110 - protein, 130 aa, Glycine max
  Clone ID: PAT_MRT3847_121012C.1.pep
VPYLSLFTPHLQNSGQMAIVALSSSLRGGRNLLCSIPPKPSPATTVLRQPTSTNSNYKIPPCPNKPQPPPPQNPNLKHHRRYKNHRPVTHDGCLIGSDGTDRACFIGEYCVSLPAPRRAVPFPGHLLQDA

SEQ ID NO: 166111 - protein, 153 aa, Glycine max
  unsure (1)..(153): unsure at all Xaa locations
  Clone ID: PAT_MRT3847_121013C.1.pep
AFEPLLLFGKNPFPGVAMGLRVKGGGPPSPFFPLSQSFPKALFGFSQKFVFSPSXKGLQALLVRYVCPFLFRDPRRLEPQKFCGRGPPPRFPNFSPLRKKGGVLGFFVFGPGPVFSCGKNKTLCWGVWEFFNFGRFFFKGWVMDSCFDSPFSV

SEQ ID NO: 166112 - protein, 115 aa, Glycine max
  Clone ID: PAT_MRT3847_121014C.1.pep
IDLPLPPPGGKPRDPVPVPPLASVLIPSFVKPQKQPPLSLPKPPEVFLVQPVNLALGGRGTRVFSNGEAGSAFENLQVWGTDPFQIKNFPGGGVLPLIFMARSRARVKKILALVF

SEQ ID NO: 166113 - protein, 65 aa, Glycine max
  unsure (1)..(65): unsure at all Xaa locations
  Clone ID: PAT_MRT3847_121015C.1.pep
IKVXQYRDLRQVLMKRIXFLSALHFRINTRYKSSNPPFTSVELDHSDSGREGCTVTTLTITAGRL

SEQ ID NO: 166114 - protein, 57 aa, Glycine max
  Clone ID: PAT_MRT3847_121016C.1.pep
NLGGRFPTFSQHKGSVWVNGGIRSRVPVFFLWVYKWKHGSYWGLLKKRRVIYDFNSP

SEQ ID NO: 166115 - protein, 110 aa, Glycine max
  Clone ID: PAT_MRT3847_121017C.1.pep
HPVGPEEHMVTSGNARVLFFRVRSTVPHTCTQVLKRRLSSHEPAVTIARLPNSSVTTKMQKAHCAIPNTNLSMSVPASEPFIQCNEKSQSTSDTDTTISDTLNECSYASF

SEQ ID NO: 166116 - protein, 48 aa, Glycine max
  Clone ID: PAT_MRT3847_121018C.1.pep
SRTFYWTETSQIFFLKGRTSGTRGRRIDWHIKIDPIFFRKIFKIKKKC

SEQ ID NO: 166117 - protein, 72 aa, Glycine max
  Clone ID: PAT_MRT3847_121019C.1.pep
KHAQKSHMVLEKANSMARLGTLSSGGASKTATKAMFGKGCTSSHIRSPSGSVFYEGLIIYPLSQCMGKGHRC

SEQ ID NO: 166118 - protein, 109 aa, Glycine max
  unsure (1)..(109): unsure at all Xaa locations
  Clone ID: PAT_MRT3847_12101C.1.pep
CILLHHTHGHIGNSLAFIATFFXLITQTTLSVLRLLFLIDFLKHSTFXXXLFXAPITISLQHLNGFLCIKTSHFTTDTYFVHLIRLIFSKTHHXLNLQTILIGTSFFGF

SEQ ID NO: 166119 - protein, 50 aa, Glycine max
  Clone ID: PAT_MRT3847_121020C.1.pep
EMNIKFIIVTHALVVPRKATKRFKRHVQESNVLSTDTSFVLGNMIYSCYS

SEQ ID NO: 166120 - protein, 126 aa, Glycine max
  Clone ID: PAT_MRT3847_121021C.1.pep
KTIADGISIMKAIIKGHSYNHSYNSFTSCAASCPASRFIHHSIHTPPITHLFSYSIVASILAIIIPPLPLAIPIHTLCRNQKQRHASAIQCPMHHRLDLRLDSLPPTLLSIRLIPSHRASSICKSI

SEQ ID NO: 166121 - protein, 55 aa, Glycine max
  Clone ID: PAT_MRT3847_121022C.1.pep
HQLQSSRQVFARTIKFSKYVNFFPVYLGPRCGFLCITHDAKKKKKKNNPKAAALE

SEQ ID NO: 166122 - protein, 27 aa, Glycine max
  Clone ID: PAT_MRT3847_121023C.1.pep
ISKIILSHINQYNTLATTVNSITLLLL

SEQ ID NO: 166123 - protein, 71 aa, Glycine max
  Clone ID: PAT_MRT3847_121024C.1.pep
LKIQRIKRRIWKRFGMTRTHHRPRIILTTNSTMKGTYRRNKFNEEPLSMSHAGFGCEKILLSYRRRTVLSQ

SEQ ID NO: 166124 - protein, 323 aa, Glycine max
  unsure (1)..(323): unsure at all Xaa locations
  Clone ID: PAT_MRT3847_121025C.1.pep
MAYRTSSITSLFLTLVLLGTILCDAQLSSTFYDSACPNALSTIRSVIRCAVSAERRMAASLIRLHFHDCFVQGCDASILLDDSSTIESEKSALHNANSIRGYNIIDQAKSEVEXVCPGVVSCADIVAVAAPDASFAVGGPSWTVKLGRRDSTTASKSSATSDLPRFTDDLDTLISKFNNKGLTARDMVTLSGAHTIGQAQCFTFRGRIYNNASDIDAGFASTRQRGCPSVSNDDNDKKLAALDLVTPNSFDNNYFKNLIQKKGLLQSDQVLFSGGSTDSIVSEYSKNPTTFKSDFAAAMIKMGDIEPLTGSAGMIRKICSSVN

SEQ ID NO: 166125 - protein, 48 aa, Glycine max
  Clone ID: PAT_MRT3847_121026C.1.pep
GSSTITLSRSAPGLLYLTPHLMHVMTIEHLTCSLALLLMAGVLAVMPA

SEQ ID NO: 166126 - protein, 108 aa, Glycine max
  Clone ID: PAT_MRT3847_121027C.1.pep
NTYNSLGGGIFYVYIQEVQVIKDFNFANEAGGVGKNITRSFPAHVRNNSLIIRFYWAGKGTIFIPYGPLISAISVTHVSTTTSGSMSTGVIVGIVVAAIVLVILIVLG

SEQ ID NO: 166127 - protein, 103 aa, Glycine max
  unsure (1)..(103): unsure at all Xaa locations
  Clone ID: PAT_MRT3847_121028C.1.pep
AVVGYALYLISLGLIFNQDKKVRKVVGSASKFRKRXIGFAMTGLGDNLYVIGGFIGPDRWNWDIKPLSEVDVLPLGSERPTWRQAARMTRCHGTILGCTLLRI

SEQ ID NO: 166128 - protein, 48 aa, Glycine max
  Clone ID: PAT_MRT3847_121029C.1.pep
SHYKCQRIALLSQCFSQYLIWYRASSTVVPLAQQKFEEISIMLSPSRA

SEQ ID NO: 166129 - protein, 150 aa, Glycine max
  unsure (1)..(150): unsure at all Xaa locations
  Clone ID: PAT_MRT3847_12102C.1.pep
IHIFRVQNTTLKRCCTEQGIATANATMPXPTINVHQGGTVLAHVSNEGPYDITLHWHGVLQXLLNXADGPEYITDCTMKPXSKFTSKLNVTQHEGTGWWHAHALYIRATCHGAIMIKPSXRLFPFAKPYKRIPLMLRDRYNARAEDTTTE

SEQ ID NO: 166130 - protein, 372 aa, Glycine max
  Clone ID: PAT_MRT3847_121030C.1.pep
MSSFLSLSLSAPSLHDSSFLHGTKLFPFSRRVAPRRFNSSSAKCSLDHIPKQFRKENLKDGLMENYKNAPQSLYGLSPSQMDMFMTEDNPIRQQSERVTEESISSAKNYMDNGGMWSLSGMGKSDASKYSMSVSMYRGGRGTGRPKTAPPDLPSLLLDARICYLGMPIVPAVTELIVAQFMWLDYDNPSKPIYLYINSSGTLNEKNETVGSETEAYSIADMMSYVKADVYTVNCGMAFGQAAMLLSLGTKGYRAVQPNSSTKLYLPKVNRSSGAVIDMWIKAKELEANTEYYIELLAKGTGKSKEEIAKDVQRPKYLQAQDAIDYGIADKIIDSSSRDVAFEKRNYDEMLAQSRAMRRQGGGNPQAAPSGFR

SEQ ID NO: 166131 - protein, 111 aa, Glycine max
  Clone ID: PAT_MRT3847_121031C.1.pep
MFSQLFSHYILSSMLAKHIQAKELEANTEYYIELLAKGTGKSKEEIAKDVQRPKYLQAQDAIDYGIADKIIDSSSRDVAFEKRNYDEMLAQSRAKRRQGGGNPQAAPSGFR

SEQ ID NO: 166132 - protein, 55 aa, Glycine max
  Clone ID: PAT_MRT3847_121032C.1.pep
GKKIHLCWEHEPKAFTNFVRSAADLHGMPNLSSKIQTRHISAGYKEHWISLHKSQ

SEQ ID NO: 166133 - protein, 478 aa, Glycine max
  Clone ID: PAT_MRT3847_121033C.1.pep
MAAISNSLSLKHSFSLSRAPPSSSSIKFKFRRCYAAFANENREYVIVGGGNAAGYAARTFVEHGMADGRLCIVTKEPYAPYERPALTKAYLFPPDKKPARLPGFHTCVGSGGERQTPGWYKENGIEMLYEDPVKDIDIEKHTLTTSSGKLLKYGSLVIATGCTASRFPEKIGGNLPGVHYIRDVGDADALILSLEKAKKVVVVGGGYIGMEVAAAAVGWKLDTTIIFPEDHLLQRLFTPSLARRYEELYQKNGVKILKGASIKNLEAGSNGHVAAVKLGDGSLVEADTVIIGIGAKPAVTPFERVGLNTEVGGIQVDGQFRTSTPGIFAVGDVAAFPLKIYNRISRVEHVDHARRSAQHCVKALLSAQTHTYDYLPYFYSRIFEYEGSPRKVWWQFFGDNVGETVEIGNFDPKISTFWIESGKLKGVLLESGSPEEFQLLPKLARSQPLIDKAKLQNATSVEEALEIARESLQGEAAV

SEQ ID NO: 166134 - protein, 74 aa, Glycine max
  Clone ID: PAT_MRT3847_121034C.1.pep
HAAYISNWANQPIFCLLKAGLQQATARQSHQPAAVDKLKQIPSPALNHLFSYDTLITKLYRVTTHKSTGGPETP

SEQ ID NO: 166135 - protein, 470 aa, Glycine max
  unsure (1)..(470): unsure at all Xaa locations
  Clone ID: PAT_MRT3847_121035C.1.pep
MATMLTKEHGLNLKETELCLGLPGGGAAATTTTIAFTLRMATILSPIQTLKFRSPNPKPLFSPKPPPISTPLTFRADKLTLFVSSATSSATVSTNGPPSPPSPARSKVRRHTISVFVGDESGMINRIAGVFARRGYNIESLAVGLNEDRALFTIVVSGTDKVLRQVMEQLQKLVNVLKVEDLSREPQVERELMLIKVHADPKHHAELKWLVDIFRAKIVDISQHSVTIEVTGDPGKMAAVQRNFSKFGIKEIARTGKIALRREKMGASAPFWRYSAASYPDLEGRTPVNALVGAKNMKPVAKLDTPVGGDVYPIEPSDGFTVNQVLDAHWGVLNDEDTSGIRSHTLSMLVNDAPGVLNIVTGVFARRGYNIQSLAVGHAEVEGLSRLTTVVPXTDEXISKLVQQLYKLVELMRGRDITHLPFAERELMLIKIAVNAAARRDVLDIASIXRAKAVDVXSDHTITLELTGRF

SEQ ID NO: 166136 - protein, 136 aa, Glycine max
  unsure (1)..(136): unsure at all Xaa locations
  Clone ID: PAT_MRT3847_121036C.1.pep
MPSPSVRRLTMAAISNSLSLKHSFSLSRAPPSSSSIKFKFRRCYAAFANENREYVIVGGGNAAGYAARTFVEHGMADGRLCIVTKEPYAPYERPALTKXYLFPPDKKPARLPGFHTCVGSRGERQTPGWYKENGIE

SEQ ID NO: 166137 - protein, 66 aa, Glycine max
  Clone ID: PAT_MRT3847_121037C.1.pep
STFYLLWPREPWSYRLLTSLAEQGSKGRRQDMRKGCWKGLASSLRRQQMYPTYIKGRASPIPVRGP

SEQ ID NO: 166138 - protein, 45 aa, Glycine max
  Clone ID: PAT_MRT3847_121038C.1.pep
LIFLVGDFFFSHVEYNFNWEAYFVASALNVGLLIEYILICQGKIG

SEQ ID NO: 166139 - protein, 80 aa, Glycine max
  Clone ID: PAT_MRT3847_121039C.1.pep
SDGLLNAMARVNHTPSSHKYAQKPSPCAYSSTQSPSHSHIARTRDKQIAPQVEPHDDPNAHEQNKMRTRSLTEILHENRN

SEQ ID NO: 166140 - protein, 91 aa, Glycine max
  Clone ID: PAT_MRT3847_12103C.1.pep
RTRAESARARLSYDSDLRDHVIVDRGGNQSDLQEKTDNIVNAFIGQLVPVSSEIREISNFETGSQSSLHDSDVLAGQSSALKDKMPVHTDA

SEQ ID NO: 166141 - protein, 66 aa, Glycine max
  unsure (1)..(66): unsure at all Xaa locations
  Clone ID: PAT_MRT3847_121040C.1.pep
MKYQSKTLCNLQNLFYNELTKMKKKLMQKTYTPPQGAQQNLPSRRKNHCKGFKWSSSSTGVXSGVG

SEQ ID NO: 166142 - protein, 117 aa, Glycine max
  Clone ID: PAT_MRT3847_121041C.1.pep
HEPAETDHTSPIKLDATAHAHIEKHRKLQEDLTDEMVVLAKQLKESSLTMSQSLQNTEKILDSTEKAIEHSLASTGRANVRATAIYSESSKTSCLTWLVMFVMTCVFVMVILLVRVT

SEQ ID NO: 166143 - protein, 53 aa, Glycine max
  Clone ID: PAT_MRT3847_121042C.1.pep
KGAHSQEPFFFFLMICRGGPGPWAGFFSASLLFSRLFNNEESPDRLVKQNNKG

SEQ ID NO: 166144 - protein, 274 aa, Glycine max
  unsure (1)..(274): unsure at all Xaa locations
  Clone ID: PAT_MRT3847_121043C.1.pep
MGISKTEXNLRRLLGAAPQQQNQAKLVHYVXREQLEQLAEERTLEGLPRISKAXLNDYSEKIEAIASKLVNHVIDTRVPGKDFXGILLKKNILKLRKKSRYLRRRPVPASSMEDKAHELAETDHTSPIKLDATAHAHIEKHRKLLKDMTDEKDVXLAEQLIXSSLTMRESLQNTEKSLPQYSKDPSISIVRHLTXLASTSPSNVRAAAILDSTEKAIEHSLASTGRANVRATAIYSESSKTSCLTWLVMFVLTCVFVMSILLIRITYCSSRFTG

SEQ ID NO: 166145 - protein, 273 aa, Glycine max
  unsure (1)..(273): unsure at all Xaa locations
  Clone ID: PAT_MRT3847_121044C.1.pep
MGISKTEVNLKRLLAAALQQQNQAKLVHYVATLREQLEQLAEERAPEGLPRISKAVLNDYSEKIEAIASKLVNHVSDPPVPKKDFERNSVEENSSEIEETKQILLSSGLRRRPVPASSTEDRAHKPAETDHISPVKLDAAAHAHIXKHRKLQEDLTDEMVVLAKQLKESSLTMSQSLQNTEKDSSRISYFHSILLVLLLNGYMNXCGWLWLALQILVSTEKAIEHSLASTGRANVRATAXYSDSSKTSCLTWLVMFVMTYVFVMVILLIRVTV

SEQ ID NO: 166146 - protein, 79 aa, Glycine max
  Clone ID: PAT_MRT3847_121045C.1.pep
ENLQESVLNQLFCWEKHGRKEEEERSLWLRLKYCDFHWESNRVSSQTAFLLGETWHLLRVSPQSTCWLSSSPSCSLAHI

SEQ ID NO: 166147 - protein, 76 aa, Glycine max
  Clone ID: PAT_MRT3847_121046C.1.pep
MGISKTEVNLKRLLAAAPQQQNQAKLVHYVATLREQLEQLAEERTPEGLPRISKAVLNDYSEKIEAIASKLVNRGE

SEQ ID NO: 166148 - protein, 52 aa, Glycine max
  Clone ID: PAT_MRT3847_121047C.1.pep
FNLELFFYTILCFCLKLKEINYIFWLLTHRRKEPPKFSNFDCYRFSIYMVNT

SEQ ID NO: 166149 - protein, 193 aa, Glycine max
  unsure (1)..(193): unsure at all Xaa locations
  Clone ID: PAT_MRT3847_121048C.1.pep
LTHEYLRRTSKGILLKKTILKLRKESRYLRRRPVPASSTEDKAHELAETDHTSPIKLDATAHAHIEKHRKLQEDLTDEMVVLAKQLKESSLTMSQSLQNTEKDSSRISYFHSILLVLLLNGYMNXCGWLWLALQILVSTEKAIEHSLASTGRANVRATAXYSDSSKTSCLTWLVMFVMTYVFVMVILLIRVTV

SEQ ID NO: 166150 - protein, 67 aa, Glycine max
  Clone ID: PAT_MRT3847_121049C.1.pep
ATGPHIHIQDKPRHPPLHYTGITANIDIYNTFIPHRAYPSVRDSDGNTPLNVASAETRNAIHEMFSK

SEQ ID NO: 166151 - protein, 85 aa, Glycine max
  unsure (1)..(85): unsure at all Xaa locations
  Clone ID: PAT_MRT3847_12104C.1.pep
KKRGNILKMDRHKYVKVAYHGFKELSKEDKVGTYXNTLVHDSFXGPDYALIDTLFSLAEAYLFAQLVDFKDGNPGKIQEHVDYAR

SEQ ID NO: 166152 - protein, 169 aa, Glycine max
  Clone ID: PAT_MRT3847_121050C.1.pep
MPDLSEQKSGKLLSSTAKKQPPSNSKPVGDSIAAKPKIKQQDTHGFQAKQAKPNVVTRWIPSNKGSYTNSMHVYYPPSRNNSAPAALTNFSSSKEKMEDAKTRSLSAPVVSAVVSLDKTNDLKSRKVATSKSSACVAAEMDEKCAPLLFLAIKETFFQSDTQAQDQSSE

SEQ ID NO: 166153 - protein, 76 aa, Glycine max
  Clone ID: PAT_MRT3847_121051C.1.pep
FRTLHHLVLVPNNDFLYIVDPRMLHNTIEDHQHHLQLDIPFLHVASSHIHKGSMHSSYQRARKRSIPGNPMIRDTD

SEQ ID NO: 166154 - protein, 51 aa, Glycine max
  unsure (1)..(51): unsure at all Xaa locations
  Clone ID: PAT_MRT3847_121052C.1.pep
PCQIETFQTKNTKIHNEXXTFQTLPKPFTQLGATLQXLCELIKTXFGLELF

SEQ ID NO: 166155 - protein, 84 aa, Glycine max
  unsure (1)..(84): unsure at all Xaa locations
  Clone ID: PAT_MRT3847_121053C.1.pep
KLHKEIGPYKXTDGVKPKKAIITLAKASNRNWLNLHFKENKLKPNLYLEKDPMAGIMDIMRNMYEDGDQEXKKTIAKAWTDARS

SEQ ID NO: 166156 - protein, 45 aa, Glycine max
  Clone ID: PAT_MRT3847_121054C.1.pep
PMETKIVNPIGTSVTSWLPSPTVQMRPSPAISLSHLPVFAAWTDT

SEQ ID NO: 166157 - protein, 35 aa, Glycine max
  Clone ID: PAT_MRT3847_121055C.1.pep
MWKNNNLCYKLSPTNTIYGFVLCEPELMYDLWTNT

SEQ ID NO: 166158 - protein, 72 aa, Glycine max
  unsure (1)..(72): unsure at all Xaa locations
  Clone ID: PAT_MRT3847_121056C.1.pep
HSWLNGIIQYLKSSPGKRLLFKKXENLSMKVYTDADYVGSIVDRRSTTGYCMFFGGNLITXRSKKQNVVASS

SEQ ID NO: 166159 - protein, 85 aa, Glycine max
  Clone ID: PAT_MRT3847_121057C.1.pep
YQKNFYFFKQCNSLVGISSNNLIIIFKSPNISIIEPPKNFLKSKLQSVFIEDYSQTHVSTIFQLTKPEYETFKFKVQPSHINSIF

SEQ ID NO: 166160 - protein, 114 aa, Glycine max
  unsure (1)..(114): unsure at all Xaa locations
  Clone ID: PAT_MRT3847_121058C.1.pep
EKQRPEEDLKGRSXKKGQDAEPSILNRASSSQTGGSLKSMEGGKKEKGKGQFGPAEKEGQENLSLKTGGGXGKITGGFLFKKKAKTYGWSRPWVWLNEKDRKLGXPKKQDGKHF

SEQ ID NO: 166161 - protein, 40 aa, Glycine max
  Clone ID: PAT_MRT3847_121059C.1.pep
SVIANAQKLGEERGARSRAHALAQIKCILSGSFMPVSYPS

SEQ ID NO: 166162 - protein, 121 aa, Glycine max
  Clone ID: PAT_MRT3847_12105C.1.pep
LTSLNLSVATTTYHICFRKTWNLERTTCSALTPTQKRKMETLAVTVTITILLMFGIHHGMLLLQLMHHTPPRPRRATPAAVTASITTNYTAAKGVTCRRTLTSRACILVKDITLRMLLTVM

SEQ ID NO: 166163 - protein, 289 aa, Glycine max
  Clone ID: PAT_MRT3847_121060C.1.pep
MMELEVDENDLKAAGAELFADGGRRGIRINGWVIETRRHSILNSSTFQEWEQKLDTSHLPEMVFGENTLILKHLSSGTNIHFNAFDALRGWKQEALPPVEVPAAAKWKFRSKPSQQVILDYDYTFTTPYCGSGTIEIDKDLNEGETSKETSDIHWEDCKDQIDVVALASKEPILFYDEVVLYEDELADNGVSLLTIKVRVMPSSWFLLLRFWLRVDGVLIRLRETRMHCVFGGSTNPIILRESCWRESTFQALSAKGHPFDSGAYGDPSFISQKLPIIMHKTQKLVISS

SEQ ID NO: 166164 - protein, 440 aa, Glycine max
  unsure (1)..(440): unsure at all Xaa locations
  Clone ID: PAT_MRT3847_121061C.1.pep
NRSISEMAKEDVFEFLGNVPLLQRLPGSSVRKISELVILKHYEPGEYVVREGERGDGLYFIWEGEAEVVGSVNADDDNHPEFQLKRFDYFGFGLSNEVHHADVVALTKLSCLVLPHEHSALLQPKSIWSAEKSHDTCSLVEHILHLDPIEVDIFQGVTLPDAPRFGKVFGGQMIGQALAAASKSVDCLKVVHSLHAYFILAGDLNNGEDXVPITYQIHRLRDGKSFASRKVDGIQKGNVIFTLMASFQKEESGMVHQEVAIPSVPAPDKLLPMEELRERRLTDPRLPITYRNKVATSQFIPWPIEIRLCEYETATNMTKSPPSLRYWFRAKGKLSDDQALHRCVVAYASDLIFLQVSLNPHREKGFRTRSVSLDHSMWFHRSVKADDWVLFAIFTPSAHSARVFVTGQMFNQKGELLVSLVQEGLARKINPGNSAIKSML

SEQ ID NO: 166165 - protein, 76 aa, Glycine max
  Clone ID: PAT_MRT3847_121062C.1.pep
GFRTRSVSLDHSMWFHRSVKADDWVLFAIFTPSAYSARVFVTGQMFNQKGELLVSLVQEGLARKINPGNSAIKSKL

SEQ ID NO: 166166 - protein, 116 aa, Glycine max
  Clone ID: PAT_MRT3847_121063C.1.pep
LDPHTKHFVRVCGQLSHLVSNHTNHAVDPNVAVRGLKRFPVRDIRGWWRTVQLYTDQTGANISKSGGVGEENIDRFYSHGKSLTRLSIQTVIKSAVTGKTRPLPINPRSGLGVLLT

SEQ ID NO: 166167 - protein, 57 aa, Glycine max
  Clone ID: PAT_MRT3847_121064C.1.pep
VLVTLLCCIFPEVVSIVSQCRVKFVRLGKNMIQLVCAEPTEFSSLLCSIGPKVLVRH

SEQ ID NO: 166168 - protein, 451 aa, Glycine max
  unsure (1)..(451): unsure at all Xaa locations
  Clone ID: PAT_MRT3847_121065C.1.pep
MELHCSVKKLENEKAFEFLGGVPLLQRLPSSSLRKIAQLVDVKHCEPGEYVVREGEPGDGVYFILDGEVLGSARANDENRPEFQLKQYDYFGYGLSNTVHQADVVALSKLTCLVLPHVHSTLLQPKSIWRAENSLQTCSPVENILHLEPLXVDIFQGVTLPDAPRFGKVFGGQMIGQALAAASKSVDCLKVVHSLHAYFILAGDLNNGEDFLKLVPITYQIHRLRDGKSFASRKVDGIQKGNVIFTLMASFQKEESGMVHQEVAIPSVPAPDKLLPMEELRERRLTDPRLPITYRNKVATSQFIPWPIEIRLCEYETATNMTKSPPSLRYWFRAKGKLSDDQALHRCVVAYASDLIFLQVSLNPPREKGFRTRSVSLDHSYVPESYSMWFHRSVKADDWVLFAIFTPSAHSARVFVTGQMFNQKGELLVSLVQEGLARKINPGNSAIKSML

SEQ ID NO: 166169 - protein, 438 aa, Glycine max
  Clone ID: PAT_MRT3847_121066C.1.pep
MELHCSVKKLENEKAFEFLGGVPLLQRLPSSSVRKIAELVVVKHCEPGEYVVREGEPGDGLYFILEGEAEVVGSVSADDENRPEFQLKRYDYFGFGLSNEVHHADVVALTKLSCLVLPHEHSALLQPKSIWSAEKSHDTCSLVEHILHLEPIEVDIFRGITPTNAPTFGKVFGGQIVGQALAAASKSVDCLKVVHSLHVYFLLVGDFNIPIIYQVKRLRDGKSFATRKVDAIQKGNVIFTLLASFHKEEVGFHHQEVSIPSVPAPDTLLSLEELREQRLTDPRLPRTYRNKVATIEFIPWPIEIRFCEPKTSTNQTKSPPSLRYWFRAKGKLSDDQALHRCVVAYASDLIFLQVSLNPNRKKGMKARGVSLDHSMWFHRHLRADDWVLFVIFSPTSSNARGYVTGQMLNQKGELLVSVVQEGLMREVIFANSAIKFNL

SEQ ID NO: 166170 - protein, 129 aa, Glycine max
  Clone ID: PAT_MRT3847_121067C.1.pep
ILQSDQYFGPSLFMNPFFNQEVTKMFPEKDTVFHRLGRYLFHPSNEAWKLISDYYQEHLAKADKRIGLQIRVFSPVSTPQQTVMDLVLSCTLKHKILPQVDLQTSAGKNHSVKAVLVASLHREYGDNLR

SEQ ID NO: 166171 - protein, 43 aa, Glycine max
  unsure (1)..(43): unsure at all Xaa locations
  Clone ID: PAT_MRT3847_121068C.1.pep
MAREKVQIKTIDNATARQVTFSKRRRGLFXTAEELSVLSDANA

SEQ ID NO: 166172 - protein, 321 aa, Glycine max
  Clone ID: PAT_MRT3847_121069C.1.pep
MSATNVPKVLLQLQPPSKSNPLCVPVIGLGTAAVHNDGDTVKAAVIEAIKLGYRHFDTAAQYGSEQALGEAIAEALRVGLIASRDELFITSKLWCCDNHPHLVLPALQNSLRSLKLDYLDLYLIHWPITAKPGMWEMPYSEESLVPFDLKSVWAAMEECHKLGLTKSIGVSNFSCKKLENLLSFATIPPSVNQVEMNIAWQQKNLRAYCKAKGIIVTAYSPLGAKGSKWDINQILDNELTKQIAQAHGKTAAQVCLRWLFEQGVTFIPKSYNKERLKENLEIFDWSLTKDDHEKINQVKQERMFKYGTAAFPLPDLFDGET

SEQ ID NO: 166173 - protein, 80 aa, Glycine max
  Clone ID: PAT_MRT3847_12106C.1.pep
AHNTHILFLSIVHHTEPANCVTPTIIISLLIFASLVPLKKHTHTTSTTEDHVGVRAPQGEEEEDLSARVLVHSGAPHFSC

SEQ ID NO: 166174 - protein, 75 aa, Glycine max
  Clone ID: PAT_MRT3847_121070C.1.pep
QHQGAPILKALAHLTYHEHHIAQKKDDTYLQYSLHPYHLLTIHPIIPHNKNFSSTKQTLIYANITNITKTNTPFF

SEQ ID NO: 166175 - protein, 101 aa, Glycine max
  Clone ID: PAT_MRT3847_121071C.1.pep
PKPPLEKKGKNPPKFSPLIFCPGKKILYPPWRANFHKPKKKLRLRSLNEKFFLPQTHPFKQMLCPTTLISPFCPKQCLTTIPVKATFPANFCSNSPHKPGP

SEQ ID NO: 166176 - protein, 120 aa, Glycine max
  Clone ID: PAT_MRT3847_121072C.1.pep
MKDKQKKSLSFDPFAALSAWVPSLFVNPSDHICSEYVGYFEHRRKMEEIGAGNIEKLATQTSLNCLLMGVLGKESDEPLHLIPSASLTVNHTPSKDFKEAHGIHQWWKPDLRLESKLYRY

SEQ ID NO: 166177 - protein, 96 aa, Glycine max
  Clone ID: PAT_MRT3847_121073C.1.pep
NITGKASLLDPFISAAVVVDNPSAVDDLAFHSHIHKISSFILSHTEQQYYTETSKRRDDPAFSIPEQIPEFRGGAHRRQHGEYEKSSYMPALTKRE

SEQ ID NO: 166178 - protein, 69 aa, Glycine max
  Clone ID: PAT_MRT3847_121074C.1.pep
QRRPPSLSELIAHDAKMKSLVLANTIQFRHLNRCKPIPRTITLSIKKAKLQTKSVSIRSPLVMHKSTVS

SEQ ID NO: 166179 - protein, 55 aa, Glycine max
  Clone ID: PAT_MRT3847_121075C.1.pep
RRIHLDTGPSDRDPRQRCPQLILWMFARQQPQCHSASWASFQLNTDNRGSFALCG

SEQ ID NO: 166180 - protein, 76 aa, Glycine max
  unsure (1)..(76): unsure at all Xaa locations
  Clone ID: PAT_MRT3847_121076C.1.pep
MAIKAIELLKGSGNHEEIFEVLAAVAASLGDVIDDVNTLQVTPLKGAMTNEVXXRVDENQTFEGMSKHGQGPRLLG

SEQ ID NO: 166181 - protein, 82 aa, Glycine max
  Clone ID: PAT_MRT3847_121077C.1.pep
NSLFFFHPLFVNPPPLLLVVGPRCHLFLFHRQQPPLLIGRFFLPEPLKDILLPLGWGDLSRKLGMPLMLSMLCAFEGFHASL

SEQ ID NO: 166182 - protein, 91 aa, Glycine max
  Clone ID: PAT_MRT3847_121078C.1.pep
MAIKAIELLKGSGNHEEIFEVLAAVAASLGDVIDDVNTLQVTPLKGAMTNEVFEVNWPTKSDGHQRRVLVRLYGEGVEVFFNRVDEIQTFE

SEQ ID NO: 166183 - protein, 359 aa, Glycine max
  Clone ID: PAT_MRT3847_121079C.1.pep
MAIKAIELLKGSGNHEEIFEVLAAVAASLGDVIDDVNTLQVTPLKGAMTNEVFEVNWPTKSDGHQRRVLVRLYGEGVEVFFNRVDEIQTFECMSKHGQGPRLLGRFTTGRVEEFIHAKTLSAADLRDPEISALIASKMREFHNLHMPGAKKAQLWQRMRKWLSHAKSLCSPKETKNFGLDNLDAEINMLVELLSQGNQQIGFCHNDLQYGNIMMDEDTRAITLIDYEYASYNPIGYDLANHFCEMVANYHSDEPHVLDYSKYPGLEERQRFVYNYLSSEGKKPSNSEVDQLVNLAEKYTLANHLFWGLWGLISSHVNTIDFDYKEYARQRFQQYWLKKPTLLDSPSIVSQDGIANGVNH

SEQ ID NO: 166184 - protein, 61 aa, Glycine max
  Clone ID: PAT_MRT3847_12107C.1.pep
RAHVMYTTNSIISFHCQNSSATLKVLTTILKTLKHREKECLQMNLHVCLQCLFLRDVFNFL

SEQ ID NO: 166185 - protein, 55 aa, Glycine max
  Clone ID: PAT_MRT3847_121080C.1.pep
HVTNNYIHTNSPFPLEIINGVRHQLTHYLKKGTINRPYAHVPCLPRHARDHQALQ

SEQ ID NO: 166186 - protein, 281 aa, Glycine max
  unsure (1)..(281): unsure at all Xaa locations
  Clone ID: PAT_MRT3847_121081C.1.pep
MAIKAIELLKGSGNHEEIFEVLAAVAASLGDVIDDVNTLQVTPLKGAMTNEVFEVNWPTKSDGHQRRVLVRLYGEGVEVFFNRVDEIQTFECMSKHGQGPRLLGRFTTGRVEEFIHAKTLSAADLRDPEISALIASKMREFHNLHMPGAKKAQLWQRMRKWLSHAKSLCXSSKETKNIGLDNLDAEINMLEELLSQGNQQIGFCHNDLQYGNIMMNEVTRAITLIDDEXASNTLIGYDLANYFCETAAKYHSDEPHVLDYSKXPGLVQRQRCVYNYLSSES

SEQ ID NO: 166187 - protein, 172 aa, Glycine max
  Clone ID: PAT_MRT3847_121082C.1.pep
MRNRMERLVVPCSFSCASHSSVELGAPKGPKEDSKGTIVSRRQEGQDRSIIKAKMKRGKPSGFLVLPKPNVAAGIQRIIKGIKSLSQLFVYKKEDVEEMEPEMEIGYPTDVKHVTHIGIDGSTITNNVKGWDNMKAPELLSLSPISFKQFELAMASQAQYPLINDPNSSKCG

SEQ ID NO: 166188 - protein, 109 aa, Glycine max
  Clone ID: PAT_MRT3847_121083C.1.pep
LSNKEILKMGNCGSNPKTNEGPEAVPEPVIEEVKVEQKESSEANVETKLKDQTPNDSEIKSLGTLLNEKVEEAPKTEEVTAEPKPEEPKTDEVKVQEEKPKAEEAKAET

SEQ ID NO: 166189 - protein, 138 aa, Glycine max
  Clone ID: PAT_MRT3847_121084C.1.pep
FWGAPPFCPVLGVNAFPFYSSVGPLLPFFGVVLPISSLGVDPPPFYPPTLFFFKMNIFFLVKFLSFFRGWIPPFGMGFSRSSLISLSYLFWGSYFTFFFFFLFFCLFFPLFLFFCLSFCVYFFFFFFFFFFFFFFFFI

SEQ ID NO: 166190 - protein, 67 aa, Glycine max
  Clone ID: PAT_MRT3847_121085C.1.pep
KEGVIQGLVSRDVFPPSPIRSKAYANVILTLFWFTFPFPTTPIKSNLICTHSYLQFQLNPSISPNKL

SEQ ID NO: 166191 - protein, 44 aa, Glycine max
  Clone ID: PAT_MRT3847_121086C.1.pep
GVKVFPIFKILLEGTKLLFYNREGHHALFISVLFHIVVFPQPND

SEQ ID NO: 166192 - protein, 152 aa, Glycine max
  unsure (1)..(152): unsure at all Xaa locations
  Clone ID: PAT_MRT3847_121087C.1.pep
STRSPTRTDKLTTINNMCAYGLNPGISGTRLLGTISXSITHQTVWNXMATVRTPLNFDSSKQSFLTIFLLTFFGGGIFXVTKLGDWITLIQNSSISNLFKVPVXKKGLLKVKXELSGNATPKKSDWVLLDQIFLXTNYIYTKHFDAVSWQKL

SEQ ID NO: 166193 - protein, 51 aa, Glycine max
  unsure (1)..(51): unsure at all Xaa locations
  Clone ID: PAT_MRT3847_121088C.1.pep
PKPNGFFTPREPFLNQRDNPSSPIKKPPSGPPFXKIKKVSLIHXDQTPKKS

SEQ ID NO: 166194 - protein, 111 aa, Glycine max
  Clone ID: PAT_MRT3847_121089C.1.pep
MSVQQPPCAAPLQNTTMVAVDKDKNSVHAFRWAVNHLDNPIIIAVHVKHKNFSHHVTNVFPPDEEDVANIFNTLRGMCTRKAVKMKEAVIDDSDVVRGLLEYANRNAIHSI

SEQ ID NO: 166195 - protein, 60 aa, Glycine max
  Clone ID: PAT_MRT3847_12108C.1.pep
KNCFKSVATVLKKIFSSVKSLKFELLMDGPARPHYYYYYYYYYYYYYYYKRKVFPRECFY

SEQ ID NO: 166196 - protein, 61 aa, Glycine max
  unsure (1)..(61): unsure at all Xaa locations
  Clone ID: PAT_MRT3847_121090C.1.pep
VSFLXGXFXXVXXXLXCWCXVVXXGRXSLXGXLXXXXXWVCXFCLAVVXXAXCACLRXRAX

SEQ ID NO: 166197 - protein, 62 aa, Glycine max
  unsure (1)..(62): unsure at all Xaa locations
  Clone ID: PAT_MRT3847_121091C.1.pep
MGPWYLHAGNTDEGLDSSLLDDMXTNETNCFELSEISGHVAEYSADQYDSRFIQQKLETATT

SEQ ID NO: 166198 - protein, 50 aa, Glycine max
  Clone ID: PAT_MRT3847_121092C.1.pep
NFFYLSYCLFNMHNNVHFRFLTKNIYLDLVSELTSQHTGHTDQTCTVREL

SEQ ID NO: 166199 - protein, 478 aa, Glycine max
  unsure (1)..(478): unsure at all Xaa locations
  Clone ID: PAT_MRT3847_121093C.1.pep
RIFLKDDDLIAGAVVDFNNDWNGFMNASDXEKSFEAARHGKKDWNSRKLEAGSNIYXWVAREDDYNCGGPIGEYLRNKGRLRTVSDIVQEASESRNNIVTNLTNEIEITNENLDKMQYKFNEKTMSLSRMLEEKDKLHNAFEEESRNMQRRARNEVRRILDEQEKLSSELEEKKRKLDSWSRDLNKREALTDQEKKKLDEDKKKKDLRNESLQLASKEQKIADENVLRLVEEQKREKEEAYNKILQLEKQLDAKQKLEMEIEELKGKLQVMKHLGDEDDAAVQNKIKEMNDELQEKVDNLENMEAMNQTLIVKERQSNDELQEARKELINGLDDMLNGPRTNIGLKRMGELDQKIFVNNCKKRFPLEEAGTKGVELCSLWQENVKNSAWHPFKVVTVDDKPENIINEEDEKLRSLKQEWGDEIYSAVVTALKEINEYNASGGYTVKELWNFKXKXKATLKEVINYIMEHIKPLKRKRA

SEQ ID NO: 166200 - protein, 46 aa, Glycine max
  Clone ID: PAT_MRT3847_121094C.1.pep
SRSGRPPDLKKCMDGKLQIRLNANRMGVGTLRGLDQVMNVGGSTLE

SEQ ID NO: 166201 - protein, 77 aa, Glycine max
  Clone ID: PAT_MRT3847_121095C.1.pep
KLYMNSHRIEKLELYQIRPSSNQITYGMLHGINTQTSNLINQGSIFDSKELEEAIALHGVKDRNDEGKASLFTCRPA

SEQ ID NO: 166202 - protein, 74 aa, Glycine max
  Clone ID: PAT_MRT3847_121096C.1.pep
FSEESPSSLVSEGDEDLLEPYETEISLKCLLLLLLSKTASLESGETEFSSFSKVETFPSFSFFFQLSPSFTLCF

SEQ ID NO: 166203 - protein, 826 aa, Glycine max
  Clone ID: PAT_MRT3847_121097C.1.pep
LKYNKGAQDGIGIVASILLVVFVTATSDYRQSLQFKDLDKEKKKITVQVTRNSCRQKLSMYDLLPGDIVHLNIGDQVPADGLFVSGFSVLINESSLTGESEPVNVSELNPFLLSGTKVQDGSCKMLVTTVGMRTQWGKLMATLSEGGDDETPLQVKLNGVATIIGKIGLFFAVVTFSVLVQGLFSRKLREGSQWMWSGDDAMQIVEFFAIAVTIVVVAVPEGLPLAVTLSLAFAMKKMMNDKALVRHLAACETMGSATTICSDKTGTLTTNHMTVVKAYICGKIKEVNGSKVYSDFSSDIHDSALAILLESIFNNTGGEVVKNKDEKIEILGSPTETALLEFGLSLGGDFHKERQRSKLVKVEPFNSIKKRMGVVLQLPDGGFRAHCKGASEIILAACDKVVDSSGEVVALNEDSINHLNNMIETFAGEALRTLCLAYLDIHDEFSVGTAIPTRGYTCIGIVGIKDPVRPGVRESVAICRSAGIAVRMVTGDNINTAKAIARECGILTDGIAIEGPEFREKSEEELLDIIPKIQVMARSSPMDKHTLVKHLRTTFQEVVSVTGDGTNDAPALHEADIGLAMGIAGTEVAKESADVIILDDNFSTIVTVAKWGRSVYVNIQKFVQFQLTVNVVALIVNFSSACLTGNAPLTAVQLLWVNMIMDTLGALALATEPPNEELMKRPPVGRKGNFISNVMWRNILGQSIYQFVVIWFLQTRGKVTFHLDGPDSDLILNTLIFNSFVFCQVFNEISSRDMERINVFEGILKNYVFVAVLTSTVVFQIIIVEFLGTFANTSPLSLKQWFGSVLFGVLGMPIAAALKMIPVGSV

SEQ ID NO: 166204 - protein, 54 aa, Glycine max
  unsure (1)..(54): unsure at all Xaa locations
  Clone ID: PAT_MRT3847_121098C.1.pep
GXEEKQLTKRFRASAYKCSFXSAYFLLITLSLKIXXENGEGERVGVKXGGEDIH

SEQ ID NO: 166205 - protein, 255 aa, Glycine max
  unsure (1)..(255): unsure at all Xaa locations
  Clone ID: PAT_MRT3847_121099C.1.pep
RRDKTIPICDSMATLNNLTAEKKGTLNNNTRNGFHTIEDQRNKDNHNNNNNNGDDCSSASSITVSNEESGKSTSQESIMVPNSNGFIHHVPCISTLPWPYPFPSAAPAMCPPGFPMSFYPAAFWNIPWFPSQHSHHSAPTPRSPSSGPNSPTLGKHSRDDDAEKQDHLQEESPSRQRNGSVLVPKTLRIDDPSEAAKSSIWATLGIRNECVASGGMFKGFQSKKDDKIFVVEASPVETANPXAALSRSLNFHENS

SEQ ID NO: 166206 - protein, 159 aa, Glycine max
  Clone ID: PAT_MRT3847_12109C.1.pep
CFVGNYMADFYGLYVTGATTGLKLDPSKRVVYITPQALMGHLELLNHENLIVLDECHLAEPHYGMLRELIRKSKLPSLWVSATLPEALQSICQLVIDIPIANLWDVDSQVVKREGETLQEVLQDYESYCRDVGNQLSPSQKGLIFVPTIAMAERLADSC

SEQ ID NO: 166207 - protein, 42 aa, Glycine max
  Clone ID: PAT_MRT3847_1210C.1.pep
SSKPPKNKDPNLSGDVRQRAVTGRMGMGTRRWIQYISLSSSI

SEQ ID NO: 166208 - protein, 104 aa, Glycine max
  Clone ID: PAT_MRT3847_121100C.1.pep
TLGKHSRDDDATKQYHLQEEQPPSRQRNGSVLVPKTLRIDDPSEAAKSSIWATLGIKNECVTGGGMFKGFQSKKEEKDHVVEASPVLRANPAALSRSLNFHENS

SEQ ID NO: 166209 - protein, 255 aa, Glycine max
  Clone ID: PAT_MRT3847_121101C.1.pep
ISVKSSPADESRHDCLTWLDSKKESSVLYICFGSLSLISDEQLYQIATGLEGSGHCFLWVVHRKNKDGEEGDSSSSSGKWLPAGFEEKIAKENRGMLIKGWAPQPLILNHPAVGGFLTHCGWNAVAEAISSGVPMVTMPGFGDQYYNEKLITEVHGFGVEVGAAEWSISPYEGKKKVVSGERIESAVKRLMDDGEKGKRMRSKAKEMQEKAWKAVQEGGSSYDSLTALIHHFKTLVPNHDTTGNGLHHGNGNIDH

SEQ ID NO: 166210 - protein, 91 aa, Glycine max
  Clone ID: PAT_MRT3847_121102C.1.pep
KNILVDNLTLKIVVAYKLSPALRATLSLPHKGGCIHACLLFLVSSFPLTKWFDTSDIFSWGMGNAKKEGGAKKMKTLFFGQLFALPLGFGD

SEQ ID NO: 166211 - protein, 111 aa, Glycine max
  Clone ID: PAT_MRT3847_121103C.1.pep
GQPTIYSLLRLSDERAEKGNQDIDSHRCVKALPSVAVHTESTSTPLAYLYQGVHFHSGDASEKTSIGLFYFDREFDVCKGLFVRRFSILRSDHAQSLNFESLYNTLYVRIA

SEQ ID NO: 166212 - protein, 101 aa, Glycine max
  unsure (1)..(101): unsure at all Xaa locations
  Clone ID: PAT_MRT3847_121104C.1.pep
XXXXTIXPXXLPLXXPPIXXLIXXHLXSXXPSTQNXSXXXXXPHTPLXFPQXSTXIXXIXXQIXKXXTHLXXYXFLXXXXXXXLXXXIXXLXXXLXXXXQX

SEQ ID NO: 166213 - protein, 87 aa, Glycine max
  Clone ID: PAT_MRT3847_121105C.1.pep
HEAWHKAEDKYVLSALAVAGVVALIGSSDIISSIDSLPLIPGLLDVVCIGYTGWYAYKNFAFKPDRQAFLLKVNETYIEILESSLHS

SEQ ID NO: 166214 - protein, 86 aa, Glycine max
  Clone ID: PAT_MRT3847_121106C.1.pep
LVRIKALCLTSLRFDTHPSWYAVYKEHHNPLASPGLGIVASPFPKLFAIKKKKLVTYFLFCANSVNELNVGKRKTAEYRSLVNKQV

SEQ ID NO: 166215 - protein, 48 aa, Glycine max
  Clone ID: PAT_MRT3847_121107C.1.pep
HSLSDALSSLSVMRNPRRGLVRDVLTQRAAMLAQRVVCLFSSSARPAR

SEQ ID NO: 166216 - protein, 169 aa, Glycine max
  unsure (1)..(169): unsure at all Xaa locations
  Clone ID: PAT_MRT3847_121108C.1.pep
QCYMHHHALATAARTSTQRLIVSTKPNQIVCKAPHKQVTVQEGEDTTTGLVSRTLVLTVLIGAGAVGSKVAPAXAPYVQAANVSGIPNTNTDFLSYDGNGFKLSLPSKCNPTREVDCPAHVLRCDDKXDSTSYDAVMVTATDTNSITDYGSPHELLSQVYYLHSKQAFY

SEQ ID NO: 166217 - protein, 172 aa, Glycine max
  Clone ID: PAT_MRT3847_121109C.1.pep
MPNPKVFFDMTIGGQPAGRIVMELYADVTPSTAENFRALCTGEKGAGRSGKPLHYKGSSFHRVIPNFMCQGGDFTAGNGTGGESIYGAKFADENFVKKHTGPGILSMANAGPGTNGSQFFICTTKTEWLDGKHVVFGQVVEGMDVVKEIEKVGSSSGRTAKPVVVADCGQLS

SEQ ID NO: 166218 - protein, 48 aa, Glycine max
  unsure (1)..(48): unsure at all Xaa locations
  Clone ID: PAT_MRT3847_12110C.1.pep
TKNKQRYRVIMHSXNEKNFYPEKFDKKKGQYIPSIVWSVVILCQFTRS

SEQ ID NO: 166219 - protein, 172 aa, Glycine max
  Clone ID: PAT_MRT3847_121110C.1.pep
MPNPKVFFDMTIGGQSAGRIVMELYADVTPRTAENFRALCTGEKGVGRSGKPLHYKGSSFHRVIPSFMCQGGDFTAGNGTGGESIYGAKFADENFVKKHTGPGILSMANAGPGTNGSQFFICTEKTEWLDGKHVVFGQVIEGLNVVKDIEKVGSSSGRTSKPVVIANCGQLS

SEQ ID NO: 166220 - protein, 65 aa, Glycine max
  Clone ID: PAT_MRT3847_121111C.1.pep
SYYIYIYIYIYSSFSFLRCHIIMNVYVFLNRSSIFLFLFLFSYDIIILIIFIFFSCTFLFSLSIG

SEQ ID NO: 166221 - protein, 117 aa, Glycine max
  unsure (1)..(117): unsure at all Xaa locations
  Clone ID: PAT_MRT3847_121112C.1.pep
MAAENVVEFTDLPVKRPREEEEGTNGVSNDAVSALPNDPQYPGISAVIPGEAHSLKMEKILFQGKSDYQNVMXFQSSTYGKVLVLDGVIQLTERDECAYQEMITHLPLCSIPNPKKV

SEQ ID NO: 166222 - protein, 83 aa, Glycine max
  unsure (1)..(83): unsure at all Xaa locations
  Clone ID: PAT_MRT3847_121113C.1.pep
TLIKYEYKXDDLTNNTPLLLQMNPLHNKIHHLIHNGKPISKSLIPVHYIYEVCNDINPLLPSYPYHIAHTKILAYYLYNNIYD

SEQ ID NO: 166223 - protein, 340 aa, Glycine max
  Clone ID: PAT_MRT3847_121114C.1.pep
MAAENVVEFTDLPVKRPREEEEEEQTNGVSNDAVSTLPNDPQYPGISAVIPGWFSEISPMWPGEAHSLKVEKILFQGKSDYQNVMVFQSSTYGKVLVLDGVIQLTERDECAYQEMITHLPLCSISNPKKVLVIGGGDGGVLREVARHASVEKIDICEIDKMVVDVSKQFFPDIAVGFEDPRVTLTVGDGVAFLKNVPEGTYDAVIVDSSDPIGPAQELFEKPFFASVAKALRPGGVVCTQAESIWLHMHIIEDIVANCRQIFKGSINYAWTTVPTYPSGMIGFMLCSTEGPLVDFKHPVNPINENDSQQSRPLKFYNSEIHTAAFCLPSFAKRKIGSKTN

SEQ ID NO: 166224 - protein, 47 aa, Glycine max
  Clone ID: PAT_MRT3847_121115C.1.pep
RGRPFFFFFSFRRKQSNALRWDTTRLCQLHIESCKLIRTKPPHMPKD

SEQ ID NO: 166225 - protein, 62 aa, Glycine max
  Clone ID: PAT_MRT3847_121116C.1.pep
ITEARQACRSRLVQHVIAACAMGSALMATATMHITVTTHATVRLAIATTLMSKELSNVMCMF

SEQ ID NO: 166226 - protein, 338 aa, Glycine max
  Clone ID: PAT_MRT3847_121117C.1.pep
MAAENVVEFTDLPVKRPREEEEGTNGVSNDAVSALPNDPQYPGISAVIPGWFSEISPMWPGEAHSLKMEKILFQGKSDYQNVMVFQSSTYGKVLVLDGVIQLTERDECAYQEMITHLPLCSIPNPKKVLVIGGGDGGVLREVARHASVEKIDICEIDKMVVDVSKQFFPDIAVGFEDPRVTLTVGDGVAFLKDVPEGTYDAVIVDSSDPIGPAQELFEKPFFASVAKALRPGGVVCTQAESIWLHMHIIEDIVANCRQIFKGSVNYAWTTVPTYPSGMIGFMLCSTEGPLVDFKHPVNPLSENDSQQSRPLKFYNSEIHTAAFCLPSFAKRKIGSKTN

SEQ ID NO: 166227 - protein, 31 aa, Glycine max
  Clone ID: PAT_MRT3847_121118C.1.pep
CSILTTPATRFSFSSHNTFYILISNTCIKMA

SEQ ID NO: 166228 - protein, 59 aa, Glycine max
  Clone ID: PAT_MRT3847_121119C.1.pep
FFSSFSLSFTSRPPFLIICYPYIYTINVIAYSDNGESNYYASFLQSFFPLCLIVYIFQM

SEQ ID NO: 166229 - protein, 163 aa, Glycine max
  Clone ID: PAT_MRT3847_12111C.1.pep
MAAAAAVTVLLPPRIPTATNVTRCSALPSLPPRGTNTKTTLLLSSLNHFSVSRKSSLLQTRASSEESSSVDANEVFTDLKEKWDALENKSTVLFYGGGALVAVWLSSILVSAINSVPLLPKIMELVGLGYTGWFVYRYLLFKSSRKELATDIESLKKKITGTE

SEQ ID NO: 166230 - protein, 75 aa, Glycine max
  unsure (1)..(75): unsure at all Xaa locations
  Clone ID: PAT_MRT3847_121120C.1.pep
KNLEFIKRKKQAQTPYYCMHKGRDVTSCVLGYGRDPHQKCPKXMEDYVGRMFHQTKEFDVCRKDQQAFEKRCFLE

SEQ ID NO: 166231 - protein, 74 aa, Glycine max
  Clone ID: PAT_MRT3847_121121C.1.pep
GPTSMGQAKLFCSLVCTEVSGWASRVDSQSCEGQEGRLLLGMKQESLLKGKSSNRVPLNLSQVSANGVHLISGE

SEQ ID NO: 166232 - protein, 35 aa, Glycine max
  Clone ID: PAT_MRT3847_121122C.1.pep
HGLLIGGPYYGALKAPKLRKRTLCFTDGQYTDECI

SEQ ID NO: 166233 - protein, 50 aa, Glycine max
  unsure (1)..(50): unsure at all Xaa locations
  Clone ID: PAT_MRT3847_121123C.1.pep
VHFKEQIWFKAGAIIFSEDVLDYLGYTNFVHAHSIXSVMGFQVIIIGLLK

SEQ ID NO: 166234 - protein, 68 aa, Glycine max
  Clone ID: PAT_MRT3847_121124C.1.pep
WEGQWSPFLPIRILRKSIKLRREPKTLNKRPVLVGLNPRTIEQSRDRTEQGSQGYSWPKTITSLPSNR

SEQ ID NO: 166235 - protein, 135 aa, Glycine max
  Clone ID: PAT_MRT3847_121125C.1.pep
MYYVKEAAHVDPMFVADNTNPKDYYKVLEVEYDATDENIKLNYRRLALKWHPDKHGGDSAVTAKFQEINEAYNVLSDPTKRLDYDLTGICEIEKYSLQEYLARFKSMILTCNGLGINQTDRWSQQLIENFESLDK

SEQ ID NO: 166236 - protein, 59 aa, Glycine max
  Clone ID: PAT_MRT3847_121126C.1.pep
GNNWLSALLSISSFYIRSIMGDFVVINILLSKSKLHKQLRGRGIFLSISVFSCAGLSIR

SEQ ID NO: 166237 - protein, 121 aa, Glycine max
  Clone ID: PAT_MRT3847_121127C.1.pep
RTPTTRYIKPVLRYLIHLNICCPSRGRYYLHSSIRVVFANRVPDGKEKLRNEIQHPEPRYSPYKPSREPTSLRVSTKFSADKGEQRPSPRPPSYRATDDCPPHPFRPIPSIRADVVGLENL

SEQ ID NO: 166238 - protein, 35 aa, Glycine max
  Clone ID: PAT_MRT3847_121128C.1.pep
MDIAHCYLKGNADAVEFCPHDPYHNVLAVSTYTLQ

SEQ ID NO: 166239 - protein, 49 aa, Glycine max
  Clone ID: PAT_MRT3847_121129C.1.pep
DCYFWTCQLPLYDQEYSCHDHQNRESHGHERSRRRERLVLLRPQCHRPY

SEQ ID NO: 166240 - protein, 163 aa, Glycine max
  Clone ID: PAT_MRT3847_12112C.1.pep
MAAAAAVTVLLPPRIPTTTNVTRCSALPSLPPRVSNTKTTLFSPSLNNFSVSRKSSLLQTRASSEESSSVDANEVFTDLKEKWDALENKSTVLLYGGGAIVAIWLSSILVSAINSVPLLPKIMELVGLGYTGWFVYRYLLFKSSRKELATDIESLKKKITGTE

SEQ ID NO: 166241 - protein, 470 aa, Glycine max
  unsure (1)..(470): unsure at all Xaa locations
  Clone ID: PAT_MRT3847_121130C.1.pep
GRQCGISGHIVYRGYSRIDESHREVDRRSRDFLTLFRYMNTXFYDQAWNLPLPWSSVVKETQILRSASPDLIVKTGGRLRDGLRSSVRSRFSSSPPRALIWFISHQDSYPISPVSHSFTRGENIRSISNLGKTISLIVEIPPNKSVKQLLESQHHTCAGCHKHFDDGKTLIWDFVQTFGWGKPRLCEYTGQLFCSSCHTNQTAVLPARVLHNWDFTYYPVSQLAKSYLDSIYEQPMLCVTAVNPFLLSKVPALLHIMSVRKKIGTMLPYVRCPFRRSINRGLGNRRYLLESNDFFALRDLIDLSRGVFAALPVMVETLSRKILEHITDQCLICCDVGDPCNARQDCSDPSSLIFPFQEDDIERCKACQLVFHKRCFKKLANCPCGAQLRLNETRSLTNRASQRGGGGESRGALNLLGMGLSSGLSPRFLSGLFTKEKPEKTREHKDENIILMGSLPSSFMITTCTVYILS

SEQ ID NO: 166242 - protein, 201 aa, Glycine max
  Clone ID: PAT_MRT3847_121131C.1.pep
RKKIGTMLPYVRCPFRRSINRGLGNRRYLLESNDFFALRDLIDLSRGYLHAHSLPVMVETLSRKILEHITDQCLICCDVGDPCNARQDCSDPSSLIFPFQEDDIERCKACQLVFHKRCFKKLANCPCGLQLRLNETRSLTNRASQRGGGESRGALNLLGRGLSSGLSPRFLSGLFTKEKPEKTRQHKDENIILMGSLPSTI

SEQ ID NO: 166243 - protein, 39 aa, Glycine max
  Clone ID: PAT_MRT3847_121132C.1.pep
LMSLISIEHCHQSIIKKGYNNIATKGVKDAPNTKRVIFN

SEQ ID NO: 166244 - protein, 33 aa, Glycine max
  Clone ID: PAT_MRT3847_121133C.1.pep
IRTTNAYGINPTGFVNHTAIQRRQRRNLNTPRT

SEQ ID NO: 166245 - protein, 490 aa, Glycine max
  Clone ID: PAT_MRT3847_121134C.1.pep
MESRTKSNPQLTRALCYANDGNQQGRSPSVIVIGGGMAGIAAARSLHDASLQVVLLESRERIGGRIHTDYSFGFPVDMGASWLHGVSNENPLASVIGRLGLPLYRTSGDNSILYDHDLESYGLFDMDGKQVPQELVAKVGEIFEAILQETDKIRQESSEDMSVLRGLSIVFDRKPELRLEGIAYKVLQWYLCRLEGWFAADTDAISLKGWDQEVLLPGGHGLMVRGYLPVVNSLAKGLDIRLGHRVTKVVRRYNGVKVTVENGKTFFADAAVIAVPLGVLKAKKILFEPKLPDWKEAAIADLGIGLENKIILHFENVFWPNVEFLGVVADTPYECSYFLNLHKATGRAVLVYMPSGQLAKDVEKMPDEAAVNFAFMQLKKIFPDASSPIQYLVSRWGSDINSLGSYSYDAVGKPHELYERLRVPVDNLFFAGEATSMSYPGSVHGAYSTGTMAAEDCRMRVLERYGEVDLFQPVMGEEGSMSIPLQISRL

SEQ ID NO: 166246 - protein, 50 aa, Glycine max
  unsure (1)..(50): unsure at all Xaa locations
  Clone ID: PAT_MRT3847_121135C.1.pep
VIYSLSPNIIIPLXYKIIPPFFLISKXIXMGYRTSPSCRFXLDSXVGRRG

SEQ ID NO: 166247 - protein, 489 aa, Glycine max
  Clone ID: PAT_MRT3847_121136C.1.pep
MESRTKSNPQLTRALCYGNDGKQQGRSPSVIVIGGGMAGIAAARALHNASFQVVLLESRDRIGGRIHTDYSFGFPVDLGASWLHGVSNENPLASVIGRLGLPLYRTSGDNSVLYDHDLESYALFDMDGKQVPPELVTKVGEIFETILQETDKIRQESSEDMSVLRGLSIVFDRKPELRLEGLAHKVLQWYLCRMEGWFAADSDTISLKGWDQVLLPGGHGLMVRGYLPVINTLAKGLDILLGHRVTKVVRRYNGVKVTVESGKTFFADAAVIAVPLGVLKAKKILFKPKLPDWKEAAIADLGIGLENKIILHFENVFWPNVEFLGVVADTSYGCSYFLNLHKAAGHAVLVYMPSGQLAKDVEKMSDEAAVNFAFMQLKKILPDASSPIQYLVSRWGSDINSLGSYSYDAVGKPHELYERLRVPVDNLFFAGEATSMSYPGSVHGAFSTGMMAAEDCRMRVLQRYGEVDLFQPVMGEEASLSIPLQISRL

SEQ ID NO: 166248 - protein, 142 aa, Glycine max
  unsure (1)..(142): unsure at all Xaa locations
  Clone ID: PAT_MRT3847_121137C.1.pep
ARGTVHDVVLVGGSTTIPKGRQLLQDFSNGKELCKSINPDEAVAYGAAFQAAILSGEGNEKVHDLLLLDVTPLSLGLETAGGEMTVXLIPRNTTYLNKGMNXFSKSISDNQPSSVASRFYEVRRTRTSYTNWLGTIRTFWIP

SEQ ID NO: 166249 - protein, 132 aa, Glycine max
  unsure (1)..(132): unsure at all Xaa locations
  Clone ID: PAT_MRT3847_121138C.1.pep
MNSIKIRLVQGPIXKEFQRFSLTLFVSINNSKCLDFXRIGSSQIVMIXSTLHYFGNPMTQSYGYVKYKIFNPSKKRGGGGGGVDTQFQVSKHNSILDIISYXTYRILXKVVFDKSHMYYLEGDISYLLRSTL

SEQ ID NO: 166250 - protein, 313 aa, Glycine max
  Clone ID: PAT_MRT3847_121139C.1.pep
KLLNQQVSFFFSFFLLNYSSFYKLLLYHSSGVYLQEVLLPGGHGLMVRGYLPVVNSLAKGLDIRLGHRVTKVVRRYNGVKVTVENGKTFFADAAVIAVPLGVLKAKKILFEPKLPDWKEAAIADLGIGLENKIILHFENVFWPNVEFLGVVADTPYECSYFLNLHKATGRAVLVYMPSGQLAKDVEKMPDEAAVNFAFMQLKKIFPDASSPIQYLVSRWGSDINSLGSYSYDAVGKPHELYERLRVPVDNLFFAGEATSMSYPGSVHGAYSTGTMAAEDCRMRVLERYGEVDLFQPVMGEEGSMSIPLQISRL

SEQ ID NO: 166251 - protein, 355 aa, Glycine max
  Clone ID: PAT_MRT3847_12113C.1.pep
RPGKELLWPKLDILRRKLKSRGLFQSVDSLCAEGKFPESLFDSAGEIDSEDIFLRLREDDRRGTNNDIILCDGVCDRGFHQLCLDPPLLTEDIPPGDEGWLCPGCDCKDDCMDLVNDSFGTSLSISDTWERVFPEAASFAGNNMDNNLGLPSDDSDDDDYNPNGSDDVKIEGDESSSDESEYASASEKLEGGSHEDQYLGLPSEDSDDGDYDPDAPDVECKVNEESSSSDFTSDSEDLAAAIEDNTAPGQDGLIMFGEHIFIFIVKLAICHEFSLRLANGSTIHVGASGIHHKWKPILVEMLHRKLPMAGLKMRGRSNVNQCLRRSVEKTLKPQALENGSICQNPYLKHSWISMA

SEQ ID NO: 166252 - protein, 77 aa, Glycine max
  Clone ID: PAT_MRT3847_121140C.1.pep
SQFKLPFFSWVMLEVFTMDEILLPFPPVFFFFFPALKTFGNKVGPIIKVNLLLLVLDVNKPRQDTICGKKKKTQGFL

SEQ ID NO: 166253 - protein, 39 aa, Glycine max
  unsure (1)..(39): unsure at all Xaa locations
  Clone ID: PAT_MRT3847_121141C.1.pep
LXFFHNEXAFGLNLLYELIRYSRFILPSPIXCGTKYCGR

SEQ ID NO: 166254 - protein, 102 aa, Glycine max
  unsure (1)..(102): unsure at all Xaa locations
  Clone ID: PAT_MRT3847_121142C.1.pep
AYYSFFYNIFKVVADLHLGTGGFQGCMPPKLXMITHVCYSHNLIGNIPNIYYYAANNPSDATISKRMSFSNTIIYLTPSSQNAILYKSLNYLXKLISSYHSL

SEQ ID NO: 166255 - protein, 240 aa, Glycine max
  Clone ID: PAT_MRT3847_121143C.1.pep
ATILTSGVDLSLFSILVHAGGQQEVLVQLAAFIPLMYMCICTYYSLFKMGMMMFYSLTPKQTSSVSLLMICSMIARYAAPISYNFLNLINLGGGRKTIFEQKMGKINDAVPFFGKGFNKIYPLIMVVYTSLIASNIFNRVIKYCGNWKIFKFNDDAEDMDGFDPSGVIILQRERSLLQQGHKVGELVFPLARSFSVTMDVESNSKAMALNESATTNIVEEKNEGTQKDMSRKIGSKKYAA

SEQ ID NO: 166256 - protein, 315 aa, Glycine max
  Clone ID: PAT_MRT3847_121144C.1.pep
MEKAEEQQQQNEEVLSVELPASSGRKKTETQLLKGKSEREMENAEEMMQQNDEVLSVELPAPSGWNKLFFPKKLGTPRKSEIVFIAPTGEEISTKKQLEQYLKAHPGNPVISEFDWGTGETPRRSARISEKVKSTPPADSDTPKKRARKSSGSKKDNKETESASEEGKAKSDTEDPKAAEEEKNEGNDNSNSGGKQLENGDKTEQIDEQAKKPDVDMEENDLNDTNNKLENDSDEIKNSHVNGENVIAERPEGEEAQKQEVEPAEKVAEEAANTAETEKSLLTELEKEKNEEKTDTATLEANGGGEKENPNAAQM

SEQ ID NO: 166257 - protein, 565 aa, Glycine max
  unsure (1)..(565): unsure at all Xaa locations
  Clone ID: PAT_MRT3847_121145C.1.pep
ELKRYLEDRLLLKQYAESDTVVDNGKVYKVQMEEAPPLSGSHEKLVRPVVRLQERNIVPTRINPEVCDNXLINRVICVKSGSRKSLLNVFQDGVCHPKMAMVIDDRSKVWEDKDQPRVHVVPAFTPYYAPQAETANAVPVLCVARNVACNVRGXFFKEFDESLLQRIAEIFFEDDIGLLPLPPDVSNYLMSEDVPNGNANAPISEGINGAEVERRLSQPDDKFSVDLVTRPMTNSVEFRHETSQPTAGIISNVTGPGSSRTLIPSQKPGLLGPPVKHDGNSVDRDYDMRKGLLGMRHGPDIRGQISAEPPLILRPPNQASPSLMQPFGGGLVEDDIASRSQTNSWPSASVKESNVIKSDKHQAQQKPFSNSVIGSSPNVLLPQASQLKAEEATSVSDLQRQIVPSKSQLSSEYGISQNHASSNSKDFQHEAGKMNFLSPLSIQVLQEIGRRCNSKVEFKSILSTSKDLQIFXMEVLFTGNKMGVGMGRTRNDAQQQAAENALRSLAEKYVAHVEPQCRAVDKDFDKLSLGCDNGFLWDVINPESSEPQPEDGVSRENVSEHQCEG

SEQ ID NO: 166258 - protein, 106 aa, Glycine max
  unsure (1)..(106): unsure at all Xaa locations
  Clone ID: PAT_MRT3847_121146C.1.pep
TSTXXYXPTXRLHXXQXXXXLXXXSXAXHRIXXXXXXXXXXXXXXXXXXXXXXXVXXXXHXIPEXXKRXTXPXAXLXXXXXRXXDXXXLXXXARXRAEXRXTYAIE

SEQ ID NO: 166259 - protein, 46 aa, Glycine max
  unsure (1)..(46): unsure at all Xaa locations
  Clone ID: PAT_MRT3847_121147C.1.pep
TIGFYKGFGIXTSIYAPPHAAWWASYSLVHRLIWGAVGSYQPNSDC

SEQ ID NO: 166260 - protein, 47 aa, Glycine max
  Clone ID: PAT_MRT3847_121148C.1.pep
RYGGIIICLTNWSLLALQILKDIECPYDLAMTPLKIPGDKKIFSTFY

SEQ ID NO: 166261 - protein, 64 aa, Glycine max
  Clone ID: PAT_MRT3847_121149C.1.pep
TRAHKRFSQSKGVFLLPEHILLTRFSYTHEDMERTCHQKFVRLKKMMSCLHGSITSMWYLPSNF

SEQ ID NO: 166262 - protein, 123 aa, Glycine max
  unsure (1)..(123): unsure at all Xaa locations
  Clone ID: PAT_MRT3847_12114C.1.pep
TVTKQVSXGSLWYGPERVNYLGPFSGEPPFYLTGEFPGDYGWDTAGLSADPETFAKNRELEVNHSRWAMLXSLXCVFPELLSRSGVKFREVLWFMAGSQIFSDGGLYYLVSPCLIHAQIIFTM

SEQ ID NO: 166263 - protein, 224 aa, Glycine max
  Clone ID: PAT_MRT3847_121150C.1.pep
MCGAIDTTPVHLRNNPNPNTNPNFYRCRYGYPSLLLQVVSDHKKIFWDVCVKAPGGTDDSTHFRDSLLYHRLTSGDVVWDKVISVRGHHVRPYVVGDWCFPLLPFLLTPFSPSGMGTPAQNLFDGMLMKGRSVVVEAIALLKGRWKILQDLNTGVRHAPQTIVACCVLHNLCQIAREPEPELWKEPDESGPPPRVMDSEKSFYYFGENLRQALADDLHQKLSSR

SEQ ID NO: 166264 - protein, 174 aa, Glycine max
  Clone ID: PAT_MRT3847_121151C.1.pep
MVHYHRSHQPRKANNTDSIIKDEESQNNITLDCSSSAYYKRTRPKLLSFLFLITFLSCCYVFAPLFLGPFFPLSLLYSPATENDLKQDGVGANDSPCSSVSTGTICCDRSGYRSDVCVMKGDIRTHSASSSVFLYNSRSNSNVSRNFEEELQHEKIKPYTRKWETSVMDTIDEL

SEQ ID NO: 166265 - protein, 56 aa, Glycine max
  Clone ID: PAT_MRT3847_121152C.1.pep
MVLLQVAPNVIESQAPTLSLKFAQSHVSSSFGIRVSAFVVHIEIIFMRRLFVLVFS

SEQ ID NO: 166266 - protein, 163 aa, Glycine max
  unsure (1)..(163): unsure at all Xaa locations
  Clone ID: PAT_MRT3847_121153C.1.pep
PHPPTPHTHPPPTPTPTPPPPHPTPPXSPPTTPPPPPPLTLSTPPHTNPPPTHPAIPPPPHSALPTPPPPPVILPPTRTPPRPFPPAPQAGTVPHFSPSLKLLQPPGISTVPGPGFGQKKGVFLLRPTILPAEEPMPHFMDSFQKFNDEIMDQFQADRGYSRL

SEQ ID NO: 166267 - protein, 58 aa, Glycine max
  Clone ID: PAT_MRT3847_121154C.1.pep
SKCVGISLVKNQDNMSQCIGQCHIVCFAFVRVLAMLQLIVQTGYMLRAADTEGAMIKV

SEQ ID NO: 166268 - protein, 41 aa, Glycine max
  Clone ID: PAT_MRT3847_121155C.1.pep
VETFVKPRHKEKWLTKFEIRNLHTVEIYILFGIYTIPCYLL

SEQ ID NO: 166269 - protein, 89 aa, Glycine max
  unsure (1)..(89): unsure at all Xaa locations
  Clone ID: PAT_MRT3847_121156C.1.pep
LFFQVQPXFCSSSXXXARSRSXINXXXEELCPCWVGAEXXVLAESXHGXXAEASXXXXXKSXHLXYHVXXKRXIXSXWXXVSXWAXLRR

SEQ ID NO: 166270 - protein, 84 aa, Glycine max
  Clone ID: PAT_MRT3847_121157C.1.pep
RGERPTISRYLGPSTPHLGIYINSRAIITTSLSFLFSFQFKRSTELCLPYNIILSKRVLLLHHINCNVDGDTSEFTSGGMACGR

SEQ ID NO: 166271 - protein, 141 aa, Glycine max
  Clone ID: PAT_MRT3847_121158C.1.pep
PGGGKKNSKILGPQPKKPPREKGTPKVLGPVKKPPPWGKPKVFSPEPPTHPPGEKTRGGNPPGKAPGLFPPPPKKQFFSKDPPGRPVFFGPGEPKNQKKARGPKNPRKKWPLGGGSSGPGGKFPNRGGPLPRPLGSSFLPT

SEQ ID NO: 166272 - protein, 76 aa, Glycine max
  unsure (1)..(76): unsure at all Xaa locations
  Clone ID: PAT_MRT3847_121159C.1.pep
MRSYESKNLXYXTYKYYYKYWVELSGSYLNKNFFSFFLSFYRKKKDSIETKKITKLIRRERGERGIRTLDSSLFRT

SEQ ID NO: 166273 - protein, 105 aa, Glycine max
  unsure (1)..(105): unsure at all Xaa locations
  Clone ID: PAT_MRT3847_12115C.1.pep
IKKCYPQKNFWTEKNSPPPKIFFKKKKIFFFIFLKTLITFFFKAFSGPFXHKFLRKGLPQFFLFFWSPCRTKNHTQGKNLSSYKWLHVEKIIHGRLKRSWTIIIF

SEQ ID NO: 166274 - protein, 70 aa, Glycine max
  Clone ID: PAT_MRT3847_121160C.1.pep
IPKKIAEKTIANILSVLSKAARTKVRESRNRRADGLTLKYQVIFLFIVNVSFQLRRLQRIHCSQRSMLFL

SEQ ID NO: 166275 - protein, 66 aa, Glycine max
  unsure (1)..(66): unsure at all Xaa locations
  Clone ID: PAT_MRT3847_121161C.1.pep
MPIRNITGXRTEEATHPDQMNAAGAENISTLIFPFDGLSYGGAYNKLTDNGAATPAGLISASIDHA

SEQ ID NO: 166276 - protein, 49 aa, Glycine max
  Clone ID: PAT_MRT3847_121162C.1.pep
DIHLFSCIWIPEGQGTHLFHRGCNQQSSPKWTKFSTLEIVSPRRKTNCR

SEQ ID NO: 166277 - protein, 42 aa, Glycine max
  Clone ID: PAT_MRT3847_121163C.1.pep
GSKENPVILGQCRPLFKSVRFNVLKVIPAGSSIGPKKAFTGM

SEQ ID NO: 166278 - protein, 49 aa, Glycine max
  Clone ID: PAT_MRT3847_121164C.1.pep
RITSIKFTVYTTTTYSLKNLSRSLFKLTSNLFHTCKTIDNSKLTLLTHF

SEQ ID NO: 166279 - protein, 203 aa, Glycine max
  Clone ID: PAT_MRT3847_121165C.1.pep
EFCTRLDPVSGEKIRKVMPIAPEDSINIAGLSQVPDGVASWHVAVSKFTDSPLLSAALPVWDSSNKSIVAVVGVTTALYSVGQLMKELVEKHSGHMYLTSQEGYLLATSTNAPLLSNTTKPPKLKMAVDCENEVIREGAQWLQKTYGNNFPQSHELHVENVRLGRQQYYIDSFFLNLKRLPLVGVIIIPRKHIMGQADERASK

SEQ ID NO: 166280 - protein, 64 aa, Glycine max
  unsure (1)..(64): unsure at all Xaa locations
  Clone ID: PAT_MRT3847_121166C.1.pep
SLKSNVYHNINNDIINMKENMNLGISRSCSSTPSQEVKQIGHLVIIPQNPFKSRXPVGVPRRVV

SEQ ID NO: 166281 - protein, 71 aa, Glycine max
  Clone ID: PAT_MRT3847_121167C.1.pep
KKKNWTFSIITSANIHSNSKYCASLNLSNIPYIPFRLVLAASSAIPLRYCLNSGRPNILNYNICEHSFPRA

SEQ ID NO: 166282 - protein, 488 aa, Glycine max
  Clone ID: PAT_MRT3847_121168C.1.pep
MASTTTSSLCTWLVAACMSVTCHADRTKTPHAMFRSSKKSRYSQFNVCRSTHSGKTMAVALQPTQEITTIKKPPTKQRRVVVTGLGVVTPLGHEPDIFYNNLLDGASGISEIETFDCAEYPTRIAGEIKSFSTDGWVAPKLSKRMDKFMLYMLTAGKKALVDGGITDDVMDELNKDKCGVLIGSAMGGMKVFNDAIEALRISYKKMNPFCVPFATTNMGSAMLAMDLGWMGPNYSISTACATSNFCILNAANHIIRGEADVMLCGGSDAAIIPIGLGGFVACRALSQRNTDPTKASRPWDINRDGFVMGEGAGVLLLEELEHAKERGATIYAEFLGGSFTCDAYHVTEPRPDGAGVILCIEKALAQSGVSKEDVNYINAHATSTPAGDLKEYQALMHCFGQNPELRVNSTKSMIGHLLGAAGGVEAVATIQAIRTGWVHPNINLENPDNGVDAKVLVGSKKERLDVKAALSNSFGFGGHNSSIIFAPY

SEQ ID NO: 166283 - protein, 124 aa, Glycine max
  Clone ID: PAT_MRT3847_121169C.1.pep
QSGVSKEDVNYINAHATSTPAGDLKEYQALMHCFGQNPKLRVNSTKSMIGHLLGAAGAVEAVATIQAIRTGWVHPNINLEKPDNGVDAKVLVGSKKERLDVKAALSNSFGFGGHNSSIIFAPYK

SEQ ID NO: 166284 - protein, 93 aa, Glycine max
  Clone ID: PAT_MRT3847_12116C.1.pep
IDRPLSRITSWPRLIPGTRTRTVLITVTLLSPFLVDLLASRATSIASQIVRGRRRKPKPSNSRYLRQPAILPRTNPHLRQRHPSITTAAPSIN

SEQ ID NO: 166285 - protein, 118 aa, Glycine max
  Clone ID: PAT_MRT3847_121170C.1.pep
MASTTTSSLCTWLVAACMSVTCDADRTRTPHAIFRSSKKSRKSQFNVSRSTHSGKTMAVALQPTQEVTTIKKPPTKQRRVVVTGLGVVTPLGHEPDIFYNNLLDGVSGISEIETFDCA

SEQ ID NO: 166286 - protein, 55 aa, Glycine max
  Clone ID: PAT_MRT3847_121171C.1.pep
VVGRVRVGIDNVDLHAPTEFGCLVVYALTENTTDDCEHGIALLADLAQKVDQVVS

SEQ ID NO: 166287 - protein, 126 aa, Glycine max
  unsure (1)..(126): unsure at all Xaa locations
  Clone ID: PAT_MRT3847_121172C.1.pep
IRLEAEYPTRIAGEIKSFSTDGWVAPKLSKRMDKFMLYMLTAGKKALVDGGITDDVMDELNKEKCGVLIGSAMGGMKKHHNIFKXVFNDAIEAXRISYKKMNPFCVPFATTNMGSAMLAMDLGWMG

SEQ ID NO: 166288 - protein, 62 aa, Glycine max
  Clone ID: PAT_MRT3847_121173C.1.pep
NKKLPPIRNFPPHGSQPPKKCSEFVWLKGDGVKQGHCQKKGRGSPPFYWHLTQIYGPFFFFG

SEQ ID NO: 166289 - protein, 64 aa, Glycine max
  unsure (1)..(64): unsure at all Xaa locations
  Clone ID: PAT_MRT3847_121174C.1.pep
EEEEEDQDEDEEQXDKGGQKGEGLSLKEDHEDLRIRTPFTSTLKGFQLFLKTHIGNVGVFKRST

SEQ ID NO: 166290 - protein, 167 aa, Glycine max
  Clone ID: PAT_MRT3847_121175C.1.pep
METSLRYGEDSKALRIHAKQKLRIDSNTYFQLRGELDTRLGQPSSSSALIRHFYPSLSATLGVGVRYDKRDKLRYTVSAKKTFPVTVDGLLNFKIKGGCDVDKDFKERKSRGAAEFSWNVFNFQKDQDVRLRIGYEVFDQVPYLQIRENNWTVNADYKGRWNVRYDL

SEQ ID NO: 166291 - protein, 84 aa, Glycine max
  unsure (1)..(84): unsure at all Xaa locations
  Clone ID: PAT_MRT3847_121176C.1.pep
LLYFSSSLTKFCEGACLPILLALFLIIIMFFWHYATIKKYNYNLHTRVSLYWLLPLGPRLGIFIVPELGLLFTDLTTVFXENFS

SEQ ID NO: 166292 - protein, 85 aa, Glycine max
  unsure (1)..(85): unsure at all Xaa locations
  Clone ID: PAT_MRT3847_121177C.1.pep
KVPKTPVXLKELESIHKVLDLYVWLSFRLEEFFPDHELAVSQKAICSMLIEEFLERLGWQKPMARRLASHKMSSPLLSQHMRKCL

SEQ ID NO: 166293 - protein, 38 aa, Glycine max
  Clone ID: PAT_MRT3847_121178C.1.pep
KNMICDISVRLPSCCNSLVDSQCSCIVYVSCRCVVYSQ

SEQ ID NO: 166294 - protein, 72 aa, Glycine max
  unsure (1)..(72): unsure at all Xaa locations
  Clone ID: PAT_MRT3847_121179C.1.pep
SSSFTFHIKEKIIDVISXIQHPTTSIIYFKXQSLHHYLTLHLINYINTFNLIHTKXLQSIQFSTLSXXIXXL

SEQ ID NO: 166295 - protein, 49 aa, Glycine max
  Clone ID: PAT_MRT3847_12117C.1.pep
TFHTFNIVESLDPKQIRICRCIRLSHAIKYGKSTFFLCNEPFLSTIFIF

SEQ ID NO: 166296 - protein, 45 aa, Glycine max
  unsure (1)..(45): unsure at all Xaa locations
  Clone ID: PAT_MRT3847_121180C.1.pep
KSNQSIDDDPSAYPKSAXFGKPVVGKTKIRTEGGKGSITITRTKG

SEQ ID NO: 166297 - protein, 68 aa, Glycine max
  Clone ID: PAT_MRT3847_121181C.1.pep
PLLIGKKSEHAKKGDKQWAFPTPGAKQDPCFFFPPGWGTMKRFEQTLFLSKAQLGLGTLCIHLSSKGH

SEQ ID NO: 166298 - protein, 25 aa, Glycine max
  Clone ID: PAT_MRT3847_121182C.1.pep
MHAPLLFFIFTQYKLTVCSNINQIL

SEQ ID NO: 166299 - protein, 43 aa, Glycine max
  Clone ID: PAT_MRT3847_121183C.1.pep
TVERFFSFLFCLSKLEIKFNSLMVKKLFNYNCMYYFFTLWNKG

SEQ ID NO: 166300 - protein, 44 aa, Glycine max
  Clone ID: PAT_MRT3847_121184C.1.pep
NHIYSKLLTVASQSIVARGIMFVKVEVQRFWCKKKTKFNDSEFT

SEQ ID NO: 166301 - protein, 203 aa, Glycine max
  Clone ID: PAT_MRT3847_121185C.1.pep
MELEIRACLLLFLFSLFSCSQAYTFYVGGKDGWVLYPSENYNHWAERMRFQVSDTLVFKYKKGSDTVLVVNKDDYEKCNKKNPIKKFEDSESEFQFDRSGPFYFISGKDGNCEKGQKLIIVVLAVKNPPPYYPPTPPNTPYVPITPPKAPYVPTPPQTPPKIPYPPYVPTPPKTPFPIHSPPYVPPKAPSPTNHPPFIPTPPK

SEQ ID NO: 166302 - protein, 88 aa, Glycine max
  Clone ID: PAT_MRT3847_121186C.1.pep
CNKLKKLLKVLSSLPQDDQVPLILCVGVVYIAHHMCNYLVLLQVKQTAMKDLCLRAGKSLKKYLSQSVADSARICKLFVVPLDQVNRI

SEQ ID NO: 166303 - protein, 69 aa, Glycine max
  Clone ID: PAT_MRT3847_121187C.1.pep
FFFPLNVAFYSFIACSVPSKYPSQQHANSFVEGQGMSQVSRPLQFCIHITLKMEIFSIVQNKQLAYNHV

SEQ ID NO: 166304 - protein, 37 aa, Glycine max
  Clone ID: PAT_MRT3847_121188C.1.pep
SKKFSFLYIISERAGIKNKNTPTSNHNIFTFNVIKNV

SEQ ID NO: 166305 - protein, 79 aa, Glycine max
  Clone ID: PAT_MRT3847_121189C.1.pep
QFSFSFSSTVATDLVSVRCHKFSLSLSLSLSLRCESSFQTCHFLTTLSIYLPQYLEQDLSAIVSNKIVSNNIVLNKILP

SEQ ID NO: 166306 - protein, 58 aa, Glycine max
  Clone ID: PAT_MRT3847_12118C.1.pep
YGEKTTLHWHGEATPINKGEWAPYQFTRYPPNSKIITPIHKVLTLPNTRNRVWERITT

SEQ ID NO: 166307 - protein, 38 aa, Glycine max
  Clone ID: PAT_MRT3847_121190C.1.pep
RGKILTTHSGILDVVSQNTAWENKIWSPLKNPAFHSNF

SEQ ID NO: 166308 - protein, 59 aa, Glycine max
  Clone ID: PAT_MRT3847_121191C.1.pep
TLDTIKEVVTTGGGGKHEQTIGLDEKIKEDLIGIGSGADDPKTGARSGKGEGLAEPEYG

SEQ ID NO: 166309 - protein, 57 aa, Glycine max
  Clone ID: PAT_MRT3847_121192C.1.pep
YLPYLGRSGFFSVSLSFLISVWFRSDIVGLLSVSGHPCLPLEQAHFLNLIPQVFESL

SEQ ID NO: 166310 - protein, 70 aa, Glycine max
  Clone ID: PAT_MRT3847_121193C.1.pep
FSRASCSPESSVCREAKKGLAERWAVMSNEGSQGQRHVRRSSTVGEMLALSGVGRSVISELGGIHEEREP

SEQ ID NO: 166311 - protein, 88 aa, Glycine max
  Clone ID: PAT_MRT3847_121194C.1.pep
ASFTWSRQKAYGLPSQIQEVVSTGNPKVSKGTSPLTVSLPPQSPSSQPHSHSIHGATPSSRVPPTPLTTLPKVKRPLHRGSPSTGPKP

SEQ ID NO: 166312 - protein, 63 aa, Glycine max
  Clone ID: PAT_MRT3847_121195C.1.pep
FLFKCSCFKRVRSRELLVFHVCYVQFVPGACLLFWCRCRILGFDMMYCRSVRLKNLISISYHS

SEQ ID NO: 166313 - protein, 40 aa, Glycine max
  Clone ID: PAT_MRT3847_121196C.1.pep
RCTMILSSTNKLQNHSTSLSEICWWMTFNLSNNKILYFHI

SEQ ID NO: 166314 - protein, 150 aa, Glycine max
  Clone ID: PAT_MRT3847_121197C.1.pep
MEAQELKRVFQMFDRNGDGRITKKELNDSLENLGIFISDKDLSQMIQRIDVNGDGCVDMDEFGELYQTIMDERDNEEDMREAFNVFDQNADGFITVDELRTVLSSLGLKQGRTVQDCKAMISKVDVDGDGMVDYKEFKQMMKGGGFTALT

SEQ ID NO: 166315 - protein, 212 aa, Glycine max
  Clone ID: PAT_MRT3847_121198C.1.pep
MPTILHRIFLLYNLVHSFLLCLVPKKVRPFLPPSWFQTKTITAPSSSSSSSSSSARIIKRTTMDPNELKRVFQMFDRNGDGRITKKELNDSLENLGIFIPDKELGQMIERIDVNGDGCVDIDEFGELYQTIMDERDEEEDMREAFNVFDQNADGFITVDELRTVLSSLGLKQGRTVQDCKNMISKVDVDGDGMVDFKEFKQMMKGGGFSALT

SEQ ID NO: 166316 - protein, 59 aa, Glycine max
  Clone ID: PAT_MRT3847_121199C.1.pep
SGLNAIASSSQVRPLVLFAPLNQIPHSTHRNLSYHSLGPVRAYKTHPPCRFSPPARTSE

SEQ ID NO: 166317 - protein, 54 aa, Glycine max
  Clone ID: PAT_MRT3847_12119C.1.pep
MIENKSEGFMQSHTVLASKHGMKGFESMIKHADLCTIGVVQHFAHCLLQSYPLC

SEQ ID NO: 166318 - protein, 92 aa, Glycine max
  Clone ID: PAT_MRT3847_1211C.1.pep
MAVAGVHNVTVLESTFLRESHSQPSGRQGDGGRGGTRSPSVLQMWREIEDEQVVRQVQGKTPPGGVGKRGGFNPKKKGGKSFWGKFWGGGFF

SEQ ID NO: 166319 - protein, 50 aa, Glycine max
  unsure (1)..(50): unsure at all Xaa locations
  Clone ID: PAT_MRT3847_121200C.1.pep
QHKSRTSNVSGVSRPLQSLPNGDCFVIRHLLHTSRLTIIDEXQSEQPNPR

SEQ ID NO: 166320 - protein, 91 aa, Glycine max
  Clone ID: PAT_MRT3847_121201C.1.pep
LHLLHTYPIEDCHAMRQKPFYMGIITFSSTCQLFQSDFYFTLSSYQKSVLLQENKQDRVISHAIWFGLTLSLEQASFKPITKSYRSLCLQT

SEQ ID NO: 166321 - protein, 230 aa, Glycine max
  unsure (1)..(230): unsure at all Xaa locations
  Clone ID: PAT_MRT3847_121202C.1.pep
AVCYPWYLRHPNVLLFMGAVYSQERLAIVTELLPRGSLFKNLHRNNQTLDIRRRLRMALDVARGMNYLHHRNPPIVHRDLKSSNLLVDKNWTVKFFVXVGDFGLSRLKDATLLTTKSGRGTPQWMAPEVLRNEPSNEKSDVYSFGVILWELMTQSIPWKNLNSLQVVGVVGFMDRRLDLPEGLDPHVASIIDDCWRSDPEQRPSFEELIQRTLFLVNRVTAVSIRRISES

SEQ ID NO: 166322 - protein, 83 aa, Glycine max
  Clone ID: PAT_MRT3847_121203C.1.pep
FFGVFLKQFTWFFTRTRKRVMGEMGPTEPRTKLKNLTRTTHFFFLEEKGNKQTKMEKHTTGQYCPNKRDAAIYTKMGGSKNTF

SEQ ID NO: 166323 - protein, 61 aa, Glycine max
  Clone ID: PAT_MRT3847_121204C.1.pep
KESSQASVFDVIHSSRRSCRMHVFSNVLNLVRGQLKDSGGPMPLCRVRCTYKQITERVEIE

SEQ ID NO: 166324 - protein, 43 aa, Glycine max
  Clone ID: PAT_MRT3847_121205C.1.pep
EGRTMDIKVFFVPHIMSGNKIDEKNKGQVFSNITFLKHSRAKT

SEQ ID NO: 166325 - protein, 109 aa, Glycine max
  Clone ID: PAT_MRT3847_121206C.1.pep
VAPLSSIHSQGKLMTPGKLQPTHYARILLAQTVLRSHSRPAISGVQVSEQLGPVTHISGHTASQVVYPESGTLAAHDTMVRSRHISRTVRPLYSSSIGSARCAAQALEP

SEQ ID NO: 166326 - protein, 39 aa, Glycine max
  Clone ID: PAT_MRT3847_121207C.1.pep
PNFYPSYFPNKPPQYLTKDHSFPSISPKHMGALEQKTCA

SEQ ID NO: 166327 - protein, 106 aa, Glycine max
  unsure (1)..(106): unsure at all Xaa locations
  Clone ID: PAT_MRT3847_121208C.1.pep
FFFFLSFVAIGGRXPDPTMQGGDFSPGXTLWEWSLSPSIPRGGAGSYALPIFHTFKPGGLSAMXLLPCXWPSLSNPVLRLKPLGSAALASCSSFSAWEASAPPPIG

SEQ ID NO: 166328 - protein, 335 aa, Glycine max
  Clone ID: PAT_MRT3847_121209C.1.pep
VLSLINEHSGAALQYGIDKDFSNESRHVIFYDMGASSTHAALVYFSAHKGKEYGKSVSVNQFQVKDVRWDPELGGQHMELRLVEYFADQFNAHVGGGIDVRKFPKAMAKLKKQVKRTKEILSANTAAPISVESLHDDVDFRSTITREKFEELCEDIWEKSLLPVKEVLENSGLSLEQIYAVELIGGATRVPKLQAKLQEFLRRKELDRHLDADEAIVLGAALHAANLSDGIKLNRKLGMIDGSLYGFVVELNGPDLLKDESSRQLLVPRMKKVPSKMFRSINHNKDFEVSLAYESENHLPPGVTSPEIARYQISGLTDASEKYSSRNLSSPIKTN

SEQ ID NO: 166329 - protein, 125 aa, Glycine max
  unsure (1)..(125): unsure at all Xaa locations
  Clone ID: PAT_MRT3847_12120C.1.pep
MASVALKPAPFTVEKALVRGLAFLLRNYSSFRVVDSGGKKIKTDXPYGINGGMAVKEGVYASRMKRNGLGVYQWVDTYGANVDGYSPIYHTEDWSSTGDVYAGHPTGXAILAVTLLGLVAAVDFL

SEQ ID NO: 166330 - protein, 55 aa, Glycine max
  unsure (1)..(55): unsure at all Xaa locations
  Clone ID: PAT_MRT3847_121210C.1.pep
ETQVRRGYALSLSISLSGGEARXRPLEKIGRSIRLNLTSACIRRRSSTQVSPNCN

SEQ ID NO: 166331 - protein, 111 aa, Glycine max
  Clone ID: PAT_MRT3847_121211C.1.pep
KHKLFYRQTHFSKNQFPAHFLKGKKHSHGPLAVFARFTINTYSLTTLFLNKKEILITKHLSQPPIFIFKTTTTTTKLSPLTTNSFCQLDIFGHNNYTLSGNGPQIFFLKES

SEQ ID NO: 166332 - protein, 39 aa, Glycine max
  Clone ID: PAT_MRT3847_121212C.1.pep
FFEMLKESQLTVEATVRPSVMLHLYQKDPPRALLVIVAI

SEQ ID NO: 166333 - protein, 77 aa, Glycine max
  unsure (1)..(77): unsure at all Xaa locations
  Clone ID: PAT_MRT3847_121213C.1.pep
ASEGLKHXELDVLFTDLNGDDYHAFLMIRLNSEEGHSLYELTNFWGMDLTTDRXMSLVRIXQSVIEANVDVTTTDNY

SEQ ID NO: 166334 - protein, 49 aa, Glycine max
  Clone ID: PAT_MRT3847_121214C.1.pep
QFKHQSHPYPPTLFSFLPSQLLNPLTFPSLPTNPAQSSSVTPLSMAIKL

SEQ ID NO: 166335 - protein, 77 aa, Glycine max
  Clone ID: PAT_MRT3847_121215C.1.pep
RSQIIHKLSGHIFQLSQHKFASNVVEKCLEYGDATDRQLLIAEIVGHDKQNDNLLGSWRIPDILLHRKRKVAGLQCK

SEQ ID NO: 166336 - protein, 53 aa, Glycine max
  Clone ID: PAT_MRT3847_121216C.1.pep
IFFLRAVSECSRLMVTFHQKAGSGKLTGVYRKYNTWKYGCAAKIEPALFLLDN

SEQ ID NO: 166337 - protein, 89 aa, Glycine max
  Clone ID: PAT_MRT3847_121217C.1.pep
MRIRAKAIITHLMAVHGDDDPAEMDASNLWTINTYEAVGNGGTLDRMHNGHRLLLTGSAELAKCRIVIGDCDGPMLAMETVTSMEIKLY

SEQ ID NO: 166338 - protein, 90 aa, Glycine max
  Clone ID: PAT_MRT3847_121218C.1.pep
VGGIRPFISSFLSFIDYLSTYSYSYSLDTISSSSFLLSYPLRTYCSSSSPFPSACSEHLLSYSLFTDSYSFYHLLTTMPFYDLVTHPAPL

SEQ ID NO: 166339 - protein, 50 aa, Glycine max
  unsure (1)..(50): unsure at all Xaa locations
  Clone ID: PAT_MRT3847_121219C.1.pep
IDEQFFDQFIHLKTTEMANKVLDRYYRAPDXVLKRLETMKSVVSFXIIRE

SEQ ID NO: 166340 - protein, 57 aa, Glycine max
  Clone ID: PAT_MRT3847_12121C.1.pep
TRPKKPDESDPDNATSAAKSQAIKSLTSQIRDMALKASGTYKHCAPCTGPTTQGRIR

SEQ ID NO: 166341 - protein, 60 aa, Glycine max
  Clone ID: PAT_MRT3847_121220C.1.pep
RDDKRGCFLEAFGILSISYDVKRTVRRDREGTRMSVSVTVMTFNHHDEEPQHSHDSWEKI

SEQ ID NO: 166342 - protein, 65 aa, Glycine max
  Clone ID: PAT_MRT3847_121221C.1.pep
MVEKANGTKDEVVTIQYTIKLHKRLHGCTFKKKAPKAIKEIRKFAQKAMGTNDVRVDVKLNKFVW

SEQ ID NO: 166343 - protein, 54 aa, Glycine max
  Clone ID: PAT_MRT3847_121222C.1.pep
VGVKPAADLPTMSLTCRSKGTHTTAMGESEACLHYARFLFISIDRLLGIRKDRH

SEQ ID NO: 166344 - protein, 178 aa, Glycine max
  Clone ID: PAT_MRT3847_121223C.1.pep
MAGSSASLLFLFLLFGFSAAKELLVGGKIDAWKIPSSESDTLNQWAERSRFRVGDHLVWKYESGKDSVLEVTREDYANCSTSNPIKEYNDGNTKVKLEHPGPFYFISGSKGHCEKGQKLIVVVMSPRHTFTAIISPAPTPSPAEFEGPAVAPTSSATTFQVGLLTALGVLAIYVGFLM

SEQ ID NO: 166345 - protein, 175 aa, Glycine max
  Clone ID: PAT_MRT3847_121224C.1.pep
MAACSRTSLLLLFFLFGFSAAKELLVGGKIDAWKIPSSESDSLNQWAERSRFRVGDHLVWKYENGKDSVLEVTREDYANCSTSKPIKEYNDGNTKVKLEHAGPFYFISGAKGHCEKGQKLIVVVMSPRHIISPAPSPTEFHFEGPAVAPTSSATTFQVGLLTALGVLAMYVVFLK

SEQ ID NO: 166346 - protein, 111 aa, Glycine max
  unsure (1)..(111): unsure at all Xaa locations
  Clone ID: PAT_MRT3847_121225C.1.pep
KISKKYVKNLTLIGLLFNSKKSSFMVKGNQNGLVKPWFQKIKPLKSWPQLKDLAGTISGNHFSIPFVRLVRGTPSFKITTTKWFNSPKTKPEGLAEGLAEGCGRPGDFXPV

SEQ ID NO: 166347 - protein, 48 aa, Glycine max
  Clone ID: PAT_MRT3847_121226C.1.pep
CTFQPDAHIDKFYWAPTSDDRIGISTGIVSTDSTPEQDVVKILVTLPG

SEQ ID NO: 166348 - protein, 65 aa, Glycine max
  Clone ID: PAT_MRT3847_121227C.1.pep
NASGSTRISGSERDCTDCFKKMADKPDMGEIASFDKAKLKKTETQEKNTLPTKETIEQEKRSEIS

SEQ ID NO: 166349 - protein, 52 aa, Glycine max
  Clone ID: PAT_MRT3847_121228C.1.pep
GFILNELKHLLVGLGVLRQLGYVRDRFAWRGRHGACYKIWVRERERESVCET

SEQ ID NO: 166350 - protein, 207 aa, Glycine max
  Clone ID: PAT_MRT3847_121229C.1.pep
MVRLWCSSLSITLLFQQLIRLCISWSVQTPTPPLPILPLPTYSQLKWQQREIIMFFHFGVNTFSDREWGTGQENPAIFNPTGLNTTQWATVAADAGVSLMILTAKHHDGFCLWPSKYTDHSVISSPWQGGKGDVVQDFVNAATAQGIDVGVYLSPWDRHDPRYGNDLLYNQYYLAQLQELLKKYPNVREIWLDGAKGANAKNMTYYF

SEQ ID NO: 166351 - protein, 64 aa, Glycine max
  Clone ID: PAT_MRT3847_12122C.1.pep
PLAWWYDARCINCVALSLNPYLHVFGCGPIKLALIQLVKPWLVHMSVHRVRSVHSQFSMFRAGF

SEQ ID NO: 166352 - protein, 118 aa, Glycine max
  Clone ID: PAT_MRT3847_121230C.1.pep
TTTPLCLIASPRMAFGAEHGYRQEKRRPCFILFCHCPPDTLVGFISCLKHMPECVMSLMALPYATRSSLILSGLSCDLPEDESMMFMIQLTSYIYVLMYVRMIRTLSLSPMSHGSVES

SEQ ID NO: 166353 - protein, 66 aa, Glycine max
  unsure (1)..(66): unsure at all Xaa locations
  Clone ID: PAT_MRT3847_121231C.1.pep
DWMASELLRNELSDDKCEVLSYGVILWXALYLASSXGGMNPMHVVGAVGVQHLRIDFSYNEDPAIA

SEQ ID NO: 166354 - protein, 85 aa, Glycine max
  unsure (1)..(85): unsure at all Xaa locations
  Clone ID: PAT_MRT3847_121232C.1.pep
NKEEQFSLTKEEEANGRSIXDXQISEFKEAFSLXXKDGDGCXTTKELGXVXRSLGQNPTEAEXQGMITEVAXDGNGXIDXPEXLN

SEQ ID NO: 166355 - protein, 33 aa, Glycine max
  Clone ID: PAT_MRT3847_121233C.1.pep
SIFQLGYDLKEDEVDSVFWQFKAMAEKKKVKNY

SEQ ID NO: 166356 - protein, 78 aa, Glycine max
  unsure (1)..(78): unsure at all Xaa locations
  Clone ID: PAT_MRT3847_121234C.1.pep
LQTIPCVFTKSSQINYNLNLQPIYQFYTILSNTLSLITKHCYSSXYNYYLLTFLVXSNFTKTAPKIYLRXXXXXXVLX

SEQ ID NO: 166357 - protein, 52 aa, Glycine max
  Clone ID: PAT_MRT3847_121235C.1.pep
FFFFFFFFLVFFFWGHPFFYVFLGWEIKKKKSLRCLGFVFPINKIMGSQFNW

SEQ ID NO: 166358 - protein, 92 aa, Glycine max
  unsure (1)..(92): unsure at all Xaa locations
  Clone ID: PAT_MRT3847_121236C.1.pep
INQYFINKFEKKNISKAKPKPTAHYAMLCSLIXFRRSAPSYHTLHSLFPTINRFXFSASAAMVAHAKDEAYLSATIPKRIRLFETILAEQHT

SEQ ID NO: 166359 - protein, 107 aa, Glycine max
  Clone ID: PAT_MRT3847_121237C.1.pep
SLVVGARPAGEGLGSASGAAVAPLVGPRVALRFLVVGLVSDPPVSVDDAPLLATSFPAFMALRAGLVLWPPLPPKGVFVLEFLLGGATPSTHPAKGVSSAWLLLPVL

SEQ ID NO: 166360 - protein, 277 aa, Glycine max
  Clone ID: PAT_MRT3847_121238C.1.pep
RAESARGELPLRFADFGVLHRNEASGALSGLTRVRRFQQDDAHIFCRESQIIGFTYELKLSTRPEKYLGDIATWDKAESALKEALDDFGKPWQLNEGDGAFYGPKIDISVSDALGRKFQCATLQLDFQLPDRFKLEFSAEDEAKIERPVMIHRAILGSVERMFAILLEHYKGKWPFWLSPRQAIVCPVSEKSQAYALQVRDQIHQAGYYVDADTTDRKIQKKVREAQLAQYNYILVVGEEEANTGQVSVRVRDLAEHKVMSIEKLLEHFRDKAAAFE

SEQ ID NO: 166361 - protein, 708 aa, Glycine max
  Clone ID: PAT_MRT3847_121239C.1.pep
MLCSLIRFRRSAPSYHTLHSLFPTINRFSSSASAAMVAHAKDEAYLSATIPKRIRLFETILAEQHTQRLSLSPDPIKVTLPDGSVKEAKKWHTTPLDVAREISKNLANSALIAKVNGVLWDMTRPLEDDCQLQIFKFDDDEGRDTFWHSSAHILGQSLETEYGCKLCIGPCTTRGEGFYYDAFYGDLGLNDDHFKQIEAGALKAVAEKQPFERIEVTRDQALEMFSDNKFKVEIINDLPADKTITVYRCGPLVDLCRGPHIPNTSFVKAIACLKASSAYWRGDKDRESLQRVYGISYPDQKKEYLHRLEEAKKYDHRILGVKQELILHHEWSPGSWFFLPHGARIYNKLMDFIRNQYRDRGYQEVISPNVFNMDLWVQSGHAANYREDMFILEVDKQEFGLKPMNCPGHCLMFKHRVRSYRELPLRFADFGVLHRNEASGALSGLTRVRRFQQDDAHIFCRESQIKDEVRNGLNFINYVYKIFGFTYELKLSTRPEKYLGDIATWDKAESALKEALDDFGKPWQLNEGDGAFYGPKIDISVSDALSRKFQCATLQLDFQLPDRFKLEFSAEDEAKIERPVMIHRAILGSVERMFAILLEHYKGKWPFWLSPRQAIVCPVSEKSQSYALQVRDQIHQAGYHVDADTTDRKIQKKVREAQLAQYNFILVVGEEEANSGQVSVRVRDLAEHKVMSIEKLLEHFRDKTAAFE

SEQ ID NO: 166362 - protein, 99 aa, Glycine max
  Clone ID: PAT_MRT3847_12123C.1.pep
LDNQVARSQFFKRLYEIVEHLTKMYGGQSRTTRFQLSKALFRSSLAANEKVGPHVLKMIDLIEQLKKFGCTLGKELSQDLIMQSLFDSFSQFIVNFNIR

SEQ ID NO: 166363 - protein, 81 aa, Glycine max
  unsure (1)..(81): unsure at all Xaa locations
  Clone ID: PAT_MRT3847_121240C.1.pep
MHNFTSEQRSNAVNISQSLAMAYVMDQKAMLLQQSTWQNNVRXGNLVEQIRGPLSSLXTLSKILSTXXKGTSDFPTLELLG

SEQ ID NO: 166364 - protein, 41 aa, Glycine max
  Clone ID: PAT_MRT3847_121241C.1.pep
LDFWLKVFNFLGKNAYKISLVIWVVIKSHVYKMSPKRPSGF

SEQ ID NO: 166365 - protein, 52 aa, Glycine max
  Clone ID: PAT_MRT3847_121242C.1.pep
KNKNCFFLFRILPLQFKSIYLATLCVFCFVSGNGSSFCDAHGSWWLLEFLSF

SEQ ID NO: 166366 - protein, 238 aa, Glycine max
  Clone ID: PAT_MRT3847_121243C.1.pep
VTPCPVSSGDDDEWTTENNEQFQEQEEYDEDEDYQEEDEVHEGDDHAQLNQDFEDMHLQEKGLPHLMDNLVLGFDEGVQVGMPNEEFERTLKDEETTFMAPQASEECVSYDNARDNGKALQPVNDTSQVNLNSTSTGFQDSRKPAQDLVIQPSNSLSPVVSESLVNEEASNGLLTQHSTTPSPVTVAPHYSSSNAPSQAEVPIKLQFGLFSGPSLIPSPVPAIQIGSIQMPLHLHPQS

SEQ ID NO: 166367 - protein, 218 aa, Glycine max
  unsure (1)..(218): unsure at all Xaa locations
  Clone ID: PAT_MRT3847_121244C.1.pep
RNTPKTKPIFVFSSSVVAMTTITRHSYKLSLKRATKRITRRRRRNPHNHRKRSTSTTIDPFKPQCCTNSAASAKLETLKNLIPGGEEAVKPDQLFKETAEYIVLLRTRVVVLRSRIPQCASWCCGRASWFSSAALCSLLSPSPPPKMRMNMKMVSCLHSFFTLFFFFFILLLLLLLFFLCFFLSVLFCDFCPFISEEKKRKDLWSSVFFWGGGVXTFI

SEQ ID NO: 166368 - protein, 129 aa, Glycine max
  unsure (1)..(129): unsure at all Xaa locations
  Clone ID: PAT_MRT3847_121245C.1.pep
APTRAKEDTRMTLAYIPRSSPDPIADGNSAGDTINFEAXPHKLVQFGETQEKDVLKITQEEYLTAWATQVRPATTMLADGCPYSNAMGHDRSKGTRPGDNVIGAKXQTINNACAYGLKPGITRSRLVGT

SEQ ID NO: 166369 - protein, 57 aa, Glycine max
  Clone ID: PAT_MRT3847_121246C.1.pep
TWHRQATGRPTQTRRGTPTQMTTSKSFFNQSLAFLKYLHLHFGFSRLIIYKRRSERS

SEQ ID NO: 166370 - protein, 61 aa, Glycine max
  Clone ID: PAT_MRT3847_121247C.1.pep
SHVLFQPIYFVFCNRHLKRFKRCSIRYYLFNNRHLGHFFPLHKRRLVIICVMFFPLKPLID

SEQ ID NO: 166371 - protein, 65 aa, Glycine max
  Clone ID: PAT_MRT3847_121248C.1.pep
TRPVALCPSLTLVDDDYTQCPSLFFILRTPSYSNEGVHNPIFDCGLAPCGTATSHWEIDRQDRRV

SEQ ID NO: 166372 - protein, 575 aa, Glycine max
  Clone ID: PAT_MRT3847_121249C.1.pep
MVELRLSIRALQLPTLLILCFFLILGNFHKAEARIRHHKWEVKYEFRSPDCFKKLVITINGKTPGPTIQAQEGDTIVVQVNNSLVTENLSIHWHGIRQIGTPWFDGTEGVTQCPILPGDTFIYQFVVDRPGTYLYHAHYGMQREAGLYGMMRVAPRDPEPFAYDLDRSIILNDWYHSSTYEQAAGLSSIPFRWVGEPQSLLIHGKGIFNCSKSPSLGTDVCDASKCSPFVQTVIPGKTYRLRIASLTALSALSFQIEGHNMTVVEADGHYVEPFVVKNLFIYSGETYSVTVKSDQDPSRNYWITSNVVSRNRTTPPGLGMFNYYPNHPKRSPPTVPPSPPAWDDVEPRLAQSLSIKARQGYILKPPTTSDRVIVLLNTQNNISEYRHWSVNNVSFTLPHTPYLISLKENITGAFDPTPPPDGYDFANYDIFSVASNANATSSSGIYRLKFNTTVDIILQNANTMNKNNSETHPWHLHGHDFWVLGYGKGKFDVNNDTKKYNLENPIMKNTVPVHPFGWTALRFRTDNPGVWAFHCHIESHFYMGMGVVFEEGIERVGKLPSSIMGCGQTRGFHRP

SEQ ID NO: 166373 - protein, 50 aa, Glycine max
  Clone ID: PAT_MRT3847_12124C.1.pep
CVWILHCSSIKSFLINQILIAFLCVVFGLLCAFMLQFVGRTHSLCFSFVK

SEQ ID NO: 166374 - protein, 46 aa, Glycine max
  Clone ID: PAT_MRT3847_121250C.1.pep
IAGSTRSLIRGRPFFFFWTITLCGEYYIYNIWPLRFIMAFEYESGL

SEQ ID NO: 166375 - protein, 64 aa, Glycine max
  Clone ID: PAT_MRT3847_121251C.1.pep
NKSGCYLITRIISIFIPTSLRVPNSFKGQEKFTSSVAGPPVLSTKFNFLFFPTSLRLIPPVNTS

SEQ ID NO: 166376 - protein, 60 aa, Glycine max
  Clone ID: PAT_MRT3847_121252C.1.pep
YMYTCINLNYIIQVWMDQWDAPRWPHILKIIYYYYVKSVFQNQLPLAMIVVIRSIFVSMG

SEQ ID NO: 166377 - protein, 145 aa, Glycine max
  Clone ID: PAT_MRT3847_121253C.1.pep
TAARRRQKGDAKKWAQVIAFPFAIQGHINPMLQLAQILHSKGFSITIIHTTFNSPNPSNYPHFSFSCIQDNLSETETSASDLLNFIVALNVKCLVPFKDCVEKLLSDVSEEAVVSCFISDALCYFTQAGADNLQLPRIVLRTGGV

SEQ ID NO: 166378 - protein, 133 aa, Glycine max
  Clone ID: PAT_MRT3847_121254C.1.pep
NGQCALELQQAAALFNPQLEQMLLQLNRKIGSDVFIAANTGKAHNDFVTNPRQFGFVTSQVACCGQGPYNGLGLCTALSNLCSNRETYAFWDAFHPSEKANRLIVEEIMSGSKAYMNPMNLSTILALDANTGR

SEQ ID NO: 166379 - protein, 84 aa, Glycine max
  Clone ID: PAT_MRT3847_121255C.1.pep
RLEIHLSAANFSSINYYVYRTQLWRDLIMNSPFNLCTENKEMGYVASFLYCGRTCHPRPNDLENEAYFLSIPIFFAKAPPSKLF

SEQ ID NO: 166380 - protein, 71 aa, Glycine max
  unsure (1)..(71): unsure at all Xaa locations
  Clone ID: PAT_MRT3847_121256C.1.pep
ASYKVACVVAMMCLVVAMSVTPMAHAAITFGQVSCNVSPCLIYFRSGXXPSDSCCNGVKSLNGAAKTTVDR

SEQ ID NO: 166381 - protein, 55 aa, Glycine max
  Clone ID: PAT_MRT3847_121257C.1.pep
PGVFTCNNLIHGLCDGGRVHDAARLHSSVEGLGLPGNIIAYNVQIEGELSGCALI

SEQ ID NO: 166382 - protein, 70 aa, Glycine max
  unsure (1)..(70): unsure at all Xaa locations
  Clone ID: PAT_MRT3847_121258C.1.pep
VLXSXXGELVXYXYXAXXVHXXXXLSXYXXXLXXXXXXRXREREHPKRTRREXRKRVMARAEFRXTYXKX

SEQ ID NO: 166383 - protein, 99 aa, Glycine max
  Clone ID: PAT_MRT3847_121259C.1.pep
QCTDQSLFSLFKLNLFIPFHVDLYLVFFLPFLLIKYIQFQFHVISETSFWVFFPSLVFFLSGMTIFVLRFLVVDFFSEMRKVFFFMTVFSVEFKNAIPS

SEQ ID NO: 166384 - protein, 49 aa, Glycine max
  unsure (1)..(49): unsure at all Xaa locations
  Clone ID: PAT_MRT3847_12125C.1.pep
GNVVKICXXSHIFCLYLYKTDEITRLKERRMEDRDRSRRQWNLLNAEAN

SEQ ID NO: 166385 - protein, 56 aa, Glycine max
  Clone ID: PAT_MRT3847_121260C.1.pep
EKSNPWGPSPSLFSYPCLQGSYFSFRSPPRLNDKNRAPPSPCVCQLMPIPNFKYLV

SEQ ID NO: 166386 - protein, 110 aa, Glycine max
  unsure (1)..(110): unsure at all Xaa locations
  Clone ID: PAT_MRT3847_121261C.1.pep
GDIVMRKVFVTDQDRIAGVNSFHDTNNVRGVARVMVACQNSGISMDIYNMCHKYLMDTKHFGAPLAAFQIIQHKLVQMPGNIHSTILVGXRLCKLSDNGKTTPVQSSLQN

SEQ ID NO: 166387 - protein, 76 aa, Glycine max
  unsure (1)..(76): unsure at all Xaa locations
  Clone ID: PAT_MRT3847_121262C.1.pep
HVDSQRPKLSWFQRYNIIGGIAQGILYLHEFSTLKIIHXRDLKPSNILLDENMVPKISDFGLARIIEINPDQGGYK

SEQ ID NO: 166388 - protein, 103 aa, Glycine max
  Clone ID: PAT_MRT3847_121263C.1.pep
MANPWQPYVDTNLVGSKFCKQAAIHGHDGAKWATSAGFNVSPTEAKALVGGFKDPNTIRASGIHLNGVKYLTIRADERSIYGKKGATGCVAVKTQRGVLIAIY

SEQ ID NO: 166389 - protein, 36 aa, Glycine max
  unsure (1)..(36): unsure at all Xaa locations
  Clone ID: PAT_MRT3847_121264C.1.pep
MAVQGDGPTIGINLHTTYSCIGLXHHDRIYIISNYH

SEQ ID NO: 166390 - protein, 88 aa, Glycine max
  unsure (1)..(88): unsure at all Xaa locations
  Clone ID: PAT_MRT3847_121265C.1.pep
CLAARHLTXXXRRFHGLGCSHCGRXYYXXRXXVIXXWLLRCPSSXGXXLPXXGFSXSXKGRYIGRMYAYFEPASISSAIRFLSCLGSP

SEQ ID NO: 166391 - protein, 63 aa, Glycine max
  Clone ID: PAT_MRT3847_121266C.1.pep
FGGSKYPKIPRGGLKKNLGHYKLGKQTYPNHFRNKRFFFLNKALPIRGYKMGQKPWKKVFSWT

SEQ ID NO: 166392 - protein, 76 aa, Glycine max
  unsure (1)..(76): unsure at all Xaa locations
  Clone ID: PAT_MRT3847_121267C.1.pep
SPLMSSXPLETAPLRIXITXTPPXESPXTXTLYXXSPXQXXPYTVVFFMSSQGSPRXLCLLLLHCRRSXSVFWSLC

SEQ ID NO: 166393 - protein, 90 aa, Glycine max
  Clone ID: PAT_MRT3847_121268C.1.pep
PGFINSNSNAGRHQPSLSGATASGFSIPTNTETTSQPRVDPNGKRPGYGLNLFWDWNISRFQHALAGFKGGKTMVIHQFHQAMQGGKFKN

SEQ ID NO: 166394 - protein, 73 aa, Glycine max
  Clone ID: PAT_MRT3847_121269C.1.pep
MLLIGKPSWFAPCPENSLQSANRNNAFIRYKEKKKTPIFYKKVKYSSLKAKAHVTKPVKRPFFKTRDLYYYDP

SEQ ID NO: 166395 - protein, 77 aa, Glycine max
  Clone ID: PAT_MRT3847_12126C.1.pep
FFHAPCGGFFFFLRPVCCVPGVLHKEKKKCSASLSCHVAYVSDAVDKSATAVFVFDIVRYLADVFAMFLGALMACLT

SEQ ID NO: 166396 - protein, 52 aa, Glycine max
  unsure (1)..(52): unsure at all Xaa locations
  Clone ID: PAT_MRT3847_121270C.1.pep
MSSCGCGSSCNCGSNCGCNKXSFXLSDDEKTTTETLVVGVGSVNAQMDGAVM

SEQ ID NO: 166397 - protein, 67 aa, Glycine max
  Clone ID: PAT_MRT3847_121271C.1.pep
QIGRFQFEVQTIQYPLLKLADEKTKGKSSFPGKTVVLLKDFIPSGKKSSKKRTKGFCGCSRPSTNEG

SEQ ID NO: 166398 - protein, 64 aa, Glycine max
  Clone ID: PAT_MRT3847_121272C.1.pep
VVCNDRTPYIHPSFTADVARLREKGDQARLQNSPDACLRHLADSNTLISFSHQRRSWLRTRMVL

SEQ ID NO: 166399 - protein, 87 aa, Glycine max
  Clone ID: PAT_MRT3847_121273C.1.pep
AYEFYGGVIKVDDAWPKKENTPSAVKPKVVTFNLGGATLYYEASAKDLKEFFDTLTGYDVSADAVYRDNPTKSYTYGFAYYKSNNEA

SEQ ID NO: 166400 - protein, 70 aa, Glycine max
  Clone ID: PAT_MRT3847_121274C.1.pep
MLHLMIFQLQLQRNEVIALTNLLNRLSESVKFIQEMGPTAERIMEGGHFSAHTRTLISSWKKIWSYVSKT

SEQ ID NO: 166401 - protein, 160 aa, Glycine max
  Clone ID: PAT_MRT3847_121275C.1.pep
MSMLETDQIKQLNDIFKRFDMDQDGSLTHLELAALLRSLGIKPTGDEIYALLSNMDENGNGYIEFDELVHAIMPDLTESVLINQEQLLEVFRSFDRDGNGYITASELAGSMAKMGQPLTYRELASMMAEADSNGDGVISFNEFAALMAKSAAEFLGVKVA

SEQ ID NO: 166402 - protein, 57 aa, Glycine max
  Clone ID: PAT_MRT3847_121276C.1.pep
YNWQFKGKKGLKVYIIKNIMPTFLSTGITWSHTSAKPRSERSSVISVRVSRQFNRPP

SEQ ID NO: 166403 - protein, 56 aa, Glycine max
  Clone ID: PAT_MRT3847_121277C.1.pep
FDPGFIKIGLRTPPTYKWAPFKSFSGVFRMQFVNCAKKKSVWLLCPKIKKAFVVLA

SEQ ID NO: 166404 - protein, 216 aa, Glycine max
  Clone ID: PAT_MRT3847_121278C.1.pep
FSDSLLWDQRVTIVVFFLTLSERERKMEGWLYLIRANRFGQHYSRKRYFILKGNVLRSFKIKPTSQMEEPIRSAIIDSCIRVNDNGRETMNKNVLFIFTVYNATDQSDKLKLGASSSEEAARWIRTLQDAAMKGCPSPAKNLVACHKKRRSSLRNGGSKSTDWKYSNLNFQSCIYTEAMTADVIAPSPWKIFGCQNGLRMFKEAKDWDSRGSHWGG

SEQ ID NO: 166405 - protein, 183 aa, Glycine max
  Clone ID: PAT_MRT3847_121279C.1.pep
FFLDKCLGECFLLLPELLKKVGRLYSLCLQFAAATPWLFSSSVGFPNPVDPFDDSKGLNKARWKSGPVLLSTPRNVAVPGFVLNFGKGFFSGLQSLGSLLSSNSPAEPYLFFFGQWVFGVLIVKDGFFWVFTWVLAFLPKGGGFSSFGVFGLFPRLGGVLCLGIENNFFCFPVFFDTFLLKFD

SEQ ID NO: 166406 - protein, 74 aa, Glycine max
  unsure (1)..(74): unsure at all Xaa locations
  Clone ID: PAT_MRT3847_12127C.1.pep
RQIKATFNTHDHXXMFLXSFXNFAXXCVYGXXXXVSVHEYVKPXFSGSKLKXFLAXHXXHHYDGXDKTSATLQF

SEQ ID NO: 166407 - protein, 123 aa, Glycine max
  unsure (1)..(123): unsure at all Xaa locations
  Clone ID: PAT_MRT3847_121280C.1.pep
WKLLMCQVDQLIFEELMRERFPKLVNHLDYLGVQVAWISGSWFLSIFVNIIPWESVLRVWDVLLFEGNRVMLFRTALALMELYGPALVTTKDAGDAITLFQSLVGSTFDSSQLVFTXCMGYLA

SEQ ID NO: 166408 - protein, 240 aa, Glycine max
  Clone ID: PAT_MRT3847_121281C.1.pep
LKDGDFQGVSLSTIGRSVVLVNPDIPEAKNLRSWYDFERKDAAMYSVGSGSSPISNNGIRSLYTDRIFFSDIISNPSLGDVMPAFFRLRGHITFIKPDQAMWYRACKTCNNKVTESFGSGYWCDGCQKSDEQCSLRYIMVAKVSDGSAETFISVFNQEAEKIIGCSADDLDNLKLQEGEVNPYQMTLKEATWAQHLFRVSVTPNEYNGEKRQRITVRAVVPVDFAAESRFILEELSKMRA

SEQ ID NO: 166409 - protein, 45 aa, Glycine max
  Clone ID: PAT_MRT3847_121282C.1.pep
IYDFDGDYKDVGISLFTTKYMVFKNCLSNAKSDTILSAWNPQPDW

SEQ ID NO: 166410 - protein, 327 aa, Glycine max
  Clone ID: PAT_MRT3847_121283C.1.pep
TRRSNSISNTLSMYSSSTSSESSSVGGFSSSESESFYYGVQRPKPIKTSVSDKTKTKTNFDASLHSHNFRSHSSQSQKPKDENGFGKTKSKALKILYGELKKAKQPISPGAKLASFLNSLFTSTGNAKKAKVSTTTTSTYRPVLIPIATDRVADTKSVSAAQQQPGSTCSSASSFSRSCLSKTPSSRSGAKRSVRFCPVSVIVDEDCRPCGHKNLHEGEESLVDSRGKNKSEELRLHVMQENPRVEELAKNLLKNYQKKSEVEFDDVMPYEDEEEEDDDDVASCASFDLFELDNLSAIGIERYREKLPVYKTTHFNTNKAIANGFIL

SEQ ID NO: 166411 - protein, 47 aa, Glycine max
  unsure (1)..(47): unsure at all Xaa locations
  Clone ID: PAT_MRT3847_121284C.1.pep
DDLXFSVSWDIVSDIYIINGPCEFATGIEQTCTSIVSHVMFSSTCIG

SEQ ID NO: 166412 - protein, 84 aa, Glycine max
  Clone ID: PAT_MRT3847_121285C.1.pep
DGEIKVGEEGVGACSEVISGTYSIKQTGADDPWCSKETARHNPSHVLHKHTHFIQEQSKVPPPPIIIHSSSVQYTASASVHRYS

SEQ ID NO: 166413 - protein, 181 aa, Glycine max
  Clone ID: PAT_MRT3847_121286C.1.pep
MEAATFPHQLQVKPFHFFLIITAQNLQDGKLMIPNKFVEKYGEGLPNALFLKTPNGTEWNFNLEKHDGKIWFQKGWKEFAEYHSLAHGHLLVFRRHGTSHFQVHIFDLSSLEIDYPSKGTEGKTSPNHEGNKQPRNEENLEYLQPYQVRSHKSVKVENMMTLPEEAQPHTDTFKEKSKGCC

SEQ ID NO: 166414 - protein, 72 aa, Glycine max
  Clone ID: PAT_MRT3847_121287C.1.pep
IKRRRRVIAVIAVISFSLSFSIHVPFYHILFLVVTRALELAQHIGLTVFALSASAVVIVVVSKGRVAIFHVC

SEQ ID NO: 166415 - protein, 49 aa, Glycine max
  Clone ID: PAT_MRT3847_121288C.1.pep
FVSNRDPTHNLFLLFSFLKHLINLYLSIQTLYSCLLRNFDVLEYLHDVQ

SEQ ID NO: 166416 - protein, 84 aa, Glycine max
  unsure (1)..(84): unsure at all Xaa locations
  Clone ID: PAT_MRT3847_121289C.1.pep
SSFFFFFFLDVEGALVYFLGHLHRQRTVRQTLVWLALGCSDTTNWKXQEEWDGRDTPIRARSDHIDRKNRHLGNRHLELRGEHG

SEQ ID NO: 166417 - protein, 47 aa, Glycine max
  unsure (1)..(47): unsure at all Xaa locations
  Clone ID: PAT_MRT3847_12128C.1.pep
LLLNNFPPDFNLGLHYLAISPFYKWTCNNXQLRMRSVQPLDISQLSK

SEQ ID NO: 166418 - protein, 62 aa, Glycine max
  Clone ID: PAT_MRT3847_121290C.1.pep
PAFKTKLKTSCLPFEQVIHCILRFKARTDWLIGWILASQLLRFSPILSKYYLVGFIGYIDTI

SEQ ID NO: 166419 - protein, 38 aa, Glycine max
  Clone ID: PAT_MRT3847_121291C.1.pep
MRRTLVRDGRLYDSKRRHHSDLHLPLHLVLNSDSFPPM

SEQ ID NO: 166420 - protein, 60 aa, Glycine max
  Clone ID: PAT_MRT3847_121292C.1.pep
NTLNLSWPRETCKSTELIITDIFVSFRYTDLFSNFNKVNEPIILAKLLLTTLTSVVHHVL

SEQ ID NO: 166421 - protein, 98 aa, Glycine max
  unsure (1)..(98): unsure at all Xaa locations
  Clone ID: PAT_MRT3847_121293C.1.pep
LHYATLAILRAIAASSPSKDKENVSIKSITXFSQPSVGQAALKDSANRNGRLQYSTSYCVRKDVAAQILSAADCHHYDAQTPPGPWEKETDNLIFEKT

SEQ ID NO: 166422 - protein, 179 aa, Glycine max
  Clone ID: PAT_MRT3847_121294C.1.pep
MAHQSSSSESDDRQIPSHHQPLDLNSPHPSKDIIFNNNMELQQEESNLNKHEYDEDIRDKDKDVVTTQNPSAASETTLLCCNEENMALQEEETSDVAAAKEEEEEEDSGRERLNRHRVEVAGRVWIPDIWGQEELLKDWIDCTAFDATLVPSRISTAREALVQECTRANSAGLRIENRC

SEQ ID NO: 166423 - protein, 115 aa, Glycine max
  Clone ID: PAT_MRT3847_121295C.1.pep
HSFCFSLIIIYILAQLHFLAIILLYQKGRTGWRIQELPTLSMPRNKSYILSLKSNKLTALAHRLHWENRENPGLTHLKGHAPFPRWRNCQNAQKARPYHHFHNLNGLWGERYAPS

SEQ ID NO: 166424 - protein, 68 aa, Glycine max
  unsure (1)..(68): unsure at all Xaa locations
  Clone ID: PAT_MRT3847_121296C.1.pep
EGDSAHWMDXNYLYTCLTDTGXATSGQVIPNKQTTQSEGYGFIESNMPAETERLLQTYHGAIMPNGGQ

SEQ ID NO: 166425 - protein, 91 aa, Glycine max
  unsure (1)..(91): unsure at all Xaa locations
  Clone ID: PAT_MRT3847_121297C.1.pep
WHPDKNSXKREEAEAQFREIAAAYEVLSDEDKRVRYDRGEDLXKAGMGGGGGGFNPFGGGGYTYTFEGGFPGGGFGGGFPGGGGGGFEFHF

SEQ ID NO: 166426 - protein, 123 aa, Glycine max
  unsure (1)..(123): unsure at all Xaa locations
  Clone ID: PAT_MRT3847_121298C.1.pep
LRKKDQRLTMKQKCLVVLVVVVLLACAVGWDEGIPGGWNPIRSINDAQVTEISNFAVAEYEGQSVEKLNLVKVMKGDLQVVTGLNXGLRLSARDSNSYQAIVYEKAWAREQYRNLTSFTPLHA

SEQ ID NO: 166427 - protein, 1032 aa, Glycine max
  unsure (1)..(1032): unsure at all Xaa locations
  Clone ID: PAT_MRT3847_121299C.1.pep
QTADSDHVLKRTRPFGLSDEVSNLPVNLLPVAYSGQSHGQSSYSSDDLPKTVVMTLNQGSIVKSMDFHPLQQILLLVGTNMGDVMVWDIGSRERIAQRNFKVWELGACSVALQASLSNDYSASINRVVWSPDGTLCSVAYSKHIVHIYSYHGGDDLRNHLEIEAHAGSVNDLAFSYPNKQLCVVTCGEDRVIKVWDAARXVTGAKQYTFEGHEAPVYSVCPHHKESIQFIFSTATDGXKAWLYDNMGSRVDYDAPGHSSTTMAYSADGTRLFSCGTNKEGESFLVEWNESEGAVKRTYHGLGKRSVGVVQFDTTKNRFLAAGDEFMIKFWDMDNTNMLTSVEADSGLLASPCIRFNKDGILAAVPSADGGGGTLAFAGGRTLPRSAEHRAFGASXAAAVALWGVLTNLAFPSTIVTVRTSLAASAPPVAAMVGLNNDTRNLADVKPRIVDEAVEKSRIWKLTEINEPSQCRSLKLPDSLSSMRVSRLIYTNQGVAILALAANAVHKLWKWQRNERNTTGKATASIQPQLWQPSSGILMTNASSDTNPEDAVSCFCWLSPXNDNGVKILGKKGGIQLHRTLENRTFHATCTSCYISCISSSRQPYYCYWARRTLPLADRAPPVAAMIGINNDTRNLADVKPRIVDESVEKSRIWKLTEINEPSQCRSLKLPDSLSSMRVSRLIYTNQGVAILALAANAVHKLWKWQRNERNTTGKATASIQPQLWQPSSGILMTNDISDTNPEDAVSCFALSKNDSYVMSASGGKISLFNMMTFKTMTTFMPPPPAATFLAFHPQDNNIIAIGMEDSSIQIYNVRVDEVKTKLKGHQKRITGLAFSHVLNVLVSSGADSQLCVWSTDGWEKQASKFLQMPSGRPPAPLADTRVQFHLDQTHLLAVHETQIALYEAPKLECIKQFSPREANPITHATYSCDSQSIYVSFEDGSIGILTVPALRLRCRINQSAYLHPNPSLRVHPLVIAAHPSEPNQFALGLTDGGVHVLEPLEAEGKWGTPPPNENGAGPSTASGAAVSEQPQR

SEQ ID NO: 166428 - protein, 40 aa, Glycine max
  Clone ID: PAT_MRT3847_12129C.1.pep
SQLLKEYRGQHIGLLAPLVIGRKGLYTDLAKWAKGKGYTQ

SEQ ID NO: 166429 - protein, 99 aa, Glycine max
  Clone ID: PAT_MRT3847_1212C.1.pep
MQELGFITDVHGSCNSFKINKLARFAVEEQNKRENSVLEFARYFTAFLHYIFTLKFFLNLIIFCITYFNVIFSRALFFAFFISSFILHDLSIFIMLFIS

SEQ ID NO: 166430 - protein, 57 aa, Glycine max
  Clone ID: PAT_MRT3847_121300C.1.pep
FPFHLIFLSNPVTDTNYKLRSIYIYIYMCVCIAYSLLLDFSNTSIANCLQFRIYIKK

SEQ ID NO: 166431 - protein, 82 aa, Glycine max
  Clone ID: PAT_MRT3847_121301C.1.pep
KKNFLEGNEGLVVVGTELWLGSLTGASLSICILAILKRKSHWTALHWKQAFFLESFFFLIYARFIKETSPQNFIIRSVTGIV

SEQ ID NO: 166432 - protein, 68 aa, Glycine max
  Clone ID: PAT_MRT3847_121302C.1.pep
YRPIPGRPTSALIHKTLATIDRKPRLVFTIRQHSHPSYHHVYITTIHSYLYSPHGGDTKRALDNNSFS

SEQ ID NO: 166433 - protein, 87 aa, Glycine max
  unsure (1)..(87): unsure at all Xaa locations
  Clone ID: PAT_MRT3847_121303C.1.pep
MAAQALVSAAPLTFSAEAARHSLGPRSLQSPFGLYRKASLLVKAAATPPVKQGSDRPLRFASKQSLAYXDGSLPGDYGLDPLRLSHP

SEQ ID NO: 166434 - protein, 137 aa, Glycine max
  Clone ID: PAT_MRT3847_121304C.1.pep
MTSIASPFCTCLVATWRNHLVATWRKHLPNSNLVKHCNLVPRSGKAMVVALQPTQDATIMRKPTKHRRVVVTGMSVVTPLGHDPDVFYSNLLEGVSGISKIDTFDCEEFPTRIGGEIKSFSTDGWVAPKLSKRMDKY

SEQ ID NO: 166435 - protein, 72 aa, Glycine max
  Clone ID: PAT_MRT3847_121305C.1.pep
HDTPPVCNISCDKPSTALRSAYMDVSTKLKSIVHDYTLYILDHTMLYRDFTVSIIWIDVVGVRCRRSPVSKC

SEQ ID NO: 166436 - protein, 91 aa, Glycine max
  unsure (1)..(91): unsure at all Xaa locations
  Clone ID: PAT_MRT3847_121306C.1.pep
DRRTYSRNFEEFPNXLLLXNCPAVRWIRRKIXDAVRINSGHQFLSLETVRRRALLSLFSLSKQQQRSSSALSLSITNFLSLETVKVKTRRR

SEQ ID NO: 166437 - protein, 103 aa, Glycine max
  Clone ID: PAT_MRT3847_121307C.1.pep
RVREGVGILLQIMMLVLSFVLGHVLRRKKIYVLPEASASLLIGLLVGTLANISHTQTSIRAWFNFHEEFFFLFLLPPIILYPLSFHSSSSSSLLFIPLNSLIP

SEQ ID NO: 166438 - protein, 84 aa, Glycine max
  Clone ID: PAT_MRT3847_121308C.1.pep
HASATPYYYKSPPPPEKPPPPLAVPRQRKQWEVPSPVTPVDQQISRPAPSLTPPSRPFVLQTPNTKVSPVELPPASSQNFEEGS

SEQ ID NO: 166439 - protein, 299 aa, Glycine max
  unsure (1)..(299): unsure at all Xaa locations
  Clone ID: PAT_MRT3847_121309C.1.pep
MQKGREVRDNNIFEPRRFEDFGDFGFHRSRMPSLFGGRDPFDDPFFTDPFDSLFGPSSASRAMQKTNREKGIVIEEIDSDDEGADNGPETGEKDFDKKKSKSTMEPSIEYPDDDVNERKNSDVTYKNDHFXRYMVEPLKARKFSFQTSRVTYGGILYIYYKPKDGGXNGGVWEENKEADTTTGQASHRRITRGIHDKGHSVLRKLDSDGKVDTTQTLHNLNEDELAGFEEAWKGNNMAQLPGFDVHRKEDSSSGKHNRKQVWPLQYLEPAGRSRGFPSNYEAGTDSGGRTKKVVRINIE

SEQ ID NO: 166440 - protein, 47 aa, Glycine max
  Clone ID: PAT_MRT3847_12130C.1.pep
RLVPLQSLPSPRINRRAISPHLSRGSKQWPINLPLNRSPSSRKPSAC

SEQ ID NO: 166441 - protein, 204 aa, Glycine max
  Clone ID: PAT_MRT3847_121310C.1.pep
NSINLLVDSWPVFNKERKNSDITYKNDHYMVEPLKARKFSFQTSRVTYGGIDGAYYTSTRTRRMGANGELMEENKEGDTTTGQATHRITRGIHDKGHSVLRKLDSDGKVDITQTLHNLNEDELAGFEEAWKGNNMAELPGYDVHMKEEHNNVADSSSGKQQNRNQVWPLQYLEAARISRGLPSNYDAGTNSGGRTKKVVRINIE

SEQ ID NO: 166442 - protein, 104 aa, Glycine max
  unsure (1)..(104): unsure at all Xaa locations
  Clone ID: PAT_MRT3847_121311C.1.pep
LVGVSGLPETDRIANVARQPQVKFQQYSVYVTAVDANQXPFLTDFVGLNXSASSSPLVLCGNGGPGWSSMGVITFAEHGPFRPNYNGMLGMNGYRCRRDAKVLY

SEQ ID NO: 166443 - protein, 78 aa, Glycine max
  Clone ID: PAT_MRT3847_121312C.1.pep
TTMLSSRCSTASMLLPLLFPIFLFLFIIHLEGNHLSFEFPNFSLSSIKGITTQLQPHGQYLANSAYRSLEHRIKVCTN

SEQ ID NO: 166444 - protein, 39 aa, Glycine max
  Clone ID: PAT_MRT3847_121313C.1.pep
LLKGGCFDKFLLKSKKTLKRKNRIFIPKKKLQTNKLYQS

SEQ ID NO: 166445 - protein, 55 aa, Glycine max
  Clone ID: PAT_MRT3847_121314C.1.pep
GRLCGDWKNSFSLRLMVLIHWIICIESRCYGIVRSFISAVTVDIGLSLVMCSLRG

SEQ ID NO: 166446 - protein, 82 aa, Glycine max
  Clone ID: PAT_MRT3847_121315C.1.pep
SFFRGTTGHLGQVTDACPGTSAEAWGLTLNRSRPDINTCCVSIQQMNSRMRHAQPQYALDVALIALTFGAIAISGTRIKTTD

SEQ ID NO: 166447 - protein, 88 aa, Glycine max
  Clone ID: PAT_MRT3847_121316C.1.pep
MGRKFFVGGNWKCNGTTGDVKKIGSTLNEAKVPGEEVREVVESPTLGILPFVKRLLRPEFHVSGQNCGRRKVRAYTGEDSAQTLVNLG

SEQ ID NO: 166448 - protein, 518 aa, Glycine max
  unsure (1)..(518): unsure at all Xaa locations
  Clone ID: PAT_MRT3847_121317C.1.pep
MSSSSGTSATPYPIKTIVVLVQKNRSFDHMLGWMKSLNREIDGVTGLESNQVSTFDPNSNRVYFGDQSGFEEPDPGHTVEDVYEQVFGEPWSESSAANKLSPRMKGFAQNSAKQKKGSTAETVMNGYKPDLLPVYKELVKEFAVCDRWFASVPGPTQPNRLYVHSATSHGLTTQDTKKLIGGLPQKTIFDSLDENGFSFGIYYQYPPSTLFFRNLRKLKYIDNFHQFDLKFKKQCKEGKLPNYVVIEQRYFDLLSLPANDDHPSHDVAEGQKFVKEVYEALRASPQWNEMLFVIIYDEHGGFYDHVPTPVDGVPSPDDIAGPEPFKFQFDRLGVRVPTXIISPWIEAGKVLHEPSGPFPNXQYEHSSIPATXVKKIFNLPQFLTKRDAWAGTLEDLLSLSTPRTDCPVKLPDPVKLREAASAEQQTQLSEFQEDLIYMAATLNGDHNKSIYHKLTENLTVSEAVKYCEDAFGTFLNECEKAKQSNRIDGSEIVYCARPHTAPQSKNFWHKMLSCILCN

SEQ ID NO: 166449 - protein, 302 aa, Glycine max
  Clone ID: PAT_MRT3847_121318C.1.pep
MAKYHSSGKSSSMTAIAFLFILLITYTGTTDAQSGVCYGRLGNNLPTPQEVVALYNQANIRRMRIYGPAPLFDPEELTQWSFYRALIAEFIATPVDGVPSPDDIAGPEPFKFQFDRLGVRVPTIIISPWIEAGKVLHEPSGPFPTSQYEHSSIPATVKKIFNLPQFLTKRDAWAGTLEDLLSLSTPRTDCPVKLPDPVKLREAASAEQQTQLSEFQEDLIYMAATLNGDHNKSIYHKLTENLTVSEAVKYCEDAFGTFLNECEKAKQSNRIDGSEIVYCARPHTAPQSKNFWHKMLSCILCN

SEQ ID NO: 166450 - protein, 100 aa, Glycine max
  unsure (1)..(100): unsure at all Xaa locations
  Clone ID: PAT_MRT3847_121319C.1.pep
GDLHSRCIGAFNTCVVKTYKPLAPTSTMHLEGLSLKLPLQISLLHNSPGSMACLAMAAAADNVNSVVNVIVXFKQQNLRKLMDSVNNKVGIGRQVLYLAN

SEQ ID NO: 166451 - protein, 77 aa, Glycine max
  Clone ID: PAT_MRT3847_12131C.1.pep
MSCCGGNCGCGSSCKCGNRCRGYKMYPDLTYTKSTTTKTLIMGVAPVKAQFNSAKMGVPTNNNGYKCRPNCTYNPCT

SEQ ID NO: 166452 - protein, 48 aa, Glycine max
  Clone ID: PAT_MRT3847_121320C.1.pep
LMWSAQTSISMSDLLGENRIHCSLLISTNVAVFPIDILKDGTFLDPTQ

SEQ ID NO: 166453 - protein, 59 aa, Glycine max
  unsure (1)..(59): unsure at all Xaa locations
  Clone ID: PAT_MRT3847_121321C.1.pep
METRVKHTLIVKVMVRTGSIXQVTHVIVKFLDDHNSHIMTNVKRPVIEGHILTLLHSER

SEQ ID NO: 166454 - protein, 245 aa, Glycine max
  Clone ID: PAT_MRT3847_121322C.1.pep
YGCEKTTEGDLNLMSLYKKIGKAEYKCPNWFPFEVRRLLAKILDPNPNTRISMAKVMENSWFRKGFKPKSGQVKREAVDVALVVSDQIFGLCENTSAAVVEAEQAVVKPAHFNAFNIISLSAGLDLSGLFAGNVELDDTKFTFMSSASSIMSTMEDIARILRMEIIKKDGGLLKLERSKEGRKGPLSIDAEIFEVAPSFHLVELKKSSGDTLEYQKILEDLRPALKDIVGVWQGEQHAVARLCTP

SEQ ID NO: 166455 - protein, 153 aa, Glycine max
  Clone ID: PAT_MRT3847_121323C.1.pep
KELEELRRKYDVKFQGIEVEFKQRKTTLDTNRNVVHMNKFLAAAFRSKCSTLKPSCTSGMLPDSGFAQQQLLQPSKQQSTSWRSLLAGSSSSTTTSSQHMVTPIRAGYSASGFSHNVSARSPIIDTISLPVGNPQAGVGQIRAPAPHLQPYRQ

SEQ ID NO: 166456 - protein, 66 aa, Glycine max
  Clone ID: PAT_MRT3847_121324C.1.pep
RGKLIERERERERGEYCAYNMGFLGFHAQSGHWAEKVGKKEVDLAIGKNTKFHTRQSGGSLFTGPC

SEQ ID NO: 166457 - protein, 83 aa, Glycine max
  unsure (1)..(83): unsure at all Xaa locations
  Clone ID: PAT_MRT3847_121325C.1.pep
SSEINQEQVGDVLDQPVKNMNTGEIALFSHPPXXTFGPFWSSQELASVPPDSTVEYEVELLSFVKVKESWDLDTQVKIVAPGS

SEQ ID NO: 166458 - protein, 65 aa, Glycine max
  Clone ID: PAT_MRT3847_121326C.1.pep
QSFLLISCISSQLIELFCCFLKYFPGAHILFYKILHEINAYIGHSVEMHPETLYPIAPKDLIVTY

SEQ ID NO: 166459 - protein, 162 aa, Glycine max
  Clone ID: PAT_MRT3847_121327C.1.pep
DFLSTSLLIPSSANSSLTLHKDHPTGLLSSSTLGRSAKIGMSFPTTGTELGNFGSFSYHHDGLFTNNERVPSHLSKIGKNLRNDNTPTPRNHRIRFMNGSPLKGFNRTSPSNSQENRPDKILPEVEQNLHFGHNQTTSPMYSWKATVNPVTRSTLSYPKEFA

SEQ ID NO: 166460 - protein, 56 aa, Glycine max
  Clone ID: PAT_MRT3847_121328C.1.pep
KCRTRSCHVYLTGSKVVKCLITCAGSQFLIDWNGDVSALVCIQLSDYLMCYRFKLK

SEQ ID NO: 166461 - protein, 38 aa, Glycine max
  Clone ID: PAT_MRT3847_121329C.1.pep
LTLNMHFHSHYIENQSRLKRKLLDSSSGIYYILQINEI

SEQ ID NO: 166462 - protein, 130 aa, Glycine max
  Clone ID: PAT_MRT3847_12132C.1.pep
EEHLLRAVICAGLFPGISSVVNKDKSIALKTMEDGQVLLYSSSVNDSVLLLFGGNVSRGGLDGHLKMLGGYLEFFMKPELAKTYLSLKMELEELIQKKLLDPMLETQSHSELLSAVRLVVSEDHCDGRFV

SEQ ID NO: 166463 - protein, 28 aa, Glycine max
  Clone ID: PAT_MRT3847_121330C.1.pep
CLYLFPLYLNTHIAHSNAHSISVYFSTY

SEQ ID NO: 166464 - protein, 68 aa, Glycine max
  Clone ID: PAT_MRT3847_121331C.1.pep
VFLHYNFYKGGHWNQDDIYIESNLPLAGSMSYIKGHGVKSKKRRAKKHYTATTYNKLLTYLGKLFTHE

SEQ ID NO: 166465 - protein, 54 aa, Glycine max
  Clone ID: PAT_MRT3847_121332C.1.pep
LFVPPHGFFCPGSMYLVSVFFFFFPKFFWVVYRNVVFVFSVWRVTLYILLRYGG

SEQ ID NO: 166466 - protein, 134 aa, Glycine max
  Clone ID: PAT_MRT3847_121333C.1.pep
NIVNQQILDQQLSSIFSQDDLNSYLLGYVNNNNNDGNDSNNNNINNNGYDQLNLINLLTAAASNNFSLDFNQLNSLDNVNNNNNNNNSNNNNNNNSIIINNSNGSNCIIDDNDYYTTTAYDDGISNVMDYLFLR

SEQ ID NO: 166467 - protein, 85 aa, Glycine max
  unsure (1)..(85): unsure at all Xaa locations
  Clone ID: PAT_MRT3847_121334C.1.pep
GGLKVEAFLDRAACGEYIADYVLRDQYRSDSKTVNQQAYFYAKSLKLTXKMFFVLDVDNTTLSNLQDFAYHGFGVEPHNTTAFKN

SEQ ID NO: 166468 - protein, 901 aa, Glycine max
  unsure (1)..(901): unsure at all Xaa locations
  Clone ID: PAT_MRT3847_121335C.1.pep
MEYGVRVTEGEEYFKPFNVSYDHRALILNGKRRFLISAGIHYPRATPEMWPDLIAKSKEGGADVIETYVFWNGHEPVRGQYNFEGRYDLVKFVRLAASHGLYFFLRIGPYACAEWNFGGFPVWLRDIPGIEFRTNNAPFKVKSFXEEMKRFVSKVVNLMREERLFSWQEXQCLTKLVTEFYQIENEYGNIENSYGKGGKEYMKWAAKMALSLGAGVPWVMCRQQDAPYDIIDTCNAYYCDGFKPNSHNKPTMWTENWDGWYTQWGERLPHRPVEDLAFAVARFFQRGGSFQNYYMILTSPFMLQYFGGTNFGRTAGGPLQITSYDYDAPIDEYGLLREPKWGHLKDLHAALKLCEPALVATDSPTYIKLGPKQEAHVYQANVHLEGLNLSMFESSSICSAFLANIDEWKEATVTFRGQRYTIPPWSVSVLPDCRNTVFNTAKVRAQTSVKLVESYLPTVSNIFPAQQLRHQNDFYYISKSWMTTKEPLNIWSKSSFTVEGIWEHLNVTKDQSDYLWYSTRVYVSDSDILFWEENDVHPKLTIDGVRDILRVFINGQLIGNVVGHWIKVVQTLQFLPGYNDLTLLTQTVGLQNYGAFLEKDGAGIRGKIKITGFENGDIDLSKSLWTYQVGLQGEFLKFYSEENENSEWVELTPDAIPSTFTWYKTYFDVPGGIDPVALDFKSMGKGQAWVNGQHIGRYWTRVSPKSGCQQVCDYRGAYNSDKCSTNCGKPTQTLYHVPRSWLKATNNLLVILEETGGNPFEISVKLHSSRIICAQVSESNYPPLQKLVNADLIGEEVSANNMIPELHLHCQQGHTISSVAFASFGTPGGSCQNFSRGNCHAPSSMSIVSEACQGKRSCSIKISDSAFGVDPCPGVVKTLSVEARCTSPLSDDFFQEAVSSF

SEQ ID NO: 166469 - protein, 979 aa, Glycine max
  unsure (1)..(979): unsure at all Xaa locations
  Clone ID: PAT_MRT3847_121336C.1.pep
MEYGVRVTEGEEYFKPFNVSYDHRALILNGKRRFLISAGIHYPRATPEMWPDLIAKSKEGGADVIETYVFWNGHEPVRGQYNFEGRYDLVKFVRLAASHGLYFFLRIGPYACAEWNFGGFPVWLRDIPGIEFRTNNAPFKVGKECGFWALYALKPLIGFTFHNLKHIHSPAGIENEYGNIENSYGKGGKEYMKWAAKMALSLGAGVPWVMCRQQDAPYDIIDTCNAYYCDGFKPNSHNKPTMWTENWDGWYTQWGERLPHRPVEDLAFAVARFFQRGGSFQNYYMILTSPFMLQYFGGTNFGRTAGGPLQITSYDYDAPIDEYGLLREPKWGHLKDLHAALKLCEPALVATDSPTYIKLGPKQEARVYQANVHLEGLNLSMFESSSICSAFLANIDEWKEATVTFRGQRYTIPPWSVXVFCQIAEIQFSILPRLEHKLLSNWXESYLPTVSNIFPAQQLRHQNDFYYISKSWMTTKEPLNIWSKSSFTVEGIWEHLNVTKDQSDYLWYSTRDTEGIYKHLDTAVIVTAVSRVYVSDSDILFWEENDVHPKLTIDGVRDILRVFINGQLIGNVVGHWIKVVQTLQFLPGYNDLTLLTQTVGLQVFGNCVKFHNSTVMVFDQSNLVVKLVPLDKRFISNSKGRIEERNDEQFKAVISVSIGKNDCTAGSINNYGAFLEKDGAGIRGKIKITGFENGDIDLSKSLWTYQVGLQGEFLKFYSEENENSEWVELTPDAIPSTFTWYKTYFDVPGGIDPVALDFKSMGKGQAWVNGQHIGRYWTRVSPKSGCQQVCDYRGAYNSDKCSTNCGKPTQTLYHVPRSWLKATNNLLVILEETGGNPFEISVKLHSSRIICAQVSESNYPPLQKLVNADLIGEEVSANNMIPELHLHCQQGHTISSVAFASFGTPGGSCQNFSRGNCHAPSSMSIVSEACQGKRSCSIKISDSAFGVDPCPGVVKTLSVEARCTSPLSDDFFQEAVSSF

SEQ ID NO: 166470 - protein, 115 aa, Glycine max
  unsure (1)..(115): unsure at all Xaa locations
  Clone ID: PAT_MRT3847_121337C.1.pep
WEMGGSVKNISETRLNLDLSQCCVVLFILLPIPPIPMISFGSSLSTLLSALSSCYGKHLSSSDLLFIPYTYYRSKFLWTLTIFLDLLLILTALSLXLDMLLQDNKLLFYISSFLS

SEQ ID NO: 166471 - protein, 80 aa, Glycine max
  Clone ID: PAT_MRT3847_121338C.1.pep
KTRKRKSYGSLVEYFLWSLKEIRAAHYKKAIGPGSWFGGGVSMWVIFHTLDNAETWHAKVQHGYREEWLLTSLFSKTENS

SEQ ID NO: 166472 - protein, 65 aa, Glycine max
  Clone ID: PAT_MRT3847_121339C.1.pep
DLTRAPHSTKQLLFCGSTPCGTGCSGVWKVNASTKLFQHYEAVRARSNCEPSVASLRCLIDRSFI

SEQ ID NO: 166473 - protein, 478 aa, Glycine max
  unsure (1)..(478): unsure at all Xaa locations
  Clone ID: PAT_MRT3847_12133C.1.pep
EGLFWTPWLSASLLCWARLQRWTRWSPENVGRVFGVFHETRISQDLLELKDGTGRTNLTVLGHKLAMLPVEPKLGKMLILGAIFKCLDPIMTVVAGLSVRDPFVMPSDKKDLAESAKAQLAARGYSDHLALIRAYDGWRDAEAQQAGYEYCWRNFLSSQTLRAIDSLRKQFFYLLKDICLVNNNSETYNTWSHEEHLLRAVICAGLFPGISSVVNKDKSIALKTMEDGQVLLYSSSVNGCVPRIPFPWXLVFNEKVKVNSVFLRDSTGISDSVLLLFGGNVSRGGLDGHLKMLGGYLEFFMKPELAKTYLSLKMGLEELIQKKLLDPMLETQSHSELLSAVRLLVSEDHCDGRFVFGRQVLPQSKKETNSKTGGVAEEKNYKNHLQAFLNRAGHDSPTYKTKELKNNQFRSTVIFNGLNFVGQPCSSKKLAEKSAAAEALLWLKGDSHSSDDIDHASVLLKKSNKKSRKNSFSSAKWS

SEQ ID NO: 166474 - protein, 113 aa, Glycine max
  Clone ID: PAT_MRT3847_121340C.1.pep
GKRGRGRNREKEKLKNKQGNLPLRLSLSLSLFLEFVSHFFLSPCNTATAPFSLFLAAIMFSSTRCAFLSNSGLGGCSSLCDAAQKKRSTRLRVVSMTPSRAAAAGPVIETAAL

SEQ ID NO: 166475 - protein, 69 aa, Glycine max
  Clone ID: PAT_MRT3847_121341C.1.pep
TQTTFPYTGLCANRAKPVTLSLLKDTYIKCALYFHTTSLDHHTLERSRIQLGRWSRRLFMKSRLLASDN

SEQ ID NO: 166476 - protein, 63 aa, Glycine max
  unsure (1)..(63): unsure at all Xaa locations
  Clone ID: PAT_MRT3847_121342C.1.pep
RHSWIKRYDPQGEREGFRRGYHRQGGVKTRTLMSMYATICKLFKRSCARTTHQNLDRLVPKCX

SEQ ID NO: 166477 - protein, 71 aa, Glycine max
  Clone ID: PAT_MRT3847_121343C.1.pep
GMYLVLSHTRTNLLCLVSTHLTASYSFLVSLFNLSFCLFSITYISVERASMEDMLFSVIHPTNIAKMLTND

SEQ ID NO: 166478 - protein, 25 aa, Glycine max
  Clone ID: PAT_MRT3847_121344C.1.pep
LKKTFYINLKFDTLLDTFLKRKKNL

SEQ ID NO: 166479 - protein, 63 aa, Glycine max
  Clone ID: PAT_MRT3847_121345C.1.pep
GYNARKSLSLDKIKSVSMRKVLEVCPYSFFPQKFSFFVIYLEILKIFMLRPLIFNHPCNLHTC

SEQ ID NO: 166480 - protein, 45 aa, Glycine max
  Clone ID: PAT_MRT3847_121347C.1.pep
GPIKPWPITINLHYLTSNGPEAPEKPPPLKPFKFWEEDWTDPIFI

SEQ ID NO: 166481 - protein, 80 aa, Glycine max
  Clone ID: PAT_MRT3847_121348C.1.pep
HINPPTNFKHKFTNNLQTSLKQITFSPSTLYTNYTYHLHVYFPINYPIESSLFIFFHSPTLHSHIYNNHHICLNIFYYLL

SEQ ID NO: 166482 - protein, 140 aa, Glycine max
  unsure (1)..(140): unsure at all Xaa locations
  Clone ID: PAT_MRT3847_121349C.1.pep
ELRMWVCVSEYFSLKRVTKAIIEAAGHTCQDLDLESQQRRLHDLLQRKRYLLVLDDVWDDNQENWQRLKSALACGAKGASLLVTTRLLKVVAIMGTLPPHELSVLSDNXCWELVKHQSLGPNEEEHVELEDIRKEMVKSV

SEQ ID NO: 166483 - protein, 145 aa, Glycine max
  Clone ID: PAT_MRT3847_12134C.1.pep
AFEGKIDPKYIYSMSAGLINLNMFLSNYHTSDYEYKLKDTVISSIKCLIFLLSPNELLQVNPLENYIYRESSAKRKHQQLMDTILCCLYLYCKNSFASSPKLLSQPISAPGKISQKQLCKYSLNCAPNLDRQDAITLYKNTGSDL

SEQ ID NO: 166484 - protein, 65 aa, Glycine max
  Clone ID: PAT_MRT3847_121350C.1.pep
QAIQQSLCLQSNRNARQRSHDSTCNVCYTTSAVYLTGCSSWCFTSLYYSRCVVILLYSDACLCVC

SEQ ID NO: 166485 - protein, 234 aa, Glycine max
  unsure (1)..(234): unsure at all Xaa locations
  Clone ID: PAT_MRT3847_121351C.1.pep
GSSEWFPPSRALGALSAFRQTRRAFAANKHSAPDDAYAAESIGDDPLAASSGQVIVGVESRYRVVYRLVNGIYVLGITVADHDNSVNVFECIHIVNQAVSVVVTACRGVDVTPEKLSRKYAEIYMALDIVLRGVSNIRLAAMLATMHGESIAKMVHSAIDTENKIRGAETWPSAEVHSLEHQAGIDAFTTATFELPPETLNAXDEVAXSLAPAGPEPQEEPQQKQDESQVEKDP

SEQ ID NO: 166486 - protein, 118 aa, Glycine max
  Clone ID: PAT_MRT3847_121352C.1.pep
SPVLVLNKLSPPFWFFPLNQKNFWFFFLPCPPNGGGLIFFWAPDPVWGAPISGGFFKNSGSFMPPNFFFVHGTPLFFFFWAPPNLFLCLKLLVFFLPVCPYQWGPQPRLVPIYFFSHS

SEQ ID NO: 166487 - protein, 56 aa, Glycine max
  Clone ID: PAT_MRT3847_121353C.1.pep
LYDMRGTFILYIGHSKTRTGSINYTHVTILHPHSIHDYGKIKTILLSKGKLKELIK

SEQ ID NO: 166488 - protein, 59 aa, Glycine max
  Clone ID: PAT_MRT3847_121354C.1.pep
QIQQKALSSQWSQLSLRTFFQISANLDNGRSVEVVDDSCTEYSDNQAEPSQPSPRLQGT

SEQ ID NO: 166489 - protein, 98 aa, Glycine max
  Clone ID: PAT_MRT3847_121355C.1.pep
LVPNSARERERESPNKYGFQNSDSPCCSFGNIRPALTCIPASKLCKDRSKYVFWDEYHPSDRANELIAFELIKKFGFVRVDQTKPPSPSPALAPSSDD

SEQ ID NO: 166490 - protein, 61 aa, Glycine max
  Clone ID: PAT_MRT3847_121356C.1.pep
VICLRRPLPVDQVLFHRAQMGYHIVHLARQNYGIVVHLHVDDFPRCLVSLYLRIACQHHRS

SEQ ID NO: 166491 - protein, 38 aa, Glycine max
  unsure (1)..(38): unsure at all Xaa locations
  Clone ID: PAT_MRT3847_121357C.1.pep
GDLLSLASGMLMREEYRAQNAVTAYGKFCPFXQSVWMM

SEQ ID NO: 166492 - protein, 57 aa, Glycine max
  Clone ID: PAT_MRT3847_121358C.1.pep
FFFFFFFFFFFFFFFFFFFFFFFLGGKKNLFINKKWFFPQRGFFYFGGYITFSKTYF

SEQ ID NO: 166493 - protein, 91 aa, Glycine max
  Clone ID: PAT_MRT3847_121359C.1.pep
SRPSKIHIKNNTTSIASQPHSTLNTIIINLLKYSNPRQLLLLQLIPCVHNLGERTAQQLGIVFFFFFALKFFGFCVCACVVFCFCSLSLYA

SEQ ID NO: 166494 - protein, 63 aa, Glycine max
  Clone ID: PAT_MRT3847_12135C.1.pep
WNLSYIFMRKYSLDNFTQTSLRFRETISLYLLTNCDAFLFPSHISPCVSLMKAVNIHNFFYYF

SEQ ID NO: 166495 - protein, 325 aa, Glycine max
  unsure (1)..(325): unsure at all Xaa locations
  Clone ID: PAT_MRT3847_121360C.1.pep
MAGAASALFLLDIKGRVLIWRDYRGDVTAVEAERFFTKLIEKEGDPQSQDPVVYDNGVTYLFIQHSNVFLMMATRQNCNAASLLFFLHRIVDVFKHYFEELEEESLRDNFVVVYELLDEIMDFGYPQYTEAKILSEFIKTDAYRMEVTQRPPMAVTNAVSWRSEGINYKKNEVFLDVVESVNILVNSNGQIIRSDVVGALKMRTYLSGMPECKLGLNDRVLLEAQGRTTKGKAIDLEDIKFHQCVRLARFENDRTISFIPPDGSFDLMTYRLSTTSKPLIWVEASXESIQRVRIEIMVKAMSQLNGPTSARIPPFLNDGYGASPP

SEQ ID NO: 166496 - protein, 137 aa, Glycine max
  Clone ID: PAT_MRT3847_121361C.1.pep
GVGYLKKKILNDALMGILRVRDLKSPPYVSTDPSLNVHKISDSDQFVIVGSDGLFDFFSNDEAVQLVESYILRNPFGDPAKFLIEQLVARAADFAGFSMEELMNVPDGRRRKYHDDVTVMVIILGMNQRTSKASICL

SEQ ID NO: 166497 - protein, 53 aa, Glycine max
  Clone ID: PAT_MRT3847_121362C.1.pep
KVYNTPMGHFQFKKGKKKPKALKGDKTQPGAGGPKRGQTFFGLRGFPNGALRP

SEQ ID NO: 166498 - protein, 52 aa, Glycine max
  Clone ID: PAT_MRT3847_121363C.1.pep
TSPGLLGCLSMAAAPPNVNSVFNVIATFQHQNLRVLFDFAHKKVGIAPGVCY

SEQ ID NO: 166499 - protein, 44 aa, Glycine max
  Clone ID: PAT_MRT3847_121364C.1.pep
LLVLYMNGNMWKIRVYCCQNQSRENKFVKKTKIVLFSDHLYFML

SEQ ID NO: 166500 - protein, 94 aa, Glycine max
  Clone ID: PAT_MRT3847_121365C.1.pep
EHGLAISIELSKVLLTGDRRGKERWRGCSGRAIGRGRQRKRRGCVSGRSESAGCEHGECCYELLQLTNAVAIMVTTSHKVVAVQPDRAATNSPL

SEQ ID NO: 166501 - protein, 61 aa, Glycine max
  Clone ID: PAT_MRT3847_121366C.1.pep
PRVRPRFRPLFLLNIDKNTERDLQIVVEKGSQLLNKAKAELVDFTSYADVSNQPVQDPQVH

SEQ ID NO: 166502 - protein, 150 aa, Glycine max
  unsure (1)..(150): unsure at all Xaa locations
  Clone ID: PAT_MRT3847_121367C.1.pep
MVNPNLRTDPSTIYNLIKSYALSPSTILKAHNLFQQIHRPTLPFWNIMIRGWSVSDQPNEAIRMYNLMYRQGLLGNNLTYLFLFKACARVPDVSCGSTIHARVLKLGFESHLYVSNALINMYGSCGHFGLAQEVVDEMPEKDLXLWNSVV

SEQ ID NO: 166503 - protein, 117 aa, Glycine max
  Clone ID: PAT_MRT3847_121368C.1.pep
YCLNNQTIGVQDFEVLKVVGQGAFGKVYQVRRTGTSEIYAMKVMRKDKIMQRNHAEYVKSERDILTKLDNPFVVRIRYAFQTKYRLYLVLDFVNGGHLFFHLYHQGLFREDLARFYA

SEQ ID NO: 166504 - protein, 53 aa, Glycine max
  Clone ID: PAT_MRT3847_121369C.1.pep
AAKEAKKLLHDRSCLDGPDSTFQLKVPATMPVVKELCGLDIVQTYLKWKMGNK

SEQ ID NO: 166505 - protein, 53 aa, Glycine max
  Clone ID: PAT_MRT3847_12136C.1.pep
GHLPCIQRTWTCGVGELKLCWLTAVANTHQTYVYGQNLKIMWDVLCCTLVFCV

SEQ ID NO: 166506 - protein, 42 aa, Glycine max
  Clone ID: PAT_MRT3847_121370C.1.pep
LPYDTIISNYYRDTSLQFLTRENAYNIIELPEAQFFASISFD

SEQ ID NO: 166507 - protein, 68 aa, Glycine max
  Clone ID: PAT_MRT3847_121371C.1.pep
PIRLEHLSTNQNKIPNKLLIMPYKEILTGSSTYKRGGSLTLTHKFLQSLLLLSPFKLISQSLFHTLSL

SEQ ID NO: 166508 - protein, 79 aa, Glycine max
  unsure (1)..(79): unsure at all Xaa locations
  Clone ID: PAT_MRT3847_121372C.1.pep
DSVTPTKPINLVALPVQNDGSXTGHQRYXXQKRTXXMQGPXAEDRNGKHPRGNREQQDATKTDQAPSGHATQRTSRNTH

SEQ ID NO: 166509 - protein, 85 aa, Glycine max
  unsure (1)..(85): unsure at all Xaa locations
  Clone ID: PAT_MRT3847_121373C.1.pep
LQVPLLCDNESAICMADNPVEHXXTKHIDIRGGFLRDHQQKGDIEVFYVSTENQLAHTCGGRGGGKTFCXLRRELYVLDCVTIDL

SEQ ID NO: 166510 - protein, 99 aa, Glycine max
  Clone ID: PAT_MRT3847_121374C.1.pep
VFNTRSQTLVYLQGNPLGGFPPEFSGAPTGNPFLTTQRGKAPLFFPPPPKIYLNPGGGRKVFKVLEPPRVFLFSMLFWREGDPPEKYSGGGGAFVPKKG

SEQ ID NO: 166511 - protein, 71 aa, Glycine max
  unsure (1)..(71): unsure at all Xaa locations
  Clone ID: PAT_MRT3847_121375C.1.pep
XTTRATNYYYYIKKTQTGSTDTKYLSPGVPRASNTNYNSNNFFEKGCTHEKKSKNPCTRFLEKKYITEGGT

SEQ ID NO: 166512 - protein, 168 aa, Glycine max
  unsure (1)..(168): unsure at all Xaa locations
  Clone ID: PAT_MRT3847_121376C.1.pep
PAVALRVQGDRSAFFDCAIHGYQDTLYAHAHRQFYRNCEISGTVDFIFGYGTTLIQSSKLIVRKPDPNQQNIVVADGTDQKNMPTGVVLQNCEIIPEAALVPDKMKFRSYLARPWKAYSRAILMENTIGDFIQPDGFLPWNGNLYLDTCFFAEYANTGMGADTQRXVK

SEQ ID NO: 166513 - protein, 349 aa, Glycine max
  unsure (1)..(349): unsure at all Xaa locations
  Clone ID: PAT_MRT3847_121377C.1.pep
MSTSSQHQFRYTQTPSKVLHLRNLPWECSEEELRELCRPFGKIVNTKCNVGANRNQAFVEFVDLNQAISMVSYYASSSEPAMVRGKTVYIQYSNRHEIVNNKSPGDIPGNVLLVTIEGVEAGDVSIDVIHLVFSAFGFVHKIATFEKTAGFQALIQFTDAETASSARDALDGRSIPRYLLPAHVGSCNLRISYSAHKDLNIKFQSNRSRDYTNPMLPVNYTAIEGAVQTAVGPDGKRKEPDSNVLLASIENMQYAVTVDVLHTVFSAFGTVQKIAIFEKNGQTQALIQYPGTNPVXDIITASAAREALEGHCIYDGGYCKLHLSYSRHTDLNVKAFSDKCRGYSAPGEK

SEQ ID NO: 166514 - protein, 66 aa, Glycine max
  Clone ID: PAT_MRT3847_121378C.1.pep
HFHDECHFPFRLLPILVKSCMGKRFFFFVNRLKGDVYSIRLKLGYAQVLPAETVLKFWPSQYIMAV

SEQ ID NO: 166515 - protein, 341 aa, Glycine max
  unsure (1)..(341): unsure at all Xaa locations
  Clone ID: PAT_MRT3847_121379C.1.pep
MDWVRGDALGRGSFATVSLAIPTTNPNQFPSLTAVKSAEAQTSCWLRNEKHVLDRLGSSSEXIIRCFGDDCSFENGVEYYNLFLEYAAGGSLADELKNHDGQISEHEAREYTRAIVEGLSHVHKSGFVHCDIKLQNILVFGDGGIKIADFGLAREAGQRQEKSECRGTPMFMSPEQATGGECESPADIWALGCAVVEMVTGKPAWQVENGSSMWSLLLRIGVGQEVPEIPNNLSEDGKDFIEKCFIKDPKKRWSAEMLLKHPFLLNDDTVSFKRVHESPRSHFDFPDWVSSVANSLPSSPEFQEKWGFDDEFCSPEDRLRQLLTVNRPASWSESDGWSSVR

SEQ ID NO: 166516 - protein, 90 aa, Glycine max
  Clone ID: PAT_MRT3847_12137C.1.pep
TVPHLRPPPFWLQRPPGLHVQASHHALTRFVPRYPALLHVTTLLNRQLNTPYLRGLLLLSAPTGDCSLLNHICKTCLIRRCYGPLALCAQ

SEQ ID NO: 166517 - protein, 46 aa, Glycine max
  Clone ID: PAT_MRT3847_121380C.1.pep
ASKALHVTDSGIGTLRQFFGSRTATRTNGLRTNLVVVGPLTLLLAS

SEQ ID NO: 166518 - protein, 159 aa, Glycine max
  Clone ID: PAT_MRT3847_121381C.1.pep
VEGPIPPSKVAYVAKELYDMGCFEISLGDTIGVGTPGTVVPMLLAVMAVVPIDKIAVHFHDTYGQSLPNILVSLQMGISTVDSSVAGLGGCPYAKGASGNVATEDVVYMLNGLGIKTDVDLGKLILAGEFISNHLGRPSTSKTAIALNRVTSNASKISH

SEQ ID NO: 166519 - protein, 67 aa, Glycine max
  unsure (1)..(67): unsure at all Xaa locations
  Clone ID: PAT_MRT3847_121382C.1.pep
TDGEKNIYGEIVTIEYDPYRXAYICLIHYGDGEKIYMLHPKGAIIADTIVSDTDSSIQMTKCPTLEC

SEQ ID NO: 166520 - protein, 481 aa, Glycine max
  Clone ID: PAT_MRT3847_121383C.1.pep
MPPKPLDYGSINENVKKSQYAVRGELYLRASELQKEGKKIIFTNVGNPHALGQKPLSFPRQVVALCQAPFLLDDPNVGLLFPADAIARAKHYLSLTSGGLGAYSDSRGLPGVRKEVAEFILRRDGYPTDPELIYLTDGASKGVMQILNTIIRGQDDGILVPVPQYPLYSATIALLGGTLVPYYLEETANWGLDVNELRQSVEQARFKGITVKAMVIINPGNPTGQCLSEANLREVLQFCYQENLALLGDEVYQTNIYQDERPFISSRKVLMDLGPPISKEVQLISFHSVSKGYYGECGQRGGYFEMTNIPPETVDEIYKVASISLSPNVPAQIFMGVMLHPPQPGDISYDKFVRESTGILESLRRRARLMTDGFNSCRNVVCNFTEGAMYSFPQIRLPPRALEAAKQAAKVPDVFYCLKLLEATGISTVPGSGFGQREGVFHLRTTILPDEEDMPAIMDSFKKFNDEFMEQYEDNRGYSRL

SEQ ID NO: 166521 - protein, 61 aa, Glycine max
  Clone ID: PAT_MRT3847_121384C.1.pep
TFYPRECVYQYFYMVLFIYMDIEGEGATFSGIRAGRTFRPVCYLLTIFWGALWVITYECFW

SEQ ID NO: 166522 - protein, 183 aa, Glycine max
  Clone ID: PAT_MRT3847_121385C.1.pep
SKGYYGECGQRGGYFEMTNIPPETVDEIYKVASISLSPNVPAQIFMGVMLHPPQPGDISYDKFVRERRARLMTDGFNSCRNVVCNFTEGAMYSFPQIRLPPRALEAAKQAGKVPDVFYCLKLLEATGISTVPGSGFGQREGVFHLRTTILPDEEDMPAIMDSFKKFNDEFMEQYEDNRGYSRL

SEQ ID NO: 166523 - protein, 480 aa, Glycine max
  Clone ID: PAT_MRT3847_121386C.1.pep
SPKPLDYGSINENVKKSQYAVRGELYLRASELQKEGKKIIFTNVGNPHALGQKPLSFPRQVVALCQAPFLLDDPNVGLLFPADAIARAKHYLSLTSGGLGAYSDSRGLPGVRKEVAEFILRRDGYPTDPELIYLTDGASKGVMQILNTIIRGQDDGILVPVPQYPLYSATIALLGGTLVPYYLEETANWGLDVNELRQSVEQARFKGITVKAMVIINPGNPTGQCLSEANLREVLQFCYQENLALLGDEVYQTNIYQDERPFISSRKVLMELGPPISKEVQLISFHSVSKGYYGECGQRGGYFEMTNIPPETVDEIYKVASISLSPNVPAQIFMGVMLNPPQPGDISYDKFVRESTGILESLRRRARIMTDGFNSCRNVVCNFTEGAMYSFPQIRLPPRALEAAKQAGKVPDVYYCLKLLEATGISTVPGSGFGQKEGVFHLRTTILPAEEDMPDIMDSFKKFNDEFMEQYEDDRGYSRL

SEQ ID NO: 166524 - protein, 66 aa, Glycine max
  Clone ID: PAT_MRT3847_121387C.1.pep
MADPTFIMIKPDGAQRRLIGEIISRFQKKGFYLTGLTLVSVDRPFAEKHYADLSAKPFFSGLVDYI

SEQ ID NO: 166525 - protein, 62 aa, Glycine max
  Clone ID: PAT_MRT3847_121388C.1.pep
KIKIKKKKKKKKKKKKKKKKKKKKKKKKKKKKKKKKKKKKKGGAVLKNQSLLPLACNVIVFL

SEQ ID NO: 166526 - protein, 57 aa, Glycine max
  unsure (1)..(57): unsure at all Xaa locations
  Clone ID: PAT_MRT3847_121389C.1.pep
IKAIGKLIHGKEFDLEELXGRSNQSQMRKITKISSSQLGVSSLVDPITCRKSARHAL

SEQ ID NO: 166527 - protein, 67 aa, Glycine max
  Clone ID: PAT_MRT3847_12138C.1.pep
NSVRKSPPQPWVSFMGLVWEGLSGRCERAQRVLRASSERTPSHGAGAKCADQCISGWRPLPSSCSNS

SEQ ID NO: 166528 - protein, 160 aa, Glycine max
  unsure (1)..(160): unsure at all Xaa locations
  Clone ID: PAT_MRT3847_121390C.1.pep
MLRFSFNQRFWLSSSLLLLVLLIALSSSSLTESSFNSQAEHTGRNLLQAKKSCPVNFEFLNYTIITCKCKGAQYPPSXLCGIERVVACPYANVLNDLTNDCATIMFSFINLYGKYPPGFFASMCNEGKKGITINCLPAAAASPPSVSADDTGMKTHQMRV

SEQ ID NO: 166529 - protein, 367 aa, Glycine max
  Clone ID: PAT_MRT3847_121391C.1.pep
MESASELVEFPLLLTPIDSNYRACTIPYRFPSDNPRKPTPTEISWIDLFLNSIPSFKKRAESDTSVPDAAAKAEKFAQRYADILEDLKKDPESHGGPPDCILLCRLRELVLRELGFRDIFKKVKDEENAKAISLFENVVHLNDAIEDEGKRLENLVRGIFAGNIFDLGSAQLAEVFSKDGMSFLASCQNLVPRPWVIDDLDTFKLKWSKNPWKKVIIFVDNSGADIILGIMPFARELLRRGSQVVLAANDLPSINDVTCSELVEIISKLKDEDGQLVGVSTSNLLIANSGNDLPVIDLTRVSQELAYLASDADLVILEGMGRGIETNLYAQFKCDSLKIGMVKHPEVAQFLGGRLYDCVFKYNEVSS

SEQ ID NO: 166530 - protein, 56 aa, Glycine max
  Clone ID: PAT_MRT3847_121392C.1.pep
TSSLPRRPRRSPLYSDGQAPRRLLTRKYLFASLSLSQQSLILLLFSSIEEGGALGF

SEQ ID NO: 166531 - protein, 50 aa, Glycine max
  Clone ID: PAT_MRT3847_121393C.1.pep
LSRRMRYRRLTHNGACLLATCFARVRAIPNIRLVRARNIIVRIRDGRPDA

SEQ ID NO: 166532 - protein, 43 aa, Glycine max
  unsure (1)..(43): unsure at all Xaa locations
  Clone ID: PAT_MRT3847_121394C.1.pep
RNFGTSVNAXFEFRFXWFNVSXGKLKSXNSEMXIXSHLXQNKX

SEQ ID NO: 166533 - protein, 68 aa, Glycine max
  Clone ID: PAT_MRT3847_121395C.1.pep
SVVSVLGSEATGNPFEVAATIIRPTGGCCTASTAFALAAQALFSYAMRIASTFLGPMVMRGCIRGRAW

SEQ ID NO: 166534 - protein, 90 aa, Glycine max
  Clone ID: PAT_MRT3847_121396C.1.pep
DKTAASTEFSTVMKRMAELEEKIVTINNKPTAMPPEKEQMLNATITRADDLEKQLLATKKALEDSLVKQEELSAYLDKKKKKKKKRFFFF

SEQ ID NO: 166535 - protein, 62 aa, Glycine max
  unsure (1)..(62): unsure at all Xaa locations
  Clone ID: PAT_MRT3847_121397C.1.pep
RLEENREGRAAAFGDDIAIECLATEFKREIYXGWCGAGADHYEPLIAHPSAFVSQEKVAVVL

SEQ ID NO: 166536 - protein, 69 aa, Glycine max
  Clone ID: PAT_MRT3847_121398C.1.pep
LLLCVRNIKGKKITLCAGHRLRESFSFPLLVYLLHTLLFDIRLRVRFKLLLHLSQFSVQFQVQAGEILD

SEQ ID NO: 166537 - protein, 69 aa, Glycine max
  Clone ID: PAT_MRT3847_121399C.1.pep
VINTLTVASTDSLTPHFRLQHLVGLPWSLCSAVYSRQVSFVGTCNGIDLALINLFPSLTMFRHTFRCVQ

SEQ ID NO: 166538 - protein, 71 aa, Glycine max
  Clone ID: PAT_MRT3847_12139C.1.pep
TKRLNFHQLSGNINGGKQKKNKATIKGNITGGAQNSKNPHGPQRQTNSLIQRWEALWDNKSGKQNDPPNCF

SEQ ID NO: 166539 - protein, 424 aa, Glycine max
  unsure (1)..(424): unsure at all Xaa locations
  Clone ID: PAT_MRT3847_1213C.1.pep
IRNGSCWCAYVTVQSTFLRESHSQPSGRQGDGGRGGTRSPSVLQMWREIEDEQVVRQVQGRPGXRYQRSDGLVVDLSQENLPDSSNQREEHMIEDAVLGENDSETWSQSQNEFHDEQEELNNSSRENSSDFGVVERERVRQIFREWMNSGSRDHASNHSQGNNSRGEWLGETEQERVSAIREWVQMSSQQRGVSSGESREEQSSEIGTQIECVRDGFVVNQNEGQHQTEHTRRGIRKLRGRQVFLDMLKKAEMERQREVQELLNHRVVSHFPHRNRIQALLRGRFLRNDRSIDNNRSTSIAESELGLLRQKQTVSGLREGFVFRKDNFGCSHATSNTSDTSSENDIDVNTIEDTGASSLQAVPTVHSQQSEPNNRVSDGLEISCDQICSKGTICENLDWQGSTAHVEADLESSFSTRGERGDGT

SEQ ID NO: 166540 - protein, 55 aa, Glycine max
  Clone ID: PAT_MRT3847_121400C.1.pep
DFGSRPHNPVEPVMLARILRLLACYKIPPFPLGILPHGKVKRPYGLAPVPNYLVR

SEQ ID NO: 166541 - protein, 70 aa, Glycine max
  unsure (1)..(70): unsure at all Xaa locations
  Clone ID: PAT_MRT3847_121401C.1.pep
SEWFGEVRLSVTRSQQGCFVQXRNGRNQWNKHAYIIITITSAFRENHHHHHLCSSQRRHYSWVLPLVSQL

SEQ ID NO: 166542 - protein, 83 aa, Glycine max
  Clone ID: PAT_MRT3847_121402C.1.pep
GGGGPPSPPFYGGGGVPYWRVFFPTGNFYPSDVGPAGFFFFGGRRKIWFAHNKKHWGNKSKYHPQKIKKSKKKKKKKKKKKKG

SEQ ID NO: 166543 - protein, 55 aa, Glycine max
  Clone ID: PAT_MRT3847_121403C.1.pep
MVPLLQFHNMVLLRNILLLGGSQLRHFCIRVTTAFIKSNLHKSVHFTLLLLDNLS

SEQ ID NO: 166544 - protein, 143 aa, Glycine max
  unsure (1)..(143): unsure at all Xaa locations
  Clone ID: PAT_MRT3847_121404C.1.pep
GWGFVIIVCFFFWVCXFSKKRMEGWFLLDFCAENTTKFQDNLCNKSPKAPTRTKKVFPPRYLFTPFFGRNPTPDWGAKFIKFFFKKKQKLCFHRGEQPSSWIYSPREKRDLMPSLLKKKKKGGLIFEKGPKGGINLSNSNSLG

SEQ ID NO: 166545 - protein, 56 aa, Glycine max
  unsure (1)..(56): unsure at all Xaa locations
  Clone ID: PAT_MRT3847_121405C.1.pep
NXEELXFNLXTXXSLSLNNSSXXXLXPLKLHXYLPQXLKPLSXILQPPIPYSLLFK

SEQ ID NO: 166546 - protein, 61 aa, Glycine max
  Clone ID: PAT_MRT3847_121406C.1.pep
HNTISLHLILRSIELDCTYQALCSSFVCSFGLLTSFPPHLISQVISFTQCSLLITLCVDII

SEQ ID NO: 166547 - protein, 88 aa, Glycine max
  Clone ID: PAT_MRT3847_121407C.1.pep
FLLQGNHCPGVPASGRHNRSKVQGMLARKGGILDCCLLSEPSPTPQPASWWLLSSKLSLPNLSSSEGKRESVPGFSRVGERTGKGADI

SEQ ID NO: 166548 - protein, 126 aa, Glycine max
  Clone ID: PAT_MRT3847_121408C.1.pep
AFKVSFFLALVLVSNILLLDTTAAGRSIGENSNSEEKKEPEFLFKHEGGVYIPGIGPVGFPHKFHLTPQNPLPGGNGNGGAGTATGSGSPPGSSYVPGGDDTFVPNPGYEVPIPGSGGSVPAPAAP

SEQ ID NO: 166549 - protein, 67 aa, Glycine max
  Clone ID: PAT_MRT3847_121409C.1.pep
LEPEKADEFKKGVEGATKFLLSKLKDLQFFVGESMKDDASVVFAYYKDGATNPTFLYFSHGLKEIKC

SEQ ID NO: 166550 - protein, 452 aa, Glycine max
  Clone ID: PAT_MRT3847_12140C.1.pep
MRECISIHIGQAGIQVGNACWELYCLEHGIQPDGQMPSDKTVGGGDDAFNTFFSETGAGKHVPRAVFVDLEPTVIDEVRTGAYRQLFHPEQLISGKEDAANNFARGHYTIGKEIVDLCLDRIRKLADNCTGLQGFLVFNAVGGGTGSGLGSLLLERLSVDYGKKSKLGFTVYPSPQVSTSVVEPYNSVLSTHSLLEHTDVAVLLDNEAIYDICRRSLDIERPTYTNLNRLVSQVISSLTASLRFDGALNVDVTEFQTNLVPYPRIHFMLSSYAPVISAEKAYHEQLFVAEITNSAFEPSSMMAKCDPRHGKYMACCLMYRGDVVPKDVNAAVATIKTKRTIQFVDWCPPGFKCGINYQPPTVVPGGDLAKVQRAVCMISNSPSVAEVFSRIDHKFALMYAKRAFVHWYVGEGMEKGEFSEAREALAALEKDYEEVGAESGDGDDDGEGDDDY

SEQ ID NO: 166551 - protein, 374 aa, Glycine max
  Clone ID: PAT_MRT3847_121410C.1.pep
MSAFLLLFLVFSSQLIGGLNTPLPSPIYGNLVTILSIDGGGIRGIIPAVVLDHFEKALQAWDKSASLASYFDVIAGTSTGGLMTAMLTTPHPDDPTHPLFTPSGIIEFYKKYGPSIFNETSGWDNAFPGPKYDGKFLHNKARELLQDTRLSQTLTNVVIPTFDLKKLHPVIFSNFQLKTVPSFDAKLSDICIGTSAAPTYLPPYYFENDGTEFNLVDGGRPNQRHLSHSIPLLYCFQVSTLILLSEKMAFKVSFFLALVLVSNILLLDTTAAGRSIGENSNSEEKKEPEFLFKHEGGVYIPGIGPVGFPHKFHLTPQNPLPGGNGNGGAGTATGSGSPPGSSYVPGGDDTFVPNPGYEVPIPGSGGSVPAPAAP

SEQ ID NO: 166552 - protein, 42 aa, Glycine max
  Clone ID: PAT_MRT3847_121411C.1.pep
STPPSAMPHTTPMTPVSDSIADNVRSSVFHPCNNSATRSIGD

SEQ ID NO: 166553 - protein, 90 aa, Glycine max
  Clone ID: PAT_MRT3847_121412C.1.pep
SHNSALCRIALCSLVQCSKRIIDVQVLVIIQVGYGTVTIVASLESSVSTIFRPVIVSGSNSSFSYQQDVHTALDLGQISTHCIISLRFTQ

SEQ ID NO: 166554 - protein, 52 aa, Glycine max
  Clone ID: PAT_MRT3847_121413C.1.pep
FVYQILEKCRNLVLLPNAKGETLLHIAARYGHSNIAKLLVQRVKAFPPAGRL

SEQ ID NO: 166555 - protein, 73 aa, Glycine max
  Clone ID: PAT_MRT3847_121414C.1.pep
KQVKYETGLKTQLGQFREIIKSQFYNLYQDFTTISLQLQFHVLSESFGGINIVKPCNFIIFNPDFNYHESHGV

SEQ ID NO: 166556 - protein, 188 aa, Glycine max
  unsure (1)..(188): unsure at all Xaa locations
  Clone ID: PAT_MRT3847_121415C.1.pep
MGLVCSRSRRFREADAEENAQDAEIERRIELETKAEKHIQKLLLLGAGESGKSTIFKQIKLLFQTGFDEAELKSYIPVVHANVYQTIKVCNTXRVLHDGSKELAQNDFDSSKYVISNENQDIGEKLSXIGGRLDYPRLTKELAQEIETLWEDAAIQETYARGNELQVPDCAHYFMENLERLSDANYVP

SEQ ID NO: 166557 - protein, 202 aa, Glycine max
  unsure (1)..(202): unsure at all Xaa locations
  Clone ID: PAT_MRT3847_121416C.1.pep
MLLYKYLSTTLYRTWNTIYYIFLHGEEHKLNLLLSSFASHFTLNVSAKSRGIFHSTTISLQKRPFCFFSDNMGLVCSRGRRFREADAEENAQDAEIERRIKLETKAEKHIQKLLLLGAGXSGKSTIFKQIKLLFQTGFDEAELKSYIPVIHANVYQAIKVLHDGSKELAQNDFDSSKYVISNENQDIGEKLSEIGGRLDYPR

SEQ ID NO: 166558 - protein, 178 aa, Glycine max
  Clone ID: PAT_MRT3847_121417C.1.pep
FGTRDGLCPLTPEETTLILTALGIDQNIQIYIAAGEIYGGQRRMASLQAAFPNLVRKETLLEPSDLMYFQNHSSQMAALDYLVSLESDIFIPTYDGNMAKVVEGHRRFLGFKRTILLDRKHLVHLIDLYTKGSLSWDEFSIMVKKSHANRMGNPKRRVIIPSRPKEEDYFYANPQECV

SEQ ID NO: 166559 - protein, 68 aa, Glycine max
  unsure (1)..(68): unsure at all Xaa locations
  Clone ID: PAT_MRT3847_121418C.1.pep
SCLALRVCVFIKSFVIYPPICKRLEKPATQLKIDICQRFKFLFFFPKXPFAQHQLTTLPNFSIYGVCI

SEQ ID NO: 166560 - protein, 58 aa, Glycine max
  unsure (1)..(58): unsure at all Xaa locations
  Clone ID: PAT_MRT3847_121419C.1.pep
INPATPTVXXEHTVNEENPNVGGCESCGLSKLSPLRAQAVLLCNRQDRSVGSWVLARA

SEQ ID NO: 166561 - protein, 54 aa, Glycine max
  Clone ID: PAT_MRT3847_12141C.1.pep
CLTRLLHTFHFSQLYLFPPPFFTLGFLQTKEVTTLTNKMKTHTLCILSACLIFC

SEQ ID NO: 166562 - protein, 109 aa, Glycine max
  unsure (1)..(109): unsure at all Xaa locations
  Clone ID: PAT_MRT3847_121420C.1.pep
LNESIXXXXXXXXXXXXXXXXXXXXXXXXXXXXXXFXXXXXXXXXXXXXXXXXXXXXXXXXXXXXXXXXXXEKLSMSCRFTPMLKKLFLYPQNPPRNRQWSCSYPHKHF

SEQ ID NO: 166563 - protein, 49 aa, Glycine max
  Clone ID: PAT_MRT3847_121421C.1.pep
SQRALNGTGLIPGLNPLICNQKISCFYRMKLLEAYIGWATLKSLLRNYM

SEQ ID NO: 166564 - protein, 104 aa, Glycine max
  Clone ID: PAT_MRT3847_121422C.1.pep
GPLFLPPSGLLCIRLRCVSAAVGGKVRFYLFVLLFIPLCYLFPCSFLLRFCSPTLLSVVFLNTLAVVLTGGIYISADCLSPQPLCLSSCSFRFFPCGSFILSYM

SEQ ID NO: 166565 - protein, 89 aa, Glycine max
  Clone ID: PAT_MRT3847_121423C.1.pep
KGHYQKKGQRNDLFLSKRKRGGPGKKSPTWKPLPALGQKFRTGKYKKQTYLPGKFFRTIKKTAKNIYGDRRKNPTLGGQAPLLVYPGEI

SEQ ID NO: 166566 - protein, 36 aa, Glycine max
  Clone ID: PAT_MRT3847_121424C.1.pep
LIALMLFKEVNWYENSYIRLHVKMVIIILSDVLIEY

SEQ ID NO: 166567 - protein, 105 aa, Glycine max
  Clone ID: PAT_MRT3847_121425C.1.pep
QLVVALFAASNLGDMFGSRFIFLNSFQSNLLTDGLKNKGGWGHVWNKKAGPLSCCKQGNQCAFTPVFPFAWWDGFWQFPIPREINCLASYGIKLFAFGPVDKNSL

SEQ ID NO: 166568 - protein, 44 aa, Glycine max
  Clone ID: PAT_MRT3847_121426C.1.pep
VIIKICMVVDILPGLYFLWFIVISDNNQSLHVLWHTKVCYCYCL

SEQ ID NO: 166569 - protein, 106 aa, Glycine max
  unsure (1)..(106): unsure at all Xaa locations
  Clone ID: PAT_MRT3847_121427C.1.pep
PVQLKILDALKTGLTPSLHFVSTISSSDSAHIFLNLKRKNLSCPNKLPEDECDXTCLSTKXESCIECMCLVRTKADNAPNTCLRGGSDVCLHGSHTDCGSLESYIT

SEQ ID NO: 166570 - protein, 65 aa, Glycine max
  unsure (1)..(65): unsure at all Xaa locations
  Clone ID: PAT_MRT3847_121428C.1.pep
SLFSSGIKCIPKGYLMPEKECNTIPNLFXEEKNECPXVPTIYLREIDSEDXVVLCKCHQILKKAP

SEQ ID NO: 166571 - protein, 51 aa, Glycine max
  Clone ID: PAT_MRT3847_121429C.1.pep
AFIILLSYLPHLFTSSIYMYYNISLFDIITLVKEKNVNYSWLKSNRQDCRF

SEQ ID NO: 166572 - protein, 73 aa, Glycine max
  Clone ID: PAT_MRT3847_12142C.1.pep
KWEGVYHPSGDPEDSGSASSSTHRFMLYATALSITWGDTPEYWTWVQQKEEARYASISKYILKFTKTQFTQSI

SEQ ID NO: 166573 - protein, 94 aa, Glycine max
  unsure (1)..(94): unsure at all Xaa locations
  Clone ID: PAT_MRT3847_121430C.1.pep
TEETCDHFEHLVATITHQSHLCPLPLTVQPIIWNYDHCLYLYPTPHTIXLGDRSQQKALTCPGITCFNTGSFAIDNTFVAYRPCSQEVELSALP

SEQ ID NO: 166574 - protein, 98 aa, Glycine max
  unsure (1)..(98): unsure at all Xaa locations
  Clone ID: PAT_MRT3847_121431C.1.pep
MASDLMIRIGMNGFGRIGRSSARGALHRNDLVLVAVNDPLMTTGYMSYMFKFYTFHGQWXQFVVKLKGFNTLFLGEKPVTSFXGFRHPEEIPCGEAWA

SEQ ID NO: 166575 - protein, 49 aa, Glycine max
  unsure (1)..(49): unsure at all Xaa locations
  Clone ID: PAT_MRT3847_121432C.1.pep
IIQXNTYLVEHKFLTHYQLQVTTIQPSANDQIPSCFFRGLYLKTIGMFG

SEQ ID NO: 166576 - protein, 87 aa, Glycine max
  Clone ID: PAT_MRT3847_121433C.1.pep
GFFYRQRAPAWGFLYGTADHTSTAPVPTSETNNGVDTHVRSQKNLPPKHILPYEPTKPTVRTNSTPMIRTLGQHHGKIHTPDNNRNG

SEQ ID NO: 166577 - protein, 91 aa, Glycine max
  Clone ID: PAT_MRT3847_121434C.1.pep
TVASILGFIQPRQCDMFSWQPILSYKFNCSIVDHYLLSNKFNEPNCFVNVAYNNQPEGKQQTKEINKQILHHLGDINFHGFVILKQLLLLP

SEQ ID NO: 166578 - protein, 228 aa, Glycine max
  unsure (1)..(228): unsure at all Xaa locations
  Clone ID: PAT_MRT3847_121435C.1.pep
MAPAPRVISDKASMRSWSRSMRAQGKLIGLVPTMGFLHAGHLSLVAQARQLSDVVAVSIYVNPGQFAPTEDLSTYPSDFDGDVKKLASVPGGVDVVFHPRNLYDYGKNGGGDVAEAGGMVSCVESGSGHESWVRVEKLELGLCGKSRPVFFRGVATVVTKLFNIVEPDVAVFGKKDYQQWRLIQRMVRDLDSSIKVIGAEITRXYDGLGMSSRNVHLSPEEREKALSI

SEQ ID NO: 166579 - protein, 93 aa, Glycine max
  unsure (1)..(93): unsure at all Xaa locations
  Clone ID: PAT_MRT3847_121436C.1.pep
IKPCCSSYRYDHLXSPGVLIRDTPTPEAXPSLPGLVKWNEWRDGSRKVKRWTDGVRPCQSCGSTHFHSEFAMQCSTCYSQDYDSCLSNKTKCV

SEQ ID NO: 166580 - protein, 38 aa, Glycine max
  Clone ID: PAT_MRT3847_121437C.1.pep
HAYVDMYFEFKCTINITGSGISLLSKTNNRVVHYTRIH

SEQ ID NO: 166581 - protein, 94 aa, Glycine max
  Clone ID: PAT_MRT3847_121438C.1.pep
LIYMLPKCKGKSAYNNPPPYLRIVKSLRAMGYEVYMLPKCGLTYVSVDWIEPFENFCNILMLDIVNINCCIFGFRILSWTKYITHHYYYYMVFI

SEQ ID NO: 166582 - protein, 71 aa, Glycine max
  Clone ID: PAT_MRT3847_121439C.1.pep
AKITINIFLILKIIWGVLCATTKGSWGFVYDMGIILCERRVISVIWRQQKLYGGFCDIKDNIHGEDKLYVN

SEQ ID NO: 166583 - protein, 225 aa, Glycine max
  unsure (1)..(225): unsure at all Xaa locations
  Clone ID: PAT_MRT3847_12143C.1.pep
MAETSERKKPPVIEPPDDLRCRRTGGHTWRCKHWRIHDQPYCEDHFLALRANKNNKKPKPPSTSSASASAQRDNAKRLRERDEEEATVPEKGKHKKKLKLESPKEQVELLLLDRKARSREKIKQTLMRLDECLEIDDEKPLKTTKTKSFSSSSKSNAAKPKISVSESGMCHQCQKSDRTVARCRKCRKRXCVPCIRRWYPQMTKGGIEKSCPYCQGICNCKSCLR

SEQ ID NO: 166584 - protein, 45 aa, Glycine max
  Clone ID: PAT_MRT3847_121440C.1.pep
EDRLNLAVYVLCSTLERQHLTHDLFETRRIRSFDQMRSSYIRMSQ

SEQ ID NO: 166585 - protein, 43 aa, Glycine max
  Clone ID: PAT_MRT3847_121441C.1.pep
DGSELHLRVGNSLLLQLHGSQISRKVGPTLESYLPIQTQICLM

SEQ ID NO: 166586 - protein, 37 aa, Glycine max
  Clone ID: PAT_MRT3847_121442C.1.pep
CCLSDSEILLGVNSQGQMKKGSSFIFSSFVPCCSLIF

SEQ ID NO: 166587 - protein, 419 aa, Glycine max
  Clone ID: PAT_MRT3847_121443C.1.pep
MESESKNDTQVAPALIAVHPDQSSVAVAVGPHLRVFDLLSGSAASLTDDSDGAVPFHKDNIRAIRFGAKGKLFVSAGDDKTLKVWSTQSWRCITTVSSEKRVTAVAISDDGTFVCFADKFGVVWVVDLDPPLHDDKKPAPLLSHYCSIITSLEFSPDGRYILSADRDFKIRVTNFPKKPLNGAQQIQSFCLGHTEFVSCLAFIQAQECPQGFLLSGSGDSTVRLWNIDSGALLDTCEVAIKAGLLESNGKAEERGHAVTDLCTVLDGLLVAVAIQSLQGIVLLSCNVSAQTLSVAKVVSVAGEAFVPTCLGSSPSIGKLWMVTGVSGLPGFNYPSLACVRVISSIDVEKEPVVLGDDNIPGGEKLLETLQGSASVDDNAFLAAAEAVKTAMCNLLIKKQYPSENREYRKKSRNDRKLKG

SEQ ID NO: 166588 - protein, 47 aa, Glycine max
  Clone ID: PAT_MRT3847_121444C.1.pep
TEWRVNKDDVNIPCVWLVSLRSSVVEHFTEHCTDLLVRMTYHMSENV

SEQ ID NO: 166589 - protein, 96 aa, Glycine max
  unsure (1)..(96): unsure at all Xaa locations
  Clone ID: PAT_MRT3847_121445C.1.pep
MGGPITAWPMPFDHPKNRVLVTKGLKIGVVVKAWDPRDKLVPPSNVXKPVRRLMAPKKGYXISQRAMTLKNAFSRSRDKGGFSRGEMEDFIAPPPK

SEQ ID NO: 166590 - protein, 74 aa, Glycine max
  Clone ID: PAT_MRT3847_121446C.1.pep
FQVLAGEILDECSNSTIWYRTMGGDGSIYLHCVTLFFALIRIVVQSGLIGETLGRWCKCMVRVFFLEQQVHWDN

SEQ ID NO: 166591 - protein, 80 aa, Glycine max
  Clone ID: PAT_MRT3847_121447C.1.pep
MGMSRSFLVGFIGGLVLAVLIQAQDQSGFISIDCGAPCGGSYTELTRTGINYISDANFIDTGVSRKIVSELKSVYQQQLW

SEQ ID NO: 166592 - protein, 34 aa, Glycine max
  Clone ID: PAT_MRT3847_121448C.1.pep
SLYDVGIKLFIHMIISNSNHVEHKIKLGILRFKV

SEQ ID NO: 166593 - protein, 405 aa, Glycine max
  Clone ID: PAT_MRT3847_121449C.1.pep
MLLSSFCVTWPYLWCWDSTSLHPILTILVTLISVLCLLRWFKNSSYEATLPSPLPPGPLGLPLLGYLPFLGTNPHLKFHKLAQVYGPIYKLMLGTKTFIVVSSPSLVKEIVRDQDTVFANRDPPISVLVALYGGTDIASLPLGPRWRKARKIFVSEMLSNTNISSSFSHRKIEVKKSIRDVYEKKIGCPISISELAFLTATNAIMSMIWGETLQGEEGAAIGAKFRAFVSELMVLVGKPNVSDLYPALAWLDLQGIETRTRKVSQWIDKFFDSAIEKRMNGTGEGESKSKKKDVLQYLLELTKSDSDSASMTMSEIKAILIVCVLRRPLSTAPTFQSGLASLLPHSGALMGVPALSVVALRSGDRSCLSCQPVAFLHFPAFFDQSRRPRPLPRLLLWGIWISSLS

SEQ ID NO: 166594 - protein, 152 aa, Glycine max
  unsure (1)..(152): unsure at all Xaa locations
  Clone ID: PAT_MRT3847_12144C.1.pep
EFIKQAELYISAEADSILKLLPNNNSSIEHPLAKTEIIGPIHAIFLRLLRYGLTTSEGCPRSANLLIMLDTTEIIDWFSGIXASWLKWHENCANFDEIKLLISNHVRKSCIRPLAAKVRVPETEIEKPFGVELSRIPSTQDXEKEMINEALD

SEQ ID NO: 166595 - protein, 45 aa, Glycine max
  Clone ID: PAT_MRT3847_121450C.1.pep
YPANLPHKSSISSSHHQCLQSFSCRFNKHVLEHCIGSGYDMIPYL

SEQ ID NO: 166596 - protein, 64 aa, Glycine max
  unsure (1)..(64): unsure at all Xaa locations
  Clone ID: PAT_MRT3847_121451C.1.pep
VSRSIVKGTWXHELSFLTISTGRILEKKLIRFYVINNPNQVTGFVLGAGAAYLWEGVYXHPFIF

SEQ ID NO: 166597 - protein, 31 aa, Glycine max
  Clone ID: PAT_MRT3847_121452C.1.pep
WHKCEDLVLNFIFKSEIYNSRFLKSKIDILF

SEQ ID NO: 166598 - protein, 92 aa, Glycine max
  Clone ID: PAT_MRT3847_121453C.1.pep
IWHLSPPTREPAKPHPTADGITQVMSMDEGSLVQALAVYQASLDDKFDVDPSDDASDRGAKPIEELIKLQLEHKPDNVRSSVGTSPAMSTNA

SEQ ID NO: 166599 - protein, 103 aa, Glycine max
  unsure (1)..(103): unsure at all Xaa locations
  Clone ID: PAT_MRT3847_121454C.1.pep
LYGRPRVRQCCGRVSNEAAQNAAAALKGADHRRATKVSARLVAQQKTPNPTILPTTTIGTFPQTVELRRERREDKVDKISXEEYAKTYKEEGAKVAELQEELD

SEQ ID NO: 166600 - protein, 181 aa, Glycine max
  Clone ID: PAT_MRT3847_121455C.1.pep
AGLYGTAPTETEQKPSPVNNTIPLQKELESDTTYDDTDTFKMFMGKSLSKPVAVILMRMFDELGLNTDEFDERAVEMLATFPFEQANFILKELKDSQLFGVQNKPQYLMSVMRNFRERLRTMGVQQAMELPLIPGPDPESIKTLITKSGYQLEVTVGQRKYHSPPGYEGPDPNQTDGGCIY

SEQ ID NO: 166601 - protein, 182 aa, Glycine max
  Clone ID: PAT_MRT3847_121456C.1.pep
MDSLSLHSNLHSVNNKRRQITHQNSFALTPSWTSLTEQRLYSSKLLHSLRRNSNPTAALEVRASADRVLAATAKGRTRWSRAILSNPICRWKQRHHKKVKKYSANKFMKKTTPEIRRSLPAVQKKARVLGKLIPGCRKVSFPKLLEEAGDYISALEMQVRAMKALADLLATGAPPPAPIGLS

SEQ ID NO: 166602 - protein, 50 aa, Glycine max
  unsure (1)..(50): unsure at all Xaa locations
  Clone ID: PAT_MRT3847_121457C.1.pep
LHLTGMXKIKWYXXXXKHXALXRRXXVRXVXLXAXLCXLXLFVXXXFKXX

SEQ ID NO: 166603 - protein, 99 aa, Glycine max
  Clone ID: PAT_MRT3847_121458C.1.pep
FRGTIYYTSRNATCSIWGFMITILYRLLHGKHRIWLYLRAPGLTFPAFRGYLLVYYGCKLFCGFFLWVCLLVYSGFVIGFVRLPSHSPPPPPLPPPPPQ

SEQ ID NO: 166604 - protein, 79 aa, Glycine max
  unsure (1)..(79): unsure at all Xaa locations
  Clone ID: PAT_MRT3847_121459C.1.pep
WIRESSLXXCXXXASEDXPFLXSXPQQRXHXLQFPXLKPRGRFSGLMSGWGSPSXXXIHIXCXTXYSNXSVAHITELLL

SEQ ID NO: 166605 - protein, 61 aa, Glycine max
  Clone ID: PAT_MRT3847_12145C.1.pep
NSLLLGPKTGEVLFADLTKSHIVTSSFRFGLVSNLGSCFCLSLKITFAPIFPTSVSNNITI

SEQ ID NO: 166606 - protein, 253 aa, Glycine max
  Clone ID: PAT_MRT3847_121460C.1.pep
MGCCVSSTNRSHSSPSSKPFDRPRSTAKGSENRAPPPEEETVKEVLSETPKWKPKFEAEKPTESDAENEKEKLFVKPDEISEVSEVCSVSESLSTLAEEEARQRVNRSPAKVRKARSFSGEFGCRREMTARKSPARRPEQSPGRRNIGSVRVVQMANGGTGSQPRRRDSGEISGRRSRSPGTRTDSMSTRSILGQSPSKRRTHTNQSPARVRTGTAESGGRKMENSSMEGKWPSSAIESLENPLVSLECFIFL

SEQ ID NO: 166607 - protein, 93 aa, Glycine max
  Clone ID: PAT_MRT3847_121461C.1.pep
MANILVCPSFLLRCRKRCYVVVAESLRKQIEGTTMKSKSASDNVINIKEEKFWMRDPKSGNWIPENHFGQVDAAELREKFLPTRHTNSSNQLK

SEQ ID NO: 166608 - protein, 329 aa, Glycine max
  Clone ID: PAT_MRT3847_121462C.1.pep
YVPAAIFCATNIGKPHIISIVWVVNPPDESLGFILADNGYDVWLANVRGTKYSRGHISLHPNDMAYWDWSWDELARYDLPAFVQYVYNQTGQRMHYAGHSLGTLMVLADLSRGKLLDMLRSAALLCPIAHLNHVTSPVARTAAQSFIADPLYWLGLREFIPNGDAASKLVGGICHILNLINCSNNLLTLITGPNCCLNSSAFNAYLDHGLPPTATKNLIHLCQMIRTAKIAKYDYGDQRQNMQHYGQRVPPLYDMTKISNEFPLFLTYGRQDALSNVKDVQLLLNDLRDHDGNKLVVLFTEDYSHYDFIMGVNVNQIIYDPMIVFFEVN

SEQ ID NO: 166609 - protein, 137 aa, Glycine max
  unsure (1)..(137): unsure at all Xaa locations
  Clone ID: PAT_MRT3847_121463C.1.pep
MIARQLFYYREGRLYQGEYALEAIGNAGTGLGILSXDGVVQVGEKTGTYKLLETSSXPEKMYKIDEHVACAVAGMYVXDANMLTHTARVQVHGYAYAYQHAMPAEQMDQSLCDTRQGYTQSAGRRPFGVLLLFAGCD

SEQ ID NO: 166610 - protein, 63 aa, Glycine max
  Clone ID: PAT_MRT3847_121464C.1.pep
PRGRPTTPGHTALGASSSASSPLPLPVTVWNNNVMHILVHLANVLITGRHASINQKATKPHSQ

SEQ ID NO: 166611 - protein, 84 aa, Glycine max
  Clone ID: PAT_MRT3847_121465C.1.pep
SDTVLPWKVKSGKASPDDIVHVHNNVVTEVHNDNDDDNENAHSTVNSVSEIATSETDAVEGQRHVHVNHVQYEVRVAPKPQFRN

SEQ ID NO: 166612 - protein, 85 aa, Glycine max
  Clone ID: PAT_MRT3847_121466C.1.pep
FLSLSMSFRNNDLISTNNNHSLNMGDEPFGLEFANNFKKGSLSVSACSNYTSSYTDFTPGSVPTSQPMNFHHFVFSEIVPAPCTT

SEQ ID NO: 166613 - protein, 120 aa, Glycine max
  unsure (1)..(120): unsure at all Xaa locations
  Clone ID: PAT_MRT3847_121467C.1.pep
YSSRKKIHEDKDAEPTEFEESGGQALFDLENTNHELNSDLKDLYINSAAQDDVSENRXGDDIHDPYRLRKGFRNIHGRLVRELDKKLSGEDVILVATRRSLRPPIKGSADQRPRMRTLTA

SEQ ID NO: 166614 - protein, 38 aa, Glycine max
  Clone ID: PAT_MRT3847_121468C.1.pep
DILLGISKTVESAGNTLMPAFSVPQATARSSENAESSA

SEQ ID NO: 166615 - protein, 40 aa, Glycine max
  Clone ID: PAT_MRT3847_121469C.1.pep
VSFLRLVVIFQRRLGIQYCFLSIAGQLQTTITNNKFLSAL

SEQ ID NO: 166616 - protein, 504 aa, Glycine max
  Clone ID: PAT_MRT3847_12146C.1.pep
MTIDLDSIARRVEVDNRIPIRYYYRIADNLLKQATIYREEHNVVDLYIILLRFLSLESETLSYHRDYQASLANERAANKERSRAVLDELESLKPEFKLRVEKMNDSHVKALLPEENGFNKALQSSVNSSLQWPAVNKQPAAGFSSQSSWNYDNMLSLDSWPIDKQFQKLSESLPPPNKETLSRHSFLGPNGLRGQWLGPSAEIKVQYPSSGELTQAKDSSPNQAGLYDLVAIKDGDQGPVTSTMDSVLSLDDGRWLRPAVESCSPVVTESREDPLQLLNIKQPLPPPILAQVYPERVPIPPSKVADPRPGPAKSSHDSGLGATTYQHLHIPVKMMEEFLRLASENTRKNLETCPVLAGSLKKRVFHITTLIIPKQESTSDSCQTLNEEEIFEVQDSLSLFPLGWIHTHPSQTCFMSSVDLHTHYSYQIMLPEAIAIVMAPTDTTSPHGIFHLSDPGGVSVIRNCQQRGFHPHEEPEDGTPIYEHCSHVYMNANLKFDVVDLRER

SEQ ID NO: 166617 - protein, 87 aa, Glycine max
  Clone ID: PAT_MRT3847_121470C.1.pep
RGGNLEEPKPWRFADPSSLNDFDTYRASERFPRPSLSDLPKIAQETMSAYETVKKGVKKLMRKYTVKACGYCTEVHVGPWGHNAKLC

SEQ ID NO: 166618 - protein, 58 aa, Glycine max
  unsure (1)..(58): unsure at all Xaa locations
  Clone ID: PAT_MRT3847_121471C.1.pep
MDPYMNRASSACNYHXWTTYYGAPIWNNNXSITDEYRGAIVLDDYHLEHKLANSDRER

SEQ ID NO: 166619 - protein, 159 aa, Glycine max
  Clone ID: PAT_MRT3847_121472C.1.pep
SYYRRALAREKLDKIGSAFNDAKEAIRLRPGDTVLVELCSRLLKINAERLKQVESVENRAEEMLKIAFGEQQSDKEKHIKAMNNLLVLCRDSNSGAMRVWQNGQIAAQLLGVIKGNASDEEALCARRILDELAKSRERSVQMMEWLSVQTLDRLPSLRP

SEQ ID NO: 166620 - protein, 66 aa, Glycine max
  Clone ID: PAT_MRT3847_121473C.1.pep
GSRSLKLRFLAYSMAADRYGPDRDHTDTNGNTRSCYQKQFPAGCEAPCAAILESPEPRSRTRDRIA

SEQ ID NO: 166621 - protein, 40 aa, Glycine max
  Clone ID: PAT_MRT3847_121474C.1.pep
ALPLMIRDPNLVSLRQCRVSAQGFETPDFLSMSNLRFIAP

SEQ ID NO: 166622 - protein, 80 aa, Glycine max
  Clone ID: PAT_MRT3847_121475C.1.pep
IMIYFPSNLHFTHFICFHAYTLFWAHICFHIHLVPFTIAFNLQFQSFTFFSLYFSIAFKFIKFKTQHCYSLNKKNSHPVF

SEQ ID NO: 166623 - protein, 230 aa, Glycine max
  unsure (1)..(230): unsure at all Xaa locations
  Clone ID: PAT_MRT3847_121476C.1.pep
MKMKVLVMLDATILVAWLCHAYDMCHLRMNTGYGARTPEAKCAWWRLAGEAHSMFGFETIPEECVEXNIGIHAVAEQYRSXSKTVYANTAYFXATYLVVHPKDAFGFSIDGTGLCNISYYKKHGCGVEKFNYALYDEWGNAGSATGLSVTLNNYIKVVTIGFKIILLSGGTLGMQAVSEANLEKAGYHTWEKLIXMDPHDACTPNAVSYKTAAGEKLIRQGYNIGGIIGD

SEQ ID NO: 166624 - protein, 46 aa, Glycine max
  unsure (1)..(46): unsure at all Xaa locations
  Clone ID: PAT_MRT3847_121477C.1.pep
XETYCERRLINLTHTKCLLIPMKKCSNGGTRKAYILTQYISLKVLG

SEQ ID NO: 166625 - protein, 162 aa, Glycine max
  unsure (1)..(162): unsure at all Xaa locations
  Clone ID: PAT_MRT3847_121478C.1.pep
MMQISSTIPAPNLHMFQTRRTSFRCRASPLNPTTSSSPQSIKSVSDSTRLHLSNLDNLLQKQSPTTQPKQQEELTLAATIQNNKTTTTEKKGKNVLEGLNLARLWPDMXATEEMSPRHLNRLQRXLFKTDEYSPRNTLRSLWREYHGSHDWKSMLDPLDENL

SEQ ID NO: 166626 - protein, 45 aa, Glycine max
  Clone ID: PAT_MRT3847_121479C.1.pep
NEGSHYLPCLKVWVFVKGKKVGYRSLRWGKKSNGGLKKKKKRQPV

SEQ ID NO: 166627 - protein, 88 aa, Glycine max
  Clone ID: PAT_MRT3847_12147C.1.pep
STYSAITSPECVSRQCTCSSVIGSSSLSRGSYSRHEIALVVFSVVSFGPSVRSSVVGTLQGKWIPRLRIGHWCPLQWSNHSFLVLQYA

SEQ ID NO: 166628 - protein, 50 aa, Glycine max
  Clone ID: PAT_MRT3847_121480C.1.pep
KLIQTLTQEHKQIVITMPLIRIQILCSQSFNASTQSINGHHPMKITRIIF

SEQ ID NO: 166629 - protein, 47 aa, Glycine max
  unsure (1)..(47): unsure at all Xaa locations
  Clone ID: PAT_MRT3847_121481C.1.pep
VAFTDKHDALESTSFXEFKANMPQYNDVIYTSIVKKEPAAKDLFLIC

SEQ ID NO: 166630 - protein, 53 aa, Glycine max
  Clone ID: PAT_MRT3847_121482C.1.pep
GKLLLADITNNGDESMMATAGTMMPKIKLIGITRQRLEKENDNLYAQKSLPVV

SEQ ID NO: 166631 - protein, 73 aa, Glycine max
  Clone ID: PAT_MRT3847_121483C.1.pep
DSISRNLDTLIEHIVTKWTLKITFTFAHRLQQLSYPILLYILRIIYRIETVNDINTTTQKPQNILNHLQINLT

SEQ ID NO: 166632 - protein, 86 aa, Glycine max
  unsure (1)..(86): unsure at all Xaa locations
  Clone ID: PAT_MRT3847_121484C.1.pep
LIACXXGSPLLLGVKELAENKEHGSAFEDNKFLSKDGKPXXLXLSSDXHAVVEHTKKVLVIEDXEVXXLKDGGVXIWXFEDXRELF

SEQ ID NO: 166633 - protein, 87 aa, Glycine max
  Clone ID: PAT_MRT3847_121485C.1.pep
QQQQQQQQQQQQFQQQQQQQQPQQQLFLFTNDRTPASYSTNWADLHPDSQKILLQIEERILEFRDESQRLDQCSRLYDSSVSNDGFE

SEQ ID NO: 166634 - protein, 125 aa, Glycine max
  Clone ID: PAT_MRT3847_121486C.1.pep
FGNPRRPTRPGLVLSVWGFFSFMVTGSIAALNSGIGLGSVLLALGVSSLRAYKRGQPSSLMLKGQTAIASILFLREIRLLAAEGSPLVTYFTSLISGAVVAFYVYRLVLEHKQKNASNLENGAEN

SEQ ID NO: 166635 - protein, 71 aa, Glycine max
  Clone ID: PAT_MRT3847_121487C.1.pep
MAASKGPNRKVQARAFMKEKIVTSLTASAFTNLMIAPDEAEADISPYLKNFLISISAGGVDVASIIETVVR

SEQ ID NO: 166636 - protein, 69 aa, Glycine max
  unsure (1)..(69): unsure at all Xaa locations
  Clone ID: PAT_MRT3847_121488C.1.pep
YQPWMWNVRNHEVKPLPEGXLHPSKIYLYRFTTCYSPLKNTSLLXYASLRTISHIIVLSSYSPLSKITA

SEQ ID NO: 166637 - protein, 64 aa, Glycine max
  Clone ID: PAT_MRT3847_121489C.1.pep
MEGIQESIFLPVTRADLKVLRSLFNCIMPYLLGWNAFGNSIKPEVYSQVNSTTPRYGAANEWNR

SEQ ID NO: 166638 - protein, 91 aa, Glycine max
  unsure (1)..(91): unsure at all Xaa locations
  Clone ID: PAT_MRT3847_12148C.1.pep
LVLNLSXCANHSVXVGYCIXXXREXWPYLFEFRXNLLTTLDLIPVXVVXMKFTNWXLFLKCSPILLXDXILLIRSLQISHXXMGNYXLCSQ

SEQ ID NO: 166639 - protein, 80 aa, Glycine max
  Clone ID: PAT_MRT3847_121490C.1.pep
NKNLHPILILTQPIPSYTIIYFLKNTFIYTTLITSSNLYEISKTPFKLFHYYHFNQFHINLISHYTFYIILYYPFQPSSL

SEQ ID NO: 166640 - protein, 106 aa, Glycine max
  Clone ID: PAT_MRT3847_121491C.1.pep
VFRMNIGSSGQTFSQGNFRKKLFWRVTGERFFRMTICSSRNFPKLFLQEDLEEVFWEVSERSFLARRSKRFKSAFPPFFMTTSSTLRFFYPRLNATRPLYIKGDES

SEQ ID NO: 166641 - protein, 69 aa, Glycine max
  Clone ID: PAT_MRT3847_121492C.1.pep
KKTALIITFRKKRPRLLSFLLINLTRHRWQAPFEFTCSYAVHGKNSPYPDINGSKKPKQPRTFFRTRGR

SEQ ID NO: 166642 - protein, 160 aa, Glycine max
  unsure (1)..(160): unsure at all Xaa locations
  Clone ID: PAT_MRT3847_121493C.1.pep
CHVCSKSFNRYNNLQMHMWGHGSQYRKGPDSLKGTQPSAMLRLPCFCCAPGCKHNIDHPRARPLKDFXYTLQTHYKRKHGIKPYMCRKCDKTFAVKGDWRTHEKNCGKIWYCLCGSDFKHKRSLKDHIKAFGHGHGAVDIDCMQEDEAASEIEHDGDISM

SEQ ID NO: 166643 - protein, 57 aa, Glycine max
  Clone ID: PAT_MRT3847_121494C.1.pep
MASSSSYNSPCAACKFLRRKCLPGCIFAPYFPPEEPQKFANVHKIFGASNVTKLLNE

SEQ ID NO: 166644 - protein, 121 aa, Glycine max
  Clone ID: PAT_MRT3847_121495C.1.pep
FGNRSITCCCCCRGIHATPPSPMGKSSPPNTNHETLILPSNGAVNAHAAHAAPVRNSAAPIQNPRKRNEEIEGPDWIGTRRRLSQFEERSSAIEGREAQRETYGFERKSVCVPLERLSFVD

SEQ ID NO: 166645 - protein, 52 aa, Glycine max
  Clone ID: PAT_MRT3847_121496C.1.pep
HKSGVTVSTGLAQLACLYPIRAESMWYLDRWATATQHHTNQHSGPMSSTHFD

SEQ ID NO: 166646 - protein, 48 aa, Glycine max
  Clone ID: PAT_MRT3847_121497C.1.pep
KKKKKKKKKKKKKKKKNNKNKKNKKIKKINKKKKYKGGPPTKGPGTPG

SEQ ID NO: 166647 - protein, 103 aa, Glycine max
  Clone ID: PAT_MRT3847_121498C.1.pep
MEQKKFVALLMVVVVMASSMWKGSKGLSLCNMDEGGLEACKPSVTQPNPVDPSPDCCKALAGADLKCLCSYKNSSELPFLGIDRTLATSLPAKCNLTPPDNCS

SEQ ID NO: 166648 - protein, 277 aa, Glycine max
  Clone ID: PAT_MRT3847_121499C.1.pep
MATGLLKRAAQRLPSSPGFKLALLRAHASEAQAQQVEPKARGTPTLKTFQIYRWSPENPSKPELKDYQINLKECGPMVLDALIKIKNEIDPSLTFRRSCREGICGSCAMNIDGCNGLACLTKIPSEGAATTITPLPHMFVIKDLVVDMTNFYNQYKSIEPWLKRKNPPEPGKEILQSKKEREKLDGMYECILCACCSTSCPSYWWNPESYLGPAALLHANRWISDSRDEYTKERLDAINDEFKLYRCHTILNCARACPKGLNPGKQISHIKSLQPKA

SEQ ID NO: 166649 - protein, 106 aa, Glycine max
  Clone ID: PAT_MRT3847_12149C.1.pep
VGRTVGNRKHLETAQRWMVSKEIKRSMIMKFLFCHHHHFQQVRSNVPGHSNLKLELALDFYATLDFGLTCYSGAPPFTYLRYLIFHKCFFIPVKKKNGIHLPMLKK

SEQ ID NO: 166650 - protein, 130 aa, Glycine max
  unsure (1)..(130): unsure at all Xaa locations
  Clone ID: PAT_MRT3847_1214C.1.pep
GCTSKQVVLTPGRVQLLLNIETTXFRAYGGRNAKRISKMDRGCIVGADLSELNLVIGQTGARDRPCLTDXETPRMRESKRASKATKLINLHTEDDSRKSADTYPRTYATTAGEIASSAPGIKRLETALTL

SEQ ID NO: 166651 - protein, 95 aa, Glycine max
  unsure (1)..(95): unsure at all Xaa locations
  Clone ID: PAT_MRT3847_121500C.1.pep
MMMNSAMCAVVGVALFLLAEVGPMVEAVTCTPTKLSAGLPAFTSGAXPSNACCTNLNQLTPCLCGYLTYAILKQYVYSPNARKTVASCGIPFPTC

SEQ ID NO: 166652 - protein, 117 aa, Glycine max
  Clone ID: PAT_MRT3847_121501C.1.pep
MKKQGIKCHMKAEIEKILPAESNSAHCGSVQLKGAPSLPANLIIMGTGVGPSTSFLKDSGFELEKDGGIAVDEYLRVKGHQNIYAIGDIAHYPQYPAKFQRRVEHWNVAGNHGREVA

SEQ ID NO: 166653 - protein, 52 aa, Glycine max
  Clone ID: PAT_MRT3847_121502C.1.pep
SRVFFFFFFQFKEGNKKSIMHINSFRCSTWMASSKERFPFRKSKLNKFVLVL

SEQ ID NO: 166654 - protein, 69 aa, Glycine max
  Clone ID: PAT_MRT3847_121503C.1.pep
NKNPMVLAPQGVAPRGRIKYGSKNMLGDTVTMLIKGDPKSSPQGQFIRENHLEVLVGRSFKKGCEMSYL

SEQ ID NO: 166655 - protein, 57 aa, Glycine max
  unsure (1)..(57): unsure at all Xaa locations
  Clone ID: PAT_MRT3847_121504C.1.pep
GFVPVLSKSXXLPERLTWWARPRSTREVRFRCPPFPFPVVARESAKKFFCQSLFPRA

SEQ ID NO: 166656 - protein, 348 aa, Glycine max
  Clone ID: PAT_MRT3847_121505C.1.pep
MEKAHMQVPRVKLGNQGLEVSRLGFGCGGLSGIYNAPLSHEEGCSIIKEVFNKGVTFFDTSDLYGQNHDNEIMVGKALKQLPREKVQLATKFGVTVSGPDGLDFGVKGTPEYVRQCCEASLKRLDVDHIDLYYQHRVDTSVPIEDTMGELKQLVNEGKIKYIGLSEANADTIRRAHAVHPITALQMEYSLWTRDIEEEIIPLCRQLGIGIVAYSPLGRGFFAGKAVVETLPSQSLLSMHPRFTGENLEKNKLFYKRLDDLASKHACTPSQLALAWLLHQGNDIIPIPGTTKLKNFENNIGSLTVKLTEEDLRELSEAVPVYEVAGTREYGMLSNYTWKFATTPPKQLS

SEQ ID NO: 166657 - protein, 61 aa, Glycine max
  Clone ID: PAT_MRT3847_121506C.1.pep
GTHRPLMGYLPGDDLKSDQLASHQGLEAQPEDQVQHSRCIDTSLNAANSDLGDSGDQALEA

SEQ ID NO: 166658 - protein, 188 aa, Glycine max
  Clone ID: PAT_MRT3847_121507C.1.pep
SHNASQSNHVSDASGIEELEIAVADYNWSLRHRQITSLNLKYLASWNMALRVDVEGNGTDSRGSRCYFPNFEEHFDDVIYPKGDPDAVSLSKRDVDLLQPDTFINDTIIDFYIQYLKNQIPDKEKPRFHFFNSFFFRKLADMDKNPSSASDGKAAFLRVRKWTRKVNLFGKDYIFIPVNLIFTEVNSH

SEQ ID NO: 166659 - protein, 35 aa, Glycine max
  Clone ID: PAT_MRT3847_121508C.1.pep
SMSSRTRDISAGCQKTGYPTEKSPANGTTYDKSCR

SEQ ID NO: 166660 - protein, 76 aa, Glycine max
  Clone ID: PAT_MRT3847_121509C.1.pep
SSGSSIFRPLFQKRYFATSLPPMIRKDNFSKSQQNPEKGTGINSKLSPRTLLLQRKSMKPNSHSLLEKIFKNNSES

SEQ ID NO: 166661 - protein, 61 aa, Glycine max
  Clone ID: PAT_MRT3847_12150C.1.pep
LIKPFSCTWLIGTDTPRCHKCIFSVYAKPASKSGFFKCLSFELPRRKFCVIWRRQKKWDVS

SEQ ID NO: 166662 - protein, 139 aa, Glycine max
  Clone ID: PAT_MRT3847_121510C.1.pep
GGAPFVTCHKCLNLLQLPADFLLFERACHQLICGECSEVLKFSMHGSHIDFFSPNNAIGPPSSDLNGRSEVISSRNLPSASHANYYHYSATEAISYYDDYGLSISKSYSSQGEPSLAHSHHLHSGEYANPSVSHGTFEP

SEQ ID NO: 166663 - protein, 114 aa, Glycine max
  Clone ID: PAT_MRT3847_121511C.1.pep
KGWPKGFVIETNKKSKRAHSFGGRPPAARDKRRARDTRRASMTVAATGRRAANIIKQMNDSRRRWCTLLTSSTVSGMQMRYSLIRTIALVVISERLPGRLGSRRTVRGALATAA

SEQ ID NO: 166664 - protein, 68 aa, Glycine max
  Clone ID: PAT_MRT3847_121512C.1.pep
LISFFTWGLFWGKPLYRAPSSAKSHKMTTNFFLKNINLLPFKGPWDLFCKAQKEIEQTMGTLASWRYL

SEQ ID NO: 166665 - protein, 64 aa, Glycine max
  Clone ID: PAT_MRT3847_121513C.1.pep
PRKGESFRMLDYFHQWGRENPFGEKVFWAKGGMVLTPGLVFISKRKTHNPPPKLAVIKPPPRKL

SEQ ID NO: 166666 - protein, 61 aa, Glycine max
  Clone ID: PAT_MRT3847_121514C.1.pep
IYCGHVLKHLSVVLLSLPVYLSLFMFYCVTGKAFQGFKAYNSSSTVFLKSWCMALFSSLTL

SEQ ID NO: 166667 - protein, 64 aa, Glycine max
  Clone ID: PAT_MRT3847_121515C.1.pep
KAHAKCGGFHRQQRHSRLYKDSLIHMDLIQRLSLFPNPMRLNKTSIDSILFSKIHIYISIYLQR

SEQ ID NO: 166668 - protein, 71 aa, Glycine max
  Clone ID: PAT_MRT3847_121516C.1.pep
KRPLRCLFFNKKGRVAPEKCKNFFYFYISQMGFFPYNKKIFFVHKKPRPPFFFPPQRCIPALFLPPFFFFF

SEQ ID NO: 166669 - protein, 87 aa, Glycine max
  unsure (1)..(87): unsure at all Xaa locations
  Clone ID: PAT_MRT3847_121517C.1.pep
LTVTRTKAKNMNERHLRFRSYLCREDKAYSTREEDEETKLYKGLQVNKAAGHMQIVPLLSSEKIQXKKKKLDSYDEIATTSHGCSPQ

SEQ ID NO: 166670 - protein, 119 aa, Glycine max
  Clone ID: PAT_MRT3847_121518C.1.pep
SQKGRLGIKKKKKKKKKKKKKKKKKTLLLHDALSSFPKEGSIPIATSITGFETHVEDTGLEVAVDCGLRAKAEFCIRLYNRSLPTRNAKLAPLEARTECIGRLGSVCFLGYVPNCVAYC

SEQ ID NO: 166671 - protein, 74 aa, Glycine max
  Clone ID: PAT_MRT3847_121519C.1.pep
SISKGERFIKLTIYTLTFMRPLFQYEIKGPKFDSGISLLHMQINAVYMDPYRVPHLIMPRLEFKNPTLPFYSLN

SEQ ID NO: 166672 - protein, 43 aa, Glycine max
  Clone ID: PAT_MRT3847_12151C.1.pep
EPISKVHHLTWSKPIRQWLLESVVYYSPSPASNLLRPCSPIWR

SEQ ID NO: 166673 - protein, 131 aa, Glycine max
  Clone ID: PAT_MRT3847_121520C.1.pep
ANNLKRLAEEFGPEWAMQHIIPQVLEMISNPHYLYRMTILHAISLLAPVMGSEITRSELLPIVITASKDRVPNIKFNVAKVLESIFPIVDQSVVEKTIRPSLVELSEDPDVDVRFFSNQALHAMDHVMMSS

SEQ ID NO: 166674 - protein, 48 aa, Glycine max
  Clone ID: PAT_MRT3847_121521C.1.pep
VGFVLWHLFKYLFRFLVERIGNGSQHKLWKMLSVFDVRCYVKGIDDRM

SEQ ID NO: 166675 - protein, 88 aa, Glycine max
  unsure (1)..(88): unsure at all Xaa locations
  Clone ID: PAT_MRT3847_121522C.1.pep
VLEICRSEGIPFREVAPSWSECEIWXEAFITNSLRLLQHVDSIQVPTEWQSAHSKTWKDISWTKKQFQEKIMEKAILEGYPISNIYAG

SEQ ID NO: 166676 - protein, 63 aa, Glycine max
  Clone ID: PAT_MRT3847_121523C.1.pep
MSSNSFCGKKKDDEKALCDYGNKYSFESQTAPISDGVLPGTIRQLVLEICRSEGIPFREVAPS

SEQ ID NO: 166677 - protein, 98 aa, Glycine max
  unsure (1)..(98): unsure at all Xaa locations
  Clone ID: PAT_MRT3847_121524C.1.pep
VSSYLKKVGFNPDKIPFGPVSGFEGDNMTERSTYLYWYKGPTLLDALDQFSVPKRXLSSPLXLSLQDLYKIGGIGTVPMXRVETCVLKPAMVETFVPT

SEQ ID NO: 166678 - protein, 678 aa, Glycine max
  unsure (1)..(678): unsure at all Xaa locations
  Clone ID: PAT_MRT3847_121525C.1.pep
MNLSNGKGSMSTLTASVVMKSGDAVSDQFPAGLRVLVVDDDPTCLMILEKMLRTCLYEVTKCNRAETALSLLRENKNGFDIVISDVHMPDMDGFKLLEHIGLEMDLPVIMMSADDGKSVVMKGVTHGACDYLIKPVRIEALKNIWQHVVRKRKNEWKDAEQSGSAEEGDRQPKASDEADYSSSANEGSWRNSKKRRDEEEEGXDDSSTLKKPRVVWSVELHQQFVAVVDQLGIDKAVPKKILELMNVPGLTRENVASHLQKYRLYLRRLSGVSQQQGNLSNSFMSSQEATFGGTSINGIDLQTLSAAGQFPSQSLAKFQAAGLGRTTAKAGIPMSLSDQKNLFSFENPRLRFGEGSLTHMDIRKPKNLLHGILTNMEPKQLANLHQSTQPLGSLNMRVNSPATQNKPLLMQMTQAQPKGQLLSENVNTNXTRYPSSLLQTTEEEDLSTGVSGNAIACSRNITTTYNPVQQKSSLVKVAMNRDDKSTAKKPQVVRSLEIHRKFVAALFQQEGTSGVKESVVLFKSYDMFNDLHHQKSHDWDLTNTGMTYDASQHAKPSQTTLFSAPQDAIHESFSSMQETDLHTDTTSIGKAMFSTGEGMHQSSLQNIGQHRAITFFXDNSVRVKAERIPDPSCQINNLFSDQYGQEDLVSAFLKQQEGVGTAENEFDFDGYSLDNIPV

SEQ ID NO: 166679 - protein, 32 aa, Glycine max
  Clone ID: PAT_MRT3847_121526C.1.pep
SFFFLNTPSNYMFIIKRGTILLKNIMSTPSYS

SEQ ID NO: 166680 - protein, 65 aa, Glycine max
  Clone ID: PAT_MRT3847_121527C.1.pep
FCKNCVGLISSLRLRIRRNKSPTFVDHPKRSLMVQRLNVSLLSKPRDRQWSNALTFLSFQNQKIV

SEQ ID NO: 166681 - protein, 50 aa, Glycine max
  unsure (1)..(50): unsure at all Xaa locations
  Clone ID: PAT_MRT3847_121528C.1.pep
KINEGWLFPLHKLKKGSLGFLFPFGKIPVFXNEINYFFPPANKELILEMF

SEQ ID NO: 166682 - protein, 64 aa, Glycine max
  Clone ID: PAT_MRT3847_121529C.1.pep
ESTNPRLIQVVFSMQLAYSLAFHFNLYLTLLQQHILSLIAFFFSCVMMCFAFHFTSQLTPPNLG

SEQ ID NO: 166683 - protein, 114 aa, Glycine max
  unsure (1)..(114): unsure at all Xaa locations
  Clone ID: PAT_MRT3847_12152C.1.pep
LIELILGFVVYQEQASLAPKITRKVSRYPEVIMGIRXYSRSHMYHKTGIWAIQANSGGVLTRHYPITKPETLAKIAPKFYPVXDITKPLVIKHTPIIAKLRASSTHGIVLTLPA

SEQ ID NO: 166684 - protein, 57 aa, Glycine max
  Clone ID: PAT_MRT3847_121530C.1.pep
GVESSGGRTPNNTQVNLQAQQQGRLLGDGGNNDYLTTLCKAEYPPNGRDGGNHQPTG

SEQ ID NO: 166685 - protein, 87 aa, Glycine max
  unsure (1)..(87): unsure at all Xaa locations
  Clone ID: PAT_MRT3847_121531C.1.pep
IKPQHSDHESNQICCLTPCDIALLPAHYIQKGLLYKKPSXHLLATXWIENLSQNLKHSLSLTLFHVYPLDGRLATHRTHDPAFYADA

SEQ ID NO: 166686 - protein, 93 aa, Glycine max
  unsure (1)..(93): unsure at all Xaa locations
  Clone ID: PAT_MRT3847_121532C.1.pep
PINALDELCRLMKSFVHPKPGAAGSVGAGLIPISSELCYRLGACQMVMCGTGMQRSTLSVSLEQAAILARSHGLLPKCIMQATDIMRXQGPRV

SEQ ID NO: 166687 - protein, 57 aa, Glycine max
  unsure (1)..(57): unsure at all Xaa locations
  Clone ID: PAT_MRT3847_121533C.1.pep
QHIPQASASLLRRVGSKKRGSAPLPIHGISKITLKVVVLHFRCXSAPTNPTPLTHAS

SEQ ID NO: 166688 - protein, 62 aa, Glycine max
  Clone ID: PAT_MRT3847_121534C.1.pep
TLSLFIGIYLEDVSVMSSPIVSTVIKGDWHSYGDMQYALYQTQQHVIVDVRIIRCSATVRGS

SEQ ID NO: 166689 - protein, 568 aa, Glycine max
  unsure (1)..(568): unsure at all Xaa locations
  Clone ID: PAT_MRT3847_121535C.1.pep
MDGTTNSGEPRSSSVLQNTGASEDPNRSGSGQNSMARYKLMSPAKLPISRSPCITIPPGLSPTSFLESPVLLSNMKVEASPTTGSLRKLQQTVHGSMASAASATFPVTTACFDTNTVDARKSSFFEFKPLSRSNKVPAETHTSISNFKFVHKSSAPVXFGASNNSFESEISVPSRDEGPSLNLSSYPCSQSMGRILMGXKLITPQHRNRELSVTFCFLFSYFWRXYSFKGVTSHFLKVGSSSSEVKKLFERSHDGQITEIVYKGTHDHPKPQSSCRYSTGTVMYIQGERSDKASLAGRDDKASTMYGQVSHAAEPNSTPESSPVATNDDGLEGAGFVSNRNNEEVDDDDPFSKRRKMELGNVDITPVVKPIREPRVVVQTLSEVDILDDGYRWRKYGQKVVRGNPNPRSYYKCTNAGXPVRKHVERASHDPKAVITTYEGKHNHDVPAARNSSHDMAVPAATAGGQTRIKLEESDTISLDLGMGISSAAEHRSNGQGKMLHSELGETQTHASNSNFKFVHTTSAPVYFGVLNNSSNPYGSRDNRSDGPSLNHSSYPCPQSMGRILLGP

SEQ ID NO: 166690 - protein, 94 aa, Glycine max
  Clone ID: PAT_MRT3847_121536C.1.pep
IVTTPKRENFRKLVSLRPKRKINIPAKKTKFLLKAFPQNQNQGFFFHLLLEKVLQLPTLRGVPKCPHKGEKSCLKLPPISFFQNWVFLHYFSGN

SEQ ID NO: 166691 - protein, 118 aa, Glycine max
  Clone ID: PAT_MRT3847_121537C.1.pep
IPRLIMGVIVQVLCSYSTLPLYTIVTQMGSKSKAEKAEPSSLIGTKGGSPNNTRQSNHMIKESTQIDEQAIIMMEDATTSTIELPHIVHAPFERPNASNSYSSTNIHQHEFNFDIRKT

SEQ ID NO: 166692 - protein, 80 aa, Glycine max
  Clone ID: PAT_MRT3847_121538C.1.pep
KDGVHPSLGPSDRGSYVLYDALTSISGDYGAVRQIYDYALIYTVIYTVYHADQPVAASLSTLDGICYAAETILLVSGRDL

SEQ ID NO: 166693 - protein, 82 aa, Glycine max
  Clone ID: PAT_MRT3847_121539C.1.pep
GFCSRPKKKREGWGSLSCLSPNQPDVTVLQFPLHGANPVLTVLTLATPSQPQPFKRNIPHNFKTGINDPWAFHPPPYFKGHL

SEQ ID NO: 166694 - protein, 64 aa, Glycine max
  unsure (1)..(64): unsure at all Xaa locations
  Clone ID: PAT_MRT3847_12153C.1.pep
XVXXXXXFFFFFFFFFFPKKKKSQPKGFFFMVLKSPPGHEKPKFLPKDPLIKLFPQPPFGHSHH

SEQ ID NO: 166695 - protein, 47 aa, Glycine max
  Clone ID: PAT_MRT3847_121540C.1.pep
INQSFHLIPLIPSNGHQRFYYYLWRKKNPGKEGPFNQNLNYYQRMAK

SEQ ID NO: 166696 - protein, 91 aa, Glycine max
  Clone ID: PAT_MRT3847_121541C.1.pep
ESFFEKHLPKLPPGLRPRPIAWTLAEKLADMLAHKREHKWMHDMKTEMDSVRAGIPYGSPETCPTTSRTILREHSGTLASRARTGSPSSDH

SEQ ID NO: 166697 - protein, 57 aa, Glycine max
  Clone ID: PAT_MRT3847_121542C.1.pep
MSCPGAPLWYAHLAFELYHLGYGGWKTFPGVVLLAGRGVAGAVCWAGVFSIAGGPST

SEQ ID NO: 166698 - protein, 133 aa, Glycine max
  unsure (1)..(133): unsure at all Xaa locations
  Clone ID: PAT_MRT3847_121543C.1.pep
MAAGIYLTEALQNIDALAGPLLIVAYPLYALLRAPDSKPPVDDHQWLTYWVXLYSEITLCELTSARSIGWIPIWPYAKLILTXWLDIPYFNGAAYDYEHYVRPLFVHPQNAYMWIAPSTDDFSAKTDDAITVA

SEQ ID NO: 166699 - protein, 160 aa, Glycine max
  Clone ID: PAT_MRT3847_121544C.1.pep
KSFPPCHCSLGRAAHCHYNHRRVIPSPFYLLQHLSIFFSRETFLSKTKSVSKSFPPCHCTLGRAAHCHYSHRRIIPSHLRLAPFFPTTACTDTGHRASGANTSRHGCISIAPPSLGLEVSITPLAIWFSPFLYFSSLLYCLNLDLNDIFFSNFMIFGIYC

SEQ ID NO: 166700 - protein, 41 aa, Glycine max
  unsure (1)..(41): unsure at all Xaa locations
  Clone ID: PAT_MRT3847_121545C.1.pep
LMGVDPGTNPVCHFLGSKAILWXPNLSVDTAXQTNIVXYSP

SEQ ID NO: 166701 - protein, 48 aa, Glycine max
  Clone ID: PAT_MRT3847_121546C.1.pep
PTRPPTLPEGFLIFLIGWTKWSTWRKKFHRVRVAEPIDFEGPVGQYLF

SEQ ID NO: 166702 - protein, 48 aa, Glycine max
  Clone ID: PAT_MRT3847_121547C.1.pep
VAIYWNISFVFASFFSLVYFGSGSVISDNWLRLSQQYYVVIFCCARPF

SEQ ID NO: 166703 - protein, 147 aa, Glycine max
  Clone ID: PAT_MRT3847_121548C.1.pep
KLELKDCHPTNGSSSLLGTDCLDPFANCVHLKNLHLSEMSFKSDLNPKDFVISAPKLSNLNLMCNRFKCKIVVAAPQLSNFIYLYSTPCAFFEFRLPSMDGLVIDIHEPHDRLEKCRRRKKEETLHGLINMLQGHHNAEAVKLSFCT

SEQ ID NO: 166704 - protein, 82 aa, Glycine max
  Clone ID: PAT_MRT3847_121549C.1.pep
RSTRADHWIFQIWNDLMGNMTCSFNKTDSIECCEAEMQKADSQESGPALKKSKTKILASQNVDHCEMEESQDRLSDMPECII

SEQ ID NO: 166705 - protein, 127 aa, Glycine max
  unsure (1)..(127): unsure at all Xaa locations
  Clone ID: PAT_MRT3847_12154C.1.pep
ESTHASTPEATIAIATQAFILTPPLSGLRPATAPAIHASKTPSXSLSSPNPLNFYITITASTVDETTHAPSKLETVPVEFTPPELDPNTRYPIFSXCTSGLLHKAHVDEYHVITWDSPXEQILEMPT

SEQ ID NO: 166706 - protein, 450 aa, Glycine max
  Clone ID: PAT_MRT3847_121550C.1.pep
MGNMSCSFNQTDSVECCEAEIQKADSQESGPALKKSKTKILASQNVDNCEMEESEDRLSDMPDCIIHHILSFMETKDAIQTCVLSKRWRYLWASVPCLNFSSKSFMRLVNFKKFVLWVLNHRDSSHVKLLVYYRFGVDYSTDQGLLNKVIEYAASHGVEEIKINLRAKTAGRTSGSPPVEIPFSLFTCQSLKKLELKDCHPTNGSSSLLGCKSLDILHLEQFSMHPVAADFSNPFASLAELFGFTTLTTLHLNNFILCYTGTDCLDPFANCVHLKNLHLSEMSFKSDLNPKDFVISAPKLSNLNLMCNRFKCKIVVAAPQLSNFIYLYSTPCAFFEFRLPSMDGLVIDIHEPHDRLEKCRRRKKEETLHGLINMLQGHHNAEAVKLSFCTVKVTCGASALVKPACLPSTKLKSLNFGVGSTYKIFINNLDHITAYFRNCSQHADFEIVTV

SEQ ID NO: 166707 - protein, 55 aa, Glycine max
  Clone ID: PAT_MRT3847_121551C.1.pep
SVLFSTVGLQTNACCKPKGVVILHKTPQPIPKEKNHSTKDRNRLNHKKKKLYIIE

SEQ ID NO: 166708 - protein, 89 aa, Glycine max
  unsure (1)..(89): unsure at all Xaa locations
  Clone ID: PAT_MRT3847_121552C.1.pep
MDGKCLTGAVCMRKTRHLSVLINPEECVETPNEYIPREQYLSXHKRLNTHDYSYATDLEIHSKDTFLLSIHGTELSNISYYQKHGYGVE

SEQ ID NO: 166709 - protein, 51 aa, Glycine max
  Clone ID: PAT_MRT3847_121553C.1.pep
FPLEVFASRNPLFTKPAHEKCSLMSPKIIPFSVDPKKKMGYGAGISGTCPI

SEQ ID NO: 166710 - protein, 98 aa, Glycine max
  unsure (1)..(98): unsure at all Xaa locations
  Clone ID: PAT_MRT3847_121554C.1.pep
YTEENYRDRRALIVRRNPXHRKIPVQSHNDKPICDXACIVLYIDKVWNDKSPLMPFDPNKTTXARFXVDYIVRKIXTYXKKMWFFKGEEHEQRKKELI

SEQ ID NO: 166711 - protein, 261 aa, Glycine max
  unsure (1)..(261): unsure at all Xaa locations
  Clone ID: PAT_MRT3847_121555C.1.pep
MGRISRTKSYAIASSIVQENQQQTPPSITCTTFNILAPIYKRLNHEDQSCRESDYKACWLTRNQRILDWLLYERSSIICLQEFWIGNDEFVNLYDKRLGDAGYINLKLGRTNNRGDGLLIAVQKEYFTVVNHKELHFNDCGDRVAQLLHLELAFPFSQCQNSDVRHEILIVNTHLLFPHDSSLCLVRLHQVYKILQYVESYQKEYQLKPLPIMLCGDWNGSKRGHXYQFLRSQGFVSSYDAAHHYTDADAHKWVSHRNHLG

SEQ ID NO: 166712 - protein, 72 aa, Glycine max
  Clone ID: PAT_MRT3847_121556C.1.pep
FQLDRTRPPTRPPTRSISVNSLSYSIYTFATIFTNIYVDTIYSNPPILMNYNYLIYHMTTIRSLTFTHTFTL

SEQ ID NO: 166713 - protein, 45 aa, Glycine max
  Clone ID: PAT_MRT3847_121557C.1.pep
ILLWHGLFVDWILKQMLIRQRGLLRMWPSYKFTVFKYFLVGDFPL

SEQ ID NO: 166714 - protein, 99 aa, Glycine max
  Clone ID: PAT_MRT3847_121558C.1.pep
AHSKLFSQIYQLHAKFVVQFEYHPEKVTEVIITTTKLNAVSLRKRDRICETQFWNYSLMPKLLARLRYYASAVCAENLLPFVSFWQKLVEFQPHKNHQQ

SEQ ID NO: 166715 - protein, 59 aa, Glycine max
  Clone ID: PAT_MRT3847_121559C.1.pep
VTSYMGGLNVTCWLTTEQANAANISIPIFFSICCLQQLFSLMVLPSHFTTSMFGGTFWM

SEQ ID NO: 166716 - protein, 88 aa, Glycine max
  unsure (1)..(88): unsure at all Xaa locations
  Clone ID: PAT_MRT3847_12155C.1.pep
GSSRLSFILVLVVVTYSSMTIDSREGEGRTLTKSEXMPSKDEIPTVVHLTLVGTLTNFFATLALVVELPARPKVRTPEVTVKNANKIP

SEQ ID NO: 166717 - protein, 43 aa, Glycine max
  Clone ID: PAT_MRT3847_121560C.1.pep
FFYVCRSVLLRQRLANYSPKAKFGLLFIISDCLWLLSHYSSLR

SEQ ID NO: 166718 - protein, 147 aa, Glycine max
  unsure (1)..(147): unsure at all Xaa locations
  Clone ID: PAT_MRT3847_121561C.1.pep
MSDLCSIAFLVLPSSLWAEKGRGERESLRHRIEPPELSRAMIDYLAGAFSGGIXRTVTSPRDGITIXFQLHRQPTSSWSLLLTGSASRSAGTSTYTGMLQASHGIPREQSSHGFSRRNGPALLMGMRYSAVQFTVTHTEQTVASGSS

SEQ ID NO: 166719 - protein, 37 aa, Glycine max
  Clone ID: PAT_MRT3847_121562C.1.pep
LMGELVLLLLLFCVCVGLFAHLLISCCSSSCGCCSSC

SEQ ID NO: 166720 - protein, 69 aa, Glycine max
  unsure (1)..(69): unsure at all Xaa locations
  Clone ID: PAT_MRT3847_121563C.1.pep
SLREIHWELMPGGLLVQKWESNARAGEGTITVLVSSVSQSDEISIEATSPFGXLLMILTLATGFEPRQA

SEQ ID NO: 166721 - protein, 87 aa, Glycine max
  Clone ID: PAT_MRT3847_121564C.1.pep
GSSTFVHGAYRLSRTDLKVGHADIRLSLLQQCIAYHWAYMANYNLRGAIVLLPANALIWCQCLSMTKSLRLRPQLLAPLIRRGGWRS

SEQ ID NO: 166722 - protein, 57 aa, Glycine max
  unsure (1)..(57): unsure at all Xaa locations
  Clone ID: PAT_MRT3847_121565C.1.pep
TNKNQLLFFSXSLSGVGLLLQTMICFWXVTLTHFSIPELGTGSLVFLYICLAFVIHE

SEQ ID NO: 166723 - protein, 95 aa, Glycine max
  Clone ID: PAT_MRT3847_121566C.1.pep
VADCQVLPATSVGAEGGDELRRYMAFAAQLRTPATATIIFKGTRLGIKPAPKVASFSARGPNPESPEILKPDVIAPGLNILAAWLVRFPLPGFPL

SEQ ID NO: 166724 - protein, 183 aa, Glycine max
  unsure (1)..(183): unsure at all Xaa locations
  Clone ID: PAT_MRT3847_121567C.1.pep
RMAPRYAKPHGLXLEDGTHLFSSLISFFSLFSFLFSFLFFFFFFFFFFFFSFFSWGKPDSKKWGKPKNPGEKKKKNPNFFPWDPPNQIFKKKKPFKKKGGKGVNLNTHPHTLLGGGKPKKGFGPKKAPKGKRPKKTTKKNLKTPISKTPPEGKRKKKKKKKFWGQLRGQKRAQKTKHPKKGRF

SEQ ID NO: 166725 - protein, 69 aa, Glycine max
  Clone ID: PAT_MRT3847_121568C.1.pep
REREAALYAETLCLKIHDIALRNISLPLRESVLLESGGMQKWLRELQLKTRSWLKKLRRDHWGVNQTEG

SEQ ID NO: 166726 - protein, 57 aa, Glycine max
  Clone ID: PAT_MRT3847_121569C.1.pep
IMEIKKVKMEKLLGSNLTLDKLNSYFITCNGYLMLVQKKKYSFVSVVPKQKDGHWVK

SEQ ID NO: 166727 - protein, 40 aa, Glycine max
  Clone ID: PAT_MRT3847_12156C.1.pep
KIVSLPFVKKSPNPPVIPNQAPINPSSKISPPFKKKKKPN

SEQ ID NO: 166728 - protein, 65 aa, Glycine max
  Clone ID: PAT_MRT3847_121570C.1.pep
AIGNSTHLVVKRKLQLLLTCPLTKLVSYLIKEIYQRAALCLKLEILPLAGRYIKLYISLGDRCVE

SEQ ID NO: 166729 - protein, 81 aa, Glycine max
  Clone ID: PAT_MRT3847_121571C.1.pep
FFQSLSLLGYGLFPLKGGELICLVKGHVIVKMVFVCVTLAWRSWAENPFISLAVNPRRKDFALYPVFSKKESGGFALRALG

SEQ ID NO: 166730 - protein, 113 aa, Glycine max
  Clone ID: PAT_MRT3847_121572C.1.pep
MNPMENNSSTNATSKLPRRAKRKKKGLGVNVAQVADNTSEFSFAIAKTAVAQICQSVGYKISKHHALEALTNVSTRYMEAIVRSASSFANASNRTDSNLFDLINGIHDLCSGL

SEQ ID NO: 166731 - protein, 82 aa, Glycine max
  Clone ID: PAT_MRT3847_121573C.1.pep
QNMGYNWSSIYYANYDLSGYQLVSPIVGLLAYNADEDAKSSNPFQLGIVAGETPMTIDFTNATKMNQDGVKPLCASFEGDGR

SEQ ID NO: 166732 - protein, 487 aa, Glycine max
  Clone ID: PAT_MRT3847_121574C.1.pep
MAAEIPCCGTKFSLYVLVIIGLVCFAGLMAGLTLGLMSLGLVDLEVLIKSGRPQDRIHASKIYPVVKNQHLLLCTLLIGNSLAMEALPIFLDSLVHPAAAILISVTLILMFGEILPQAICTRYGLTVGATLAPLVRVLLIVFFPLSYPISKVLDWMLGKGHAALLKRAELKTFVNFHGNEAGKGGDLTHDETTIITGALELTEKTAKDAMTPISKAFSLDLDATLNLETLNSIMTIGHSRVPVYAGEKTNIIGLVLVKNLFMVDSKAAVPLRKMLIRKIPRVSENMPLYDILNEFQKGHSHIAVVYRDLNDKNEAPKKVKDGELLDLKDKRKNKGEKTSLDKGEKLESHYSLTTDGAQQAKKSPPATPAFKKRHRGCSYCILDLDNSPLPVFPPNEVVVGVITMEDVIEELLQEEILDETDEYVNIHNKIKVNMNASKEKAPDANMLLPSQAVQGHTPTNSISTATSATGSPTTIDLISESESLRNR

SEQ ID NO: 166733 - protein, 54 aa, Glycine max
  Clone ID: PAT_MRT3847_121575C.1.pep
NFPRFNKKIIYLTLKKTFSHGFLILPLFLHTITFTPTTIYPNILSTFTKTPLVS

SEQ ID NO: 166734 - protein, 58 aa, Glycine max
  Clone ID: PAT_MRT3847_121576C.1.pep
YIIFPFTLYHLAAGRFYSPIFESSRASLSIQLRNHNRLNSFSIYTSQLFVLSGKYTST

SEQ ID NO: 166735 - protein, 105 aa, Glycine max
  Clone ID: PAT_MRT3847_121577C.1.pep
KKKKGGGGLKKKILNRPLGKKKFFFKGTKKKPGAPILKTFSWEKIGFPQNYPLKKNPPFKSLNNGEKSRNKTPFQRVAPPKGKWDGTLSGPINKRMGGAPGKGTF

SEQ ID NO: 166736 - protein, 65 aa, Glycine max
  Clone ID: PAT_MRT3847_121578C.1.pep
NSYCQHIDCQHIEYFLFYYFINTCMFLFFLIFFCESYVRHFLVFIIFFFNFSGFSIIFNFFFYNF

SEQ ID NO: 166737 - protein, 129 aa, Glycine max
  Clone ID: PAT_MRT3847_121579C.1.pep
VLSSAPQQNCSQPLSTCNRAASHTPESSDKPMKPHNITTTLTEKEFKVLSDLIALKSPCNLLIFGFQPQYLILSSMNAAGSTIFLDDDSHKISKERKISNNTQIHKLEYNMPAKAGYKLLKHARQNPAA

SEQ ID NO: 166738 - protein, 73 aa, Glycine max
  Clone ID: PAT_MRT3847_12157C.1.pep
HTHFPWDDIFSTDHLPVFKAKRKANLNSEESSISRMVFILGAEPCAPTMFRGFLKDPVPSKTSRPFATFFFFT

SEQ ID NO: 166739 - protein, 62 aa, Glycine max
  Clone ID: PAT_MRT3847_121580C.1.pep
MIHGYVQLIFGLHYCKNMMLHPFRCLVVSIQYSFFQPSKAKGPKHTPQLIWQCKGEVLKTTV

SEQ ID NO: 166740 - protein, 75 aa, Glycine max
  Clone ID: PAT_MRT3847_121581C.1.pep
FFPPPSCMMQASALWLFSCSLSCSYKSSYLPLEPQNPSSRGDCSQLHLILLVELGRTAENIASVGVISGMRFARR

SEQ ID NO: 166741 - protein, 137 aa, Glycine max
  unsure (1)..(137): unsure at all Xaa locations
  Clone ID: PAT_MRT3847_121582C.1.pep
KCSTAXGKTRKHEXTGAGTHPTDDRPEKEDQEKPKKTEARPRQRREPQHNEGQAQTETNTCKTTLDDRETPKGATQEPKSSQSNNARPKNTAGGTTRRSERKARXATEGNPRASGAQQRTHRTKGMTKMAATRGTPE

SEQ ID NO: 166742 - protein, 80 aa, Glycine max
  Clone ID: PAT_MRT3847_121583C.1.pep
CDLFHIITHCRNLHFMPRRLYLVWKCDLHSNFAQKTRTAMFTTISYIQLHYRVNMEGYQVSDLYTGVLPMYPHTCPYTSL

SEQ ID NO: 166743 - protein, 89 aa, Glycine max
  Clone ID: PAT_MRT3847_121584C.1.pep
GVVSPRCGLPLTEENVEKVLDEVRPGLMADGGNVALHEIDGLVVVLKLQGACGSCPSSAMTLKMGIETRLRDKIPEILGVEQIMDTETG

SEQ ID NO: 166744 - protein, 51 aa, Glycine max
  Clone ID: PAT_MRT3847_121585C.1.pep
MVLNPRNKKLQVQAARFAANNGPEKGSCKSRKLKQTQLALVEAYYRVDLRL

SEQ ID NO: 166745 - protein, 235 aa, Glycine max
  Clone ID: PAT_MRT3847_121586C.1.pep
MLSRALSTPTTQSLKATRTNAMLYPTHRLLSLKNPVSNTRGFSSKENIFIRGHQINIKQFFGLISGRTPRNKAGVVSPRCGLPLTEENVEKVLDEVRPGLMADGGNVALHEIDGLVVVLKLQGACGSCPSSAMTLKMGIETRLRDKIPEILEVEQIMDTETGLELTEENVENVLSEIRPYLVGTGGGILELVQIKDYTVKVRLSGPAAGVTTVRVALTQKLRDKIPAIAAVQLID

SEQ ID NO: 166746 - protein, 54 aa, Glycine max
  Clone ID: PAT_MRT3847_121587C.1.pep
TLNEFMESNTSSAIGDEINQIICLSIFFFCVFFWEFGCSKCGFIIFTLNKSLNH

SEQ ID NO: 166747 - protein, 43 aa, Glycine max
  unsure (1)..(43): unsure at all Xaa locations
  Clone ID: PAT_MRT3847_121588C.1.pep
AXPRFYXXCXXTRXTCWYWDSXHSXAQTQTXWSXXFXTRXSNP

SEQ ID NO: 166748 - protein, 99 aa, Glycine max
  unsure (1)..(99): unsure at all Xaa locations
  Clone ID: PAT_MRT3847_121589C.1.pep
MASLALSTAATSLGMGXMLIDPINLIVSTRPSSSSSSPASFKTVALFSKKKAAPSKKAAASAPANDELAKWYGPDRRIFLPEGLLDPSYIPYYFYPKIP

SEQ ID NO: 166749 - protein, 70 aa, Glycine max
  unsure (1)..(70): unsure at all Xaa locations
  Clone ID: PAT_MRT3847_12158C.1.pep
TARKKRKSNTQRTCLDTYGASCITVIPSMPLLSXAPTSASRHHTRDLNLKINLVTSRITSTCVVFLCWSL

SEQ ID NO: 166750 - protein, 47 aa, Glycine max
  Clone ID: PAT_MRT3847_121590C.1.pep
RGERTRTGQASLAQPKLHFQMASASVPMALLLSSVTNNNKPSSLTFF

SEQ ID NO: 166751 - protein, 60 aa, Glycine max
  Clone ID: PAT_MRT3847_121591C.1.pep
MAFSKALFLAVVMSVFVAVISAAEAPAPSPTSPAAAVSPSFVAGVLAAGAALAFGSTLRI

SEQ ID NO: 166752 - protein, 84 aa, Glycine max
  Clone ID: PAT_MRT3847_121592C.1.pep
RSLTMKLEVINSRNQYRPSWEAGERSMLYGTRKVHYQGFFQPLECNPTVQIGSAYRVIRTASEQQLAATTPAQRVNGVIPGWTL

SEQ ID NO: 166753 - protein, 93 aa, Glycine max
  Clone ID: PAT_MRT3847_121593C.1.pep
HQLQKLLLKRMKLVVIALVLMLASSSVAINRMKFVPKLDERSELSNESDDNDHHQIPRKEYGKPGSGQREVDEGFRHVYTAGNDYGTPGQGGN

SEQ ID NO: 166754 - protein, 100 aa, Glycine max
  Clone ID: PAT_MRT3847_121594C.1.pep
VSGPATPATVEGGMTHSTDGSGAERGASHGLWYSTSHFQTIQRTSLLWKQHQTGNLMSERTGVLLQAGVLLQGRFRLRLQYTFDPGSYMLLTPNDPRVSE

SEQ ID NO: 166755 - protein, 68 aa, Glycine max
  Clone ID: PAT_MRT3847_121595C.1.pep
LILLTFYFQLNDSKNPVFYPTFYTLHLLKNLVVTHLSNFPLTTFFHNYLLSKMPNSKPLCKPLLNLNG

SEQ ID NO: 166756 - protein, 52 aa, Glycine max
  unsure (1)..(52): unsure at all Xaa locations
  Clone ID: PAT_MRT3847_121596C.1.pep
MPLFGCTDASQVLKELQEAKTAYPNGFIRIIGFDNVRQVQCISFIAXQPPGF

SEQ ID NO: 166757 - protein, 62 aa, Glycine max
  Clone ID: PAT_MRT3847_121597C.1.pep
FIKGNKRSYGTPNKGGNHVKKLTKPKFLINLFSFSILTNFQIKELNLTSNCRVNKPKCHGLP

SEQ ID NO: 166758 - protein, 58 aa, Glycine max
  unsure (1)..(58): unsure at all Xaa locations
  Clone ID: PAT_MRT3847_121598C.1.pep
EVPLDRXWQTHEXRTEPIDSNTKSLVXQRHTSACKSIVAVYAKGHLLLYKYKYHIISL

SEQ ID NO: 166759 - protein, 80 aa, Glycine max
  Clone ID: PAT_MRT3847_121599C.1.pep
ASPSGPPILLIYLPIYTILVVAMYIILACTCFAIGMFIPLRRLIISLSNFFTSPPYPCGLPPGFWRSPPPPPQRRRTSYS

SEQ ID NO: 166760 - protein, 61 aa, Glycine max
  Clone ID: PAT_MRT3847_12159C.1.pep
EFRTQRTCLDTYGASCITVIPSMPLLSSGPTSASRHHTRDLNLKINLVTSRITSTCVVFLC

SEQ ID NO: 166761 - protein, 63 aa, Glycine max
  Clone ID: PAT_MRT3847_1215C.1.pep
FKQFFMNIVGVILIPSHHIYNLYRIISIINYNFGSNFIMIFEKTCALLIYLYFLNFFESELVV

SEQ ID NO: 166762 - protein, 63 aa, Glycine max
  Clone ID: PAT_MRT3847_121600C.1.pep
DRGISFTTLLSLLPHTFHSTNNGPCNHLPTAPAGLRPQPQPLLRTLTPTQSTTTPTLTCPYWD

SEQ ID NO: 166763 - protein, 50 aa, Glycine max
  unsure (1)..(50): unsure at all Xaa locations
  Clone ID: PAT_MRT3847_121601C.1.pep
MKIPLAYSTLSDPXKRANSDQRLFRRQRPLSTAAVFSGYTRRNWETDQCW

SEQ ID NO: 166764 - protein, 85 aa, Glycine max
  Clone ID: PAT_MRT3847_121602C.1.pep
FIINWVITARDIHNVIMLLNILDLPITHIHIHGDAVSISNQGTTKCEAQTGEADDRTIWLAHAHASLHSHVHMLYNLMATLHLTS

SEQ ID NO: 166765 - protein, 65 aa, Glycine max
  Clone ID: PAT_MRT3847_121603C.1.pep
AHTKTFLFKGSEHTPKQGEYGIDNFLQKLPYFLKKITRQYPLLGGSLGPANKSGKKVVLTLTIEN

SEQ ID NO: 166766 - protein, 37 aa, Glycine max
  Clone ID: PAT_MRT3847_121604C.1.pep
KICAIIGGVFTVAGKKDSSIYYGQRPLKRKMELGKFT

SEQ ID NO: 166767 - protein, 70 aa, Glycine max
  Clone ID: PAT_MRT3847_121605C.1.pep
GFLGSCMSWCSMGFWSPAAFPFPQAPFVFWGSFAYDCLRSLSSCSLHLFFFWVRLSFSFLDVEHLSVHMY

SEQ ID NO: 166768 - protein, 43 aa, Glycine max
  Clone ID: PAT_MRT3847_121606C.1.pep
RFSISFYYTILSMKSIMYFFVSLSMHKYSKDVHESFLNVIYLG

SEQ ID NO: 166769 - protein, 240 aa, Glycine max
  Clone ID: PAT_MRT3847_121607C.1.pep
LAFFSSIYAFFYYYCRKVGAPPELASLLEEIARESYPTDALREIGDDPELDEFMESYCEVLHRYKQELSKPFNEATLFLCSIESQLSNLCKGTLTMPLDNNHSDEAAGTSEDELSWEKVEAVEGHESSGPRPGDQELKEMLLRKYGGYLSSLKKEFLKKRKKGKLPKDARMVLMDWWNTHYRWPYPTEEEKVQLSEMTGLDQKQINNWFINQRKRHWKPSEDMRFAIMDGVSGSGFGGPI

SEQ ID NO: 166770 - protein, 63 aa, Glycine max
  Clone ID: PAT_MRT3847_121608C.1.pep
TREKSRHESYQSKYEKGMSIQTGDCVWLGFIGIELPYRRRHDKRKRKEKSRDETRETAFVNAF

SEQ ID NO: 166771 - protein, 84 aa, Glycine max
  Clone ID: PAT_MRT3847_121609C.1.pep
QFSVSNYLCRRQVAVNLRSRNYASSNSKDDLMIEEDAERNARSLLKTILCVTASVAGYHMFPYMGENLMQQSEYLERVKDPLFK

SEQ ID NO: 166772 - protein, 80 aa, Glycine max
  unsure (1)..(80): unsure at all Xaa locations
  Clone ID: PAT_MRT3847_12160C.1.pep
PIYNAKSKNHIFATVRKKRKSNTQRTCLDTYGASCITVIPSMPLLSXAPTSASRHHTRDLNLKINLVTSRITSTCVVFLC

SEQ ID NO: 166773 - protein, 51 aa, Glycine max
  Clone ID: PAT_MRT3847_121610C.1.pep
TLFSIHLSLPKPEILVEQPFPISLEGSFGNVIIITFSCYLTDKQLFCIRES

SEQ ID NO: 166774 - protein, 148 aa, Glycine max
  Clone ID: PAT_MRT3847_121611C.1.pep
RNSRLDPRVRDEGKKKRKVSKHQELERAKKLEEVKKKDPEKAEAFAKKQSWKAAMDRASGVKVHDDPKLLHKSIHKEKKKQLKNAEKWKDRVQTRDQLKAEKQQKRSENIASRIREKKMRKIAKREKKLMRPGFEGRKEGFMNDGGSS

SEQ ID NO: 166775 - protein, 79 aa, Glycine max
  Clone ID: PAT_MRT3847_121612C.1.pep
QNDLPGYPPHSLSLLYHNNIFHYSITSSFLPFLSHCQLIIPLYPPSVPSSVNLLNFGLMTHETIAELTFPSDPVTHLRL

SEQ ID NO: 166776 - protein, 144 aa, Glycine max
  Clone ID: PAT_MRT3847_121613C.1.pep
SGLLLSCIGHKWLVDRTCETSHTIRAAHGLPLRQSGMMSLHFSCSVTKKEHQIMQSMLTIRATHGLPLCLSGMIHPLALSHDVCRIADHDRRRRTMRKQRQRSLTREGVVHDAVREIHFVEVKGETDLHDLSHTHHLGLSARAA

SEQ ID NO: 166777 - protein, 84 aa, Glycine max
  unsure (1)..(84): unsure at all Xaa locations
  Clone ID: PAT_MRT3847_121614C.1.pep
RTPTYRPXTHFQKCKNDFILKVQIPRSSNGSFPSQSGSYWLKQYFSSPISTNKWGQQITAXISKKTFFPFSHSYLLLPLYRPNY

SEQ ID NO: 166778 - protein, 73 aa, Glycine max
  Clone ID: PAT_MRT3847_121615C.1.pep
FFVIPLLYLCSVCRIADHDRRRRTMRKQRQRSLTREGVVHDAVREIHLVEVKGETDLHDLSHTHHLGLPATAA

SEQ ID NO: 166779 - protein, 30 aa, Glycine max
  Clone ID: PAT_MRT3847_121616C.1.pep
IPVPKGCTDPNASNLDPTAKSDNGTCLYPP

SEQ ID NO: 166780 - protein, 81 aa, Glycine max
  Clone ID: PAT_MRT3847_121617C.1.pep
FFCTVCVLYEETLGFCFLAEVSVRTEKAPLEPLLISAHASALFAKGSVFWEYSGCAVIGQRPDNRRDGIHRLWVFLSLILY

SEQ ID NO: 166781 - protein, 69 aa, Glycine max
  Clone ID: PAT_MRT3847_121618C.1.pep
AVLVTSSFNTRFGVWEAAKWVARVRDLSVYDPKRPILLNLPTDLVEENRYLQSKESALEAPFLIKMMEY

SEQ ID NO: 166782 - protein, 45 aa, Glycine max
  Clone ID: PAT_MRT3847_121619C.1.pep
KVKGMAQPSHPLAGKPEIIRSMAKFLVMPGNSFNLSFEFSLVQTL

SEQ ID NO: 166783 - protein, 48 aa, Glycine max
  Clone ID: PAT_MRT3847_12161C.1.pep
EQRYRKACGGLQRYPDKQCNKRNKLKTQIESKSVRNIFHKVKTLGPRL

SEQ ID NO: 166784 - protein, 34 aa, Glycine max
  Clone ID: PAT_MRT3847_121620C.1.pep
MEANVNLVPIDVRLLTKPRMKLGIFIGLLKEASR

SEQ ID NO: 166785 - protein, 44 aa, Glycine max
  unsure (1)..(44): unsure at all Xaa locations
  Clone ID: PAT_MRT3847_121621C.1.pep
FNWLERCVNSAKVTXSIMYLSYKLSIILEDITNSQFISTLWMXC

SEQ ID NO: 166786 - protein, 64 aa, Glycine max
  Clone ID: PAT_MRT3847_121622C.1.pep
HGFFFLFNMYHSFFFLFGGRTPKREGAAFLIEKKNTILPGLKRIQSTLNTMRKKRVLKKPGGFP

SEQ ID NO: 166787 - protein, 95 aa, Glycine max
  Clone ID: PAT_MRT3847_121623C.1.pep
TTGRTKIFNENGFQPAPILAGFLEENLGHYIKGNGLLFRHFCRHPLMGFALQHTTGNWVTQKAFARYSFPGKGYPGFLGGNFGFLDIWILGGGTP

SEQ ID NO: 166788 - protein, 57 aa, Glycine max
  Clone ID: PAT_MRT3847_121624C.1.pep
KWIGLYCFVIYLCSPVLLPVKQFFSYFNQCHSSIHSFATLWCSILFGSIIAIHGPFA

SEQ ID NO: 166789 - protein, 378 aa, Glycine max
  Clone ID: PAT_MRT3847_121625C.1.pep
MATTTSSSSEEAPNTKKNKKERLGWIEWLRGWFYLVYEMLFQRIMASHLHNPMPLPPVNDLTCIVTGSTSGIGLEIARQLAQSGAHVVMAVRNTKAAQELIQKWQVDSEGLSIPLNVEVMQVDLLSLDSVTRFAEAWNARSAPLHVLINNAGIFSIGEPQKFSKDGYEQHLQVNHLAPALLSILLLPSLIRGSPSRIVNVNSIMHHVGFVDTEDMNVTSGKRKFSSMVGYSSSKLAEIMFSSTINKRLPAESGISVLCVSPGIVQTNVARDLPKLVQAAYHLIPYFIFSAQEGARSALFAATDPQVPEYCEMLKADEWPVCAFISQDCRPANPSEEAHNVQTSYEVWEKTLEMIGLPSDAVERLLDGEEVKCRYGQEQ

SEQ ID NO: 166790 - protein, 134 aa, Glycine max
  Clone ID: PAT_MRT3847_121626C.1.pep
MSLFVGFRSLVSRGPSNVGVVQLRFRRRTVSPPPWVPRKLNPIHDQLYKPDRALIEQDLSSDSFVHSRKLSLSPYETFHLIPGVSNPPDCTQNQYSFEASKRIGLIGRKIGMTLQWLKDGTRCLCTLIHVPVNH

SEQ ID NO: 166791 - protein, 58 aa, Glycine max
  Clone ID: PAT_MRT3847_121627C.1.pep
GSNRGTGPSPFGPRRRKSEPKRSPAKLAPGACFWNPRKPEPPPPGAQLGVGAPAGVGF

SEQ ID NO: 166792 - protein, 52 aa, Glycine max
  Clone ID: PAT_MRT3847_121628C.1.pep
LIYFLIVESWHLKSISRGATRCIGRYTLFALYNKHCEYQIAGLVLTEEKRQC

SEQ ID NO: 166793 - protein, 81 aa, Glycine max
  Clone ID: PAT_MRT3847_121629C.1.pep
KGGWPPLAPGKIKKAFRFLNLFFLKGPPKKTPAFFKKKWVKTPIFYPLFKVFSKKPRGGTFGGFSGIFFKGKNFTKWKRFF

SEQ ID NO: 166794 - protein, 73 aa, Glycine max
  Clone ID: PAT_MRT3847_12162C.1.pep
RGRTCSFFFLYSMNSFYFNLNNIFVLAITWSFDTFVCRFHINTIYFFIVHFWRFICYHMLLKAFHAQYFINLF

SEQ ID NO: 166795 - protein, 67 aa, Glycine max
  unsure (1)..(67): unsure at all Xaa locations
  Clone ID: PAT_MRT3847_121630C.1.pep
XXRXXTQGXFAXTLXDILSXSLXSDYGGGWTRWSCAHFMVVRDAYXXNXRXXXCLXMXYXSGNXXML

SEQ ID NO: 166796 - protein, 52 aa, Glycine max
  Clone ID: PAT_MRT3847_121631C.1.pep
IILFIKPIFYYNYLFSLSYIKLRCLWLCSYIKYLEESFTTNNNFNQIKHDCL

SEQ ID NO: 166797 - protein, 275 aa, Glycine max
  Clone ID: PAT_MRT3847_121632C.1.pep
MGDHFELLVDRLLTESTLEAALESRNRSILAASSAGNDAKIDLNLMKMGVDDIKFPGKVVECRICHDDDEDSNMETPCSCRGSLLLAHHFCIHRWCNEKGDTTCEICHQQFKPGYTAPPPLFQFGRIPMSFRGNWEISRRDLNSTHLVSMVPTDQNLTTSNYDQYSASATGSLICCRSIAVIFMVLLILRHTLPLVISGNKEYSFPLFLLRLFRIAGVVLPIYFMVRAVALIQRHRRQHQEHLNASASSSDDESEHSRFAASASASCHTCTVKIQ

SEQ ID NO: 166798 - protein, 48 aa, Glycine max
  Clone ID: PAT_MRT3847_121633C.1.pep
LEGKGWVRPLLPVGLYTINALRFLLLVLVIIQQEFLPLIYDLLIEIWN

SEQ ID NO: 166799 - protein, 115 aa, Glycine max
  Clone ID: PAT_MRT3847_121634C.1.pep
KGDTTCEICHQQFKPGYTAPPPLFQFGRIPMSFRGNWEISRRDLNSTHLVSMVPSDQNLTTSNYDQYSASATGSLICCRSIAVIFMVLLILRHTLPLVISGNKEYSFPLFLVRFA

SEQ ID NO: 166800 - protein, 430 aa, Glycine max
  Clone ID: PAT_MRT3847_121635C.1.pep
MGKWRRRSKRGESSNEIDELLRQQREITERLRDPRGLRRGSLPGPALPTNGVRQRPFIRPVTGDRNDSEDQPPSKRRLSSAVVKVDDGDLPEDADAGQEDGKTKDLTNEAVNGTAAVVGRMIATLSILQSGWSKRDICGSNQKTSKASDVPNTDHVPRVLPKNEDPSLVNRNKRMLGQLLGTLEKFRKEDMQLSGTEAYMRRSSSLQRAEQRAREESERLRKEEREQIAEKRRRDLTLRARVAAKTEEKKLELLFLQWSEHRKRLSNFIRTKAEPPIYYLPNKPLDEDPTLLEKRKEEAFLEWKNARREEVSEYQKQIGEQYLANVEKELERWQNARNARKVNNDQNLQETMDKELDTHRLEHGPKKRKIPDENNNDDDDDVEDINVGEDDMMDDELDDDSSRRIDETTKTEAGSASSDPAADADNAGGK

SEQ ID NO: 166801 - protein, 83 aa, Glycine max
  Clone ID: PAT_MRT3847_121636C.1.pep
MAMHHPPRKRGVSTTRRTSFRMERCRHPADKTPTLNRRTTTVPIGSRRQNQEELALTISDQPITQSLSSLAATQIPNKVLCTK

SEQ ID NO: 166802 - protein, 187 aa, Glycine max
  Clone ID: PAT_MRT3847_121637C.1.pep
MGSTAVEKTEEELRNEIDELLRQQREITERLRDPRGLRRGSLAGPALPSNGARQRPFIRPVTGDRNDSEDQPPAKRRLSSAVVKVDDGELPEDAGAGQDGKTKDSANEAVNGTAAVVQNDSNPFNSHQTVWSKRDNNQRTSKASDIPTTEHVPRVLPKNEDPSLVNRNKRMLGQLLGLSRNQKGRQH

SEQ ID NO: 166803 - protein, 129 aa, Glycine max
  Clone ID: PAT_MRT3847_121638C.1.pep
KRPPIQIRHFFSHQWQCQMTGNLVFRHKHSFPLACAENKHSLQLPFLLPPPWFFLQLCLGRLCAQDPYAAAGTVDEPAAGAGAVVCARGPRPGHRPGSRGMGSPESPGRLWPSHGDPGNSEEGEGAQPP

SEQ ID NO: 166804 - protein, 87 aa, Glycine max
  Clone ID: PAT_MRT3847_121639C.1.pep
LESAVRELSFINYQLSNSQGDKSGQKGHLSLATEASEGGPGGRMVEPGKTRVGIIKPRHRSQKFKIGVGRHWKAKWPKKKKYEQLKE

SEQ ID NO: 166805 - protein, 68 aa, Glycine max
  Clone ID: PAT_MRT3847_12163C.1.pep
LLPQHCFSTICFIAACLISTSQGKFKTPVARLQEKNAGLKHGSEDFENLAGECSTQVEIGGDQAPGGG

SEQ ID NO: 166806 - protein, 32 aa, Glycine max
  unsure (1)..(32): unsure at all Xaa locations
  Clone ID: PAT_MRT3847_121640C.1.pep
NERCKDSKEFILIPPSDYSICILFFKVTXXXC

SEQ ID NO: 166807 - protein, 190 aa, Glycine max
  Clone ID: PAT_MRT3847_121641C.1.pep
MSPKYEEKLESNDDIWLMVSEIPLFTQPTAAPPLSRPPPPRPVHILKSGAGSSASANVRKKDNDFSYFPSSTQFSQGPKSAPAAAKFSSASQFDELEDFAMGKSRDNDDEGVNGLADKELEMNSAAAAMKEAMDRAEAKFRHAKGVRERENTKVAKSKEPVQLDKDGKVVSEDRGKQERLDHEWQQKERE

SEQ ID NO: 166808 - protein, 70 aa, Glycine max
  unsure (1)..(70): unsure at all Xaa locations
  Clone ID: PAT_MRT3847_121642C.1.pep
LNGLKIPPTGEMTPLSRGVNAHHMNKVLPPQMLTQIGAMGGXQSLMNKMESPKQIMGMFGGGDNHIACGI

SEQ ID NO: 166809 - protein, 204 aa, Glycine max
  Clone ID: PAT_MRT3847_121643C.1.pep
RGRVGGRVGEHIAMVKGDIGDGHDVLVRVHSECLTGDIFGSARCDCGNQLALAMQQIEAAGRGVLVYLRGHEGRGIGLGHKLRAYNLQDDGRDTVEANEELGLPVDSREYGIGAQILRDLGVRSMKLMTNNPAKYVGLKGYGLTISGRIPLVSLITKENKRYLETKRVKMGHVYGSEFNSKLNYQDSGNGKVNSDDDSNAAPGL

SEQ ID NO: 166810 - protein, 91 aa, Glycine max
  unsure (1)..(91): unsure at all Xaa locations
  Clone ID: PAT_MRT3847_121644C.1.pep
WPSGXTPLRPXXSXQXXPXTHVLVGGXXVLCIXXSWXLGHAGDKIGSXXKVSGGXGRQGVXVYVXVSSVNNXEFCXXTHRXHHRITLMLXX

SEQ ID NO: 166811 - protein, 249 aa, Glycine max
  unsure (1)..(249): unsure at all Xaa locations
  Clone ID: PAT_MRT3847_121645C.1.pep
KIVSIADLIRYRRKRDKLVDRRTRGLIERAGAALIPTMWGPFVANLYRSLLDGIEHIAMVKGDIGDGHDVLVRVHSECLTGDIFGSARCDCGNQLALAMQQIEAAGRGVLVYLRGHEGRGIGLGHKLRXYNLQDDGRDTVEANEELGLPVDSREYGIGAQILRDLGVRSMKLMTNNPAKYIGLKGYGLTVSGRIPLLTLITXENKRYLETKRVKMGHIYGTEFNGRLSTHDSGNGNATRIEDSNAVTGL

SEQ ID NO: 166812 - protein, 67 aa, Glycine max
  Clone ID: PAT_MRT3847_121646C.1.pep
KTSLLYLGKVALLDTMWAGLEWCFKPRAEGKLSLFFIWERGWGFSSAVERLPSETQGLGYGPQLRKT

SEQ ID NO: 166813 - protein, 110 aa, Glycine max
  unsure (1)..(110): unsure at all Xaa locations
  Clone ID: PAT_MRT3847_121647C.1.pep
MEDPPLQKIAISGPTLASLIQRFSTSPSSIHGLLFGHVTPLPLTLSDDDTSSAATPTPTLLATVTGFLTSPSFHDSSGTVLPSSLPNSPLLGWXCGRRRSRLRPSMRHFS

SEQ ID NO: 166814 - protein, 67 aa, Glycine max
  Clone ID: PAT_MRT3847_121648C.1.pep
FDRGIFLIFHSVGEKYKQNNGRKEGSNKSFTKIICLLRFFPPTTVLIPPWFLRRKHLISNKYNNVEV

SEQ ID NO: 166815 - protein, 34 aa, Glycine max
  Clone ID: PAT_MRT3847_121649C.1.pep
MRALLAKLGIRPFSYGLVVLSVYDNGSVFSPEVL

SEQ ID NO: 166816 - protein, 35 aa, Glycine max
  unsure (1)..(35): unsure at all Xaa locations
  Clone ID: PAT_MRT3847_12164C.1.pep
VLRKMEMSERNSGWEDLIFIPPGXSRSQHIQELNE

SEQ ID NO: 166817 - protein, 51 aa, Glycine max
  Clone ID: PAT_MRT3847_121650C.1.pep
YYSNYIIVINANNLYVPFFLHRRVLVLYFKKFVGAFYGAKPYFFFFIHFVF

SEQ ID NO: 166818 - protein, 320 aa, Glycine max
  Clone ID: PAT_MRT3847_121651C.1.pep
MAPKQTKAEKKIAYDAKLCDLMEEYGQILVVNSDNVGSNQLQNIRKGLRGDSVVLMGKNTMMKRSVRMHAEKTGNNAYLNLIPLLVGNVGLIFTKGDLKEVSEEVAKYKVGAPARVGLVAPIDVVVPPGNTGLDPSQTSFFQVLNIPTKINKGTVEIITPVELIRKGDKVGSSEAALLAKLGIRPFSYGLVVLSVYDNGSVFSPEVLDLTEDDLIGKFAAGVSMVTSLSLAISYPTLAAAPHMFVNAYKNVLAVAVETDYSFPEADKVKEYLKDPSKFAVAAVAAPAAASGAPAAAAKEEEKKEEPAEESDDDMGFSLFD

SEQ ID NO: 166819 - protein, 319 aa, Glycine max
  Clone ID: PAT_MRT3847_121652C.1.pep
MAPKQTKAEKKIAYDAKLCDLMEEYGQILVVNSDNVGSNQLQNIRKGLRGDSVVLMGKNTMMKRSVRMHAEKTGNNAYLNLIPLLVGNVGLIFTKGDLKEVSEEVAKYKVGAPARVGLVAPIDVVVPPGNTGLDPSQTSFFQVLNIPTKINKGTVEIITPVELIKKGDKVGSSEAALLAKLGIRPFSYGLVVLSVYDNGSVFSPEVLDLTEDDLIEKFAAGVSMVTSLSLAISYPTLAAAPHMFVNAYKNVLAVPVETDYSFPEADKVKEYLKDPSKFAVAAVAAPAAESGAPAAAKEEEKKEEPAEESDDDMGFSLFD

SEQ ID NO: 166820 - protein, 45 aa, Glycine max
  Clone ID: PAT_MRT3847_121653C.1.pep
LAPDEDGNKPESILLPSSSQKYKIKIFTIPWELPKTIECSRYGHP

SEQ ID NO: 166821 - protein, 79 aa, Glycine max
  Clone ID: PAT_MRT3847_121654C.1.pep
RSLSDDSCPKTLNRYGYKGRPRRVPEIVSCSSSEPSHQRQLVRHPLAILPHRQLSGTSRISPNADHPIPDASSDLVSPM

SEQ ID NO: 166822 - protein, 162 aa, Glycine max
  Clone ID: PAT_MRT3847_121655C.1.pep
HIIRFCRMKVEIEGSHSDYAESVSSQPENRGRLESKKKLKKVRSIRLVRLPSKRSSTRGGRPQYDPLSIDTKSLEGPTPIEMADASPNYMKATSSSHAKDSFQNTERILFTKKTLTRMSTALKLKRSLTRKISGRTEPKRKTESSKISQFAAVKGQNHPEVL

SEQ ID NO: 166823 - protein, 72 aa, Glycine max
  unsure (1)..(72): unsure at all Xaa locations
  Clone ID: PAT_MRT3847_121656C.1.pep
RWTLRFRGFSRFPKRVWLLFAPVRGEAPAVATGMGGGGRVARADIQTVLICMTYNPLLSSSXSTKSAQRFQA

SEQ ID NO: 166824 - protein, 157 aa, Glycine max
  Clone ID: PAT_MRT3847_121657C.1.pep
ARECVQSRIRQHWAAVKIQAAFRGCLARRALRALKGLVKLQALVRGHIERKRTAEWLKRLQALLHAQTQVSAGLTLHASPSSSKLSSHLQGPETPEKFESPIRSKSMKHEHSPILKRNGSKSCALINGYQEICGSRSESQGNEQLWNSRSMNRAHGS

SEQ ID NO: 166825 - protein, 70 aa, Glycine max
  unsure (1)..(70): unsure at all Xaa locations
  Clone ID: PAT_MRT3847_121658C.1.pep
LHPDKLCDQISDAVLYTXTXHDPDSNCACETCTKTNFVMVFXKLPPKSMFDYEKIVRDTCNNIGIVSNYI

SEQ ID NO: 166826 - protein, 50 aa, Glycine max
  unsure (1)..(50): unsure at all Xaa locations
  Clone ID: PAT_MRT3847_121659C.1.pep
RAFFNFYAVPPXLCCXLLSCAKCXXSSRSIVPSTELLLLPASPASVFVRV

SEQ ID NO: 166827 - protein, 52 aa, Glycine max
  Clone ID: PAT_MRT3847_12165C.1.pep
VSIILCLTTNRIIYTYFNAPLLVCLENLGFKKCSITRALLPDQLYNTTLAFQ

SEQ ID NO: 166828 - protein, 161 aa, Glycine max
  Clone ID: PAT_MRT3847_121660C.1.pep
EKSLDEESRIEKSNESISMLWGRDGKFTFSDLVKATNGFNDMYCIGKGAFGSVYRAQVLTDQVVAVKRLNISYSDDIPAVNRQSFQNEIESLTEVRHHNIIKFYGSCSCRGQMFLVYEHVHRGSLGKVLYGEEGESELSWATLLETVQGIAHANLYLLCDC

SEQ ID NO: 166829 - protein, 225 aa, Glycine max
  unsure (1)..(225): unsure at all Xaa locations
  Clone ID: PAT_MRT3847_121661C.1.pep
SXCGDNXNLSMWIGXNESQFKHVGEDVESEHASLSSIVDNDDVNAEDIITGVSGVSPNCYQGTHDGPFVADSSLGFVPNAINSQLWPYEEMMNNIKAENVELNADIAYMSNGMPSSTTGWMPFQDSQLMLADNGYPSFHSGNFDDMSSLSLSACASYMSYGDHYQNNFHRDDAEFNVGQEVKQTPGIFSSEGCQAYQCFQNEDNYAVISGISNQYQDSIGRTASF

SEQ ID NO: 166830 - protein, 96 aa, Glycine max
  unsure (1)..(96): unsure at all Xaa locations
  Clone ID: PAT_MRT3847_121662C.1.pep
EISLTLKKTXPLXSXFLILYLLPSINPYFLKSFFYYINFQHILFLFHLTIYYLLIISHLLYFHLPLNYLLPPSTLLQLTNKLSYLSTQILHFFFIP

SEQ ID NO: 166831 - protein, 69 aa, Glycine max
  Clone ID: PAT_MRT3847_121663C.1.pep
SRPIISEQAAPPGQRVLLAASDSRQKQKQPIDSGRRSGGTVYLLRCLIFLRLRLRRRIRFFLQLGAHFC

SEQ ID NO: 166832 - protein, 92 aa, Glycine max
  unsure (1)..(92): unsure at all Xaa locations
  Clone ID: PAT_MRT3847_121664C.1.pep
MREQGAFHLEEHGQTERSQWVLDSPNPPPLWKKLFSSVKETILPHGNKFCFSSKRKTIHGHAXSCLKNLFPIISWLTDYKASMFKDDLLAGL

SEQ ID NO: 166833 - protein, 119 aa, Glycine max
  Clone ID: PAT_MRT3847_121665C.1.pep
KTLGGLEMINPGAIIGGKLKHPLSTWDWTFSSFPSLNIGGNKPPSGEKDAKKYFGKFKSRFFVPRTHAWDQKGSWQPIPFFCCRGSTPPIRWPDQNPLFKDVQLFGPPKGGQLLFGAFQ

SEQ ID NO: 166834 - protein, 207 aa, Glycine max
  Clone ID: PAT_MRT3847_121666C.1.pep
SYCMLQCMQAGYAEGAIDGRIPLLITSEFCSTTGIPVDCVGDEQKSNVGLFQNNSQRAFTDVNMGQVYNVVDDYEQQRICSAVASGNTGIIRRHREVRNEQLSINSTQGTAQRRIRLSMATHGSNKTVKSESCAQEELYAKSVIAMGEKASESHTSDESATLTNDGNELPKTSKSSGKRKISRHATKAGSTLGLKDSLLLRRVPYIS

SEQ ID NO: 166835 - protein, 508 aa, Glycine max
  unsure (1)..(508): unsure at all Xaa locations
  Clone ID: PAT_MRT3847_121667C.1.pep
MGSVDCYPSRTDDAAVVSLDSLPLGFRFRPTDEELVNYYLRQKINGNGRXVWVIREIDFCKXETWDMLGLSVVQTKDPEWFFFCPQDRKYPNGHRLNRATNNGYWKATGKDRRIKSGKDLIGMKKTLVFYTGRAPKGNRTNWVMHEYRPTLKELDGTNPGQNPYVLCRLFKKHDESLEVSHCDEAEQTASTPVAYSTEEIQSDLAVVAGSPSQVTEDDKHQAMIPAHSEEAISNVVTPVVCRSDRYDACHAPNQIVLPTAEEFQPLNYYDPRNELLDDKLFSPVLAHIQPEFHYQANIESDDWYGLQYGTNETNMSDFLNSVVNWDQVSFEDLNCQQQSYPLFNVKDSILSSDLDSELANMTCMQAGYAEGAIDGRKPLVITSEFCSTTGIPVDCVGDEQKSNVGLFQNNSQRAFTDVNIGQVYNVVDDYEQRGICSAVASGNTGIIRRHREVQNEQLSSNSTQGTAQRRIRLSMATHGSNKMVKSGSCAQEELNLKSVIAMVRILFF

SEQ ID NO: 166836 - protein, 101 aa, Glycine max
  Clone ID: PAT_MRT3847_121668C.1.pep
PFFLFYVLSISHSHLTFFSFSFLFPNLNFSLQNPLTVLKDRSESGCQIYHPSSPEIIVPIRFFFPLPSTLSQIFTLFAAIEHNLVYLLTVTAIFVLPFSLF

SEQ ID NO: 166837 - protein, 112 aa, Glycine max
  Clone ID: PAT_MRT3847_121669C.1.pep
LTDFATASCSGLLFALRVLTTLETDDAYERNVEASAQVYSMVPALSKMPFRSLLDVGLSQTTTRTRFFTALKGAPGGSLDISYTDHWFARSDLDPKGLAAKGKLICFFFRHV

SEQ ID NO: 166838 - protein, 57 aa, Glycine max
  Clone ID: PAT_MRT3847_12166C.1.pep
KGMVDWWPQLAFLRIQGYHGPVLGIVVLGGVPDSEMDTIWSEDCEQLNPACAKAQTV

SEQ ID NO: 166839 - protein, 84 aa, Glycine max
  Clone ID: PAT_MRT3847_121670C.1.pep
YLLSLPKENQGNQLTCIIFFYLSSKGFEWEKGFSLTRFEFDMQSFDALQFWFYRTKCARNTCLTSLHCSFSFSPLDVFPSSHHL

SEQ ID NO: 166840 - protein, 101 aa, Glycine max
  unsure (1)..(101): unsure at all Xaa locations
  Clone ID: PAT_MRT3847_121671C.1.pep
HPFSPRGSGRKRAPTKRLSKCLRKRKGKGDPPXTGPLSGGFGGVTFNFPPTLAPPLAPVLFFFLPSFRAISGGFPKGGLNGGLPWGARWRASPDFPSKKFD

SEQ ID NO: 166841 - protein, 702 aa, Glycine max
  unsure (1)..(702): unsure at all Xaa locations
  Clone ID: PAT_MRT3847_121672C.1.pep
NELNLAHNKXLGPLPDLTGMDTLNYVDLSNNSFDASDAPTWFTILPSLTTLIMEFGSLQGTLPSKLFDIPQIQQVKLRNNALNNTLDMGDNICPQLQLVDLQENEISSVTFRSQYKNILILIGNPVCSGSALSNTNYCQLQQQAKQPYSTSLANCGGKSCPPDQKLSPQSCECAYPYVGTLYFRGPSFRELSSVNTFHSLEMSLWVKLGLTPGSVSLQNPFFNSDDYLQVQLALFPPIGQYFNRSEVQRLGFELSNQTYKPPKEFGPYYFIAFPYPFPGSHKGASLNKGVVIGISIGCIILVLSLIGLAIYAILQKKRAERAIGLSRPFASWAPSGKDSGGAPQLKGARWFSYDELKKCSNNFSESNEIGFGGYGKVYKGVFPDGKIVAIKRAQQGSMQGGVEFKTEIELLSRVHHKNLVGLVGFCFEQGEQMLIYEFMPNGTLRESLSGRSEIHLDWKRRLRIALGSARGLAYLHELANPPIIHRDVKSTNILLDENLTAKVADFGLSKLVSDSEKGHVSTQVKGTLGYLDPEYYMTQQLTEKSDVYSFGVVMLELITSRQPIEKGKYIVREVRMLMNKKDDEEHNGLRELMDPVVRNTPNLVGFGRFLELAMQCVGESAADRPTMSEVVKALETILQNDGMNTNSTSASSSATDFGVGKGGMRHPYIDGTFTKKDNVNDSSSSAFDYSGGYTLSTKVEPK

SEQ ID NO: 166842 - protein, 78 aa, Glycine max
  unsure (1)..(78): unsure at all Xaa locations
  Clone ID: PAT_MRT3847_121673C.1.pep
GWFWWPGFKLVFHFLQKVPRSCSIHPYLQDLAQRFCRFVEAPCVMSADYPGVIPLPRVLFFLLHILLLCRSCRKTARX

SEQ ID NO: 166843 - protein, 50 aa, Glycine max
  Clone ID: PAT_MRT3847_121674C.1.pep
AFDKRHRENSKEKHQSLLLFFLLHHLNLDWKSFELGCFSHQFNVDAVPST

SEQ ID NO: 166844 - protein, 155 aa, Glycine max
  Clone ID: PAT_MRT3847_121675C.1.pep
VYSFGVVMLELIPSRQPIEKGKYIVREVRTLMNKKDEEHYGLRELMDPVVRNTPNLIGFGRFLELAIQCVEESATDRPTMSEVVKALETILQNDGMNTNSTSASSSATDFGVGKGGMRHPYIDCTFIKKDNANDSSSSAFDYSGGYTLSTKVEPK

SEQ ID NO: 166845 - protein, 72 aa, Glycine max
  Clone ID: PAT_MRT3847_121676C.1.pep
MATHEMDPDVVRWGLHLLDVCTLSHHGSPSIVTQYDPDLSRVEYVTEGFCQHEYVDNDEAGARAYQEELSQL

SEQ ID NO: 166846 - protein, 50 aa, Glycine max
  unsure (1)..(50): unsure at all Xaa locations
  Clone ID: PAT_MRT3847_121677C.1.pep
ICFLALSLSPSVAGEGQNNGLDMNLYKESCPQVEDNITXQVKLLYKRHKK

SEQ ID NO: 166847 - protein, 140 aa, Glycine max
  unsure (1)..(140): unsure at all Xaa locations
  Clone ID: PAT_MRT3847_121678C.1.pep
KNFEGIINGDRFITXQRERGDQGRGLNARPLSLEGHVLKNLRWGNFSNCASPLLSTFIGESSLEKVALALLPLVGERFQVSFGGPMRGTFWIPQWIIAHQLVKSPLAIFFDANTGAADYLLVWHWHFQRVGTSPTTMQRS

SEQ ID NO: 166848 - protein, 40 aa, Glycine max
  Clone ID: PAT_MRT3847_121679C.1.pep
HLCKCQPVLLTRTTRIKKTRLPTKSINIRFPLIMHKFRLS

SEQ ID NO: 166849 - protein, 143 aa, Glycine max
  unsure (1)..(143): unsure at all Xaa locations
  Clone ID: PAT_MRT3847_12167C.1.pep
KIGYVDTPQGGWSIIDIAEYRVRLADELQHPTAGRSGVSQRLVAEQDGQKMVNAAKNEKLARLKQAKEEAXEKEELLNTGAQLEAEFQKKVSDSTGDSGANVKRLEHXTGVKIQHRENGGCKNIEDDSCWPCLLKHVTKWCKN

SEQ ID NO: 166850 - protein, 105 aa, Glycine max
  Clone ID: PAT_MRT3847_121680C.1.pep
KIGKGFNFPPRLSPLKSTQGVGPKLKSEKKFWVNGYQKKKKKGGLKAPKKVLKGGKLRISPKGKGKLWFQAIPIQAPGGGPPPGTLKRCCQKRVLKFKKEFVFPP

SEQ ID NO: 166851 - protein, 146 aa, Glycine max
  unsure (1)..(146): unsure at all Xaa locations
  Clone ID: PAT_MRT3847_121681C.1.pep
MAIKTMELLKGCGSQEEIMEVLSAVASDLGDVIDDVNTLXREEEIRTFECISKHGQGPRLLGRFTSGRVEEFIHARTLSAADLRDPEVSALIASKMREFHNLHMPGAKKAQIWHRVRKWLGQXKSLCSPRMQKIWXDNLDEEINIL

SEQ ID NO: 166852 - protein, 58 aa, Glycine max
  Clone ID: PAT_MRT3847_121682C.1.pep
VFRHLSDRGLCKLHTYCVWEMLLWKVSDSFANTSTRHSWCVIYIWVKLRTQYQIRLLI

SEQ ID NO: 166853 - protein, 165 aa, Glycine max
  Clone ID: PAT_MRT3847_121683C.1.pep
LEIVFCHNDLQYGNIMMDEETRLITIIDYEYAGYNPIAYDLANHFCEMVADYHSDTPHVLDYKKYPGLEERQRFIRNYLSSEGNKPSNAKVNQLVKAAEKYTLANHLFWGLWGLISSYVNKIDFDYKEYGRQRFQQYWIRKPTLLDSPSIVSLDETVNGLLSSFT

SEQ ID NO: 166854 - protein, 362 aa, Glycine max
  Clone ID: PAT_MRT3847_121684C.1.pep
MAIKAIELLKGCGSQEEIMEVLAAVASDLGDVIDDVNTLQVIPLNGAMTNEVFQINWPTKNGGEIRKVLVRLYGEGVEVFFDREEEIRNFDCISKHGQGPRLLGRFTSGRVEEFIHARTLSAADLRDPEVSALIASKMREFHNLHMPGAKKVQIWHRMRKWLGQAKSLCSPKDEKNFGLDNLDEEINILEKKLSEGYQEIGFCHNDLQYGNIMMDEETRLITIIDYEYASYNPIAYDLANHFCEMVADYHSDTPHVLDYTKYPGLEERQRFIRNYLSSEGNKPSNAKVNQLAKAAEKYTLANHLFWGLWGLISSYVNKIDFDYKEYARQRFQQYWIRKPTLLDSPSIVSLDETVNGLMPSFT

SEQ ID NO: 166855 - protein, 311 aa, Glycine max
  Clone ID: PAT_MRT3847_121685C.1.pep
MDSVPSNSHGNLDEQISQLMQCKPLSEQEVRVLCDKAKEILMEESNVQPVKSPVTICGDIHGQFHDLAELFRIGGKCPDTNYLFMGDYVDRGYYSVETVTLLVALKVRYRQRITILRGNHESRQITQVYGFYDECLRKYGSANVWKIFTDLFDYFPLTALVESEIFCLHGGLSPSIETLDNIRNFDRVQEVPHEGPMCDLLWSDPDDRCGWGISPRGAGYTLGQDLSEQSRDTNNLKLIARAHQLVMEGYNWGHDQKVVTIFSAPNYCYRCGNMASILEVDDCKGHTFIQFEPAPRRGEPDVTRRTPDYFL

SEQ ID NO: 166856 - protein, 138 aa, Glycine max
  unsure (1)..(138): unsure at all Xaa locations
  Clone ID: PAT_MRT3847_121686C.1.pep
MDSVPSNSHGNLDEQISQLMQCKPLSEQEGLXCDKAKEILMEESNVQPVKSPVTICGDIHGQFHDLAELFRIGGKCPDTNYLFMGDYVDRGYYSVETVTLLVALKVRYRQRITILRGNHESRQVCSFLNSDLPVSSGL

SEQ ID NO: 166857 - protein, 67 aa, Glycine max
  Clone ID: PAT_MRT3847_121687C.1.pep
IGLTHAGRAWYICTNMVSGGTSTRMHGWIDMHRVTAQQITRRRLAVLGCSLMMAGVRATFMFLLYQH

SEQ ID NO: 166858 - protein, 29 aa, Glycine max
  Clone ID: PAT_MRT3847_121688C.1.pep
LEALRAYYLIRPHDNTSRLYLEEMLLIID

SEQ ID NO: 166859 - protein, 104 aa, Glycine max
  Clone ID: PAT_MRT3847_121689C.1.pep
PQLGIRVESRGRQTGEGEKEITYQDWLILKVLCTIMLLPPLPDPHTQLIMVSTKPNQLVCTAQRLEYYDMGPIFLPLVITLLIEAHDQPSQVSTCLCNLSCSCY

SEQ ID NO: 166860 - protein, 121 aa, Glycine max
  Clone ID: PAT_MRT3847_12168C.1.pep
HEFPKKPSTQTLISFLFLHSTPPYPTAPSHDLCVFFFFPKSKSQQQTPHHQMPLVFLRPPLLHRPLALLLFSTALQIHSSPKFADSRPAFFVLALRAGPHALRLSVLHFLGPSRALLAAAH

SEQ ID NO: 166861 - protein, 42 aa, Glycine max
  Clone ID: PAT_MRT3847_121690C.1.pep
LLIISSESEGSQSLRPYWLGTINLPNTYFARKIIVFSSELGW

SEQ ID NO: 166862 - protein, 74 aa, Glycine max
  Clone ID: PAT_MRT3847_121691C.1.pep
EPLKTNTIKSKLKIKKLTQFFHYNNCGNMYHRQYQNIDLSPIKHIQCIIGPPKHPLLRPNRSIFILNPTIELFP

SEQ ID NO: 166863 - protein, 152 aa, Glycine max
  Clone ID: PAT_MRT3847_121692C.1.pep
LGSESSKLVEHLDGSSKENFCPTALTLKFTNFDSVPSTTDLNNIFGRFGPLIESKTELLERTNRARVVFQRRSDALAASACAGLHCLVGPSRVCLRRHILPRQPPQAAGERGRVRWMAPRSVAGAAARPPGVGPVNLAWGVYVNVNIPSILC

SEQ ID NO: 166864 - protein, 71 aa, Glycine max
  unsure (1)..(71): unsure at all Xaa locations
  Clone ID: PAT_MRT3847_121693C.1.pep
KTFPCHIYLSFLGIFILDIHDKIVRDKPISVSLLFHLFIFVCVLICIMSIGSVDKISVXXXGGCHFQXXXG

SEQ ID NO: 166865 - protein, 181 aa, Glycine max
  Clone ID: PAT_MRT3847_121694C.1.pep
PACSPVRISGRPRPGYARNGFGEEATSFFRLMKMKRIHVNKLTVLSVLMACGTIKSLLFGREVHAQIIKSNIHTNIYVGSTLVWFYCKCKEYSYAFKVLQYMPFRDVVSWTAIISGCARLGLEHEALEFLQEMMEEGVLPNSYTYSSALKACAELEAPIQGKLIHSYASKTPASSNVFVNS

SEQ ID NO: 166866 - protein, 139 aa, Glycine max
  Clone ID: PAT_MRT3847_121695C.1.pep
QWVSMGVVLLIIAIILHFTDALPINKQLYSFSYVCFTAGAAGIVFSGFYILIDVWGLRTPFLFLEWIGMNAMLVFVMAAEGIFAAFVNGWYYEDPRSSLVHWIKKHVFVNVWHSERVGTILYVIFAEITLWSVVAGVLH

SEQ ID NO: 166867 - protein, 55 aa, Glycine max
  unsure (1)..(55): unsure at all Xaa locations
  Clone ID: PAT_MRT3847_121696C.1.pep
MVKKVMNTNPNSFRKIGEKFLETKGGGYWENLKNKIXKVRQLFLKVENKIEGLGR

SEQ ID NO: 166868 - protein, 103 aa, Glycine max
  Clone ID: PAT_MRT3847_121697C.1.pep
GTNLMETRKEWQPDLPCDKIPSVWSPPDERTGGTEHEGFDPSLGGSQKYATPMMPLDEEILCKVAQDMVEEWFDRDDEEDSFEEDSLSAALKGVEGLDYLERI

SEQ ID NO: 166869 - protein, 85 aa, Glycine max
  Clone ID: PAT_MRT3847_121698C.1.pep
QFLILLCSTLCIPLSVEYIECTEMAITEFLLFILTATLGGMFLCGANDLITIFVALECFSLCSYLLSGYTKKDVRSNEATMKYLL

SEQ ID NO: 166870 - protein, 92 aa, Glycine max
  unsure (1)..(92): unsure at all Xaa locations
  Clone ID: PAT_MRT3847_121699C.1.pep
VIINGWXMERDXKIWKDGKXFKXERFDEEGEEKKLVXFGMGRRXWXGKXMXMESVRYNLGLMIECFGWKRVSEKKVDMXENNWIXLXRVIEL

SEQ ID NO: 166871 - protein, 258 aa, Glycine max
  Clone ID: PAT_MRT3847_12169C.1.pep
MESRGHSNPLLSFSSFIHQHCVRLGSDLATRLDDTKRALAQAHHNLLFPKHALAATSTLGSLHVAKSLVGTSVYTVSNSNNEFVLISDADGAKSIGLLCFRQEDAEAFLAQVRSRSRELRSKARVVPITLDQVYMLKVEGIAFRFLPDPVQIRNALELKPANKGGFDGVPVFQSELLVVKKKKKRYCPVYFSKEDIEQELSKVSRASRGPGVSQHIAVGSLEDVLRKMEMSERNSGWEDLIFIPPGKSRSQHIQELNE

SEQ ID NO: 166872 - protein, 221 aa, Glycine max
  unsure (1)..(221): unsure at all Xaa locations
  Clone ID: PAT_MRT3847_1216C.1.pep
MASKGLTILAVLICVSALGLSASVAAEGPNNGLDMNFYKELCSHAEDIITEQAKLFYTRHRNSAFFWLRNIFHDCAVQSCDAPLMLDSTRRSLSENDTDRGFVLRDFKYIETIKEAFERECPVVVSCADILDLSARDGICSLGGPHIPLKTGRRDGRRSRAYVDDLVLPYHNESISAVLDKFGAMGIDTPGVVALLGAHRVGRTXLLKLVPRLYPENGFSS

SEQ ID NO: 166873 - protein, 182 aa, Glycine max
  Clone ID: PAT_MRT3847_121700C.1.pep
SKFYPDYRADDIRAAKKKAVAYIKRAQRKDGSWYGSWGICFTYAAMFALESLASVGETYETSEHSRRGCEFLIEKQQADGGWGESYLSSEKHVYVQHEKSQVVQTAWACLALMEAQYPHKEPLERGIKLLMARQQRNGEWLQESIEGVFNQSCMISYPNYKFYWPIRALGLYSKKFGNEALQ

SEQ ID NO: 166874 - protein, 255 aa, Glycine max
  Clone ID: PAT_MRT3847_121701C.1.pep
MELKQQKLLLVLILTLLFATATPDSEYVRPLPRKTLTTIPWDSISKAHSSYPQQVHISLAGDKHMRVTWITDDKHSPSYVEYGTLPGRYDSIAEGECTSYNYLLYSSGKIHHAVIGPLEDNHAVIGPLEDNTVYFYRCGGKGPEFELKTPPAQFPITFAVAGDLGQTGWTKSTLAHIDQCKYDVYLLPGDLSYADCMQHLWDNFGKLVEPLASTRPWMVTEGNHEEENILLLTDEFVSYNSRRKMPYEEKWIHFK

SEQ ID NO: 166875 - protein, 47 aa, Glycine max
  unsure (1)..(47): unsure at all Xaa locations
  Clone ID: PAT_MRT3847_121702C.1.pep
XSXFXLGTXDHXXXRXXXRLNXXXYASLXFXLXXRHSXAXXRLSXRX

SEQ ID NO: 166876 - protein, 227 aa, Glycine max
  Clone ID: PAT_MRT3847_121703C.1.pep
MDVSERTLDGENSVRRRSRKKSMSGTASGAREHMEQLQKLQDKDPEFYEFLKEHDNELLQFSDDDVDEDVGTNTEDGNLQLDEEVSEDEIEEKEQKSSKEVITTSMVDLWGKSIQESGSLSAVRSLMRAFRTACHYGDDGGNESMAKLSVIMSSTVFNKIMLTVLTEMDGILRNLLKLPASGGKKETITDLMATKHWKSHGHLVKSYLGNALHGLNQMTDTEMISFT

SEQ ID NO: 166877 - protein, 167 aa, Glycine max
  Clone ID: PAT_MRT3847_121704C.1.pep
WKLGIRLELEPIELLGVDLPTAYQHAFTYIRQLATILREALNTKTKESFRKVYGWKFINCLELWTGAICAYSSESDFKQLAYPLTQIISGVARLVPTARYFPLRLRCVRMLNQIAASTHSFIPVSMLLLDMLEMKELNRPPTARKNDDTDDSPPKQKRKHRSTGLKG

SEQ ID NO: 166878 - protein, 53 aa, Glycine max
  Clone ID: PAT_MRT3847_121705C.1.pep
KKPPPARESKSEGLPPSEGRARCPPCGAGLAAVLQLAVFCCTDRTSIRDLRHS

SEQ ID NO: 166879 - protein, 179 aa, Glycine max
  Clone ID: PAT_MRT3847_121706C.1.pep
LPLNATVLDLRSEATSAFQEVYAMYKRFQAEELLGYGSISDSLTIRFLLGTSGSIQIQGKCPAKHGLSRFRMERGTEVWKVDCTCGAKDDDGEKMLACDTCGVWQHTRCAGIDNNTDGMPSKFVCMGCVNLYREETKKLPAPGEEANETCKFNTSCRNEAVARDCATVSCNIAVNFGVG

SEQ ID NO: 166880 - protein, 158 aa, Glycine max
  Clone ID: PAT_MRT3847_121707C.1.pep
YAMYKRFQAEELLGYGSISDSLTIKFLLGTSGSIQIQGRCPAKHGLSRFRMERGTEVWKVDCICGAKDDDGEKMLACDTCGVWQHTRCAGIDNNTDGMPSKFVCMRCVNSYREETKKLPTPGEEANETCKFTTSCRDEAVARECATVSCNIAVNFGVR

SEQ ID NO: 166881 - protein, 70 aa, Glycine max
  Clone ID: PAT_MRT3847_121708C.1.pep
KFEDKLEQKESSRSLYLQKIQSWDGYMFSSLFFAFLLLVLLSFHTMASRMSCTFHTFVNITNYCLKHLQT

SEQ ID NO: 166882 - protein, 499 aa, Glycine max
  Clone ID: PAT_MRT3847_121709C.1.pep
MISFTVFVFLTLLFTLSLVKQLRKPTAEKRRLLPPGPRKLPFIGNLHQLGTLPHQSLQYLSNKHGPLMFLQLGSIPTLVVSSAEMAREIFKNHDSVFSGRPSLYAANRLGYGSTVSFAPYGEYWREMRKIMILELLSPKRVQSFEAVRFEEVKLLLQTIALSHGPVNLSELTLSLTNNIVCRIALGKRNRSGADDANKVSEMLKETQAMLGGFFPVDFFPRLGWLNKFSGLENRLEKIFREMDNFYDQVIKEHIADNSSERSGAEHEDVVDVLLRVQKDPNQAIAITDDQIKGVLVDIFVAGTDTASATIIWIMSELIRNPKAMKRAQEEVRDLVTGKEMVEEIDLSKLLYIKSVVKEVLRLHPPAPLLVPREITENCTIKGFEIPAKTRVLVNAKSIAMDPCCWENPNEFLPERFLVSPIDFKGQHFEMLPFGVGRRGCPGVNFAMPVVELALANLLFRFDWELPLGLGIQDLDMEEAIGITIHKKAHLWLKATPFCE

SEQ ID NO: 166883 - protein, 110 aa, Glycine max
  Clone ID: PAT_MRT3847_12170C.1.pep
MASNRGQGGIQQLLAAEQEAQRIVNAAKNEKLARLKQAKEEAEKEIAQYRAQLEAEFQKKVSDSTGDSGANVKRLEQETDEKIQHLKTEAARISDDVVAMLLKHVTSVKN

SEQ ID NO: 166884 - protein, 54 aa, Glycine max
  Clone ID: PAT_MRT3847_121710C.1.pep
HWQATPVPNKCFHLMQSWLYQAHMLFTRPNNNVCMPIYTSIVVYCIRGPYGKVL

SEQ ID NO: 166885 - protein, 62 aa, Glycine max
  unsure (1)..(62): unsure at all Xaa locations
  Clone ID: PAT_MRT3847_121711C.1.pep
EHLLEGFDLQHMLTSNNVTLIDTNYQKIXPTHTSISFRXNXXRIXTDRFPYCFXXXIGIIIN

SEQ ID NO: 166886 - protein, 43 aa, Glycine max
  Clone ID: PAT_MRT3847_121712C.1.pep
KNKLEKKVITIIVSVEDQRDDFLESNKGARTFKLPNPLSKIKL

SEQ ID NO: 166887 - protein, 36 aa, Glycine max
  Clone ID: PAT_MRT3847_121713C.1.pep
ERSRSSEQSFKKKIKVLHYSLTKIATGFSWMKKTGF

SEQ ID NO: 166888 - protein, 81 aa, Glycine max
  Clone ID: PAT_MRT3847_121714C.1.pep
YHQLALCFLISNCFPLCSCAFFSISNPSNSSLSFSIVFFLESAAAGSFSITQEKSDSWKFQMLPMVVIKSNPYSPQISAML

SEQ ID NO: 166889 - protein, 86 aa, Glycine max
  Clone ID: PAT_MRT3847_121715C.1.pep
YPEPQYILHLLRTMVLKSTPPPNNISRHSKKQKACDIRDEKIFTPNISIPHHIHRQNAKQFFPLNLLHPCQHQRLVHFSSPTCAKF

SEQ ID NO: 166890 - protein, 82 aa, Glycine max
  Clone ID: PAT_MRT3847_121716C.1.pep
KKKKKKKENKKKKKKKKKKNNKKKKKKKKKKKKRGRPPLINLFNPEINSEPVPAGFPLFLLWSRFKPWRNNGHSFFLCKIFF

SEQ ID NO: 166891 - protein, 53 aa, Glycine max
  Clone ID: PAT_MRT3847_121717C.1.pep
FIIVIFIWRRGFLEKKLVTELAELERKLKIRLLRILSNIWQVRYSKFFHCDLL

SEQ ID NO: 166892 - protein, 108 aa, Glycine max
  Clone ID: PAT_MRT3847_121718C.1.pep
SLGGFHFSEPYSVRCRPPSHRICILSIIIMEHSVLLLFFLRVGTLQVHLLAWPVGGYPGICGSNGPFQVVWLAILYFSASFLGSRSAKNSMVLRVFVSTRIFGGVVAR

SEQ ID NO: 166893 - protein, 148 aa, Glycine max
  unsure (1)..(148): unsure at all Xaa locations
  Clone ID: PAT_MRT3847_121719C.1.pep
MFNVIGFSLLTMDSVAYRGLLYTFFILNFVLVCQLILLQPLVSASDGKPENAAELFERASQSIKVKDYTEALXDLNAAIEADPTLSKAYLFRASVLRQLCRYEQSERSYKKCSGLKPGDSAAEKELSQLLQAQRALETAXSLYDSGNF

SEQ ID NO: 166894 - protein, 53 aa, Glycine max
  Clone ID: PAT_MRT3847_12171C.1.pep
YGCEKTTEGGRTFYKTEFCLISRAQKRERKCEQRWLGWVVPSLLIQLFHYTYT

SEQ ID NO: 166895 - protein, 56 aa, Glycine max
  Clone ID: PAT_MRT3847_121720C.1.pep
MIFRLAVNLHKSVERCRYTPGLIDYSAPKICINLPSSLKLQSHPSQASISKDGRRY

SEQ ID NO: 166896 - protein, 145 aa, Glycine max
  Clone ID: PAT_MRT3847_121721C.1.pep
NATTFTAKKKKKKKKKKKKKKKKKKKKKKKKKKKKKKKKKKKKKKKKKKKKKKKKKKGGAPFRGPNFPPRGTQENFFFLGPQKKNPGPGVYHGGRGKTRGAPKLIALAKNPLFPSGEKAKGPPPVPLSKSGAILMGKGPPPLSAH

SEQ ID NO: 166897 - protein, 315 aa, Glycine max
  Clone ID: PAT_MRT3847_121722C.1.pep
VQGTDQDRLILHISESWLDERMQMQLEAGQNGFTDKSIVDKLSLEIETFLKAKQNSRSTENIAVRNCRNSLESVPLNDAVSAPQEVGDDDDSVGSDSNCFELNKPSNKGSKVHEEEPVGKIFEETSKTNQPKKKPIPREGLKHRSPCSLQVEFEEQIAWAMSSDSHKKSQSIDADQGKTTDTRPVEGIVSEKSEHFEIYENDDSERKNIPTELHSSSKNHIIDNLLRGQLLASEGGNMHAENNYGEASCSNAGWRNQASPVKQWMAKLASQDLDISEASKVPSGSKESNNTLKAKLLEARSKGQRSRLKALKGSF

SEQ ID NO: 166898 - protein, 83 aa, Glycine max
  Clone ID: PAT_MRT3847_121723C.1.pep
FPPRFFFCIFKGILFSPRKRLFPFFPQAFIFPPSGKFCSPPRSGPVFPFRAPLPTPRWAPGWEKNIHTIGGDQNKKSGPFLGA

SEQ ID NO: 166899 - protein, 134 aa, Glycine max
  Clone ID: PAT_MRT3847_121724C.1.pep
GVLSVVWAVKIFPGALTLAPFFKKFFSGFSRGAFFKNWGRYPPPSFPGPFPWLLPLGGSLGGFLRRETGRGALVRYPTPGAPKWGAFWFVLPLGPPLVPLSGFKNDLLDYWGPFLVPCPLIPCRTLCNFFGFFW

SEQ ID NO: 166900 - protein, 193 aa, Glycine max
  unsure (1)..(193): unsure at all Xaa locations
  Clone ID: PAT_MRT3847_121725C.1.pep
DFFPCTVGPFVFRDGQVKSFKEKDEVDAWLFSNPMRRLEALHFXERNYIVISYDLHTNSTSLQQRWKYEDPTDLFHLPLQLAADREIVRYLIGGVKIFKINSEFAHPSMNPFSTVASNFRILSPKYTLLVHDPRKLCHSFMIKFTVTVWFFCSLXAMNMMGLYDFAYWFSWLIWEAVVTILSSLLIISFDCII

SEQ ID NO: 166901 - protein, 79 aa, Glycine max
  unsure (1)..(79): unsure at all Xaa locations
  Clone ID: PAT_MRT3847_121726C.1.pep
ETLVFCWILSFHYVLRPKHFETQASVFLLLGLPIFPNLSNKPKIPHDLLISLENINSFDIGLLFCISCSPXSKSLNFGP

SEQ ID NO: 166902 - protein, 47 aa, Glycine max
  Clone ID: PAT_MRT3847_121727C.1.pep
RPRVRRDTLYDLSEPMFKFIKVGIVYTCATCILDYLGFYEARPITIL

SEQ ID NO: 166903 - protein, 147 aa, Glycine max
  unsure (1)..(147): unsure at all Xaa locations
  Clone ID: PAT_MRT3847_121728C.1.pep
MSEKAALGSWSSGLCGCFSDCSSCCLTFWCPCASFGRIGEIVDKGTTSCCLHGSLFCLLGGFSYLAGIYACMYRTKIRRQYGIEGHQCADFLLSCFCSACTLCQEYRELQARGFDVSAECXIGWKGNVQMRTSGVTAAPVVNGGMSR

SEQ ID NO: 166904 - protein, 43 aa, Glycine max
  Clone ID: PAT_MRT3847_121729C.1.pep
AKKLSFQTTEQSLKNKIEACFVVDSKEKEPPFSKDQKASHHNL

SEQ ID NO: 166905 - protein, 93 aa, Glycine max
  Clone ID: PAT_MRT3847_12172C.1.pep
ASTPQHTLEAHPDLWQLRINMNPWTLLLDELGLHTEHAKCYYGCPSCTGLGRFKRLQHHFPPGASILTYEDGEHLMTLPVNVDKGVYLMGAAL

SEQ ID NO: 166906 - protein, 48 aa, Glycine max
  Clone ID: PAT_MRT3847_121730C.1.pep
NRLVSILKEPKWKLNSDNGYKYASCCSHLPTIYSAVYLAKVLIVLCLV

SEQ ID NO: 166907 - protein, 241 aa, Glycine max
  Clone ID: PAT_MRT3847_121731C.1.pep
MCSLEKRGNAWVLTLDGDDGDVQHRLNPTLIDSLLSTLNRLASQATPGSVLVTTATGKFFSNGFDLSWARAAASASAATDRLQFMVDSLKPVLAAIMSLPMPTIVAINGHASAAGFLLAVSHDYVLMRSDRGVLYMPEVDLGLPLPGYFAAVIRSKIRSPAVMRDLVLGGAKLTAAEAVRMGIVDSAHDSAESTVEAAMRLGEQLARRKWVGEVYAEIRKSLYPDACKVLGLTQKAIVSKI

SEQ ID NO: 166908 - protein, 68 aa, Glycine max
  Clone ID: PAT_MRT3847_121732C.1.pep
RFYCHHSNRSQDGKASSYIEHTCQTLETDSCTYWTFIYESAATDYIIEKRIDYLPLTMTAEDRHHFLL

SEQ ID NO: 166909 - protein, 73 aa, Glycine max
  Clone ID: PAT_MRT3847_121733C.1.pep
MPTKPTLVGCWICPWGMPTINICIPHTIINSNHPLVINHSIVWIVYYTILVWLNKKCTVASPIGPLRGLSLLC

SEQ ID NO: 166910 - protein, 181 aa, Glycine max
  Clone ID: PAT_MRT3847_121734C.1.pep
MVKYSREPDNPTKSCKARGADLRVHFKNTRETAFAIRKLPLVKAKRYLEDVLAHKQAIPFRRFCGGVGRTAQAKSRHSNGQGRWPVKSAKFILDLLKNAESNAEVKGLDVDALYISHVQVNQAQKQRRRTYRAHGRINPYMSSPCHIELILSEKEEPVKKEAETQLATSKKKGALRSGASS

SEQ ID NO: 166911 - protein, 181 aa, Glycine max
  Clone ID: PAT_MRT3847_121735C.1.pep
MVKYSREPDNPTKSCKARGADLRVHFKNTRETAFAIRKLPLVKAKRYLEDVLAHKQAIPFRRFCGGVGRTAQAKNRHSNGQGRWPVKSAKFILDLLKNAESNAEVKGLDVDALYISHIQVNQAQKQRRRTYRAHGRINPYMSSPCHIELILSEKEEPVKKEAETQLATSKKKGALRSGASS

SEQ ID NO: 166912 - protein, 79 aa, Glycine max
  Clone ID: PAT_MRT3847_121736C.1.pep
MIGLYVCRLNRIRNLSNISTGAPIRIHNQTEFTKNVIMFDDDREEKAFGLTFAEAGTMYMSAAEIDNKALQLDFTKCIP

SEQ ID NO: 166913 - protein, 244 aa, Glycine max
  Clone ID: PAT_MRT3847_121737C.1.pep
MSSSKLFTTFLFSLNLALLLQTSFGADPLFHFCSNSENFTANSPYESNLKTLINSLIYKTPSTGFGVGSVGQYQNQKAYALALCRGDVSASECKTCVSEAPKEILSRCPYNKGAIIWYDYCMFKYLDTDFLGKIDNTNKFYMWNLKNVSDPATFNYNTRDLLSQLAQKAYVNNKLYATGEAKLENSETLYGLTQCTRDLSSSDCKKCLDDAINELPNCCDGKEGGRVVSGSCNFRYEIYPFVKE

SEQ ID NO: 166914 - protein, 598 aa, Glycine max
  Clone ID: PAT_MRT3847_121738C.1.pep
MAPPTPAVEGAQAPQGRQQQPQGGFGLTGIIRMVVFWYFASKFFSPKKPTEPSALISNLFQKAQPLDMWLYLSEHEKFNDFGSESSLVWHETNVPYAVWGPESTRTHTLKYHPSESLKHNGSLYAHVFFAHSGFSPDPSDPEYQPQAAFGRTHPVVTYLPKSKADKKKSLLGSSPDSSEAQVASKVVDESEDDDDSSDDGDSNDDGPVEWASYWKPNITINLVADFTQYPKTGVAPNIAPYLNVDPLTGNYYPIVYFNEFWLLRDKLIPLNETVTELSLNLEVGPISMTKWQLFLQIDQSFQIHRSYGSMLEGEADELKRVFLEGNPYLLAITMVVSLLHSVFDFLAFKNDIQFWNKNKSMEGLSAKTVVVSFACQLIIFLYLLDNDTSWMILASSGIGCVIEFWKIGKAMRIEIDRTGRIPMLKLRDRESYVRNKTKEYDDIAMKYLFYVLFLLVAGFSVYSLMYERHKSWYSWILSSLTSCVYMFGFIMMCPQLFINYKLKSVAHLPWRQMTYKFLNTIIDDLFAFVIKMPTLHRLSVFRDDLIFVIYLYQRWIYKVDKKRVNEFGFGGEDDQVVAETDATKEEENTTTEEEKKTN

SEQ ID NO: 166915 - protein, 133 aa, Glycine max
  Clone ID: PAT_MRT3847_121739C.1.pep
KKKQIPRSSFRFYISCRGQPGGLSQRRKESRRRKEERPRAKMASPSTTGDTNKIAVRSSLVESFRGCGISGIRIDKEELKKQLTMPQYLRYAMRDSIRLQDPVAGESRYINRAEGEDAAAPLCPMVVFINPRS

SEQ ID NO: 166916 - protein, 110 aa, Glycine max
  Clone ID: PAT_MRT3847_12173C.1.pep
MASNRGQGGIQQLLAAEQEAQRIVNAAKNEKLARLKQAKEEAEKEIAEYRAQLEAEFQKKVSDSTGDSGANVKRLEQETEEKIHHLKTEAARISDDVVAMLLKYVTSVKN

SEQ ID NO: 166917 - protein, 200 aa, Glycine max
  Clone ID: PAT_MRT3847_121740C.1.pep
MAPPAPAVEGGQAPQGRQQQPQGGFGLSGIIRMAVFWYFASKFFSPKKPTEPSALISNLYQKAQPLDMWLYLSEYEKFNDFGSESSLVWHETNIPYAVWGPESTRTLTLKYHPSESLKHNGSLYAHVFFAHSGFSPDPSDPEYQPQAAFGRTPPGVMDLPKSQADKKKSLLGGSPQSSEAQGHPRGVMNLKMKILRMDGP

SEQ ID NO: 166918 - protein, 101 aa, Glycine max
  Clone ID: PAT_MRT3847_121741C.1.pep
MMCPQLFINYKLKSVAHLPWRQMTYKFLNTIIDDLFAFVIKMPTLHRLSVFRDDLIFVIYLYQRWIYKVDKKRVNEFGFGGEDDQAVAETDAAKEEEKKTN

SEQ ID NO: 166919 - protein, 68 aa, Glycine max
  unsure (1)..(68): unsure at all Xaa locations
  Clone ID: PAT_MRT3847_121742C.1.pep
AQDCLTTIFISFSYQPHTHXCYFLIIKSNNNPLILSLPKNSLTVNANIIHSFFNYNIKLSNEPLNKRM

SEQ ID NO: 166920 - protein, 95 aa, Glycine max
  Clone ID: PAT_MRT3847_121743C.1.pep
HYRILAIQDEHKYHKSPNFFIWGILVSKHYRIRFLSAFFSHFLPIFSLVAKCKPASSKLGLEDVSKVVRTADTSWARYCSSRRCPGSSGSAAFSN

SEQ ID NO: 166921 - protein, 122 aa, Glycine max
  Clone ID: PAT_MRT3847_121744C.1.pep
QLENGDKTEQIDEKAKKSDVDMEETDLNDTNNKLENDSAEIKNSHVKGENVITEKPEGEEAQKLEIEPAEKVAEEAADTEKSQGPLLTTELEKEENEEKTDTVILDANGGVEKENPNAAAEM

SEQ ID NO: 166922 - protein, 73 aa, Glycine max
  Clone ID: PAT_MRT3847_121745C.1.pep
CFGRIYISFWKFASCKKVSKKFFKDEMLQNDWLRFVTLVGFICFVFVYVAMAEEYRISPGSDLFNDPWLGLLR

SEQ ID NO: 166923 - protein, 41 aa, Glycine max
  unsure (1)..(41): unsure at all Xaa locations
  Clone ID: PAT_MRT3847_121746C.1.pep
VFLKFXFEGFXPLGTLIHMTININXSMFQXILYYXIXKXXX

SEQ ID NO: 166924 - protein, 93 aa, Glycine max
  unsure (1)..(93): unsure at all Xaa locations
  Clone ID: PAT_MRT3847_121747C.1.pep
PPPATTCHLPHPQXSLSTTAXEXVEEVSGXVSTIXAFLAHVQPSQKRDLRNDDXGPRPEALDWSXSSXSAXATXKPXKRVNXLVALPFSEPRX

SEQ ID NO: 166925 - protein, 71 aa, Glycine max
  Clone ID: PAT_MRT3847_121748C.1.pep
KKKKTKKKNKKKNAPPPTKNLINPKINSNPNPTANPPSLIMSRIKPFLNHSQTHILYKIIILSHFHTTYYP

SEQ ID NO: 166926 - protein, 148 aa, Glycine max
  unsure (1)..(148): unsure at all Xaa locations
  Clone ID: PAT_MRT3847_121749C.1.pep
MVGLPSLVEILIIQIVSHVSSANIVHSNIWGHSCILSILGFRYYVTFIDDFSRHTXLFLMKECSELFFVFQKLXEIHTQFGNKIRALHSDDAREYFXYSFFTFMTSHGMIHQSSCPHTLQQNGVANHKLQHIIDTARTLLTHSNATKF

SEQ ID NO: 166927 - protein, 79 aa, Glycine max
  Clone ID: PAT_MRT3847_12174C.1.pep
FKYCNLIQKTRGLGNKKGKRKRDKKKRKGRGDAGVELEPERGQRNLKGIPFIAGGMEKKICVQMKLNLRWGNINRKTRG

SEQ ID NO: 166928 - protein, 51 aa, Glycine max
  Clone ID: PAT_MRT3847_121750C.1.pep
RIQNNVNFISSINLVLFLLFCTTVCFIVRIGDNPRINSHVADISDIKQIKV

SEQ ID NO: 166929 - protein, 219 aa, Glycine max
  unsure (1)..(219): unsure at all Xaa locations
  Clone ID: PAT_MRT3847_121751C.1.pep
RLREDDRRVRLREDDRRVRLREDDRRVRLREDDRREEDGEIISESSSKSAPSSDEDEHEEERESEGDLFMIRRMLGSQAVELDDCQRENIFHARXLIQGKLRSLIIDSGSCTNVPNARLVSKMNLETKPHPWPYKLQWLSEDGEMIVNRQVEVGFSIGKYEDYVLCDVXPMEACHLLLGMPWQHDRRVMHDGFTNKFTFVHKDCKTTLAPLAPRKDGEV

SEQ ID NO: 166930 - protein, 38 aa, Glycine max
  Clone ID: PAT_MRT3847_121752C.1.pep
SRPVILLQKSYVASLLKWVKENPQFRILEACQFSPVMS

SEQ ID NO: 166931 - protein, 61 aa, Glycine max
  Clone ID: PAT_MRT3847_121753C.1.pep
QTLALISCSIDPETIKPIPLTLSGCSPPLLYLCHSLSLFFKLGVGDVKLFQFPLLSSSRTR

SEQ ID NO: 166932 - protein, 50 aa, Glycine max
  Clone ID: PAT_MRT3847_121754C.1.pep
FVLERFFTSTCSYNPLKQRSMICSTTHESKIQLPLINQHCESLNSYIMKQ

SEQ ID NO: 166933 - protein, 63 aa, Glycine max
  Clone ID: PAT_MRT3847_121755C.1.pep
FGFFFFFFFHPQKATLLFIFISRFYKLRTKSIPIKGTLKSTPGTTNFQRGLLPPDASHSFLKC

SEQ ID NO: 166934 - protein, 54 aa, Glycine max
  Clone ID: PAT_MRT3847_121756C.1.pep
IKTSKLVKGLPLHRILTSFGLRANSCHFQVLTQIQLIDLPFQISLSVKPCFYPL

SEQ ID NO: 166935 - protein, 73 aa, Glycine max
  unsure (1)..(73): unsure at all Xaa locations
  Clone ID: PAT_MRT3847_121757C.1.pep
LXCTSYNITQLYISQKILIYNHFNIFTNNTDTINFTILYTTATYTSTIISPLIYKISSTSIIKFSLQIQIPLH

SEQ ID NO: 166936 - protein, 76 aa, Glycine max
  Clone ID: PAT_MRT3847_121758C.1.pep
KTRLRFNDVKTSCFSSIASTLALQAHFKSPSTASIPTPSWWCASPPVQLDLLCRRLQHYPHMEDLHQDLCSSRVDL

SEQ ID NO: 166937 - protein, 48 aa, Glycine max
  Clone ID: PAT_MRT3847_121759C.1.pep
HPHYYTMISQRDLKLARGRLLKLTPFFLTLVVQLAVSFMTPEWILTAE

SEQ ID NO: 166938 - protein, 111 aa, Glycine max
  unsure (1)..(111): unsure at all Xaa locations
  Clone ID: PAT_MRT3847_12175C.1.pep
SLVNPQRSKFITMKNHVDITVPQLAQKLSSVHIDNHFIRRDYTVTNNSLANHIYDDYFMPGRYLHLKLSLMFADFWEEALPCLYFPLIPKCVQPQLNXAGFQEEGQICHFH

SEQ ID NO: 166939 - protein, 54 aa, Glycine max
  Clone ID: PAT_MRT3847_121760C.1.pep
GNNENRPSPGTYCPRGAFLVIALISVTCFRFSTNLSPFSAIADHHHFFGDTVPG

SEQ ID NO: 166940 - protein, 55 aa, Glycine max
  Clone ID: PAT_MRT3847_121761C.1.pep
WDPNPVYINRTAQSTFLGREDYLQEKKYPTAHLEGWKINRGYLPNQIKAFFLVKD

SEQ ID NO: 166941 - protein, 114 aa, Glycine max
  Clone ID: PAT_MRT3847_121762C.1.pep
PLFFSIGDPPFFALLPPFCCSWIFLFPPLFGGRELNPFFFRLFFFLALRGLNFFLPGRILFFFVGGFQFPPYKKMSMTSPGCFKFPCGKPGSPKRTKQKKKPQKKNKKKKKKKK

SEQ ID NO: 166942 - protein, 58 aa, Glycine max
  Clone ID: PAT_MRT3847_121763C.1.pep
LPLLTFASFLSYSYSAYTLMVLVPILWDDAVSEPQPEPVLEEFSTLSTLPTIDESSSA

SEQ ID NO: 166943 - protein, 99 aa, Glycine max
  Clone ID: PAT_MRT3847_121764C.1.pep
ATARSCLSATCMPSRALAVHEQDVDLEVARLDALLEGSDLDPAVVAAMSKTRVVEAREGNERVHTHHHYRQSAPDSHPTRRSTKRKRHSYLGARAEFRA

SEQ ID NO: 166944 - protein, 78 aa, Glycine max
  unsure (1)..(78): unsure at all Xaa locations
  Clone ID: PAT_MRT3847_121765C.1.pep
XSLSXEKXHKFWGNPTXXARGGVXXDSTXAKGXIGLPIPLSEGKQXPYRGGGHYXXVTFDINSXETCDKGYNLLAHNY

SEQ ID NO: 166945 - protein, 298 aa, Glycine max
  Clone ID: PAT_MRT3847_121766C.1.pep
MMTANCVRFSFNYNNPCLLFANGYPSSSSLPLSLQNKPRKSASVIVSARKKDKKEDTHSSVPKPDEVTGFFPEAVLLKKRTVEEEGKLLPEFEDAEERQLFEALMLELDSDMDVEILRHYEVMYLIHEKHEEEVAAVNEKIQDFLREKKGQVWRLNDWGMRRLAYKIKKANNAHYMLINFELDAKYINDFKTLLDQDERVIRHLVIKRDEAITEDCPPPPEFHTLRANADDNDDEEFDENYDDDWDGEDEEDGNDGDDGENGIIFVDDDDDDIDSRNETPANVRQPDIRKLRAENVGR

SEQ ID NO: 166946 - protein, 134 aa, Glycine max
  unsure (1)..(134): unsure at all Xaa locations
  Clone ID: PAT_MRT3847_121767C.1.pep
FVVSVFEMGEIWWSLLGAAIPVVVAGQAFRVKKRRAEEQRLQSARGRERSSDEIFVCERVCTSKRMLKKVGSFSKDPIPDTCVTVCGASDLDACADACARTVCVNQHQVPNWXDICLRRCQSECLKLSSQSHSS

SEQ ID NO: 166947 - protein, 140 aa, Glycine max
  Clone ID: PAT_MRT3847_121768C.1.pep
EEEANLVICCVFEMGEIWWSLLGAAIPVVVAGQAFRVKKRRAEEQRLQSARGRERSSDEIFVCERVCTSKRMLKKVGSFSKDPIPDTCVTVCGVSDLDACADACARTVCINQHQVPNWNDICLRRCQSECLKLSSQSQSS

SEQ ID NO: 166948 - protein, 79 aa, Glycine max
  unsure (1)..(79): unsure at all Xaa locations
  Clone ID: PAT_MRT3847_121769C.1.pep
SPEKLLNQQKRHPLMGAPWPAKRAQLHATPAASAPLFSIDHSGYRIPASQXLIITHSDSGKHATPFSEPFALYNAQQHL

SEQ ID NO: 166949 - protein, 122 aa, Glycine max
  unsure (1)..(122): unsure at all Xaa locations
  Clone ID: PAT_MRT3847_12176C.1.pep
MGADGESKKGARGREGGGPXKKPGSRGVKAGLQFPVXRDWRDLRRRGGAQRVXAGAPVYLAAGLEYLAAEVLXCGGNAARDNKKNRSIPRDVLXGXRSYEEXXKLVXWVTIAHGGVLPNINP

SEQ ID NO: 166950 - protein, 51 aa, Glycine max
  Clone ID: PAT_MRT3847_121770C.1.pep
CPGWVKTDMGGPKAPKSPKKGAKTPVYLALLPPNGEGPHGQFVSKKKVEQW

SEQ ID NO: 166951 - protein, 53 aa, Glycine max
  Clone ID: PAT_MRT3847_121771C.1.pep
SRPTRWWLYKTQHGFLLLSVYFQKVASPIQQACGPCSFLAFQIIKLDPEQKQQ

SEQ ID NO: 166952 - protein, 78 aa, Glycine max
  Clone ID: PAT_MRT3847_121772C.1.pep
NLKWRNEGDWKLQHTRPSCSQLSRLAQGGEQDTNNKWKPPQERKGVRIFTSVKGEKGIARRKTCCNFQGLKNLGVFWH

SEQ ID NO: 166953 - protein, 54 aa, Glycine max
  Clone ID: PAT_MRT3847_121773C.1.pep
IPEVRVTKQNRAAGILENFAEGEKYSQHSLRKYVRGKQPQIMPSVNNFFSDPSN

SEQ ID NO: 166954 - protein, 82 aa, Glycine max
  Clone ID: PAT_MRT3847_121774C.1.pep
DKASSKLARRVYHEQKILIMSTSNKSYPTAELDVNFNSITWIINLTIAPKAAIHKIDNIIKNRQCNSYVMLRNATPYCTMIF

SEQ ID NO: 166955 - protein, 64 aa, Glycine max
  Clone ID: PAT_MRT3847_121775C.1.pep
GGSLVFFVQALSFLMAVFGNMVEYRHIEVDYTNLPYMGLVMLGTQLSDLRGRYALGGSNGKGLH

SEQ ID NO: 166956 - protein, 43 aa, Glycine max
  Clone ID: PAT_MRT3847_121776C.1.pep
FEENMTMKVSNLLNSLNFSLCFSSLSRKFQFDLSTIPRTISRL

SEQ ID NO: 166957 - protein, 70 aa, Glycine max
  Clone ID: PAT_MRT3847_121777C.1.pep
NNGFKMWSSEWANQTSWHLSFLIANPNQFTVFDILLGISQDFEIAGKIFKPAFFVPQAAASFFKNGESFA

SEQ ID NO: 166958 - protein, 50 aa, Glycine max
  Clone ID: PAT_MRT3847_121778C.1.pep
LKNKIHHIQKETYWCYGNYVSRHFPIRYITNMTVLQTTPTHDCCTQPLKK

SEQ ID NO: 166959 - protein, 107 aa, Glycine max
  Clone ID: PAT_MRT3847_121779C.1.pep
MAGLLSSIFGADKDQVNWAVYFKIRAGGDGDRGCRLHTKRTSPPTFVLAHMYQRPNMDMGIITNRYEPHPQSLDLRKVQDHFGDYCEDLCHALNRYCPSESLNIWDN

SEQ ID NO: 166960 - protein, 66 aa, Glycine max
  Clone ID: PAT_MRT3847_12177C.1.pep
PKPSNTKFTPSTTPPLTPSYFSTTIKPLSTPLFISLSAPSTHTAPLISTTSYTTLTTPPPTTKSIT

SEQ ID NO: 166961 - protein, 58 aa, Glycine max
  Clone ID: PAT_MRT3847_121780C.1.pep
EIHVCHKTQKEEMTFFLPSEHRNHRNKSELLDLEEKGDVGAREEERPIICAGEMISSL

SEQ ID NO: 166962 - protein, 198 aa, Glycine max
  Clone ID: PAT_MRT3847_121781C.1.pep
MFAEPYVADSKDPAYSPPTPGMKVQTNKNALVPEIVPTFEPSDADIPDNYVTQTVLKQKYLPPITWRNLLSNIQWVSFLALTITPALAIYGLCTVPYNQKTAIWAVIYYYITGLGITAGYHRLWAHRSYNASVPLQYALSLAGAGAVQGSIKWWSRGHRAHHRYTDTKLDPYSAHEGFWWAHVGWMLGKPRGKIGVAD

SEQ ID NO: 166963 - protein, 45 aa, Glycine max
  Clone ID: PAT_MRT3847_121782C.1.pep
KGRGKRLDCIGICFSPHLKKGGEKGKLGCFMKPGLNRVKGLKKGC

SEQ ID NO: 166964 - protein, 51 aa, Glycine max
  unsure (1)..(51): unsure at all Xaa locations
  Clone ID: PAT_MRT3847_121783C.1.pep
KGEGLNLWGYRYNRKGGDDFTLKGVFNIDRGGIWGKLRWVWRXRGWGGGNS

SEQ ID NO: 166965 - protein, 122 aa, Glycine max
  unsure (1)..(122): unsure at all Xaa locations
  Clone ID: PAT_MRT3847_121784C.1.pep
MPRTSSETIGSLNILTGGEFCFTLIXRSDLEGSKSIDCMSGRMSQMRYPCGIFTDTSTFNFRMTTGSIGHAFTGSYSVLEIXTLXXXTLLLHTRFMFWLISXLGHRRYVLTDVXXQXXSTPD

SEQ ID NO: 166966 - protein, 256 aa, Glycine max
  unsure (1)..(256): unsure at all Xaa locations
  Clone ID: PAT_MRT3847_121785C.1.pep
PTIISESFQKALEKGLEILTDMSRPVQLSDRETLLNSATTSLNSKVVSQYSSLLSPMSVNAVMKVIDPATATSVDLRDIKIVKKLGGTIDDCELVEGLVLTQKVANSGITRVEKAKIGLIQFCLSAPKTDMDNQIVVSDYAQMDRVLREERAYILNLVKQIKKTGCNVLLIQKSILRDALSDLALHFLNKMKNYXVLRDVEREDIEFICKTIGTKPVAHIDQFTADMLGSAELAEEVSLNGSXKLFXITGCTSQGK

SEQ ID NO: 166967 - protein, 150 aa, Glycine max
  Clone ID: PAT_MRT3847_121786C.1.pep
PRVRSLLFFSTSSLPNHSSFREPEEQWNLQRHRCQLIGNATLPPTTPCGLAAVLRVSDALRVMVYICQIGVSPGEEVGVSPGEEIPFGKIVKCPSCRIAVGVAQPQQVLEIVSCAKCRCQYELVLGDIVSIESEEISQCFLPNAAWTSPH

SEQ ID NO: 166968 - protein, 97 aa, Glycine max
  Clone ID: PAT_MRT3847_121787C.1.pep
GLNPLVHERKMTLTNPEFGQEVSKARPKIVSANDGTQVVPKRLNFNFSTLTTYTQSLGYNTISLEIDGIAKIALIYTQKIFIMYLPRRNCSNLYSIR

SEQ ID NO: 166969 - protein, 509 aa, Glycine max
  Clone ID: PAT_MRT3847_121788C.1.pep
MDPKGSLCATRSSSLTSPGNGLQTNLSSDPPSFYGVRIESPFEEFIQPSPPTQSVLPGESNTDIDIPDQENCPLSDSSHTSKLQDWNPSAMLNNLSFLEVKIHQLRDLVHVIVSKKCQPFGQPHELVTQEQQLITADLTSIIVQLISTAGSLLPSVRHTLTNANPLVGQLDQLHGINLPFESEPSSGIRPQNNSGNKLFDQSIQNDLPNKLEMEQNYNMEEHEPKDEEDVDEGENLPPGSYEILQLEKEEILAPHTHFCTICGKGFKRDANLRMHMRGHGDKYKTPAALAKPHKESGSEPKLISRGIPAPMPAERNKDHKKFQPLKTILCVKNHYKRTHCDKSYTCSRCNTKKFSVMADLKTHEKHCGKDKWLCSCGTTFSRKDKLFGHIALFQGHTPAIPLDETKGMAEPPDIQNRESNNKVESINFCFGSNSSSENVVQNMMDMKGNNDDPMNYFSSLNFEGCNFGAFNEFSQPPFEDSDGCFSFPMSGSFNYAPKFGGGESSSDNL

SEQ ID NO: 166970 - protein, 228 aa, Glycine max
  Clone ID: PAT_MRT3847_121789C.1.pep
MATHVHSEICIPLAKPHKETGSEPKLIKRYSCPYAGCKRNKDHKKFQPLKTILCVKNHYKRTHCDKSYTCSRCNTKKFSVMADLKTHEKHCGKDKWLCSCGTTFSRKDKLFGHIAQQCVQKAAIPLDDTKGVAEPPDIQNRESNNKVESINFCFGSNPSTENVVQNIMDMKGNIDDPMNYFSSLNFEGCNFGAFNEFSQPPFEDSEASFSFPMSGSYNYAPKFDSDNL

SEQ ID NO: 166971 - protein, 69 aa, Glycine max
  Clone ID: PAT_MRT3847_12178C.1.pep
MADEEPVDQKRYLEESCKPKCVKPLLEYQACIKRIHGDDSGQKHCTGQYFDYWSCIDKCVAPKLFTKLK

SEQ ID NO: 166972 - protein, 141 aa, Glycine max
  unsure (1)..(141): unsure at all Xaa locations
  Clone ID: PAT_MRT3847_121790C.1.pep
PPRPHPPPGHPTQGPPGPGPRKGPGSPKAPPGPPKXPGASPEGATGQLKEDPNPPNGKKNPPPPQAGPRGKGGPPRVGEGGPKAGPRGXKGKRGPPGRPAKAKGRSRGGREREGPPPQPGPRKEGGKTPFYPAPRGVTRGR

SEQ ID NO: 166973 - protein, 109 aa, Glycine max
  unsure (1)..(109): unsure at all Xaa locations
  Clone ID: PAT_MRT3847_121791C.1.pep
NAILMNVPDAVLPMGRHSVXMLILEVTTKDFDYIXMPVSLIIAHESLAADTINFVSLPHTLAAVGQTQETMRSKXSQEEFTTALTTTERPVPPLSSAGCPYQYAKGHER

SEQ ID NO: 166974 - protein, 77 aa, Glycine max
  Clone ID: PAT_MRT3847_121792C.1.pep
TRILDLLCNCRILIVKKVVRFIIVEALSALCNGGDGSDCVASFSEFKNLLLGYRHLRQKLLWMKLFQSTDNWCCAQT

SEQ ID NO: 166975 - protein, 68 aa, Glycine max
  Clone ID: PAT_MRT3847_121793C.1.pep
GIAYHMNKETSAHAPSTMMIKVVAPPERKHSLSIGGYILESLITFQQMLIYTGEYDEYVPHIRYHKCF

SEQ ID NO: 166976 - protein, 417 aa, Glycine max
  Clone ID: PAT_MRT3847_121794C.1.pep
MPNPKHIILQSFVFLCLLLQASSKSTIEPCSNSDSCNALLGYTLYTDLKVSEVASLFQIDPISLLTANAIDISYPDVEHHILPSKLFLKIPISCSCVDGIRKSVATHYKTRPSDTLSSIADAVYAGLVSSDQLREANSISDPSVLDVGQNLVVPLPCTCFNGSDNSLPAIYLSYVVRPVDTLAAIAARYFTTLTDLMNVNAMGSTAINDGDILAVPIPACASNFPKSASDFGLLVPNGSYAITAGHCVQCSCGPKNLDLYCMPASLAVSCSSMQCRGSNLMLGNVTVQQTSGGCNVTSCNYDGIVNGSIVTTLSPSLQPRCPGLQEFPPLVAPPTTVARDTVFAPAPAPLFDGAGPASPKSSLVPSAGLPGGFSPANGPISGISSGASVACSLVKPLPTLTNALVLLLVKLMIPVAL

SEQ ID NO: 166977 - protein, 332 aa, Glycine max
  unsure (1)..(332): unsure at all Xaa locations
  Clone ID: PAT_MRT3847_121795C.1.pep
MPNPNPKHLFHATLFLSILLQALSKSTIEPCSNSDSCNALLGYTLYTDLKVSEVASLFQIDPIALLTANAIDISYPDVEHHILPSKLFLKIPISCSCVDGIRKSVATHYKTRPSDTLSSIADAVYAGLVSSDQLREANSISDPSVLDVGQNLVVPLPCTCFNGSDNSLPAIYLSYVVRPVDTLAAIAARYFTTLTDLMNVNAMGSTAINDGDILAVPIPACASNFPKSASDFGLLVPNGSYAITAGHCVQCSCGPKNLDLTVXPASLAVXCSSMQCRGSNPMLGNVTLGIRLEQPLLISLCLLHTSPTFQIALSAMHKHQQQNEDPTGTTSH

SEQ ID NO: 166978 - protein, 68 aa, Glycine max
  unsure (1)..(68): unsure at all Xaa locations
  Clone ID: PAT_MRT3847_121796C.1.pep
ACGAGADCNPIHHNGPCFLSNTVRAHXYYAVNSYFLRKGEAQRSCHFEGTSIVTASDHSFGYDCDYPS

SEQ ID NO: 166979 - protein, 98 aa, Glycine max
  Clone ID: PAT_MRT3847_121797C.1.pep
CYVSVSSSESPRLRVELRRDTHTSLTLTFKIRCRGFDPLAEVPQPLVLYCVVCIWGMAESCTNSAVSVDSISRDNKFWKGAFAVAGIMLTLVHLWCLA

SEQ ID NO: 166980 - protein, 37 aa, Glycine max
  Clone ID: PAT_MRT3847_121798C.1.pep
VVGFMDKRLALPKGVDPHVASIIDDRWRSDPKQRPSF

SEQ ID NO: 166981 - protein, 87 aa, Glycine max
  Clone ID: PAT_MRT3847_121799C.1.pep
PSLRSNPYKGIGCKSPHHERCPNLQCKGSNHCSHCPKQKHFPMNLGISIFSSLVDYQALSSFISIKIVNVERGNREPTERDFDFGFL

SEQ ID NO: 166982 - protein, 59 aa, Glycine max
  Clone ID: PAT_MRT3847_12179C.1.pep
PGAVIRGNKGPGGIQRRGTGTALIIGIYDEPMAPGQEQQGSGKVLGLILKEHGSLINGA

SEQ ID NO: 166983 - protein, 66 aa, Glycine max
  unsure (1)..(66): unsure at all Xaa locations
  Clone ID: PAT_MRT3847_1217C.1.pep
MAPLTYLFFXLFLXXCLNPLQNHTTLSPNDTPGRRFLPPKRTQCRRFTHHHPXKHQRQQESSLLTS

SEQ ID NO: 166984 - protein, 50 aa, Glycine max
  Clone ID: PAT_MRT3847_121800C.1.pep
SDYNFCLQHVNTSRHVTLSQYYYYSKSYNSISNDSIIKSIKSSPYGELNP

SEQ ID NO: 166985 - protein, 53 aa, Glycine max
  unsure (1)..(53): unsure at all Xaa locations
  Clone ID: PAT_MRT3847_121801C.1.pep
ELQMYALLTNLGXLVWTQQERSQRRMDGTRTELTPFLRTDLFYINIHVSYGIM

SEQ ID NO: 166986 - protein, 69 aa, Glycine max
  Clone ID: PAT_MRT3847_121802C.1.pep
PVPMVSNLNLKPVSYSNYLFGMNPANIKLCNKLKLGLDIVFLENLVHSVLVGGTLESYHGKKNPFYAGS

SEQ ID NO: 166987 - protein, 85 aa, Glycine max
  Clone ID: PAT_MRT3847_121803C.1.pep
WIPDAWVRSGELKTGTPRGPTWNLGRGIEGGPNYGKRRFLGERGIQWTIPHNRRKREPKEKSPGGPRGELKKKNWGGLKGRFTKK

SEQ ID NO: 166988 - protein, 52 aa, Glycine max
  Clone ID: PAT_MRT3847_121804C.1.pep
LLLFRRNLSLYRDIKYGDIILIYMGIRGSGPIYILYIYTHIDINLKQLFNIL

SEQ ID NO: 166989 - protein, 88 aa, Glycine max
  Clone ID: PAT_MRT3847_121805C.1.pep
AIKGEEKTLSLSLSLSLSLSLSACSIHCSIIKAQRPTTNSPFTMGEVKPKRNRFLFDSFTVTIFLLKIENQKEKGKEKRKKGNFNSEQ

SEQ ID NO: 166990 - protein, 59 aa, Glycine max
  Clone ID: PAT_MRT3847_121806C.1.pep
LVLYLLSRKGFIERYMKNVNPISDVLINQRCKCVTNDNYNNYCNTLYVYPPLLLSSRSR

SEQ ID NO: 166991 - protein, 91 aa, Glycine max
  unsure (1)..(91): unsure at all Xaa locations
  Clone ID: PAT_MRT3847_121807C.1.pep
LVRVPTAPGEGLRPPPPAGARIIGGKCNAPPPRQGGXGRKKNIGALGEGLAGHRDGNKGKTALEHNRAQGSLPGSQKEQNTPPPPMGXEPK

SEQ ID NO: 166992 - protein, 139 aa, Glycine max
  Clone ID: PAT_MRT3847_121808C.1.pep
MSRAVVYILIATAILFFIFRSPLNHEESKGRLNRRFGYKLLERAPKFDPLVTNIERVVENKMYHEPAPRMLSNLDSTASVSDAVETYQYLTSGGKLNTTLRLIILFPLLDREPKDGVIDFNELEAWISQRATERLDYLT

SEQ ID NO: 166993 - protein, 43 aa, Glycine max
  Clone ID: PAT_MRT3847_121809C.1.pep
SSSPSSVGIGVCVLLCSLESSTGSDALDRLSRVKFRHKRLVCV

SEQ ID NO: 166994 - protein, 69 aa, Glycine max
  Clone ID: PAT_MRT3847_12180C.1.pep
MADEEPVDQKRYLEESCKPKCVKPLLEYQACIKRIHGDESGQKHCTGQYFDYWSCIDKCVAPKLFTKLK

SEQ ID NO: 166995 - protein, 49 aa, Glycine max
  Clone ID: PAT_MRT3847_121810C.1.pep
YYSDAFGYFMLLRALACGVFFPLIVSYGLALYNEQYHFFNQGFCFFKIH

SEQ ID NO: 166996 - protein, 154 aa, Glycine max
  unsure (1)..(154): unsure at all Xaa locations
  Clone ID: PAT_MRT3847_121811C.1.pep
VEDFILITDKAYTRNEVLDMEKLMMNILQFKLSVPTPYMFMRRFLKAAHSDKKLELLSLLLVQLCLGECKRHKFXPSMMTAAAIYTAQCSLYQFKQWTKTTEWYTDYSEEKLLECSRLMVTFHQKAGSGKLTGVYRKYNTCKYGCAAKIEPALF

SEQ ID NO: 166997 - protein, 70 aa, Glycine max
  unsure (1)..(70): unsure at all Xaa locations
  Clone ID: PAT_MRT3847_121812C.1.pep
MNELKLNISTSSVLLPLCYTNKLKVDFFFYFVGKFSALIDFLFQXXSIIFXXSQACYNYKLLTSDPSMLL

SEQ ID NO: 166998 - protein, 256 aa, Glycine max
  unsure (1)..(256): unsure at all Xaa locations
  Clone ID: PAT_MRT3847_121813C.1.pep
NLEDDMYHIYTSGTTGKPKAVSVKQRNILNLVCAWTKRLNLSDDEVYLQYANYVFDASATDFYCSLLNGYPLVIATSVERTNTDLLEKLISQENITIASIPXTGGATSTPAFVQHISKHCXFITSCWIYEKGDAIPSTIPIGKPLANVDIFIMSGGKLCGVGIPGELCIAGESLTSGYLNRPELSAEKFINNPFGPGQLYRSGDLARLMPDGQIEFLGRIDKQVKVHGYRIELGEIENIINSVDTVTDSVVILAKQ

SEQ ID NO: 166999 - protein, 50 aa, Glycine max
  Clone ID: PAT_MRT3847_121814C.1.pep
TITSTSPHINFFPILTLSLTSFSSIPPPPPPTNHPFHTKKSPHHLITTIT

SEQ ID NO: 167000 - protein, 89 aa, Glycine max
  unsure (1)..(89): unsure at all Xaa locations
  Clone ID: PAT_MRT3847_121815C.1.pep
XXXXXXXXXXLXXXLXXXXXXXXXXLXRXSXXPXWXXXFXXGRXGFFXXXXGFFFFFXVFFFFFFFFFFFXLEPEFPVALPLPPLLVPX

SEQ ID NO: 167001 - protein, 163 aa, Glycine max
  Clone ID: PAT_MRT3847_121816C.1.pep
LINELNLSLPGTLTTFFNLCNKIDVFKRKLKMWLKRTHENDYDMFPSFSEFLNSSGLNMTDITRIIFEHLEGLSQVFSDCFPPEQDLRSRNLWIIHPFMNHQNNNLTDFEEEKLTELSSDLGLQALFKSVSVTQFWINAKTSYPELHERAMKFLLPLSTVYLC

SEQ ID NO: 167002 - protein, 35 aa, Glycine max
  Clone ID: PAT_MRT3847_121817C.1.pep
MGSEGDHQHQQQHHQDHDHHPHDHDHHHHRDRRGD

SEQ ID NO: 167003 - protein, 161 aa, Glycine max
  unsure (1)..(161): unsure at all Xaa locations
  Clone ID: PAT_MRT3847_121818C.1.pep
MEGISVGLKKYWRRSIRGYQRLHVSDRRKKETVQLGGSQRRRRWRIKLARKIRIPKISSPKKLVLWVRDAYVRMMLGMANSMGASAVGYGGDAAFTAKGGFERAPPPKEYDQKMIIHMYKSLIMAQGQLLPRDSTPKPATTTMVTTXLRIFFSFFYLLLLL

SEQ ID NO: 167004 - protein, 82 aa, Glycine max
  Clone ID: PAT_MRT3847_121819C.1.pep
KFLNLPWCLPNLCPRKLKSSILFRIPILLFLDAALLAASMEDPNLTIGPGRMVVTQKGKIERRVACCGFYCHQQSLYIDQFD

SEQ ID NO: 167005 - protein, 55 aa, Glycine max
  unsure (1)..(55): unsure at all Xaa locations
  Clone ID: PAT_MRT3847_12181C.1.pep
XLNRXFEMACXLRFXHXXXXXXVXFRXXRNXYXXSXXXXXMXTSXRIPSXXXXXX

SEQ ID NO: 167006 - protein, 60 aa, Glycine max
  Clone ID: PAT_MRT3847_121820C.1.pep
LLLLLIKFRLLLLLLPHVHAPSISVQLCDFLLGSKGKECNLVLGLSCFWLGFVSTAGNSE

SEQ ID NO: 167007 - protein, 63 aa, Glycine max
  Clone ID: PAT_MRT3847_121821C.1.pep
MRLWWFLEFGCVVIVIVLTGLVKFGKAEVYIATSEGEPIICYKGGIDGYEATAVASDDDYDEK

SEQ ID NO: 167008 - protein, 110 aa, Glycine max
  unsure (1)..(110): unsure at all Xaa locations
  Clone ID: PAT_MRT3847_121822C.1.pep
SLIHRSSHASALSLTHTISLSFSHPDLVTRAMSTTPREKVTYMAKHTDHANRYXEMMKLMEKVSAYNDSHELTTEEHNLLSVNYKNVISARHAYXRIISIIEHKEDKRVN

SEQ ID NO: 167009 - protein, 47 aa, Glycine max
  Clone ID: PAT_MRT3847_121823C.1.pep
LVTRSSNQGDVGQINWKDEGSFGRIRALAMANPRMRRKQIPPLYLML

SEQ ID NO: 167010 - protein, 50 aa, Glycine max
  Clone ID: PAT_MRT3847_121824C.1.pep
CQLSTLLPDQMSCYANLIKLKIIFAYFCICYYYTMNNNCSLKIINIKGTF

SEQ ID NO: 167011 - protein, 79 aa, Glycine max
  Clone ID: PAT_MRT3847_121825C.1.pep
NKSRPYRLKHKTDLTRIPPTNDSMDWTWQSLTHTSTHLLPNRTSDRRTFHCSFGIDYTTSILFITHRIRRRFPGNSLAL

SEQ ID NO: 167012 - protein, 104 aa, Glycine max
  Clone ID: PAT_MRT3847_121826C.1.pep
LVSSHNPIFVDSSFHDVCGRPCPGVLFFHWGPYEWSVSSCLRNFINGHHPHVVCCFNIIILAFVPTLACESMHQLLRSYFMQGHLTALLKKHTKKIKGGRRLES

SEQ ID NO: 167013 - protein, 147 aa, Glycine max
  unsure (1)..(147): unsure at all Xaa locations
  Clone ID: PAT_MRT3847_121827C.1.pep
MEKEGFTRCWWWCFCAEAKMSGKGPGLFSAIGKIGRDILMKDYNSDQRFTFSSSSTNSGLDLKSTLVKSRGLSSGDVAAAFKYKNKAVNVKVDTESXLPSVKTIALIRLPDYNSGKVLRLSWDKRLEYSVQVCYLGLLFRKGVLRHC

SEQ ID NO: 167014 - protein, 62 aa, Glycine max
  Clone ID: PAT_MRT3847_121828C.1.pep
HKSTCSLFPFFSFSLSTATYDQGLIIAERNQSLCCSSVTKGYGLQDKQNPLQSSLYILSHKH

SEQ ID NO: 167015 - protein, 46 aa, Glycine max
  Clone ID: PAT_MRT3847_121829C.1.pep
WQVYCMGGHRLNSSPSLRLTMKEDFALFLMLAEVLSALEDIYLLLM

SEQ ID NO: 167016 - protein, 104 aa, Glycine max
  unsure (1)..(104): unsure at all Xaa locations
  Clone ID: PAT_MRT3847_12182C.1.pep
PPLGGLFFQAPFFGQWGEPELGYLLFLVRGGYVYPPPYXVGGFQNFDRGPFKELFRKTFSGXEGFKLSPWVRLVVGHFFFQRGGPFWPGTFWGGPSLKALSQVA

SEQ ID NO: 167017 - protein, 85 aa, Glycine max
  Clone ID: PAT_MRT3847_121830C.1.pep
EFGSRWGGGSHYRGLVPGEPAGRPPALPLPGLAGLRDHTQLLRMAGQPWLAWGTAAARVSARPTRDCSCTSRCHHACDVVAVTLS

SEQ ID NO: 167018 - protein, 52 aa, Glycine max
  unsure (1)..(52): unsure at all Xaa locations
  Clone ID: PAT_MRT3847_121831C.1.pep
CRDKKHQRTLMPEKLXHKLLEAFHNQGPVIKRKHDLHKMAEANRALAHYRWW

SEQ ID NO: 167019 - protein, 48 aa, Glycine max
  Clone ID: PAT_MRT3847_121832C.1.pep
TKLSFYSKCFSPFIHALSCIYTTFIIAFNKSVTNFTTASNNPNMVVTN

SEQ ID NO: 167020 - protein, 70 aa, Glycine max
  Clone ID: PAT_MRT3847_121833C.1.pep
GGGGQKYGGFGGGPIGLGAPSYCLVGRVRFIAPAVFSRVIGSAVIPLGIWGVVFSGALRGVFLWGAFNFV

SEQ ID NO: 167021 - protein, 89 aa, Glycine max
  Clone ID: PAT_MRT3847_121834C.1.pep
MESKTQFCGRGKRYAVTVKNSNPRSSGPATRVNRPDSGGFMRRPRRNMQRTEFRVRESAEKRQSTSSVLTDQFGLDNRSNINGRGAGVS

SEQ ID NO: 167022 - protein, 44 aa, Glycine max
  Clone ID: PAT_MRT3847_121835C.1.pep
VHVTHAVQTIRRASHICELLKPYRDICQTLELASVLSLQQGHMD

SEQ ID NO: 167023 - protein, 57 aa, Glycine max
  unsure (1)..(57): unsure at all Xaa locations
  Clone ID: PAT_MRT3847_121836C.1.pep
VAAFINLFXXRQGLIFKQEISXXAWKRRNXHVXXLXMEEIXHLKXGXGVQNGGLGVC

SEQ ID NO: 167024 - protein, 84 aa, Glycine max
  Clone ID: PAT_MRT3847_121837C.1.pep
ARATNKGHNLADRIIPTSPRPEVSVARGQKGTVRSGLNIKISGLFTVGTSSAYQPKIALLAVRKMARSLDKNFWPGASENYSIY

SEQ ID NO: 167025 - protein, 57 aa, Glycine max
  Clone ID: PAT_MRT3847_121838C.1.pep
NSPLQVREEHSSVLHGSRQPCICPCSLGETPVRLKNPTASGPPGVYSARRDKEFGPV

SEQ ID NO: 167026 - protein, 40 aa, Glycine max
  unsure (1)..(40): unsure at all Xaa locations
  Clone ID: PAT_MRT3847_121839C.1.pep
ISPSGPRRSXWAAPPALKTGQTPRRPPRIPWCGSRCFLSA

SEQ ID NO: 167027 - protein, 41 aa, Glycine max
  Clone ID: PAT_MRT3847_12183C.1.pep
YTAPHRTGNINHWSVIYLLHQELTLEIFCWAIPDKAFRSYS

SEQ ID NO: 167028 - protein, 91 aa, Glycine max
  unsure (1)..(91): unsure at all Xaa locations
  Clone ID: PAT_MRT3847_121840C.1.pep
TDAKRNARDSHVPILAPLPIGFAVFXVHLATIPITGTGINPARSLGAAIIYNKDHAWNDHWIFWVGPFVGAALAAIYHQVIIRAIPFKSRS

SEQ ID NO: 167029 - protein, 69 aa, Glycine max
  Clone ID: PAT_MRT3847_121841C.1.pep
PDLVSLDLRDPVHGFPGTTLLSVMGTDTIVLAKTTHLTGYENRVRRHETQGITCRDCRTKRRRPPFNMT

SEQ ID NO: 167030 - protein, 53 aa, Glycine max
  Clone ID: PAT_MRT3847_121842C.1.pep
LGISSKRSIRTAWSSTLQHSSCTEEEYLALCLIMLRHGGAGEVPAAKHAVSDN

SEQ ID NO: 167031 - protein, 35 aa, Glycine max
  Clone ID: PAT_MRT3847_121843C.1.pep
YDYRKSTLELVYKLKDSSISCVDSMSACFRVYSLT

SEQ ID NO: 167032 - protein, 68 aa, Glycine max
  unsure (1)..(68): unsure at all Xaa locations
  Clone ID: PAT_MRT3847_121844C.1.pep
SXPLSVSXXXLSXXXXXXPLAPPACSXSXGPXXPXXXGXXXLVXRXXXFXXLXFXXLLFGSFFFLXFF

SEQ ID NO: 167033 - protein, 102 aa, Glycine max
  unsure (1)..(102): unsure at all Xaa locations
  Clone ID: PAT_MRT3847_121845C.1.pep
FIPPQTLFIINIIGXVAGFSYATNSGSQSWGPLFGKLFFAFWVIIHLYPFLKGFMGGQNRTPPLVGGGSIFFASIFSLLWVRIDPFPPRVPGPNVXECGINC

SEQ ID NO: 167034 - protein, 66 aa, Glycine max
  Clone ID: PAT_MRT3847_121846C.1.pep
LHVVLDERAESSLAKSFPLSHCLVFSSLILITKFFSNERRHSDLRFPSSNTKREMQSISLFYLHIV

SEQ ID NO: 167035 - protein, 63 aa, Glycine max
  Clone ID: PAT_MRT3847_121847C.1.pep
MGKGRIGINGLGRIGRSVARVAHARDYVELVSRFDHLMITDDMTYMFIYDSVHGHWMHYDVTD

SEQ ID NO: 167036 - protein, 57 aa, Glycine max
  unsure (1)..(57): unsure at all Xaa locations
  Clone ID: PAT_MRT3847_121848C.1.pep
TFTLTTTSXLCNVCFYLNEHPTPPYSKSFTFISALRYHFLYPSILLSFFPNIPFYFS

SEQ ID NO: 167037 - protein, 62 aa, Glycine max
  unsure (1)..(62): unsure at all Xaa locations
  Clone ID: PAT_MRT3847_121849C.1.pep
MKIKGLVFLHAKNLGTMECQSXQKFTHRMNTGLWARIPEVICASLTLAVEAHKIFGFETIPE

SEQ ID NO: 167038 - protein, 52 aa, Glycine max
  Clone ID: PAT_MRT3847_12184C.1.pep
GAQEPHGYGWAYCPHLDLGLPLVRRGRAFLSSERSNYSFPKFDVLVAPQKYS

SEQ ID NO: 167039 - protein, 88 aa, Glycine max
  Clone ID: PAT_MRT3847_121850C.1.pep
MGLSIFRFSSILFLLALTNSPWAFLRQIPQLVICCYVLKPASTLHLEEVPTEQCSDWVGLYFLVSFNFPIGAILKTICNNRETVSTST

SEQ ID NO: 167040 - protein, 76 aa, Glycine max
  Clone ID: PAT_MRT3847_121851C.1.pep
FHNYWSAPNTVLAVESSAFSKSASHRMSTHSALSFRFDSIRFPPILSKSEVRSLWRTVKETSREIEDEQECGRVHA

SEQ ID NO: 167041 - protein, 63 aa, Glycine max
  unsure (1)..(63): unsure at all Xaa locations
  Clone ID: PAT_MRT3847_121852C.1.pep
IPDPWSLIAFDTTMLDVPMNVPYIILLSLSKDIFAYCDIDYQLDIXLVINLPVYGFLTIAFSH

SEQ ID NO: 167042 - protein, 116 aa, Glycine max
  Clone ID: PAT_MRT3847_121853C.1.pep
FLCATRGIHRGGACSDCTSAGALLLVDTYHTNPENAVRSIFVAPFRGGRPIPVVTFSNTIVQIEPYMNSRFQLMSTTTNGDFVQGKDLALVKANVSCAAVGLTSSYTPTSYVESWF

SEQ ID NO: 167043 - protein, 141 aa, Glycine max
  Clone ID: PAT_MRT3847_121854C.1.pep
ENLGKLTSLNKLILSGNLICGVIPGTLGLCKALQLLDISNNRITGSIPDEIGYLQELDILLNLSWNSLTGPIPETFSNLSKLSILDLSHNKLTGTLTVLVSLDNLVSLNVSYNSFSGSLPDTKFFRDLPTAAFAGNPDLCI

SEQ ID NO: 167044 - protein, 27 aa, Glycine max
  Clone ID: PAT_MRT3847_121855C.1.pep
TIMRTRSPLLLRGSDYLASVALASSIP

SEQ ID NO: 167045 - protein, 58 aa, Glycine max
  Clone ID: PAT_MRT3847_121856C.1.pep
EIIDAASHVPPPPSEDQKKKIAKIMMKGMAAIGEQKRLKSKKVLSDKKAFRRSKNSWD

SEQ ID NO: 167046 - protein, 72 aa, Glycine max
  Clone ID: PAT_MRT3847_121857C.1.pep
GIIYRTITQVAMIISGSGSIGCLAIKANRASRQVCPKKVCNGHTVSGSYISCMRVVPHSSCRDHCHSDKYVL

SEQ ID NO: 167047 - protein, 89 aa, Glycine max
  unsure (1)..(89): unsure at all Xaa locations
  Clone ID: PAT_MRT3847_121858C.1.pep
KGGGPHQRXXXXKKNNLFSTKTTPNYVLGALLMKPPKIFAQIFLLFPQKKFSNNYFFTKKKKLVFFTSTREQQTRFINKTTRQLYPFFI

SEQ ID NO: 167048 - protein, 73 aa, Glycine max
  Clone ID: PAT_MRT3847_121859C.1.pep
ALNVLVMHQAVVAQMTDSRLVMGFRSMVVLSSFRSRRGVMSSVSFSIRAVDAVNEVRCRDEAANRAFLIGFEA

SEQ ID NO: 167049 - protein, 95 aa, Glycine max
  Clone ID: PAT_MRT3847_12185C.1.pep
TIPIKVKYTPSKQPRYNQDKTPELIITILQILVTLDILRLAEWHFVLHQINMIIHLLDHINTDICNDKLVMKTAPPPRILSNPIWATEMRGGLDM

SEQ ID NO: 167050 - protein, 56 aa, Glycine max
  Clone ID: PAT_MRT3847_121860C.1.pep
TAWDKIGYRFSHLYKGVIGAIYCLKMRAGAWIIGFSKISFYHTPQKLDYRRFRRAY

SEQ ID NO: 167051 - protein, 80 aa, Glycine max
  unsure (1)..(80): unsure at all Xaa locations
  Clone ID: PAT_MRT3847_121861C.1.pep
GNDIRVIVSMEWTDXDKKSVNEDSTGITRCITKQNRQNTPSRLEMRKYXPRVSKHTIDAESQKWIKLNACVIPYEPKNFT

SEQ ID NO: 167052 - protein, 119 aa, Glycine max
  unsure (1)..(119): unsure at all Xaa locations
  Clone ID: PAT_MRT3847_121862C.1.pep
MRGITICYPLRMNTGYGARTPEGICAXXRLAGQAHNMCGYETMPDECVEATKEFIHGEQYTSDSKTGNQQAYFYARDLYIHPKDTFVLSIDGTRLSNIPYYKKHGYGVEKFNSTLYDEW

SEQ ID NO: 167053 - protein, 37 aa, Glycine max
  Clone ID: PAT_MRT3847_121863C.1.pep
NDSKLHKVMTFKPRHHLSSIQNHSFQSKIFNNKFKLQ

SEQ ID NO: 167054 - protein, 45 aa, Glycine max
  Clone ID: PAT_MRT3847_121864C.1.pep
EKIISYISLCKLIYLKNKVLVKDLNSIIEKVKIKTHYIIFNLNLS

SEQ ID NO: 167055 - protein, 130 aa, Glycine max
  Clone ID: PAT_MRT3847_121865C.1.pep
SRGKRRDKHRDKRQRKQDKRSKLRSRRELASHTNSDSGSRSDNNSDGKSGAAQAKDKKHKGHSQRHAEGQPSVVAEKELHHMHLEKREKPNMLEEEEFPKENGEWHSNSTGANHRSDRREGRQPDVMDDQ

SEQ ID NO: 167056 - protein, 620 aa, Glycine max
  Clone ID: PAT_MRT3847_121866C.1.pep
LKLVDCLGTIAQSGTAKFLKALKDSKDAGGDNNLIGQFGVGFYSAFLVSDRVVVSTKSPKSDKHYDLEGGANASSYTISEETDPEKLIPRGTRLTLYLKRDDKGFAHPERIEKLVKNYSQFVSFPIYTWQEKGYTKEVEVDEDTAEDKKDDQDDKTEKKKKTKTVVERYWDWELTNDTQPIWLRNPKEVTKEEYNEFYKKTFNEYLEPLASSHFTTEGEVEFRSILYVPAFAPSGKDDIINPKTKNIRLFVKRVFISDDFDGELFPRYLSFVKGVVDSNDLPLNVSREILQESRIVRIMRKRLVRKAFDMILGISMSENKEDYEKFWENFGKHLKLGCIEDRENHKRIAPLLRFFSSQSDEELISLDEYVENMKPDQKDIYYIAADSVTSAKNTPFLEKIAEKDLEVLFLVDPIDEVAIQNLKSYKEKNFVDISKEDLDLGDKNEEKEKEMKQEFGQTCDWIKKRLGDKVASVQISNRLSSSPCVLVSGKFGWSANMERLMKAQSMGDASSLEFMRSRRVFEINPDHSIIRNLDDAFKTNPDDEDALRAIDLLYDAALVSSGFTPDNPAQLGGKIYEMMGMALTGKWSTPGQFQSTVTQPHTPETLEAEVVEPTEAGGQK

SEQ ID NO: 167057 - protein, 156 aa, Glycine max
  Clone ID: PAT_MRT3847_121867C.1.pep
RLGDKVQSVQISNRLSSSPCVLVSGKFGWSANMERLMKAQSMGDASSLEFMRSRRVFEINPDHSIIRNLDAAFKTNSDDEDALRAIDLLYDAALVSSGFTPDNPAQLGGKIYEMMGMALTGKWSTPGQFQSTVNQPHTPEIVEAEVVEPTEAGGQK

SEQ ID NO: 167058 - protein, 41 aa, Glycine max
  Clone ID: PAT_MRT3847_121868C.1.pep
ERKIGVCRKYVMLKRKKKVIFIRKDSRLECKGIINRYGNIC

SEQ ID NO: 167059 - protein, 68 aa, Glycine max
  unsure (1)..(68): unsure at all Xaa locations
  Clone ID: PAT_MRT3847_121869C.1.pep
XXIXEXXLVVXXDXVGXTGCXXRXALXSFSXXVHXCRXXRIGXIRRTCXXXXTXXXPEXXAHARVXLX

SEQ ID NO: 167060 - protein, 137 aa, Glycine max
  Clone ID: PAT_MRT3847_12186C.1.pep
CKNNEAKVSVNITRFNSLNDEGMQATCDQRIGKNKVSATDERQKTRKAAPETLESLEEERLLQMFEEKHIKESRSSQESDRSTGVGTWKEATEFFELVGTEESGKLIQPINHSSTKSLVQDTRIHEHGRVDGKENKG

SEQ ID NO: 167061 - protein, 91 aa, Glycine max
  unsure (1)..(91): unsure at all Xaa locations
  Clone ID: PAT_MRT3847_121870C.1.pep
DLVLRYVSYKDAVSDAPHANSIWWFLPVFNAEKETTCFPELDYRIRRLDHTIRNVTXLAPTVRYLKGLKKFHXFAEFTIDDFXTSESGLNS

SEQ ID NO: 167062 - protein, 45 aa, Glycine max
  Clone ID: PAT_MRT3847_121871C.1.pep
LGVRKPKVRNCACIRLLNRALLVCGLVALKPRHLGYVRLYITPEK

SEQ ID NO: 167063 - protein, 49 aa, Glycine max
  Clone ID: PAT_MRT3847_121872C.1.pep
ITFRYKPLKSPSLFKSQASYRIPLSQQKAEYARYCSSISYFTTYELVSI

SEQ ID NO: 167064 - protein, 56 aa, Glycine max
  unsure (1)..(56): unsure at all Xaa locations
  Clone ID: PAT_MRT3847_121873C.1.pep
TTIXYGVPYLIQSCRRICMTSTTHTPSSNMGCVIGHSTQIGFHRPNHLSLSLSTQH

SEQ ID NO: 167065 - protein, 129 aa, Glycine max
  Clone ID: PAT_MRT3847_121874C.1.pep
MAPELAQTMRVTNKCDVYSFGVVVLEIMMGKHPGELLFTMSSNKSLSSTEEPPVLLKDVLDQRLPPPTGNLAEAVVFTVTMAMACTRAAPESRPMMRSVAQQLSLATKQPCLTEPFGMITISKLTAGFH

SEQ ID NO: 167066 - protein, 64 aa, Glycine max
  Clone ID: PAT_MRT3847_121875C.1.pep
CILKSLDYWGSISPIYKKKSRCLLASLMYIEINSVLLVEYLGVAFACEKLEIRSRADTPLESVG

SEQ ID NO: 167067 - protein, 58 aa, Glycine max
  Clone ID: PAT_MRT3847_121876C.1.pep
HIISCTTRFWPFLLLDRAQINHVHGKKKEFEARILRSNCNHADVSKEIEAKPYLSDSV

SEQ ID NO: 167068 - protein, 323 aa, Glycine max
  Clone ID: PAT_MRT3847_121877C.1.pep
MLRTLVLKRSLGLHSHFHHLLLRRCSSSAAPNSSADAETRKYAGYAALLLFCGGATYYTFPLPDDAKHKKAQIFRYAPLPEDLHTVSNWSGTHEVQTRNFLQPENAEQLERALREARSRIRPVGSGLSPNGIGLSRTGMVNLALMDGILDVDKQSKTVRVQAGIRVQQLVDGLKDHGLTLQNFASIREQQIGGIIQVGAHGTGARLPPIDEQVIAMKLVTPAKGTIEISKDKDPELFYLARCGLGGLGVVAEVTLQCVDRQELVEHTVVSTMNEIKKNHKKLLSENKHVKYLYIPYTDSVVVVRCNPVSKWKGPPKFKPQYTK

SEQ ID NO: 167069 - protein, 79 aa, Glycine max
  Clone ID: PAT_MRT3847_121878C.1.pep
SQLHTSNILLRKVLWNKEATQLINQSAADLKKQLIQNEGKFDPKSMPKALDNVLKKQLAFKIKIVPNSSCYSVLETSQD

SEQ ID NO: 167070 - protein, 172 aa, Glycine max
  Clone ID: PAT_MRT3847_121879C.1.pep
MLRTLVVKRSLGHHWHSHSQHLRLQRQFSSSPEPNSSVDAETRKYAGYAALLLFCGGATYYTFPLPDDAKHKKAQIFRYAPLPEDLHTVSNWSGTHEVQTRNFLQPENAEQLERELREARSRIRPVGSGLSPTGIGLSRTGMVNLALMDGILEVDKQRRTVRVQAGIRVQQL

SEQ ID NO: 167071 - protein, 119 aa, Glycine max
  unsure (1)..(119): unsure at all Xaa locations
  Clone ID: PAT_MRT3847_12187C.1.pep
GHIENMSSKKEEKSQAAAERIKAAALSAAKGLSRAQAERAATAAARNVNAYGQKEDGPADGRGKREXKRQIFLMSTXEKAVKLGDRKDLKACNVGMPWIGXCQKGFQRGHWTYECKNER

SEQ ID NO: 167072 - protein, 53 aa, Glycine max
  Clone ID: PAT_MRT3847_121880C.1.pep
NIQIQIAPSLFLLTKFHDKLLKSKSPLFVLLNNGAFLFYFLLDRTYFLADTIL

SEQ ID NO: 167073 - protein, 54 aa, Glycine max
  unsure (1)..(54): unsure at all Xaa locations
  Clone ID: PAT_MRT3847_121881C.1.pep
KKKGGGFTLLLPKGGGEAHFFISNQLMIIMXLLFLFFXPCXCLLASGNVVSHQP

SEQ ID NO: 167074 - protein, 137 aa, Glycine max
  Clone ID: PAT_MRT3847_121882C.1.pep
MYLARLMGYDYHIQYRSSIHNQAADALSRLPEQDPSMFMILSVPCLTFMEELRRQLDSHPEYQHQHQNVRDCPAKHPEFSITHDLVLNRGRIWLPWGLPIISTLLTEYHAMPTGGHIGVAKTLAHITENFYWPGLRD

SEQ ID NO: 167075 - protein, 87 aa, Glycine max
  unsure (1)..(87): unsure at all Xaa locations
  Clone ID: PAT_MRT3847_121883C.1.pep
AYGDSFNAVARDLAKXLRALGAAEVVPLFEGDVDGGDVDAVYDRWCEKVVAVLKSGSVGKAVIMMVLRNLASLRVLKMSLMWIVVRL

SEQ ID NO: 167076 - protein, 109 aa, Glycine max
  Clone ID: PAT_MRT3847_121884C.1.pep
YACYLSMSAGPVMGVLYVSTAKTPASGDNPISYKNDNQTEWSYYKVVIPLLELKSVNPSSNTSNPAEKYIQVISVDNHEFWFMGFLNYEGAVESLQGAIQAGRQIQSEA

SEQ ID NO: 167077 - protein, 133 aa, Glycine max
  Clone ID: PAT_MRT3847_121885C.1.pep
MKKSKMKMKIQIFIFFCFISCFSYGFAAAATNDEVSALLSIKEGLVDPLNALQDWKLHGKAPGTDAAHCNWTGIKCNSDGAVEILDLSHKNLSGRVSNDIQRLKSLTSLNLCCNAFSTPLPKSIANLTTLNSL

SEQ ID NO: 167078 - protein, 81 aa, Glycine max
  Clone ID: PAT_MRT3847_121886C.1.pep
YGLEIRAQGHENPKRQGGVADFPFRAYFVPSLSAVQLFKNHENLCVNNGDRLPNSEVSEACEMVDISANSSTASQHSIFSV

SEQ ID NO: 167079 - protein, 105 aa, Glycine max
  Clone ID: PAT_MRT3847_121887C.1.pep
SYRVGVFALTMFLLFFVFHPSGFCLCFRLPFILKGFLFLSFPLQGWSRFSLNLFSFSYPSIFIFIKCIFLFSLFRFLFFPLGFSLSFPVAPAPGLGWFLLPFGCF

SEQ ID NO: 167080 - protein, 32 aa, Glycine max
  unsure (1)..(32): unsure at all Xaa locations
  Clone ID: PAT_MRT3847_121888C.1.pep
YRALPTRPPFRPFFFIFLDXAEDPRIIYLSVK

SEQ ID NO: 167081 - protein, 332 aa, Glycine max
  Clone ID: PAT_MRT3847_121889C.1.pep
MAFVAHQPQGLFVTSSSRRLPWSKRLKLKQCLTKHHMIGRTDRHCLVKWNACLSLGPPCFCVSKFKPLRISGFKGSTQNDDSGIRANRLKAPNTSVRLGESGEAHNVPLSYASETNDSIATSSAIHRLFNKWLTMLRTQPSSQEVEKFFEEPTSAGILPKTQQGTQIKESRAVLKVAWSHFLALDATIKIPLLVFVPLYLAVNVKYGAEVSKELTPLWILGPFIVATQVLAIRWLCALYVFSFKQTVKLLKNSPSYCILAHSYVFRGKLKEDISTYVLQPILSVKNRDYKQLTRKKLKELQEWIVEMYLDYVESIWPYYCRTIRFLKRANLI

SEQ ID NO: 167082 - protein, 52 aa, Glycine max
  Clone ID: PAT_MRT3847_12188C.1.pep
LILEPYHYVITKTKINIIVLFRYLYDCIWTISEIKLRNIVVCPLYSLKMRQK

SEQ ID NO: 167083 - protein, 113 aa, Glycine max
  unsure (1)..(113): unsure at all Xaa locations
  Clone ID: PAT_MRT3847_121890C.1.pep
XXXFXXPXXXXFXXXXXXLXXYXXXLXXXXYYXXXRSXXXXXLAXXXXTLXLXCXXSXXXXXTXXPFXXXLXXNYVLXXSXXXEYCXRFVXSGHXLSRXYXFFSXXIXXFXXX

SEQ ID NO: 167084 - protein, 51 aa, Glycine max
  unsure (1)..(51): unsure at all Xaa locations
  Clone ID: PAT_MRT3847_121891C.1.pep
MIKEECNWRSYRHDKSLQNENRHKPIPHERARNDKXTEMMRDARPSEWLSP

SEQ ID NO: 167085 - protein, 150 aa, Glycine max
  Clone ID: PAT_MRT3847_121892C.1.pep
MQATFLCSHMFLSYPLPVKLLQRSSPHKLFSDGTTTRRSLIYASKRDPFGHHYDGNLVDENMILLRMRIREIEMVEMKGKATSDWSVWEKKYFAENYGSDVCEAVGLLQRVLMNTRPSFALGMLALVMLSMSMSTLQVGFHLIEFAKGII

SEQ ID NO: 167086 - protein, 63 aa, Glycine max
  Clone ID: PAT_MRT3847_121893C.1.pep
MGERSFIMSKPRGVQRGLSGEIRSRGEKRGGDLRGLKLVSVDRRCAEDQGADLSAKPVFTGLV

SEQ ID NO: 167087 - protein, 147 aa, Glycine max
  Clone ID: PAT_MRT3847_121894C.1.pep
MEEEQRVAQVELAKQRCKCVIDAINSLPCSTNITVSCRRTLLKLARAELAFLSRPSSSSVPLSANIGHLETVVHILQQPFVTGVSGVCDPIPLSPSVGSEARVRSALNNRIVDSAFTHNTRAVSIIESDRYLKNSWCIQYQGRECSN

SEQ ID NO: 167088 - protein, 106 aa, Glycine max
  Clone ID: PAT_MRT3847_121895C.1.pep
SANPSPNPSDKFYLPLLTMPTTKLLPTSWALLLLSDLTFTHAYCLPPTPSAKPTPPTPIPTPPTPKPTPPTPKPTPPTPKPTPPTPNSTPPTIKPSWPPTSTTSPP

SEQ ID NO: 167089 - protein, 93 aa, Glycine max
  Clone ID: PAT_MRT3847_121896C.1.pep
KKKKKFSLSCFSSSEKILSNSKKGKQHHYNPSIKTPFFFLKPNKMKENWRGATSLHPINPKSHLLWEANHKPEKRKRVGKWGKKIMKKPNPLS

SEQ ID NO: 167090 - protein, 37 aa, Glycine max
  Clone ID: PAT_MRT3847_121897C.1.pep
RVHVFGNGDVYEGEFHRGKCSGSGVYYYSRSGMYEGD

SEQ ID NO: 167091 - protein, 56 aa, Glycine max
  unsure (1)..(56): unsure at all Xaa locations
  Clone ID: PAT_MRT3847_121898C.1.pep
VGNIAILLEKQKSTVEDGPDYTEKNGMFFIXPFAKTADNIIILFKEYAKRLLRPTV

SEQ ID NO: 167092 - protein, 201 aa, Glycine max
  Clone ID: PAT_MRT3847_121899C.1.pep
MGTLTSCSFMPLNSEFRRAFRERIQCHKLTRLRGTSCFFSRARVPKWGKSKLPNFDSLRSFATKNDNSDGDKDNSNHVGAAGEESGGDDSKSNVTTTMAEEERGFTSEKSTPPSTSHRSSLSSLGPAYNTFQVDSFKLIELLGPEKVDPADVKLIKDKLFGYSTFWVTKEEPFGDCLLRILYIVGFMARVPWFCQTPFTLV

SEQ ID NO: 167093 - protein, 41 aa, Glycine max
  Clone ID: PAT_MRT3847_12189C.1.pep
SLGCVRNLMKVYAAIVVRAHNVSKMEPIIFCNLGASLADSF

SEQ ID NO: 167094 - protein, 103 aa, Glycine max
  unsure (1)..(103): unsure at all Xaa locations
  Clone ID: PAT_MRT3847_1218C.1.pep
NAKELKARYGGTYVFTMXTSSDHEKDVENMVQKLPPNANKIYHLSGTQKFELPKEDVRIADVFQAVDAAKRNFTVSAWGLVDTTLEDVFIKVAREAQAFDTLS

SEQ ID NO: 167095 - protein, 53 aa, Glycine max
  unsure (1)..(53): unsure at all Xaa locations
  Clone ID: PAT_MRT3847_121900C.1.pep
SQQGKQPMXXXIYAQSVLIXTSRMRGKAWVTAWPGYPGSREIKFPRGSNGXST

SEQ ID NO: 167096 - protein, 61 aa, Glycine max
  Clone ID: PAT_MRT3847_121901C.1.pep
AAQVTQGATKAVLQAGGCCSGNFTDNKFSFRADWGNLGIRGELWVRRSLHGCVCGDTPKGF

SEQ ID NO: 167097 - protein, 90 aa, Glycine max
  unsure (1)..(90): unsure at all Xaa locations
  Clone ID: PAT_MRT3847_121902C.1.pep
RYPKNRVSTDNPAXRLTMIQHAPLKHLADPEKFETVQRCVIXTPRDHCFXVQKSNTKDTLXARPRSLGNXLTQQPANGRKKLAPVXXSKR

SEQ ID NO: 167098 - protein, 32 aa, Glycine max
  Clone ID: PAT_MRT3847_121903C.1.pep
HRMEELSDSHIAPMPEHRFDKLIQGSVLRAKS

SEQ ID NO: 167099 - protein, 64 aa, Glycine max
  unsure (1)..(64): unsure at all Xaa locations
  Clone ID: PAT_MRT3847_121904C.1.pep
KNHKKNLNRVRFFFLIQLLLPXNALLKFEECILTFKXLQFFILYLFKYLITVNPSIDLNNIFPY

SEQ ID NO: 167100 - protein, 95 aa, Glycine max
  unsure (1)..(95): unsure at all Xaa locations
  Clone ID: PAT_MRT3847_121905C.1.pep
PEDHTTAGGTYYPITDNKXHSRRSETAAQCKVPCIYLADRXGALLPEQAEEFLDRANFVRIFYIQAVMCAHGIANIASLMGSCTVGGAYIPDYGR

SEQ ID NO: 167101 - protein, 74 aa, Glycine max
  Clone ID: PAT_MRT3847_121906C.1.pep
GCEKTTEGEKNQHNTELLPRDHSTASILSQFLMLRLLSLSSTSISFQTLKSCFSFRHTHFLQTQTLTISPPPLL

SEQ ID NO: 167102 - protein, 109 aa, Glycine max
  Clone ID: PAT_MRT3847_121907C.1.pep
YLTKSPATPVFAYNHRNAIHKMPKKKLHKITRCNTLGHTKTKSEIHSHKICMWVRKRCSIYQQNRRKKNQKIKLYSEFLKETNDRVTKTSKLRRKGHRSGGGEMVRVWV

SEQ ID NO: 167103 - protein, 92 aa, Glycine max
  Clone ID: PAT_MRT3847_121908C.1.pep
VLDSVKVTQALGIKAPIHVSMKLGDSSNVYNKIVNAAEHPHLSIPETETARRKKQHNQLLHHSLIFALVGAAMAVAGLTACRVRAVKKNTAA

SEQ ID NO: 167104 - protein, 173 aa, Glycine max
  unsure (1)..(173): unsure at all Xaa locations
  Clone ID: PAT_MRT3847_121909C.1.pep
YIFKGNREMEEEESEKSPQLVRVLEALKEATHDIQRHHSSDSPAIKALLELHSILSSSDPYLSALSDHLIRLKTLVHSLNHSNGLLSFLTRPLSTLSLSRLASQIESEIQSWIDRETLHTLCSSLRDPNNNHEFVSLLTQSIYRVSXGFNRELQDLVLKLKVFSSLESGLFHH

SEQ ID NO: 167105 - protein, 175 aa, Glycine max
  Clone ID: PAT_MRT3847_12190C.1.pep
HASASDMQVKRVSSSMSAVNGTKDFVAMNRSLSGRSRIRSLTKADGSKFDLEKKPYNRQQSSLSHVRTLERKRRIPNVTQLEGTGSVYSVGTKQRNLHSGGMGGKRRDFNASSLNNSIVKNKQVGQGERVIKVNDNKINVVSFNPPLKQKIGIHGKREETSSDNESMSISEGLRL

SEQ ID NO: 167106 - protein, 49 aa, Glycine max
  Clone ID: PAT_MRT3847_121910C.1.pep
QFFFLPFFFTKKKTAVKKLNTPLLYTKTSGYIKKKKIFFNPPMTKIFFR

SEQ ID NO: 167107 - protein, 75 aa, Glycine max
  Clone ID: PAT_MRT3847_121911C.1.pep
VIEHIDSIQMLHSQPTTKPLSDFHSYYYCPRVKVNHNWFTLTDLLNTIYGSYSNCGEEQIIIFTTNHRERIKPSL

SEQ ID NO: 167108 - protein, 49 aa, Glycine max
  Clone ID: PAT_MRT3847_121912C.1.pep
SLEQPPFSALVSFAYITPPPTHFLSDSVVLHCCSDFHTAVQSCCVSVIQ

SEQ ID NO: 167109 - protein, 146 aa, Glycine max
  Clone ID: PAT_MRT3847_121913C.1.pep
MTDAAVSFAKDFLAGGVAAAISKTAVAPIERVKLLLQVQHASKQITADKQYKGIIDCVVRIPKEQGVLSFWRGNLANVIRYFPTQALNFAFKDKYKQIFLGGVDKRTQFWRYFAGNLASGGAAWATSLCFVYPLDFARTRLASDVG

SEQ ID NO: 167110 - protein, 46 aa, Glycine max
  Clone ID: PAT_MRT3847_121914C.1.pep
HAFDILVLIHELRRLKRPVRRAVRLDRARASSWPWITHCRTNTSHN

SEQ ID NO: 167111 - protein, 33 aa, Glycine max
  Clone ID: PAT_MRT3847_121915C.1.pep
IILQQICTINDFLQHFKSQFCVNILADAWADAW

SEQ ID NO: 167112 - protein, 92 aa, Glycine max
  Clone ID: PAT_MRT3847_121916C.1.pep
GKLLRLVPPRRNCRDRPRRLCKREIQILVGGKRACLAHTTPGPRTWVWKATRLIRRISAPSCTYTKACQHRQSMAMWHSAPVSQVYYTPITA

SEQ ID NO: 167113 - protein, 89 aa, Glycine max
  Clone ID: PAT_MRT3847_121917C.1.pep
GDGGCEGNIVNDGIYNMPIIIEFIVAREVEGVDVGGSVSEGEEVVDERVEKERVVELEDWEGSPQVNESLTQNARLNRRNCVQKVKYAV

SEQ ID NO: 167114 - protein, 67 aa, Glycine max
  Clone ID: PAT_MRT3847_121918C.1.pep
KNIMAHLLMGKDVQVMLIREQSRQQNSEQYGFHFCKNIYVADKRPVVTDTWLAAQWGFSIFSHCFCL

SEQ ID NO: 167115 - protein, 94 aa, Glycine max
  unsure (1)..(94): unsure at all Xaa locations
  Clone ID: PAT_MRT3847_121919C.1.pep
VVRKERRLFWDDCSSHKLSHRIHSTGTFFMTIWYKXYLNITPVCRHSLSDVVCXICETVLCQLTWGRARIRECCSFMKNGHLMVCYTHFSLSMI

SEQ ID NO: 167116 - protein, 80 aa, Glycine max
  Clone ID: PAT_MRT3847_12191C.1.pep
LVKRMLDLVHAEVYTFLENEYVHDEKPLKYCPPKDSRKLVLTSPCLLSSTRHIAIPISILYTEFCFYFRGREITLHLFTQ

SEQ ID NO: 167117 - protein, 48 aa, Glycine max
  Clone ID: PAT_MRT3847_121920C.1.pep
YVVCLPPFSHNGPIGLGGVGKICLSLNVNGPRILYFVPGNKLGLNFPF

SEQ ID NO: 167118 - protein, 139 aa, Glycine max
  Clone ID: PAT_MRT3847_121921C.1.pep
GMTPRIFEHLFTRIQKEKEARRDEKIKFTCKCSFLEIYNEQILDLLDPSSNNLQIREDSKKGVYVENLTETEVTYAREVIQLLIQGAANRKVAATNMNRASSRSHSVFTCIIESQWESQGVTHFRYARLNLVDLAGSER

SEQ ID NO: 167119 - protein, 67 aa, Glycine max
  Clone ID: PAT_MRT3847_121922C.1.pep
IRSRSQGPHWSYVERPVFLLSFYIANWGLFGRFYWGFRIRMGWGGLGICSTLCIYPCYSNHPFFKGG

SEQ ID NO: 167120 - protein, 164 aa, Glycine max
  unsure (1)..(164): unsure at all Xaa locations
  Clone ID: PAT_MRT3847_121923C.1.pep
ARYRLRPTDHPGYLTKMFAPACVYRHWQHHNVSVHDXNTLLFSDMPGTIFGHKNPEEIPWGSTGSDIIAETTVVVTDNDKVDAHSNGGAXRILFTAPSKDAPMXMLLSYDHEYXQHLDIIYNATCTTNCLAPLAKDIRDXFXITHGLMTTVTSISDTHMTDYGP

SEQ ID NO: 167121 - protein, 149 aa, Glycine max
  Clone ID: PAT_MRT3847_121924C.1.pep
MADSERIQNSWMASDQTAIEMSGEGTGSRECSSLPPPPQKPFNSDQLGIGERAFSAAGAAFLSAIIVNPLDVAKTRLQAQAAGVAYSHPLSNMTSRMACFGPNMIFADLKCSPSCHRAGFQGTVSICPPECFRYKGTLDVIYKIIKQEG

SEQ ID NO: 167122 - protein, 103 aa, Glycine max
  Clone ID: PAT_MRT3847_121925C.1.pep
MRTSKFPCRGLDYRLFLLIFAVCLVLYGTVSRLNAPNVSYATISKLRHFNPKHVISKGKGYPPVLAYWILGSKGESKKMLRLLKALYHARNQYLLQLDDRSSE

SEQ ID NO: 167123 - protein, 200 aa, Glycine max
  Clone ID: PAT_MRT3847_121926C.1.pep
MESNPTTMDAKRELEVEDWELLHPNDDDSIVFGGPPLDSILPDHFSLNPNSSCSSNSNSNSSSEVDRNFDDSYVANQIFPNSTLAPWNGDSDSDTTATNAPVVAMAEAEAEAVVEQEEEQKKMEEVEEKDDDEEDEGEEEEEEEEEEKEKRLVWWKVPFEVLRYWVNALPLPLPGWFLTFLAAGAFPGLFFLGRKVAQKE

SEQ ID NO: 167124 - protein, 37 aa, Glycine max
  Clone ID: PAT_MRT3847_121927C.1.pep
RKRKNSSHCLKKKKNPTLFSSIKKGQLPSTNKKFLNH

SEQ ID NO: 167125 - protein, 103 aa, Glycine max
  Clone ID: PAT_MRT3847_121928C.1.pep
MLKTKESWLNWYDQPSLTKKVLGSNFLLVVFHWYVMLSTFGAVLDMVTDRISTACLLVVLSQLYKPSLIFLSLLALDIASHWLQMYSTFLTGKTSHKDVKDSS

SEQ ID NO: 167126 - protein, 109 aa, Glycine max
  unsure (1)..(109): unsure at all Xaa locations
  Clone ID: PAT_MRT3847_121929C.1.pep
FVSWALEESGGWVERTTVDDMDIAVXAHLIGWNAHLSFNACKDLCELPELYXAYKKQHHRWHYGTMQLIRLCLFXILTPKISVWQKAKLIYLXLPSRKHIFPYYFFNLV

SEQ ID NO: 167127 - protein, 403 aa, Glycine max
  unsure (1)..(403): unsure at all Xaa locations
  Clone ID: PAT_MRT3847_12192C.1.pep
MEVVAPDVHQKNTLSGPTDGWKDGIVENEQSRSEGKSTEAGDAALLYFEATLRTLKRTKESIGRATRIAIDCAKFGIATKVMEIVVHNLEIESSLHRRVDLXFFLVDSIAQCSRGLKGDIGGVYPSTIKAVLPRLLSAAAPPGNAAKENRRQCLKVLRLWLERKILPEPIIQHHXRTLQSYSRPGSAGVHARRSSRRDRPFDDPVRDMEGMLDEYGSNSSFQLPGVCMPRMLEEDGGSDSGGGPLVALSPGLDSEKVKVHHSSLTSENPWQVFGGVYAELEMEVVALVVDGELNLICKIDRGNASEFVEKLSLSFGAPCPQDLPPSSPTSPSSPLTPPPAPPPPSLPLPPPPPPTLHFKSATSDQYHVAVDSKGFEDSLTVEANVLHPMSEPLAEPRDSRSIR

SEQ ID NO: 167128 - protein, 86 aa, Glycine max
  Clone ID: PAT_MRT3847_121930C.1.pep
FFFFGPSCTQKESTDDPQLTTNSLGFAYPNSENILAGCRAQSQGITWGGNSEWTHSIRVHRIAPEGTIQIRTLGRMRMKKLSPEEC

SEQ ID NO: 167129 - protein, 658 aa, Glycine max
  Clone ID: PAT_MRT3847_121931C.1.pep
MDNFLEHSLWSRYLTSIYWSITTLTTVGYGDLHPVNSREMIFDVFYMLFNLGLTAYLIGNMTNLVVHGTSRTRKFRDTIQAASNFAQRNQLPHRLQDQMLAHLCLKYRTDSEGLQQQETLDSLPKAIRSSISHYLFYSLIDKVYLFHGVSNDLLFQLVSEMKAEYFPPKEDVILQNEAPTDFYILVTGAVELLVLKNGVEQVVGEANASVRLVIFTEGGEIGVLCYKPQLFTVRTKRLSQLLRLNRTTFLNIVQANVGDGTIIMNNLLQHLKEINDPIMEGVLVDIENMLARGRMDLPVSVCFAAARGDDLLLHQLLKRGMDPNESDNNRRTALHIAASQGKQNCVLLLLDYGADPNIRDLEGNVPLWEAIVGGHESMSKLLSENGANLQCGDVGQFACTAAEQNSLNLLKEIMRYGGDITLPNSSNTGTTALHVAVSEGNVETVKFLLDHGASIDMPDKHGWTPRDLADQQAHTEIKALFDSIGEPKVHSSVAIPVRNSKIKYLGRFTSEPTMTLPLDGSFHGTDGSWSQNQSQNQSRPRRRSNNYHNSLFGILSAAHNGEKYLLSAVDMNNNARNGMKSSSAVGPTRVIISCPEKGEVVGKLVLLPGSFQELVEIGAKKFGFYPNKVVCKDGGEIEDIEIIRDGDHLVFLGASGGC

SEQ ID NO: 167130 - protein, 92 aa, Glycine max
  Clone ID: PAT_MRT3847_121932C.1.pep
LKGNGHFHCIIDSYPSGCASCKTSERINDFPPKGFHADPIVGKKAVSSANTCLCTLQLFKLFYPKPQKKRGLKIINPSHRFLPFPSQLNKSY

SEQ ID NO: 167131 - protein, 74 aa, Glycine max
  Clone ID: PAT_MRT3847_121933C.1.pep
EKQGKAMSLMVRNQICLPQKMDECKDTDLSLCFVYSLSLSLSHTHTHAIGAYECFLVSMIFRSLCDRQRRIEAF

SEQ ID NO: 167132 - protein, 48 aa, Glycine max
  Clone ID: PAT_MRT3847_121934C.1.pep
INSITCNQTAVWISQLANVQPCLIMFSSCNLAANKSSIYTIANKPKTV

SEQ ID NO: 167133 - protein, 124 aa, Glycine max
  Clone ID: PAT_MRT3847_121935C.1.pep
FLFIIFFFFFFFFFFFFFWGTCFFLIRPWGAGGKTGDPRTGGNQSATESRTKDHTRNKSQASSVKKEAPNERAKPNDRGQQRDRTPGGKREGHTHQSAGKRGWEAERKRGHRGDRENQTDRQQG

SEQ ID NO: 167134 - protein, 70 aa, Glycine max
  unsure (1)..(70): unsure at all Xaa locations
  Clone ID: PAT_MRT3847_121936C.1.pep
APTHSTTHXITFSFFYTQKNTAPRKFKIVPAKTKNFLHFQKQLIISPNLFILPMPLLSFYKHFTIIFITF

SEQ ID NO: 167135 - protein, 62 aa, Glycine max
  Clone ID: PAT_MRT3847_121937C.1.pep
VVSHENRPILGALTVEELKHFSASSSPRKSPKDEMPIIGSVGGYAEDSGSANRVRSRRVHLK

SEQ ID NO: 167136 - protein, 125 aa, Glycine max
  Clone ID: PAT_MRT3847_121938C.1.pep
QWLQELKRFPTLQAEIAEAANEGLERFHDDGKKTTLRLVEMESSYITVDFFGKLPQEVDKGKNSASSLLDDQYAKGHFQRIGSNVSSYVGMVSQTLKNTIPKAVVHCQVMEAKRSLLDPFYAQLG

SEQ ID NO: 167137 - protein, 156 aa, Glycine max
  Clone ID: PAT_MRT3847_121939C.1.pep
MVWHFQIFSVSGSDAHAHALTHGHIVTSSFSNTSLALQCQKPLFKFSNSSSLPPSIYYTGATTEAESTPVSGDDNFAKCYVCSLEVSELRHRNCANLDCNLLFLCCGQCAEDLRGCCCLTCTTAPRLRPVLNGMQRYKKWHYYRDMDFQGKMKISA

SEQ ID NO: 167138 - protein, 90 aa, Glycine max
  Clone ID: PAT_MRT3847_12193C.1.pep
ARGYDNHERLRPPYDYQERWNVPPCSGPRYHDRGVPAPYGCHSSESVSFSGHGWRFPPPSMNYRDSLHFRPHFEDAIPVANRGPNFWQPR

SEQ ID NO: 167139 - protein, 81 aa, Glycine max
  Clone ID: PAT_MRT3847_121940C.1.pep
ASALYLEMSFKLDCPFSYLHLPCSSTPPSLVTSFSLPLASTFVSPIGLAFSASTFPLGLLPCFSSLFRSLRLICLYSARSP

SEQ ID NO: 167140 - protein, 57 aa, Glycine max
  Clone ID: PAT_MRT3847_121941C.1.pep
PTTIQEITPHSKSRTFPSDSLFTTIQLHSSKFIKSPISFYYHLLSNTLQSSFYILSI

SEQ ID NO: 167141 - protein, 58 aa, Glycine max
  unsure (1)..(58): unsure at all Xaa locations
  Clone ID: PAT_MRT3847_121942C.1.pep
MGISRDSMHMRRATGGKKKAWWKKRTYXLVRQSVNTKLXSYKTVMRIRAQRGNVKWKA

SEQ ID NO: 167142 - protein, 53 aa, Glycine max
  unsure (1)..(53): unsure at all Xaa locations
  Clone ID: PAT_MRT3847_121943C.1.pep
MGSLMASLTLTLVLAXLSLSVRSQTSADKYEYASPPAPEKPDNYHSPPPPAHK

SEQ ID NO: 167143 - protein, 324 aa, Glycine max
  Clone ID: PAT_MRT3847_121944C.1.pep
MEENLPPGFRFHPTDEELITCYLTRKVSDSSFTSKAIAVVDLNKCEPWDLPGKASMGKKEWYFFSLRDRKYPTGLRTNRATESGYWKTTGKDKEIFRAGVLVGMKKTLVFYRGRAPRGEKSNWVMHEYRLENKHHFGPSKDEWVVCRVFQKSLQVKRPQQTPSSQPESPCDTASMVNEFGDVELPNLINNIANSSGGLTNNISGQTCFNADLINSVNTNMNLAMNWPVASEVIQVPTLPSLPWPSGLLNPSISVNSLLLKALQLRSYQQREAATDHLIASYVPQGVSHVGTDLSSNLTASSSKVLECMPQQQQLEQPFNLDSIW

SEQ ID NO: 167144 - protein, 84 aa, Glycine max
  Clone ID: PAT_MRT3847_121945C.1.pep
RKSTNKMISMSSCNLENPQHFLHHLLTIFLTISTQKHLQLLTSQPIFLIITCYKKLMKKIIYSKPRVPSLRRIHRTQRSSRSRR

SEQ ID NO: 167145 - protein, 287 aa, Glycine max
  Clone ID: PAT_MRT3847_121946C.1.pep
MSFETTGTIASFGGKLLKLKHKSESTNTDMELNMFLPPQALKSGAKVPVLFYLSGLTCTGNNCSEKGFFQHGAAKHGIAVVYPDTSPRGLQIEGEDEAYDFGSGAGFYVDATKDPWSKGYKMYSYITKELPEALFSSFKELDSSKVSITGHSMGGHGALTLFLKNPGMYKSVSAFAPIANPINCPWGQKAFKGYFGEDQQQKWKEHDASELVKQWKGPLEVLIDVGTGDNFYKQGQLLPENFVKAAKESGNDKGIQLRMQPDYDHSYYFMATFADDHVEWAAKHLNA

SEQ ID NO: 167146 - protein, 50 aa, Glycine max
  Clone ID: PAT_MRT3847_121947C.1.pep
LEPFFVFSIRSLSPCIYVNLRFRSLSCAFFPLLVILLIVVLNNRLFRACL

SEQ ID NO: 167147 - protein, 48 aa, Glycine max
  Clone ID: PAT_MRT3847_121948C.1.pep
LGNPSNKIKRTYPFPIGLRKNPYFGKKGMGYRFFKISRDFLPFKEKNK

SEQ ID NO: 167148 - protein, 99 aa, Glycine max
  Clone ID: PAT_MRT3847_121949C.1.pep
APKKRIGPFFSPLFFFLVAGLFSKKKRFLEFPFFPKIFMRRFPKRADFIPFATLILMPPPPQIKKKKGFFKKLTFREAPLQGNGISSKYFYKNKLYGGL

SEQ ID NO: 167149 - protein, 126 aa, Glycine max
  Clone ID: PAT_MRT3847_12194C.1.pep
LKKKIPAIKQTRIKAMASFEASLLFLFSLPTPLFLENLFKFFFFSQTFGIYNTGGGDHNPAYIFNLKKKKTGPKTPPPEGGHQGIDLLKNKPGAGVCLVNRPKQTGEPKGGGEKTSPPPFESPFGG

SEQ ID NO: 167150 - protein, 93 aa, Glycine max
  Clone ID: PAT_MRT3847_121952C.1.pep
MDKSMLADLDSLPEADKQRMTVMIDQLQIRDSLRMYNSLVERCFNDCVDTFKHKSLQKQEETCVRRCAEKFLKHSMRVGMRFAELNQGAATQD

SEQ ID NO: 167151 - protein, 101 aa, Glycine max
  unsure (1)..(101): unsure at all Xaa locations
  Clone ID: PAT_MRT3847_121953C.1.pep
EGRGKEGREGKEEETEEKDNKQWEKETTHKTSXQEAKKRNTEKGKDVEKGREXLSGEETRRRGSENASAQRKREEEKKAEKGDEETVETGEEAGKKAKKRG

SEQ ID NO: 167152 - protein, 51 aa, Glycine max
  unsure (1)..(51): unsure at all Xaa locations
  Clone ID: PAT_MRT3847_121954C.1.pep
MGKXFGPNSHXQKSSXSWPWAFXPPPRPKSXKSNRKGHPPKPTKXXXFAXX

SEQ ID NO: 167153 - protein, 70 aa, Glycine max
  Clone ID: PAT_MRT3847_121955C.1.pep
SYCRGVHRPNLSAGKMPKPEAVLVYFSLIDHNSCVVIPHFVVEETGRWWLPTHSNTEAMTVIMHEPLTYL

SEQ ID NO: 167154 - protein, 110 aa, Glycine max
  Clone ID: PAT_MRT3847_121956C.1.pep
LYYTIYLPLKLVGKQCLPLLYLSCLLYWQAILLIFTRSIRKLMSEFNGGASSGPKICLTLEHTVNIEPHGHFGQQLVQVLSWFGFIAQVAEYVVSGAKDNVEAMRGIKPS

SEQ ID NO: 167155 - protein, 132 aa, Glycine max
  Clone ID: PAT_MRT3847_121957C.1.pep
MGASQSVQVVEDSEEEEDERNLNGPLMGRAQLGNHMVKKVLEQEPEMLPCHASASPLSPQLSSLGTPRLGPSIKVWDPYNVLGPPPPLPSPPALSRSFSGNGMVAVADDEAVTEVFLISHGECELNLAPDLV

SEQ ID NO: 167156 - protein, 75 aa, Glycine max
  Clone ID: PAT_MRT3847_121958C.1.pep
KRLFLLCIALFYVTKIPFVTICPFASSTITPFQEDPELAVVHVQMTFLDPGASLGKLFSGRFSKKVLAYCDEGWE

SEQ ID NO: 167157 - protein, 99 aa, Glycine max
  Clone ID: PAT_MRT3847_121959C.1.pep
MYNALINAYAQRGLSELAVNAFRLMTTEGLTPSLLALNSLINAFGEDRRDAEAFAVLQYMKENVPAVYEEMVASGCTPDRKARAMLRSALRYMKQTLKS

SEQ ID NO: 167158 - protein, 70 aa, Glycine max
  unsure (1)..(70): unsure at all Xaa locations
  Clone ID: PAT_MRT3847_12195C.1.pep
EAMLSNPPKPRRPPPNPNKDLIYAVLXKKKEVGYPPTLMVLTMIRMRVRPAKKAVTMPMILTLIKLGRST

SEQ ID NO: 167159 - protein, 106 aa, Glycine max
  unsure (1)..(106): unsure at all Xaa locations
  Clone ID: PAT_MRT3847_121960C.1.pep
MGCLRSINFIAPTMVHCLALNSLINAFGEDRRDAEAFAVLQYMKENLXPDVVTYTTXLMKALIRVEKFQKVPAVYEEMVTSGCTPDRKARAMLRSALRYMKQTLKS

SEQ ID NO: 167160 - protein, 687 aa, Glycine max
  unsure (1)..(687): unsure at all Xaa locations
  Clone ID: PAT_MRT3847_121961C.1.pep
HVPFTTTTNNSPIPFPIHVTHFHFPTTHHRHNHNHVLPPPQSTANPITAKPIILEEGPDDILSFHNRRYDFTPLLSFLSTTSNSTPPTSLGSTEFQLAESYRAVPAPLWHALLKSLCASSSSSSSIALAYAVVSWLQKHNLCFSYELLYSILINALGRSEKLYEAFLLSQRHVRTPLTYNALIGACARNGDVENALILMSKMRRDDYQPDFVNYSSIIQYLTRSNKIDSPILQKLYAEIETDKIEIDGHLMNDIIVGFSKAGDPTRAMRFLAMAQSNGLNPKPSTLVEVILALGNKRRSNEAEALFEEIRENXLIIKSGFLLYSSITPSRQXFGAVCLCHAGYVRSAGVKPDEQTYSLLIDVYAHAGRWESARIVLKEMEASNVQPNSYVFSRILANYRDKGEWQKSFQVLKDMKSSGVQPDRHFYNVMIDTFGKYNCLDHAMATFERMLSEGIPPDIVTWNTLIDCHCKSGRHDMAEELFSEMQQRGYSPCITTYNIMINSMGEQQRWEQVTAFLSKMQSQGLQPNSITYTTLVDVYGKSGRFSDAIECLEVLKSTGFKPTSTMYNALINAYAQRGLSELAVNAFRLMTTEGLTPSLLALNSLINAFGEDRRDAEAFAVLQYMKENNIEPDVVTYTTLMKALIRVEKFQKVPAVYEEMVASGCTPDRKARAMLRSALRYMKQTLKS

SEQ ID NO: 167161 - protein, 27 aa, Glycine max
  Clone ID: PAT_MRT3847_121962C.1.pep
LCRTSSQISSQHIKWLHLSTQNLLMFS

SEQ ID NO: 167162 - protein, 83 aa, Glycine max
  unsure (1)..(83): unsure at all Xaa locations
  Clone ID: PAT_MRT3847_121963C.1.pep
DRLSCIKLLSRIFAKIVLRIVMXAAYATDKATILYMLEVVDIDVISRLNEFTAMSRXDPRIYGAQMSTIRLEQLEINMGGVTV

SEQ ID NO: 167163 - protein, 157 aa, Glycine max
  Clone ID: PAT_MRT3847_121964C.1.pep
MIKLRSMRFSRSSSKLGNGGHKATTPTEKDCRSIGEIQWELRPGGMLVQKRESNQSAGEGMITIIVSTVSQSHEISIEATSTFGELKMILSLATSFEPREQRLLFKGKEREDDEYLHMVGVRDKDKVLLFEDPAIKEKKLLGLRNQPINNPSRTISV

SEQ ID NO: 167164 - protein, 65 aa, Glycine max
  Clone ID: PAT_MRT3847_121965C.1.pep
ITFEDEDDDEIELAESLQFNFDTIKVATNNFSDSNKLGEGGFGAVYQGRLSNGQVIAVKRLSSDS

SEQ ID NO: 167165 - protein, 93 aa, Glycine max
  Clone ID: PAT_MRT3847_121966C.1.pep
NLVPNWSGLTRSSWFNCVTDPVVKLIRLDHLKSIQTMNSKLQKFKFSDKLLSSVKILYPNALLINFKIHGNRIREIMFEILKFFTKGVLILYF

SEQ ID NO: 167166 - protein, 51 aa, Glycine max
  Clone ID: PAT_MRT3847_121967C.1.pep
RNQSPDEKQFSTCRSCKFTFPHTLRYNNSLIPPNFSSPNLPLHTRIWITER

SEQ ID NO: 167167 - protein, 90 aa, Glycine max
  Clone ID: PAT_MRT3847_121968C.1.pep
LMQRVSQVWFEQSRESQWGRVCVREAEVETEYQSDRGIVHWLLQVLNMLHSPSRALPSPSRSSASLSLCVLCLRSFQNLKVKALDGWLTG

SEQ ID NO: 167168 - protein, 103 aa, Glycine max
  Clone ID: PAT_MRT3847_121969C.1.pep
EYHSIITSKNKVPDPKPNTEEKAVRSGMAGRSLGSVENSEGNKGKVSQVEVGSGKDGFQQMELTDPRSHNVMPMQFHSVVPALFHNVSSPFHTAPSTHLHENR

SEQ ID NO: 167169 - protein, 47 aa, Glycine max
  unsure (1)..(47): unsure at all Xaa locations
  Clone ID: PAT_MRT3847_12196C.1.pep
DERDPKXQPXXREXEGKPXHDSRDSXEGTLSXTXYXWLAFGXGVXRP

SEQ ID NO: 167170 - protein, 127 aa, Glycine max
  Clone ID: PAT_MRT3847_121970C.1.pep
MAYARLAPMAVFLLATSTIMFPTKIEAADCNGACSPFEMPPCRSRDCRCVPIGLVAGFCIHPTGLSSVAKMIDEHPNLCQSDDECMKKGSGNFCARYPNNYIDYGWCFDSDSEALKGFLAMPRATTK

SEQ ID NO: 167171 - protein, 97 aa, Glycine max
  Clone ID: PAT_MRT3847_121971C.1.pep
MPDEKASRSVLLGKGHFFGTCFSHGPPPVLSLVASQCNVSLKKQRSRSILSSFFCCFRDYNVEAPPPSSPSVLPPLVEENGGLQKALQLHCCDLARR

SEQ ID NO: 167172 - protein, 77 aa, Glycine max
  Clone ID: PAT_MRT3847_121972C.1.pep
GGGFNIKKRGAQFISKKGPAPAFGKFYSIFRDWVFLARPEKMSLYFKNFYEGVNKKKKLCVSGKACFFNFIAPGFSF

SEQ ID NO: 167173 - protein, 80 aa, Glycine max
  Clone ID: PAT_MRT3847_121973C.1.pep
AWRFRDSAWIVGVRRAVVGGLFGDEDGLYLVLVHAEAIGVPMSGLGNYNRDLDWGAEFDLRDPWSGEEGFKGYIGIGRFS

SEQ ID NO: 167174 - protein, 112 aa, Glycine max
  Clone ID: PAT_MRT3847_121974C.1.pep
FGFFFFFIILDWGFTYFFFFFFFFFYKFFLGGGGENFYFFLGKKKPKTFFRPNKSPRGERKIFFSPRGAFPKLKKTPFVRPKKKNLAPPPSWGGCFRKKALHLSPPFKGLAL

SEQ ID NO: 167175 - protein, 63 aa, Glycine max
  Clone ID: PAT_MRT3847_121975C.1.pep
AGTILGGCQCHAYHMLPLRMNTGYSDRTLQVNCEGRTLTLHVHIIPGFHTSRATAAMPTPAKY

SEQ ID NO: 167176 - protein, 69 aa, Glycine max
  unsure (1)..(69): unsure at all Xaa locations
  Clone ID: PAT_MRT3847_121976C.1.pep
LFVRTRVRLGLKISQSKIALPKNTEGGTILRRDLLATFLTEGNIRVCVGYQRTHXMKGMIKMATTEAIL

SEQ ID NO: 167177 - protein, 45 aa, Glycine max
  Clone ID: PAT_MRT3847_121977C.1.pep
KRSTLLRLQDRVRQDLRLRTPEHVQRFRMLKNNLLRAKSHQKLDP

SEQ ID NO: 167178 - protein, 252 aa, Glycine max
  unsure (1)..(252): unsure at all Xaa locations
  Clone ID: PAT_MRT3847_121978C.1.pep
WLVPLFSALCSHNALLVFQWFSHHESAILENSAGAEKHQAVALRVQADRSIFYKCRMDGYQDTLYAHTMRQFYRDCIISGTIDFVFGDAVAVLQNCTFVVRKPLENQQCIVTAQGIKERNQPSXLVIHGGSIVSDPTYYPVRFDNKAYLARPWKNFSRTIFMDSYIGDLITPDGYMPWQTLEGFSGMDTCFYAEFNNRGPGSDKTKRVKWEGVNTLDSEGITNFLPSMFFHGDDWIRVTRISYYSGQVFHTN

SEQ ID NO: 167179 - protein, 145 aa, Glycine max
  Clone ID: PAT_MRT3847_121979C.1.pep
MDWVRGDAVGRGSFATVSLAIPTTNYNQFPSLTVVKSADAQTSCWLRNEKHVLDRLGSCPRIIRCFGDDCSFENGVEYYNLFLEYAAGGSLADELRNHDGRIPEPQAREYTRDIVEGLSHVHKNGFVHCDIKLQNILVFEDGRIK

SEQ ID NO: 167180 - protein, 61 aa, Glycine max
  Clone ID: PAT_MRT3847_121980C.1.pep
YGHLPTKIFYNIRVATPLTHWNIILQLLIWGKKKLKLFSILKGCSIQVKKTDFFHKKCLCF

SEQ ID NO: 167181 - protein, 92 aa, Glycine max
  Clone ID: PAT_MRT3847_121981C.1.pep
ARELDLETTESVAQTWTAGSRRFIGEPIFVPKGYQEDDGYLLVVEYAVSMNRCYLVILDPKRIGADNALVARIEIPSHLNFPLGFHGFWAAN

SEQ ID NO: 167182 - protein, 108 aa, Glycine max
  Clone ID: PAT_MRT3847_121982C.1.pep
VDPLPPHQQHQELLLLQWENRYYYFPAGREHYYPFQRQKDHFVVAVVGTVKQILQWVNRNVGGPIPTRFGEMYSHHQYHYWEQTRSSCCCYYPWMYVFNHDGSYWRHK

SEQ ID NO: 167183 - protein, 115 aa, Glycine max
  unsure (1)..(115): unsure at all Xaa locations
  Clone ID: PAT_MRT3847_121983C.1.pep
SKQTLKRRRGIRSEADANLMNQLTWRLGLTXTRDAECYDVYGLHEEQVVMVTKPGTAVLVLYHTTTQTEETMLLSENYDIDYYMRTYFMKQTGGHAXKTIVLLNALWYLTCEDKL

SEQ ID NO: 167184 - protein, 389 aa, Glycine max
  unsure (1)..(389): unsure at all Xaa locations
  Clone ID: PAT_MRT3847_121984C.1.pep
MDSRNVVVCDNGTGYVKCGFAGENFPTSVFPCVVGMPKLESLTEQALKDIVVGEGCADLRHQLDISYTXDPVNVPNGQNWDDMCHVWDHAFFNELKFNPPDCKILLTDPPLNPSKNREEMVETMFEKYNFAGVFIQIQAVLTLYAQGLLTGLVIDSGDGVTHVVPVVDGYSFPHLTKRMNVAGRHITSYLVDLLSRRGYALNRNADFETVREIKEKLCYISYDYKREYQLGLETTILVKNYTLPDGRVIKVGTERFQAPEALFTPELIDVEGDGMADMVFRCIQEMDIDNRMMLYQHIVLSGGSTMYPGLPSRLEKEILDRYLDVVLKGNRDGLKKLRLRIEDPPRRKHMVYLGGAVLAGIMKDAPEFWINREDYLEEGIACLSRCGQA

SEQ ID NO: 167185 - protein, 106 aa, Glycine max
  unsure (1)..(106): unsure at all Xaa locations
  Clone ID: PAT_MRT3847_121985C.1.pep
DGMXWHSPFILASLSAFKLYQCATCSIIRCLQQPLMXVEVWHQRRKACQTPRATYQHSFALRLEALHISLKCPSHLYEDRYTMPPMWFRLLSNKRCKSEIAVLRTP

SEQ ID NO: 167186 - protein, 55 aa, Glycine max
  Clone ID: PAT_MRT3847_121986C.1.pep
HKQALKYRLRSDCLGDARAKEREQLLECLRCHGTVVATWFKPIIKFCKHILDSYR

SEQ ID NO: 167187 - protein, 70 aa, Glycine max
  Clone ID: PAT_MRT3847_121987C.1.pep
VASNPICHLAALYALLYFLLYHHSDCGWHASNPICHVAALYALLYYLFGHQTAGGRRGPSSTQEGQDHVT

SEQ ID NO: 167188 - protein, 80 aa, Glycine max
  Clone ID: PAT_MRT3847_121988C.1.pep
MVVPESQMNSQNEVESPLQLEEQQQQQNNNNNKNHPFSSLGRQSSSIYSLTLDEFQHTLWENGKNFGSMNMDEFLSSIWS

SEQ ID NO: 167189 - protein, 55 aa, Glycine max
  Clone ID: PAT_MRT3847_121989C.1.pep
LLTKICYNSVTHRRAFNVIGKKNLLPNDATKHLCSYLQRHKNKYEAPARQANRPM

SEQ ID NO: 167190 - protein, 136 aa, Glycine max
  Clone ID: PAT_MRT3847_12198C.1.pep
IQELKEASISEIAKTVHEAISKVNNEDHFLDLIDWIECHRPGLMLAKAVLGQEGPTLVVSSGQRFPVKEVDFGFGSPLLGTVYTSIQKVGVSYMNQRLSAKGDGSWTVSAILWPELEAALQDDPIFHPMSASHLQL

SEQ ID NO: 167191 - protein, 83 aa, Glycine max
  Clone ID: PAT_MRT3847_121990C.1.pep
SGSRVTVWQRKNQTAKSGTLVNPVGAPNLPPKLVLVGTGMTFISHMIPTNAYGVNLGKQHFMGGSNGALINLLGPPGGFMVTP

SEQ ID NO: 167192 - protein, 124 aa, Glycine max
  unsure (1)..(124): unsure at all Xaa locations
  Clone ID: PAT_MRT3847_121991C.1.pep
VYFGGNDSMGPHSSGLGPHVPLHEYIENMRKILIHIQXIFSELVRTNELCQSYSEACIKLCKELDVKVVDLFNALQKRDDWMNACFTDGIHLAAEGSKIVVKEILRVLKEAEWEPCLHWKSMPT

SEQ ID NO: 167193 - protein, 256 aa, Glycine max
  Clone ID: PAT_MRT3847_121992C.1.pep
MAAPARPLFVLFGSSIVQLSFSHGGWGSHLSDIYSRKADILLRGYYGWNSRRALQVLNQVFPKDAAIQPSLVIVYFGGNDSMGPHSSGLGPHVPLHEYIENMRKILIHIQGLSEKIRIIVLSCPPVNEEKVRGNTSGIFSELVRTNELCQSYSEACIKLCKELDVKVVDLFNALQKRDDWMNACFTDGIHLAAEGSKIVVKEILRVLKEAEWEPCLHWKSMPTEFAEDSPYDLVAADGKTTLNPSEWTFYREIQWD

SEQ ID NO: 167194 - protein, 179 aa, Glycine max
  unsure (1)..(179): unsure at all Xaa locations
  Clone ID: PAT_MRT3847_121993C.1.pep
RXXXXLKAMPRXNQIRDQXXXGRXRVDMIXQSSSAMDXQKXXTALGSGTRDIVPKDSAGGDAQEFERNEENSVILSEVSDTAGKVKVNALSRPFRQEQLKPQERYIRASISGNIYVWIGKQYPAREKSQXMAKAQLPLSSKNYPSWVKVTRXLQGTEPAAFKQSFSTWRDVGMSHSRLV

SEQ ID NO: 167195 - protein, 98 aa, Glycine max
  unsure (1)..(98): unsure at all Xaa locations
  Clone ID: PAT_MRT3847_121994C.1.pep
MWWRLPPPRWPPSAAVSRNSSRRSRASAPAPTRKKQPPTKSSKRLQQPTENSTTFAEPSCSTTPPPPPPPRSSLRCSPSEKRCSSTSTKRSXTRTPRR

SEQ ID NO: 167196 - protein, 62 aa, Glycine max
  Clone ID: PAT_MRT3847_121995C.1.pep
KGGYLKGTKLIHLKPLFFLPKFLNISFKKKKNISGGPWGAIFFRPLPGRAKNWVHGKLLGPV

SEQ ID NO: 167197 - protein, 70 aa, Glycine max
  Clone ID: PAT_MRT3847_121996C.1.pep
RMHTGATIPLPMKSQEAFLVQRRVVSIVRRRAHKCKTNFLISCHAQHTDTQARCVKLGFCLCNEIRMMIR

SEQ ID NO: 167198 - protein, 178 aa, Glycine max
  unsure (1)..(178): unsure at all Xaa locations
  Clone ID: PAT_MRT3847_121997C.1.pep
QLSIGQASTGLTALKASWRRPKTRIGTLKAQLQQAQAQLAVAKASARQSQLDLDDTTVISTLAGRVADPSVRVGQFTQPGTRLLTVVPVQALYLTANFKETQIHHMQPGQTVXVHVXALGSEDLSGHIDSLSPGTGSQFALLPAQNATGNFTKIVQRVPVRIQLDVPESARAVLMPGL

SEQ ID NO: 167199 - protein, 52 aa, Glycine max
  Clone ID: PAT_MRT3847_121998C.1.pep
RDLELVPFFFFFVNRNIESHYHAYISSDAPLPFSMYNYYSPIYRYIRSCSPE

SEQ ID NO: 167200 - protein, 142 aa, Glycine max
  unsure (1)..(142): unsure at all Xaa locations
  Clone ID: PAT_MRT3847_121999C.1.pep
HASDLNFLVIHHIQFSNAIHRDDLVSGAGSNAVAVLADGLVDGLLDGSSTDKVSRIYLETLSLNLAHGCXKRNTKLRCPMSSWANIGDLMXIAQLLEKTLYFAGVAIAIMVCIVNGPGEMADADYGYAGGTLSEIDLYVGKT

SEQ ID NO: 167201 - protein, 87 aa, Glycine max
  Clone ID: PAT_MRT3847_12199C.1.pep
IPPKTFGPPPPPIYFSGKSHLKKKASPQKTTFNIFTRFLTYPFWLKHIAGPAQNRGAWGGPKPKDSKGQERLPLGIFISLGENRGTG

SEQ ID NO: 167202 - protein, 83 aa, Glycine max
  unsure (1)..(83): unsure at all Xaa locations
  Clone ID: PAT_MRT3847_1219C.1.pep
ARNSARXXXVDXLTHXXRXXXEXGXXXXGGXXXSXXQTKPXXWXXIRXXXXXXXGXXNVLISLHXDTEXXVXYXFNTLXXRXR

SEQ ID NO: 167203 - protein, 39 aa, Glycine max
  Clone ID: PAT_MRT3847_121C.1.pep
FQLHGPIVFVSILCFYRVMRNLTWRKERLLKMAHNLNIL

SEQ ID NO: 167204 - protein, 64 aa, Glycine max
  Clone ID: PAT_MRT3847_122000C.1.pep
LRSSECSLKRPALCSPIDFPKSNPIESVVLEPEAPHVLHIYDSRMRRPHHLGACKGRGWTEKDS

SEQ ID NO: 167205 - protein, 108 aa, Glycine max
  unsure (1)..(108): unsure at all Xaa locations
  Clone ID: PAT_MRT3847_122001C.1.pep
AGAALPFHFFFLFSTQENTTGRDDTTTDAXVDGKEDSTVIAYNQEPKTCELQIXKNNSRKTNNITWGFKAIIPXKDKTKVWIDDSQGIHLMNGKNGHSPIKDIGAVRH

SEQ ID NO: 167206 - protein, 50 aa, Glycine max
  Clone ID: PAT_MRT3847_122002C.1.pep
LNLKRFCCNSFVYIYALESITFQPYMAMVVFRLFELGSSTLFLIVLINFL

SEQ ID NO: 167207 - protein, 36 aa, Glycine max
  Clone ID: PAT_MRT3847_122003C.1.pep
PPIAWNMSCLSTSTGGWFTRILGLCLDVAPIKSGSH

SEQ ID NO: 167208 - protein, 63 aa, Glycine max
  Clone ID: PAT_MRT3847_122004C.1.pep
PPADSWRSTRGGCDVGYERELIGVLISIGKQGLFSYSRLAFLLSHLISSSITGLPLNILKFVG

SEQ ID NO: 167209 - protein, 45 aa, Glycine max
  unsure (1)..(45): unsure at all Xaa locations
  Clone ID: PAT_MRT3847_122005C.1.pep
NHXAPRTFFFSRNKRXXRXLVQMDPEPRXKQXIMPKHAKPQLQLN

SEQ ID NO: 167210 - protein, 61 aa, Glycine max
  Clone ID: PAT_MRT3847_122006C.1.pep
VTEAGGPLVTRFVLATWAWRVGSLVMSKTLLTYYSSLVNGLPVSALLDLTLVVGTCSCCAM

SEQ ID NO: 167211 - protein, 126 aa, Glycine max
  unsure (1)..(126): unsure at all Xaa locations
  Clone ID: PAT_MRT3847_122007C.1.pep
RGIHRVARAFSGMIVDLVDCTAGITRGHINPAVTFGLLLARKXAVRHREIMYIERQCMRAIRETARRWVYXGNQIRALNCGANFVATDNSNGDRHEAQKELSVMTDYTEVYRISAQREARDTRATI

SEQ ID NO: 167212 - protein, 81 aa, Glycine max
  unsure (1)..(81): unsure at all Xaa locations
  Clone ID: PAT_MRT3847_122008C.1.pep
FVXNDDEALSLSLPLISSVPCPPSTLFVKCSHQTTIDLIISFSTNEFSTFFRWNLNHIFNWSCLMTKLSRLTKQASCYTYI

SEQ ID NO: 167213 - protein, 54 aa, Glycine max
  Clone ID: PAT_MRT3847_122009C.1.pep
NFLAHRLDGVSDHKVSLSVISVSNLGCSTDRLLFSIIVLGKAFFRMCACCKKGH

SEQ ID NO: 167214 - protein, 76 aa, Glycine max
  Clone ID: PAT_MRT3847_12200C.1.pep
PTINSRFSIAQRNLFMPSNSITTSIFFPLPSDLMQNCQKMESFHRFRLWVFVFLCLMFQSGNGFYLPGSYPHKYGI

SEQ ID NO: 167215 - protein, 181 aa, Glycine max
  unsure (1)..(181): unsure at all Xaa locations
  Clone ID: PAT_MRT3847_122010C.1.pep
WVGVNEKKQRQYKKGKHEYTFSQHVLPHSPSSSQTLASALSSPSSSKTRTLVCRFVNRSSLFPTTTRLLRRTKSFEHHALFTRRGSLRRACSASLEPFSDEEFAKKIEDLALKFQLSDENTNANDLDSEDFQEISLSXLNFAEEFEPPEEIFPANIERKANSXELPXSLRIIKKKLQWKEG

SEQ ID NO: 167216 - protein, 70 aa, Glycine max
  unsure (1)..(70): unsure at all Xaa locations
  Clone ID: PAT_MRT3847_122011C.1.pep
SXPFXXXKRNPRNXSSFRIWTVPQXNXSSXNXIIXXXHPXNSXRSSQFPCGXRXTIXRSLGXVVRGSXXT

SEQ ID NO: 167217 - protein, 525 aa, Glycine max
  Clone ID: PAT_MRT3847_122012C.1.pep
MELKFMQFSQHVLPHSPSSSQTLASALSSPSSSKTRTLVCRFVNRSSLFPTTTRLLRRTKSFEHHALFTRRGSLRRACSASLEPFSDEEFAKKIEDLALKFQLSDENTNANDLDSEDFQEISLSSLNFAEEFEPPEEIIPANIERKANSVELPFSLRIIKKKLQWKEGFREAGESAYCSVKKAFSSMVFIIRELHSFTMQMREFLFYEDLQGILERVQNEMHASFVWLFQQVFSHTPTLMVYVMILLANFTVHSMGNNAAIAAVAPPPVTSVVEAHDQRGHIQSHNIDSSSIKTFSVSNGKNTAYVGGGNGGGGKVRPAGNGTDGDGRFDRSRHGTVFSDGGASSQVYKTGDKTESVSGQEEEEELNLWNAMVEEASRMEGLDRDVMKRFVSPVMARIESDDYAEYLRTELVYQTGLSQDPSNTLLLVNYAQFLYLVVHDFDRAEELFKRAIEVEPPDAEAYNKYAKFLWKVKNDLWAAEETYLEAISADPDNAFYAADYAHFLWNTGGEDTCFPLSSPDNSKEV

SEQ ID NO: 167218 - protein, 32 aa, Glycine max
  Clone ID: PAT_MRT3847_122013C.1.pep
ILPKIKAIPQLQGYLRSVFALTNGIYPHKLVF

SEQ ID NO: 167219 - protein, 95 aa, Glycine max
  Clone ID: PAT_MRT3847_122014C.1.pep
QNLAYLPVNGEMGEGNFYRYIIHGVQHVKNHINHPLDRLRRNIMHPITGGICPFYITYMVHYCFLTNILPKGGCEEENCHQPLLHSPFFYLQKGL

SEQ ID NO: 167220 - protein, 78 aa, Glycine max
  unsure (1)..(78): unsure at all Xaa locations
  Clone ID: PAT_MRT3847_122015C.1.pep
EGSQETVATMIGMALGMLVARLTIGHPLAIWFSFLSLTVFHMYANYRAVQXLTLNSLNPERSSILFQHFMETAQGIVC

SEQ ID NO: 167221 - protein, 34 aa, Glycine max
  Clone ID: PAT_MRT3847_122016C.1.pep
SVRQSSGIVNDVVSSTRQVSSKNDCCTKCHRARA

SEQ ID NO: 167222 - protein, 76 aa, Glycine max
  Clone ID: PAT_MRT3847_122019C.1.pep
FWYKAQNKVLFHQSMKINLRLQETETPPSMNNSPRSNLSNNNCTNNNSIGLQIPTTPKTIPRSDSTTNPYPTTFVQ

SEQ ID NO: 167223 - protein, 106 aa, Glycine max
  unsure (1)..(106): unsure at all Xaa locations
  Clone ID: PAT_MRT3847_12201C.1.pep
LDRNKLPHFLYSMRKVRTGLYSPLLGSYKSVSIVAMAQAFGVTXDFIELELSRYIAAGMLLRKLDKAAGVLXHNRPNAKNGLVQAPIQLGVILLNRIQKMSCAIHL

SEQ ID NO: 167224 - protein, 167 aa, Glycine max
  unsure (1)..(167): unsure at all Xaa locations
  Clone ID: PAT_MRT3847_122020C.1.pep
PLASYEDQFXPINSFSQNSAQGSAGSPCGNDSTLIDKCTIKVCDTSYVRPGCTDAWQGIKRSMFKKNDEDKSGSSDQNATTGASSHNSSDLRRRQFDTSSFRQRAEALEGLLEFSARLLQQERYGELGVLLKPFGPGKASPRETAIWLSKSLKENTFSAGNNSPKLL

SEQ ID NO: 167225 - protein, 118 aa, Glycine max
  unsure (1)..(118): unsure at all Xaa locations
  Clone ID: PAT_MRT3847_122021C.1.pep
IRPPRCKTNGMGSTRRKKEXFRETPTSNDLKLLSTLPTYRGIDQERIDEVNKLMDNVVVHWLNPXGEHYIAVNTWGDRGFPPSNTLHDILPCLLHQSXPDISENLRKLARHIQKHTFE

SEQ ID NO: 167226 - protein, 338 aa, Glycine max
  Clone ID: PAT_MRT3847_122022C.1.pep
HASVHVRSSMEHSAAPFAFSGGEDYSCSPANDPNYGKLVMFSGDADFADGAHNLLNKESEIGRGGFGVVYRTFLRDGHAVAIKKLTVSSLIKSQEDFDREIKKLGNVKHPNLVALEGYYWTSSLQLLIYEYLSSGSLHKLLHDDNSKNVFSWPQRFKVILGMAKGLAHLHQMNIIHYNLKSTNVLIDCSGEPKVGDFGLVKLLPMLDHCVLSSKIQSALGYMAPEFACRTVKITKKCDVYGFGILVLEIVTGKRPVEYMEDDVVVLCDMVRGALEEGKVEQCVDGRLLGNFAAEEAIPVIKLGLICASQVPSNRPEMAEVVNILELIQCPSEGQEELE

SEQ ID NO: 167227 - protein, 89 aa, Glycine max
  Clone ID: PAT_MRT3847_122023C.1.pep
LKLPAAIYWFEESHTPTYLTSCLCLFPRPLSSTHSLQAVTKEHEPSNFSTCRTGASMNTKMLVYFSVLHLLRGIYMIQQDFPPMASILT

SEQ ID NO: 167228 - protein, 69 aa, Glycine max
  unsure (1)..(69): unsure at all Xaa locations
  Clone ID: PAT_MRT3847_122024C.1.pep
MGTAPCCDKAREKRGPWSPQDDTQVEEYIEKPGSGGNWIALSSESXLKRCXNCCRLRWLKYAXPYIKHG

SEQ ID NO: 167229 - protein, 80 aa, Glycine max
  Clone ID: PAT_MRT3847_122025C.1.pep
LPHVLYVWVFCSAHCPGKGSIGDPSPTPLAAPVNHHALGLSPPPRPRKVSLKDRNALLQFLALCLASPSDNGISCDPNPT

SEQ ID NO: 167230 - protein, 57 aa, Glycine max
  Clone ID: PAT_MRT3847_122026C.1.pep
TSLYGTSHYTFLITLPLTLLTKTKEPQFQPLITITSTLFISLQLFPILSISIYFQQT

SEQ ID NO: 167231 - protein, 113 aa, Glycine max
  unsure (1)..(113): unsure at all Xaa locations
  Clone ID: PAT_MRT3847_122027C.1.pep
GICLTMLCSLALAGESHGHASLPEEDDGEDDWPNTASPTALRERIKALRGGAESDELPKRSDETQNPKTFLYTEDLHSGLTLKVQCTKRAYAQPYGVYTWXTDIKDTCKEGYS

SEQ ID NO: 167232 - protein, 56 aa, Glycine max
  unsure (1)..(56): unsure at all Xaa locations
  Clone ID: PAT_MRT3847_122028C.1.pep
QXXDKVVVXTEGQCLYFGXGSDAMRHFQSVGXAPXFPMNPADFLXDLANGXCHVDG

SEQ ID NO: 167233 - protein, 47 aa, Glycine max
  Clone ID: PAT_MRT3847_122029C.1.pep
SILGQRSSMKSWKFAVSIYAIGKKFWRNLINPVVMKTIRQSRCIKYV

SEQ ID NO: 167234 - protein, 48 aa, Glycine max
  Clone ID: PAT_MRT3847_12202C.1.pep
QTPPFFTKIHPSFIQLIFHSCLQPSEDSPQNVQTVIIVSFPITTLLVD

SEQ ID NO: 167235 - protein, 83 aa, Glycine max
  unsure (1)..(83): unsure at all Xaa locations
  Clone ID: PAT_MRT3847_122030C.1.pep
XRKXRSXSFHCYXVPSISNCSIPLCXRVPGPLNRVSGXXFFXVXTEEYXXXXYGXXXCLXXXLFGVLFTXTKKXXXXXGVXXX

SEQ ID NO: 167236 - protein, 75 aa, Glycine max
  Clone ID: PAT_MRT3847_122031C.1.pep
VDGIGVVVDERRRRVIFVLGGDCERERNGDCSIQEECVVGRRGIKIHWVLFPRRRCYGPFKKNLATVRMSGRTNG

SEQ ID NO: 167237 - protein, 197 aa, Glycine max
  unsure (1)..(197): unsure at all Xaa locations
  Clone ID: PAT_MRT3847_122032C.1.pep
QENRDVSSRVCDHQILAIFFFTVQQQHLSLFAAMNSSGYEYQQEQQHGYDPSQTQTPSYDQSSQPYYPYNYAQDNQPQPQFQQDPNSTPIAPEQSHSAEPSQAHAPDPLQAATVPGSINPAAVAVVAGALAQLVGNLDGVPRELIGTSQYRGAGRRGGRSFRGYGRGRFNXPPCRGRGRGGDGRQFSSHSSEALLLM

SEQ ID NO: 167238 - protein, 84 aa, Glycine max
  Clone ID: PAT_MRT3847_122033C.1.pep
FDNTCISVWQMLNLITLSSEFGICFVIMNNPRYSQSRRGKSIEQRMNNKGPMALNDLLQVLQFGYKNKPQFLRPRRLYTQFSPS

SEQ ID NO: 167239 - protein, 47 aa, Glycine max
  Clone ID: PAT_MRT3847_122034C.1.pep
WGERKLYYYCLLKDKNNSYMYKLESQCHTIIIGTSKATRNIYNHYSH

SEQ ID NO: 167240 - protein, 106 aa, Glycine max
  Clone ID: PAT_MRT3847_122035C.1.pep
LIFLHRKWRHPNIRSLYQAIRPVRFTSSGIRASALDTGSILSYYFLFNLSRFVFCPCSVICVFVYILFRSCLRLVFCYLRSCLHLVSFLFLARSCSWFLGLSHFGP

SEQ ID NO: 167241 - protein, 53 aa, Glycine max
  Clone ID: PAT_MRT3847_122036C.1.pep
RWFFIRYRRGTERKFLHKREVKESICTGDNLAISRVGQLQPIEKAHRTSSIHI

SEQ ID NO: 167242 - protein, 336 aa, Glycine max
  Clone ID: PAT_MRT3847_122037C.1.pep
MRRYLSKFIHYPIGFNPSNSFPLNCEMGSYCAARSTNRQASFSGNMHEYATRAFATTSCASLSEDQPKDNSVSDMLVDSFGRLHTYLRISLTERCNLRCQYCMPADGVELTPSPQLLTKTEILRCANLFVSSGVNKIRLTGGEPTIRKDIEDICLELSTLKGLKTLSMTTNGIALARKLPKLKECGLNSVNISLDTLVPAKFEFMTRRKGHEKVMDSINASIDLGFNPVKVNCVVMRGFNDDEICDCVELTREKPIDIRFIEFMLCDGNVWNVKRLVPYSEMLDKVMKRFTSLERVHDHSTDTAKNVTIDGHESRSSFITSMTEHVSAGCDRLRLL

SEQ ID NO: 167243 - protein, 110 aa, Glycine max
  unsure (1)..(110): unsure at all Xaa locations
  Clone ID: PAT_MRT3847_122038C.1.pep
IYWCHGSTMVXAFALSDTFKVPWNYEGKLSCMTVSFKFXALAPRAVVPLYSSFFHTRIDSYGSPWGPVCDQVIVFPVACILECHAICTSMICSNLPLCISRKLLFSIIPR

SEQ ID NO: 167244 - protein, 560 aa, Glycine max
  unsure (1)..(560): unsure at all Xaa locations
  Clone ID: PAT_MRT3847_122039C.1.pep
MASFLLRRNRNLFARSLLGNKEPFRPYFQLKFLSLGGAANKVHPYSSSNGPIRNDFTDLTCPHTWYPQARRKHRRVILHVGPTNSGKTHHALKQLESSASGVYCGPLRLLAWEIAKRLNKAQVPCDLITGQERGEVDGANHKAVTVEMADLSADYQCAVIDEIQXIGCTTRGYSFTRALLGIAADELHLCGDPAAVPLIQEIMKITGDEIEVQFYERLSPLVPLKVPLGSFSNVRNGDCIVTFSRQEIYKLNKRIEKEGKHLCSVVYGSLPPETRTRQNLPSLNMFNDASSEFDVLVASDAIGMGLNLKPMARRLASLKMSGPLVARHLTVPLIKHIAGRAGRYGSNFPVGEVTCMDEEDLPLLHSSLNSPSPILERAGILPTFDLMYMYSRLHPRNGFYQILARVFFVYACAWFLKVAAVIDELPLGLHEKYLFCISPADMDDEISSQGLAQFAENYAKKGLVRLREIFTPGSLKVPKTPAALKELESIHKVLDLYVWLSFRLEESFPDHELAASQKAICSMLIEEFLERLGWQKPMARRLPSHKMSSSLLSQHMRKHL

SEQ ID NO: 167245 - protein, 62 aa, Glycine max
  unsure (1)..(62): unsure at all Xaa locations
  Clone ID: PAT_MRT3847_12203C.1.pep
NSCVIGIIAIKIRHIXQFVFRASVIDSPGVTTIAEPSLDSTWALTKKDEKELLLWNTKKKSQ

SEQ ID NO: 167246 - protein, 199 aa, Glycine max
  Clone ID: PAT_MRT3847_122040C.1.pep
MALVVMCGQPCSGKSKAAVCLAGPLKESESKLQVRIIDEACFHLNRNQSFANMPSEKNLRGVLRSEVDRSLSKDSIIIVDSLNNIKGYRYELWCLARAAGIRYCVVFCDVEETICRKWNEERREKGEANYDDSIFEDLARRFEKPDRRNRWDSPLFELWPHREATEKSSPAVVDAVSYLTKKVDSKTRDVKILQPTIAT

SEQ ID NO: 167247 - protein, 75 aa, Glycine max
  unsure (1)..(75): unsure at all Xaa locations
  Clone ID: PAT_MRT3847_122041C.1.pep
MENPPPPPGGLKKERKTVKVVSFVNWGPFFWPSDETKKRVFPPSGHGKVSLXAGSPFGLPKIFWNPRKALGLCPF

SEQ ID NO: 167248 - protein, 92 aa, Glycine max
  Clone ID: PAT_MRT3847_122042C.1.pep
HSFPENFSTHQIPNIPKFQFSLHKEHNTNMKTRTSAKISATWIPIFSVFSFIIGMLVTSRSLPFPLFSDILTFQILYFFICEVGNLGLWVLI

SEQ ID NO: 167249 - protein, 115 aa, Glycine max
  Clone ID: PAT_MRT3847_122043C.1.pep
GEFPKGLNTPPNLCQPLGQSITIHSNLPPFPLNPNPNPQPGSPPVPFIKGGNPKTESRKPVPKLAVIKKEAATKARKPAGKGKAPKDPISPKRLQIASSVFMEDFRKVFTKENPE

SEQ ID NO: 167250 - protein, 39 aa, Glycine max
  Clone ID: PAT_MRT3847_122044C.1.pep
HICSRQHRLKCGAALNNNYAIYYRYHVIKTDFGLCQLGF

SEQ ID NO: 167251 - protein, 82 aa, Glycine max
  Clone ID: PAT_MRT3847_122045C.1.pep
FFRVVPSVASLPRRFGCSMWLAFLSGVPFSVRPRRRLGLPRGAVSFALSACWSCPLAALWVCTPPFPFLVPPFPRCVGGCEK

SEQ ID NO: 167252 - protein, 95 aa, Glycine max
  Clone ID: PAT_MRT3847_122046C.1.pep
PYASRLHVLKKNSFTLRQTSIDGHCSLPNNEDTYWALQEFDAYIDGAASLEELQGGARALHGAIGEAEPGTAFWVMDTDDDGLIELKELTKMLNE

SEQ ID NO: 167253 - protein, 71 aa, Glycine max
  Clone ID: PAT_MRT3847_122047C.1.pep
IAIICLLIRPILKPKEMRSEFLGEFQFHIFKKLGGQNGHFLIGIIWFLIKPFLKPKEMKTGFLGGSQLQIP

SEQ ID NO: 167254 - protein, 47 aa, Glycine max
  Clone ID: PAT_MRT3847_122048C.1.pep
PKPPIEFGTHPPFLFKCKNLKPSPKDISPFLTYSYGKKSTTLSPMNR

SEQ ID NO: 167255 - protein, 94 aa, Glycine max
  unsure (1)..(94): unsure at all Xaa locations
  Clone ID: PAT_MRT3847_122049C.1.pep
SXXRPDXPYCSXTXXSRXSSVYGADSLAXGVDVCCXXXCCYCDXGGSAXXAXCGFAXAAEAATXTXXRXXCXXSXCXSXWNLINTTTAXXXEKV

SEQ ID NO: 167256 - protein, 126 aa, Glycine max
  unsure (1)..(126): unsure at all Xaa locations
  Clone ID: PAT_MRT3847_12204C.1.pep
TTSLSTTISLFSILMRLGFLGHTLFSFLSNSPPRDSERVXXKKGGVGFXVXRXXXRGERXXRFXSXGGXSAXKGHSNXAQTGGXCYHPPSLSXNHXHHYQGGANTXXXLXKXGLXXRSLXLILYSG

SEQ ID NO: 167257 - protein, 34 aa, Glycine max
  Clone ID: PAT_MRT3847_122050C.1.pep
FFICTTKTEWLDGKHVEFLQVVDGMDVVKDIEKV

SEQ ID NO: 167258 - protein, 64 aa, Glycine max
  Clone ID: PAT_MRT3847_122051C.1.pep
NKSHMNSVLFDWLIVLEDCLNCDHLLLWSLWRLLELGPLEWWFSSTSTRNMIKIKYISECQFLF

SEQ ID NO: 167259 - protein, 76 aa, Glycine max
  Clone ID: PAT_MRT3847_122052C.1.pep
FLQLRFWYVLFQIEKFQASGMEPLEVSSIIDRLFNPICFHLSLFPACIEALYICLNRASLLLGFTLSSQPVKYSCG

SEQ ID NO: 167260 - protein, 154 aa, Glycine max
  Clone ID: PAT_MRT3847_122053C.1.pep
QLDLSSNALNGSIPLELYGLLGLTDLLLNNNTLVGAISPFIGNLSGLQTLALFHNNLEGSLPREIGMLGKLEILYLYDNQLSGAIPMEIGNCSSLQMVDFFGNHFSGEIPITIGRLKELDFLHLTQNELVGEIPTTMGHCHKMNNMGLSAGQLL

SEQ ID NO: 167261 - protein, 48 aa, Glycine max
  Clone ID: PAT_MRT3847_122054C.1.pep
ITNFFTENKLTTKLLNTLVSFIKKTIYPKVGFDFFLVNIVWPSYCLEL

SEQ ID NO: 167262 - protein, 67 aa, Glycine max
  Clone ID: PAT_MRT3847_122055C.1.pep
DFESLNNVKCNVKSILYVYSIYCVYSLIHVNNLYHVIHFHNFSRHLTVSLVLMLVSHLWMAQLPQHR

SEQ ID NO: 167263 - protein, 93 aa, Glycine max
  unsure (1)..(93): unsure at all Xaa locations
  Clone ID: PAT_MRT3847_122056C.1.pep
FTPPARILSVIVRGXXCVTXXXYXSHSHKLAIHPHQTRQKLSLHRDRDRSSASGSPGVRDFVARQRERERERERERERERESQEIIKGLFRYS

SEQ ID NO: 167264 - protein, 36 aa, Glycine max
  Clone ID: PAT_MRT3847_122057C.1.pep
VTQVIYFFQLKVFRIYFILNHPIFCMIIKSVSCLKC

SEQ ID NO: 167265 - protein, 39 aa, Glycine max
  unsure (1)..(39): unsure at all Xaa locations
  Clone ID: PAT_MRT3847_122058C.1.pep
IQVQIQGCIFFKCIFLTNLFKPASPNIKSENVMLFXNFP

SEQ ID NO: 167266 - protein, 71 aa, Glycine max
  Clone ID: PAT_MRT3847_122059C.1.pep
LTNYLLDVDECNEKTHNCTEGSICSNSPGIYSCSCPKGYEGDGKNNGTGCRPKVSSSRIIIIALSEYIIVC

SEQ ID NO: 167267 - protein, 61 aa, Glycine max
  unsure (1)..(61): unsure at all Xaa locations
  Clone ID: PAT_MRT3847_12205C.1.pep
FSEYPPLGRFAVRDMRXTVAVGVIKNVEKKDPTGARVTRXXRRGSDRAVWFIRGCRFLWLQ

SEQ ID NO: 167268 - protein, 40 aa, Glycine max
  Clone ID: PAT_MRT3847_122060C.1.pep
ENVVIEIRNNVELILLIIEVIYDLHIFKPFAPSDYPPVRV

SEQ ID NO: 167269 - protein, 74 aa, Glycine max
  Clone ID: PAT_MRT3847_122061C.1.pep
IWGGEWGLTVSHPTTSLYTVNMPLYSPLYSIKAELDEYFWRDKMGFYTLLMGEYIEKKIIVAKICDGSTRAMEG

SEQ ID NO: 167270 - protein, 51 aa, Glycine max
  Clone ID: PAT_MRT3847_122062C.1.pep
ATERIYERRQGYHTLRYHGVYTHEMSIDSLHVHGVNVILKTQPTIHWTLQG

SEQ ID NO: 167271 - protein, 384 aa, Glycine max
  Clone ID: PAT_MRT3847_122063C.1.pep
MEVSALRPHCPLCRRCFSSPFSLPSLLPSQPLQRRKMQSFQISYNGLRNSTVLRNFVQSRADFSCCLKGTSVGLNKYNGARYKRNFLCKSPVCISSMKISNASTGTLEEMTEEEELNSLRPCEMQVRTVGMAACNNEFSTTTLGKKLSGGDYRGWTMAKDKLTENKKEMNGSNKFERENGSFSASNGIASIAQNQAVPRNGDSIIVLQDPGTHAPSSVNYSVLNNSKVLTDSEKVIHQYNGSSLGIGKEKVIVVNGDHGLDETAKDSTNATLTKQACGTDQSKLRDRLCSIYDDILVVDNIPLAEEVSKMLTTKYRHLIYACDTEVAKIDVKQETPVDHGEITCFSIYCGPEADFGGGKSCIWVDVLDGGGKEILEKFAEFLAF

SEQ ID NO: 167272 - protein, 75 aa, Glycine max
  Clone ID: PAT_MRT3847_122064C.1.pep
LMYISLFWKEAKVWCSGGRGPTPMSTEQVAFSAKNNFKIKIKISLLKNKQYLTTLLFPRKSVENTNSISKRINKN

SEQ ID NO: 167273 - protein, 101 aa, Glycine max
  unsure (1)..(101): unsure at all Xaa locations
  Clone ID: PAT_MRT3847_122065C.1.pep
PYYEKHGYGVQEFNETLYDEWDNNGDAPALPKTLKTYNKLLSLGSKIVFFVXTYLDKMGVTESNLKKAGFHTWEHLILKDPHLITPHALPYPSPMRHNLLR

SEQ ID NO: 167274 - protein, 118 aa, Glycine max
  Clone ID: PAT_MRT3847_122066C.1.pep
VVGDGITTTNTKVREFLCEMARRRVAETSGADRLDTASRARTPEWLWITFPSPIFKLVLSLKPTALRVGLPACVCGPLNLAIEIRFEKMPQSPQTANTCLTIRNIDTKGEGPKMSWSW

SEQ ID NO: 167275 - protein, 89 aa, Glycine max
  Clone ID: PAT_MRT3847_122067C.1.pep
LDDFCGLGTAAGKAGSSRMWEPLKHSSKMSRRDRSLGKSSVRSYTDETMEQQSWIRLADDLFDPVIARLPIATCFCLRSVCQRWNSLLT

SEQ ID NO: 167276 - protein, 120 aa, Glycine max
  Clone ID: PAT_MRT3847_122068C.1.pep
LQSQASCSLASAAFRGAFAGSYSCCFVAVTASSPALQSYASPLSAAGSLLVAPLSLHAFGIRAPVESYYVAAFAAAYAASPYIPAIALAAGVGASYLTCAFAAWRSCTCPCCVYRYLGTV

SEQ ID NO: 167277 - protein, 119 aa, Glycine max
  unsure (1)..(119): unsure at all Xaa locations
  Clone ID: PAT_MRT3847_122069C.1.pep
PQAPPRMLCPLKPPMSLEPVDHIMDRASSPLMAQNLLLGPMKMPPWAPPGLEIWDWLIKFPCLLCGRNQGTVLLLSLDSKNPLFGXNLFDRGAELLDVFYIGAWYGTFFFYVEKKGICQ

SEQ ID NO: 167278 - protein, 55 aa, Glycine max
  unsure (1)..(55): unsure at all Xaa locations
  Clone ID: PAT_MRT3847_12206C.1.pep
PQPTYYIVFMKKTPHSFQTLSYTSVLSTLILFIFYTHIXTLAKLFITIYTHSCFI

SEQ ID NO: 167279 - protein, 269 aa, Glycine max
  Clone ID: PAT_MRT3847_122070C.1.pep
MGKKKPTARDEENAVQQGGGGKSKKKAVLIDDDEYSIGTELSEEPAPASEEKPVVAGKKKGKKGNAKAKSNDDDVDEDEDDPEIVFAGKKKGKNKKGGGSSAFTASGFDLLGDERDDDEEKSGLTGEVDGEEEDEPVVSFTGKKKASKKEGGSLFSASAFDAIDDGEEEDGPVISFKGKYGSPQGAKKGGGSLFSASAFDAIDDDADGEVVDDKNDDVDDDEPVIAFTGKKKSSKGGKKGGSVFSAAVLGEIDDGEENKDDGGGDDDDD

SEQ ID NO: 167280 - protein, 68 aa, Glycine max
  unsure (1)..(68): unsure at all Xaa locations
  Clone ID: PAT_MRT3847_122071C.1.pep
AFDMVGLHGAGLCLSNXIAFNDKLVLANTHESSVGHFPVDSRVPILENCLYPGRQVPSQAVGGNETCG

SEQ ID NO: 167281 - protein, 96 aa, Glycine max
  unsure (1)..(96): unsure at all Xaa locations
  Clone ID: PAT_MRT3847_122072C.1.pep
MCRIEFDVFDRRLHVRVVSDVHVSVDASYHSNSNARRAYLAYVXTNAGXSHDCISIMKYLINNGYLLNSPATTAAVFQHLMNAECLEYLRSDIIKV

SEQ ID NO: 167282 - protein, 88 aa, Glycine max
  Clone ID: PAT_MRT3847_122073C.1.pep
IIRTQVSKIVVISDQATLSAYSKTISAINFSNYQFFIFSYKHFFFSLQCFRLIIISATVSHHSCKRHQCSHLRKDMVHCFKFQSHFFT

SEQ ID NO: 167283 - protein, 53 aa, Glycine max
  Clone ID: PAT_MRT3847_122074C.1.pep
CNSEISVLNSQTSTHFTCLKVNYLHIHSMFYAVYKLDTHGESNSTGVKGYDMT

SEQ ID NO: 167284 - protein, 31 aa, Glycine max
  Clone ID: PAT_MRT3847_122075C.1.pep
CSGYYSGYCNGYYSDYCSENVDMQLCIKANQ

SEQ ID NO: 167285 - protein, 58 aa, Glycine max
  Clone ID: PAT_MRT3847_122076C.1.pep
ITGPTDASGQSCADSADFFQGRALFPAGRVVSEAWGPRLHTLSYRRTVNPTMKSKQTK

SEQ ID NO: 167286 - protein, 343 aa, Glycine max
  unsure (1)..(343): unsure at all Xaa locations
  Clone ID: PAT_MRT3847_122077C.1.pep
TRPVFAVGAAIAVGGLALGAGLSNVRYFSEAGAAAERIKEVIKRVPKIDSDNKEGEILENIYGEVEFDRVEFAYPSRPESAILKGLNLRVPAGKRVALVGESGSGKSTVIALLQRFYDPCGGEVRVDGVGIQKLQLKWLRSCMGLVSQEPALFATSIKDNILFGKEDATQDQVVEAAKAAHAHNFISLLPHGYHTQVGERGIQMSGGQKQRIAIARAIIKKPRILLLDEATSALDSESERLVQEALDNAAVGCTTIIIAHRLSTIQNADLIAVVGGGKIIEMGSHDELIKNDTGAYAXAFRLQQQMGKDKVEGKHGKNYSRDCFIHNRPRHGTYFCPHIIRGL

SEQ ID NO: 167287 - protein, 102 aa, Glycine max
  unsure (1)..(102): unsure at all Xaa locations
  Clone ID: PAT_MRT3847_122078C.1.pep
ALNLGLLKSTIASASQTGKVILWPAAKAGDQRQGRVLTRFFTPVXKVSWSLTESILSVVEGTFNGSLCKQPVSGHCQRVPTVERYTCEIFPCVKGHNLRFKI

SEQ ID NO: 167288 - protein, 58 aa, Glycine max
  Clone ID: PAT_MRT3847_122079C.1.pep
GEFISSAEISFISTTCAIHLITIRHRIDFYSDCETRFLFSILLIWATTVYIYLQIYYS

SEQ ID NO: 167289 - protein, 97 aa, Glycine max
  unsure (1)..(97): unsure at all Xaa locations
  Clone ID: PAT_MRT3847_12207C.1.pep
KNCVKALKTGFWKYVKGWWRMIMFRSEGIPRVWFSFSVGTPIAXVEFSLEFGYHFDSFYNNKTNPTLILLPLYVFKIIFNWIWNGEGSVLTSSVEVR

SEQ ID NO: 167290 - protein, 451 aa, Glycine max
  Clone ID: PAT_MRT3847_122080C.1.pep
MLYDKYISAARRPQKGAAHRHMAMEKLASSSTATVVPTQHFLFQFHQHSLFFFPKTAFSTFHRNRTEPLSLPCCKSRHRRLEALSSKQDQLWVSEEELELELEEGEDSYLDGDDDDDDSSFLSLSDKPDRNMAMLDDYEGEELDFDYGPDHRSGYVALLGKPNVGKSTLANQMLGQKLSIVTDKPQTTRHRILCICSGTDYQMILYDTPGVLQKEMHLLDSMMMKNVRSAAVNADCVVVLVDARKAPEKIDGLLEEGIGDLKDKPPTLLILNKKDLVKPGELAKKLEWYEKFTEVDEVIPVSAKYGQGVEDVKDWILSKLPNGPAYYPKDIVSEHPERFFVAEIVREKIFMQYRNEIPYACQVNVVNYKARPNAKEYIQVEILVEKNTQKIILIGREGKALKLLATAARLDVEDFLQKKVYLEIEVKVRANWRQDEGLLNHYGYGGQIRVI

SEQ ID NO: 167291 - protein, 59 aa, Glycine max
  Clone ID: PAT_MRT3847_122081C.1.pep
GIRCNIVSHIIMRSIERYQMWKGRYFVGEWPLCNSILCEARVFEAIKVNVVIDHSKRLF

SEQ ID NO: 167292 - protein, 138 aa, Glycine max
  unsure (1)..(138): unsure at all Xaa locations
  Clone ID: PAT_MRT3847_122082C.1.pep
RQLLLHMNGGKGERSYAHHSSLQKKLMLKATPILEETIMKLYHDSSPSCMKVADLGCSVGPNSLLVISNIINIVDTTCTILNCEPPTFPFYLNDLLGNDFNTIFQSLPDSHTRLGEDXGHKLGLCFINATPGSCYGKV

SEQ ID NO: 167293 - protein, 73 aa, Glycine max
  unsure (1)..(73): unsure at all Xaa locations
  Clone ID: PAT_MRT3847_122083C.1.pep
VSLDPLEGAAXXFFFFFFFFFFFLFFFFVGVGGKTFFLKIKGASGQPNCKYTRGLKDLSIKFNLWAYPLSWAF

SEQ ID NO: 167294 - protein, 139 aa, Glycine max
  unsure (1)..(139): unsure at all Xaa locations
  Clone ID: PAT_MRT3847_122084C.1.pep
KWAGDPDDEGPXTYDDAKHNAICANIPQLSXQDRTLLLEFLFRDEQRHMRCXGSAVYDQNIHLVGYEQISRMMRGDTPYRLEASHHISGXRTNKLHPILSYQGPNYPLRYYLKCEADKXTHLYASILRPDAAYSIQGDN

SEQ ID NO: 167295 - protein, 183 aa, Glycine max
  Clone ID: PAT_MRT3847_122085C.1.pep
TRGKPLHADGYAIDNGAVNHQIYKQLPDASSQMKSKLTEHVSPELKQVSLDNGGRKDLLNKDNVVGLETEIYSINNYNKPLIDETKTSKPDLPILHQVSSDKHLDDPASILPEVDWGDTSVKESNEDINVQALPVSINGNTTTDEDSEEFPSNVVSKQAQGDILIDINDRFPREFFTDMFSKA

SEQ ID NO: 167296 - protein, 56 aa, Glycine max
  Clone ID: PAT_MRT3847_122086C.1.pep
PRVRMVEGCLCFLSVGGLNQSGIPWRLGGGLTTTKIWIAEVYEIHSGWILQSILAP

SEQ ID NO: 167297 - protein, 93 aa, Glycine max
  Clone ID: PAT_MRT3847_122087C.1.pep
LANLLIRHILGSPKCNMSLGFRFHPTDEELILHYLIEEVAFIPLSDTIIGEDDIYNVDPWDLPPKATFGEKERYLFRPRDRQYPDGARINRAF

SEQ ID NO: 167298 - protein, 161 aa, Glycine max
  Clone ID: PAT_MRT3847_122088C.1.pep
MTATMSGPIPNDHWLHFYQQNQFPSSVSDATTVTTTAAPAKLSPEGGVSKPIRRRSRASRRTPTTLLNTDTSNFRAMVQQFTGAPSAPDMFGSPVPVNPNGLMLAPSQSLYHQQNHLAYRDGGDKGFFQRLSNPTATAPNNDRADEVLVDHGGRFFPTTSS

SEQ ID NO: 167299 - protein, 98 aa, Glycine max
  Clone ID: PAT_MRT3847_122089C.1.pep
DQQFTAKLFFIFIFPLSFLNFESFSNLCFTFKFTRGRVLGLFASDFPVMNCSYNYVCVRNLSLVKKNHLCSGRQPIFFLLFLLYFFEFRIKKWLLSFL

SEQ ID NO: 167300 - protein, 70 aa, Glycine max
  Clone ID: PAT_MRT3847_12208C.1.pep
LGLNRGFQTAGREPGLFKAYMFLKFRLGSCDILEAGVCLICVYGFLCTFKKSSYNFFTIPCKLSKKVFSC

SEQ ID NO: 167301 - protein, 76 aa, Glycine max
  Clone ID: PAT_MRT3847_122090C.1.pep
SLSTPSLNCRHACRQCAVCMRFHVELALPSSDGEVVTLWSSQARPATALLPDTGTYLDASVHDWSGSTRLGDFGTC

SEQ ID NO: 167302 - protein, 130 aa, Glycine max
  Clone ID: PAT_MRT3847_122091C.1.pep
LVALLVAFGVIFGINPSILGLTVLAWDGVQIALSGCYAGPMFNTLIGLGISLLLGAWSKKPSLYVVPEDTSLFYTMGFLITGLLWALIVLPRNNMHPNRILGMGLISLYVIFLSFRMCTAMRFITIAGLS

SEQ ID NO: 167303 - protein, 127 aa, Glycine max
  unsure (1)..(127): unsure at all Xaa locations
  Clone ID: PAT_MRT3847_122092C.1.pep
AWGNSXMGDLMSNISLALNGEDGVQIALSGCXAGPMFNTLIGLGISLLLGAWSNKPSLYVVPEDSSLFYTMGFLITGLLWALVVLPRNNMHPNRILGMGLIALYLIFLSFRMCTAMGFITIAGLSLS

SEQ ID NO: 167304 - protein, 36 aa, Glycine max
  Clone ID: PAT_MRT3847_122093C.1.pep
TVIAEIISNLCLVLGIRLARYLCSRPFITDSCSIPI

SEQ ID NO: 167305 - protein, 124 aa, Glycine max
  unsure (1)..(124): unsure at all Xaa locations
  Clone ID: PAT_MRT3847_122094C.1.pep
AQNVNCIAAVSLGTLLHSGESSKMEGRARKRASIPVQGPACNATDKLDVPHTFNTLQHTARTAVHIDYRAPVLPIKLECSHLLLNSKFFWKDVDEXPQRVQDLDKYDGVDEKIETSLYLLKSTS

SEQ ID NO: 167306 - protein, 109 aa, Glycine max
  Clone ID: PAT_MRT3847_122095C.1.pep
MEFNKDEAVRARQVAEARMQRGEFVEALKFATKAKKLCADVVNITHVITICEVHNAAKKKLSATDLDWYAILQIEGLADEAAIKKQYRRLALLLHPDKNKFAGAEAAFK

SEQ ID NO: 167307 - protein, 67 aa, Glycine max
  Clone ID: PAT_MRT3847_122096C.1.pep
FTPNHRLNGLFLCPPPSIVDACQLFDDTCWVADATYVRTFNKRLKHNDVELTFGSLSPVALSLLLWT

SEQ ID NO: 167308 - protein, 108 aa, Glycine max
  Clone ID: PAT_MRT3847_122097C.1.pep
YPQDGKQGWWSGGFGYGLWIGILVASGFSVIPVPSFTWKAKFELSGNGTTKDDSRRIASTLFPSMTSMLSRKKDHGRAEALLIAAYGQDQNKTLKPSCCDTILDNLEN

SEQ ID NO: 167309 - protein, 175 aa, Glycine max
  Clone ID: PAT_MRT3847_122098C.1.pep
ALVAPPVSAANTKVASRLAVALVAPPVSAANTKVASGLALALLIAPPVGTANTKVTGGLAITLVAPLVHGRADAVVSRRSGVGGVALNVVGGSNGLGSLDCRCGSVGNGGGSRGEACSGQAHEKDGGLELHDGSQRPRQVDMKVGRMCRDEVGGGEPRRGMARSTDKQCTQRGEG

SEQ ID NO: 167310 - protein, 50 aa, Glycine max
  Clone ID: PAT_MRT3847_122099C.1.pep
TIKAVFIQASLVLFSSTAYIFFSTQIQFQLNYLIARNIFVSYCKERGRCL

SEQ ID NO: 167311 - protein, 136 aa, Glycine max
  unsure (1)..(136): unsure at all Xaa locations
  Clone ID: PAT_MRT3847_12209C.1.pep
FTIDPFVEKQYVAGANLKPISERSWSCLQSSLETSAAATQTHWAPPRSLPPINDMKTMHAKAPCSTNDKTLTVEETPMAPHPEXHRRVTEKNKYHAHDPDNQFXTADFVQLQKTNSINKTKACLALPGPNKSSNRA

SEQ ID NO: 167312 - protein, 81 aa, Glycine max
  Clone ID: PAT_MRT3847_1220C.1.pep
TIGFAICFQIPHSSAQGPNTLFQSLTINILAKETIDDIAQSIVINNQTHDVILPSIPINKYRKHQIMHDAIKCIHHTKRTT

SEQ ID NO: 167313 - protein, 159 aa, Glycine max
  Clone ID: PAT_MRT3847_122100C.1.pep
ASVTTIAAPSVAPAAPFGTSFATKDIQFPRMGPAAPDPNLVLRNQVGGRLLGGNSMGDTKHVIRLGFGEAGSDPSWALVGFGGGYFSPISSIPSGAPQLENPLLQFELASSRVGFRSLLLGGPPMGRTKIYLFWLELDYFAIIKNCLLIKIHVGIQGEG

SEQ ID NO: 167314 - protein, 70 aa, Glycine max
  Clone ID: PAT_MRT3847_122101C.1.pep
ANKLSWNVTIFIIAKPYLLIAPSQCYHFFFCTAKINILYMKFSTRCTEDTKITIKTITVCIPLGETEYSP

SEQ ID NO: 167315 - protein, 104 aa, Glycine max
  Clone ID: PAT_MRT3847_122102C.1.pep
TRHHRLSSEGSSAKSATGGARANLYGRKGAEKNAPTWAEPGMLVGQVPRAMTPTDLSPEDDPKTAKTGRPKALKRPLNKDQRVKPSTPTTSSEYHNQDQGADLG

SEQ ID NO: 167316 - protein, 190 aa, Glycine max
  Clone ID: PAT_MRT3847_122103C.1.pep
DCTPEFRFFWLTSKLAETDAFEPPSHYHKYRHAHYQAGITPLALVWKDENCSQYVLDTDSKGQVPNQQQVVLELQDDGKLTTSDDPPMVFGCLDGSFIQQSGLHSGCLLRFSIGEGGLVLMDGKLDKADLHYLGKANRARASADSFSKVLREYFSKALSFCDFSFHLKIKILLWMDCMHVENVTMLMETI

SEQ ID NO: 167317 - protein, 417 aa, Glycine max
  Clone ID: PAT_MRT3847_122104C.1.pep
MAPHDLRRPFKRPAISDQERRREQSLLRQAQSRQDAQRHARFLASAALSLPPKTPEPESEPKPEPEFELAETEASSDSGYESLDIIGASTLSAAEARKWFAKQLMHPEWMIDIPNNLAQDWFVFARPSGKRCFVVSCNGTTISRLRNGAILHRFPSALPSGARKKDPSYSILDCIFHEVDQTYYVIDMVCWRDYPLSDCTAEFRFFWLTSKLAETGAFDPPSYYHKYRFSLVPVYSCDSSGLYAAYSAPVPYVKDGLLFYNKHSHYQAGITPLALVWKDENCSQYVLDTDSKGQVPNQQQVVLELQEDGKLTTSDDPPVVFGCLDGSFIQQSGLHSGCLLRFSIGEGGFVLMDGKLEKADLHYLGKANRARASADSFSKVMFQHSVRHSPLRIEGLLESVGLPVDQESKACDIEMDG

SEQ ID NO: 167318 - protein, 53 aa, Glycine max
  Clone ID: PAT_MRT3847_122105C.1.pep
ASLLCCYNYSNSSDLTPMLSNFTFVLGGILLLHYQLRHTNFVSDGCNKIKTII

SEQ ID NO: 167319 - protein, 227 aa, Glycine max
  Clone ID: PAT_MRT3847_122106C.1.pep
LETLFANWSPVYLSASKDESESKDTEPAFWTGGQVTEEGLKWLLDKGYKTIIDLRAETVKDNFCQAALQDAISSGRIELVKIPVEVRTAPTMEQVVKFASYVSDCSKRPIYLHSKEGVLRTSSMVSRWRQYMTRSSSQIVSNPPVTPYDMLSRNTNGSAKPQDSSMTAERSSLEKDINSLQESLNSTHNSVGTFDRSTSQKKYNGKPQGTTAMSKVSTDNGESSEAT

SEQ ID NO: 167320 - protein, 70 aa, Glycine max
  Clone ID: PAT_MRT3847_122107C.1.pep
KGPHPACGPVLPWVKKEKAHPGRHKYSKPPSSPRVWPYSFNASWHNHGFPGLDSEEFQRHKGYFDMENCN

SEQ ID NO: 167321 - protein, 345 aa, Glycine max
  Clone ID: PAT_MRT3847_122108C.1.pep
MEKLQLHVPRVKLGSQGFMISRLGFGCVGLSGLYNAPLSHEAGCSIIKEAFNMGVTFFDTSDFYGLNHDNEIMIGKALKELPREKVQLATKFGLVRSDGVFAGVKGTPEYVRQCCEASLKRLDVEYIDLYYQHRVDTSVPIEDTMGELKKLVNEGKIKYIGLSQASPDTIKRAHAVHPISALQMEYSLWTRDIEEEIIPLCRELGIGIVAYSPLGHGFFAGMQAAVETLPSQSALAEDARFSGENLEKNKLFYNRIADLASKHSCTPSQLALAWFLHQGNDIVPIPGTTKIKNLENNVGSVAVKLTNAELSEISDAVPVYEVAGEAPGLGSLSQYTWKFATTPSK

SEQ ID NO: 167322 - protein, 64 aa, Glycine max
  Clone ID: PAT_MRT3847_122109C.1.pep
LTELLERGERLPRPDKCPCEVYHLMKNCWETEASFRPTFENLIPILKTVHEKYQGQAPSVFSVC

SEQ ID NO: 167323 - protein, 41 aa, Glycine max
  unsure (1)..(41): unsure at all Xaa locations
  Clone ID: PAT_MRT3847_12210C.1.pep
RHTKNKEXSCLIRSGCFNIAELHGQLRYQHTTRVCASSKPL

SEQ ID NO: 167324 - protein, 44 aa, Glycine max
  Clone ID: PAT_MRT3847_122110C.1.pep
PVLNSRLDAISSLRIQQKDTGSYIPLNDTFWLITPHVLALFKHS

SEQ ID NO: 167325 - protein, 64 aa, Glycine max
  Clone ID: PAT_MRT3847_122111C.1.pep
NFIVVVCSSGTLNSMLRFLRLLIISHLPVGLAILVNNFPFAPEKSYYSFLKFSVFLAHLSGLVV

SEQ ID NO: 167326 - protein, 340 aa, Glycine max
  Clone ID: PAT_MRT3847_122112C.1.pep
MLRDKINVIGHPEILVLKEELVSCLISDALCYFTQAVADSLQLPRIVLRTGGVSSFVAFTAFPLLREKGYVPIQECKLEEPVEELPPLRVKDLPMIKTEEPEKYYELLRMFVKETKGSLRVIWNSFEELESSALTTLSQEFSIPMFPIGPFHNVAAITETEFIEIAWGLVNNKHPFLWVVRPGLIKGSEWLEPLPSGFMENLEGRGLIVKWAPQLEVLAHSTIGAFWTHNGWNSTLESICEGVPMICMPCFTDQKVNARYVSHVWRVGLQLEKGVDRGEIERTIRRLMDANVERKEIRGRAWKLKEVAKICLKQGGSSFSSLEFLVAYILSLESFTFEAS

SEQ ID NO: 167327 - protein, 132 aa, Glycine max
  unsure (1)..(132): unsure at all Xaa locations
  Clone ID: PAT_MRT3847_122113C.1.pep
VDTLISAHEEGLLYFSGGXPKRFLAGHNITISDGIDKTSATLQFIKLADRDFLNRNFKQMSNVLWLAPEDKASLWSQLHYVSCNNLEMQEAYLVNLANVLRELYLHSAXTARLATLKALSRIEWLQTADPPT

SEQ ID NO: 167328 - protein, 85 aa, Glycine max
  Clone ID: PAT_MRT3847_122114C.1.pep
NDMLDDMRYLAGWPEHPWFLEESETVFASELRNVITDELLEWCVEDGSEDEHVCTADHGLRLCHSLVGETINFLESMVVRKRMGS

SEQ ID NO: 167329 - protein, 288 aa, Glycine max
  Clone ID: PAT_MRT3847_122115C.1.pep
EKICEENEELKRRVEAQSFNARDVERMKRELQAVERDTAEAELARNALEEQAWDLDTTLSHKIKDLEALGMECNQALKRLKIGNGIQYLLNAKGTTPAEIMGIDHKLVLKPALRSFSDEIKKSSMEKLEESISYQQKSGENAVRLEGKRNQLAAVQSRIDEMEAQLNRIKKETHEYTSRASAEAKKMLEDVQLADHEIDIMEREAAEVLKTSELKLQEVIKQSEEEIQMHARELFQLVDSVSKFKEHVGSKISEIGRDLSETAAAVSDTYRGACVDIDIERKKMRERK

SEQ ID NO: 167330 - protein, 120 aa, Glycine max
  unsure (1)..(120): unsure at all Xaa locations
  Clone ID: PAT_MRT3847_122116C.1.pep
YFSILSQFHSKDNPNTFPVHLNIYNLTPINFYTYLLILQLYHSTVQLHLFXYSFISHYHYTTFIFXIQPKHYPFFTFTNSIFILTTYLSPIYLLSFIYNFLIIYSXNTYYLIFNKFNHFF

SEQ ID NO: 167331 - protein, 74 aa, Glycine max
  Clone ID: PAT_MRT3847_122117C.1.pep
LILPADHPPNDHRFWRAIQNLKITAPNKGTACHPTPSIMGPLTTLVEPTASLTSPYETHVNQMTRQMPSGMCCM

SEQ ID NO: 167332 - protein, 90 aa, Glycine max
  unsure (1)..(90): unsure at all Xaa locations
  Clone ID: PAT_MRT3847_122118C.1.pep
PIYSILSVYPSPFKMQXFVKTLXGKIIXXEVESSXTIDNVKAKIXDKEXITXDQQRXIFAGKQXEDGRXTLGDXXIQKXXNLXXVXRXRG

SEQ ID NO: 167333 - protein, 62 aa, Glycine max
  Clone ID: PAT_MRT3847_122119C.1.pep
VRVGDQWATAERQAPSIYNLYLLRSQFPRVLYLFLSHIVSAICTHISIMMSATKLKSVELYR

SEQ ID NO: 167334 - protein, 141 aa, Glycine max
  unsure (1)..(141): unsure at all Xaa locations
  Clone ID: PAT_MRT3847_12211C.1.pep
KCHTLFSALKACPKLQNLEFNSEINANAVDXYDQHDEDDAMEYYRRKEPCECIDQQLKTLSIMGFAGKKTEVEFLKYVITNGEVMKKITIWFVDDCSWIHAAELDVCYHFRQPLQTCPSFSILGHFTWQMWVGTLKHGSQL

SEQ ID NO: 167335 - protein, 82 aa, Glycine max
  Clone ID: PAT_MRT3847_122120C.1.pep
FSLSSCQLLTPMNDPEMTFATNTRCPTSAPAMKTTSETTATTVSTMPTNSTQRHQRFSLLRPSHKQHPLCDIWQANQSTTFT

SEQ ID NO: 167336 - protein, 151 aa, Glycine max
  unsure (1)..(151): unsure at all Xaa locations
  Clone ID: PAT_MRT3847_122121C.1.pep
TEGTILVINVLCCIAHTCSASKWQHQQDSCSKQVQGVNLMHCDNHVMEKIQGRGDDDNDDDDDMXVLTTMQGRIXYIMETKTRLRTNKKTTHAEGLRRMSERXSDRCQAKRVQKIMENQSEKLVDMRNKKMGKELINSATISRXRPMIQCD

SEQ ID NO: 167337 - protein, 160 aa, Glycine max
  Clone ID: PAT_MRT3847_122122C.1.pep
PRVRSQDEEQVRDHYDRGDDFYGWFLGPRMIYTSGIISDINSEESLEQLQDNKLGVVCEKIGLQKGERMLDIGCGWGTLARFASKHYGANVTGVTLGRNQTAWGNNGLRKEGITEDQSRFCAWITARFPCPRAATTSPVSKWATRRCPPLGGFCARCTTC

SEQ ID NO: 167338 - protein, 57 aa, Glycine max
  Clone ID: PAT_MRT3847_122123C.1.pep
KVIGRGWLSIGSEKNDGRRPLVNLTNLHCERGGEGNIEFNERFLRIYVFSERIRVYV

SEQ ID NO: 167339 - protein, 87 aa, Glycine max
  unsure (1)..(87): unsure at all Xaa locations
  Clone ID: PAT_MRT3847_122124C.1.pep
MAYLKNTWALVQMFASLIFSGDNRLTEKTVFTCIDLDIXVVYYPVATQVRTFLPHYIERHLYTXQIYILPSFLTGEIKYQLNWSDIH

SEQ ID NO: 167340 - protein, 261 aa, Glycine max
  unsure (1)..(261): unsure at all Xaa locations
  Clone ID: PAT_MRT3847_122125C.1.pep
MAVGKNKRISKGKKGGKKKAADPFAKKDWYDIKAPSLFQVKNIGKTLVXRTQGTKIASEGLKHRVFEVSLADLQGDEDHAFKKIRLRAEDVQGKNVLTNFWGMDFTTDKLRSLVRKWQTLIEAHVDVKTTDNYTLRMFCIGFTKRRSNQVKRTCYAQSSQVRQIRRKMREIMVNQAAACDLKELVRKFIPEMIGKEIEKATSSIYPLQNVFIRKVKILKAPKFDLGKLMEVHGDYSEDVGAKVDRPADETLAEEATEVVGA

SEQ ID NO: 167341 - protein, 260 aa, Glycine max
  unsure (1)..(260): unsure at all Xaa locations
  Clone ID: PAT_MRT3847_122126C.1.pep
MAVGKNKRISKGKKGGKKKAADPFAKKDWYDIKAPSLFQVKNIGKTLVSRTQGTKIASEGLKHRVFEVSLADLQGDEDHSFKKIRLRAEDVQGKNVLTNFWGMDFTTDKLRSLVRKWQTLIEAHVDVKTTDNYTLRMFCIGFTKRRRNQVKRTCTXRAQFRQIRRRMRXLMATQAPACDLKELVRKFIPEMIGKEIEKATFSIYPLQNVFIRKVKILKAPKFDLGKLMEVHGDYSEDVGAKVDSPADEPLAEEPPEVVGA

SEQ ID NO: 167342 - protein, 125 aa, Glycine max
  Clone ID: PAT_MRT3847_122127C.1.pep
IHSADPFAKKDWYDIKAPSVFQVKNVGKTLVSRTQGTKIASEGLKHRVFEVSLADLQGDEDHAFKKIRLRAEDVQGKNVLTNFWGMDFTTDKLRSLVRKWQTFIEAHLDVKTTDNYTLRMVCIGF

SEQ ID NO: 167343 - protein, 50 aa, Glycine max
  Clone ID: PAT_MRT3847_122128C.1.pep
SSKMSISSYLLVKLLIQQQCHIHPMFSYLYHSIYTYISELVTKVNKLYTI

SEQ ID NO: 167344 - protein, 65 aa, Glycine max
  Clone ID: PAT_MRT3847_122129C.1.pep
MPLRTTKGMLPENALPMLQMQMCLIFLGRLGVPRFTSMGVDTFLCHIHFPYDFVNFKLWHWQLLP

SEQ ID NO: 167345 - protein, 72 aa, Glycine max
  Clone ID: PAT_MRT3847_12212C.1.pep
WFGEGIKSFQFLEPIRASPGEPQLLDLGGANRKMSKLKKDSFLGDTKLIPYGQGFHNKNRPLHGPHMGRMIK

SEQ ID NO: 167346 - protein, 235 aa, Glycine max
  Clone ID: PAT_MRT3847_122130C.1.pep
MSLFGAYSICEVGKDAAGVAGNIFAFGLFVSPIPTFRRIIRNGSTEMFSGLPYIYSLLNCMICLWYGTPLISPDNLLVTTVNSIGAAFQLVYIILFLMYAENPRVRRMVGLLLAVLGIFVIILVGSLQIDDSAMRRMFVGFLSCASLISMFASPLFIIKLVIRTKSIEFMPFYLSLSTFLMSFSFFLYGLLSDDAFIYVPNGIGTVLGIIQLVLYFYYKGSSSEECREPLIVSYE

SEQ ID NO: 167347 - protein, 88 aa, Glycine max
  Clone ID: PAT_MRT3847_122131C.1.pep
LIRQLNKDMEKLKLYGRKKSCQADDVEDYLSKMLEHDIYDRHPDMNCMWDLGWNDETVAFIEKYDVIRDTEKHILSLLLDEITVDFCM

SEQ ID NO: 167348 - protein, 64 aa, Glycine max
  unsure (1)..(64): unsure at all Xaa locations
  Clone ID: PAT_MRT3847_122132C.1.pep
RAYAEGRMPGAAVMQRSCQVLTDLLEMHLRARASVTDDMVDAFMAIRSLPQMXRLNSSYLHHPN

SEQ ID NO: 167349 - protein, 163 aa, Glycine max
  unsure (1)..(163): unsure at all Xaa locations
  Clone ID: PAT_MRT3847_122133C.1.pep
GSTLRDTLLAWKQPVLQKDRGLIEENFGRMSYAAHNVNHTQEKDMLLGKIDFDNKSHSQLEKVSSTKAQLVSGKTSKSDIMGAGSHASQDLPEKEDQEIPKXIDARLXQRLHPQYNEVHAQMETNLSKLPLDDVETPKGSMXDLKISQCKIALPKNTVGGTIL

SEQ ID NO: 167350 - protein, 124 aa, Glycine max
  unsure (1)..(124): unsure at all Xaa locations
  Clone ID: PAT_MRT3847_122134C.1.pep
SFKLWHQRLGHPNKDALEIVLNKCNIPFINKTNRDFCNSCSIAKSHKLPSSPSSTVYTAPLELVFFDVWGPSSVESSYGFLYFLTCVDAYSRFTXIYLLNHKFDVSNNFQLFKAMAEKQFQTPL

SEQ ID NO: 167351 - protein, 75 aa, Glycine max
  Clone ID: PAT_MRT3847_122135C.1.pep
KISLESIRSPENSHKQIKVEGYNVKAVNLKAFGLGIDTGCGPGNNVLCRLSIAVQKNIFKKAMVCIIKLKQVAIV

SEQ ID NO: 167352 - protein, 74 aa, Glycine max
  Clone ID: PAT_MRT3847_122136C.1.pep
DNLPVWGLHPSASKLACCPECLGHRLNLILKRPRKKVYFPSKERLDDQYWFQFLGSLNLWMWVSQVLISLALDN

SEQ ID NO: 167353 - protein, 79 aa, Glycine max
  unsure (1)..(79): unsure at all Xaa locations
  Clone ID: PAT_MRT3847_122137C.1.pep
MCGIIHKIEESLRXXRHKKEEHKGEHHGEHKGEHKGEHHGEHKGEHKGEQHHGEHKEGLVXXIKDXIHGDGHDKGEKKK

SEQ ID NO: 167354 - protein, 167 aa, Glycine max
  unsure (1)..(167): unsure at all Xaa locations
  Clone ID: PAT_MRT3847_122138C.1.pep
RRSKANFFRIMKVLSGLXAFGRWFDQICNWKNPITTILIHVLFIILVLYPELILPTIFLYLFLIGIWNFRWRPRHPPHMDTXLSHADAAHPDELDEEFDTFPTSRSSDIVRMRYDRLRSIAGRVQSVVGDLGTQGERFQSLLSWRDPRATTLFVTFCFVAAIVLYVT

SEQ ID NO: 167355 - protein, 138 aa, Glycine max
  Clone ID: PAT_MRT3847_122139C.1.pep
VNALALSSDENVVYSGACDRAILVWEKKEGDDGKMGVVGALRGHTKSILCLSVVADLVCSGSADTTIRIWRGCVDSHEYSCLAVLEGHRASIKCISAVVDCNNNNNNTSQSEALLSFLVYSGGLDCDIKVWQILLPAS

SEQ ID NO: 167356 - protein, 51 aa, Glycine max
  Clone ID: PAT_MRT3847_12213C.1.pep
TNSIYKRNKICDTVVSCNEDQVSSFLHYNQCIASAKNAIYADFKELLIQSQ

SEQ ID NO: 167357 - protein, 84 aa, Glycine max
  Clone ID: PAT_MRT3847_122140C.1.pep
PPRLGLGTNWRFSFWQEGFLYEQILKFSPGNLFFNFKKKGGFFNPFQGPRGGFQSQKGGWGPKKKTKMGFFILFFSRERKLLKF

SEQ ID NO: 167358 - protein, 101 aa, Glycine max
  Clone ID: PAT_MRT3847_122141C.1.pep
GVLFYFAPAGVFGRGPPFPSFSPGSGWGPPSPGVFSPPKRTGGFLLGHRVLFLFPGCKGGPSWVFFFGPLKTTAPGFVAIWRGFYKFCLSTIKKRKRTDKQ

SEQ ID NO: 167359 - protein, 838 aa, Glycine max
  unsure (1)..(838): unsure at all Xaa locations
  Clone ID: PAT_MRT3847_122142C.1.pep
MTGSGRSTVRSRARSDADADADSRRQKRPPFNRQRERSRYGSSIPIYNNANLKVLLGICFVAFFIIWFMIHHLSNSVTEPKLPRAVTPFPAPKIMDLPQFEGEHKESLYWGTYRPHVYLGIRARTPKSLMAGLMWIGVKDGKYHLRHFCRHEDDLSTYGWTRHNGRDFGHQVLVDHGMTLTTGFLKSKEEGSGYGGDWAVRINVQIDKSKWNEEFGIGAQLFFYLADEAGNALDVSRENLNIHEDSLLASGSGADIGDWQLHLKSKDDLQLHYAGFRTPHFHNLSDLVEENLASQIQKHARLQLSDSLDDSPNVLVFQIIGGFPFTTDIVLISGTDLETSREEELLGRVRGLSGSSLSNKLKYIEQEFDEKFEKIFNLAEKVDSDALPLGMAAVGSFFGRSAFFYGQSXAARSCPLQLREHVSYMSYWSAELYTAVPSRSSFPRGFLWDEGFHQLIIWRWDIHISLDIIGHWLDLMNADGWIPREQILGAEALSRVPEEYVPQHPTNGNPPTLFLALNGIINGLKNNEFTATDKTEISLFLERAFVRLEAWFQWFNTTQSGKQMSSYYWHGRNNRTIYELSPKTLSSGFDDYPRASHPSADERHVDLRCWMLLATDCLQYIEELLDKETKPGKMHFDDAHGAYFDFGNHTEKIQLKWKEVEIGHNHTARQLVRVVLEKPVLRLVPHIGYVSLFPFMGKIIPSGSWILEKQLELISNHSLFWTGYGLRSLATTSSLYMKFNSELEGPYWRGQIWINMNYRILSALHHYSKENGPYQDRAKAIYKELRSNLIRNIVRNYQQTGFLWEQYDQNNGKGKGSHPFTGWTSLVVLIMGEEYDII

SEQ ID NO: 167360 - protein, 82 aa, Glycine max
  Clone ID: PAT_MRT3847_122143C.1.pep
DYALAVLHPAFPDLHVARCQTDSKEEKEAAEESSDIRIDGEDEQDYRDGTLPSAPRIETISVCAKNRARLMTAGEETQLLVG

SEQ ID NO: 167361 - protein, 81 aa, Glycine max
  Clone ID: PAT_MRT3847_122144C.1.pep
SCSSLVRLMQFHNYVYFEHRKLVCGVESSYLSAESWVQKVMIALPVTMIGTLMMSLRCLEYLPRIQPFLVKRAVKIVWGRV

SEQ ID NO: 167362 - protein, 138 aa, Glycine max
  Clone ID: PAT_MRT3847_122145C.1.pep
PTVVKTSCSVALITAIVLLTLGCAMGLVAGSVGSALASAATVNTFAVSATIIPPTGRTFTGYTALALAAQALLHICYAHRLSFFAYPCLPVEALGAAYGSLATLTTGTDTIPMISKSVGRVREWNGFISLSLVTAFVA

SEQ ID NO: 167363 - protein, 146 aa, Glycine max
  unsure (1)..(146): unsure at all Xaa locations
  Clone ID: PAT_MRT3847_122146C.1.pep
LVVSKFSQEEFIAARSTKARAASTLEAVGCSYLFAMLHDNAMTTIPCDGHIVGKLATITNMCAYGLNLLIKRPSLLGTIPQIILQQTVWNXXATVGTPLDXCSNKPSWCQISIDLLCGGIFMDKTCYWITLIQNHTIINLERVAAW

SEQ ID NO: 167364 - protein, 70 aa, Glycine max
  Clone ID: PAT_MRT3847_122147C.1.pep
PCRYYHRIRVWAGRSGSSLSSHVHSCRCSICCMVITRRILSGYSCTAGSQLRFVETLLAVRRHVLVTCDV

SEQ ID NO: 167365 - protein, 84 aa, Glycine max
  Clone ID: PAT_MRT3847_122148C.1.pep
TRRRRSHFLIQQFSSIGYVWSSMSYIPNLRARSYHPEQPVLEHIHIAVQHGNCTRGHICSTFVQQLCPSPTCSLSATSPHSSNS

SEQ ID NO: 167366 - protein, 45 aa, Glycine max
  Clone ID: PAT_MRT3847_122149C.1.pep
VQCVQLFVTLRALHGHWHNIGNYIMLNTHPQNLKLSKTISHLTFT

SEQ ID NO: 167367 - protein, 67 aa, Glycine max
  unsure (1)..(67): unsure at all Xaa locations
  Clone ID: PAT_MRT3847_12214C.1.pep
AIADESVMVIGYGTILLARPPHVKAATGEEASAEDLGGATVHCETSRVSDXIPQDGLHALALGLTII

SEQ ID NO: 167368 - protein, 53 aa, Glycine max
  Clone ID: PAT_MRT3847_122150C.1.pep
VLSLDHVEMWLGTLNKGDCQHLQARTHYMLKQSELLCTQYPRTEPLSLAAQTY

SEQ ID NO: 167369 - protein, 42 aa, Glycine max
  Clone ID: PAT_MRT3847_122151C.1.pep
SMEDGVQRRNVPLYFYIWHSQNKRGENIIKICRSGVLCMELN

SEQ ID NO: 167370 - protein, 83 aa, Glycine max
  Clone ID: PAT_MRT3847_122152C.1.pep
NCKACLSFIFFGDQINTLCKVHIFSPKDPGSAISKVRAFPSFYPNPTNIFSSETQNWSKSPRVSSSRSSKIFSSPIIKRVSFL

SEQ ID NO: 167371 - protein, 49 aa, Glycine max
  Clone ID: PAT_MRT3847_122153C.1.pep
YNYNHNNTNDDHNNHFLNSGGHSTNTTKTKTWVLPPLFLREWPIYEIPP

SEQ ID NO: 167372 - protein, 50 aa, Glycine max
  Clone ID: PAT_MRT3847_122154C.1.pep
EMTLKPRVLTKIRIDWDSGMNETIKSPNYVQTGMVPINSPIGPIVHMTIL

SEQ ID NO: 167373 - protein, 163 aa, Glycine max
  Clone ID: PAT_MRT3847_122155C.1.pep
HSSTPRRPNGLTVLVTGAAGFVGSRCSLALKKRGDGVLGLDNFNSYYDPSLKRSRQAMLWKHQVFIVEGDLNDTPLLEKLFDVVPFTHILHLAAQAGVRYAMQNPQSYVTANIAGFVNLLEAAKSANPQPAIVWASSSSVYGLNTQNPFSELHRTDQPASLYA

SEQ ID NO: 167374 - protein, 440 aa, Glycine max
  unsure (1)..(440): unsure at all Xaa locations
  Clone ID: PAT_MRT3847_122156C.1.pep
RNSRVDPTRPKSIKLERYNSYIRRLNSTKLLNASSKLLFRATLLVALILVFLFTFNYPPLSATDSTHRHLHAHSHYFLSSSSFGAWEKQVRHSASPRRPNGLTVLVTGAAALKKRGDGVLGLDNFNNYYDPSLKRARQAMLWKHQVFIVEGDLNDTPLLQKLFDLVPFTHIXLHLAAQAGVRYAMQNPQSYVTANIAGFVNLLEAAKSANPQPAIVWASSSSVYGLNTQNPFSELHRTDQPASLYAATKKAGEEIAHTYNHIYGLSLTGLRFFTVYGPWGRPDMAYFFFTKDILQGKTIDVYQMQEGKQVARDFTYIDDIVKGCLGALDTAQKSTGSGGKKKGPAQLRVYNLGNTSPVPVGTLVSILEGLLSTKAKKHVIKMPSNGDVPFTHANVSLAYRDFSYNPTTDLATGLRKFVKWYLGYYGLQQRLKKEYHLDNE

SEQ ID NO: 167375 - protein, 123 aa, Glycine max
  Clone ID: PAT_MRT3847_122157C.1.pep
MDADSQPQQLEERTEEQELKYLEFVQFATIQALMRCAILYSYAKERAGPLKPGVDTVEEAVKTVVAPVYDRFHLVPGEGLKYSDRKVAELDSHVPSNVKKVSSQACSVVSEVRRDGVFAYAKT

SEQ ID NO: 167376 - protein, 257 aa, Glycine max
  unsure (1)..(257): unsure at all Xaa locations
  Clone ID: PAT_MRT3847_122158C.1.pep
MCVFPLGLKLKTIIMGSSSPPDTSKSIKLERYNSYIRRLNSTKLLNASSKLLFRATILVALILVFLFTFNYPPLAPDFTSHRHLHSHSHFLSSSSSFASWEKQVRHSSTPRRPNGLTVLVTGAAGFVGSHCSLALKKRGDGVLGLDNFNSYYDPSLKRSRQAMLWKHQVFIVEGDLNDTPLLEKLFDVVPXTHILHLAAQAGVRYAMQNPQSYVTTNIASNITLLESKKNQKFKTAIDRDQFPPKTLAIFSVGTKGR

SEQ ID NO: 167377 - protein, 49 aa, Glycine max
  unsure (1)..(49): unsure at all Xaa locations
  Clone ID: PAT_MRT3847_122159C.1.pep
RAGVRDQPCGLVSSSTRLATKKSNTLSTENKGNXNNNQIYDHEQDQNHS

SEQ ID NO: 167378 - protein, 125 aa, Glycine max
  Clone ID: PAT_MRT3847_12215C.1.pep
ALPQDCVVEKTDRVTKYNTNAGGEDRDRIQAIAEGQARRETPARKENPCVTGTGKPTLTRARRSNNEGGWKERGYEAGSRARSEMNEQLMNSNGPGEAQARTRCTEEVYTRHKLKAWVGTRRTNG

SEQ ID NO: 167379 - protein, 66 aa, Glycine max
  Clone ID: PAT_MRT3847_122160C.1.pep
QEILIKISQNKLEEDLPKHKTDPTNENHNRACKTHATRNYKDQTKYPNLTVGARQNIKQPTAPQPG

SEQ ID NO: 167380 - protein, 77 aa, Glycine max
  Clone ID: PAT_MRT3847_122161C.1.pep
VKKGGKVPNVFSSPKLLETPGKTPVFGSEFGKKKRVFPLRATIFPAEENKPEIMESFKKFKDEFMEQNENEKGYSRV

SEQ ID NO: 167381 - protein, 43 aa, Glycine max
  Clone ID: PAT_MRT3847_122162C.1.pep
SFLHSLLSMFFPIEPRSGNFLLVYELARVLLLRDFQSKKNHPR

SEQ ID NO: 167382 - protein, 95 aa, Glycine max
  Clone ID: PAT_MRT3847_122163C.1.pep
LSIGCRTLEPETEAIVATLQELLNCFLLLCVRPLKGKQITLCAGHRLHESFSFPLLVYSLNTLLFEIGLRVRFKLILPLSQISDAKQVHAGEIMD

SEQ ID NO: 167383 - protein, 91 aa, Glycine max
  Clone ID: PAT_MRT3847_122164C.1.pep
SFFFFFFYFFFLEGNFKIYWVWEDTHSQVKYWKIFFPTIWGPELTKTKTHFGEMIFPKGKVDLSYPRADRRSLLCLSTGTGQKQLPYHCCC

SEQ ID NO: 167384 - protein, 50 aa, Glycine max
  Clone ID: PAT_MRT3847_122165C.1.pep
KVIITLWQSLLCDPNPNSPANSEAARMFSENKREYNRRVREIVEQSWTAD

SEQ ID NO: 167385 - protein, 66 aa, Glycine max
  Clone ID: PAT_MRT3847_122166C.1.pep
YGCEKTTEGDQDVHLNVPSILCILAFALSECTEPDRDQQNKHSTGCDCLLRQHTLCLVLNLCPLTN

SEQ ID NO: 167386 - protein, 90 aa, Glycine max
  Clone ID: PAT_MRT3847_122167C.1.pep
MDSSSTQEFEYLFKLLMIGDSGVGKSSLLLCFTSDSFEDLSPTIGVDFKVKYLTMEGKKLKLAIWDTAGQERFRTLTSSYYRGAQGIIMA

SEQ ID NO: 167387 - protein, 170 aa, Glycine max
  unsure (1)..(170): unsure at all Xaa locations
  Clone ID: PAT_MRT3847_122168C.1.pep
ASSMQSFCAFPIDLVGGGILVDXTEDWXTLIQTSPITTLXRVAGWNKGRLMVNIAMSGNAPVKKSDWASLVQVFLTNNNTTQHFDACKRTXTXPHSXELIFPIEVCGPNNGFEMWSSDWANQTSWHSSYLIDNPIHSTAYDILLGMTQDSETAGNTLMPDVCVPQATAIS

SEQ ID NO: 167388 - protein, 83 aa, Glycine max
  Clone ID: PAT_MRT3847_122169C.1.pep
RSSVMDLEPWEALDVDDTNLSAFLRPCNSKGDSSSLIPGPAGAVQAVMRNRRHHDPLSTQEFLKRVERQSDRDFNSNPWLCAL

SEQ ID NO: 167389 - protein, 91 aa, Glycine max
  Clone ID: PAT_MRT3847_12216C.1.pep
KSLVTKSKLSPNINLPEIVGHEVSIWKSEVFVVIKCNPMSLLHIGFPFLSSLSCFIICTRDNRGQELSTNIGSSEILTGIDDVFEPREGFS

SEQ ID NO: 167390 - protein, 112 aa, Glycine max
  unsure (1)..(112): unsure at all Xaa locations
  Clone ID: PAT_MRT3847_122170C.1.pep
MATENPIRISEAGSKWPSFKEAATFGSPSRHMAXRIWVYFLNGHKFHGRGKDVVPNSSGSAPPSMEGSFLAIESLLSQNTTWNASLGSLNRDMQKDDSGKGSLYLSRGTLAH

SEQ ID NO: 167391 - protein, 46 aa, Glycine max
  Clone ID: PAT_MRT3847_122171C.1.pep
VITQNVQQAAQIAESKRTNSPIRIREHFSFSYKTFYNGMCFLTCNN

SEQ ID NO: 167392 - protein, 56 aa, Glycine max
  Clone ID: PAT_MRT3847_122172C.1.pep
GSRRCHSLIFSPTELGLIYRGKSNMVRSITWNSALYHLAKELPSFWPHVSCQNLVP

SEQ ID NO: 167393 - protein, 79 aa, Glycine max
  Clone ID: PAT_MRT3847_122173C.1.pep
WKKVRSIWSTIQTFPQFYKTAQRTPPLIPKKRGVLGFVPNTTTTFAFHGGKTEFLFSNKNTPGGGAFIPYNGETVKSQF

SEQ ID NO: 167394 - protein, 51 aa, Glycine max
  Clone ID: PAT_MRT3847_122174C.1.pep
YSPIVVQMSRRSKRVCFSPDVKDKPTIFLKYCGDGGNGNDDRVSRNRKRIS

SEQ ID NO: 167395 - protein, 109 aa, Glycine max
  Clone ID: PAT_MRT3847_122175C.1.pep
GASSSFRYQGGGGVIPRAGAFEGANSAQASNGGTRNSQGSMSLVAKPSFFRSKGTRTIPYAEYVKRRDKGRCYHCGNAFGPGHRCPEKIMRVLILAEDDPQNDNGEISG

SEQ ID NO: 167396 - protein, 64 aa, Glycine max
  Clone ID: PAT_MRT3847_122176C.1.pep
ITVGGSRSPFLHLGVQGGRPKRGRRGSFYIQTTLKNMTNQPTAIKSLPPVNAPNIDDHPDLPSL

SEQ ID NO: 167397 - protein, 34 aa, Glycine max
  unsure (1)..(34): unsure at all Xaa locations
  Clone ID: PAT_MRT3847_122177C.1.pep
RSDLMPXLMHLSLQALQXFCKSRGMYGSLSYWXQ

SEQ ID NO: 167398 - protein, 67 aa, Glycine max
  Clone ID: PAT_MRT3847_122178C.1.pep
KGSGGDPHSKPTLEKNPLQHKLLVNFIDRFQGPQTLEFTIENGWPSDGPKDHRISGVTPFGICSKEL

SEQ ID NO: 167399 - protein, 87 aa, Glycine max
  Clone ID: PAT_MRT3847_122179C.1.pep
HVELPWALVTKPFSTTKGGIKVFALALVKLKCHGFIDLKKSFFLKTVSSKENLLNIGRFSLQCFSPFGKLNGNFSRVIMLEVSNCCH

SEQ ID NO: 167400 - protein, 95 aa, Glycine max
  Clone ID: PAT_MRT3847_12217C.1.pep
HLLFSLRHSHFIVTTHCLYRYHSLCTMLMVALITNAQIEYAILASLIPGSRTFSYIGINGSHCKASLIRLVSSDQWVMVIMECYAQGTSTDYEVN

SEQ ID NO: 167401 - protein, 49 aa, Glycine max
  Clone ID: PAT_MRT3847_122180C.1.pep
IFIQIFSRGFFPFWAGVLITAGDCFYFLFLENYGVRKLEAVFAGLNSVM

SEQ ID NO: 167402 - protein, 84 aa, Glycine max
  unsure (1)..(84): unsure at all Xaa locations
  Clone ID: PAT_MRT3847_122181C.1.pep
LERKILDPERLSRVESIFGNLSETIKIYGPWSSAWVGEAGGAYXSGGNHVSNRFLNSFCAVLWHRLMGKKVLTVSSDVHIKDFY

SEQ ID NO: 167403 - protein, 89 aa, Glycine max
  unsure (1)..(89): unsure at all Xaa locations
  Clone ID: PAT_MRT3847_122182C.1.pep
MTEYWVSQGNKWCDFCKIYISNNPGSIRNHELGQRHKDNVSKRLAAMRKDNIAKEKEQKETARAIEHIEAXAQRSYHKDIAFEETRESH

SEQ ID NO: 167404 - protein, 247 aa, Glycine max
  Clone ID: PAT_MRT3847_122183C.1.pep
MTEYWVSQGNKWCDFCKIYISNNPGSIRNHELGQRHKDNVSKRLAAMRKENIAKEKEQKETARAIEQIEAKAQRSYQKDKVKFEETRESHELDDQEWEFDSSTGYYYHKTNGFYYDQKSGFYYSDAIGKWVTQEEAYASPHFTSNAGHNGPTAKKSLSTSQSKSDENKGNKFNNGSSPGPVVTTSLNPKRNVKAAPSSLAVGKRKRPGEKSKVISDEEKAALKAREAARKRVQEREKPLLGLYNKPY

SEQ ID NO: 167405 - protein, 49 aa, Glycine max
  Clone ID: PAT_MRT3847_122184C.1.pep
SETLINLLYLWAIETIYLVFTLDAVYTSTFLFNKTFSYFLIKKDIGFIK

SEQ ID NO: 167406 - protein, 64 aa, Glycine max
  Clone ID: PAT_MRT3847_122185C.1.pep
MGSLHVAKSLVRTHGYTVRNHNNECGLMSDTDGATSMGQLCFRQEDAECYLAHVRSRSRELRSR

SEQ ID NO: 167407 - protein, 122 aa, Glycine max
  Clone ID: PAT_MRT3847_122186C.1.pep
SLVRTAHDVSTMLRCGQETMICLMNNGGYTIEVETHDVPYNVINNCNYSGLIDAIHNGERKYWTAKAHCEKELVEAIATVTGPKTDCLCFIDVIVHNDDTSNEVLEWGYRVSAVNIRASNPE

SEQ ID NO: 167408 - protein, 89 aa, Glycine max
  Clone ID: PAT_MRT3847_122187C.1.pep
KRELRCFIVSVIIENRLIVKNDRARIKVRVRVTDMVDLVVVLWVVEVWSQVEAVRVRDLKGGLVVSVGSGSFVKGHNIVKGVGVIIFEA

SEQ ID NO: 167409 - protein, 41 aa, Glycine max
  Clone ID: PAT_MRT3847_122188C.1.pep
QAYQISVRWQKLEEGVSMVKWLRTLVVRNQTAKPSVPFPNP

SEQ ID NO: 167410 - protein, 54 aa, Glycine max
  Clone ID: PAT_MRT3847_122189C.1.pep
GNYCYFTIRQSHHCIRFNTSNHFIFVLKRGGAAAVEVRSQGDCKYHLGFEDTRH

SEQ ID NO: 167411 - protein, 36 aa, Glycine max
  Clone ID: PAT_MRT3847_12218C.1.pep
VGERGPHNMEPATGSTRLRLRLPVMAMYACAITLSC

SEQ ID NO: 167412 - protein, 53 aa, Glycine max
  Clone ID: PAT_MRT3847_122190C.1.pep
CLTLKLTNTLYYSNLYLKSSQSSIYNYILSISNNECTYALSTYNHMLSSTKSL

SEQ ID NO: 167413 - protein, 50 aa, Glycine max
  Clone ID: PAT_MRT3847_122191C.1.pep
SRGVLLPILQPGRFWIRTSSAASLWDTPSFGIRTLSSTVLVLAFAECVGF

SEQ ID NO: 167414 - protein, 168 aa, Glycine max
  Clone ID: PAT_MRT3847_122192C.1.pep
MRLEKCWFCSSTIYPGHGIQFVRNDAKIFRFCRSKCHKNFKMKRNPRKVKWTKAYRRVHGKDMTQDSTFEFERKRNRPERYDRNLAENVLKAIPKIDKIRVSREERHHKNRMKGKKEKLLKEAVKELEQGISLVKAPSVLQQDPSLTLPKIKVKVSQQQSEENHAMEE

SEQ ID NO: 167415 - protein, 89 aa, Glycine max
  Clone ID: PAT_MRT3847_122193C.1.pep
TNQIRPPNAPTRFETQFNLRVFFFLSVCCACFPLIAQWIYIHLLVWFCFCVFDSTAPLPHTVSPPPPPPPLSSSFLVTAPWTVRSTSLE

SEQ ID NO: 167416 - protein, 149 aa, Glycine max
  Clone ID: PAT_MRT3847_122194C.1.pep
MRLEKCWFCSSTVYPGHGIQFVRNDAKIFRFCRSKCHKNFKMKRNPRKVKWTKAYRRVHGKDMTQDSTFEFERKRNRPERYDRNLAENVEFLRLIKLEWEENKRMKGKKEKLKLEHQFQSCASDHYTKIKVQNHANNAALNFCRFNICC

SEQ ID NO: 167417 - protein, 70 aa, Glycine max
  Clone ID: PAT_MRT3847_122195C.1.pep
TNSAIYNLYVLLQLYLFLNHATLLKSKRIQLGIKVQSTYTPPYFLYLHEKLFVFTFQGCIYINSATVVGC

SEQ ID NO: 167418 - protein, 93 aa, Glycine max
  unsure (1)..(93): unsure at all Xaa locations
  Clone ID: PAT_MRT3847_122196C.1.pep
MEDSSSSAAYIRLVHRLIEECILFNMSKEECMEALSKHANIKPVITFTVWKELEKENKEFFAAYXRSRTERASERETRQRIQSVVSDSSKERI

SEQ ID NO: 167419 - protein, 81 aa, Glycine max
  unsure (1)..(81): unsure at all Xaa locations
  Clone ID: PAT_MRT3847_122197C.1.pep
PLGWIKXXEIFYIXIWIXRXPXNSQPFYYCSCKWAGVENCESVLHSXGYFCKWNINSNWHARIWINCNSKTIWDSKLEKSK

SEQ ID NO: 167420 - protein, 76 aa, Glycine max
  Clone ID: PAT_MRT3847_122198C.1.pep
TCKNEIILKLNMDLDLNSEKLTQPSSRSFNAVCSGNFDFYLILYISSSQPSINRKICISKKKKLKNMQEIYIGKFL

SEQ ID NO: 167421 - protein, 212 aa, Glycine max
  Clone ID: PAT_MRT3847_122199C.1.pep
KLLRNSPATRIIASFHGSQVEPLAQRRFPLAVEVQQRPIFQPSPVTEPLGSPHSDVIFPSFALGLTGTPVWEGAEGRRAPWAESETKKRRRKVKAHQTKELRRRKGSQQDKQSSCCLHLWPIQNPYFCLYGAFSRLRNASGRHCFTCSHSLHGIHVPSQSVLEKCCCQTLFHMSSLSLRVGVGSQHALVSVREGFGIWGTLVLDKGDNISWD

SEQ ID NO: 167422 - protein, 68 aa, Glycine max
  Clone ID: PAT_MRT3847_12219C.1.pep
RHYCTARKCQPYILALNPRNHDLENCAKYTIQGICYIVHENCAGNNGYDDILAYHDYKVHVPFWQNGL

SEQ ID NO: 167423 - protein, 44 aa, Glycine max
  Clone ID: PAT_MRT3847_1221C.1.pep
ERTNRVQPFPRFRQGPSHTQIESPGANHGKMDRKAIGSEIEDRR

SEQ ID NO: 167424 - protein, 57 aa, Glycine max
  Clone ID: PAT_MRT3847_122200C.1.pep
LRRVLFFFFNKNWFYTNIARVKVENPKNKGKLKIGTNPKLTQNKAYSTPKKAFKFWA

SEQ ID NO: 167425 - protein, 45 aa, Glycine max
  Clone ID: PAT_MRT3847_122201C.1.pep
TEPQFRARPTRTLESIWSTLACIIGIAGLCGLGCIMALLYAYTYA

SEQ ID NO: 167426 - protein, 55 aa, Glycine max
  Clone ID: PAT_MRT3847_122202C.1.pep
ESLSSKNEVSYFEPISLFIFPRVDYEYSLDTIEAKTEFSNEGEVVLGLSINPVSF

SEQ ID NO: 167427 - protein, 37 aa, Glycine max
  Clone ID: PAT_MRT3847_122203C.1.pep
KRKIGNGLDDNFKLGWCKIPWLKVAEWIYRNDSFKYE

SEQ ID NO: 167428 - protein, 47 aa, Glycine max
  unsure (1)..(47): unsure at all Xaa locations
  Clone ID: PAT_MRT3847_122204C.1.pep
AASCAGXXXLLWCXGGSXVGSSGXXGXXGAXFASXXGGXXGLAPVSS

SEQ ID NO: 167429 - protein, 66 aa, Glycine max
  Clone ID: PAT_MRT3847_122205C.1.pep
CSLNSIHFPTFYNSSTIKTLTFPNLIFSRHIHFSTDHLLTNRPSTYGLSNSSTSLITNCTPPIITH

SEQ ID NO: 167430 - protein, 49 aa, Glycine max
  Clone ID: PAT_MRT3847_122206C.1.pep
DSGTSKNVRPFINCTSVVPKNFATIVTDDHRADNIIGAGFLGTTDVQLI

SEQ ID NO: 167431 - protein, 87 aa, Glycine max
  unsure (1)..(87): unsure at all Xaa locations
  Clone ID: PAT_MRT3847_122207C.1.pep
FLKKRFFKNQWLPRALMGGFFKITKNKTPFLLNNPEKGSAFFPQKAHQTFXITKVIFNKGEGKSQPPPANLVFFQARPRVKASNVFS

SEQ ID NO: 167432 - protein, 81 aa, Glycine max
  unsure (1)..(81): unsure at all Xaa locations
  Clone ID: PAT_MRT3847_122208C.1.pep
RSTLATDFPHCIPYVFRTPSSFARRLTTRLRSTFWWLVMWTLTRNHHSRAEERLFWTHPLQGMPYHGMHVRPRTRXPPPPN

SEQ ID NO: 167433 - protein, 57 aa, Glycine max
  Clone ID: PAT_MRT3847_122209C.1.pep
SCLEHKPSSNQNTPISNEASHNRLLKLSLNPDNEASLLTLYNVGNTYIAKVSRSGKL

SEQ ID NO: 167434 - protein, 36 aa, Glycine max
  Clone ID: PAT_MRT3847_12220C.1.pep
GPNSTLWLMGLNLIPTALYFIDGVVIEIAEMRYFGN

SEQ ID NO: 167435 - protein, 92 aa, Glycine max
  Clone ID: PAT_MRT3847_122210C.1.pep
GAHRGDLKLILYLGSTPPIQRNLSHTLVPLLRQLRRDRSCLCQAVCLQILQRLPRIWGKGSSRIAARKAYIKVGLLWAPEMLFNSPCFYPNV

SEQ ID NO: 167436 - protein, 45 aa, Glycine max
  Clone ID: PAT_MRT3847_122211C.1.pep
SRPADPDDPLKTTDQTRNLGLIVSSHLQHHECQNYTFWLIKSLLC

SEQ ID NO: 167437 - protein, 218 aa, Glycine max
  Clone ID: PAT_MRT3847_122212C.1.pep
MGADEDYDYLFKLVLIGDSGVGKSNLLSRFTRNEFSLETKSTIGVEFATRSVPVDSKLVKAQIWDTAGQERYRAITSAYYRGAVGALVVYDVTRHVTFENVERWLKELRDHTEAYVVVMLVGNKADLRHLRAVSTEEATEFAEKESIYFMETSALESLNVDNAFIEVLTQIYNVVSRKTLETVDDDPSTKALPKGETIVIGTKDDDVSAVKKSGCCST

SEQ ID NO: 167438 - protein, 459 aa, Glycine max
  unsure (1)..(459): unsure at all Xaa locations
  Clone ID: PAT_MRT3847_122213C.1.pep
MGNPSLSSLLLVLLCIISLILALAQADSDSHFEGFEAEDDDDDLEDSSIHPASLRSPPLSDPTPTPQPPPSDLPKFPPFDFWDDDEFEGVPVEHSSPEPPSDPKSPENATTTQTPPTPNPPRSFSVEIICGSFLIMFAINYFSGKRENENIALSWAAQFAAKDSIFEKNFSLLGIGDGGEEAPLLLKEGQTTFKFYASGRRYCQGLLATLELKSRHDLIARIYNMIVPCRDEIAFEVYMNDDAMDHVVFAMAKKKAAKAMHKDVRDLQRFATLLSPLPLPLPLPXARKWVADDLAVISESKEVANDFITDAVIDQVFGEKAFEKFGKGLISLHFSDQHPGIHKKILLFKFVLPAAKDMADMTRLVALVPYYIDLIGRYKLSSQARSKTEAARQKAAVEAQKELRNAQQEAMQRRKAERKKMVEEAEAKLSAEAIRKKEAKERARQMKKAMPRMKMARGA

SEQ ID NO: 167439 - protein, 61 aa, Glycine max
  unsure (1)..(61): unsure at all Xaa locations
  Clone ID: PAT_MRT3847_122214C.1.pep
LGIWVXRXPIFIXWGXXCKPXIXXFRXLXXPXXTSASLNPPXXPPPTPIXRXXXPXLEXGV

SEQ ID NO: 167440 - protein, 64 aa, Glycine max
  Clone ID: PAT_MRT3847_122215C.1.pep
SSIFLCRNQKSIDFKKVDAHVHQLKGSSSRYYHSSIGPNQNCVTHKNLNKKEPLYFVLQRFCTC

SEQ ID NO: 167441 - protein, 187 aa, Glycine max
  Clone ID: PAT_MRT3847_122216C.1.pep
MANPILSFLLLALLCILALAHADSHFEGFEAEDDDDLEDSSIDPASLRSPPLSDPTPLTTDPTPQPPASDLPKSPPATTFDFWDDEEFEGVPVEHPAPEPPSDPKSPENSTTTQTPPTLTPPRSFTVEIVCGSFLIMFAINYFTGKRENENIALSWAAQFAAKDSIFEKNFSLLGIGDGGEEAPLLL

SEQ ID NO: 167442 - protein, 84 aa, Glycine max
  Clone ID: PAT_MRT3847_122217C.1.pep
VPDRVLPGRSCCFSFCLSWGLSTELRFRDCNHIVEFVFVEFVSSTYLLRSKKTRKKSSPGKGGTRFWKAIVLGFKTPREAIEST

SEQ ID NO: 167443 - protein, 63 aa, Glycine max
  Clone ID: PAT_MRT3847_122218C.1.pep
VQSGFFCTLLALMSFLVLNFLVTMGYRMGQGFGYCLVHSFGFIGLRLVVACGTQCGVHSFTVF

SEQ ID NO: 167444 - protein, 60 aa, Glycine max
  unsure (1)..(60): unsure at all Xaa locations
  Clone ID: PAT_MRT3847_122219C.1.pep
TXXXXSHGLEXSEMXPQXRPRNXXQXXQLXKXXXRXPFAXHXXXTTTXXRXXXTYXXXXR

SEQ ID NO: 167445 - protein, 130 aa, Glycine max
  Clone ID: PAT_MRT3847_12221C.1.pep
MSKQLMKKSDILQLREEQMRRSEKERRRNERKQEGKAAKTLSAILFAFIITWTPYNVIVCLEAFYPNSVPSYLFTLSYFLSYVNSTINPLCYALCNARFRMTYLRIIKCKWRHSPIGRQMYAADGAFVQS

SEQ ID NO: 167446 - protein, 84 aa, Glycine max
  Clone ID: PAT_MRT3847_122220C.1.pep
AWVFKTPVFALQDLQLKIEGCFLTPVRPKYSQAIFYFVGALFSPKLLEIFFLSQKFLARQCKGLLLDNKKTLIPNLIFPSTSIL

SEQ ID NO: 167447 - protein, 47 aa, Glycine max
  Clone ID: PAT_MRT3847_122221C.1.pep
ILSPEAFSDLLLYMFRVSHVGWQSPQSIAFTFNPLITSDVSGPAFVY

SEQ ID NO: 167448 - protein, 127 aa, Glycine max
  unsure (1)..(127): unsure at all Xaa locations
  Clone ID: PAT_MRT3847_122222C.1.pep
MMGRTPCSDENGLKKGPWTPEEDRILVDYIQKHGHGSWRALPKHARLNRCGKSCRLRWTNYLRPDIKRGKFSEEEXQLIINLHAVLGNKWSAIAGHLPGRTDNEIKNFWNTHLKKKLLXMGLDPVTH

SEQ ID NO: 167449 - protein, 87 aa, Glycine max
  unsure (1)..(87): unsure at all Xaa locations
  Clone ID: PAT_MRT3847_122223C.1.pep
LEPTVIDEGRTGTYTALYHSEQLIIGXEDASNNSARGHYTIGKESDELCLDRIIKLADNCTGLQRFLAFNAVGGGTGSGLGSLWLER

SEQ ID NO: 167450 - protein, 256 aa, Glycine max
  Clone ID: PAT_MRT3847_122224C.1.pep
MVSLSLCLPSSIYLQAKDLKFESLRKAISRLDLTTTSPLIKSSLLLKACIRSGNLELGKLLHHKLIDSGLPLDSVLLNSLITLYSKCGDWENALSIFRNMGHHKRDLVSWSAIISCFANNSMESRALLTFLHMLQCSRNIIYPNEYCFTASLRSCSNPLFFSTGLAIFAFLLKTGYFDSHVCVGCALIDMFTKGDRDIQSARIVFDKMLHKNLVTWTLMITRYVQLGLLGDAVDLFCRMIVSEYTPDVFTLTSLLS

SEQ ID NO: 167451 - protein, 49 aa, Glycine max
  Clone ID: PAT_MRT3847_122225C.1.pep
LISKSYFLIILEKLLFSRLTREINIEVPGRRNAISYMIKPRTVTCLFKL

SEQ ID NO: 167452 - protein, 40 aa, Glycine max
  Clone ID: PAT_MRT3847_122226C.1.pep
QDNTVTIDRKLRPKKTMSSYYMHETAKVNSSVNATQMFDT

SEQ ID NO: 167453 - protein, 89 aa, Glycine max
  Clone ID: PAT_MRT3847_122227C.1.pep
KIRKSPRWKGPHFLKKPLIWLLLGIIKHLLPRFLEPTLPLNMNMRPDPLMCKPRCCIHKFFKPLFLGVVCLGSSLPLGLFMRAVNGKIV

SEQ ID NO: 167454 - protein, 65 aa, Glycine max
  Clone ID: PAT_MRT3847_122228C.1.pep
HIQALITYRRLSNLFLKTHRHNSNGPTFNHLAVLKKKCNKKVTCSFHNDKRTNSIIPLMLKERPT

SEQ ID NO: 167455 - protein, 70 aa, Glycine max
  Clone ID: PAT_MRT3847_122229C.1.pep
LLTLLRYDPSTGIYGMDFFVVLERPGYRVGRRRRCKSRVGIQHRVTKEDAMRWFQVKYEGVILSKYRTIL

SEQ ID NO: 167456 - protein, 52 aa, Glycine max
  Clone ID: PAT_MRT3847_12222C.1.pep
TSYSTWYCGNEYSIFRLVHADWMEDWLMYRIYIFWWNIIHILILILNHPKYI

SEQ ID NO: 167457 - protein, 75 aa, Glycine max
  unsure (1)..(75): unsure at all Xaa locations
  Clone ID: PAT_MRT3847_122230C.1.pep
TVERCLCGPAMWXVXGXLVYSPLDSFKLSQYPPTTYSLKAQHPLSSLTSSSNACQKLIPRISHIHSSKLTPFHYF

SEQ ID NO: 167458 - protein, 49 aa, Glycine max
  Clone ID: PAT_MRT3847_122231C.1.pep
SHIPIYIPVYHASLYVLLWLVYEREDTSATSSISKDELFAGLTHPYCLL

SEQ ID NO: 167459 - protein, 68 aa, Glycine max
  Clone ID: PAT_MRT3847_122232C.1.pep
VIGNILSLLGSARDVLVASVTCKLWREACFNNPHRLSFNNCEGLSNFLFNIKGKQENFGLVLPPFYLQ

SEQ ID NO: 167460 - protein, 85 aa, Glycine max
  Clone ID: PAT_MRT3847_122233C.1.pep
RYPNLCAETLMELGLGNQNVDNNIEALVNKTIFETSLPSSYFAEFKTGEAQPAHSVVADYCEELMSMSLKRLDQSLRALKSPKRY

SEQ ID NO: 167461 - protein, 265 aa, Glycine max
  Clone ID: PAT_MRT3847_122234C.1.pep
ISKLNPQQWPEKLAGKVAIITGGASGIGEETARLFAHHGARMVVIADIQDDLGIQVAASIGSHRCSYVRCDVTDEDQVKNLVDSTVNAHGQLDIMFSNAGILSPSDQTILDLDFSAYDRLLAVNARGTAACVKHAARSMVERRVRGSIVCTASVSASHGGLRRTDYVMSKHAVKGLMRAASAQLGAHGVRVNCVSPSGLTTPLTRAAHAPMETKELQKQYAQSFRLKGVFLTPKHVADAVLFLACGDSEFVTGHDLVVDGCFDGV

SEQ ID NO: 167462 - protein, 80 aa, Glycine max
  Clone ID: PAT_MRT3847_122235C.1.pep
ASVILFGTNNSSSISGVWVFRGQELAFPLSPDWQVDYESYTWRKLDPGSEETQTLVREYFCWEGAFQHVGKAFNQGKIFK

SEQ ID NO: 167463 - protein, 48 aa, Glycine max
  Clone ID: PAT_MRT3847_122236C.1.pep
GPLPERGAHLGVAHSGGREVLNAPPRFGTVNYQKGSFWFNCKKKGDWV

SEQ ID NO: 167464 - protein, 158 aa, Glycine max
  unsure (1)..(158): unsure at all Xaa locations
  Clone ID: PAT_MRT3847_122237C.1.pep
RPVSPPPFVLEERFQWVHQNLPSRSPFHQLPSLAAGFCLKQCRGFAFLLESQERMELVXTNHHFFFLIFIPGPKLELPNAALFLIYQELGNVGGLKWTPFYDLPHLSGWVPLFYGLLSPPYCSPFPWCFIYFLRKKIFLFFALYSPDTLLHLYMGFSW

SEQ ID NO: 167465 - protein, 36 aa, Glycine max
  Clone ID: PAT_MRT3847_122238C.1.pep
VQNYHNFRIFGTWFVLVNVSKKMSFRKYVTLSVLVK

SEQ ID NO: 167466 - protein, 85 aa, Glycine max
  unsure (1)..(85): unsure at all Xaa locations
  Clone ID: PAT_MRT3847_122239C.1.pep
KVKIGINGFGRXGRLVARVALQRDDVELVAVNDPXITTDYMTYMFXYDXVHGHWXHHDVTVKDEKTXXRDKPVHVXGHRXPXEIP

SEQ ID NO: 167467 - protein, 132 aa, Glycine max
  Clone ID: PAT_MRT3847_12223C.1.pep
RACVESIVQELMDQTWSCYDVLRVMSYAVGNSFQSYWQSYAVLYEFVSPLCGPWCSQTCSAKIGMHADSRPSRVLDTFGKKVQHNHKALITPEYMWNSAHSFTSAGYVRSAKVVSRSVRAVVRLSLCESHKL

SEQ ID NO: 167468 - protein, 31 aa, Glycine max
  Clone ID: PAT_MRT3847_122240C.1.pep
VSLVLSLISSSLDAWRTRQYDYYQRVLNGIL

SEQ ID NO: 167469 - protein, 311 aa, Glycine max
  Clone ID: PAT_MRT3847_122241C.1.pep
MAAADSSAAPSHQLSQRETDIQMMLAADVHLGTKNCDFQMERYVFKRRTDGIYIINLGKTWEKLQLAARIIVAIENPQDIIVQSARPYGQRAVLKFAQYTGAHAIAGRHTPGTFTNQMQQSYNEPRLLILTDPRTDHQPIKEGALGNIPTIAFCDTDSPMRYVDVGIPANNKGKHSIGCLFWLLARMVLQMRGTIRPGHKWDVMVDLFFYREPEEAKQQEEDEAPPAQDYAISDFNAAGIGSFPASDGQWPAAVEQPWTEEAPQPISAAPTNLTPEAAVAGDWGEAVPAPVPAPQAGVPPAQAFPPATGWD

SEQ ID NO: 167470 - protein, 136 aa, Glycine max
  Clone ID: PAT_MRT3847_122242C.1.pep
MESNFPGAYHLFGEDQGIPYLSDSLGFPTMDPSSPEDNDFSETVKFISQILMEENVDQRPFYDSLTLRVTEKSFYDALTGNQPPFVLCSEAETNTITSNNSGSNFLNENSRELNIPSPLSSVSAIHFNPNSQPLPS

SEQ ID NO: 167471 - protein, 40 aa, Glycine max
  Clone ID: PAT_MRT3847_122243C.1.pep
EGMPISKEPGMKGNLRVKLDVKYPSRLTPEQKSDLRRVLG

SEQ ID NO: 167472 - protein, 75 aa, Glycine max
  unsure (1)..(75): unsure at all Xaa locations
  Clone ID: PAT_MRT3847_122244C.1.pep
KALGFLFFSTRLLYKKFPPPLLPTHPSKVLPYSAANGLCIRSFFFRPFFPPGSIQINCPRALLTPKKIXPAMECL

SEQ ID NO: 167473 - protein, 248 aa, Glycine max
  Clone ID: PAT_MRT3847_122245C.1.pep
ACRRQNKTFPRVGLVFDLTQDSRRFYPDFLPGRHRRRSSFAERGSGRFFRTSGGGVAFSASAAAGRKAAAVENALPCSLEDLYKGVKKKMKISRNVYDAFGKCGDVEEILTIEIKPGWKKGTKITFPEKGNREPGVIPADLIFVIDEKPHALYRRDGNDLVINQEITLLEALTGKTLDLTTLDGRSLMIPLTDIVKPGAEVVVPNEGMPISKEPGRKGNLRIKLDVKYPSRLTPEQKSDLRRVLGGIS

SEQ ID NO: 167474 - protein, 56 aa, Glycine max
  Clone ID: PAT_MRT3847_122246C.1.pep
MVGLQGVMPPSFLPRPICATGEACEGFSVLLRSVNRFRIGFMEFFFRSSVIVNGSE

SEQ ID NO: 167475 - protein, 54 aa, Glycine max
  Clone ID: PAT_MRT3847_122247C.1.pep
MRRQVHYICTIALISSFLFLLPILGSCGSLVYFVTPSRLTCLFHRACPIVVHFK

SEQ ID NO: 167476 - protein, 65 aa, Glycine max
  Clone ID: PAT_MRT3847_122248C.1.pep
GYKTAWPTPVSSTIFHNQFFGVFRSSNIGLVLRNSGLEHAMFLSNFSHAQNLGLSSDRRGYRQNM

SEQ ID NO: 167477 - protein, 109 aa, Glycine max
  unsure (1)..(109): unsure at all Xaa locations
  Clone ID: PAT_MRT3847_122249C.1.pep
MVKTLEKVAEDVPVQKCYGGQNEYKKGMIPPNTMFVNPKGIRIQHTIYRDTAAAFICPYXCDTDLTTIRSKPNVTALDRCLVPMMLVVCFVXTTMDCLWHKYHYCAKCQ

SEQ ID NO: 167478 - protein, 139 aa, Glycine max
  unsure (1)..(139): unsure at all Xaa locations
  Clone ID: PAT_MRT3847_12224C.1.pep
MAKGKHTHTRAQGKKWSTFSLVLWALFFLTLILVVLLALGIVYLPTTDDDFPTTDLSAFRRKTSQSAESLVENPPEQWTEILSWEPRAFIYHNFLSKEECEYLIELAKPQMVKSSVVDSXTGKSTESQVRTSSGMFLKR

SEQ ID NO: 167479 - protein, 79 aa, Glycine max
  unsure (1)..(79): unsure at all Xaa locations
  Clone ID: PAT_MRT3847_122250C.1.pep
NNLNNTTIYAVRSYIPGVGGAPHXQHNTYPSQITIPQIPYLCLLTTASSKHMVSIKDITLIYRTRDNYIHCDNKTKDYH

SEQ ID NO: 167480 - protein, 378 aa, Glycine max
  unsure (1)..(378): unsure at all Xaa locations
  Clone ID: PAT_MRT3847_122251C.1.pep
MTMSITLLLQANPSHLKWNQLPSLPRRTRPDRFTPIPDSKRRVSSVKCISSSRKPDNTFSLQSPWEVLASTVSNTLKALKKPAIAAVLVGLLLMYDPTCAFAASGGRMGGRSFSSSSSSSRSYSVPRTSSSGFSFSAPYYGPSPFGGVYVGPAVGVGVGAGSSFFLILVGFLAFVLVSGFLSDRSEGSALLSQWVSSLFGFXVGLLGMGRTLQRDLNRIAAVADTSPSEGLHYVLTETTLALLRHPDYCISAYSSVDIKQGIEDGEKRFNQLSIEERGKFDEETLVNANNIKRQSTRSQRANGFSNEYIVITILAAAEGDHKLPSINGSGDLKQALQKLGSIPSSRLLAVEVLWTPQNENDTLSERELLEDYPLLRPL

SEQ ID NO: 167481 - protein, 63 aa, Glycine max
  Clone ID: PAT_MRT3847_122252C.1.pep
VVSSGLLLPVLCLYSLLLCGRSFCMACHGALVSELPIDRKFLQTTILRRCVISRLALLSLWLD

SEQ ID NO: 167482 - protein, 46 aa, Glycine max
  Clone ID: PAT_MRT3847_122253C.1.pep
LSILLSSHEPRKIDENFCFISLGAPKKKYNSMCWPHIKPGFLYLSP

SEQ ID NO: 167483 - protein, 367 aa, Glycine max
  Clone ID: PAT_MRT3847_122254C.1.pep
MGTNRSLMATILIVFFTVLAVSSALDMSIISYDRSHADKSGWKSDEEVMSIYEEWLVKHGKVYNAVEEKEKRFQIFKDNLNFIEEHNAVNRTYKVGLNRFSDLSNEEYRSKYLGTKIDPSRMMARPSRRYSPRVADNLPESVDWRKEGAVVRVKNQSECEGCWAFSAIAAVEGINKIVTGNLTALSEQELLDCDRTVNAGCSGGLVDYAFEFIINNGGIDTEEDYPFQGADGICDQYKINARAVTIDGYERVPAYDELALKKAVANQPVSVAIEAYGKEFQLYESGIFTGTCGTSIDHGVTAVGYGTENGIDYWIVKNSWGENWGEAGYVRMERNIAEDTAGKCGIAILTLYPIKIGQNPSNPDNSS

SEQ ID NO: 167484 - protein, 56 aa, Glycine max
  Clone ID: PAT_MRT3847_122255C.1.pep
LHTPNQQPVRLITCWPPYKQGPRQLKGHVPSTGFVPTFQMMRRPFNMKKINITTNT

SEQ ID NO: 167485 - protein, 256 aa, Glycine max
  Clone ID: PAT_MRT3847_122256C.1.pep
MPACSAVVPDVLHGRTPDATPAHARCQTAPQRILIDDSFMIQGQLVDNDRSDSQWKTDLSMVADLSAAKKLESDAAAASNEKNQEPSDLFVVLKRDSGLDSVEASRTMDYEIDFSFSETNRRSSIDDSHEKVNDSLPVSPAKTKVSGTRSSEKDGKSKALRCSSGKGKPEIMSRARKPALPKKPVVQKSKREQEDEIRQKMEELRNERQRRIAERTASSGVGRAATKKDQIEGKTARISAKSDKNKGISSVKVRGI

SEQ ID NO: 167486 - protein, 56 aa, Glycine max
  Clone ID: PAT_MRT3847_122257C.1.pep
TFSAFMLNIYVVQQFQSFHLNSPQFKYHLFYISKFIIATLNNYQLPYLLSTPLLIF

SEQ ID NO: 167487 - protein, 162 aa, Glycine max
  Clone ID: PAT_MRT3847_122258C.1.pep
MDYEIDFSFSETNRRSSMDDSHAKVNDNLPVSPVKTNVRKSQVSGTRSSGKDEKSKVLRDYSGKSKPEIMSRARKPALPKKPIVQKSKREQEDEIRQKMEELRNERQRRIAERTASSGIARAATRKDQIEGKTARISAKSDKNKAQPVKETSRISSVKVRGI

SEQ ID NO: 167488 - protein, 91 aa, Glycine max
  Clone ID: PAT_MRT3847_122259C.1.pep
IENSNATYFFWELIYQKDPPKDMAQKKREHEWLRFCLMVTHVQEEKGEGIMTVLTKMMTLKRKGSDSGKADNEPPGCVDLADGETRVNNTA

SEQ ID NO: 167489 - protein, 85 aa, Glycine max
  Clone ID: PAT_MRT3847_12225C.1.pep
QKMQYPKVNIQTFTSFPYCIYVLSVVSSEIILLAKLLSFSVHSSKIEAMYCLLGLCSFISVKAASSAVYAPPSSMSFSSLLRFSL

SEQ ID NO: 167490 - protein, 133 aa, Glycine max
  Clone ID: PAT_MRT3847_122260C.1.pep
NREKQIRGGEKSPPPRRVFSLGALQTTKKFLGARGETPKFRRSFAPKNSFASGTQSNYCHFWRPKKPYCITPLSFLLDPLGHKSAILFQNLPKFFFLGNPSGWEAMWSPATKGRPPLSRKGGQKKTQPSPWVF

SEQ ID NO: 167491 - protein, 84 aa, Glycine max
  Clone ID: PAT_MRT3847_122261C.1.pep
DGGEILFPRGILVGPLGVCLLEPPTLFYGGVLSPEKKFAELGFFLKKRGEGGFYFNPKKWFPPKKKWPRVPAKGGGTLFLFEAA

SEQ ID NO: 167492 - protein, 92 aa, Glycine max
  Clone ID: PAT_MRT3847_122262C.1.pep
LLLVAGSCHKWLAPSRLPRRSSHCCPVPPVLRLAAVGCLTALILARGRRLFPRAALLVRVFSYSSRFGSRPELRIKVYSVTRNLLITMGVGT

SEQ ID NO: 167493 - protein, 75 aa, Glycine max
  Clone ID: PAT_MRT3847_122263C.1.pep
MHKKSDRHHHHHRHHHHHHHKHRHHLDDERNHMQQHSPKFNGKHDEKLDKTETDKKDGGHHESRAMVENNDGQIV

SEQ ID NO: 167494 - protein, 101 aa, Glycine max
  unsure (1)..(101): unsure at all Xaa locations
  Clone ID: PAT_MRT3847_122264C.1.pep
SHXRVRKLGIRLEHXHXXPXTXTXGXXXKXLNKEFXRRQIYXXSVPXSXMNXGXXLXXARGXXTXPXLHXXVXXXXMXFXXVXXXIXXXXXADXVXXAXXX

SEQ ID NO: 167495 - protein, 151 aa, Glycine max
  Clone ID: PAT_MRT3847_122265C.1.pep
MDRSWMNASRMSPEYEDGVEQFLQFASERGRPNEEGKYYCPCINCLNGRRQLLDDIRDHLLCDGMKKNYTTWIWHGEVTDMHTGSQSEPFDVDMGDRLEDMIRDLGQDCFQQAHAPVYERLQSDSKNPLYASCKNSLNLLSAVLSLVNVKA

SEQ ID NO: 167496 - protein, 70 aa, Glycine max
  Clone ID: PAT_MRT3847_122266C.1.pep
RQKGMKDQFANYVVQKVLETCDDQQRELILSRIKVHLNALKKYTYGKHIVSRVEKLVAAGGTCSVSFLNL

SEQ ID NO: 167497 - protein, 40 aa, Glycine max
  Clone ID: PAT_MRT3847_122267C.1.pep
EPVFFRVCMGKWVPFVRELFFFPGLKLGVLAFEFFPCFRY

SEQ ID NO: 167498 - protein, 80 aa, Glycine max
  Clone ID: PAT_MRT3847_122268C.1.pep
MADDMSAAYYDQLSRKGNCSIKENARSRCVLFLAKRRRCKPLLLPLQISQSLLHCAFKLWEPSTASIHTPQAQDKALFRV

SEQ ID NO: 167499 - protein, 66 aa, Glycine max
  unsure (1)..(66): unsure at all Xaa locations
  Clone ID: PAT_MRT3847_122269C.1.pep
PYIRXXIVIRNWHINVTTFSGELHKNKITKTKTGIKNFSTMFIIRMKKHSHYWDQSLSKTECIKSF

SEQ ID NO: 167500 - protein, 118 aa, Glycine max
  Clone ID: PAT_MRT3847_12226C.1.pep
MAKGKHTHTRAQGKKWSTFSLVLWALFFLTLILVVLLALGIVYLPTTDDDFPTTDLSAFRRKTSQSAESLVENPPEQWTEILSWEPRAFIYHNFLVSFPYLLMIGSSASPRSFFFFWR

SEQ ID NO: 167501 - protein, 84 aa, Glycine max
  Clone ID: PAT_MRT3847_122270C.1.pep
KRFENSQVDFKGQEYFQFIPFGFGKKGCPGMNFGIASIEYVLASLLYWFDWKLPDTLDVDMSEVFGLVVSKKVPLFLKPKTFPF

SEQ ID NO: 167502 - protein, 121 aa, Glycine max
  unsure (1)..(121): unsure at all Xaa locations
  Clone ID: PAT_MRT3847_122271C.1.pep
ADQTDKAFLKQPNVFLISYKTGKVKKPEKGGNRFWKSIGLGFKTTTEAMXGTYIDKKCPFTGNVSIRGRILAGTCHSAKMNSTIIVRRNYLHYIEKYHRYKKRHYEHFADISPDFTVNVGD

SEQ ID NO: 167503 - protein, 103 aa, Glycine max
  Clone ID: PAT_MRT3847_122272C.1.pep
NSFYFQVVALMDYNLPDLIGNGSGEKKSKMSPKDALDDLDISLICKRFPSITLGYAPRVDLYDGTRSCSETMNSLATDTFGNSFSDSLKASWVQPFCRLLAAV

SEQ ID NO: 167504 - protein, 336 aa, Glycine max
  Clone ID: PAT_MRT3847_122273C.1.pep
VTGAFPRLQRLSMECCPKLKGHLPEQLCHLNYLKISGCQQLVPSALSAPDIHQLYLADCEELQIDHPTTLKELTIEGHNVEAALLEQIGRNYSCSNNNIPMHSCYDFLLSLDINGGCDSLTTFPLDIFPILRKIFIRKCPNLKRISQGQAHNHLQSLGMRECPQLESLPEGMHVLLPSLDRLHIEDCPKVEMFPEGGLPSNLKGMGLFGGSYKLIYLLKSALGGNHSLERLSIGGVDVECLPEEGVLPHSLVNLWIRECPDLKRLDYKGLCHLSSLKTLHLVNCPRLQCLPEEGLPKSISTLWTYNCPLLKQRCREPEGEDWPKIAHIKRVSLHGG

SEQ ID NO: 167505 - protein, 989 aa, Glycine max
  unsure (1)..(989): unsure at all Xaa locations
  Clone ID: PAT_MRT3847_122274C.1.pep
GMGVMGKTTLAQHVYNNPRIQEAKFDIKVWVCVSDDFDVLMVTKNILNKITNSKDDSGDDLEMVHGRLKEKLSGKKYLLVLDDVWNEHRDQWKALQTPLKYGAKGSKILVTTRSNKVASIMHSNEVRGLKQLREDHSWQVFAQHAFQDDYPKLNEQLKEIGIKIVEKCQGLPLALETVGCLLHTKPSVSQWVGVLEYKIWELPIEDSKIIPALLLSYYHLPSYLKRCFAYCALFPKDHEFYKESLIQLWVAENFVQCSQQSNSQEEIGEQYFNDLLSRSFFQRSSREKCFVMHDLLNDLAKYVCGDICFRLEVDKPDSISKVRHFSFVPQYDQYFDVHGSLYHAKMLRTFMPMPAPASRIFTWGCTGLVDELFSKFKFLRILSLFHCDLKEMPDSVGNLKHLRSLDLCYTDIKKLPDSTCFLCNLQVLKLNCCHRLEELPSNLHKLTNLRCLEFMYTKVRKMPMHFGKLKNLQVLSSFYVGMGSDNCSIQQLGELNLHGRLSIEELQNIVNPLDALAADLKNKTHLLDLELKWNEHQNLDDSIKERQVLENLQPSRHLEKLSIGNYGGTQFPSWLLDNSLCNVVWLSLKNCKYCLCLPPLGLLPLLKELLIGGLDGIVSINADFYGSSSCSFTSLESLEFYDMKEWEEWECKGVTGSFPRLQRLSIMRCPKLKGHLPEQLCHLNYLKISGCKQLVPSALSAPDIHQLYLGDCGELQIDHPTTLKELTIEGQNVEAALLEQIGRNYSCSNNNIPMHSCYDFLLSLDINGGCDSLTTFPLDMFPILRDLGIRECPNLQRISQGQAHNHLKFLGITNCPQLESLPEGMHVLLPSLLSLLVIDCPKVEMFPEGGLPSNLEKICLYCGSYKLISLLKSALGANHSLFSLDIGGVDVECLPEEGVLPHSLVNLQIRXCPDLKRLDYKGLCHLSSLKELLLKDCPRLQCLPEEGLPKSISALWIWXTCPLLKQRCREPEGEDWPKIAHIKHVSFLD

SEQ ID NO: 167506 - protein, 108 aa, Glycine max
  Clone ID: PAT_MRT3847_122275C.1.pep
LERFSIGKVDVECLPDEGVLPHSLVTLDISHCEDLKRLDYKGLCHLSSLKKLHLSNCPRLQCLPEEGLPKSISTLSIYNCPLLKQRCREPKGEDWPKIAHIKRVSLHD

SEQ ID NO: 167507 - protein, 338 aa, Glycine max
  Clone ID: PAT_MRT3847_122276C.1.pep
MEISGTVLRQVSYVSGYGTHTRSRGLAPRFGVRMGMGSGFCDEGHLRYYQDTKKVLTPKKKLKLLKGFSKLGLASDPEKLAMFYDLQQNLTSDAGDVLLRELEAARAKEKEVKKKRKQEKKAKLKAAKMNCESSSSSSSESSDSDCGCDQVVDMNTFRAGVGVGVGVVVGVVAPAPVEESPLPKTAPIVEDANAHCVAMELCSKNDIYVSSASNGFKNESAVVTSAPQKRIEVCMGNKCKRSGAAALMQEFEKVVGVEGVAVVACKCMGKCKTAPNVKVQNSVDHNSLAQGLDDSVKIPANPLCIGVGLEDVDAIVARYFWESHTDIGMAGAGAATAT

SEQ ID NO: 167508 - protein, 343 aa, Glycine max
  Clone ID: PAT_MRT3847_122277C.1.pep
MKEWEEWECKGVTGAFPRLQRLSIGYCPKLKGLPPLGLLPFLKELSIEGLDGIVSINADFFGSSSCSFTSLESLKFSDMKEWEEWECKGVTGAFPRLQRLSIYNCPKLKWHLPEQLSHLNRLGISGWDSLTTIPLDIFPILRELDIRECLNLQGISQGQTHNHLQRLSMRECPQLESLPEGMHVLLPSLDYLGIIRCPKVEMFPEGGLPSNLKNMHLYGSYKLMSSLKSALGGNHSLETLRIGGVDVECLPEEGVLPHSLVTLDISHCEDLKRLDYKGLCHLSSLKELTLWNCRRLQCLPEEGLPKSISTLTIRRCGFLKQRCREPQGEDWPKIAHIEDVDIR

SEQ ID NO: 167509 - protein, 1218 aa, Glycine max
  unsure (1)..(1218): unsure at all Xaa locations
  Clone ID: PAT_MRT3847_122278C.1.pep
MALELVGGSLLSAFLQVAFEKLASRQVLDFFRGRKLDQKLLNNLEIKLNSIQALANDAELKQFRDAFVRNLLLKVKVAVFDVEDFLDEKQHEIAKCQIESEDEADSISCTSKVRELFIASHAIACLTNTKSRMEEFRDRLDFLFSQKDHLDLKISGGIGVGXRIKFCSNTCMXSSYAFVEREIYTREEDSKLIFSXXTYDNGNRNRLSIIVIIRRGGMGKTTLAQHVFNDPRIEEARFDVKAWVCVSDDFDVFKVTRTILEAITKSTDDSRNREMVQGSLKEKLTGKRFFLVLDDVWNENQIKWEAVLTHLDFGAQGSRIIATTRSKEVASTMRSKEHLLEQLQEDHCWKLFAKHAFQDDNIQPNPDCKEIGMKIVEKCKGLPLALKTMGSLLHNKSSVTEWKSILQSEIWEFSTERSDIVPALALSTLNACRYTIERAVNQELCXYDYEFDKECLIQLWMAEKFLQCSQQGKSPGEVGEQYFNDLLSRCFFQQSSNTERTDFVMHDLLNDLARFICGDICFRLDGNQTKGTPKATRHFLIDVKCFDGFGTLCDTKKLRTYMPTSYKYWDCEMSIHELFSKFNYLRVLSLFDCHDLREVPDSVGNLKYLRSLDLSNTKIEKLPESICSLYNLQILKLNGCRHLKELPSNLHKLTDLHRLELIETGVRKVPAHLGKLEYLQVLMSSFNVGKSREFSIQQLGELNLHGSLSIRQLQNVENPSDALAVDLKNKTHLVEVELEWDSDWNPDDSTKERDVIENLQPSKHLEKLRMRNYGGTQFPRWLLNNSSWSVVSLTLKNCKYCLCLPPLGLLKSLKELSIKGLDGIVSINADFFGSSSCSFTSLESLEFHNMKEWEEWECKGVTGAFPRLQRLSIECCPKLKGHLPEQLCHLNYLKISGCEQLVPSALSAPDIHQLSLGDCGELQIDHPTTLKELTITGHNVEAALLEQIGRNYSCSNNNIPMHSCYDFLVSLVINGGCDSLTTFPLDIFPILRKLFIRKCPNLKRISQGQAHNHLQSLGMRECPQLESLPEGMHVLLPSLDRLHIEDCPKVEMFPEGGLPSNLKEMGLFGGSYKLISLLKSALGGNHSLERLVIGKVDFECLPEEGVLPHSLVSLQINSCGDLKRLDYKGICHLSSLKELHLEDCPRLQCLPEEGLPKSISTLWIWGXHCPLLKQRCREPEGEDWPKIAHIKPLLNQRCREPGGEDWPKIADIENVYIR

SEQ ID NO: 167510 - protein, 55 aa, Glycine max
  Clone ID: PAT_MRT3847_122279C.1.pep
ARPRFGNMQFPNFLPSQKQKLTLPSRIPCTTLIPRDTLTNLGPKCLLAKFTSGWV

SEQ ID NO: 167511 - protein, 123 aa, Glycine max
  unsure (1)..(123): unsure at all Xaa locations
  Clone ID: PAT_MRT3847_12227C.1.pep
ALRRRVRGRKRRLKFQNDAPVLAKHLDVSEEQRWITIPYKELPENWNHVSDMQSXLRFLNRSFLFPGEQVHILTCLSACKQDTEIITPFKVAAVMSKNGMXSXSDKENGNVENRNEFIWRRAN

SEQ ID NO: 167512 - protein, 64 aa, Glycine max
  Clone ID: PAT_MRT3847_122280C.1.pep
PQLLGGWGEYPPPWIHVLPLIQWKGLSNIWHKSHREDVEPHNLSSFGIGTAVVCFAIMWKTLRF

SEQ ID NO: 167513 - protein, 271 aa, Glycine max
  Clone ID: PAT_MRT3847_122281C.1.pep
MSTTEKGLSSALNARIEGCGTETIVFAHGYGTDQSIWDKIHPLVLALNYRLVTFDWAFAGTVKDQSLYDPHKYSSVEAFADDLITLLNEMDLKAVTFVGHSMSGIIGCIASVKRPQLFKTLILVGASPRFLNSDDYEGGFNSSDIEQLLSNIGTNYENFASGFASLIADPTNEDTVDKYEKCLKRMQGEVALSLAKTIFYSDWREILDKVETPCTIIQTKKDAAVPHNVALYMKNKIKGKVTLEIIDTLGHFPQLTAHLKFVQVLKAALAS

SEQ ID NO: 167514 - protein, 137 aa, Glycine max
  unsure (1)..(137): unsure at all Xaa locations
  Clone ID: PAT_MRT3847_122282C.1.pep
XKRAXSDLVAKIXLSDLVXXFGMPIVEASRNXNVGLTVLKRKCREFGIPRWPHRKIKSLDSLIHDLQEEAKNQELEDREAAMAVAKRQRMLESEKENIEKKPFMDIKIETKRFRQDVFKRRHRARAVEKHNSTVSST

SEQ ID NO: 167515 - protein, 138 aa, Glycine max
  Clone ID: PAT_MRT3847_122283C.1.pep
IIVSSNMMAQQLSTKIATQITKTTKYPKIIWNFLLAPVIFLLHLAVRVKTKSTLMYSIYRLSICKTMELTHATSSWTSHTPCPLPPPPRPVMPPGEMRGRAMAMKDTRAESATGSSPASEALRAEMAATVTRRWWCSV

SEQ ID NO: 167516 - protein, 80 aa, Glycine max
  Clone ID: PAT_MRT3847_122284C.1.pep
LIRQNGIVLEFLLSYKLVWREENMKLSVFFGAPKGYLKWPWPLASFQRISILMKTVKSLSFLLSQIRKFKLSVETHIIQP

SEQ ID NO: 167517 - protein, 361 aa, Glycine max
  Clone ID: PAT_MRT3847_122285C.1.pep
RARLEGKIIHRKGGVLYLFRGRNYNYKTRPHFPLMLWKPVPPVYPRLVQRVPEGLTLEEATKMRQKGSTLIPICKLGKNGVYCDLVKTVREAFEECELVRINCQGLNKSDYRKIGAKLRDLVPCTLLSFEYEHILMWRGPNWKSFIPDRGDDRKESKQIEVDHKNYKPLPSEALEFSAPSLQMNPLEHESNLLHDTSISSISSDVTLDKVEVDNSTNGMVDSHSNKLLDALGEEDVSQAPRSAAPSMKAIWLLLEQAVEKGSALVLDKDSLDADNIYQNTVAFAKSAPPGPAFRKNTKAVSQKNPKQEGSTLETKETTIDSMKRKKENSTKIPRKANFDDQLLNVVPQGTLGVDELAKLLT

SEQ ID NO: 167518 - protein, 61 aa, Glycine max
  Clone ID: PAT_MRT3847_122286C.1.pep
DLSGLFCKDICPTGWFLLRRLDSFGATPREPRVLAALGLLHRVTLSHFSFSHSRLTQLLNP

SEQ ID NO: 167519 - protein, 53 aa, Glycine max
  Clone ID: PAT_MRT3847_122287C.1.pep
EEGSRMGMATRTTVDQGKIIHGVLKKLHRADSCYSYTSFFFFIFFACINIIYI

SEQ ID NO: 167520 - protein, 68 aa, Glycine max
  unsure (1)..(68): unsure at all Xaa locations
  Clone ID: PAT_MRT3847_122288C.1.pep
MAKHDVDGGSFSAKDYDDPPPAPLIDADELTQWSFYRACIAEFMATMLVLYXITVLTLIGYCSQIDVK

SEQ ID NO: 167521 - protein, 78 aa, Glycine max
  Clone ID: PAT_MRT3847_122289C.1.pep
KDSERAVSKEEGMALAQQHRCLFLECSAKTRENVQQCFNDLTLKILDVPGLREKGSVAVKSQKQKPIYETSQSAGCCS

SEQ ID NO: 167522 - protein, 73 aa, Glycine max
  Clone ID: PAT_MRT3847_12228C.1.pep
TSLLLSKCVCIQWLVGCAGAMSGFSAKAMERSALLHLVVAGLVKFCGCFDALVLAVKCLPRVLGCAHGCEAVF

SEQ ID NO: 167523 - protein, 77 aa, Glycine max
  unsure (1)..(77): unsure at all Xaa locations
  Clone ID: PAT_MRT3847_122290C.1.pep
DSYIQVVTARESVVVFLTNPLXVDLQPRSIMEMYRALCSCISSSNLEVRQLVQRLLLSGRLPEFCLELMDAWERQSH

SEQ ID NO: 167524 - protein, 86 aa, Glycine max
  unsure (1)..(86): unsure at all Xaa locations
  Clone ID: PAT_MRT3847_122291C.1.pep
MPIRNIAVGRPEEATHPDTLKAALAEFISTFIFVFAGSGSGIGYXKLXTNGAAXPVGXIXXSIANXFALFXXVSVGANISAASQPR

SEQ ID NO: 167525 - protein, 60 aa, Glycine max
  unsure (1)..(60): unsure at all Xaa locations
  Clone ID: PAT_MRT3847_122292C.1.pep
VSEKCCWMIYYGEVRYLIGLFCPPEFLDSKAIIGQWWSKKRKKNVGVEMLWWARADSRXR

SEQ ID NO: 167526 - protein, 67 aa, Glycine max
  Clone ID: PAT_MRT3847_122293C.1.pep
QNIQGGPYTHTKRYLFTIMPNYKCILLPNLNPRYMSNSSSTYNWIHTTFFNLQQIARSLIQNFTTTF

SEQ ID NO: 167527 - protein, 50 aa, Glycine max
  Clone ID: PAT_MRT3847_122294C.1.pep
YVLPTQRHWCILDPVRLTSCLFVHPSSVGGHAVHNRQWAHTQLNNGPEWP

SEQ ID NO: 167528 - protein, 204 aa, Glycine max
  Clone ID: PAT_MRT3847_122295C.1.pep
MSGVKRALRQFTFGTGKTAGRNSAGRITSFHRGGGAKRLQRTVDHKRNTASSLGVVERIEYDPNRSSKIALVRWIEGVHHRRRRAASANAASPKLLHLDPATNDANSIRGVFALNSMLPHTHAGTSSRELFLSALASKAKGSESESVSSLGIPRFAVAAARAPFFAQRARGEETLEVRHWRRNSDAWAHRNKRKAAISWQSIAR

SEQ ID NO: 167529 - protein, 52 aa, Glycine max
  Clone ID: PAT_MRT3847_122296C.1.pep
FPLLVLQAVMGANSLQCKQTEFCSSLHTRGDLLDCLVMQRSEEPYMNQSQDP

SEQ ID NO: 167530 - protein, 49 aa, Glycine max
  Clone ID: PAT_MRT3847_122297C.1.pep
LRYNTLVMTVQSQYDYSFRLSRDERGVRLAVHIRAQLPDDHRESNFATR

SEQ ID NO: 167531 - protein, 84 aa, Glycine max
  Clone ID: PAT_MRT3847_122298C.1.pep
YLSQAEQRFHKESINNLSNLLILDILLLPFVKFNYPSLSTSQDQIVRLNKENGSLKQNFEATSPASANGAYTVKVILYSKSQDL

SEQ ID NO: 167532 - protein, 84 aa, Glycine max
  unsure (1)..(84): unsure at all Xaa locations
  Clone ID: PAT_MRT3847_122299C.1.pep
ACSDVEYRSLVGRLRXATDDQTLERALCVVRDMVETKIVNXDRKTSRCRGXGCCTFDCEQYLKNAIGGMNGRNVYGGAMSVNEA

SEQ ID NO: 167533 - protein, 91 aa, Glycine max
  unsure (1)..(91): unsure at all Xaa locations
  Clone ID: PAT_MRT3847_12229C.1.pep
LINARLALRCLVMSLPVLFTLGLARESHARHEDLWHAGWPYIPIPSSLRYLLKTGSVSVDIDDXGLDIVDLHYSKIYFYTEDSXPGKTMRV

SEQ ID NO: 167534 - protein, 66 aa, Glycine max
  Clone ID: PAT_MRT3847_1222C.1.pep
MQVFVKTLAGKHITLEVKTSATIENVKRKIRRTEGIPPDQQRLISAGMQLDDRRTLGDIQDQDGVN

SEQ ID NO: 167535 - protein, 47 aa, Glycine max
  Clone ID: PAT_MRT3847_122300C.1.pep
VYMCFPPLSFACLFLRNKCDITFLSFCLFRFCKGQDSNNLKWSHVIA

SEQ ID NO: 167536 - protein, 93 aa, Glycine max
  unsure (1)..(93): unsure at all Xaa locations
  Clone ID: PAT_MRT3847_122301C.1.pep
FEIPKGSMWDLKTFQSKIELTKNTDGGTILRSDLLANYLTEGKFRASVDLQRTHRIKGMINMAATXGVPENTGLALACAMNSSFTGPANSEIY

SEQ ID NO: 167537 - protein, 135 aa, Glycine max
  Clone ID: PAT_MRT3847_122302C.1.pep
MATVDVIKSCIGSIRQISEHIQDAIVYLDAGSTESFQFIGAYPVLLELGARAICSLENMCSLDVVVDWNSNSDPGRKLVVITSSLLSDAHRYILRCLSAHQVVHAYHEYESLLVQDYEELVKKSWTKPGQAKHNF

SEQ ID NO: 167538 - protein, 708 aa, Glycine max
  unsure (1)..(708): unsure at all Xaa locations
  Clone ID: PAT_MRT3847_122303C.1.pep
MEAQPPTPSTAPPPLPPHLSYPDSVESSPRSRNTDSWDEPFAPASTKLRLMCSYGGHIVPRPHDKSLCYVGGDTRIIVSERATSLADLSMRLSKTFLNGRPFTLKYQLPNEDLDSLISVTTDEDLENMIDEYDRTAASATSAVKPSRIRLFLFPTKPESTHSIPPQILDTSAKSDDWFLNALNGAGLLNRGFSDSASVNCLLXPDEYGRGCREQRSYPVTNSTESFYIGSTACYASQGGSFGNGKNLKQDVHSIPDSPMLETTSSFGSTSSWPSLANFPPIRVHVVEDQKVLGIEDQFAQMGVGVGQKQQQQDEGFVLLSSPPPPPVPATLAAVGVPIGPATVVAGEYHNRVVSDDERSDHGVSVGYRKPPTPPPQVQSQTQAQSQAQTQTLAPQFQQKSTGGGAVVDLPSPDSVSSDSSLANAISRSKPAVYQEQVQIQSGTTRVPSNPVDPKLNVSDPHGRIQMQQHVQDPGYLLQQQFEQHQQLQSQQPQQQFEQQHHQHQQTLPQQQQQFIHGTHFIHHNPAIPAYYPVYPSQQHPQHPQVYYVTARQAQAYNLPVQQANMGESAGNIASSRPQTPPNPSTLVQQPATYNPIRNAPMPKTEMNAYRAATAGTPQLVQVPTSQHQQQYVTYSQIHHPSQSMAPNSAAPANYAFDYADPAHAQIYYSQPMAPTMPSQYQTMMMQEGSAQHPSDSVKQQQIRTSQPL

SEQ ID NO: 167539 - protein, 128 aa, Glycine max
  Clone ID: PAT_MRT3847_122304C.1.pep
SCSDSSLANAISRSKPAVYQEQVQIQSGTTRVPSNPVDPKLNVSDPHGRIQMQQHVQDPGYLLQQQFEQHQQLQSQQPQQQFEQQHHQHQQTLPQQQQQFIHGTHFIHHNPAIPAYYPVYPSQQHPQH

SEQ ID NO: 167540 - protein, 207 aa, Glycine max
  Clone ID: PAT_MRT3847_122305C.1.pep
MQQHVHDPGYLLQQQFEQHQQLQSQQQQQFEQHQQLQSQPQHQFEQHQHQHQQTLPQQQQQFIHGAHFIHHNPAIPAYYPVYPSQQHPQHPQVYYVTARQAQAYNLPLQQANMGESAGNIASSRPQTPPNPSTLVQQPATYNPIRNAPMPKTEMNAYRAATAGNPQLVQVPTSQHQQQYVTYSQIHHPSQSMAPNFAAPANYAFDMR

SEQ ID NO: 167541 - protein, 52 aa, Glycine max
  Clone ID: PAT_MRT3847_122306C.1.pep
LHIDEKRSQHLNFCMIIKLFSIWSFFYNNHNFLILLISKLHLLQSILLNTYN

SEQ ID NO: 167542 - protein, 103 aa, Glycine max
  Clone ID: PAT_MRT3847_122307C.1.pep
CFWCNHSSTGVVDLTSCQSDSSLANAISRSKAAVYQEQVQIQPGTTRVPSNPVDPKLNVFDLHGRIQMQQHVHDPGYLLQQQFEQHQQLQSQQQQQIRTSQPL

SEQ ID NO: 167543 - protein, 369 aa, Glycine max
  Clone ID: PAT_MRT3847_122308C.1.pep
MAKKKVSQSHDPKESQNVKQPLPMATPTDGSSELQIQNLKNLNAVLLKETTQRRQQIHSLQSALQQSAVTYDTNLAFDVQNAVVSVFFKNQLEEMNLRFDTLVGEKDYEVAVLKRQLNDLAARLENETSSLVKERDGLVRETKRLEECFYRERKLRDEAETARSEGEKVLSRKQRDIAELETERDFAVKSSQESLSFIETLREEIEAVTRDKSEIQSRNNALENKIGYLENELKRLTQSTKKDEEITRTKILELEGNLGLALQKEEEMKVEISALLKEKKEVEKSVETLTEEKDGVRKALNVLQKELEDKQHELDEAVRVRSEIEEVKGNLENEIVELLGKVDELKESWENSEKENKELGLQVKHYKNA

SEQ ID NO: 167544 - protein, 189 aa, Glycine max
  unsure (1)..(189): unsure at all Xaa locations
  Clone ID: PAT_MRT3847_122309C.1.pep
MTSMEESWTSWLCDMEPDDYSFMGQSDIKVDDVNGTLASPHDVATALLEKNQQSSFSTVESLSSAAESGLERPFKLPKIEQLSQKTASSSTPSSYILSFDNTNPPPVTVESASKPGTKVLNLEKVLPSKNEPRRVVTQQNKKMGSFAGSSHHTQDHIIAERMRREKXSQKLIALSALIPDLKKMDKVSV

SEQ ID NO: 167545 - protein, 92 aa, Glycine max
  Clone ID: PAT_MRT3847_12230C.1.pep
SFFSKLMGGDESRESLLSEARDHSHLNEISDLQRRRPRRGKSSDKENNLKEKNVVQNPLHSQYIDPKQEAEFHFKTVFVVASCIPRRRNTML

SEQ ID NO: 167546 - protein, 67 aa, Glycine max
  Clone ID: PAT_MRT3847_122310C.1.pep
THPFREDTCSRVIESSHNHTQKQLKLLPWRELILNEATGMIKILLRKIFSYLTLMPMDLALLDYTAP

SEQ ID NO: 167547 - protein, 192 aa, Glycine max
  Clone ID: PAT_MRT3847_122311C.1.pep
GSSSSRDVTGVDGGPLQPRAAAGNNNRAAGSGFGFGARRNGGGGAACYQCGEFGHLARDCNRSSNSGGGGGGSGGGCFNCGGFGHLARDCVRGGGGSVGIGGGGGGGSCFRCGGFGHMARDCATGKGNIGGGGSGGGCFRCGEVGHLARDCGMEGGRYGGGGNSGGGGGGKSTCFNCGKPGHFARECVEASG

SEQ ID NO: 167548 - protein, 94 aa, Glycine max
  unsure (1)..(94): unsure at all Xaa locations
  Clone ID: PAT_MRT3847_122312C.1.pep
VRLLTLSILRGMDAVVKAKTGTGKNVAFLXLKAMSSNTSQRVPPIYVLPPCPTRELANQVAAVAKVLLKYHDAIRVQTLVGGIRFKVDQKRLES

SEQ ID NO: 167549 - protein, 51 aa, Glycine max
  Clone ID: PAT_MRT3847_122313C.1.pep
YKDQTVERNTLLAASLVLGDSFMELDTQVSSLRRLQYSLSHLSELVSSLGT

SEQ ID NO: 167550 - protein, 77 aa, Glycine max
  Clone ID: PAT_MRT3847_122314C.1.pep
GTTTTTVFVLVALFVPLSLFLPHITPNSQSIAATLHHCSCFSSQTSKRAQSTNKVKQEGIQSSHFYDSNLNLTLCLI

SEQ ID NO: 167551 - protein, 139 aa, Glycine max
  unsure (1)..(139): unsure at all Xaa locations
  Clone ID: PAT_MRT3847_122315C.1.pep
MSSALNWRHHVVIQSLLSRGPLSEKDLHAMFQDLTKRNPGTERQLFDSFILKINKALSCANFELRACIDQYDGQVYYGVVNTVSDEHSKLGTKYTVPHIAFYKAIIXAIVQDAFANAAIFSIHAFNLSLDSQVTIVTES

SEQ ID NO: 167552 - protein, 57 aa, Glycine max
  Clone ID: PAT_MRT3847_122316C.1.pep
LNLPSPIQSPVPVQTSFARERPSDRRLLVLLDDFAIKSSHSHFFNTLSSREFNLDLH

SEQ ID NO: 167553 - protein, 114 aa, Glycine max
  unsure (1)..(114): unsure at all Xaa locations
  Clone ID: PAT_MRT3847_122317C.1.pep
TWTVVIFXDLSLSLHLQPEXLFPFSHPITTPPFKLQFCHWEQASPPLHLKVLSWIWYMGLGLVGFFQGDSDLSMASENSKRGHVTRTFFLTIAFMKVAAPNFARLSAQVMVVVF

SEQ ID NO: 167554 - protein, 76 aa, Glycine max
  Clone ID: PAT_MRT3847_122318C.1.pep
NILKIRRVYDAFLAEFPLCYGYWKKYADHEARLGSIDKVVEVYERAVQGVTYSVDMWLHYCIFAITTYGDPDTVRR

SEQ ID NO: 167555 - protein, 188 aa, Glycine max
  unsure (1)..(188): unsure at all Xaa locations
  Clone ID: PAT_MRT3847_122319C.1.pep
MAEISSSGYKEYAAGLFAGVAAVATGHPFDTVKVMLQKHNAEAHKIQYKNGWHCTARILKTEGIKGLYRGATSSFVGMAVEGSLFFGIYSQTKVYLQGGVQSGEPRPQVIIPSAAYSGAIISFVLGPTELMKCRMQIQGXTDSFEPKYQFKFQLLQCXALKTVKLEGLKGNFVDTVVPLFVPLRNAKL

SEQ ID NO: 167556 - protein, 337 aa, Glycine max
  Clone ID: PAT_MRT3847_12231C.1.pep
MSEAPPPPTADASPPPYWCYHCEKRVSVETLANLPDVVCGECKNGFVESMPTPSRSRSPSASSDDPYFGSQFLQVLRLIAQSARDDDASPPPPPSRSPENDFLRIELGGWDNDEENENDDDNGDEEFEEHEEAEDRSGNEDPHGGDDEDLRRRRRELLRLRIRDLATRTRSMRNRILDWAEILMGLEDNSIEFRLQLPESDRYVGNPEDYVDAAEYEALLQTLAESDGGGRRGAPPASKAALEALPTVKIASESEAVACAICKDLLGVGDAAKRLPCGHRYHGDCIVPWLSSRNSCPVCRFELPTDDKEYEEERVVIAASSNSNGASSSGGGGSAIV

SEQ ID NO: 167557 - protein, 44 aa, Glycine max
  Clone ID: PAT_MRT3847_122320C.1.pep
IYKIITKFSFFFIIILVLYLDNFSDNFVFSGSIFGIINLIDFNI

SEQ ID NO: 167558 - protein, 70 aa, Glycine max
  Clone ID: PAT_MRT3847_122321C.1.pep
IRSQLACNKKGTVILTRIPASMVMASIESLMPKRPSRALFAFIGAYMKVLNMEHPVATPSYAGDTADVAK

SEQ ID NO: 167559 - protein, 64 aa, Glycine max
  Clone ID: PAT_MRT3847_122322C.1.pep
AFFLCVCGSISFFLCVMWVELLCSICVGEQVKAEACSYDLVIFIWFAPLLDLHHLFHLVCSSQS

SEQ ID NO: 167560 - protein, 63 aa, Glycine max
  Clone ID: PAT_MRT3847_122323C.1.pep
GTKRLIGNNTSPIWSLQTPPKKKPNLTPQNGLEKSTNKDQLKKRAQSKAKNSLPRHPINLLSF

SEQ ID NO: 167561 - protein, 101 aa, Glycine max
  Clone ID: PAT_MRT3847_122324C.1.pep
YAIPLIFTNLFWLFLVAGVGKSCLLLRFSDGSFTTSFITTIGIDFKIRTIEQDGKRIKLQIWDTAGQERFRTITTGKFYVSCRRLNTTLLLYLSLGSDMKP

SEQ ID NO: 167562 - protein, 168 aa, Glycine max
  unsure (1)..(168): unsure at all Xaa locations
  Clone ID: PAT_MRT3847_122325C.1.pep
SIYAVEILHPXKXTGKDRENKRXTGRTATPKQEGQRTKERKTTTQERAPRTISAQKPQKPXEQNRRTGKQTHPQGTARRGKRKPPSIGGGAGAKNAILMNMPNAVLSMRRYLVGELVYEASKMTSPYIKGTNSFFIAFGNLADDTINIEAFSHKLVQIGEIKEKVFFE

SEQ ID NO: 167563 - protein, 82 aa, Glycine max
  Clone ID: PAT_MRT3847_122326C.1.pep
WVCGLKVNEGGQLENTCAPLNGSIPASVFCKMCVPLESGLLCSPWQIQLNASPPIRSSWVGVRVAMNEYSHVLDEYHVRAMI

SEQ ID NO: 167564 - protein, 119 aa, Glycine max
  unsure (1)..(119): unsure at all Xaa locations
  Clone ID: PAT_MRT3847_122327C.1.pep
FXNGVXRFWVXXXXKXXMXGXNXKXXIEIXIVGXDYXXGVWXFXGFFXVXSGFCGVXIKXVFGGVIFXKNXXNRXYGGXXXXXXLXILEXKIYNRWXXFXVIXDVGXKNVKIFFFGEDN

SEQ ID NO: 167565 - protein, 71 aa, Glycine max
  unsure (1)..(71): unsure at all Xaa locations
  Clone ID: PAT_MRT3847_122328C.1.pep
XXCXXXXFXXPKGHXPGXCVXXAXPQXXXKXXKLXXXXVXXCXITIATKCCHSLSLSRLEPNSELTYACXR

SEQ ID NO: 167566 - protein, 49 aa, Glycine max
  Clone ID: PAT_MRT3847_122329C.1.pep
FKNENKKKKKKKKKKKKKKKKKKKKKKKKKKKGGKKKRKKGKERVGEIE

SEQ ID NO: 167567 - protein, 115 aa, Glycine max
  Clone ID: PAT_MRT3847_12232C.1.pep
QGFEGRPPTTPSLRGKFFLRPLWLYIPKMKMALGQIPPLTGSLRIPLLMSCHGVGASQEEEKHVRSPMDPKEIEYQPQAIKIFWVGDFGSQIFKFFPLKSVFCGKPKRTNIPTPP

SEQ ID NO: 167568 - protein, 93 aa, Glycine max
  Clone ID: PAT_MRT3847_122330C.1.pep
NSRSTPRTLRNAMSTLLHSAPTSSPSFSGIITTKGGTSPITHISLLNGIRNTAIETINLHNGIPITSYFIFIVYTNAIPSYLYTPNTHIHRFV

SEQ ID NO: 167569 - protein, 172 aa, Glycine max
  Clone ID: PAT_MRT3847_122331C.1.pep
GPPIGGPKFFKLRLERGFPLFQRAMGGPLFLRAPLRAPKGAPIFGGGFFGQPPVLKFPPFFSKGGFGKKEGGKFLGLAPFPIFCPKAPKTFSLDPIFPFGRGSIFPPPFLTCFSPRVWGGKFYFFSSKTQTNFFFFNPLFFFFPPGGGGFFFFFLGGVPPLFFILILRPFFF

SEQ ID NO: 167570 - protein, 62 aa, Glycine max
  Clone ID: PAT_MRT3847_122332C.1.pep
PPPPPPPPPPPPPPPPPPPLWEKIKKFFLLGNLKLKFYLLYLSTTLIEILRERIKKIINILI

SEQ ID NO: 167571 - protein, 39 aa, Glycine max
  Clone ID: PAT_MRT3847_122333C.1.pep
PHSNSGRQRPTTVLALRFHDIAGTCTRFVCVSFVSALAS

SEQ ID NO: 167572 - protein, 155 aa, Glycine max
  Clone ID: PAT_MRT3847_122334C.1.pep
KTTNIRFKPRNQIQHWNLIFIAAESRPRRAPAQPMPKRKTNRAMHHRTNPTHRSVPPNSSERWKLVLLATVGHRREPPPPAKAEPRSDGGQRRRREAPDRPRRGGGRARPLGVGRGRGALAPVRAGAIREDHRKGGGGTSALRRGLDRGAVAARE

SEQ ID NO: 167573 - protein, 76 aa, Glycine max
  Clone ID: PAT_MRT3847_122335C.1.pep
QVRLLGRSKYVNKKSFIGLGRDRTGVARGLSLVWCVVFAVLSFSLCLLLLPICRSTPYYDSGSEGYIRGFAPTPIE

SEQ ID NO: 167574 - protein, 123 aa, Glycine max
  unsure (1)..(123): unsure at all Xaa locations
  Clone ID: PAT_MRT3847_122336C.1.pep
TLARNGEGGGGXKEVQRXKGDDFDIKLVXDVINIXFKGPIVMRGXCVTPYEGGVFKIVCGVSDLYILQKIEVGVLTXIFCSIVHFMNGEIWLKILYIAWRTGWTLXSVCMVKIALVVHTKAVI

SEQ ID NO: 167575 - protein, 108 aa, Glycine max
  Clone ID: PAT_MRT3847_122337C.1.pep
PQTTKRFEAFRPEISYIHIFQPIASHHTLILQHPRSATTIAGGRHAAYESIMNNPIQASVAIEQAEAAGSAFFSSIIYSICKKKYLKSHATWKTKRLSTKQIPKERRT

SEQ ID NO: 167576 - protein, 109 aa, Glycine max
  Clone ID: PAT_MRT3847_122338C.1.pep
PSPFPPLSVTSLIHVAITLNVEYLCDSTLHMHRLRATNDPKPTGEPSTPSNLETSVERKRTYFEKLLSELESYPLGSIVDELGVVILVRICVFRGFDLMSLITLIKGLF

SEQ ID NO: 167577 - protein, 60 aa, Glycine max
  Clone ID: PAT_MRT3847_122339C.1.pep
GIWAHRADIYSAGSVVFLQLFVVVKENIISLGNAVFWRIICLRWINEFYVTPPGLPFFRC

SEQ ID NO: 167578 - protein, 178 aa, Glycine max
  Clone ID: PAT_MRT3847_12233C.1.pep
MSEAPPSQPPPPTANASPPPYWCYHCEKRVSIETLANLPDVVCGECKNGFVESIHTPSRSRSPSASSDDPYFGSQFLQVLRLIAQSARDDDASPPPPPSRSPENDFLRIELGGWDNDEENDNDNNDDEEFEEHEEAEDRSGNEDPHGRDDEDLRRRRRELLRLRIRDLATRTRSMRKP

SEQ ID NO: 167579 - protein, 455 aa, Glycine max
  Clone ID: PAT_MRT3847_122340C.1.pep
TKKTRGSLGERKHSSSAENHTSEFGFRSDRPDPSKSFPGNEDLERSLQKLSKDLKETQQDRDKVVQELNRLKQHLLEKASEDSDKMDEDSKIIEELRDSNNYLRAQVSHLGRTLKQALASQEELKMANDNEILKSREIIDDLNKKLTNCMSTIDAKNTELVNLQTALGQYYAEIEAKEHLEGDLARAKEETSKLSQLLKDADCRANVLISEKEEILAKLSQSEKVQSEWRSRVSKLEEDNSRLRRALEQSMTRLNRMSVDSDFLVDRRIVIKLLITYFQRNHSKEVLDLMVRMLGFSTEDKQRIGVAQQGSGKGVVRGVLGLPSRLVGGLLGGNSTDTAANAGSDNQSFADLWVDFLLKETEEREKRESSENTGKAMENSSDKSPYTIPVTPPFSNRRFDAGTPSAFQITPTNQNISRPPRGYFQHSEHFDSEFSTVPLTSSDGKTTSSNQHPRY

SEQ ID NO: 167580 - protein, 58 aa, Glycine max
  Clone ID: PAT_MRT3847_122341C.1.pep
LLYVSMLEFILMFDFLHPPIPKKPLGFPNKISLRENPPFPPYFIREDAFTLRPYKNKK

SEQ ID NO: 167581 - protein, 69 aa, Glycine max
  unsure (1)..(69): unsure at all Xaa locations
  Clone ID: PAT_MRT3847_122342C.1.pep
TLYIYRPPLFFFFFFFLMXNLPLKYFFLAFCSFISRGEKPPKNTTLLELTPQDTPIENCFKHTPAPYFS

SEQ ID NO: 167582 - protein, 374 aa, Glycine max
  unsure (1)..(374): unsure at all Xaa locations
  Clone ID: PAT_MRT3847_122343C.1.pep
MFLARPIFRGPSLWALHSSYAYSSASAAAIQAEXLIKEGPRNDWSRDQVKSIYDSPILDLLFHGAQVHRHAHNFREVQQCTLLSIKTGGCSEDCSYCPQSSKYDTGVKGQRLMNKEAVLQAAKKAKEAGSTRFCMGAAWRDTLGRKTNFNQILEYVKDIRDMGMEVCCTLGMLEKQQAVELKKAGLTAYNHNLDTSREYYPNIITTRTYDERLQTLEFVRDAGINVCSGGIIGLGEAEEDRVGLLHTLSTLPTHPESVPINALVAVKGTPLEDQKPVEIWEMIRMIATARIVMPKAMVRLSAGRVRFSMPEQALCFLAGANSIFTGEKLLTTPNNDFDADQLMFKVLGLLPKAPSLHEGETSVTEDYKEAASSS

SEQ ID NO: 167583 - protein, 71 aa, Glycine max
  Clone ID: PAT_MRT3847_122344C.1.pep
QTPDCRLTACKLGLGHMKGEDINSVNYKELMALEDALETGLVSDRDKQGAVYWMSMRHDKILEEENMELTF

SEQ ID NO: 167584 - protein, 96 aa, Glycine max
  Clone ID: PAT_MRT3847_122345C.1.pep
HEEVEPDLAAVGQPLVFIEKNRVQLSGIWSLRRTPRGGPLLPSSGGSRASGSCIFPKYFKMSQVQQALDGCKVSHETRLGDENQQWLWAKFKMSFL

SEQ ID NO: 167585 - protein, 69 aa, Glycine max
  Clone ID: PAT_MRT3847_122346C.1.pep
WGKLLDHGVLLVANESGAKAPIGFKEKPFWIKKISWGKIWGKKGFSKFCRGPNVFGVNSMVSPVDAKHV

SEQ ID NO: 167586 - protein, 100 aa, Glycine max
  Clone ID: PAT_MRT3847_122347C.1.pep
SQTNLEECRAEKILAFLSNQICPKNHSLRTMPKLSGIFAHTKSSEVNTGTFEGPWDKPSVHKKHQPSYSREMKLMDNARTNENMIYNFVSPSQVRVKYRV

SEQ ID NO: 167587 - protein, 92 aa, Glycine max
  Clone ID: PAT_MRT3847_122348C.1.pep
TAARRRQKGRADGGVKTLFVMRTEPYWWLGEPRQSTPPCFGAEAELNGLMEIAVARRIENATKLLFLCTRRIGSLPAVKIIFSTIQRTSSMF

SEQ ID NO: 167588 - protein, 138 aa, Glycine max
  unsure (1)..(138): unsure at all Xaa locations
  Clone ID: PAT_MRT3847_122349C.1.pep
AQLASSGMASVALTPAPFTVDNSXPRGLPSLSRNSSXFKSVASGGKKIKTDNPYGINGGLALREGPHASGKKGKGKGDYHSADNXGANVDGYXPIYDTKDCSPTGDVYSRGTTGLAIWAVTLLALLAGGALLVYNTSA

SEQ ID NO: 167589 - protein, 354 aa, Glycine max
  Clone ID: PAT_MRT3847_12234C.1.pep
MPSKHKQTLQRFVSFHLRRTMSEAPPSQPSPPTANASPPPYWCYHCEKRVSIETLANLPDVVCGECKNGFVESIHTPSRSRSPSASSDDPYFGSQFLQVLRLIAQSARDDDASPPPPPSRSPENDFLRIELGGWDNDEENDNDNDNDDEEFEEHEEAEDRSGNEDPHGGDDEDLRRRRRELLRLRIRDLATRTRSMRNRILDWAEILMGLEDNSIEFRLQLPESDRYVGNPEDYVDAAEYEALLHTLAESDGGGRRGAPPASKAAVEALPTVKIASESEAVACAICKDLLGVGDLAKRLPCGHGYHGDCIVPWLSSRNSCPVCRYELPTDDKEYEEERVVNSASSSGGGGSAIV

SEQ ID NO: 167590 - protein, 76 aa, Glycine max
  Clone ID: PAT_MRT3847_122350C.1.pep
LMKKVSSQSYIYIYLGLSPLLIFARGKIGIKHAHSNMQKGRELTSPQITVLWPSINTARNRKNLSLLESPFSHNRE

SEQ ID NO: 167591 - protein, 44 aa, Glycine max
  Clone ID: PAT_MRT3847_122351C.1.pep
LIKTTPEYMDYTVQQWLGGLQDTEVTILATPRTWHKSMLNNIER

SEQ ID NO: 167592 - protein, 80 aa, Glycine max
  Clone ID: PAT_MRT3847_122352C.1.pep
FINFFLKKTYGSRNPYELTHTDYVIHMSHTDYVIRKNKKHLRIFLKFCFNVGCTSNNPGAPSKAHNRPIKKFHGPDPTKM

SEQ ID NO: 167593 - protein, 70 aa, Glycine max
  Clone ID: PAT_MRT3847_122353C.1.pep
PEDDRQRQLKHLIKMSLNNSQHCLNECVLPPSLARVTNTRIQLNLLKNDQPLSSDFNEYSYSNLHLYICT

SEQ ID NO: 167594 - protein, 65 aa, Glycine max
  Clone ID: PAT_MRT3847_122354C.1.pep
DISVILFTHRAEAGKKNIFGTWTAYTKKQMVPQGHEYASCTDTNTSWLGYRVSGAVRLMANSRAR

SEQ ID NO: 167595 - protein, 62 aa, Glycine max
  Clone ID: PAT_MRT3847_122355C.1.pep
TVHKEPSCTLVVLLHLLALLSFSCSLGNMGPPGLVFVVPSLHRSICVILYLNWHKEMEEDKA

SEQ ID NO: 167596 - protein, 158 aa, Glycine max
  Clone ID: PAT_MRT3847_122356C.1.pep
MEEEDNHSHLQPLIPYYSTLSFSSHSLQQHFADKNAKHFTSDSNNIVLRILSILLLALISLWANYEASKTFHITVVNDAKDSPAGRRFALSYVSNDEASRILLNTSSYVEHFLYPNSNNNDNNYPKKHIDSVTLQLPRRNLNVTDIVAVYTAAGNHQR

SEQ ID NO: 167597 - protein, 142 aa, Glycine max
  unsure (1)..(142): unsure at all Xaa locations
  Clone ID: PAT_MRT3847_122357C.1.pep
IIGKKNALLLLLDVGPSMHSVLPEIEKVCSMLVQEKLIYSKYDEVGIVLFGTEDTNYELTTEEGGDQHAAALKTTKGGDGDIAEALQQLPTGTTDGDTLDAAIDGMDVXVKKFGXTDKGKKRVCLITNARWQIKEPDEGTNE

SEQ ID NO: 167598 - protein, 90 aa, Glycine max
  Clone ID: PAT_MRT3847_122358C.1.pep
GGSRSVPVKYVASDLDIVSSSLVLTASARGGGFSPLWALFCASVCAARWGSLPYSCSRRGYPSFQLRLDPLVRVLVRMVLPPSLCLLVEC

SEQ ID NO: 167599 - protein, 59 aa, Glycine max
  Clone ID: PAT_MRT3847_122359C.1.pep
EASYKNISTFSLDHPQLHWHFKIQLKPFMLLLSLLMALLFTESTHDRPLAKTSCSSNPS

SEQ ID NO: 167600 - protein, 165 aa, Glycine max
  Clone ID: PAT_MRT3847_12235C.1.pep
MEPYKRGTCSAFNSAFWTTNSGAAIWNNNFLLTVGASGPILLEDYHRAEKIASFDRERIPERVVHAMGASAEGFFEVTHDIFDLTCADSLRAPGVQTPDFDRLSTGIHERGSPETLKDPRGLAVKLHTREGFFDLAGNNLTMFFVRDGMKFADMGDALRPQPQNH

SEQ ID NO: 167601 - protein, 98 aa, Glycine max
  Clone ID: PAT_MRT3847_122360C.1.pep
IRLEQLLKIFLNIHTLKIDNLVLDRFMRPILYVNLGYHVIIIIFIILHESWVVAFAIIGLLLVNLRKCWLMVAASLLIFFVFGLFDVSLFSYSKSLSF

SEQ ID NO: 167602 - protein, 42 aa, Glycine max
  Clone ID: PAT_MRT3847_122361C.1.pep
SSRSSSVTVVQTTHNLGTTEPHASLQLSSPPHGNYKCHPLMV

SEQ ID NO: 167603 - protein, 95 aa, Glycine max
  Clone ID: PAT_MRT3847_122362C.1.pep
ISYIGYLENRCRMTDILHRLTRQPMLNYGILHRSTPRDRSRIEANLHRSNQATVVELTSFYIGLRDHRRTPTPFLRCLLQRRSIIDVECACCSSV

SEQ ID NO: 167604 - protein, 64 aa, Glycine max
  Clone ID: PAT_MRT3847_122363C.1.pep
FWCYAQSLSVIALICFDIYPLCHGVLQSAIPMYVDSYCNFTSQHHVYYAMVKTYSQEPMLLFES

SEQ ID NO: 167605 - protein, 87 aa, Glycine max
  unsure (1)..(87): unsure at all Xaa locations
  Clone ID: PAT_MRT3847_122364C.1.pep
XPWAPEGEGDVVVCHGNAVARIISNFXLHCSGQCVSWRENLICGDGLGQFEPXTRVQLCCKILXLXXKRDVXPLLINSXXXXXPXRV

SEQ ID NO: 167606 - protein, 165 aa, Glycine max
  Clone ID: PAT_MRT3847_122365C.1.pep
WNESMSYQPCDSEGEPLPNTELKEVWHVADVPQNDKFQYTHFAHKINSFDTAPRKLLASDSRLRPDRYALEMGDLSKSGTEKSSLEERQRAEKRSREEKGHSFTPRWFDLTEEVTSTPWGDLEIYQYNGKYSEHRAAADNSGSIDDVDAKSIEFNPWQYGNLATE

SEQ ID NO: 167607 - protein, 162 aa, Glycine max
  Clone ID: PAT_MRT3847_122366C.1.pep
SMSYQPCDSEGEPLPNTELKEVWHVADVPQNDKFQYTHFAHKINSFDTAPKKLLASDSRLRPDRYALEMGDLSKSGAEKSSLEERQRAEKRSREEKGHSFTPRWFDLTEEVTSTPWGDLEIYQYNGKYSEHRAAADNSGSIDDVDAKSIEFNPWQYGNLATE

SEQ ID NO: 167608 - protein, 77 aa, Glycine max
  Clone ID: PAT_MRT3847_122367C.1.pep
SLSKKTPKPGAKKKPRARPKNRLKGFHCQAWENYFFLSPGGKWGGSPLRGGTPPKKRGSGFPRFFFFFREKKTLSAP

SEQ ID NO: 167609 - protein, 67 aa, Glycine max
  Clone ID: PAT_MRT3847_122368C.1.pep
NEYGPQEDVISYAELLCSACGFKRDCACSYQLRIIFVFLCFKRQNILIHNKKKKRRPPFFFSLGLYL

SEQ ID NO: 167610 - protein, 72 aa, Glycine max
  unsure (1)..(72): unsure at all Xaa locations
  Clone ID: PAT_MRT3847_122369C.1.pep
QFGGLSDANPENLVGNMALSGEQSSFDVLCDAVRFGVLGDGACVRRVIASNIVAVAIFGYPPYFRAINFRTX

SEQ ID NO: 167611 - protein, 359 aa, Glycine max
  unsure (1)..(359): unsure at all Xaa locations
  Clone ID: PAT_MRT3847_12236C.1.pep
MMSWACRSEESESPNNLIPYLPNDVALNCLARIPRSHHPTLSLVSKPIRSLLYSPLLFTTRSLLQCTQPLLYLTLRSRDSSLQWFTLHRTNPNPLLAPLPPIPSPAVGSAYAVLGPTIYVLGGSIQDVPSSHVWLLDCRFHRWLRGPPMRVAREFAAAGVLHGKIYVLGGCVADTWSRSANWAEVLDPASGRWERVASPTEVREKWMHASAVVGDRIYAMADRGGIAFEPRSCAWESVGGELLXPWRGRKRALEGILYCYDYLGKIKGFDVGRGVWEELKGLENALPRFLCGATMADLGGKLCVVWECQCNGKEMEIWCAEIGVKKNSDGELWGQLGWFGKVLSVPKGSSIVNCSSVSL

SEQ ID NO: 167612 - protein, 50 aa, Glycine max
  Clone ID: PAT_MRT3847_122370C.1.pep
EQINVMNIIYCAKKKKKKKKNIGPPKIGPFPRGLISGRGPEGVQCSPIGS

SEQ ID NO: 167613 - protein, 74 aa, Glycine max
  Clone ID: PAT_MRT3847_122371C.1.pep
MTIWKNFMLSVHLNQILNKMKNCNYKIRKTKYRIEMGPPKKKKKKKRKVWCFNFLLSFFSQKIYFIFVIFRAIS

SEQ ID NO: 167614 - protein, 87 aa, Glycine max
  Clone ID: PAT_MRT3847_122372C.1.pep
GGPLEKNNLKYPLQPQTGKNPNPCILKKKKGSPSSPQKKGRTLLYPPKFSLPPACPRGTPFLLEHPFLIPPRALPARGTNTPGGAPP

SEQ ID NO: 167615 - protein, 984 aa, Glycine max
  Clone ID: PAT_MRT3847_122373C.1.pep
MDQGNNEVDYHNSADLISLEATQKESLNHQRENDAIDCSLQNNGNHISLDLHHEDNACDLVEMDSKKEKQEHLACQVVMKDQENLIPNDHCLTLLPLVDSSNKDYTECEGGMINASDVAEKEDLQDGVLMNNDPVSAALDQTITNCVVSAPLMNNENVASSGCSHVTSDQEDLSCKPLSNMDGSWGPGFDGRLEDGNTLSKHEVLNGIEISKSEGQFCPFDDARVSNVISPLRSPGRPEVVDEEAQASQELKEAETLNHVSLEAVQPAESILQPCTSHLGQPSRSFIEGEKCHVTDVSNPALSYQGTIEPSVFKETPDSGKTDMQLESQIFSDKVESINKSAAADMPEPEKLLSAYQHDGEANHLLMASTPDNQGATEGHTGAAGVKCISGKKRSYTESTLTVQSMDLIESYGGAQSKRTAESVPDDDDLLSSILVGRKSSVLKMKPSPAAPEIASMKCVRSASAPRTSALKRKVHMDDMMVLHGDTIRQQLTNTEDIRRIRKKAPCTRHEILMIQRQFLEDEIFHEPIFMDLSTDLTILRNETFDLTGIKVIEYGLDSSSVEKTNDQESYSRTHTEIHGVEGNNEPMAVQLQEDAEVQPTEVPVLSESHQSKVNLGSHDIDAHGHTGIISHVEELDSSQNVELNNVRANIEVSEAGNCSVGPGHESSSLTEVFENDFAASLARMDKTNDLVDSIHTNILSIPNAENLNTIPILEDDFVEDQSDRNGVGAIKCSMETGTQVQTDGVDANDLYTSLAIGSTETDEFTNIQASFNGDLPLEENGNSLLGQLNEDQIVASGMDCDDKDARPDCIFIENAKVDCLQSEALGLDEKESLLKDEEIPVCQEAELQSTMCPEIRSPFVDQNDENDMIANDTVFLNVGDDEIIDDDDYQSCAEGTNLENSGWSSRTRAVAKYLQTVFDKEDLHGRKELHLDNLLVGKTRKEASRMFFETLVLKTRDYVHVEQTKPFANVSIKPRMKLMQSDF

SEQ ID NO: 167616 - protein, 78 aa, Glycine max
  Clone ID: PAT_MRT3847_122374C.1.pep
RVPVAFPSCRLAIRLCFTHGRKELHLNNLLVGKTRKEASRMFFETLVLKTRDYVHVEQTKPFANVSIKPRMKLMKSDF

SEQ ID NO: 167617 - protein, 95 aa, Glycine max
  Clone ID: PAT_MRT3847_122375C.1.pep
DKKELGLHANEGADWSYPQSIPTCVSLHLKTCRLTNYVGSKGEFQFARYIMQNASHLQTMTICTNTSSNEGEKLEMIENLSSCTRCSPPCKLLFK

SEQ ID NO: 167618 - protein, 94 aa, Glycine max
  Clone ID: PAT_MRT3847_122376C.1.pep
DTQIIFFKAFIRGSKGPTYQPYYIYIYITFQLMPFINIFSSIILRFFITWLKGLENGAFFQKWTHHPPIGLLLRLGVLIFPIPLSLFLWFGSKF

SEQ ID NO: 167619 - protein, 73 aa, Glycine max
  unsure (1)..(73): unsure at all Xaa locations
  Clone ID: PAT_MRT3847_122377C.1.pep
FVFVFLFEKQRGSASGCNFFQWCPNDINDKDLVIARQRRKINNLESSLKAKEKWLKIFIVICCVLLVMIXILI

SEQ ID NO: 167620 - protein, 220 aa, Glycine max
  Clone ID: PAT_MRT3847_122378C.1.pep
GNTETEENPLNQTEGGKNQQEKVQGTSDKEDDSGVDNADSLEQIKTKSNAEHMDKRQRKKSNSKQTSTSKSISSMLTKDQVLDSKKPSPSSGSGTHGKPSVAVTKKSKSTSTKSTNKSSKTNLELVEDSVRLELSDSRFNSGGKDAAQHSTCSPGEKDDDNLEAIYGHTHAEDVSSSQQLSSKEKLDVRSDLGKKVPNVHRTGQDSKLSGRSDRAVSLIG

SEQ ID NO: 167621 - protein, 120 aa, Glycine max
  unsure (1)..(120): unsure at all Xaa locations
  Clone ID: PAT_MRT3847_122379C.1.pep
GRTRGRTRGGDFISRTAGRAQDPTKAEEDGLKRTKRXNWGKDRAEAPPKPAPTKTRTANAGQPTAPKVYAETAEPGNEDNPDIPSDQPHGYGRREPTAWKPGQKNASQREADRHHETAKS

SEQ ID NO: 167622 - protein, 45 aa, Glycine max
  Clone ID: PAT_MRT3847_12237C.1.pep
EMEPGLESNQKGNQIFWKKLMVKLSLSISDCQRMILRNQLLQPHD

SEQ ID NO: 167623 - protein, 208 aa, Glycine max
  unsure (1)..(208): unsure at all Xaa locations
  Clone ID: PAT_MRT3847_122380C.1.pep
GFLTHKLRFNAKDDDAGLKSDSVSAKKKSLTFSSSFHSRFQHLDSQSSVKKLSDTGKESSETTVVETTFGSSVKHNIDTGSQFKTPITLPAKRKLSDLKDISMFSSSGKRLNVGDQGFRSPICSSVIRKSCLQSDAVGLFSPTCNLKQSRCMGDLVDENHSISNLVQMTPSSQVLNDLQPIHAEQCTLDSLVGQYLKHQHXPCPSSIT

SEQ ID NO: 167624 - protein, 157 aa, Glycine max
  Clone ID: PAT_MRT3847_122381C.1.pep
LLGGGGGGVGVLGDDVRRPTAVTRACRNIIVEITLLRLLFSTPFLYDSYAGRYRYCIILPLKRILPGSLLLHNLLFNKSGLFISKLSLSPLRRFKGFGGPVSLRLDIRGITFKRSISVNINLGLMVMLLHTFKLPIRQLRIKLSNTQLISHFSTALS

SEQ ID NO: 167625 - protein, 71 aa, Glycine max
  unsure (1)..(71): unsure at all Xaa locations
  Clone ID: PAT_MRT3847_122382C.1.pep
XLKNISVSFRNIVNLYVETSGSIVLLTCDFLSQIQKTLQVFGGTLLSLDVMTSYISINVHDLFLFRQHYVH

SEQ ID NO: 167626 - protein, 55 aa, Glycine max
  Clone ID: PAT_MRT3847_122383C.1.pep
TGINMILFILRSSIQPIYVMYSKKEKRKNHDKGTPSDLIHQQIIMDDRSGLHLHL

SEQ ID NO: 167627 - protein, 55 aa, Glycine max
  Clone ID: PAT_MRT3847_122384C.1.pep
SKLSQKYGPGCCLLKVAYGCTLNENTCRYSKECILLGVSVTAPKSTCLSPFASFS

SEQ ID NO: 167628 - protein, 31 aa, Glycine max
  Clone ID: PAT_MRT3847_122385C.1.pep
AAVVIHWSYCCWSFKCVNWGWRLSDHMNIMH

SEQ ID NO: 167629 - protein, 103 aa, Glycine max
  unsure (1)..(103): unsure at all Xaa locations
  Clone ID: PAT_MRT3847_122386C.1.pep
VLRCQEHIEVMAHISDMKKIHLRVELKLTEHFQNANTSESYRKRGSCLPYFXIGKQDYLTAIVQVMCNAANKSTNEXRMHVGPWRKSSFTAHEVVKIQSKMQF

SEQ ID NO: 167630 - protein, 34 aa, Glycine max
  Clone ID: PAT_MRT3847_122387C.1.pep
VQICPSYVNLNLRCVYSYLTRLSPIFLLCMLESN

SEQ ID NO: 167631 - protein, 55 aa, Glycine max
  unsure (1)..(55): unsure at all Xaa locations
  Clone ID: PAT_MRT3847_122388C.1.pep
KTRFLVVSGFDRLSIKMLGIFTSSENSPREWGDYISLMSFAQKXSFMSNLINRIV

SEQ ID NO: 167632 - protein, 64 aa, Glycine max
  Clone ID: PAT_MRT3847_122389C.1.pep
PVLFFFFFFFLRASGILFERGDSVYVPRKLFHSILYKKHWMYMIFLKKIGDMGRSPRLIARDRF

SEQ ID NO: 167633 - protein, 119 aa, Glycine max
  unsure (1)..(119): unsure at all Xaa locations
  Clone ID: PAT_MRT3847_12238C.1.pep
AQNARGQTPKNEKKGAGPHNAEEPPEKEEQEKPKKTEARTRQRTEPQNKEAQAQKETKPHKTPREDAETPKGTRKEPKNPQPKRAPTKNTAGGTNQRRDQPATPTTEGNTRAXGDQQRT

SEQ ID NO: 167634 - protein, 252 aa, Glycine max
  unsure (1)..(252): unsure at all Xaa locations
  Clone ID: PAT_MRT3847_122390C.1.pep
KGRAVMISAIEKQKLVYILNRDAAARLTISSPLEAHKANTLVYHVVGVDVGFENPMFACLEMDYEEADNDPTGEAAANTQQTLTFYELDLGLNHVVRKYSEPLEEHGNFLITVPGGSDGPSGVLICSENYITYKNFGDQPDIRCPIPRRRNDLDDPERGMIFVCSATHKTKSMFFFLAQTEQGDIFKITLETDEDMVTEIRLKYFDTVPVAAAXCVLKTGFLXVASEFGNHYLYQIAHLGDDDEEPEFSSAM

SEQ ID NO: 167635 - protein, 67 aa, Glycine max
  Clone ID: PAT_MRT3847_122391C.1.pep
ICIIEFPTVYHPCETCHRSKKKILTFFSRQRLMTIMGLSWTLALAWKVCDPWITYLWSLIPSLLFSI

SEQ ID NO: 167636 - protein, 101 aa, Glycine max
  unsure (1)..(101): unsure at all Xaa locations
  Clone ID: PAT_MRT3847_122392C.1.pep
XSCFXXXLGIXSRXHRSXXSXLXFXXXSXGXPXXXXFXNAXXXXXXXKFEXXXFXVQGPSKXIXXRXXXXAXXXXXHXTXXVGXXXXDXXXXRXXVIXXSX

SEQ ID NO: 167637 - protein, 205 aa, Glycine max
  unsure (1)..(205): unsure at all Xaa locations
  Clone ID: PAT_MRT3847_122393C.1.pep
MALSSFSLPCLCYCTSTLVPFNLTRLQLVSLKPYTRSQSQHTAAKAKVSSAPLVYSTRQGFDTVNIAEDVTQLIGNTPMVYXLNKVTEGCVANIAAKLESMEPCRSVKDRIGYSMLSDAEEIGAISPGKTILVEPTTGNTGLGIAFVAATKGYKLIVTMPASINVERRILLRAFGAEVVLTDAEKGLKGXAVDKAEEIXRNTPNA

SEQ ID NO: 167638 - protein, 265 aa, Glycine max
  unsure (1)..(265): unsure at all Xaa locations
  Clone ID: PAT_MRT3847_122394C.1.pep
ASGQLDLGNAAVRRLETENAEMKAEMEASKLSASESVTACLEVAKREKKCLKKLLAWEKQKAKLQQEISDEKXEKRTKEILVQIRQCQKEAEVKWKEEMKAKEEALALVEEERHSKEAAESNNKRKLETLRLKIEIDFQRHKDDLLRLEQELSRLKASAQSAELHNQSSTSPTSDWKGAKPQRETIARLLQELDNLXEWKEEIKAKEESIACVEEERHCKESAESXQYEVMCGSSSDEYERKGKAICPCCRVQIQQRIRVFGASS

SEQ ID NO: 167639 - protein, 85 aa, Glycine max
  Clone ID: PAT_MRT3847_122395C.1.pep
KMPKWVGVLLGSAVPIDPEAPLFSVSRESVFSSLYMDFVEEEKESPILSDEERVTYKVQFMIMPGFQNGKMVVKSRVYVSNHSLS

SEQ ID NO: 167640 - protein, 52 aa, Glycine max
  Clone ID: PAT_MRT3847_122396C.1.pep
GLLPVALDSVHIRKSLSDSSLDSHIGSFGVDSFGVTLYKTSMVINCAPKSLY

SEQ ID NO: 167641 - protein, 35 aa, Glycine max
  Clone ID: PAT_MRT3847_122397C.1.pep
FCLRRNQIIQSINQSTILVLMYTPRATGLSGSFDL

SEQ ID NO: 167642 - protein, 80 aa, Glycine max
  unsure (1)..(80): unsure at all Xaa locations
  Clone ID: PAT_MRT3847_122398C.1.pep
MKMKVLVFFVATILVAWECDAYDVFPLRMNTGXGARTPEVKCASWGLAVEAHSIFGFETSPGEWLEAGKEDIHGEQYRSG

SEQ ID NO: 167643 - protein, 81 aa, Glycine max
  Clone ID: PAT_MRT3847_122399C.1.pep
MSGKRKRKLKLLSDAITEEEKPAEEKSEEKTEEVKEEAEEPKETIETESAAAAPPATTEEENKPAESVETPVEVPVEKTEA

SEQ ID NO: 167644 - protein, 114 aa, Glycine max
  unsure (1)..(114): unsure at all Xaa locations
  Clone ID: PAT_MRT3847_12239C.1.pep
VLNSRGPPTRRFDAQEENPSTVQEQILETLLVDHHSRSRVRSITCKAKIQTGRIPPDQHGSFCGKQLEDGRTLADYTSKRSHSPLVFVSGGMQIFVRPCXKDNTLESRARHIAT

SEQ ID NO: 167645 - protein, 74 aa, Glycine max
  Clone ID: PAT_MRT3847_1223C.1.pep
FIQDTDAIHSGQTERDDLIKPRLRLELIVFNEYVPYCASCPMLHDLSHACINGLITNIDHLDPYGRLRLSTYGL

SEQ ID NO: 167646 - protein, 54 aa, Glycine max
  Clone ID: PAT_MRT3847_122400C.1.pep
IYMSLLLCCTKLEICCNMIFEKLQQPAKGVTSCITYKKLSKWTKNTNQFLNILR

SEQ ID NO: 167647 - protein, 77 aa, Glycine max
  Clone ID: PAT_MRT3847_122401C.1.pep
VVPLQYHVAMVILVLALFLQSLQLSCHHLSRLGLHSLHNPHLRLVFHPHLVGARPAVLLAQHLNLNSVMRPNSRHPG

SEQ ID NO: 167648 - protein, 105 aa, Glycine max
  unsure (1)..(105): unsure at all Xaa locations
  Clone ID: PAT_MRT3847_122402C.1.pep
VHCLIYRKRHSYSTXSNQHMVVNTFGGKLVCQTTKKRASXLTCTVTGNRMQGIPHLRLAEYNRSRLPRNRKTVIRAYGGVLSWSCGRERIIRAYLDEEQEIAKMV

SEQ ID NO: 167649 - protein, 81 aa, Glycine max
  Clone ID: PAT_MRT3847_122403C.1.pep
SVDSYHFYVLLVRSSLTCVITFMSKTLTYDLESSSVYPTQSLTHRSYSLCLTFSLSLPPCATFYHLYKVYVFCCMDDNTCL

SEQ ID NO: 167650 - protein, 107 aa, Glycine max
  unsure (1)..(107): unsure at all Xaa locations
  Clone ID: PAT_MRT3847_122404C.1.pep
TFXAYVSSEFGXRSMYXXXXXXXVYHXIXLXIHHXXXHQYAXEXCFTRXXLKEXFKXAKDQAGSFXGXCFMVMXMXKXLXLXRIXXYWGXHXWLXGRAXXXKFRKQW

SEQ ID NO: 167651 - protein, 99 aa, Glycine max
  Clone ID: PAT_MRT3847_122405C.1.pep
SYIYIYIYIYIYIYILRELNFIITIGMAKKISEFLEKKLNLQDMGIKPLFFLLRFRRMGGAINKGGGSPHKMVKGRKKKSGGGMGLQNLLFPLAGSFLF

SEQ ID NO: 167652 - protein, 56 aa, Glycine max
  Clone ID: PAT_MRT3847_122406C.1.pep
ISIGVVHFRQTETITSAVHNSLISLYLSLSLSPVTILSSPLPFSFPPIFYIDISTN

SEQ ID NO: 167653 - protein, 124 aa, Glycine max
  Clone ID: PAT_MRT3847_122407C.1.pep
HFLWLQDRRNRKTNNANSYVNIFASLFLENVELEFPGEFRSHFLWFQDRPNRKPNNPNYFMNIFAPLFLEIVNLNFPGNSESHSLGFRVGLIRKPIIPISFLNILPPLFLEIVELDFPEGSFWS

SEQ ID NO: 167654 - protein, 31 aa, Glycine max
  Clone ID: PAT_MRT3847_122408C.1.pep
SLNVIQNSRGYIIPLCYVPTNIPNFGQRFFF

SEQ ID NO: 167655 - protein, 66 aa, Glycine max
  Clone ID: PAT_MRT3847_122409C.1.pep
FECRYMPKKRKDVAAKMALILQRVLCRHFFSRQKVALILQGVSYHTILFHLKGVFYFRHHESPNQH

SEQ ID NO: 167656 - protein, 62 aa, Glycine max
  Clone ID: PAT_MRT3847_12240C.1.pep
PSPLRYILTEGNLTLFSSYYSYRVSTLSFIRSTYINHSTNIQVLSCMLPNINVRQTFHSSGL

SEQ ID NO: 167657 - protein, 56 aa, Glycine max
  Clone ID: PAT_MRT3847_122410C.1.pep
HFLNSQDQKLQHLLLFISFLNILSFHCTTHYVFFSLQNMRKIYFSKICLGSSARNP

SEQ ID NO: 167658 - protein, 75 aa, Glycine max
  unsure (1)..(75): unsure at all Xaa locations
  Clone ID: PAT_MRT3847_122411C.1.pep
MSPPPTESNAMEDGKPMNGSDQAGSCFVEFCTNGLALEEKSCQEAXNLFGETKHILLSKFSPMGMECIEELIPLG

SEQ ID NO: 167659 - protein, 96 aa, Glycine max
  Clone ID: PAT_MRT3847_122412C.1.pep
QTPNTKGSPNELPPASAQNAEEGSEDTSKPIFTPLHCNKEKAISDREMVWDQSRTSSLKWNDEMIENWNVVNTPNATPNDTTPRSVLAPQNQQDRV

SEQ ID NO: 167660 - protein, 53 aa, Glycine max
  unsure (1)..(53): unsure at all Xaa locations
  Clone ID: PAT_MRT3847_122413C.1.pep
MGLDNKRSTFVNIVFADKRILFMXVLVYHMGALEKKMMKLIELPTRVTLPRLI

SEQ ID NO: 167661 - protein, 35 aa, Glycine max
  unsure (1)..(35): unsure at all Xaa locations
  Clone ID: PAT_MRT3847_122414C.1.pep
NLSLDLIKDLWSVLLYCKEALKXYXXXNIGYPNXT

SEQ ID NO: 167662 - protein, 87 aa, Glycine max
  unsure (1)..(87): unsure at all Xaa locations
  Clone ID: PAT_MRT3847_122415C.1.pep
PDLESRTQIFKIHTRTFNCERNIRLELLARLCQNSTGADITMRCTDVGVYAIPATLNTVTHKDFLDTSDKVIXGYHKLTATFTYMRY

SEQ ID NO: 167663 - protein, 57 aa, Glycine max
  Clone ID: PAT_MRT3847_122416C.1.pep
LPNKLVHTDLFLSHITYIKSCALVNKRGWAITLNLTRPFPIIISFIKGPTIIENLTH

SEQ ID NO: 167664 - protein, 98 aa, Glycine max
  Clone ID: PAT_MRT3847_122417C.1.pep
IICMIKKEGTSRSNVELRFEFGETKLVIGDGQLVFGIVFELEKSLWIRQVLLEANGLVVATIVEKLHAVARRRTLHLHLLYSLSFLHFCFLFFSFSLI

SEQ ID NO: 167665 - protein, 53 aa, Glycine max
  Clone ID: PAT_MRT3847_122418C.1.pep
PNLFLSLFRGREFCVFGWQVQKYIFIVFFYIFDNYFYNYYLLIMNVGKYISFH

SEQ ID NO: 167666 - protein, 57 aa, Glycine max
  Clone ID: PAT_MRT3847_122419C.1.pep
SAVLLKFPRGGFFLYRAEGFFKDSNGFFLKMFGFFPPILGFLVLYIAGISFFGGPNN

SEQ ID NO: 167667 - protein, 308 aa, Glycine max
  unsure (1)..(308): unsure at all Xaa locations
  Clone ID: PAT_MRT3847_12241C.1.pep
MTMTTIQSTPGSSGYLDLFPERKMSFFKNPYILGLSAVAGIGGMLFGYDTGVISGALLYIKDDFEGVRESELVQETIVSMAIAGAIVGAAGGGWMNDAYGRKKATLIADVIFIMGAIGMAAAPDPYLLILGRFLVGMGVGVASVTSPVYIAEASPSEIRGSLVSTNVLMITAGQFLSYIVNLAFTRVPGTWRWMLGVSAVPAHCSSFFLMXLFLPESPRWLFIKXRKNEAVHVLSNIYDFARLKEXVDXLTTQSDQEXQRKNSIKFXDVFKSKKSNLHYLXEAXLXAFQQFTGINTVMYYSPTIVQMA

SEQ ID NO: 167668 - protein, 96 aa, Glycine max
  unsure (1)..(96): unsure at all Xaa locations
  Clone ID: PAT_MRT3847_122420C.1.pep
MSSLYXPRNHFIQHVSYIMEGMAASRWKGWWIALTWTIWKHRNDIVFSNSSFNANRVMEDALFLVWTRMKNLEKDFTTHYNQWSSNLTQGFLCSKH

SEQ ID NO: 167669 - protein, 120 aa, Glycine max
  unsure (1)..(120): unsure at all Xaa locations
  Clone ID: PAT_MRT3847_122421C.1.pep
AXARIRLGFFPFTVTHIKQRPFSSLPFFPRLYSTLHWSWRGSLSLKVHPIYLYFFSIHMPTPYHISQQITTYFFLHHTPFFLFLKFFIFSKPLILILHHEPISTTSYLSFVFVFVFVVLH

SEQ ID NO: 167670 - protein, 153 aa, Glycine max
  Clone ID: PAT_MRT3847_122422C.1.pep
SFNLYLILVHYKWILLLLLLVTLLAFVKPFIFRWFTQFDMLSMFPLICRDNLVVPYLALLALFVLIMNAPGQHRVRESNYLGSATMFLILCCYFVLHIVYLTMHPPEKYPFLFEAIIMNLCFSQFVLVTLGCNIKQWLLNRPAKLEETEKKQI

SEQ ID NO: 167671 - protein, 57 aa, Glycine max
  Clone ID: PAT_MRT3847_122423C.1.pep
VLWSWGDRAIPLCHSRPQKGGNFTNIRMHMSFSSLSKVNVTCYDCYKLELLSSQCWM

SEQ ID NO: 167672 - protein, 217 aa, Glycine max
  Clone ID: PAT_MRT3847_122424C.1.pep
MLNKTLSFAMGCCSCFGFIRTPNRQSQRSKPTTNNNLCQEPLLDDDIEDEEGEPLYNDEVTNNSGDEGAEETRPKRSEEILNFRVENGMICRQFPVKETRKLVRSEDENGNKMINEYIRECKIGSGSYGKVALYRSSVDGKNYAIKAFHKSHLLKLRVSPSETAMTDVLREVLIMKMLEHPNIVDLIEVIDDPQSDNFYMVLEYVEGKGLYEESEAA

SEQ ID NO: 167673 - protein, 238 aa, Glycine max
  Clone ID: PAT_MRT3847_122425C.1.pep
VLIMKMVEHPNIVNLIEVIDDPESDDFYMVLEYVESKWVCEGTGHPCALGEETARKYLRDIVSGLTYLHAHNIVHGDIKPDNLLITRHGTVKIGDFSVSQAFEDGNDELRRSPGTPVFTAPECCLGLTYHGKASDTWAVGVTLYCMILGEYPFLGDTLQDTYDKIVNDPLVLPEDINPQLKNLIEGLLCKDPELRMTLGDVAEHIWVIGDDGPIPGYLCWCKRKSMVTEDSDGSDILD

SEQ ID NO: 167674 - protein, 79 aa, Glycine max
  Clone ID: PAT_MRT3847_122426C.1.pep
LFLTGHSFLYYFGPLIFFGVTIIVCMESNLVIAILWQPVLLWINRVVRSFVRLRGGNNWRGGLGSKTLGFHPTACFKKL

SEQ ID NO: 167675 - protein, 92 aa, Glycine max
  Clone ID: PAT_MRT3847_122427C.1.pep
EKGQWQTELSFQASAQKHFQKHHWPKWVPFRPAAGLKVAPLTFQREYFRASLVINTIERINQLLFSHGSKLLEGLEQEELGFGEGLEEEVAE

SEQ ID NO: 167676 - protein, 63 aa, Glycine max
  Clone ID: PAT_MRT3847_122428C.1.pep
RAGRAFFMRLCIDGVIQIRYVWALMKSLVLINCTLILYAAKLDAVTIAFNGWEFYTNLLVDGI

SEQ ID NO: 167677 - protein, 65 aa, Glycine max
  Clone ID: PAT_MRT3847_122429C.1.pep
FMLQSGSGTRKKALEQIWCTNFHSLTLSIQNPLYSDLILLSLFSACYKLFYITQTIFVVTTNNKS

SEQ ID NO: 167678 - protein, 116 aa, Glycine max
  Clone ID: PAT_MRT3847_12242C.1.pep
YGCEKTTEGAINFNEKLNTTSQNLKNMLPGLNLVVFDIYQPLYDLATKPSENGFFEARKACCGTGLIEVSILCNKKSIGTCANASEYVFWDGFHPSEAANKVLADELITSGISLIS

SEQ ID NO: 167679 - protein, 51 aa, Glycine max
  Clone ID: PAT_MRT3847_122430C.1.pep
LNTTPNPKSIKTEQLDNKTLFPTPYIIKHQNKQNCKSNLQEPSGQNFFQIR

SEQ ID NO: 167680 - protein, 47 aa, Glycine max
  Clone ID: PAT_MRT3847_122431C.1.pep
KRKHSLIEITGDSEEIKTTGHECSKKAINSFKTNTGYYEDTRSQHES

SEQ ID NO: 167681 - protein, 28 aa, Glycine max
  Clone ID: PAT_MRT3847_122432C.1.pep
RTVAGWLHRSIVSSCIKSLVLDTVARMN

SEQ ID NO: 167682 - protein, 67 aa, Glycine max
  Clone ID: PAT_MRT3847_122433C.1.pep
SSRTHYPKHTKAAGASEAMANTMPLMSHSSSRYCHDLKKDLILQLYSKISRPTVYKVSYQKVPTINL

SEQ ID NO: 167683 - protein, 60 aa, Glycine max
  Clone ID: PAT_MRT3847_122434C.1.pep
RERSKGYSKTVRKFPCIRKFYRLKKSNNFSLLKKTLIFFLNSIDRQRTTRPNRKHLEDYV

SEQ ID NO: 167684 - protein, 74 aa, Glycine max
  Clone ID: PAT_MRT3847_122435C.1.pep
QLAPFLFLAPHFFFFSFVVRHFPYAIRHILMADFWLSAMNRHPPLTTLLSPLAFTTFLSPHWPCGSPLTPFATP

SEQ ID NO: 167685 - protein, 396 aa, Glycine max
  Clone ID: PAT_MRT3847_122436C.1.pep
VKGLCMHGNLNQSLQLLDRLTKKGLVPNAFTYSFLLEAAYKERGVDEAMELLDDIIAKGGEPNLVSYNVLLTGLCKEGRTEEAIKLFRELPAKGFSPSVVSFNILLRSLCYEGRWEEANELLAEMDKEDQPPSVVTYNILITSLSLHGRTEQAFKVLDEMTRSGFKASATSYNPIIARLCNEGKVDLVLQCLDQMIHRRCHPNEGTYSAISMLSEQGKVQEAFFIIQSLGSKQNFPMHDFYKNLIASLCRKGNTYPAFQMLYEMTKYGFTPDSYTYSSLIRGMCREGMLDEALKIFRILEENDHRPDIDNYNALILGFCKAQRTDLSIEIFLMMVNKGCVPNENTYTILVEGLAFEEETDIAADLMKELYLKKVLSQSTVERLCMQYDIKELVATG

SEQ ID NO: 167686 - protein, 140 aa, Glycine max
  unsure (1)..(140): unsure at all Xaa locations
  Clone ID: PAT_MRT3847_122437C.1.pep
PRVRTILRSDLLANFLTEGIIRAGVDXQSTHRIKGMIKRVDTGGIPEKTCIDMACAMNRLFRGRANTDIHTVCSKDXRXWNPACTKAMTMILNANHRADAWSLEYIERTRYHCDIICVSGWTATSMRDAHVTIECGIYSH

SEQ ID NO: 167687 - protein, 67 aa, Glycine max
  Clone ID: PAT_MRT3847_122438C.1.pep
PLGSVDFRCPNGSPTVDSSLTRVMGNNMVKVIAWDSNEWGYSQRVLDLADIVAHKWKLDPPKFSMGI

SEQ ID NO: 167688 - protein, 146 aa, Glycine max
  Clone ID: PAT_MRT3847_122439C.1.pep
HHAYVFWCSEYGYTLKVDQKIDIYSYGVVLLELLTGKMPLDPSFEESIDIVEWIRKKKSNKALLEALDPAIASQCKHVQEEMLLVLRIALLCTAKLPKERPPMRDIVPMLGEAKPRRKSICHNGGQDSRSVEKPTIFTTSPIISLL

SEQ ID NO: 167689 - protein, 118 aa, Glycine max
  Clone ID: PAT_MRT3847_12243C.1.pep
TGAIRSIDDLDKDDHRRAFDRFKPGNFEKNLVVVDKLGALAKAKGVTPVQLILAWEIAQSKYIYPIPGSTRPEGVKESLQALEVNLSDADIKEVREVVDSADVVGGRYNDHAAASLEG

SEQ ID NO: 167690 - protein, 103 aa, Glycine max
  Clone ID: PAT_MRT3847_122440C.1.pep
AGDTPAGEERSPEAPGKHKAARTEKWREAATKERPRTEEQRSTKRPRPKETRETRPEDAHHGARKHKGPATGERRRQGATHSKRAKPKTETREGADNQGAEKR

SEQ ID NO: 167691 - protein, 43 aa, Glycine max
  Clone ID: PAT_MRT3847_122441C.1.pep
VVVLSKMYWNLIFFLISLKNISDISLEAFCSFSYSILYYSIGN

SEQ ID NO: 167692 - protein, 65 aa, Glycine max
  Clone ID: PAT_MRT3847_122442C.1.pep
KNPLWVTKLKRKFIINWTTTINGLMKPSHDHFSCLIPEIYSPRVSLKNQSHPFTKEKHTPQPPLP

SEQ ID NO: 167693 - protein, 133 aa, Glycine max
  Clone ID: PAT_MRT3847_122443C.1.pep
CPHLCPPKQTKAETKYSQKQAPANITQLFSSTQILGFSKQILNSSQMTKRREEISTCTYANQTHAIQQKGLPKHIPFTQPKTKCIHLGGGEVLNSKLASQLSLEASMLNLFMSSSIFLNQFPIRETKGSIHGL

SEQ ID NO: 167694 - protein, 75 aa, Glycine max
  Clone ID: PAT_MRT3847_122444C.1.pep
WPVVALFRALSSSFPSSPYQLPLRSLAICCTARVASFFWRQVISVISGFLYYLSGSKGHVCVEMLCLILSICFYN

SEQ ID NO: 167695 - protein, 123 aa, Glycine max
  Clone ID: PAT_MRT3847_122445C.1.pep
KKKKKKKKKKKKKKKKKKKKKKKKKKNKKKQKKKKQQKRGGPFKRTQVSFPWLATQYLFYGAPKIQFPARGFTPVGWENPWHSPIKCLWTKAPFPQLAYIQKGPNQTPFPKSGPTLKGQSGPP

SEQ ID NO: 167696 - protein, 104 aa, Glycine max
  unsure (1)..(104): unsure at all Xaa locations
  Clone ID: PAT_MRT3847_122446C.1.pep
VNARIQDKEGIPPDHQRLIFDGKXLEDGRTLADYIIQSESTLHLVLRLRGGIIEPSLQAIARKKNQDKMICRKCYARLHPRAVNCRKKKCGHSNQLRAKKKIKN

SEQ ID NO: 167697 - protein, 68 aa, Glycine max
  Clone ID: PAT_MRT3847_122447C.1.pep
CQASAHWYVTTASCWSISSVSMSYDPVLHNLVISDDHSNMLCAPVALFLASPGRTPRIRTSVSPVTTI

SEQ ID NO: 167698 - protein, 38 aa, Glycine max
  unsure (1)..(38): unsure at all Xaa locations
  Clone ID: PAT_MRT3847_122448C.1.pep
LLKLCGIGIFTICIHPMVYKTKLLNKGPXFLTCRNFYD

SEQ ID NO: 167699 - protein, 733 aa, Glycine max
  unsure (1)..(733): unsure at all Xaa locations
  Clone ID: PAT_MRT3847_122449C.1.pep
MASTFCLLHSPLYQFPSSSSSSSGPIKLRASTTSCLGQQDKEPLCNRRTVLLTSIALLPFRRLKRAPALESPPPPPPPTEETDVKTQEDNQEAEKAPEVDQPSNSFLLLLNGIGIFSSGVLGALYTLAQKEKSTAVATIETMSSKLKEKEELIVSLKKNYELKLLNKREEQAKLLEKAKEEQXATDKPTRNSANSTIKPLWGQELXNERSLIEDLKLQIGQLKTELSKTDTDKKDLENNLKEKIDSIGVLQERINLLSVDLKGKEDVVQNLNSFLAEKELQLKSLKSTYEQTKDDLINVQLQIQGLKDELLKTQEELEAKDSLVIELNSRVSSLTLENNNFRSKCDVMEKEYNVLKFSAEKKAALDSKVLREKDEELHQLKDQFELALGEASKSQIVIADLSQERDDLKEALDNESSKVNHLKQELQVTQENLAKSRNESAELENLLTLSNKLCKELELEVSKLSSELTEVNESLQRNLDDAKHEAEMLASELTTAKEHLKEAQAELQGVSKELTAALEKNDSLQKELVEVYKKAESTAEDLKEQKQLVASLNKDLQALEQQVSKDKESRKSLERDLEEATISLDEMNRNAVILSGELQRANSLVSSLEKEKDVLIKSLTNQRNACKEAQDNIEDAHNLIMKLGKERENLEKKGKKFEEELASAKGEILRLKSRINSSKVAVNNGPVQKDGGEKKVNPSKVAVNNEQAQKDEGENKVTVSARKTVRRRKANPQ

SEQ ID NO: 167700 - protein, 255 aa, Glycine max
  Clone ID: PAT_MRT3847_12244C.1.pep
RRRPGVADVSDLSANPVIRWQHRFYLPLIFGMGFAFPTLVAGLLWGDWRGGFFFAGAARLLFVHHSTFCVNSLAHWLGETPFDDKHTPRDHWITALVTVGEGYHGFHHQFPSDYRNAIHWAQWDPTKWFIWTCSKMGLAYNLKTFPHNEIEKGRYAMELKKVEKRGAALAWPVNPQELPVYTWDEFQEMSKNSGRALIVIAGFIHDVTTFMDEHPGGRGLIAYKVGKDATPAFFGGVYEHSRAAHNWLNMLRVGA

SEQ ID NO: 167701 - protein, 128 aa, Glycine max
  unsure (1)..(128): unsure at all Xaa locations
  Clone ID: PAT_MRT3847_122450C.1.pep
PRPEETDVKTQEDNQEAEKAPEVDQPSNSFLLLLNGIGIFSSGVLGALYTLAQKEKSTAVATIETMSSKLKEKEELIVSLKKNYSLKVLKQREEQAKLLEKAKEEQLALINQLNSANSTINRLXQELK

SEQ ID NO: 167702 - protein, 112 aa, Glycine max
  Clone ID: PAT_MRT3847_122451C.1.pep
PVTTINMAVPGEQRQINKGVPPATACNPPGADFGTNVLEPRQAGDLVDPSEKHMRNQHLSASDEKPHLGGEYPKYLGFSGDRLIWAITFFATLGFSLFGYDQGLMSGIIAFD

SEQ ID NO: 167703 - protein, 56 aa, Glycine max
  Clone ID: PAT_MRT3847_122452C.1.pep
LWREREEKGLSLKLPFSLPFLPEGGEKKKLGRLLISLICWGRKLELARGCVFYVWL

SEQ ID NO: 167704 - protein, 281 aa, Glycine max
  Clone ID: PAT_MRT3847_122453C.1.pep
MSNPLPVLPFPLPFQSISNNPLHLQGGAHPPLPPGRPPAPSQMIPHPNAGAFMPSQQPTVGYTNLISSLMSQGVISLANQLPAQDSVGTEFNPDILKIRHESAVNALYGDLPRQCTTCALRFKCQEEHSSHMDWHVTKNRMSKSRKQKPSRKWFVSDRMWLSGAEALGTESAPGFLPTETIEEMKDHEELAVPAEEDQNTCALCGEPFDEFYSDEMEEWMYRGAVYLNAPLGITAGMDRSQLGPIIHAKCRSESNMATSEDLGLDEKGADEEGSQRKRMRS

SEQ ID NO: 167705 - protein, 278 aa, Glycine max
  Clone ID: PAT_MRT3847_122454C.1.pep
MALKKLSAKRSRRDTAAEGTSSAPEFDSHRFRSAEHQQRFEAIKGWPFHGERRVQLRDDEYTDFQEEIAWGQWIPFDADALDQFLGDPLVLEEGQECEFSQRRNRADGFDEEAIAQLLCTPRQDFAQTAAGRRLVYAILTRMNVHVAQLIADAIYLFVGMPPTRHPLDPDKSNRALGFPALITGLCQSFRVPVTPSKAANHWGQAQIHECLYQLSLSQQGQGFAPFACPTPEHFRAEVAWPKAQAGEAPVGAPGDAEEARMDEEMTDLLSFLGGSRAT

SEQ ID NO: 167706 - protein, 117 aa, Glycine max
  unsure (1)..(117): unsure at all Xaa locations
  Clone ID: PAT_MRT3847_122455C.1.pep
FASIILCGDIRYTETTIFNCTDLNMLDVYYTLATXFTMILPHYXRWHXYTLLIYILPSFLTXAEIKYNRNLSYIHISGLLYDGGYKFWTKHEKNLAFTEEEKMDLITNRGITADVLA

SEQ ID NO: 167707 - protein, 252 aa, Glycine max
  unsure (1)..(252): unsure at all Xaa locations
  Clone ID: PAT_MRT3847_122456C.1.pep
MALYGTTLSFNGLSSTTKEFNILPYSLTGSFRKLHHVCLPSFTPNRLVLGKSFGRGDQLWLLPSHFPKLQMGRLRLGVKSEDSESILSSDNIALDEQTLEEELQHAIAEENXIXAAEIRDTLKNLQKDSKTPVCGANSRFYESFRTGDLAAMQALWAKRDGVCCVHPGLRGISGYDDVIESWNFVWANYEFPLEIKLEDIKVHARGDMGYVTCMEFVKTKGGRWGGQFVTNVFEKIDGQWFICVHHASPVDL

SEQ ID NO: 167708 - protein, 370 aa, Glycine max
  unsure (1)..(370): unsure at all Xaa locations
  Clone ID: PAT_MRT3847_122457C.1.pep
QLGRRGVRQRSTTGQLGANYSKPPLKVGGVVLYGGLPRGSVVPLLLSRRCDSLSSASSSYSSISDHVSFVKYVAATQPPQHLSQLLSILKTRGESIISPGARQGLIPLAIPLSKSSSGNVTALLRWPTAPPEMEMPVVEVRNYGVWLLAKYVDQFIHRMLVVTGGMIVQSRDELIYYSIFYAGRSXFRKADFAESGISNLDVYLLKKVGLFPDIIERKVARHFEEGDLVSALVTGEFYTKKEHFPGFARPFVFNSEVLLRVGRKVEAKDAARGALKSPWWTLGCKYQDVANIAQWDDEQIEYVKEKVTEEGRQEDLKKGKAPAQVVLDEAAFLLDLASIEGEWDEYLERIAKCYEEAGLHDVAKFILYRD

SEQ ID NO: 167709 - protein, 145 aa, Glycine max
  Clone ID: PAT_MRT3847_122458C.1.pep
GASSGLSYEEKPKPERFSKVLRKYLKLIKPLYVKVSKRYSDKVRFSGEGYAASPSSSPSVASVSSRTEKQGKGMRVVSKHLGKSRSASSTVAGVSSPAKKSDDTMQQQLDGIQSAILHCKRSFNSREGSMYSVRKSFDGEHGEKV

SEQ ID NO: 167710 - protein, 81 aa, Glycine max
  Clone ID: PAT_MRT3847_122459C.1.pep
APSADTVTSTLKKNSPIRRHIMLQKDASSSCSGELQLAKDESHGVPTFGSDTRDLYADRKQRRDRRTGGGDVWTTHLRWTI

SEQ ID NO: 167711 - protein, 81 aa, Glycine max
  unsure (1)..(81): unsure at all Xaa locations
  Clone ID: PAT_MRT3847_12245C.1.pep
IEPXXAXXFPPPLRVSCLQXTVXXXXTLPPWNPSXLSHLATPXSRVLWPKKVFFLFVQELFKGGNNGGKSNSWVQLSSYAL

SEQ ID NO: 167712 - protein, 69 aa, Glycine max
  Clone ID: PAT_MRT3847_122460C.1.pep
FTKGSPFPRTMWTFSVLARTRFIFSQFLESPLPLAPRVFQHFSTGKARFLTLRAIIGSVLFPPQWFTVN

SEQ ID NO: 167713 - protein, 89 aa, Glycine max
  Clone ID: PAT_MRT3847_122461C.1.pep
ASSSYLDRTVQGPVTTRRLCGVVRSRSLKQVASRLCCVLCNKCTNRLAKTCYKQCRHAYRKVFYPGTYKRIHKCYTPAGNVCQCSRYGM

SEQ ID NO: 167714 - protein, 108 aa, Glycine max
  unsure (1)..(108): unsure at all Xaa locations
  Clone ID: PAT_MRT3847_122462C.1.pep
MTATRRFSGDNRVTETTSINSRDLDIGAADDAMPPKFRRNVPQHIRXDPHTLVIYGDAAQVTXEMDLSRNQSQSQIPGXVYDGGHKLWTKHEXKRALTEDEQMEVIRK

SEQ ID NO: 167715 - protein, 234 aa, Glycine max
  unsure (1)..(234): unsure at all Xaa locations
  Clone ID: PAT_MRT3847_122463C.1.pep
MSCTLTILLFLAESVGGLDKLEDNSQQKPSSFSSDCHQDGECGPTERKVSPDKLYRAALLKNRFADTILKAREKTLTKGEKGDPEKLRQQREKLEIERQKERARLQAEAKAAEDARKRADAEAAAEARRRXELEREAARQVLLQMEKSVEINENSQFLEDFELLSAVPAEHYRVSVDETSPDISQDGMGSFKFGGGNPLEQLGLYIKDDDEEEEGDPLCVPNPPVNDIEEGEID

SEQ ID NO: 167716 - protein, 71 aa, Glycine max
  Clone ID: PAT_MRT3847_122464C.1.pep
EDLIGLFLFYLGDHLNNYNLMLIGMAGYVVFIAFQLPQDPPLKPANGHQPFTTIGPTGHASTGLFFCFPSR

SEQ ID NO: 167717 - protein, 64 aa, Glycine max
  Clone ID: PAT_MRT3847_122465C.1.pep
TLAFRCTSPTLPTGMARMSAKTANEHTCIHTILHEDYSDLNTNTNSNPYDKCYNYNLPYLNTKA

SEQ ID NO: 167718 - protein, 100 aa, Glycine max
  Clone ID: PAT_MRT3847_122466C.1.pep
MIVTPCLSALDKYTIKVDSITERRGGLNPSSLHQLQLHGPHVGQAAKIGLICSVIALTEAIAVGRSFASIKGYHLDGNKEMLSMGIMNIAGSLTSCYVAT

SEQ ID NO: 167719 - protein, 41 aa, Glycine max
  Clone ID: PAT_MRT3847_122467C.1.pep
RNCCRHSNLPSLITPTLQPFASSGQHCESSAAYFSWPTRLN

SEQ ID NO: 167720 - protein, 39 aa, Glycine max
  Clone ID: PAT_MRT3847_122468C.1.pep
ISTPFRPKLLRALVGGYLPWTFKRSFFGFFYKIDRGFKF

SEQ ID NO: 167721 - protein, 117 aa, Glycine max
  unsure (1)..(117): unsure at all Xaa locations
  Clone ID: PAT_MRT3847_122469C.1.pep
MSFSIGGGADPKNALIMNMPNAALSMGRYFVGDLVAVDAKHYYTYIXRTGYVLIAXGKLADDTTRXEAVTHMLAQFGEIHEIGVSKLSQXEEFLTVWTTQVRTVATLMADGCPYLYA

SEQ ID NO: 167722 - protein, 132 aa, Glycine max
  Clone ID: PAT_MRT3847_12246C.1.pep
VTIFYDCPPFTYLPPPHSITCGYAVPSIGEGFQDPRLEQCERRLHVPTDVPEVDYGGGKNSAVEKALDKGFEVKYTVSQDCTTCLGSERNCSRHDAHFYQNLCHYCPDGSHALHCSKSMSSILSSLLFSLNN

SEQ ID NO: 167723 - protein, 53 aa, Glycine max
  Clone ID: PAT_MRT3847_122470C.1.pep
PTRTAGLKKALFYIITQCFTLCPYAARFAITNLCTYTGWSTSVPVGDSLQLNP

SEQ ID NO: 167724 - protein, 50 aa, Glycine max
  Clone ID: PAT_MRT3847_122471C.1.pep
IHTSIKPFARKKKRFIHFLYVQEDIQETKGKINFRKTMVNTKNGPLIELM

SEQ ID NO: 167725 - protein, 83 aa, Glycine max
  unsure (1)..(83): unsure at all Xaa locations
  Clone ID: PAT_MRT3847_122472C.1.pep
TKTGKKVREAPKFQRLVTPFTLQRKRARFAPKKKRIVKAKSKAPGFPKLLASRLXKDQKIPPSXNLVKRRSQLSSGAKPTAPA

SEQ ID NO: 167726 - protein, 38 aa, Glycine max
  Clone ID: PAT_MRT3847_122473C.1.pep
VILGIMCRACINICLRMSMGCLWFLYKSLMFGFQKGFF

SEQ ID NO: 167727 - protein, 166 aa, Glycine max
  Clone ID: PAT_MRT3847_122474C.1.pep
YLHYSCVPRIVHRDIKPSNILLDEDLNAYLSDFGLARLLEVSETHATTDVAGTFGYVAPEYATTCRVSDKADVYSFGVVLLELMSGRKSLDPSFSEYGNGFNIVPWAELLMTERRCSELFVSTLWEAGPKEKLLGLLKLALTCTEETLSIRPSMKHVLEKLKQLKS

SEQ ID NO: 167728 - protein, 349 aa, Glycine max
  Clone ID: PAT_MRT3847_122475C.1.pep
MAPNLECRMYEAKYPEVDMAVMIQVKNIADMGAYVSLLEYNNIEGMILFSELSRRRIRSVSSLIKVGRIEPVMVLRVDKEKGYIDLSKRRVSEEDIQACEERYNKSKLVHSIMRHVAETLNIDLEELYIHIGWPLYRKYGHAFELLSKLHSMQAFKIIVTDPDTVLSTLTREVKEVGPDGQEVTSVVPAVSEEVKDSLVKNIRRRMTPQPLKIRADIEMKCFQFDGVLHIKEAMRKAEAVGNDDCPVKIKLVAPPLYVLTTQTLDKEQGILVLNNAIASCTEAIEQHKGKLVVKEAARAVSERDDKLLAEHMAKLRQDNEEVSGDEDSEEEEDTGMGEVDVDNGAGITE

SEQ ID NO: 167729 - protein, 339 aa, Glycine max
  Clone ID: PAT_MRT3847_122476C.1.pep
AAKLECGMYGAKYPEVDMAVMIQVKNIADMGAYVSLLEYNNIEGMSLFSELSRRRIRSVSSLIKVGRIEPVMVLRVDKEKGYIDLSKRRVSEEDIQACEERYNKSKLVHSIMRHVAETLNIDLEELYIHIGWPLYRKYGHAFEAFKIIVTDPDTVLSTLTREVKEVGPDGQEVTSVVPAVSEEVKDSLVKNIRRRMTPQPLKIRADIEMKCFQFDGVLHIKEAMHKAEAAGNDDCPVKIKLVAPPLYVLTTQTLDKEQGILVLNNAIASCTEAIEQHKGKLVVKEAARAVSERDDKLLAEHMAKLRQDNEEVSGDEDSEEEEDTGMGEVDVDNGAGITE

SEQ ID NO: 167730 - protein, 64 aa, Glycine max
  Clone ID: PAT_MRT3847_122477C.1.pep
LAHTVVVDAIAFVVVGQLGLDSCCFVSPHGMVLLLFMSLTPSPPLVNIRYELYVCFVCRFLCEV

SEQ ID NO: 167731 - protein, 132 aa, Glycine max
  Clone ID: PAT_MRT3847_122478C.1.pep
QTHRLRGLLHRIRPPMSPLRLCINTMAPKYANCLLITTFRTATRLPTGLPCTKPNRLPRIHLPLPSLTGHRHVRLSHWLSARHLTTSNCVYKGIITAILILGIRSLYIGLAVSSPLSSLHFLALRYSYVFSP

SEQ ID NO: 167732 - protein, 56 aa, Glycine max
  Clone ID: PAT_MRT3847_122479C.1.pep
GLVVNKLQFECRVWLTAVFGFLRLFYLVRCWLVIGDANGKRVMLKAAVRSHVNLVI

SEQ ID NO: 167733 - protein, 69 aa, Glycine max
  unsure (1)..(69): unsure at all Xaa locations
  Clone ID: PAT_MRT3847_12247C.1.pep
VFVNHFNIERYXPLRAPQCHLYVPAPLINKRDNFLVILELVSQTTEHVVPTVDEPDFICGYSGKSLHQL

SEQ ID NO: 167734 - protein, 101 aa, Glycine max
  Clone ID: PAT_MRT3847_122480C.1.pep
TIIADTWTDYTSEAIIYFLVSSPSRTVFHKCVDASAYFKNTKWLADLFDSVIQEFGSDNVGQMIMDGCVNYTAIAHHIVQMKRTIFVSSCGSQWLNLFYDE

SEQ ID NO: 167735 - protein, 103 aa, Glycine max
  unsure (1)..(103): unsure at all Xaa locations
  Clone ID: PAT_MRT3847_122481C.1.pep
GVQGTHTGANTGRATQIALNLGETKSQVSLMNDRVTEWWLKQSDCXETTXLKFVLFWDNIDIANTVESXLGRQAISFKYLERKDYYGKKPISKEGWEGIWNKM

SEQ ID NO: 167736 - protein, 83 aa, Glycine max
  unsure (1)..(83): unsure at all Xaa locations
  Clone ID: PAT_MRT3847_122482C.1.pep
PLKAKRALPFVGWGPPGFKGGFNSPPPPVVFGGALSKVQRAVCIISNPPRVVXVFGPLFPQFFFLFAQGAFFPWYVGDGMEKG

SEQ ID NO: 167737 - protein, 69 aa, Glycine max
  Clone ID: PAT_MRT3847_122483C.1.pep
VFFVYFFFYFLFCILSHHKQIFTLHLHLTRTQTLRPIVPLCVSNDCRGPFVGNLGQNLEHRNRVLFFGC

SEQ ID NO: 167738 - protein, 258 aa, Glycine max
  Clone ID: PAT_MRT3847_122484C.1.pep
MAGMVPLCIASLVTLFVATSARIPGVFNGGAWQGAHATFYGGNDASGTMGGACGYGNLYSQGYGVNTAALSTALFNNGLSCGACFEIKCDQDPRWCNPGSPSIVITATNFCPPNFALPSDNGGWCNPPRPHFDLAMPMFLKIAQYKAGIVPVSYRRVPCRKVGGIRFTINGFRYFNLVLITNVAGAGDIARVSVKGSKTGWNSMSRNWGQNWQSNANLVGQALSFRVTGSDRRTSTSWNVAPSHWKFGQTFTGKNFRV

SEQ ID NO: 167739 - protein, 90 aa, Glycine max
  Clone ID: PAT_MRT3847_122485C.1.pep
TKQKCYPLVEIAASNILAPTSGGGMPQIILILYSPQTHFAPNLLTPITLLEKIHGVLISFTMPTNLTSFYSKSTLVTLNFPSHLHPLILT

SEQ ID NO: 167740 - protein, 45 aa, Glycine max
  Clone ID: PAT_MRT3847_122486C.1.pep
RLFGLLHGLYVNMLSIVIFYDFVYSKFVHKELANHVVHDHKGRAM

SEQ ID NO: 167741 - protein, 214 aa, Glycine max
  Clone ID: PAT_MRT3847_122487C.1.pep
MEKTHSSSAEEQDPTRRHLDPPPGLTAEEFEDLKPSVLEHHTYSVTPTRQSSSLLAQRIHAPPHAVWSVVRCFDNPQAYKHFIKSCHVKEGFQLAVGSTRDVHVISGLPAATSTERLDLLDDDRHVIGFTIVGGDHRLRNYRSVTSVHGFECDGKIWTVVLESYVVDVPEGNTEEDTRLFADTVVKLNLQKLASVSEGMCGDGDGDGDGKGNKS

SEQ ID NO: 167742 - protein, 64 aa, Glycine max
  Clone ID: PAT_MRT3847_122488C.1.pep
YRPLSPLLKPRCIWPFYRGSQCSGFNAVTQVMLAKYQHSGNPAFTAIVQDLSGYPKEDRSLSSC

SEQ ID NO: 167743 - protein, 212 aa, Glycine max
  Clone ID: PAT_MRT3847_122489C.1.pep
MDKTHSGEEQDPNPTHPTRNHLDPPPGLTPEEFEDLKPSVLEHHTYSVTPTRQCSSLLAQRIHAPPHTVWTVVRCFDNPQAYKHFIKSCHVKEGFQLAVGSTRDVHVISGLPAATSTERLDLLDDDRHVIGFTIVGGDHRLRNYRSVTSVHGFERDGKIWTVVLESYVVDVPEGNTEEDTRLFADTVVKLNLQKLASVTEGMCGDSDGKGNN

SEQ ID NO: 167744 - protein, 93 aa, Glycine max
  Clone ID: PAT_MRT3847_12248C.1.pep
FQGPRFVSIAAFGAGRWEPKPTIRFLVGARGRHQNGNLIGNVGGGKRWKRQPRRRRRSWARERAKWGGGGWGSERRGKGGGGGRGDGGGSRRS

SEQ ID NO: 167745 - protein, 83 aa, Glycine max
  Clone ID: PAT_MRT3847_122490C.1.pep
MYHAYKDLCCTREGFLIVAVFPWSSRAGSCCYGCSTPFYIRSHTSVGPRETRTYNSTAAGFIRRPRFKTQKPPPRLVLSQSHS

SEQ ID NO: 167746 - protein, 45 aa, Glycine max
  Clone ID: PAT_MRT3847_122491C.1.pep
ANSDLTGNNLSALIARYVFKYPDLVHALTHNNHNHIQYNCTIPDF

SEQ ID NO: 167747 - protein, 52 aa, Glycine max
  unsure (1)..(52): unsure at all Xaa locations
  Clone ID: PAT_MRT3847_122492C.1.pep
LXIYGKENDEXNIMEDYFGGDEVLLFGKGKDVXNDFEDVGXSDXGRDMMEKK

SEQ ID NO: 167748 - protein, 310 aa, Glycine max
  Clone ID: PAT_MRT3847_122493C.1.pep
FGSRTFADFCLSLSYHHNSQSSETERDGERGGIQKQLQRWQQSGNVNVNVNVDANGELMYVKVMTDEQLETLRKQIAVYGTICEQLIEMHRTLSAQQDLAGVRLGNIYCDQLMTSGGHKITSRQRWTPTPVQLQILERIFDQGNGTPSKEKIKEITAELGQHGQISETNVYNWFQNRRARSKRKLQNVAPYSTESEVDTEVDSKNKKTKAEEEFQSQHNITTSGGAEKLCFQNPQVYSDHLHYLNPDSNKPYSMCQSDCNLKSTRNSSHVSVFNEMLSNSRSEYVGGKMEVAGSVSYNLFHQTGDCNLAG

SEQ ID NO: 167749 - protein, 120 aa, Glycine max
  Clone ID: PAT_MRT3847_122494C.1.pep
LGSPTPVLAIVPLIWANLPIDQGTPGTLVPGFIDPMCAAFNDCFSFWYLVLVRLGLVQASRETLPHVQAPGHGTWYLRKSHQYPTPHTHYLPSLIQTTTPQPTSPYNTTSVTGPWTVRSR

SEQ ID NO: 167750 - protein, 49 aa, Glycine max
  Clone ID: PAT_MRT3847_122495C.1.pep
AFWWMISQRRRRWGDTPANGGERAEARVPRRRRGRFFEPLKGYVSHFAA

SEQ ID NO: 167751 - protein, 76 aa, Glycine max
  Clone ID: PAT_MRT3847_122496C.1.pep
QFSSFILPPTGRLLDSSENLPLIQQKITLFLLQWSFYLFFKILPCTLHPTLVKKINKKPPPEQDLKCLKARKAPLI

SEQ ID NO: 167752 - protein, 49 aa, Glycine max
  Clone ID: PAT_MRT3847_122497C.1.pep
GFQASKEAPKIKMLKELQEWIVHLYLDYVESRLPYYCRTIRFLKRANLI

SEQ ID NO: 167753 - protein, 141 aa, Glycine max
  unsure (1)..(141): unsure at all Xaa locations
  Clone ID: PAT_MRT3847_122498C.1.pep
SWASMGVLIQTTTLIYIFLSSLSFKMSTHVGNKLGAQNPQRAKLETIVDLYXILCLAFLHWHSLFTLDEEVIALTTIMLPIIGHYELGNCPQTTMAALSKKLMVKRVSLSLGLRDGMPQSMIPPPFCRLLAAVRTRGRTRG

SEQ ID NO: 167754 - protein, 48 aa, Glycine max
  Clone ID: PAT_MRT3847_122499C.1.pep
YGGKVVARHSYRSRICTFHTFTRIIHLGWHQMPCLMSPTRINVDSLDF

SEQ ID NO: 167755 - protein, 26 aa, Glycine max
  Clone ID: PAT_MRT3847_12249C.1.pep
SHKLADRRGPNTRRRLVFKNRRVAWA

SEQ ID NO: 167756 - protein, 76 aa, Glycine max
  Clone ID: PAT_MRT3847_1224C.1.pep
SLCMFLLHLSNDLIPPCCSIFQEMPFKNFPLLFLKRSPLYVVNPASARYNSNSYLPFLTTIFHLCTFFATTGYSNE

SEQ ID NO: 167757 - protein, 51 aa, Glycine max
  unsure (1)..(51): unsure at all Xaa locations
  Clone ID: PAT_MRT3847_122500C.1.pep
MGRKFFVGGNWKCNGTTEEVKKIXXTLNEAKVPGXDXVXXXVSXPFXFXPL

SEQ ID NO: 167758 - protein, 48 aa, Glycine max
  Clone ID: PAT_MRT3847_122501C.1.pep
TRPHLVRTLHSTCLYLRESPPVLYLSEACSTCQDCMLLNILICLTSTT

SEQ ID NO: 167759 - protein, 111 aa, Glycine max
  Clone ID: PAT_MRT3847_122502C.1.pep
KKQKFHPGGTPGVAPENTKHNPGGNNCFIKGGNLKQGIQKNKNSSLEKKKNRPKSQKKKAPDKKNKHQGGHKGQQHPKQRLEKNPHFHKEKTIHQPSKKKHTNPRERRPMP

SEQ ID NO: 167760 - protein, 54 aa, Glycine max
  unsure (1)..(54): unsure at all Xaa locations
  Clone ID: PAT_MRT3847_122503C.1.pep
GYGVFSCYNISQIKASDYIXWLVASVHLFKVFRVGRLIISSISALSFPVPNYLK

SEQ ID NO: 167761 - protein, 47 aa, Glycine max
  Clone ID: PAT_MRT3847_122504C.1.pep
QSSHATKISLALCFASESLPERQHPSSFTVCHYIMVRRHFGLNDSIA

SEQ ID NO: 167762 - protein, 57 aa, Glycine max
  Clone ID: PAT_MRT3847_122505C.1.pep
HLCSDPPTMQVLFFASIWHHSLWVLRAFPLPPLRMVIVSHRLLFATWQFCRCLPGST

SEQ ID NO: 167763 - protein, 58 aa, Glycine max
  Clone ID: PAT_MRT3847_122506C.1.pep
TFKVCDQVKECLAFGFLNVTPQQSFIFLIMFGGILNSYKSVRDKLFILHLISEPTCMI

SEQ ID NO: 167764 - protein, 97 aa, Glycine max
  Clone ID: PAT_MRT3847_122507C.1.pep
KKTEAAQDQAQHKLQFFHLHTKIHSLPFYKLSRTPQQNKTISLTQLTHYTSTKLIKKYINHTYKPSLPVYILSTTPPKSNNKTPFIHYQSITITHIH

SEQ ID NO: 167765 - protein, 75 aa, Glycine max
  Clone ID: PAT_MRT3847_122508C.1.pep
RVCTSFMAFKPGPNHTLALIQSMFDVLPGDITVEGTGWGYMFIRKNCSCAAGIKNYVSNTTFTVKSNEGLLYDMV

SEQ ID NO: 167766 - protein, 103 aa, Glycine max
  Clone ID: PAT_MRT3847_122509C.1.pep
YLKTLPHSMCDMMRLQYIDISQCVDLTCSPEKIGKLVSLEKIDIRDCSMFINVPESPGSIQSLRLVICHDKVFGLCKEVAKPHIVHYSSIKATLSFARGPRGS

SEQ ID NO: 167767 - protein, 53 aa, Glycine max
  Clone ID: PAT_MRT3847_12250C.1.pep
VGISSGAAAAAAINLARRPEHSGKLIVVIFPSFGERYISTALFHSIYEEVQKM

SEQ ID NO: 167768 - protein, 57 aa, Glycine max
  Clone ID: PAT_MRT3847_122510C.1.pep
PRVRKKKKKKKKKKKKKKKKKKKKKKKKKKKKKKKKKKKKKKKKKGRPLKEPKLTSP

SEQ ID NO: 167769 - protein, 188 aa, Glycine max
  Clone ID: PAT_MRT3847_122511C.1.pep
MASTTLTTLTLRTLSYPTPSSSYPTHLSAKPSSLQFPNLSHRAATTRRPRVVVSAVEAPEKITKLGDEIAGLTLEEAKNLVDFLQDKLGVSAAAFAPVAVAAGAGGAVADAPAVVEEKTEFDVVIEEVPSNARIAVIKAVRALTNLALKEAKELIEGLPKKFKEGISKDEAEDAKKQLEEAGAKVTIA

SEQ ID NO: 167770 - protein, 33 aa, Glycine max
  Clone ID: PAT_MRT3847_122512C.1.pep
EHTYTSLCYLLQMPLCLTGAFLTSKFLRISNPS

SEQ ID NO: 167771 - protein, 71 aa, Glycine max
  Clone ID: PAT_MRT3847_122513C.1.pep
NLGLGGIQLPNLIPLLFHNIQLSGDTTIIYYPIQFETFTSTLKNLTKICLNSFPSPHSPIKYHTLHLLCTP

SEQ ID NO: 167772 - protein, 139 aa, Glycine max
  Clone ID: PAT_MRT3847_122514C.1.pep
MALPSPASEEAEGPCQEANQEYQEPVCSPVPEPEPEPEPEPEPEPEPVPVPPPEPQPEPEPQPLPDPAPLPVLGFEAEPVQEPEPTPTVETRGTARGFQPPEGGFGWIVVFAATWCNGSIFGIHNSVGILYSMLLEEEP

SEQ ID NO: 167773 - protein, 236 aa, Glycine max
  Clone ID: PAT_MRT3847_122515C.1.pep
MRVVCCSNSGVSAFPSCLRFPPLIAISTTPSSIRFLNSPPLRSTASSQHVTIMASKNSQQDTRLARIASAIRVIPDFPKPGILFQDITTLLLDTKAFKDTIDLFVERYRDQNINVVAGVEARGFIFGPPIALAIGAKFVPMRKPNKLPGEVISEEYSLEYGTDKMEMHVGAVQPGERALIIDDLIATGGTLGAAIKLLERVGVHVVECACVIELPELKGRERLGDKSLFVLINGGA

SEQ ID NO: 167774 - protein, 235 aa, Glycine max
  Clone ID: PAT_MRT3847_122516C.1.pep
MRVVCCSNSGVSATLPSFPCPRFPPLIAISSIRFLNSTPLRSTASPRQVTRMASKNAQQDTRLARIASAIRVIPDFPKPGILFQDITTLLLDTKAFKDTVDLFVERYRDQNINVVAGVEARGFIFGPPIALAIGAKFVPMRKPNKLPGEVISEEYSLEYGTDKMEMHVGAVQPGERALIIDDLIATGGTLGAAIKLLERVGVHVVECACVIELPELKGRDRLGDKSLFVLIKGGA

SEQ ID NO: 167775 - protein, 87 aa, Glycine max
  unsure (1)..(87): unsure at all Xaa locations
  Clone ID: PAT_MRT3847_122517C.1.pep
FSCEVGMIPYWMEWTGAANRYLRKGDDDERSDHADGEGXLPSMLWARXVETIDSHGGGEPKMAHEETHPLRACCSRTAMGSKDSRSD

SEQ ID NO: 167776 - protein, 57 aa, Glycine max
  unsure (1)..(57): unsure at all Xaa locations
  Clone ID: PAT_MRT3847_122518C.1.pep
GSSSLEVYSSDTIDYGXGKIQDTERIPPDQLRLIFAGKQLEDGLTFADYNIQKESSF

SEQ ID NO: 167777 - protein, 148 aa, Glycine max
  Clone ID: PAT_MRT3847_122519C.1.pep
MASKNSQQDTRLARIASAIRVIPDFPKPGILFQDITTLLLDTKAFKDTIDLFVERYRDQNINVVAGDEARGFIFGPPIALAIGAKFVPMRKPNKLPGEVISKEYSLEYATDKMYMHVVECACVIELPELKGRERLGDKSLFVLINGGA

SEQ ID NO: 167778 - protein, 623 aa, Glycine max
  Clone ID: PAT_MRT3847_12251C.1.pep
LNAELPACLPVLVDRMGNEITRLTAVKAFAVIAASPLRVDLSCVLEHVVAELTAFLRKANRALRQATLGTLNSLIVAYGDKIMLSAYEVIIIELSGLISDSDLHMTALALELCCTLMGDKRSNQSIGLAVRNKVLPQALTLIKSSLLQGQALSALQNFFAALVYSANTSFDSLLESLLACAKPSPQSGGIAKQALHSIAQCVAVLCLAAGDQKCSSTVKMLTDILKDDSSSNSAKQHLALLCLGEIGRRKDLSTHAHIENIVIESFQSPFEEIKSAASYALGNIAVGNLPKYLPFILDQIDNQQKKQYLLLHSLKEVIVRQSVDKAEFQESSVEKILNLLFNHCESEEEGVRNVVAECLGKIALIEPVKLIPALKVRRTSPAAFTRATVVIAVKYSIVERPEKIDEIIYPEISSFLMLIKDNDRHVRRAAVLALSTFAHNKPNLIKGLLPDLLPLLYDQTIVKQELIRTVDLGPFKHIVDDGLELRKAAFECVDTLLDSCLDQVNPSSFIVPYLKSGLDDHYDVKMPCHLILSKLADKCPSAVLAVLDSLVDPLQKTINFKPKQDAVKQEVDRNEDMIRSALRAIASLNRISGGDCSVKFKNLMNEISKSQTLWDKYYSIRNE

SEQ ID NO: 167779 - protein, 38 aa, Glycine max
  Clone ID: PAT_MRT3847_122520C.1.pep
EKKKKWLGFIDKSQYKRLKLHSTIKFPNITSHLILTET

SEQ ID NO: 167780 - protein, 70 aa, Glycine max
  Clone ID: PAT_MRT3847_122521C.1.pep
ERHGSCLWGCQFTNDIEDYIYKGILLLPIVFRKGCNIDSNLKEEFFFYCRTYSCHYKLTPDFDGVIYLLF

SEQ ID NO: 167781 - protein, 85 aa, Glycine max
  Clone ID: PAT_MRT3847_122522C.1.pep
MAAAASPVLPQELIVEILSWLPVKPLMRFRCVSKAWYSLIFHPSFIKLHLQRLPKNTHVLLTFDNYQCLTCFTPCSIRRLLENPS

SEQ ID NO: 167782 - protein, 61 aa, Glycine max
  Clone ID: PAT_MRT3847_122523C.1.pep
SKGNSRFASFNMPQNTSSREHSKAPTSAPSRSALYCTFLISLPSLTTDTFPFSSLLSFSIC

SEQ ID NO: 167783 - protein, 349 aa, Glycine max
  Clone ID: PAT_MRT3847_122524C.1.pep
MKKKSSIKAELWHACAGPLVKLPPSGTHVIYFPQGHSEQVSASLNRDVHSQIPNYPNLPSKLLCLLHTLTLHADPQTDQVYAQITLQPLPSFDKDALLRSDLALESTKPPPDFFCKQLTASDTSTHGGFSVPRRAAEKIFPPLDYSMQPPAQELVARDLHDTVWKFRHIYRGQPKRHLLTTGWSLFVSGKRLFAGDSVLFIRDEKQQLLLGIRRANRQPTNISSSVLSSDSMHIGILAAAAHAAANNSPFTVFYNPRASPSEFVIPLAKYYKSVYSKQASLGMRFRMMFETEDSGTRRHMGTVTGISDLDPVQWKNSQWRNLQVGWDESTAGEKRNRVSIWEIEQLLHF

SEQ ID NO: 167784 - protein, 43 aa, Glycine max
  Clone ID: PAT_MRT3847_122525C.1.pep
FFFFFFLRKISNLLSMKKYKSYIKNTIYTWLTLNRRILYATAV

SEQ ID NO: 167785 - protein, 96 aa, Glycine max
  Clone ID: PAT_MRT3847_122526C.1.pep
QQLLQPSRQQSASWRSLVNGSSSCGPSATSLQSPSPTTGSQHMVTPIRPGYSASVFPSNVSARSPIINPISLSVGNPQAGGGQIRAPAPHLQPYRP

SEQ ID NO: 167786 - protein, 127 aa, Glycine max
  unsure (1)..(127): unsure at all Xaa locations
  Clone ID: PAT_MRT3847_122527C.1.pep
IFVDGVYLVSQLPSEAVVVNVTRGRERDGLPTAAWTSFAVNDRSXSDIIKRIRSALGKGKKIVFLAXVDPFPEALLAVLFGVKNGILSSPPPNQMLTRLLENCKSLKYLVHECPFAICGIVCNILFT

SEQ ID NO: 167787 - protein, 85 aa, Glycine max
  unsure (1)..(85): unsure at all Xaa locations
  Clone ID: PAT_MRT3847_122528C.1.pep
CRPKRDVLMLPMGWHDAGTYDAKTKTGGPNGSIRNEEEYSHGANNGXKKAIDFCEEGKEKHPKMSYAGLYHFSXKIALSKNGGPT

SEQ ID NO: 167788 - protein, 39 aa, Glycine max
  Clone ID: PAT_MRT3847_122529C.1.pep
DSPNIQVTSNTMSSSNKLRNSCIFVVYNSILHTAVKCQN

SEQ ID NO: 167789 - protein, 72 aa, Glycine max
  Clone ID: PAT_MRT3847_12252C.1.pep
YIIALAGYDPRVAPKVYEELGKFAGYSTFGDYFSTHPSGIQRAELLAQAKIMEEAFSIYRDVRAGRRVEAFL

SEQ ID NO: 167790 - protein, 86 aa, Glycine max
  Clone ID: PAT_MRT3847_122530C.1.pep
LFFFFFFFFLFFFFFFFFFFFAGESYGKKNIKGATLKNPHHIAGEGRALGLPPLGGLDHSPGEARPPLAEVPIGTRLKKPVIPTPF

SEQ ID NO: 167791 - protein, 94 aa, Glycine max
  unsure (1)..(94): unsure at all Xaa locations
  Clone ID: PAT_MRT3847_122531C.1.pep
GRWVRKQVHINIVVIAPVDSGXLTTTGHLLYMLGRIDKRAIDRSDKDAAQMHNTAYEYAWVLDQLIAXRERRITIDLALWKFETTQYYCTDIDA

SEQ ID NO: 167792 - protein, 64 aa, Glycine max
  Clone ID: PAT_MRT3847_122532C.1.pep
PDNAKGRDDERDEDYGTYSLERDLASLPHHQLGRSRFIRGSAFEALPFFFYFPLLSSSHDHAST

SEQ ID NO: 167793 - protein, 56 aa, Glycine max
  Clone ID: PAT_MRT3847_122533C.1.pep
MVNKLNPLPIGFLSFFFFWQWKCLVYYNRSANFPTNKIKLSREDQHMDEKLWKDLR

SEQ ID NO: 167794 - protein, 90 aa, Glycine max
  unsure (1)..(90): unsure at all Xaa locations
  Clone ID: PAT_MRT3847_122534C.1.pep
FXXNKNQIQSTKIFLYDNVQCNKPDSILRDTKLKLHFCITKWNTQTQRPQTVGTHHNLIKTRYSANVGKLNSSLTSTHSNRTQLKTHSQI

SEQ ID NO: 167795 - protein, 62 aa, Glycine max
  Clone ID: PAT_MRT3847_122535C.1.pep
SLDRMGEIGATHCNFLLDRILLAAMDRAYCINTALDHNINPRRVHEEGTKGGESQRPCMGMT

SEQ ID NO: 167796 - protein, 68 aa, Glycine max
  Clone ID: PAT_MRT3847_122536C.1.pep
QLREGPRHVLHHGEVIPSHALKLRRRRRWCLHLRRRSGGFLRLLEGCFFLLVLIGDEEENGGCGSGGA

SEQ ID NO: 167797 - protein, 404 aa, Glycine max
  unsure (1)..(404): unsure at all Xaa locations
  Clone ID: PAT_MRT3847_122537C.1.pep
MATSLCTPSYRVTLKLYGTDSHKLNAKPSVRYRRRFGTTTRICCTSNNYNDNNIQRRPQSEAIQVYSQIERLLTDSVRQSQDGWWGSPDWSEVEGAWILKPKSSEPNYVVHFIGGIFVGAAPQLTYRRFLERLSEKGILIIATPYASGFDHFLIADEVQFKFDRCYRTLQETIQDLPIFGVGHSFXSVVHLLIGSRYAVQRSGNVLMAFNNKEASSAVPLFSPVIVPMAQTIGPLLSDIFSSPTLRAGAEMTLKQLENVSPPIMKQVLPLVEQLPPLYMDLVKGREDFSPKPEETRRLVLSSESAISSVLDMSIRKLPGDHGLPLQQALPNVPPAMADAVNRGSELLSNLTVGTPWEIVAKEVGNSLGMDSGVLRAEVSKDMDMLVDVIAAWIASNAGPKLLRP

SEQ ID NO: 167798 - protein, 202 aa, Glycine max
  Clone ID: PAT_MRT3847_122538C.1.pep
TIGPLLSDIFSSPTLRAGAEMTLKQLENVSPPIMKQVLPLVEQLPPLYMDLVKGREDFSPKPEETRRLIKSYYGISRNLLIKFQDDLIDETSTLAQVLSSESAISSVLDMSIRKLPGDHGLPLQQALPNVPPAMADAVNRGSELLSNLTVGTPWEIVAKEVGNSLGMDSGVLRAEVSKDMDMLVDVIAAWIASNAGPKLLRP

SEQ ID NO: 167799 - protein, 235 aa, Glycine max
  Clone ID: PAT_MRT3847_122539C.1.pep
MLRILFGTVDQLGCRQPMVEVGNIEQLQSNTTVRHKTQSFDFDEISANSPPWPPVNNSLAQNYGEDDKESGSGEWVDKVMVNKQDVNKTENLLGCWQAANNGNLSEAFYQKYIEDSPKMYSEQSYTMFMGANQFNIAGSDDIMDELDAATSDSSEPDLLWQFNHSKLSSVTNGIGSKTMRSISKAAKNSPELSKNAVHSSPLGPSPSLKNSNGVPHRSGRHPAPVDVKRRTGNRK

SEQ ID NO: 167800 - protein, 85 aa, Glycine max
  Clone ID: PAT_MRT3847_12253C.1.pep
DLRIVVFPDPTIQDQAKYWKCNRMDTHTWRQMYQDTSSNMAYVTRHNIRYKVEPVRIHRLATHQLMYNPIRHRRSTRRSQDLDRL

SEQ ID NO: 167801 - protein, 118 aa, Glycine max
  Clone ID: PAT_MRT3847_122540C.1.pep
RLELKAHLSEDAFVTCALIDMYAKCGCMEQSQNIFDRVNEKDEAVWNVIIAGYGIHGHGLKAIELFELMQNKGGRPDSFTFLGVLIACNHAGLVTEGLKYLGQMQNLYGVKPKLEHYS

SEQ ID NO: 167802 - protein, 139 aa, Glycine max
  unsure (1)..(139): unsure at all Xaa locations
  Clone ID: PAT_MRT3847_122541C.1.pep
GCWQAASNGTYXEAFYQKYLKDSPKMYSEQSDNMFMGANQFNIAGSDDMDELDAATSDSSEPDLLWQFNHSKLSSVTNGIGSKTMRSKAAKNSPELSKSAVHSSPLGPSPSLKNSNGVPHRTGRHTAPVDVKRRTGSRK

SEQ ID NO: 167803 - protein, 89 aa, Glycine max
  Clone ID: PAT_MRT3847_122542C.1.pep
NKIFSPHTTTTEKIETSFTESSSAGLMVGAPFVHPSCMKTLYYYYPDIHLHATSTSLVQIHQRNLRERVEESQSPYLALKLGTSQQDLR

SEQ ID NO: 167804 - protein, 90 aa, Glycine max
  Clone ID: PAT_MRT3847_122543C.1.pep
NYRLTKRKGEKLGVSFLTLGSPKWEDRNSPEEENPVMDSRNQVGNQLNETRPNPAICKHEFSLLGIAKLLHLTSTSTKTQFLLHCRLGMF

SEQ ID NO: 167805 - protein, 84 aa, Glycine max
  Clone ID: PAT_MRT3847_122544C.1.pep
QLWKLGVNFFIILKTKLIDVIVLRINLIRRVILINQTACHGENGESVSNNAGILHAVIDLHKIGLSPKAHPFTLCHSSIHSFTG

SEQ ID NO: 167806 - protein, 161 aa, Glycine max
  Clone ID: PAT_MRT3847_122545C.1.pep
QMKANLGKMEDPKSDKMNYPKNYATLYDLFGGLLSVAALIGKMPSENNQHDTENPSTNKYTFGFGTSQVGFLPPNYATFQQFVRSAYVHTLGLSGAELKEIKKTKKRHQWSSQLLKALLKRPYAAFTGSGGKPTDMEVEADMYNVYSQYKQGETTGLGGLE

SEQ ID NO: 167807 - protein, 75 aa, Glycine max
  Clone ID: PAT_MRT3847_122546C.1.pep
VGTFPRATKLSVVAVLSPPRALGGRCFLEGALSIVMYLSCWGPSLICAPLTKKFVSRFQSRSQPGLCSLPGLLVF

SEQ ID NO: 167808 - protein, 224 aa, Glycine max
  Clone ID: PAT_MRT3847_122547C.1.pep
RLRSAPLRHSLPSISSAPFHRTAIRLRHHSCSAALQVVKNTRQRTFKFPFWHQRSSTYGRFAYQDVSSDESDVEFAGSSSHNQQLGDSTHENIDEWRWKLTMLMRNKDDQEVVSREKKDRRDFEQLSTVASRMGLYSRQYARVVVFSKAPLPNYRPDLDDKRPQREVVLPLGVHKEVDAHLLAHLSQKARNKWGSLSDSLHKSRDSRSIPANEGMYEQPEPMTH

SEQ ID NO: 167809 - protein, 157 aa, Glycine max
  unsure (1)..(157): unsure at all Xaa locations
  Clone ID: PAT_MRT3847_122548C.1.pep
GIRNWNEESTCHVASGTLYGALLGNADWVIPEAVECXASVEYLEGYCGRGSMRKISFVGDGESKXGRTLYNHLTKDTSXYCCRVRGGVGLPDTWEKITSRCTXVVGPSDGXAWKLTVRYLAXGDALAILDELTMGKVRFDAHFQAREVCLVCNAHYD

SEQ ID NO: 167810 - protein, 104 aa, Glycine max
  unsure (1)..(104): unsure at all Xaa locations
  Clone ID: PAT_MRT3847_122549C.1.pep
SRHASSKFCVGQRIAGNKWAPDAGPFRALNRFPXRADRQLNPLIHKSNSCFLYNXYGLVKMPYNMFCRSSKYEQSFSLIPSSIIYLRTQWMLKCCYRFLNKCRH

SEQ ID NO: 167811 - protein, 123 aa, Glycine max
  Clone ID: PAT_MRT3847_12254C.1.pep
YTLYGYSLQNIFVFRSLESKLESLMAGKNEKKDDRHVDKGLARPKLHVASQILERVESSTKETSKDGLSAGSFTHETRTNWSPECPVPARSVEDMETKPEVSHSTEQAKVLNVDNRAHTIYEG

SEQ ID NO: 167812 - protein, 151 aa, Glycine max
  unsure (1)..(151): unsure at all Xaa locations
  Clone ID: PAT_MRT3847_122550C.1.pep
FFYGHTSPRKCIYLIVYVDDIIIRKNAAAAISQLKKHLFRHFKTIDLGCLXSLKYFLGIEVAQSNKGIVISQRKYALDILNETGMSGXDSPMNSNQKLMAEQGEPLSDPERXRRLVGKLIYLTITRPDISYAVGAVSQFMQNPYTNHWNAV

SEQ ID NO: 167813 - protein, 118 aa, Glycine max
  Clone ID: PAT_MRT3847_122551C.1.pep
RGRTARTFQKNFLGGKKNKQYPPLPLGLWGGEKRDPQKFSVPKPKTGEKQKNFKGQNFWGREKKNPRFGKVFLLKPPKKRGDPYQKKTFNIFKTQTLGVKKNNPRGSPLPFISKLVFG

SEQ ID NO: 167814 - protein, 60 aa, Glycine max
  Clone ID: PAT_MRT3847_122552C.1.pep
FRGLRSSSLSAQGRVWLGIIFQSEFLLLLLFKENLKIRQKKKSLFDMQLHYILRYEKVSE

SEQ ID NO: 167815 - protein, 84 aa, Glycine max
  Clone ID: PAT_MRT3847_122553C.1.pep
IDQMKDTLVTCTTHLQSRSSSLIMHLSLCCSSILNTSGFPLMVLPHSIPDLSTTIILSSPHMIAQDVNTFPIFTKTENDFYREN

SEQ ID NO: 167816 - protein, 57 aa, Glycine max
  Clone ID: PAT_MRT3847_122554C.1.pep
ATIEELQGCSHNPTGVDPTLVQWGHTGHMIRATALLPIFDRADQGYVRGSTHGGAQA

SEQ ID NO: 167817 - protein, 46 aa, Glycine max
  Clone ID: PAT_MRT3847_122555C.1.pep
PFTHQTGPAQTSPSLDKVCQCQVACSLNFQECRRIFSSTIKVEMVP

SEQ ID NO: 167818 - protein, 94 aa, Glycine max
  unsure (1)..(94): unsure at all Xaa locations
  Clone ID: PAT_MRT3847_122556C.1.pep
HEATAAAAAXLELEPSGAIKKLGREPILRDSWRDSNGTPKIFYLPTLGTNTICISLLGRSKKXTGNAREKXXIEHHRIPSHPSHRAQNTPIRPI

SEQ ID NO: 167819 - protein, 116 aa, Glycine max
  unsure (1)..(116): unsure at all Xaa locations
  Clone ID: PAT_MRT3847_122557C.1.pep
MAGEDYTFKXAMIVDARARNISHNVTCTESGSQSIEDSQAYIAILLRKLILDEIQSGKTDKDIYNKLADXFTETVLYTPNFDMQTTPIWLLPLLIASSAARVWAYNMHKQKTNVHI

SEQ ID NO: 167820 - protein, 34 aa, Glycine max
  unsure (1)..(34): unsure at all Xaa locations
  Clone ID: PAT_MRT3847_122558C.1.pep
KLLTDPRXDLKLSHAKIALPINTAGRNHSSVGTL

SEQ ID NO: 167821 - protein, 79 aa, Glycine max
  Clone ID: PAT_MRT3847_122559C.1.pep
VPKATYFVRAYALDSNDAEVAYGQTTDGKKSTNLFEINAVSGRHASLDICSICFSVFSVVSLFFFFYIEKRKGKASSSK

SEQ ID NO: 167822 - protein, 150 aa, Glycine max
  Clone ID: PAT_MRT3847_12255C.1.pep
TAARRRQKGTAARRHRKVPVPKNQRKVPVPKNTPKGSGAKKPPKGSGAKRPPKGSGAKRPPKGSGAKRPPKGSGAKRPPKGSGAKRPPKGSGAKRPPKGSGAKRPPKGSGAKRPPKGIPKTKPAQPKKKKKKKKKPPLLKIPTYLPLPAN

SEQ ID NO: 167823 - protein, 167 aa, Glycine max
  Clone ID: PAT_MRT3847_122560C.1.pep
MAAKTVTPDAVSMLLANTCPDSSSDLPEIVVQVLDLKATGNKYMFTANDGKTKLKAMISSDMCSQVLSGAIQNLGLIRVLDYTVNVIPNKSDKYLIVTKCEPVSPALEIEIKSEESGSGILLKSKVEGGVNTEGPAAAGILLMPKQVVTKSANQILREHGIPLLCTN

SEQ ID NO: 167824 - protein, 453 aa, Glycine max
  Clone ID: PAT_MRT3847_122561C.1.pep
MVMAKLKHPSSFVTLVALLLAVSLFVAPTSSTSRKTILKHHPYPTKGFRVMLRHVDSGKNLTKLERVQHGIKRGKSRLQRLNAMVLAASTLDSEDQLEAPIHAGNGEYLMELAIGTPPVSYPAVLDTGSDLIWTQCKPCTRCYKQPTPIFDPKKSSSFSKVSCGSSLCSALPSSTCSDGCEYVYSYGDYSMTQGVLATETFTFGKSKNKVSVHNIGFGCGEDNEGDGFEQASGLVGLGRGPLSLVSQLKEQRFSYCLTPIDDTKESVLLLGSLGKVKDAKEVVTTPLLKNPLQPSFYYLSLEAISVGDTRLSIEKSTFEVGDDGNGGVIIDSGTTITYVQQKAYEALKKEFISQTKLALDKTSSTGLDLCFSLPSGSTQVEIPKLVFHFKGGDLELPAENYMIGDSNLGVACLAMGASSGMSIFGNVQQQNILVNHDLEKETISFVPTSCDQL

SEQ ID NO: 167825 - protein, 191 aa, Glycine max
  unsure (1)..(191): unsure at all Xaa locations
  Clone ID: PAT_MRT3847_122562C.1.pep
MAMAKLKHPSLVALLLVLACLFIAPTSSTSRKTSFKQQHPCPTTNGFRVMLRHVDSGKNLTKLERVQHGIKRGKSRLQKLNAMVLAASSTPDSEDQLEAPIHAGNGEYLIELAIGTPPVSYPAVLDTGSDLIWTQCKPCTRCYKQPTPIFDPKKSSSFSKVSCGSSXCSALPSSTCSDGCEYVYSYRDYSM

SEQ ID NO: 167826 - protein, 228 aa, Glycine max
  Clone ID: PAT_MRT3847_122563C.1.pep
IYYCRGYYRCTYRNVQGCLATKQVQKSDEDPMICEITYKGRHTCTQASHLNKTVIPPSKTKVNLLGENKHQTHQIKNQPRQEKIEQQPPETFFTFGSSSGLEVKIEDIDHKEGIFPSFCFSSPSIVGSENGDDNNSSIFSYTMIENNLMESFSPAFISPTTSDIESNTFCHWGSTGLGQSVQSSGSDITDIVSAPTSVTNSPIMDLDFFFDKIDFDTDFPLSTMELCT

SEQ ID NO: 167827 - protein, 51 aa, Glycine max
  Clone ID: PAT_MRT3847_122564C.1.pep
KRSCLDLVVCVEKLLRMKYENAMNEIGVVMIKNYLFLLQEIVCCSNKRCVW

SEQ ID NO: 167828 - protein, 83 aa, Glycine max
  unsure (1)..(83): unsure at all Xaa locations
  Clone ID: PAT_MRT3847_122565C.1.pep
PPPALELKPLPATLKYAYLEDKENFPVIISASLTAXEEKLLLVLKKHKKAIGWTLADIPGISSSTYMHRMLLEDGAKPVRQPQ

SEQ ID NO: 167829 - protein, 189 aa, Glycine max
  Clone ID: PAT_MRT3847_122566C.1.pep
EFGTRKDCLEVLDFFKFVATYEIGSSFDAIELQRLLDIISLQYQTLHALGKTEEPPDNQSSPTIDGRNLQFPYIEHTNEFISANMLVDLHPSSDPAKVVLDMIHIPIGSDKKGGQGVIIIDESHIFLLEQLMRISPRVKPHVREEAQKIAFNLEANIRESAENSLTILGFLYLLPIYGLGSHFNKDGLL

SEQ ID NO: 167830 - protein, 63 aa, Glycine max
  unsure (1)..(63): unsure at all Xaa locations
  Clone ID: PAT_MRT3847_122567C.1.pep
THACGENDASFNYNWEAXAWDKVAVIGAGGGIGQTLALLIKMSPIGSXLHIYDIXRVKGGGXD

SEQ ID NO: 167831 - protein, 49 aa, Glycine max
  Clone ID: PAT_MRT3847_122568C.1.pep
AIRPLRDRYTAKLSRRVLYMLSSCRLMRSDSSDGYLVRDTTSCRLASLL

SEQ ID NO: 167832 - protein, 130 aa, Glycine max
  Clone ID: PAT_MRT3847_122569C.1.pep
MVKKVSDYVGINGNWLNDKKDDMAWKHSSDGNFTCLTIISPDRDDIVLPIPENENPKGLWFTTKEGSHYRLKFTFNEFDIIIFFQLKKVHIIMPPLTKLTGMVACHNNSSVGSSPSSPVSVISNTISTTK

SEQ ID NO: 167833 - protein, 92 aa, Glycine max
  Clone ID: PAT_MRT3847_12256C.1.pep
NQRVCQIVCLKIPPKALVFAWRLIKDRLPTKLNLSRRQVVVNDTTCPFCSSHEEDAAHLFFHCSKILPLWWESLSWIGIATALPQHPTEHFM

SEQ ID NO: 167834 - protein, 188 aa, Glycine max
  Clone ID: PAT_MRT3847_122570C.1.pep
LFRNWGMDLHVPVMPRKGHLLVAQNFNFLQMNHGLMEADYLNHPTISGSESPDHQKNLSVSMVASIDAAGNLLLGSSREFVGFNTNLDESVVSYIWKRVGEFFPKLKTLPLSDLSASRKVRIGLRPYMPNGKPVIGPVPGLSNVYLAAGHEGSGLLMALGTAEMIVEMVLGYPAKVDSTPFAVQKVLV

SEQ ID NO: 167835 - protein, 149 aa, Glycine max
  unsure (1)..(149): unsure at all Xaa locations
  Clone ID: PAT_MRT3847_122571C.1.pep
XXXXXXXXXXXXCGGXVVXXXXXXXVXXWSXXCXXRGXLXXXXXGWXXDSLXXXXVXELCVXTXXXXPXXAXXXXACVGXXXXXGXXXXXXXVXXXXGXXXXXXCXAXXLWXXXXXXVXXXXCXKXXGXXXXVXXXXAVXXXXFGXMLX

SEQ ID NO: 167836 - protein, 43 aa, Glycine max
  Clone ID: PAT_MRT3847_122572C.1.pep
VAEKMNFIEQLKLEKERQQKLEEEEEIRRLRKELIPKAQPMPY

SEQ ID NO: 167837 - protein, 84 aa, Glycine max
  unsure (1)..(84): unsure at all Xaa locations
  Clone ID: PAT_MRT3847_122573C.1.pep
CTWWMLAWESHNIYXLHTVHEKCVVAPEHYMHVAQYRLDYQXLNQRADMYAXDLTTHARDTFVGKINGDVLSXCAYYRIHAYRA

SEQ ID NO: 167838 - protein, 96 aa, Glycine max
  Clone ID: PAT_MRT3847_122574C.1.pep
MALQLQREASQVKTMIMVIIMIMIFCTSLSISGFWGSGHLFYFILGCGSKMTKWPCLITKEFLKYTMKAMAIPPPFHDQSWIHIYIYMYIYMYISA

SEQ ID NO: 167839 - protein, 94 aa, Glycine max
  unsure (1)..(94): unsure at all Xaa locations
  Clone ID: PAT_MRT3847_122575C.1.pep
QEXKARXXXXXTXGRXXXHQNXXNXXSXXLFRATIXXRTHPRLXXHLQLXRLXXDSPPTXSXIXLXLXLLSXSXASWEKQVRQSXMVXXPTAHR

SEQ ID NO: 167840 - protein, 109 aa, Glycine max
  Clone ID: PAT_MRT3847_122576C.1.pep
SMGPRPSSIALFKIPRPFLVQPPSQGLEANGGKLWETPLVGRALVSMNTAPGSCKTNTQDCHPAASSIIRNGRHYLGPHCCLHARNDRLANETKYGKQGKTNDSHFREQ

SEQ ID NO: 167841 - protein, 44 aa, Glycine max
  Clone ID: PAT_MRT3847_122577C.1.pep
ITRGEGRAKILNRGEIFTLALYKTPGSGYSAKKEYLCGKNDMQL

SEQ ID NO: 167842 - protein, 98 aa, Glycine max
  Clone ID: PAT_MRT3847_122578C.1.pep
TSKPGLLSDIKQALDALHLMITRADIAPLEGRMKNVFVIISSKEQNFEDAAYRQFLAGSVHQALKAVLNRFSVSEDILGTRKRRRISIFSSSPLEDFL

SEQ ID NO: 167843 - protein, 188 aa, Glycine max
  unsure (1)..(188): unsure at all Xaa locations
  Clone ID: PAT_MRT3847_122579C.1.pep
MIRGGENYVSSAPAFSNDGKRLLVCSGSTVSIFSTATGSLVSSLEGHTAAVTAVVVIPSSTGLSYCWTASVDGTIRHWDFSVPECVKIIDLCLPIFSMVVPSILSPREENGKKTANAIAYVSVQVINAPDNRPKPLYGQIRKCNLTHFRSVSQLILKETERPESLTISHLGNCLGIKDKXKLHIWGSS

SEQ ID NO: 167844 - protein, 268 aa, Glycine max
  Clone ID: PAT_MRT3847_12257C.1.pep
IRLEEARLRNVLKGDNDIRNAKTSVTNAVLHAERRLHQMMYTDRDYQRNPILKFASVTPIVTVQNWAERGYSVVNIQCKDRVKLLFDVVCNLTDMEYVVFHATIKTTIDQAYLEFYIRHKDGTPISSEPERHRVIQCLQAAVERRAFEGVRLELCTEDRQGLLAEVMRTFRENGLNVTRAEISTIGDMASNVFYVTDAIGYPADPKIVESVRQKVGLSNLKVKELPLVCHEKAEREDQPVGVGGAVLLCLGSLVRRNLYNLGLIKSCS

SEQ ID NO: 167845 - protein, 44 aa, Glycine max
  Clone ID: PAT_MRT3847_122580C.1.pep
AAVCEEGGSASNWCRSQSSSLVLNHWLFMHVHISVNCLSTADLV

SEQ ID NO: 167846 - protein, 62 aa, Glycine max
  Clone ID: PAT_MRT3847_122581C.1.pep
PCPFLRNRKMYTLFSSGEYELSMYRRIFPTAPKHGHYWGSQIYWREQQKKKSGVCHMLLFKK

SEQ ID NO: 167847 - protein, 59 aa, Glycine max
  Clone ID: PAT_MRT3847_122582C.1.pep
VARNPPVPEGVIAVPMHAKGYEDKDVRDIPETTKRVKILDVKDLTVTVLDPGHDENRKK

SEQ ID NO: 167848 - protein, 64 aa, Glycine max
  Clone ID: PAT_MRT3847_122583C.1.pep
ILMYQEGLFLLFDFFSSCQTMAEDHSSSHILPSGATSFPGVPFAVATGSTSVAVGIEFESNPNQ

SEQ ID NO: 167849 - protein, 78 aa, Glycine max
  Clone ID: PAT_MRT3847_122584C.1.pep
EKKKKKSVVARAACISPSTLIRTTLCIVFFAFRNCHIWRAMLNCICQLKIRLKLSFFWLGKVLAINVRKFLTMECLRS

SEQ ID NO: 167850 - protein, 41 aa, Glycine max
  Clone ID: PAT_MRT3847_122585C.1.pep
SSLFYFCLTVLKNITQYKLIACLHYFMSKACALLEWLVILL

SEQ ID NO: 167851 - protein, 190 aa, Glycine max
  Clone ID: PAT_MRT3847_122586C.1.pep
YGCEKTTEGVYGFIAKIGAGLFLLIQVIILLDFTHTWNDAWVEKDEQKWYIALLAVSVGCYIAAFTVSGILFIWFNPSGYDCSLNIFFLVMTMILAFVFAIIALHPQVNGSLLPAAVVSLYCAYVCYTGLSSEPHDYECNGLNKSRAVSTGTLVLGMLTTVLSVLYSALRAGSSTTFLSPPSSPRLGGSK

SEQ ID NO: 167852 - protein, 497 aa, Glycine max
  Clone ID: PAT_MRT3847_122587C.1.pep
MGGDAQKKRIAIIGVSTFLLVAMVVAVTVSINLNNKGSSYDSKEESKSSVASSIKAVKTLCAPTDYKKECEDSLIEHSNNITDPRELIKIAFHVTISKIGEGLEKTELMHQVENDPRTKEALDTCKQLMNLSIGEFTRSLDKFAKFDLNNLDNILTSLKVWLSGAITYQETCLDAFENTTTDAGQKMQKLLQTAMHMSSNGLSIINELSKTLSEMHVNRPGRRRLLNNVDDLPVLGHDFDLPEWVDDRVGVRKLLRMTGRKRMAHVVVAKDGSGNFSTINEALKYVPKKNLRPFVIYVKEGVYNEYVEVSKNMTHVVMIGDGGKKSRITGNKNFVDGVGTFRTASAAILGDFFVGIGMGFENSAGAEKHQAVALRVQADRSIFYKCRMDGYQDTLYAHTMRQFYRDCIISGTIDFVFGDAVAVLQNCTFVVRKPLENQQCIVTAQGRKEMNQPSGLIIQGGSIVADPMYYPVRFDNKAYLARPWKNFSRTIFMDSYI

SEQ ID NO: 167853 - protein, 77 aa, Glycine max
  Clone ID: PAT_MRT3847_122588C.1.pep
KHQIWLTKKGKTRGQTKPKWFYKGSHKKPRVGPLFPGKKKKRLIENGGTKKPLRLQQGIRANPILRENSWGNQTGGF

SEQ ID NO: 167854 - protein, 96 aa, Glycine max
  unsure (1)..(96): unsure at all Xaa locations
  Clone ID: PAT_MRT3847_122589C.1.pep
XIARPXXXNXXGHWPLXSXRXMRXLRXPIAPFPTTLKPXXSXPFSXNXFLLXLXXSXXRLGHXXSXFLRSLNPRLXKPKXVXRAEXXKLXRLSXLG

SEQ ID NO: 167855 - protein, 135 aa, Glycine max
  Clone ID: PAT_MRT3847_12258C.1.pep
MERMRLLFIFISILFNATTLSGVELLVHNYYKEKCPLAEDIVRHNVEVAVLKNPRLAASLLRLHFHDCFVMGCDASVLLDNVEGMTSEKLAGPNLNSLRGFEVIDKIKYLLEEECPITVSCADILAMAARDAVEL

SEQ ID NO: 167856 - protein, 59 aa, Glycine max
  Clone ID: PAT_MRT3847_122590C.1.pep
MIINTYRLTFKNNCQRNYPPHLHRGHIVRAKKTKIPAKKKRPLSRERKNATNKLRGSPI

SEQ ID NO: 167857 - protein, 90 aa, Glycine max
  Clone ID: PAT_MRT3847_122591C.1.pep
RKDVKHREWGDREKERSDRRNSPQVTNSTGDCKESAKEDRDVERLEREKKDLPKEKENLTERERDQMKRESWNGMEKEVSNNEKESVDAS

SEQ ID NO: 167858 - protein, 58 aa, Glycine max
  Clone ID: PAT_MRT3847_122592C.1.pep
VFPSTVTVPSVDAIHHFRDCQYHFHIAPTTLTTHLLITKLQFNDLQQQMTCARQLDRF

SEQ ID NO: 167859 - protein, 40 aa, Glycine max
  Clone ID: PAT_MRT3847_122593C.1.pep
TPNHNRHAIILPQIQYHVRHDTVHHELLTRIWHYVEEHGS

SEQ ID NO: 167860 - protein, 396 aa, Glycine max
  Clone ID: PAT_MRT3847_122594C.1.pep
MEGFRSIFNNEDLLVHGASLSACGLCFYKGFNRLQRKRFHGKPLCSWDIWSYLYMEIQIKVFVYEEGELPVFYYGSCSSIYSTEGSFIHAIEMNEHFRTRDPKKANVFFLPFSIAWMVRYVYIRNSYDFGPIKRTVRDYVNVIATRYPYWNRSLGADHFMLSCHDWGPETSKSIPYLRKNSIRVLCNANTSEGFDPIKDASFPEINLQPGLKDSFVGGPPASKRSILAFFAGGNHGPIRPILLEHWENKDEDIQVHKYLPKGVSYYGMLRNSKFCLCPSGYEVASPRVVEAIYTGCVPVLISEHYVPPFSDVLNWKMFSVNVSVKEIPNLKDILTSISPRQYIRMQKRVGQIRRHFEVHSPPKRYDVFHMILHSVWLRRLNFRVHDDINDFLSGNN

SEQ ID NO: 167861 - protein, 362 aa, Glycine max
  Clone ID: PAT_MRT3847_122595C.1.pep
GSRDNTTEVLMGISKGIMGRLQVTEFNLNGSMQRENELRSKVQILIDQLKAKDAALEKLEKCNVESVKEKSEVLALREKVKFLEEEQKEFELQINNVTAENEACHEHLIEMENFVDSLKESIDIAENRAESAEAKVTQLTETNLELTEEVSFLKGSASTAEKKVGSLEKQLRELDIQLQNAKASSEASQEQQNMLYTAIWDMEILIEELNSNRAKAETNKESAAEQCFVLSETNLELNKELDLLRSRTVSLKTSLDQASNTRSSRAKEIDCKAKLIMDMVMQLASERERINNQLHALKQENKHLVEKLKNTKIDASLDASNNGLNNRNEDQASNNDSSNDNSAKSSDEEGIDHFNKTFQAGG

SEQ ID NO: 167862 - protein, 247 aa, Glycine max
  Clone ID: PAT_MRT3847_122596C.1.pep
MVGSSRWINCCAWWGSEASSTMRIFLFMVPLLVLAGFASIKGSSVYNGRDSIAKRYALSSSLITRSNFSSQTFLPPPNSSLQTIYPSSNSSLQTLHQSNETEVNVSIPKFNSAPANESDESHPRQKQKRKPSFIDRNEVVLAQARAAIREAKNWNLTQDSDYVPIGPMYWNAKEFHRGQRLQNPYLTCVRTLRVLCNANTSEGFDPIKDASFPEINLQPGLKDKLRWWTACILTFNGLLCWGGIMAP

SEQ ID NO: 167863 - protein, 144 aa, Glycine max
  Clone ID: PAT_MRT3847_122597C.1.pep
GIPGSTHASVLRKSKFCLCPSGYEVASPRVVEAIYTGCVPVLISEHYVPPFSDVLNWKSFSVELSVKDIPILKDILICCLGEILIKMSFKMGISPRQHIRMQRRVGQIRRHFEVHSPPKRFDVFHMILHSVWLRRLNFRVRDDQ

SEQ ID NO: 167864 - protein, 85 aa, Glycine max
  Clone ID: PAT_MRT3847_122598C.1.pep
FLSNPLSYSKMSRRGGSKQQPDSRHPAPPSAAPSPAGRGRGRGRGEFSSVPAPSPVNAPSAPPPASTIGVPSGAAPVRAASPSPA

SEQ ID NO: 167865 - protein, 105 aa, Glycine max
  Clone ID: PAT_MRT3847_122599C.1.pep
KEKLESPRPIIIEGLGRHFVPIPYHTTFTLPRGLNTILFTGKRKDLPLTNYGVILGMGCLGGKSNLPSPTVSLVITWGPCNKRGPKRLNFSPGHLRGPVLWEGGP

SEQ ID NO: 167866 - protein, 44 aa, Glycine max
  Clone ID: PAT_MRT3847_12259C.1.pep
VSWGIVCLLLTTPHFIVCRSRGRKAWVCRSIRELWLRCVPAFPL

SEQ ID NO: 167867 - protein, 24 aa, Glycine max
  Clone ID: PAT_MRT3847_1225C.1.pep
VNSYVVFMLINQRLWACVLYLNGL

SEQ ID NO: 167868 - protein, 106 aa, Glycine max
  Clone ID: PAT_MRT3847_122600C.1.pep
FGSITQTTCKPFVVSIKCESFYNCTYNSVLKNKAIEEAADYNAISIIYCFLIVIFEKKRMASMMFKSSSIDIVIKLDFASYMLFGFMMQDLLQCMLHLQVEKWTGA

SEQ ID NO: 167869 - protein, 62 aa, Glycine max
  Clone ID: PAT_MRT3847_122601C.1.pep
VGQSHRLSNGSGIESNSIYQIDYGTMCQALSIMPAACRYRSRSGAGGSFPDGPSNMDQSKIC

SEQ ID NO: 167870 - protein, 130 aa, Glycine max
  Clone ID: PAT_MRT3847_122602C.1.pep
MSVKVNCVGGDTHNVFVYGSLLADEVVHTLLKRVPPTAPAILHDYHRFKIKGRVYPAILPVQNNKVYGRVLLGISGVELDILDEFEDVEYTRTDVEVSLKEWKQVHMNDFVKMTDGFRQELELPGSKPRV

SEQ ID NO: 167871 - protein, 118 aa, Glycine max
  Clone ID: PAT_MRT3847_122603C.1.pep
YLICSHRFKIKGRVYPAILPVQNNKVNGRVLLGISGVELEILDEFEDVEYTRTDVEVSLKDKSEKLQVCAYVWSNPNDPNLNAEWDFEEWKQVHLNDFVKMTGGFMQELELPESKPRV

SEQ ID NO: 167872 - protein, 70 aa, Glycine max
  Clone ID: PAT_MRT3847_122604C.1.pep
DKKIRSGINGFERIERWVATGALQRNDDELDADNNPFITTDYMTYMLKIDTGHGQGKHLDGNVKDSETLL

SEQ ID NO: 167873 - protein, 176 aa, Glycine max
  Clone ID: PAT_MRT3847_122605C.1.pep
MSVKLNCVGGGETHNVFVYGSLLADEVVHTLLKRVPPTAPAILHDYHRFKIKGRVYPAILPVQNNKVNGRVLLGISGVELDILDEFEDVEYTRTDVEVSLKDKSEKLQVCAYVWSNPNDPNLNAEWDFEEWKQVHLNDFVKMTGGFMQELELPESKPRVQTYETFYKQENDKPLEP

SEQ ID NO: 167874 - protein, 82 aa, Glycine max
  Clone ID: PAT_MRT3847_122606C.1.pep
HASVCLYFWSGRTPDLYPSAWSSTLCFSWFCMKKRSIIRWPTPHTHADPIASQNPMYNVHIAQTLPATVRLLRLLFSSQVNM

SEQ ID NO: 167875 - protein, 111 aa, Glycine max
  unsure (1)..(111): unsure at all Xaa locations
  Clone ID: PAT_MRT3847_122607C.1.pep
NSRYRSSNSSSLASDSYFCTNFYVFSSHRFKSKGRIYPVILPVQNNKVNGXVLLGISGVELDILDEFKDVEYTRTDVEVSLKDKSERLQVCAYVWSNPNDPNLYAEWDFED

SEQ ID NO: 167876 - protein, 175 aa, Glycine max
  Clone ID: PAT_MRT3847_122608C.1.pep
MSVKVNCVGGDTHNVFVYGSLLADEVVHTLLKRVPPTAPAILHDYHRFKIKGRVYPAILPVQNNKVYGRVLLGISGVELDILDEFEDVEYTRTDVEVSLKDKSEKLQVCAYVWSNPNDPNLYAEWNFEEWKQVHMNDFVKMTDGFRQELELPESKPRVQTYETFYKQENDKPLEP

SEQ ID NO: 167877 - protein, 152 aa, Glycine max
  Clone ID: PAT_MRT3847_122609C.1.pep
MYTFMFNFAKERPELGRDLFLAWTGWVCVWTALLLFLFAILGACSIINRFTRIAGELFGMLIAMLFMQQAIKGLVDEFRIPERQNSKSIEFIPSWRFANGMFALVLSFGLLLTALRSRKARSWRYGTGWLRSLIADYGVPLMVLGWTGVSYI

SEQ ID NO: 167878 - protein, 34 aa, Glycine max
  Clone ID: PAT_MRT3847_12260C.1.pep
ELRSLVTLCIYDRSIIGSHALHTLIHGLCWLIRM

SEQ ID NO: 167879 - protein, 75 aa, Glycine max
  Clone ID: PAT_MRT3847_122610C.1.pep
MCLLTQRSRINYQNVYRLYIQNLTNIEYTPMKNIETHTIFSVYKSSQHAYIIIARLFYMRNFESLLSLTTVLSRL

SEQ ID NO: 167880 - protein, 61 aa, Glycine max
  Clone ID: PAT_MRT3847_122611C.1.pep
LLLFLRFATTVLEKGVLGKPSKTWWAWSNVMAKWHNLNYKNTNTNPNIENPNFQNKQLMKV

SEQ ID NO: 167881 - protein, 79 aa, Glycine max
  Clone ID: PAT_MRT3847_122612C.1.pep
TVMALDEETHQRVTVLIPLHPSRAHSTDDRLSDTQLQNLKVAMNNAALPCHSYAGHTYLTSWCKTLRVRRKINLLDTQL

SEQ ID NO: 167882 - protein, 90 aa, Glycine max
  Clone ID: PAT_MRT3847_122613C.1.pep
VGHDVGQPAGVFWDHNFLRRCIEGRNPALNNVLHNAAPGREKKLCGNFFLGKIVTNSSYSELLACGALMCVITYNGFFQEYTLGIEAHTE

SEQ ID NO: 167883 - protein, 63 aa, Glycine max
  Clone ID: PAT_MRT3847_122614C.1.pep
TTNKPPLFTLPNKRHFPQTLLFFLCQKRIPFSINIDLSDKPLLLRTYERLTLLTVHRRPPEVR

SEQ ID NO: 167884 - protein, 46 aa, Glycine max
  Clone ID: PAT_MRT3847_122615C.1.pep
CRVNPKPLFTLTLLFIPASSLFSVQDALHFKDFKEKEPDKSISRLK

SEQ ID NO: 167885 - protein, 69 aa, Glycine max
  Clone ID: PAT_MRT3847_122616C.1.pep
YIPFNERRNSNSTLIPVLPLPVPCATPSSKPLANFTVSQSLLQNSLTTSGDNSLPFMSKINFYHFKQTP

SEQ ID NO: 167886 - protein, 90 aa, Glycine max
  Clone ID: PAT_MRT3847_122617C.1.pep
FLEMASTTQEHITSRSTMRETFKTIVTMISCFLDPMKIQDQAPNRISGRKSISLWKFLSLAKRVKERTEFTSFSQRQSIRSKILKQEENE

SEQ ID NO: 167887 - protein, 63 aa, Glycine max
  Clone ID: PAT_MRT3847_122618C.1.pep
ACQGEHHHIHTCQRLILDSTKVVHVQRKSIIIHSTGEGEQDRDMRSQRSKEGQEYSINQLKVK

SEQ ID NO: 167888 - protein, 260 aa, Glycine max
  Clone ID: PAT_MRT3847_122619C.1.pep
MGEEKGFGVVGVRDFGEGPSNTKTVPLQQVSSSEGSSKTVRFHDGSDNGSVEKEIKSSPDTVASEERGAKKGVSFEIDEATVTTVDGDSSVLSSVTTLSAHGTRDLLEVVEEIQGEFVTASNFGKEVALLLEVCKPPYRSRVAALRVIFSRILQMLAPSRLPSDPLSIQFSSREIKLAQAYCGEPGKEFKTNPENLSSTLEKLYAWEKKLYKEVKDEERLRASDGPIIKELTSLITLKTESWNMFARRGVWVPKCQEWSS

SEQ ID NO: 167889 - protein, 44 aa, Glycine max
  Clone ID: PAT_MRT3847_12261C.1.pep
SKSVFVSPFKIHLNTDPGLRPSHVEAHTTACQGRTQHTLSGLGD

SEQ ID NO: 167890 - protein, 161 aa, Glycine max
  unsure (1)..(161): unsure at all Xaa locations
  Clone ID: PAT_MRT3847_122620C.1.pep
HASDNFGTCSLFLSTTLLVFSRRRHTRVLTSGHSTREHLGQKAHSRITNGHYRRLSQALSXQFSIQTDRSPTTPISCLSAIALSYCKRGSARASDTTTACTHLAPVASAMPTSAWTSTNTPWSWHGGPKPPFGRRLCHSTHDLAGGEICPPHASQIPSHHC

SEQ ID NO: 167891 - protein, 81 aa, Glycine max
  Clone ID: PAT_MRT3847_122621C.1.pep
EVGNDHKMRVSSCLSTIISMALASPVAHGNALTSEPLLSPSLTLSFLRMRSDNDYYRIYSTIVCLRFQPIVMRHIIDCCNL

SEQ ID NO: 167892 - protein, 64 aa, Glycine max
  Clone ID: PAT_MRT3847_122622C.1.pep
AALAVDTIPICICSLTFWICTLLLTTIFPFMLHLLGLTGVFGLFVIWCIIPWIVVYLLVPEIQG

SEQ ID NO: 167893 - protein, 77 aa, Glycine max
  Clone ID: PAT_MRT3847_122623C.1.pep
MEKTEEKVAVGVPVQLYYGGENEYQRGMIPPNTVFGDPKGIPIQQTIYRDTPAPFNCPYCGDTALTTVSMWRQGIMI

SEQ ID NO: 167894 - protein, 103 aa, Glycine max
  Clone ID: PAT_MRT3847_122624C.1.pep
MEKKEEKVVVGVPVPVYYGGENEYQRGMIPPNAVFGDPKGIPIQQTIYRDTPAPFNCPYCAHTALTTVRLCLFSLISIQTILSHNNLPDSISSQNRSSSSYYY

SEQ ID NO: 167895 - protein, 163 aa, Glycine max
  Clone ID: PAT_MRT3847_122625C.1.pep
GYKYLVRLHFCDIASISLGLLYFNVYVNGNLAYEDLDLSYVLNSLASPFYADFVVDGGDDGALSVGVGPSKRSMPHVIDGILNAVEVMKLNNSRSSLDGEVCADFVMKSWSTGNNTGLLFTLVAAVCIVLSLSIVIRRRLTGSRESVSWSRLPVNLSDDSVKN

SEQ ID NO: 167896 - protein, 40 aa, Glycine max
  Clone ID: PAT_MRT3847_122626C.1.pep
KLASIRAATCALGMEGAGTVVAVGEGVTHVKPGDRVAYAG

SEQ ID NO: 167897 - protein, 48 aa, Glycine max
  Clone ID: PAT_MRT3847_122627C.1.pep
GGVYVGSNLNTDVVFHSFQYRISIMAIVLYSMFPFKKKKKKGRQAASQ

SEQ ID NO: 167898 - protein, 81 aa, Glycine max
  Clone ID: PAT_MRT3847_122628C.1.pep
INTGHIYLNPKIIIALETRVNVKPITETNLKLLHNSTQETKFIFSLRGLPTIKTNKPTKCLPEGWGASHYYPSTIEAPRGP

SEQ ID NO: 167899 - protein, 143 aa, Glycine max
  unsure (1)..(143): unsure at all Xaa locations
  Clone ID: PAT_MRT3847_122629C.1.pep
MAYIQTTFLNLYYYTKXELLQNPAFELXDDAFNXIDRMLNYNEPPGKYNRILKVIDSYRLLKKGHALKDEQIYYDRALRRXIEWFXAYLLVLEDIMDNFHTLRVKACXDTLPIDEMIAPYDGVLLKNYITRIIIKHFMGKPYY

SEQ ID NO: 167900 - protein, 154 aa, Glycine max
  unsure (1)..(154): unsure at all Xaa locations
  Clone ID: PAT_MRT3847_12262C.1.pep
MQIFVKTLTGKTITLEVESSDTIDNVKSKIQDKEGIPPDQQRLIFAGKQLEDGRTLSDYNIQKESTLHLVLRLRGGMQIFVKTLTGKTITLEVESSDTIDNVKSKIQDKEGIPPDQQRLIFAGKQLXDGRTLSDYNIQKESTLHLVLRLRGGMQ

SEQ ID NO: 167901 - protein, 38 aa, Glycine max
  unsure (1)..(38): unsure at all Xaa locations
  Clone ID: PAT_MRT3847_122630C.1.pep
MGXQSKYKILCGRFFFLFTKHFYFLILCQVYRDKWYLT

SEQ ID NO: 167902 - protein, 94 aa, Glycine max
  unsure (1)..(94): unsure at all Xaa locations
  Clone ID: PAT_MRT3847_122631C.1.pep
LVSYKAYSTASPSALENSVVIHGLSGYSLCSQTSPSGQMGKGFSEFSGPPQLHXGLXFPXXLRKNLXGGXFPXXXHLAFXRTLIGSLGQAGGEG

SEQ ID NO: 167903 - protein, 63 aa, Glycine max
  unsure (1)..(63): unsure at all Xaa locations
  Clone ID: PAT_MRT3847_122632C.1.pep
LLTATIAWXFPXLXKIGIXLLNXXVXLXQXLTGAPRLLXXIANDDXLPIXNXFKVXDGGEPXV

SEQ ID NO: 167904 - protein, 41 aa, Glycine max
  Clone ID: PAT_MRT3847_122633C.1.pep
PVIKLGLICASQVPSNRPDMAEVVNILELIQCPSEGQEELE

SEQ ID NO: 167905 - protein, 144 aa, Glycine max
  unsure (1)..(144): unsure at all Xaa locations
  Clone ID: PAT_MRT3847_122634C.1.pep
RKDRFLIAERYGRMNHNANHNNPFQRRIFQGXISLILKLPYKLEKVTTTIAQFLSGTTLKNDIVAAGTHSSEDYPEKDDQDEPTKIDARLGHIVYPQYNAVQAQMETILLKLSLDDVXTPKGSHVDLKISQFKIDFPKHRGGTI

SEQ ID NO: 167906 - protein, 66 aa, Glycine max
  Clone ID: PAT_MRT3847_122635C.1.pep
LIHIHILHGPEYYSQRPKRTYEYTQRVQCGKYTAPIRQKIYERPQDTCLKCLSRLHILSLFVRTTD

SEQ ID NO: 167907 - protein, 153 aa, Glycine max
  Clone ID: PAT_MRT3847_122636C.1.pep
MDALSWALNNFVAQSPSTIIYLIHVFPQINHIPNPLGIGMIPRNQVSAEQVESYIDQERGKRRELLQKFLQSCSTSKVKVDTILIESDSVAKAILDLIPILQIKRLVIGANKLHLRKSKSRRGKGIADQILQNAPQSCKVRIICEKKEVNEQM

SEQ ID NO: 167908 - protein, 53 aa, Glycine max
  unsure (1)..(53): unsure at all Xaa locations
  Clone ID: PAT_MRT3847_122637C.1.pep
MGRCTGRSWQCREEETLVCSNSFYYQPLXGTHPCDQAIIVNDKVTIEVIIVLN

SEQ ID NO: 167909 - protein, 205 aa, Glycine max
  Clone ID: PAT_MRT3847_122638C.1.pep
NAYVGIPIHEDGHWNAMVQTSRGVQIESEEHESGPIILHLDSLGLHSSKSVFDNIKSYLIEEKNYMDREDMASDVSIADRIWKCLPRRIESQIIQVPQQKNDYDCGLFVLYFIERFMEEAPERLKMKDLDMFGRRWFKPQEASNLRVKIRKLLVEKLQNSVTDNCNLESSPSSSAGPATDCVETARDSLTGPATDCVETTEDSVT

SEQ ID NO: 167910 - protein, 82 aa, Glycine max
  Clone ID: PAT_MRT3847_122639C.1.pep
PFGPFRYFERGKRGMCLRWVSQGFPGFSIFKRCKSEVHLICFMLHFRSGMASYVSVGYFGSPTHGRPFFFFFFFFFINFFFF

SEQ ID NO: 167911 - protein, 70 aa, Glycine max
  Clone ID: PAT_MRT3847_12263C.1.pep
AATINGRAASSLSGTKVSHKPYRLSDKRKNFQSGAGVTKIGDNRGYLDQWDRCITTYRGDLNGSHAPQRY

SEQ ID NO: 167912 - protein, 233 aa, Glycine max
  unsure (1)..(233): unsure at all Xaa locations
  Clone ID: PAT_MRT3847_122640C.1.pep
SCSSCRNLWDWWNRKDDTCSLATALFNKISPRYDACYFIDDVSKTYGDFGAHRCTKTTSSSNSNQGNIEINNPSRGTMLVRTRLCHLKTLIILDNVDQMEQLEKLALHPXIYLGAGSRVIIISRDRHILKNYEVNKVYNVQLLDKDKALQLFCRKTFKTEDIVKDYEQLVYDVLEYVHGFPLAIKVLASFLFDRDVFEWRSALARLKENSSKDIMNVLQLSFDGLEKKKKKNL

SEQ ID NO: 167913 - protein, 115 aa, Glycine max
  Clone ID: PAT_MRT3847_122641C.1.pep
IYCFGVLPYQIVFLLLFFFLEHKKKEPRNPHPREIIPFCGQRNPGSKKKIFRTPAGHTPAPHRNCCCEDQEGDVHAPSSPAPPSSFSHPGGGHHQGPCPGPYSQAPPWAPHGGEK

SEQ ID NO: 167914 - protein, 76 aa, Glycine max
  Clone ID: PAT_MRT3847_122642C.1.pep
KLALELRKHQQTQNPTKAPGPKATCYSSTPMMPSTSRSRLQIGLVLHKNRESERVQKSMCGGTSPSPSCALMKPCR

SEQ ID NO: 167915 - protein, 111 aa, Glycine max
  unsure (1)..(111): unsure at all Xaa locations
  Clone ID: PAT_MRT3847_122643C.1.pep
INLAENLPSPSNTHTHYHKYRKKPLSENPQIYSPRTSLCFFKEKDDRRRERERERERVGERELTDXQRRRREAGGDDQRAVSGKERRRERGRRERERERERSRGDSREISI

SEQ ID NO: 167916 - protein, 64 aa, Glycine max
  Clone ID: PAT_MRT3847_122644C.1.pep
VFDLELMRYPNIEEEMVEMLQIAMSCVVRMPDQRPKMSEVVKMIENVRQIDADTHSSSGNQVST

SEQ ID NO: 167917 - protein, 77 aa, Glycine max
  unsure (1)..(77): unsure at all Xaa locations
  Clone ID: PAT_MRT3847_122645C.1.pep
VMDQMVSVLIDKLSVELWPCLHCLFMLFISCCPCYARHKANFDGVHPCVXMANSXKLCGWAMXRFSLEYFLVLPHLG

SEQ ID NO: 167918 - protein, 151 aa, Glycine max
  Clone ID: PAT_MRT3847_122646C.1.pep
SGSTVTSLLLSAGRLCTSRIINLPTTSSNTLGISFIIQCPNCTLRTTTLPRSLCAAIIFSPHLNHILLRTCLGPSGWKPLVDPIFRSHVPTNLIIRPSMVIRTTPDKYFRSERRKGWHYNFYWSFLCDCAPLSPRHLIYLSCYIRSPIISL

SEQ ID NO: 167919 - protein, 96 aa, Glycine max
  unsure (1)..(96): unsure at all Xaa locations
  Clone ID: PAT_MRT3847_122647C.1.pep
VFXLINAHKGRLFPTSTSGPYFALSKSATSLLMQSFGPLHFQWQSTNYLSVRATPSMVCHGLGASMYSLRLGSHSFQQSQLQHSSFRHGRLRSMYS

SEQ ID NO: 167920 - protein, 78 aa, Glycine max
  Clone ID: PAT_MRT3847_122648C.1.pep
LKMGICFASISTLRSRLLSSVKTVMASGSNMPFKVNCEKVEQESDNNMASSVVKDKVLVQCGNNFKRSRAYALDIPRP

SEQ ID NO: 167921 - protein, 232 aa, Glycine max
  Clone ID: PAT_MRT3847_122649C.1.pep
MERVAESERTLYPYVTGSSVVAIKYKDGILMAADMGGSYGSTLRYKSVERIKPIGKHSLLGASGEISDFQEILRYLDELILYDNMWDDGNSLGPKEVHNYLTRVMYNRRNKFNPLWNALVLGGVKNGQKYLGMVNMIGINFEDNHVATGLGNHLARPILRDEWHENLTFEEGVKLLEKCMRVLLYRDRSAVNKIQISKITDEGATVFPPFSLKTYWEFSAFKNPTVGAEGSW

SEQ ID NO: 167922 - protein, 41 aa, Glycine max
  Clone ID: PAT_MRT3847_12264C.1.pep
HHIFRSLSVLIQANNNMNLCIGIDELTLYPILTLAKMHLTE

SEQ ID NO: 167923 - protein, 112 aa, Glycine max
  Clone ID: PAT_MRT3847_122650C.1.pep
SGLDNQIPTAFDPFADANADDSGAGSKDVAHIRVQLRNGSTSLTTVHGLKKEFSYNMILIDVQKEFCCTGTVDQDPKLGQVMQLQRDQRKNVSTFLVQAGMSNKDHIKIAAY

SEQ ID NO: 167924 - protein, 188 aa, Glycine max
  Clone ID: PAT_MRT3847_122651C.1.pep
LQVPFAGAVLSFSMFAVGLFLSSNPDTTGDLVQVPSLLFQGSLLLGLISRATLGYAAMHAATVPIHPLVIAGWCGLTIQAFNMLPVGCLDGGRAVQGAFGKNALVGFGLTTYTLLGLGVLGGPLSLPWGLYVLLCQRAPEKPCLNDVTEVGTWRKALVAIAIFLVVLTLVPVGDELAEELGIGLVTAF

SEQ ID NO: 167925 - protein, 54 aa, Glycine max
  Clone ID: PAT_MRT3847_122652C.1.pep
HVHGTNFLLLNFMDKNYPLIHVFLQHYKNPLSFFAFYILHFYFFFLFTCSRSAR

SEQ ID NO: 167926 - protein, 56 aa, Glycine max
  unsure (1)..(56): unsure at all Xaa locations
  Clone ID: PAT_MRT3847_122653C.1.pep
CSKFGALKHIYVYTKSAGCVNXRLEHPQSPISAQQAVHGIWSGAKMITASFMALQS

SEQ ID NO: 167927 - protein, 44 aa, Glycine max
  Clone ID: PAT_MRT3847_122654C.1.pep
LTSLIMTVSLTLYPNVHQHVLHDNICFDSIKEVSASSTKSFDCS

SEQ ID NO: 167928 - protein, 50 aa, Glycine max
  Clone ID: PAT_MRT3847_122655C.1.pep
SIQDKLILPFLHLHITHYHLGLPYRDESDDKVTIESAKASLQHNAPINCA

SEQ ID NO: 167929 - protein, 46 aa, Glycine max
  Clone ID: PAT_MRT3847_122656C.1.pep
FPGIGLGTLLSSGRIGSDGMVQAAAERLATDMSEEEVIKGISFPST

SEQ ID NO: 167930 - protein, 98 aa, Glycine max
  unsure (1)..(98): unsure at all Xaa locations
  Clone ID: PAT_MRT3847_122657C.1.pep
XXXXKLGIXXEXKALXXKVCXERELKXKQKKKDLRYXXXYLIXIRXCXWEXSDTXXXERXRXXXEXXXRRXXNQXXXXKXXKXXXXEXGXXXKXKXXX

SEQ ID NO: 167931 - protein, 47 aa, Glycine max
  Clone ID: PAT_MRT3847_122658C.1.pep
LSSNQYVYRYVQTIDAPLQLVWSLIKRFEYTQKYKLFMKKCNLLDGD

SEQ ID NO: 167932 - protein, 52 aa, Glycine max
  Clone ID: PAT_MRT3847_122659C.1.pep
GVVFFFFFFFFFFGNSIFLNPYFYKKGKVFIPNSVFPQALNTLYFLPLNYLD

SEQ ID NO: 167933 - protein, 75 aa, Glycine max
  Clone ID: PAT_MRT3847_12265C.1.pep
QNPAAHAAATFCCYILGHTANGRQLAPDYSRVALQIFPSMTNWSRLQVLTAIAAATVAAATAWWAAHGLLPLCGP

SEQ ID NO: 167934 - protein, 53 aa, Glycine max
  Clone ID: PAT_MRT3847_122660C.1.pep
ECDQECVLLTLIFLLFTKHLNLSKHSIWIIRSICLFILILLSDVIIQPIMLYL

SEQ ID NO: 167935 - protein, 67 aa, Glycine max
  Clone ID: PAT_MRT3847_122661C.1.pep
KGSYFIKYGQVRCQSNRQAVHDASSWSDPRRSLTVELCKKGCYGHGTSFSHSILGDLYLALRNDYLL

SEQ ID NO: 167936 - protein, 85 aa, Glycine max
  unsure (1)..(85): unsure at all Xaa locations
  Clone ID: PAT_MRT3847_122662C.1.pep
AIIICHTCKKKKKKKKKKKKKKKKXXXXXXXXXKKKKKKIXVFPPPKNRGGKKKGKKKGVSPGKKKILGGPPPPPKKKKKGVFPF

SEQ ID NO: 167937 - protein, 71 aa, Glycine max
  Clone ID: PAT_MRT3847_122663C.1.pep
NVKMLSAFKFVNTFYGVFDSLKAFMYSYPNKILRSNSILFSLCNFIHYNRSFCFFPPVNNCIPFSNYYINI

SEQ ID NO: 167938 - protein, 384 aa, Glycine max
  Clone ID: PAT_MRT3847_122664C.1.pep
MIRCPIFSGHQPPALKYLNVPTKPNYPSVEKLDYPSLPLKSHNPLLIPSHKLKKPLQYFIPPSSTTMDSTTSTESEVAYDIPPILKVYKNGRIERLAGFEVVPPGLDPETNVESKDVVIAEKDGVSARLYIPKTTYPPTQKLPILVYFHGGAFIIGTPFSPNYHNLLNNVVSKANVIGVSVHYRRAPEHPVPIAHEDSWSALKWVASHIGGNGVEEWLNKYGDFEKVFVAGDSAGANIASYLGIRVGLEQLPGLKLEGVALVHPYFWGTEPLECEAERAEGTAKVHQLWRFTCPTTTGSDDPIINPGQDPNLGKLACGRVLVCVAEKDLLKDRGWHYKELLQKSDWPGVVDVVETKDEDHVFHMSDPNCDNAKALLNQIVSFIK

SEQ ID NO: 167939 - protein, 55 aa, Glycine max
  Clone ID: PAT_MRT3847_122665C.1.pep
ILFYFLFALLFVIHSLFSFLKIKLSVAVFSLSSFYIPLLIFFFLTCLLIFTYIFL

SEQ ID NO: 167940 - protein, 65 aa, Glycine max
  Clone ID: PAT_MRT3847_122666C.1.pep
VQVKHQKAHIYACKADLPGQKEEEARAQSADGRVFKIVPWHHLEHSTSNSLSIQALSHDLTGSDR

SEQ ID NO: 167941 - protein, 80 aa, Glycine max
  unsure (1)..(80): unsure at all Xaa locations
  Clone ID: PAT_MRT3847_122667C.1.pep
MASAVKALMNDKENNDTSFDDALSALRAMPDVDDELVMDACDLLEDERKAXIFLALDISLRKKWLLRKLRQEKSHDSNCI

SEQ ID NO: 167942 - protein, 70 aa, Glycine max
  Clone ID: PAT_MRT3847_122668C.1.pep
TTPILKLLLRRLLLVYLSGTITTAEHGTVVFETHHCTYAFDFIAACSTCSLIQAMRISAEVEEEGVLRRA

SEQ ID NO: 167943 - protein, 48 aa, Glycine max
  Clone ID: PAT_MRT3847_122669C.1.pep
LDRYRPCLIQTSVYGIKVYCYPSILEALRAILIFSMSLYGVKERWDQK

SEQ ID NO: 167944 - protein, 103 aa, Glycine max
  Clone ID: PAT_MRT3847_12266C.1.pep
QSERGLLRNRPTARMNEQWPIVMFPSMSRTLAGSFLPRAVYQQGSTCPQHTLLRALIPLGNELLIWGWTAIQSLFANCAGLQVVLAFIAFGCRDLVLDFGSPF

SEQ ID NO: 167945 - protein, 72 aa, Glycine max
  Clone ID: PAT_MRT3847_122670C.1.pep
DLVLWFIIVLFVAFFFFLFWFSCPRGGDQPRRSPSKCLKGQEHLGFWLILLLFSCLGAPYPGLNFEKKNWDS

SEQ ID NO: 167946 - protein, 465 aa, Glycine max
  Clone ID: PAT_MRT3847_122671C.1.pep
QPFSWDDMLNSFQFIGNQLLYLWNTFLKFHRENKTKILEFLRNSWANDRRTEWSIWMVYSKVDMPHQYMSNGVEGTSLYRSLRGRSSSTRSSNDDPVQTATMRAELHRRGIAQMRINDRSLQDMYIFGDPLRVPIIIVECLENMHRSASVKSYFLPLEDKARHILENGSRAIIKLPGNSPPQNEHVLRVVVFVHGFQGHHLDLRLIRNQWLLIDPKIQVLMSETNEDKTSEDFREMGSRLAQEVISFLKKKMDKASRVGNLKDIKLSFVGHSIGNLIIRAALAESIMEPYLRYLYTYVSISGPHLGYMYSSNSIFNSGLWLLKKIKGTQCIHQLTFTDDHDLENTFIYNLSKKKTLANFKNVILLSSPQDGYVPYHSAKIELCPAATLDFSKQGKVFLEMLNNCLDQMRTHSEHRIVMRCDINFETSSYGRRSFNTLIGRAAHIEFLECDIFVKFIMWSFPELFS

SEQ ID NO: 167947 - protein, 60 aa, Glycine max
  Clone ID: PAT_MRT3847_122672C.1.pep
VVFSKGRYFDGDLLHEAGEMTSPYIKCTSFLFITFRNLADDPIHFDGFSLQTAPASYRSQ

SEQ ID NO: 167948 - protein, 231 aa, Glycine max
  unsure (1)..(231): unsure at all Xaa locations
  Clone ID: PAT_MRT3847_122673C.1.pep
MEDEAEETKSAVRIFVGGLAEAVSAEDLRSLFASLGSVQSVQTIRTKGRSFAYLDFLSDPKSLSKLFSKYNGCLWKGGRLRLEKAKEDYLVRLKREWEQGTLDDATQKPPTAASEEEMPNTAQSSKSNTKHLNIFFPRLRKVKSIPFSGTGKHKYSFQNIKVPPLPVHFCDCEEHCKPFVPEREKLSIDRTADSGGMNDEEISIMNAVMNKLXEKEQVSNAKNLGEEKDSF

SEQ ID NO: 167949 - protein, 166 aa, Glycine max
  unsure (1)..(166): unsure at all Xaa locations
  Clone ID: PAT_MRT3847_122674C.1.pep
FASWTGLANRGLSKGNDILCCDYARIDGVITKQVMSKMAEMINSLYTFNQKMTRERTHLLLGCCSRMAICXKDVWRVECGIPSGFPLTGICNSMLNEMLIRYSYEKLLRPAKAPRMFLQSFKKFVYLCEYGDDNSDSVHEYVKPYFSGCKLKSYLAGHNVTITDGI

SEQ ID NO: 167950 - protein, 47 aa, Glycine max
  unsure (1)..(47): unsure at all Xaa locations
  Clone ID: PAT_MRT3847_122675C.1.pep
XRSFLLLQXPXXKVGXPGRGELSXTSXXQKTGLHYNFXXNRFXXXFX

SEQ ID NO: 167951 - protein, 51 aa, Glycine max
  Clone ID: PAT_MRT3847_122676C.1.pep
FHPAFKISIMEPGALFPYVLGKGKIYALLNKAPVMVSFTKILFVTNNPPKK

SEQ ID NO: 167952 - protein, 56 aa, Glycine max
  Clone ID: PAT_MRT3847_122677C.1.pep
QKNTTTSWYQCALGNYFYLLRRFLQPSGLILCNWTPIDTCNKGHKMVHPSPCDSLK

SEQ ID NO: 167953 - protein, 84 aa, Glycine max
  Clone ID: PAT_MRT3847_122678C.1.pep
MAQLPPKIPNMSPSWPDFSSHQQKMQLPPLNNNGTITNNYHQHNQNPSWVDEFLDFSSARRGVHRRSVSDSITYLDSPMKCGRN

SEQ ID NO: 167954 - protein, 360 aa, Glycine max
  unsure (1)..(360): unsure at all Xaa locations
  Clone ID: PAT_MRT3847_122679C.1.pep
GGIRLLPISENIENYLEQNNLMPIGYSYKEIKKMARGFKEKLGGGGYGIVFAQWISXQIYFYQRWLHTSNGCRHVYFSDWATIGRIHHQNVVQLIGYCVEGSKRALVYEFMPNGSLDKFIFPKDGNIHLTYDEIYNIAIGVARGIAYLHHGCEMKILHFDINPHLVCFGXEMASKRKNLNPHADHSSQLYFPFWIYNQLGKEIDIAXKVSQNIGGKSQKTCVFIFGMLLIDMPNKRKNPNPHADDHSSQLYFPTWIYNQLEKETDIEMEGVTEEEKKMIIVSLWCIQLKPSDRPSMNKVVEMLEGDIESLEIPPKPSLYPHDTMENDQSIYSSQTMSTDFISSSSYSKEIVTNPLVEDVI

SEQ ID NO: 167955 - protein, 112 aa, Glycine max
  unsure (1)..(112): unsure at all Xaa locations
  Clone ID: PAT_MRT3847_12267C.1.pep
LHVVDFTDENTKKPGTDAWLSACSVVRTALEDNGFFMARYDKVGKELCDSVVSAVEELFDLPVETKAQKTSEKLXHGYLGQVWWLPLCESVGIDDPVTLLGCEISGRIMWPE

SEQ ID NO: 167956 - protein, 175 aa, Glycine max
  unsure (1)..(175): unsure at all Xaa locations
  Clone ID: PAT_MRT3847_122680C.1.pep
MARGFKDKLGEGGYGFGYMAPELFYKNIGISHKXDVSFGMLLMEMASKRKNLNPHADHSSQLYFPFWINQLGKETDIEMEGVTEEENKIAKKMIIVSLWCIQLKPSDRPSMNKVVEMLEGDIESLEIPPKPSLYPHETMENDQSIYSSQTMSMDFISSSSYSKEIVTNPLVEDAI

SEQ ID NO: 167957 - protein, 94 aa, Glycine max
  unsure (1)..(94): unsure at all Xaa locations
  Clone ID: PAT_MRT3847_122681C.1.pep
DTKKPITFKLQGSITLSNNINDRKTLKKKPLPSASPADQKKPSPSPSSDQKKPVPKEQRAKAAGTPPKPKAKDMKGSQEKKPQPQQKVPXSVSA

SEQ ID NO: 167958 - protein, 115 aa, Glycine max
  unsure (1)..(115): unsure at all Xaa locations
  Clone ID: PAT_MRT3847_122682C.1.pep
PKEAKIDFHTQDDSFSAASLKAYFAEXPINFLIFVASWAMGIKAFALQTSCKIMQRLDPTXMEIQAVVHAFALFAGVSDDPNIXRWSLRTPCCALFGLTIGGNITXLTGVLYWIA

SEQ ID NO: 167959 - protein, 103 aa, Glycine max
  Clone ID: PAT_MRT3847_122683C.1.pep
PNQTKPHGLENKKTKPMTKIGFCGFRLFGSVFGFTLGLVWFYYDHHFEGERAMGLQKVCCFALLGHIFKPWKQPFCFQVDKAAAYIYTCTRWEPHANAMSRPN

SEQ ID NO: 167960 - protein, 275 aa, Glycine max
  unsure (1)..(275): unsure at all Xaa locations
  Clone ID: PAT_MRT3847_122684C.1.pep
IIRVPSSTPSSVVRGVTAFAAVTSGXLNXLQGTKNLGLATFLLGLGIPGRAKDLFNQXESLASFLRRKQGFRSHLVPVNFLATVYSFSKKDQLQXVRVNTVLGLAAPPLTVKLVQXLSASNAKDSAIESKELRYDQKSGFHVLDALPKNVDVGTYVFVFEIVLHDFGSEKVYATGGQIHVPIYVTGIIEVGNAEITVLDSDLGSAETQKKLDLAGNDAVSLSANHLQKLRFSFQLTTPHGHVFKPHQAFFKLRHETKVEHIFVVGNTGKKFEKVL

SEQ ID NO: 167961 - protein, 257 aa, Glycine max
  Clone ID: PAT_MRT3847_122685C.1.pep
RASVQLQKLKLLLLPHCTIAYRNGVALAQRGSAVKFERPNHLRTPSSPKPRFPHSPGSAVRRSTSAAARSGDGVPGRVRVSVRLRPQNTEEMMADADFADCVELQPELKRLKLRKNNWDSDTYEFDEVLTEFASQKRVYEVVAKPVVESVLDGYNGTVMAYGQTGTGKTFTLGQLGEEDTSDRGIMVRSMEDILADISPGTDSVTVSYLQLYMETLQDLLNPANDNIPIGEDPKTGDVSLSGATLVEIKDQPSFLEL

SEQ ID NO: 167962 - protein, 76 aa, Glycine max
  Clone ID: PAT_MRT3847_122686C.1.pep
ILMYHVLFQLLNKKKTLISIRLTKLNMKSKTKNLQTFELQHHGVKPYSLPGEEDTYILFLHFCTLSLSLMTQFSGK

SEQ ID NO: 167963 - protein, 87 aa, Glycine max
  Clone ID: PAT_MRT3847_122687C.1.pep
QDKIVTLESNNNAVKHNHRNTIINYKNDVMFIITALWYRCLVYEFNGQVQYRSIQIIDEEGVLCMFHTFVNMESVICIELKVDVHNS

SEQ ID NO: 167964 - protein, 64 aa, Glycine max
  Clone ID: PAT_MRT3847_122688C.1.pep
CYPTPKEKKYRYDRAYDISNDTQTLHHFKHIFNTSHFFLSLFLLHHKSYFTYIFFLFFHSLSRC

SEQ ID NO: 167965 - protein, 83 aa, Glycine max
  Clone ID: PAT_MRT3847_122689C.1.pep
TTRPTIQSMLISIDGLISYGVCTISCSPICHSLIYTHDAHQCPTIPQAFQHLQLESLLPKQHLSNTNEPLLTFNPLLGIITSP

SEQ ID NO: 167966 - protein, 63 aa, Glycine max
  Clone ID: PAT_MRT3847_12268C.1.pep
FFEIYFFFFASFFLNGYVYVLPVPPGRKGSPNGRRSKYPRATFLIYGPPKTLEPFLSPCFPRG

SEQ ID NO: 167967 - protein, 61 aa, Glycine max
  Clone ID: PAT_MRT3847_122690C.1.pep
RGFFVFLKSSAILGGDIKKLPGVKWKGACNDNKKKHLRDRPVIEMTDLRIISDRILDREPA

SEQ ID NO: 167968 - protein, 60 aa, Glycine max
  Clone ID: PAT_MRT3847_122691C.1.pep
RDKQVSMSCVKFQNFLFYCTSNSLNKVVHNKCKIVSTCQNINYLSLKNRHAEESIMSPPE

SEQ ID NO: 167969 - protein, 49 aa, Glycine max
  Clone ID: PAT_MRT3847_122692C.1.pep
HWHDNFHSLEPHKNNLRRILINTNITLVICNYTLSAPAPLLNVIMNQTL

SEQ ID NO: 167970 - protein, 59 aa, Glycine max
  unsure (1)..(59): unsure at all Xaa locations
  Clone ID: PAT_MRT3847_122693C.1.pep
NHFTILNLYYSYHPNIAYPFWCYDNYTNHIALKXADNIIQQLIHLIFRINLKPFFTNFY

SEQ ID NO: 167971 - protein, 489 aa, Glycine max
  unsure (1)..(489): unsure at all Xaa locations
  Clone ID: PAT_MRT3847_122694C.1.pep
MCCMCSVLFLNCTTAMGEVVSSAPGKVLMTGGYLILERPNAGLVLSTNARFYAIVKPIHHEIKPDSWAWAWTDVRLTSPQLSREALYKLALKNLTIQTVSPSDTRNPFVEYAVQYSVAAAYATFDHNKKELLHKLLLHGLDITILGGNDFYSYRNEIERRGLPLTPESLATLPPFSSITFNTDDADGGNCKPEVAKTGLGSSAAMTMAVVAALLHYLDVVKLSSAXKTTGERKDVADLDMVHKIAQTAHCIAQGKVGSGFDVSSAVYGSQRYVRFSPEVISSTKVGDIAVPLPDSITEIIKGNWDHDTAEFSLPPLMTLLLGEPGTGGSSTPSMVGAVKKWQKSDPQKSLDTWTRLSEANSALEMQLNLLSKLAKEQWNAYKSVIDSCSMLRPDKWIEQASEPNKEAVIKALLGAKEAMLGIRYHMRLMGEAAGVPIEPEPQTQLLDATMNXERVLLAXVPGAGGFDAVFAVTLGDSSSNVTKVLSSLN

SEQ ID NO: 167972 - protein, 91 aa, Glycine max
  unsure (1)..(91): unsure at all Xaa locations
  Clone ID: PAT_MRT3847_122695C.1.pep
APRVRGSVSSRHKLTHLISGTSDEERIIHAYPFDTPXYMITIRRLRIGTIGSILCLSDDLAKINNVVEGVTHKIRRQMEELERDAGLDTGA

SEQ ID NO: 167973 - protein, 74 aa, Glycine max
  Clone ID: PAT_MRT3847_122696C.1.pep
MAHETFIFTYESVNEGHPDKLCDQISDAVLEACLEQDPDSKAACETCTKTNMVMVFSENTTKANVDYEKIVRDT

SEQ ID NO: 167974 - protein, 47 aa, Glycine max
  Clone ID: PAT_MRT3847_122697C.1.pep
FLTTQKSFTYTTGTRNGHYNMYATKRANQPPIKWITHGEARSEPLTT

SEQ ID NO: 167975 - protein, 143 aa, Glycine max
  unsure (1)..(143): unsure at all Xaa locations
  Clone ID: PAT_MRT3847_122698C.1.pep
PTRXKDPSEIGLNFTVNGTEILTKMFPNENSDGRCLKLLPFPPRLEDHVRASFALTGADLEKLRKRVLSKWDIVDRGAESEPPRLSSFVLTCAYALACIAKAIHGVEKEKEKFAFAFTVDCKARLEPPIHDNYFGKLGVGHVV

SEQ ID NO: 167976 - protein, 320 aa, Glycine max
  unsure (1)..(320): unsure at all Xaa locations
  Clone ID: PAT_MRT3847_122699C.1.pep
MARGKWVCSYKKTTLLVCFFNIAVALYALRSLYSSLYIYSGNVSRNAALYSPDQIRKMEVSIQIRWEFKPVELIKWVKALEAEFSSETEAVKLPRHLKQNIIDEILQRLRSLNSSRTDIAMEREVVESWRKEKLEEVKSALVKGTSNSTIPHEEAGMLVRALESDWAVLCEEIGLWIPAQVSNKEHDDKPEGAEEFEEEVLPGRPVSPECHAELHTDYDGAAVRWGLTFHKDSAADCCQASLDHAKHANEGDAKHNIGVDNQCNIWVYCPDEFGHKHQECWLKXAEKPRLNFKDKYPESYRNSHPSAPVIVPWVSGVISS

SEQ ID NO: 167977 - protein, 80 aa, Glycine max
  Clone ID: PAT_MRT3847_12269C.1.pep
LRALFPPVFPWCSPSGSPLGFSLRSFSLRWVSPCASSFPLWLSLVVAFLVARPLVCFSVFGSRLGVFCVRPFVWPFFLGV

SEQ ID NO: 167978 - protein, 557 aa, Glycine max
  unsure (1)..(557): unsure at all Xaa locations
  Clone ID: PAT_MRT3847_1226C.1.pep
LKVNRTLRLWHLYCPHFLRVGAKRCGKAEAERKAAKKASLKPSKLKKGAPPEESKTTAKRPDLKAVSKMMENNEILYPEKRIGNIPGIEVGYQFYSRAEMVAVGFHSHWLNGIDYMGRSYAKAFCYELKIAEASHISGMYGEDLDNAXPNEYTGHGGHSLTGDKRQFRDQKLERGNRCLMXCXEGFVLWRVIRDQDSSSSYTGKVYTYDGLYKVVNYWAGKGISGFTVYKFRLRRLEGQPTLTTNQVYFTYGRVPQSLTEIQGLVCEDITGGQEDMPIPATNLVDDPPVPPTDFTYCKSLKVAKNVKLPMNATGCKCEGICNDPTSCACALRNGSDFPYVSRDGGRLIEAKDVVFECGPKCGCGPGCVNRTSQRGLRYRLEVFRTAKKGWAVRSWDFIPSGAPVCEYTGILARAEDMDSVLENNYIFEIDCLQTIKGLGGRERRSQDGEIPANLLDKYHDQCSESVPEFCIDAGSTGNIARFINHCCEPNLFVQCVLSTHDDLRLARIMLFAADNIPPLQELTYDYGYVLDSVLDSDGKIKQMPCYCGASVCRKRLF

SEQ ID NO: 167979 - protein, 121 aa, Glycine max
  Clone ID: PAT_MRT3847_122700C.1.pep
ILPGRPVSPECHAELHTDYDGAAVRWGLTFHKDSAADCCQACLDHAKHAKEGEKKCNIWVYCPSEFGCHSPDIYQHKHQECWLKYAEKPRLNFKDKYPESYRNSHPSAPVIVPWVSGVISS

SEQ ID NO: 167980 - protein, 88 aa, Glycine max
  Clone ID: PAT_MRT3847_122701C.1.pep
MARGKWVCSYKKTTLLVCFFNIAVALYALHSLYSSLYIYSGNVSRNVALYSPYQIRKMELSIQIRGEFKPVELIKWVKALEGEFSGET

SEQ ID NO: 167981 - protein, 87 aa, Glycine max
  unsure (1)..(87): unsure at all Xaa locations
  Clone ID: PAT_MRT3847_122702C.1.pep
TDRTDGTDGLGQSDSEKVKTTPAGKYLTAALNDFNPEQYEGLAAISDGANKLMMLILDDDIKAXASREHESLAGTRHAELLFIRNMA

SEQ ID NO: 167982 - protein, 277 aa, Glycine max
  Clone ID: PAT_MRT3847_122703C.1.pep
MLGLVIEAEPELAPKNVENEEINQLKAELVSAKSEATQLKSALDVSEVRYQEEYIRSTLQIRSAFEQLEHAKSESSQRQGENEELKRARADIEELREKLMDKESQLQGLSDENEILMSRIKQNQPSEKDSEPVVELKKLDADMTELKKRLLDRETELQNVTEENNALKKEIKREELEKNKIPDEAVASAEAARATEREALVKLGYITEEADKSNRRVAQITEQLDAAQAANSELEAELRKVKVQSDQWRKAAEAAAAMISAGNHGKFGGRTRSLDSS

SEQ ID NO: 167983 - protein, 56 aa, Glycine max
  Clone ID: PAT_MRT3847_122704C.1.pep
MARTKQTARRSGGGKAHRKHLATKAARKSAPTSGGVKKPHRYRPESVALRDIRKYQ

SEQ ID NO: 167984 - protein, 78 aa, Glycine max
  Clone ID: PAT_MRT3847_122705C.1.pep
KILGCVRWAVPVIERYVGLGCYRLGIKPRVVNSEDVFKSPGRLGRLVRLAEAPRRHNNAALIASVPRGAKIGGTRLEV

SEQ ID NO: 167985 - protein, 71 aa, Glycine max
  unsure (1)..(71): unsure at all Xaa locations
  Clone ID: PAT_MRT3847_122706C.1.pep
GWNQNPFTLAYFPKRAYGCNYVEPLQVQVPANCCLKRFFFFFRLYFXEDLPPEFKLSLPSPNSLKNWRLEL

SEQ ID NO: 167986 - protein, 214 aa, Glycine max
  Clone ID: PAT_MRT3847_122707C.1.pep
MGKHLLLLVLTLHLLLLFATLHVSAAPSTTSPAKIVNGFLSNAVPAFTKWVWSLKATTKTAVSSRSMMKFESGYNVETVFDGSKLGIEPYAVEVLPNGELLILDSANSNIYRISSSLSLYSRPKLVAGSAEGYSGHVDGKLREARMNHPKGITVDDRGNIYVADTTNMAIRKISDSGVTTIAGGKWNRGGGHVDGPSEEAKFSDDLDVVYVGSS

SEQ ID NO: 167987 - protein, 29 aa, Glycine max
  Clone ID: PAT_MRT3847_122708C.1.pep
FNWSIKKITASHYCKLLIGNNAFEKFFYN

SEQ ID NO: 167988 - protein, 78 aa, Glycine max
  Clone ID: PAT_MRT3847_122709C.1.pep
ESQNSSERERSMTRILVRHGSLYMSQPSSSLRPRTCRFIESLNSYSFPPMRCPSPVPHIQDVNDTHLKAQIETYFNGD

SEQ ID NO: 167989 - protein, 58 aa, Glycine max
  Clone ID: PAT_MRT3847_12270C.1.pep
CPYFLYIHPCIHLLPFSFCPKYLSSIPVKNCWFNCCMSENVTLFLPPFCQKKIAAYRI

SEQ ID NO: 167990 - protein, 81 aa, Glycine max
  unsure (1)..(81): unsure at all Xaa locations
  Clone ID: PAT_MRT3847_122710C.1.pep
HIYLXINLFFLSHHKHPXRLAQIIKTSSPSFFLISLNSNTFTSYSIILIFNTNNNPLYTFYKILILTIIHKHLHHHTPYST

SEQ ID NO: 167991 - protein, 109 aa, Glycine max
  Clone ID: PAT_MRT3847_122711C.1.pep
SWGRLPGGPLPGAGAQTGTPAVAGPVGGGGPDNGHWGPPLWPRWAFPVWAPHAQHKGAPQPKGSPQGMGPLFFQGKLNGSRCGLPQNKETTKKKKKNKQKKKEKKKKKK

SEQ ID NO: 167992 - protein, 48 aa, Glycine max
  Clone ID: PAT_MRT3847_122712C.1.pep
RKQVDKLLTSAVFVMFILCPSNQLNKYGNPAFDHYEASYNSRRLEHEQ

SEQ ID NO: 167993 - protein, 86 aa, Glycine max
  Clone ID: PAT_MRT3847_122713C.1.pep
QKGSFLSPSNSSSSTFHTHQLADADKVSSCVSMLKGTLQRKTLGNQVEIEREAASDSLNAIFGPQEPIFQNGFHEGLENWSHQKPI

SEQ ID NO: 167994 - protein, 79 aa, Glycine max
  Clone ID: PAT_MRT3847_122714C.1.pep
SQSTRISDASTSVTSTLIARSFPLSPSSQCARVLTLTFTGHSPDIISSGSVTISMADEALDPRSVHVDHLKFGRVHLPF

SEQ ID NO: 167995 - protein, 99 aa, Glycine max
  Clone ID: PAT_MRT3847_122715C.1.pep
LSTIVTLTVKATADSCGRACTTHWVSSATKWILSNRTLHRMSGGQYFLINHCTWILPYLAAGLHYLPYYIYLNEYMLVRHCTCECLNDFTIDNVYYTIA

SEQ ID NO: 167996 - protein, 56 aa, Glycine max
  Clone ID: PAT_MRT3847_122716C.1.pep
NSQSRENIRRNPKERLTMLIGGRGLLDKLLVPSLHRHIPHIVSDVLRLKQFSYHSH

SEQ ID NO: 167997 - protein, 41 aa, Glycine max
  Clone ID: PAT_MRT3847_122717C.1.pep
GGMLFRELKFRLKTTTIIYITYSNEMKRLSTKKLRTLVPLN

SEQ ID NO: 167998 - protein, 54 aa, Glycine max
  Clone ID: PAT_MRT3847_122718C.1.pep
IFFISEVLVARSCFFRSSKGFVRQSGCPISYDHVVFSQLVLYEELLLSGRTCGR

SEQ ID NO: 167999 - protein, 53 aa, Glycine max
  Clone ID: PAT_MRT3847_122719C.1.pep
DGLECVFFFKKIKNFIYISCHQSQICIPSHMLLYFEIILIIELIIIIIIKTNC

SEQ ID NO: 168000 - protein, 105 aa, Glycine max
  Clone ID: PAT_MRT3847_12271C.1.pep
VKVWTFGSGSKGEGVPEFSCNGNKFPSCVFHPKNFSRWGGGCSQPLELWNMIEKKTMPLFVHKGFIGALGVFTVKGLGASPSHDKFVKLWKRICWVIKTGGFLVC

SEQ ID NO: 168001 - protein, 57 aa, Glycine max
  Clone ID: PAT_MRT3847_122720C.1.pep
GAFKKAPFINQKSGTTFIGKPKILNPLLGQRPLLFPPPPKPTNPPIQNNFQKTFRDL

SEQ ID NO: 168002 - protein, 148 aa, Glycine max
  Clone ID: PAT_MRT3847_122721C.1.pep
MASRPLVSIYNEKNEPTGKQIKLPAVFRAPIRPDIVSFIHDQIRKNKRQAYAVSTAAGHQTSAESWGTGRAVARIPRVRGGGTHRSGQGAFGNMCRGGRMFAPTKVYRRWHRRVNVAQRRYAIVSAIAASAVPALVQARGHVIDQLNE

SEQ ID NO: 168003 - protein, 324 aa, Glycine max
  Clone ID: PAT_MRT3847_122722C.1.pep
MTLSDDEDENLAQFLESEVLSEVSDKEEENVEEPKAKRARLEEDEITKQKQSSDSLSAPKNIVVNNGVVPRRIETGYFSQIPPELFHHILKFLSSEDLVSCSLVCRFLNYAASDEALWRRLYCMRWGMLPPTRKLRECPWKMLYIQRDGEDMVELVRSCQNEFKEYYIQMQAAKRSQAPHPSQLKDDRIILDKTLADQVSSWKSSRGLSDTVVTDHACSGETCSYYHIGDVFICEKTGQVHVCDDTCREVVMDPTNELLVCTISGHCFDRLLSPSEMEPDTEQQQGGVTDEAEPFMGSGRFARAYSLGYNCADEKELEATLRFC

SEQ ID NO: 168004 - protein, 45 aa, Glycine max
  Clone ID: PAT_MRT3847_122723C.1.pep
QLLLFLLIATKVLLPFSHSCSSLHRPYWWFTINTVLLKPHKLRKE

SEQ ID NO: 168005 - protein, 523 aa, Glycine max
  Clone ID: PAT_MRT3847_122724C.1.pep
MKGVPGAISIRTQLPEDATDVPERRRPTASARRQRVHQMIADARDMTDDVPDVAAEAPEMRADVECADRAEGSDADDAAEGFPGGPRDPSVLTSFADHVAHAVWSGQERPDLKLVSHGRKVTLIGRPVLEIEGLVGATGLSPLIDCSVTIGDPGLISAFVERWHGETSTFHLPVGELTITLDDVSSLLHLPISGALHSFHALSMEEARFLLIELLEVSAEEARAETSLTRGAYVRLKWVRDIYETRCQARQWIVAARAYLLHLVGCTLFANKSATYVHVVHLDAFRDLAQSGGYAWGVAALVHMYDQLDEACRTPTRQLAGYLTLLQCWIYEHFPSVHQCVTDDTYQETSPRASRWLTSKAHMKGITGAPYRARCDAQMGSYGRHSLTGEGGTPVRLHLEHPSAALPGQVSADYMEWFFRISHPFMTPTQAADQQRDAPAADPEDYIQTPSPQVPVAFDPPPYVDDYKGYEAIAQRLERVLNLRIVTAGTELYDIMQDYPTIARGGPSADVTVRARQRHRTDF

SEQ ID NO: 168006 - protein, 49 aa, Glycine max
  Clone ID: PAT_MRT3847_122725C.1.pep
EPRKPNSGKVVKNMKGQLLLDIGVMKAAKKKILSPSKRKVMIFFSWKNI

SEQ ID NO: 168007 - protein, 91 aa, Glycine max
  Clone ID: PAT_MRT3847_122726C.1.pep
SSLKALYLEGVDFSISKAISKRSSLEVLHLEMNGMCSDEGLVAVLEGCNLLRELRIRRSYCWEANLMGDKVSIANIECCPNLQELVLDGLN

SEQ ID NO: 168008 - protein, 117 aa, Glycine max
  unsure (1)..(117): unsure at all Xaa locations
  Clone ID: PAT_MRT3847_122727C.1.pep
KKFFLLLLPPPPPDVFFLGGWVLTPLQFPVGKRGPQSGGFFFPAKKKNPRALGXIPRGNRPPPPSLAPWGRFLAEGIPLNFNRFCQKPFAQNGPPFWGYFPRFFFFYPLGGFRPRGF

SEQ ID NO: 168009 - protein, 87 aa, Glycine max
  Clone ID: PAT_MRT3847_122728C.1.pep
FLGLCLAPWRWMDHGGGHSQLGQQVLPTALVYRGKDALCWQRWLTWPVCTVTTGWDVARTWSPVEDRSDVWPIQSFRPCLKRLELER

SEQ ID NO: 168010 - protein, 65 aa, Glycine max
  Clone ID: PAT_MRT3847_122729C.1.pep
YSHIMHNLRLSHYYSKDTLQVRLHVHVQLLLNGLCYRHLSAWNTYHIACDTHLGGELTSNACRIC

SEQ ID NO: 168011 - protein, 286 aa, Glycine max
  unsure (1)..(286): unsure at all Xaa locations
  Clone ID: PAT_MRT3847_12272C.1.pep
ADSLNSAFHLSYNMILNQMRCEDGDPENLLRNSFFQFQXDRAIPDLEKQIKSLASARASVVIEEESSLKDYFNLLEQHRALNKEIRDIVLSPRHCLPFLQPGRLVSLECTSSDEDLPLIFIEDQLTWGLVINFERVKSVSEDDASIKPEDASYIVDVLTRCVVRKDKIGKKSIKIVPLKEVGEPLVVSVPISQINTISSLRLYIPKDLLPLEARENTLXKVLETLTRXCEKGRPLLDPEEDMKIQSSSYKKASRRIEALESLFEKHEIAKSPLIKQKLKYYLSFWD

SEQ ID NO: 168012 - protein, 106 aa, Glycine max
  unsure (1)..(106): unsure at all Xaa locations
  Clone ID: PAT_MRT3847_122730C.1.pep
MKMKVHVFFVATLLVPWNCHAYDMFPLLMNTGYGARTPDVKCASXMLAVEAHNIFGFEIIPQECVESANECIHGEHXRSDSKSVKHQTYIYARYLDFHPNDTFVFS

SEQ ID NO: 168013 - protein, 49 aa, Glycine max
  Clone ID: PAT_MRT3847_122731C.1.pep
HACGKQIVVIHELRPAPYIYGFVMCDSLPVYHYGQLKGSEKTISLVDVI

SEQ ID NO: 168014 - protein, 72 aa, Glycine max
  Clone ID: PAT_MRT3847_122732C.1.pep
SSPSSCGRVYGSDRPLPSVRRNIGMIGRAVFRRCSLIGVLNVVYGVTASPCEGSWSNGEGPFGLTPPIAFSI

SEQ ID NO: 168015 - protein, 79 aa, Glycine max
  Clone ID: PAT_MRT3847_122733C.1.pep
ILIRHATLREVILPHFIWCKPRWLQNACDCELYHFLCAHIIYIFPGSLFVRFPKSRYTISDLCIPIIYINMASNKAQLV

SEQ ID NO: 168016 - protein, 371 aa, Glycine max
  Clone ID: PAT_MRT3847_122734C.1.pep
MADGPQHPSVVQKLAGQSYLVSRLSPNFNSRNYSATGSYVNGGMHSPGLAVVSPVSPVTVHAPAEKGVSGFLVDFLMGGVSAAVSKTAAAPIERVKLLIQNQDEMIKSGRLSEPYKGIGDCFARTMKDEGVIALWRGNTANVIRYFPTQALNFAFKDYFKRLFNFKKDKDGYWKWFAGNLASGGAAGASSLLFVYSLDYARTRLANDAKAAKKGGERQFNGLVDVYRKTIKSDGVAGLYRGFNISCVGIIVYRGLYFGMYDSLKPVVLVGGLQDSFFASFLLGWGITIGAGLASYPIDTVRRRMMMTSGEAVKYKSSLHAFQTIVANEGAKSLFKGAGANILRAVAGAGVLAGYDKLQLILFGKKYGSGGG

SEQ ID NO: 168017 - protein, 372 aa, Glycine max
  Clone ID: PAT_MRT3847_122735C.1.pep
MADGPQHPSVVQKLAGQSYLVSRLSPNFNSGNYSSTGSYFNGGLHSSGLAVVSPGSPVTVHAPAEKGVSGFLVDFLMGGVSAAVSKTAAAPIERVKLLIQNQDEMIKSGRLSEPYKGIGDCFARTMKDEGVIALWRGNTANVIRYFPTQALNFAFKDYFKRLFNFKKDKDGYWKWFAGNLASGGAAGASSLLFVYSLDYARTRLANDAKAAKKGGERQFNGLVDVYRKTIKSDGVAGLYRGFNISCVGIIVYRGLYFGMYDSLKPVVLVGGLQDSFFASFLLGWGITIGAGLASYPIDTVRRRMMMTSGEAVKYKSSLHAFQTIVANEGAKSLFKGAGANILRAVAGAGVLAGYDKLQLVLFGKKYGSGGGG

SEQ ID NO: 168018 - protein, 338 aa, Glycine max
  Clone ID: PAT_MRT3847_122736C.1.pep
MAMTTTTTSSPPFLFSFLSPKPFPPNPSLPLPQLQNRTPLSSTHRFFSAIPKAKRGVSGTHLCLASRAKAKPTPSSVEQESDDNFRKRVLQIALWVAEGVYILWLFLLPYAPGDPVWAISSDTLNSLVGLSLNFFLILPFMNFVGIRLIDAPVLHPMSEGLFNFVIGWTFMFAPLLFTDRNNDRYKGSLDVLWGLQMFLTNTFLIPYMAIRLNDADDESVTRKLSQFGSVMTNGAPIVGVIGGSACIVSLLWALFGRMDANFGGIADRWDYLVGYLGSERLAYAFIWDICLYIIFQPWLIGDNLQNVQENKVVVVKYLRYVPVIGLIAYLFCLDPKEV

SEQ ID NO: 168019 - protein, 215 aa, Glycine max
  Clone ID: PAT_MRT3847_122737C.1.pep
MSMVDEPLYPIAVLIDELKNDDIQLRLNSIRKLSTIARALGEERTRRELIPFLGENNDDDDEVLLAMAEELGVFIPFVGGVEHAHVLLPPLEMLCTVEETCVRDKAVESLCRIGLQMRESDLVEYYIPLVKRLAAGEWVTARVSLCGLFHIAYPSAPETSKTELRSIYSQLCQDDMPMVRRSAASNLGKFAATVEYAHLKADVMSIFDDLTQDGN

SEQ ID NO: 168020 - protein, 127 aa, Glycine max
  unsure (1)..(127): unsure at all Xaa locations
  Clone ID: PAT_MRT3847_122738C.1.pep
LLNAVGTPRSIHYWVFWILFENVMSMHRTKATLXGLLEAGRVNEWVVTEKLGDALKTKSGGKAARKPRIRIGERLHFLELLVGAYLFFCACYDLKYGKNHYFIYLFLQSMAFFVAGVGYVGTFVPNS

SEQ ID NO: 168021 - protein, 30 aa, Glycine max
  Clone ID: PAT_MRT3847_122739C.1.pep
SLNGTFKSFYWLNTHFEDLIRWYLWEGQII

SEQ ID NO: 168022 - protein, 160 aa, Glycine max
  Clone ID: PAT_MRT3847_12273C.1.pep
MSVTLHTNLGDIKCEIFCDEVPKTSENFLALCASGYYDGTIFHRNIKGFMIQGGDPTGTGKGGTSIWGKKFNDEIRESLKHNARGILAMANSGPNTNGSQFFLTYAKQPHLNGLYTVFGKVIHGFEVLDLMEKTQTGAGDRPLAEIRLNRVTIHANPLAG

SEQ ID NO: 168023 - protein, 147 aa, Glycine max
  Clone ID: PAT_MRT3847_122740C.1.pep
MATTAALSGTMVSTSFMRRQPMTTTSLKTFPNVGEALFGLKSGRGGRVTCMASYKVKLITPEGEVEFECPDDVFIVDKAEDEGIELPYSCRAGSCVSCVGKIVEGNVDQSDGSFLDDEQIDSGWVLTCVAQPRSDVVIETHKEGEIE

SEQ ID NO: 168024 - protein, 144 aa, Glycine max
  Clone ID: PAT_MRT3847_122741C.1.pep
MATTAALSGTMVSTSFMRKQPMTTKSLKTFPNALFGLKGGRGGRVTCMASYKVKLITPEGEVEFECPDDVFIVDKAEEEGIELPYSCRAGSCVSCVGKIVKGDVDQSDGSFLDDEQIESGWVLTCVALPRSDVVIETHKDGEIE

SEQ ID NO: 168025 - protein, 58 aa, Glycine max
  unsure (1)..(58): unsure at all Xaa locations
  Clone ID: PAT_MRT3847_122742C.1.pep
SHSSLCHRISVWLVSRLKVSELIFYSIIFXLGKPIPSXVILNFXKMQILRIGXXIDFA

SEQ ID NO: 168026 - protein, 275 aa, Glycine max
  Clone ID: PAT_MRT3847_122743C.1.pep
MEGERIELLSGVEDHHGGVVVDVQDPMDSTLFSSILQASIYKWSQQGKKGVWIKLPIQHSNLVDPAVKAGFRYHHAEPDYLMLVRWIPDTPDTLPANASHRVGVGAFVINNNKEVLVVQETGGKFRGTGVWKMPTGAVNEGEDLCEAAIREVKEETGIETKFVEVLAFRQSHKSFFEKSDLFFVCMLQPQSFDIQNQASEIEAAKWMPVEDYAAQPFVQDNELFDFIRKICFSKLDGNYNGFSNVLTCTSSGKKTYLYFNNRDASLSLASKEDQA

SEQ ID NO: 168027 - protein, 112 aa, Glycine max
  Clone ID: PAT_MRT3847_122744C.1.pep
VLGRSSFLFALTLFPILLGSPSGLAFLACCLCRPACFGWSLLRVLLSCASPLHFLCPRSLWCLRSSFLPQVGFSRGVFIWQAGLCVVAGWFVRRFFFFLGFFRSVVYNKHLI

SEQ ID NO: 168028 - protein, 77 aa, Glycine max
  Clone ID: PAT_MRT3847_122745C.1.pep
PKYKTQKKKKSILILTKKKWIQPLIHGPKIYPKTHENPRAFSCIFGPIFLESSIQCPWGVGLHHLGGLPFLITLYLH

SEQ ID NO: 168029 - protein, 60 aa, Glycine max
  unsure (1)..(60): unsure at all Xaa locations
  Clone ID: PAT_MRT3847_122746C.1.pep
KTXSLRSNHFRSLSSIIHLKQTNPSEHVHIIVLFTLNRSSIISFFEEIKLSIAPKIPTIP

SEQ ID NO: 168030 - protein, 60 aa, Glycine max
  Clone ID: PAT_MRT3847_122747C.1.pep
GVYVQAHLVILSIFSFFYLRLCCNLHCISSFLVSPPVKYSRQCANVNAQHLKTSSQEPRW

SEQ ID NO: 168031 - protein, 123 aa, Glycine max
  Clone ID: PAT_MRT3847_122748C.1.pep
RRVKAKKKMKTFEVLIMIMAMLAFAQADHYNLPYVQIESNNESIKVSCTRKCELICAPLIEIPPAYFLCVDNCTKRCPEMFSTSLKNCMTGCGSIKFIEVNIDVRGLATHVVNSCLQECQKKK

SEQ ID NO: 168032 - protein, 29 aa, Glycine max
  Clone ID: PAT_MRT3847_122749C.1.pep
RWFNFYKTWQPIGLYLYRLITPSKLRSNF

SEQ ID NO: 168033 - protein, 75 aa, Glycine max
  Clone ID: PAT_MRT3847_12274C.1.pep
LFGMHVTLTLGMPVGAYRYFILVCSVYSIERVCRKEKHQILCVPTTSFLFRCKINHFKSLTLCDSIILLAICEYQ

SEQ ID NO: 168034 - protein, 71 aa, Glycine max
  Clone ID: PAT_MRT3847_122750C.1.pep
AFSGNDPTKVYRIFVYILRQATKSVFSNDLARHLIIQFSYTFCLSFPSSFLFITETPIKLIFIPLNLNFFF

SEQ ID NO: 168035 - protein, 98 aa, Glycine max
  unsure (1)..(98): unsure at all Xaa locations
  Clone ID: PAT_MRT3847_122751C.1.pep
MFINQFYSYVTTWIPGKXLIQMEYAIEAVNHGSSAIRLRSNTHLVLACFNNANSXLSSHQNKIFKVYNHIVVSIAVLTADCPVLSPYMKSEFINYNYT

SEQ ID NO: 168036 - protein, 94 aa, Glycine max
  Clone ID: PAT_MRT3847_122752C.1.pep
GQSCALFVSFYIPKARESPSQSVLSQPNGHSKHQSSRPTQPQKHRPSHRPRHSHACFHEHPAKNNRIERLEIERNNRPQMSAAAKERYPWEMIG

SEQ ID NO: 168037 - protein, 131 aa, Glycine max
  Clone ID: PAT_MRT3847_122753C.1.pep
VSINTQHSLLALLKSKLVLVPRKLITNNKMGVSQKRKIRIRVIQVQDSDSDLVVQLKKEQNFRICIPMKSKTESDAKVISLRPTHLQFSVWKEQNQIREQAGIRAMTDFSFGSTNFCGTSKRNSQVVKAGE

SEQ ID NO: 168038 - protein, 55 aa, Glycine max
  Clone ID: PAT_MRT3847_122754C.1.pep
EEEESVKGTSKIGNSKVVPVLELYQIFRTGCGWVLQCSTSKSLFSWCIRIFFETS

SEQ ID NO: 168039 - protein, 58 aa, Glycine max
  Clone ID: PAT_MRT3847_122755C.1.pep
ILNILKSQYPSSISQLSHREGGHTFQRNTNHKHHNIISNSITTHLGHPTTIQLRKPSH

SEQ ID NO: 168040 - protein, 54 aa, Glycine max
  unsure (1)..(54): unsure at all Xaa locations
  Clone ID: PAT_MRT3847_122756C.1.pep
CHFLXCARKSTSRWLCRVFFTLGSRGHGLSYEGRRKRRERELGLYISPSVLVRV

SEQ ID NO: 168041 - protein, 40 aa, Glycine max
  Clone ID: PAT_MRT3847_122757C.1.pep
ILLHHQYDHKSCLVSHIDVHWELKLEIMKYNFCLILHGVK

SEQ ID NO: 168042 - protein, 203 aa, Glycine max
  unsure (1)..(203): unsure at all Xaa locations
  Clone ID: PAT_MRT3847_122758C.1.pep
MDDSAKSPDPTASFAFRSSSTTPPQSNLLRSHSTKETPFTNLIHSPPRLSCPTLSRSLQNSPLHHRRQFSPPPSPPSPTKLSDSDPQTTYHCASSVLRNDGQILSISLSSNGLVYTGSDSNLVRVWKLPEFTECGQLXTKACRVVALQVSNDTVYAAYGDGQIRVWRRTWDKGLKHGRLATIPKTLGYVRSYIAGKDKTMHKG

SEQ ID NO: 168043 - protein, 181 aa, Glycine max
  Clone ID: PAT_MRT3847_122759C.1.pep
MASSLLLAVVVVLDMVAFALAVAAKQRRNTASLNKDSAGRNYCQYDSDIATNLGVGSFFILVASQVIIMVVTRCLCCGKAMRPSGSRSWAICLFITSWVTFFIAASCLLAGSVRNAYHTNYRDLMGERAPSCQTLRKGVFGAGAAFIIFKGITSDLYYVSFSKANNNGPPPYARDTVRMNL

SEQ ID NO: 168044 - protein, 121 aa, Glycine max
  unsure (1)..(121): unsure at all Xaa locations
  Clone ID: PAT_MRT3847_12275C.1.pep
KEGTSIFFNLLTTSSHNKIIGSNNTVNTVNPPNYTIFYTLSIIQPNTTEPNKRXASCYILCSLFMTXKNIKRVCNAIHVPEPVKPIRPIRFHPATAAPNSSTAIVMPIIVPPSSPASFMQS

SEQ ID NO: 168045 - protein, 178 aa, Glycine max
  Clone ID: PAT_MRT3847_122760C.1.pep
MASSLLLAVVFVLDLVAFALAVAAEQRRNTASLNKDSAGRNYCQYDSDIATGLGVGSLFILVASQVIIMVVTRCLCCGKAMRPSGSRSWAICLFITSWVTFIIAASCLLAGSVRNAYHTNYRDLMGERAPSCQTLRKGVFGAGAAFIVLFMPDLEEGSVWSWSCFHYFQRHNLRALLC

SEQ ID NO: 168046 - protein, 343 aa, Glycine max
  unsure (1)..(343): unsure at all Xaa locations
  Clone ID: PAT_MRT3847_122761C.1.pep
MSLPTTTSGHSSIYSALTLPRTTQIHPTLFSPTTKFFSSKSPSYSGLSNCFSNTLLSRPLLFAVKASSGVGSEASKQESDKSEEEEEEEEPYEEYEVEIEQPFGLKFAKGRDGGTYIDAIAPGGSADKAGVFTVGDKVIATSAVFGTEIWPAAEYGRTMYTIXPKNWPVTHEXCRRDMEKTLIXGGELTEKEIIRAERNSGFISNRVREIQMLNALRKREQKERREKDLREGLQLYKNGKYDEALEKFESILGSKPEPEEAAVASYNVACCYSKLNQIQAALSSLEEALNTGFEDFKRIRTDPDLANARASEEFDPLLKRFDESFINENAINAIKSLFGFGKK

SEQ ID NO: 168047 - protein, 85 aa, Glycine max
  Clone ID: PAT_MRT3847_122762C.1.pep
GKKSLFSFLEKKSFFFKGGFKFLNPYPWPFFFFFKFNYPLVGEKFFFLDVTKSFFFFFINVFWGNFFFPKKKKKINKPKLKKINK

SEQ ID NO: 168048 - protein, 162 aa, Glycine max
  Clone ID: PAT_MRT3847_122763C.1.pep
CSKGHGFGGEGSSSNSSPVILTLTPTAVAVGFRCWERTTCPALLGYKSPVPTTIGAIQRLFNVTGVADILAANNLPEWTLPNNFTVEENRLLRIPLECDCSGPGLYGEPSNPLVYTVRKGDNISYLATTVFSGLVASTDIQHGNNVTNLRTGQELRVPLPCS

SEQ ID NO: 168049 - protein, 42 aa, Glycine max
  unsure (1)..(42): unsure at all Xaa locations
  Clone ID: PAT_MRT3847_122764C.1.pep
SCNKIVYLIIIEYXXXFXLXTLSDRVLLXLFXXXXIEHSLKX

SEQ ID NO: 168050 - protein, 133 aa, Glycine max
  Clone ID: PAT_MRT3847_122765C.1.pep
GSVRSFFLLPPPSESEPPWATTNWEEVPFLDLMTDLFRGLRGFSKLARRLILMGPPGSGKGPQSPILKVGSCLCHLLPGDLLRAVVAVKTLLGVKVKEVLVKGELVFDDWVVGFLDEALKNPSCQKGLIFDGF

SEQ ID NO: 168051 - protein, 59 aa, Glycine max
  Clone ID: PAT_MRT3847_122766C.1.pep
WKQLAFKFNCFACISRTLGQYIISQKAVSQITILATIVMLSNTKHTATNFLFLFHCFHL

SEQ ID NO: 168052 - protein, 249 aa, Glycine max
  Clone ID: PAT_MRT3847_122767C.1.pep
MSGGVGPTGSDISLPQEQEVGHKEPQEQHSLKNLHKTITTTPHKPTFLSFRHLNCLAVVVVLSASGMVAPEDFAFVLFSIIYMYFLSKMAFPSLLPSKEEPLVFNPKNKVLALYVFVGAIIGLYAPIAYILEGIFEGDKEGIKAAAPHVFLLSSQVFMEGVAFSGRFSTPMRAFVPVFYNSRRIFTIVDWLRSEINKVNEVHSGSDRRIFVGRVLAVANMAFWCFNLFGFLLPVYLPKVFRLYYAGHKD

SEQ ID NO: 168053 - protein, 73 aa, Glycine max
  Clone ID: PAT_MRT3847_122768C.1.pep
FLQTLKEQPHNLLGKRITEGDKRLYAHIKPIQNTRVVTIDGQTVVNIQSGNKQESTLACTIRECDGIRQTIQI

SEQ ID NO: 168054 - protein, 82 aa, Glycine max
  Clone ID: PAT_MRT3847_122769C.1.pep
QKFACPPPELIMPVSTASALTCIGYFFRASLMETRGLLTPRLLYTVMCSSVCIVFAFLYSASLFSGSKNFFWGLIIPFKKKF

SEQ ID NO: 168055 - protein, 217 aa, Glycine max
  unsure (1)..(217): unsure at all Xaa locations
  Clone ID: PAT_MRT3847_12276C.1.pep
PRVRPMDVLTQMKSLKELAVAFNAFLGPLPESLTKLSTLESLDLSSNNFSGSIPTTLCGGDAGNNNILKELYLQNNRFTGFIPPTLSNCSNLVALDLSFNFLTGTIPPSLGSLSKLKDLIIWLNQLHGEIPQELMYLKSLENLILDFNDLTGNIPSGLVNCTKLNWISLSNNRLSGEIPRWIGXXSNLAILKLSNNSFSXRIPPELGDCTSLIWVDL

SEQ ID NO: 168056 - protein, 107 aa, Glycine max
  Clone ID: PAT_MRT3847_122770C.1.pep
MATTSYMALSCRSLAGKAAKLGPSAHEDGRVNMKKTVTNQAFFGSPWYGPDRVKYSGPFSGEPPSYLTGEYPGDYRWDTAGLSADPQTFVRNRELEVIHSKWAMLGA

SEQ ID NO: 168057 - protein, 130 aa, Glycine max
  unsure (1)..(130): unsure at all Xaa locations
  Clone ID: PAT_MRT3847_122771C.1.pep
IHVTLPREAACTENHTPCAKLPTGRDKXALYYLRERPYLYRRIHHCQRVRLTMXQTLHKGKDXGTMLEQTLTVDNQPSQHQAGMNHDRETQIQPSXPMSAILGRKIRGRCHTAKLRIDDLHAVRGRVSQL

SEQ ID NO: 168058 - protein, 58 aa, Glycine max
  Clone ID: PAT_MRT3847_122772C.1.pep
QRKKCGLDDTIPIIYKAKRWIWMSVIMTLMRIKWTKDQLVFLPAIYNLFMTWIATYNL

SEQ ID NO: 168059 - protein, 115 aa, Glycine max
  Clone ID: PAT_MRT3847_122773C.1.pep
AWPVSRCRCHLLRHLGVTFQHMGSPLGRHAWTLDDLVPYVDKLAIISEEQERITEPVSHGPASKREFPAQEFHILQSSVETRGIGRRREAVEGQQYSQQMMERGHGMYYTTKVYV

SEQ ID NO: 168060 - protein, 76 aa, Glycine max
  Clone ID: PAT_MRT3847_122774C.1.pep
CCCYHRRRSARRGADRRSGRVCRPPRKPAAPANATLRNKRGGSKFELDERTYSSLTRCGRVCVRNGWWWCWRSENW

SEQ ID NO: 168061 - protein, 134 aa, Glycine max
  Clone ID: PAT_MRT3847_122775C.1.pep
MSSKKKIAILIPASMLAMLLLISSSEVAASHSKEGEVVKITNEQGDAKFVGGGDLDFMIICFPPPPRRYPPPRLYGRGVYYEYVDNLSQKQADKCYCGCCWLTESGDCRQCCREYYWSPRSGGDIQYEEDKTHI

SEQ ID NO: 168062 - protein, 56 aa, Glycine max
  unsure (1)..(56): unsure at all Xaa locations
  Clone ID: PAT_MRT3847_122776C.1.pep
KAGVLYAXSFPPQEVKHGYYKYLYIRRWVRMREIEHDEKLAIAPTETVTMLAPLLV

SEQ ID NO: 168063 - protein, 96 aa, Glycine max
  unsure (1)..(96): unsure at all Xaa locations
  Clone ID: PAT_MRT3847_122777C.1.pep
TLTALTVSLEGVRSDTIDNVXAYSQGMEXIAKDHQRVRKHAKQLGDXPTLADCSINKETPPQLGLRQHDGMQIYNKTLTGKTITLEAACSGTINDW

SEQ ID NO: 168064 - protein, 62 aa, Glycine max
  Clone ID: PAT_MRT3847_122778C.1.pep
LRVCGRVGSFTHFLLFLVLRTSSFSFHHHNFRYCIFNCFGYILRVITDCFFRLEPSLEENLR

SEQ ID NO: 168065 - protein, 82 aa, Glycine max
  Clone ID: PAT_MRT3847_122779C.1.pep
LRLFTVLSPRVHAKKGIGVSTRHYKVLKDGLHEHEHIELSPAYDDQREKDLMDLVLDVYYDAHAELRITVAHVIAFYMDHLC

SEQ ID NO: 168066 - protein, 53 aa, Glycine max
  Clone ID: PAT_MRT3847_12277C.1.pep
DPQIPYNLYHLTHITNLIHILLPFTFNPSSSYHPNLLDTHSHTIPLLNSFSNL

SEQ ID NO: 168067 - protein, 161 aa, Glycine max
  unsure (1)..(161): unsure at all Xaa locations
  Clone ID: PAT_MRT3847_122780C.1.pep
MVLGSAALFVLSLCVTELTLHAADTCPEVKVLDLEGSNKLTILQGCPGLPGALGPKGEAGAKGDRGESGLPGHPGKAGPTGPKGDRGEKGVRGEKGDTGPSQSCATGPRTCKELLTRGYFLTGWYTIYLPDCXPLTVLCDMDTDGGGWTVFHRRIDSTVDF

SEQ ID NO: 168068 - protein, 79 aa, Glycine max
  Clone ID: PAT_MRT3847_122781C.1.pep
IHDTNLKNADRHTCIRMIIDDPLSNPPNALSYKSTMRENLSRHGYIIPGIRGNQWSDLLGDHKGESGNIQLSTHMYYIE

SEQ ID NO: 168069 - protein, 99 aa, Glycine max
  Clone ID: PAT_MRT3847_122782C.1.pep
SLVHSFFHCPSWCPFALTTPPAWHRYCQPLPLPAIPYHAVLAYVRLSFLIASLPVQGRICNPCPTRRNWRSPMPIRSLLTPSPSLDAIIRHTTNTTTTP

SEQ ID NO: 168070 - protein, 77 aa, Glycine max
  unsure (1)..(77): unsure at all Xaa locations
  Clone ID: PAT_MRT3847_122783C.1.pep
ACIFYISFYEEFISFAFDSHVFQHVFDRHTLSCEGRISQSCVLACKFHLSSVEPIYSFWSXKKKKIKKKKRRPAQES

SEQ ID NO: 168071 - protein, 114 aa, Glycine max
  unsure (1)..(114): unsure at all Xaa locations
  Clone ID: PAT_MRT3847_122784C.1.pep
PAHGASILAHVVAHLVLFNECTLEMPMMAGRIKNVSQXLYHSITLKHTSGQDWSFTXKHIRMFSFTGLTKNXSDXTLNKWHVYMIKDGRIFLAGLSLAKCEYFADAIIDLYYNV

SEQ ID NO: 168072 - protein, 82 aa, Glycine max
  unsure (1)..(82): unsure at all Xaa locations
  Clone ID: PAT_MRT3847_122785C.1.pep
GPQSCAQNEHISHILTPIETRATTDTRAQYRSNQATRCGPNSCAIWLTSAQMDVQHGNYRTARKLHEKAXHASPKNWSTWTV

SEQ ID NO: 168073 - protein, 70 aa, Glycine max
  Clone ID: PAT_MRT3847_122786C.1.pep
LFVFRRKRGCQRGKTEKTERGMKKSLMRIEIRFSLETRKKKTNPTLSLSLSLSLFNFFYQCFLIIFPLLS

SEQ ID NO: 168074 - protein, 153 aa, Glycine max
  unsure (1)..(153): unsure at all Xaa locations
  Clone ID: PAT_MRT3847_122787C.1.pep
MAPALNLAAGGIPLSFSSSVDRSASFPRRYSVRAVAEEAVETRRPAASLYDVLRVERDASPTEIKSAYRSLAKLLHPDAAVRRSPETDGDVDGDFIQLRNAYETLSDPSARAIYDMTLAAAHGGRHRRFSTSLIRNHSSAFXTTRRWETDQCW

SEQ ID NO: 168075 - protein, 59 aa, Glycine max
  Clone ID: PAT_MRT3847_122788C.1.pep
IELNNAHVFFFYLSTNFNSNIFIFSLYFISTKHFLFFTLFLLYFVFFSFLHFHFFFHSS

SEQ ID NO: 168076 - protein, 55 aa, Glycine max
  Clone ID: PAT_MRT3847_122789C.1.pep
GELPWFVVMLHRHVSTTIIASKKQFSEHIIVYENERIICLEAYSTHGADHPSGSC

SEQ ID NO: 168077 - protein, 316 aa, Glycine max
  Clone ID: PAT_MRT3847_12278C.1.pep
MSDTVEHTDQRAEAIPQSTATPNWTIHVSDIRTVKVSNISLVTSKKDIEEFFSFSGDIRYIEMQRSESEHLESGHTQVAYVTFKDTQGADTAVLLTGSKIGDLYVTITPVEKYQLPPEALPSSPTNQSPDAVKKAEDVMSTMLAKGFILGKDAINKAKAFDERHQLTSNASSTVASIDRRIGLSDKLSFGTTIFNGKVREMDERYQLSEMTKSAMAAAEQKANSAGSAIMNNSYVISGASWFSSAFTAIAKAAGDVSTMTKEKVEQAAVERNEIIYSERKGTVDEFAKTHLEEASDIGPAVVPVNSDDDRNLATIL

SEQ ID NO: 168078 - protein, 138 aa, Glycine max
  Clone ID: PAT_MRT3847_122790C.1.pep
STTIPSSAVGNILEENHTVPGKLLGRKNALTEEERGSQPVQSNWQIPFEDNTGELPNWGFTQSLGLEFGSDYGASLLGDVTNNAGPEIVPELFTFNGELKEQSVHQNFSKLYTHGQSQPTLKSNSEYEVPGEASINYA

SEQ ID NO: 168079 - protein, 88 aa, Glycine max
  unsure (1)..(88): unsure at all Xaa locations
  Clone ID: PAT_MRT3847_122791C.1.pep
PLYSHLLLTPPHIFXSASSXSTPQVLXLFSWXLAHXNXTFTTXXPXTQXQTXXNTXXXXHNTNXSVSPSWALLTSQXXNXILHRFTTL

SEQ ID NO: 168080 - protein, 783 aa, Glycine max
  unsure (1)..(783): unsure at all Xaa locations
  Clone ID: PAT_MRT3847_122792C.1.pep
PRVRQEEAEAKMVAEDLGIDYMWKNIEYSHASKEDEEKIQSALDSEEAIPGNGDWAVKLGINLFYSANLSRSPLYSKQMPYNSVIYSAFGCSSPASSPVEPKVYQRRVNRQKKIVAGKWCGKVWMSNQVHPLLAKRDFEDVEDEKLLIGWILPDEKLERSEITLKSEATSRKSGKKRKMTAENGRFKKGSXLTKNVLSDNSTEDKHNLPPRSILRNKKVRYVERDRAALKGGYCPPYHRKPSNNQTNFSESDAVSDDSLDDDDHMQQRRNVIIEKAKFMDNDVVSNDRXDYDSDWQQREELSSKQVEDTERDAISEDSLDVGSLQLLRKNSRAKHAKNISQEDIISDDQMESPLQKRQRRIPKSRQGKYLTGKDIISDDQLEHKKKKQQRKNPKSRQAKYLNEEDIASDDQLEGHYRRYQRKNSRGRHAKCVAGEDGMPDDQLEDHCQKQQTNFSRKRQNKGIVREVKNEMCDDQLEDHFLKQHRRFPKSRQNKHTEKEVMDDLAENNSHLLHRTPKRKQAKCMEEDDMNSDDEMEDDQPLRRALRSKQAKPKTLLKQANSFQAKKQASRPIKQGSRLLVKSKAPQQIKQPAHLRNKQSNNTQEFSLYMEEEEDGGPSTRLRKRATKAQESEGKLKDKQTKRMKVKNAAAAKVSVGHAKMKDGEAEYQCDIDGCTMSFGSKQELMHHKRNICPVKGCGKKFFSHKYLVQHRRVHEDERPLKCPWKGCKMTFKWAWARTEHIRVHTGARPYVCAEPDCGQTFRFVSDFSRHKRKTGHSAKKNCQ

SEQ ID NO: 168081 - protein, 45 aa, Glycine max
  Clone ID: PAT_MRT3847_122793C.1.pep
MEDLNTIGADCVVISCCCQCLMLQILVFVLLKLPGKLIRKTREYA

SEQ ID NO: 168082 - protein, 157 aa, Glycine max
  Clone ID: PAT_MRT3847_122794C.1.pep
MSLINSPSRVTVGDANYMDWGGAGAGLNNHYRTTYKDDQKSMMEVALISNMDPVNIGLGCSDKPAPVTSLKPRKKTMTSVYLKFFETAADGKTRRCKFCGQSYSIATATGNLGRHLANRHPGYDKSGEAVSNAAARPVTVVKKSQPHGKANQVDYDH

SEQ ID NO: 168083 - protein, 276 aa, Glycine max
  unsure (1)..(276): unsure at all Xaa locations
  Clone ID: PAT_MRT3847_122795C.1.pep
AKMFRWKSERHRVKAVFKLHFHVTQMVQSAVDGLVLSIVPGDIGKVTTRLEKAAVRGGVCRWENPVYETVKFVREPKIXKFSERLYHFVVSTGLSKASSFGEVSVDFAEYADATKPSTVSLPIKNSHCDAVLHVSIQRLQENNDKREEEDSEDAKLKPNDRSLRTYLSNGEIDANSKSDSSEDVSAKANTNGAALSADCRTSSGSDITLSSSDGSSGLDTPRENGLRNGGIHPNNNGFPSDVSHPSEPQKPAVNASAVMYDIHQRSQCDWSARSEH

SEQ ID NO: 168084 - protein, 75 aa, Glycine max
  unsure (1)..(75): unsure at all Xaa locations
  Clone ID: PAT_MRT3847_122796C.1.pep
SIAKDCXXTVEEGHFFSFFHGWXACFVISHQXXWLMSDERYNYGAAHCSEKGLLFISRSTKVXAMXXKVXGMRXG

SEQ ID NO: 168085 - protein, 126 aa, Glycine max
  Clone ID: PAT_MRT3847_122797C.1.pep
PTRPKMRARDVNKVARGEQAPRPAHEFGTVSPPPPPSSTHSIDTKRNKKDEKPSIAENGAELANSTDYKTRQCYVKYVEYNRCIQQKGEKATDCEKLGTHFRSFCPTEWIAEWDKEREEGKFPAEI

SEQ ID NO: 168086 - protein, 50 aa, Glycine max
  Clone ID: PAT_MRT3847_122798C.1.pep
IVCHYSDTPTGYGVSVDSYLLIRLLLILVAHQCICRRKPLLPGSSMAYTH

SEQ ID NO: 168087 - protein, 158 aa, Glycine max
  unsure (1)..(158): unsure at all Xaa locations
  Clone ID: PAT_MRT3847_122799C.1.pep
AFTLLFRKLADCDCFKRIFKQMSNVVWVAPEDKGSLWSQLHYVPXDNMEMQDAYLVNLENVLRELXLHIPEDARQLRRESSLSXLEWLQKADVPTIAQIEEFHSMQRMMHAPVSNDNIDLLLSIDLLGLQGAMXVFPNKIVCNDNLVMANTQEFFDGN

SEQ ID NO: 168088 - protein, 89 aa, Glycine max
  Clone ID: PAT_MRT3847_12279C.1.pep
LGEANNIKTNNKAREETSTSQIPNQTRISPTNHLCKIQIRHKHVLYPLSKVNHKKHNTTKHVKKTTNYLAPFRYTFQQALTREENKKEK

SEQ ID NO: 168089 - protein, 220 aa, Glycine max
  unsure (1)..(220): unsure at all Xaa locations
  Clone ID: PAT_MRT3847_1227C.1.pep
MLVKGCNSNVLCAFFVLQVVNYWAGKGISGFTVYKFRLRRLEGQPTLTXNQVYFTYGRVPQTLTKIRGLVCEDITEGQENMPIPAKLXGDAPPVPPGKGFTYCKFVKVAKNVKLPMNATGCECKGICNDPTTCACALRNGSDFPYVSRDGGRLVEAKDVVFECGPECGCGPGCVNRTSQRGLRYRLEVFRTAKKGWAVRSWDFIPSGAPVCEYTGLLARA

SEQ ID NO: 168090 - protein, 174 aa, Glycine max
  Clone ID: PAT_MRT3847_122800C.1.pep
VFVCLKCCGVHRSLGSQISKVLSVTLDEWSSDEIDAMIEVGGNSSANSIYEAYFPEGFTKPGPDATHDQRVKFIRLKYEHQEFLQPSLRIVSGKSNPPKSISKGIMDSFRITSDSQHMEGMVEFIGMLKVKVIKGTDLAIRDMMTSDPYVIFKLGQQTVQTTVIKSNLNPVWNE

SEQ ID NO: 168091 - protein, 63 aa, Glycine max
  Clone ID: PAT_MRT3847_122801C.1.pep
NRLIGIFCSQNFFLPDLGPPGFFCFPLPFVVGFFLTKKKKKKKKKKKKKKKKKKKKKKKKKKK

SEQ ID NO: 168092 - protein, 64 aa, Glycine max
  Clone ID: PAT_MRT3847_122802C.1.pep
NHKSTNKTKKKTSIADHVRKKNACVNSDLPIINGRGILGECARGISNPKRVLGFTLRGENQPAK

SEQ ID NO: 168093 - protein, 87 aa, Glycine max
  unsure (1)..(87): unsure at all Xaa locations
  Clone ID: PAT_MRT3847_122803C.1.pep
MFKVVRVIGAGGAVALWWALYVLDKLYTVYATXADAMDEQVTGHAYAMVXASHRLQIYATGLADLCLIDGAVRGCSDVIDLASSIML

SEQ ID NO: 168094 - protein, 68 aa, Glycine max
  Clone ID: PAT_MRT3847_122804C.1.pep
HKGGSPNPCTIEVHHLSTPISFITISNRLPTRSNHHLEIPYILQKHLMLHNHINSPMIHQIEQRSNCS

SEQ ID NO: 168095 - protein, 181 aa, Glycine max
  Clone ID: PAT_MRT3847_122805C.1.pep
MNMKLKASRRCQYFLSSDPYSSSLIQQRAVYGLGLNKLGKANTARVHYKSEEHDITEAKMDPLESTEGTGESILLEGNVPQVSSWWQQFPKRWVIVLLCFAAFLLCNMDRVNMSIAILPMSQEFNWNSATVGLIQSSFFWGYLLTQGVAMPAMNNMLSKWIPVSERSRSLALVYSGMYLGS

SEQ ID NO: 168096 - protein, 232 aa, Glycine max
  Clone ID: PAT_MRT3847_122806C.1.pep
QLQNQLRNILAGQKFLLVLDDVGNDDRLKWVELRNLIKVGGAPGSRILVTTRIDSIASMMGTVASHKLQRLSPENSWSLFVKWAFKNEGEEEKHPHLVNIGEGIVNKCRGVPLAGRTSGSSLFSKFEANEWEYVRDNEIWNLPQNKDDILPALKLSYDFLPSYLRQCCALFSLYRKDYEFHSVEVARLWEALGVLAPPRKNETPKDVVEQYLDEILARSFLQNLSVWAYVSI

SEQ ID NO: 168097 - protein, 98 aa, Glycine max
  Clone ID: PAT_MRT3847_122807C.1.pep
GKKQVFGQCFRKSKQVCVVLHFRHAHKTKKAWKGIYNYLERFFGLAPVKQVKPERQSSFSSGPRAKVKNLSFYFRANKDAQFLSTKLGITNKASRGVS

SEQ ID NO: 168098 - protein, 58 aa, Glycine max
  Clone ID: PAT_MRT3847_122808C.1.pep
SSSQFDRSAFTHGGKMLLNFLYLVYRRGCIVLHVKINKRLHSCSSDALSTRIDMPSAL

SEQ ID NO: 168099 - protein, 38 aa, Glycine max
  Clone ID: PAT_MRT3847_122809C.1.pep
LFIEKYPYENTKTFLLNVFPQCVNRCPPNRHKSTMLRT

SEQ ID NO: 168100 - protein, 120 aa, Glycine max
  unsure (1)..(120): unsure at all Xaa locations
  Clone ID: PAT_MRT3847_12280C.1.pep
MVRGPKKHLKRLNAPSHWMLDKLSGIFAPKPSPGPHKQRECLPLLLILRNRLKYALTGKEVQSILMQRLVKIDGKVRTDHTYPVGFMDVLEIEKTDEHFRLXNDTKGRFDAHRIPKDEDS

SEQ ID NO: 168101 - protein, 73 aa, Glycine max
  Clone ID: PAT_MRT3847_122810C.1.pep
RVRWFTLSSFRELEELDQLKTIFFCFRRMSYYYYVTLVKLRIRLQIVKVPSSQSCIRSPPLPIRMQPFRTFQG

SEQ ID NO: 168102 - protein, 78 aa, Glycine max
  unsure (1)..(78): unsure at all Xaa locations
  Clone ID: PAT_MRT3847_122811C.1.pep
EPAIAGCRTLAPATKPLDVNIXXTXAHDLLEGGRDRKEKEDTLGAGHRRAEPNGVAGXDYLERLSYATYDGVPDVNSR

SEQ ID NO: 168103 - protein, 49 aa, Glycine max
  Clone ID: PAT_MRT3847_122812C.1.pep
FSFLGTLSQSNAFYSMIPARGISNLHVSSHLTPSRKMTLEFIIYGMSNE

SEQ ID NO: 168104 - protein, 110 aa, Glycine max
  Clone ID: PAT_MRT3847_122813C.1.pep
EKIYFKKKKKKKKGGKLKKRGGKKKKKKKKKKKKKKKKKKKRGGPPSWGLVPPGFNFGPVPGGVPLFLLGGGFRGGGNQGHGCFLGEIVFRSKFPPTYGPGALRGKPGGP

SEQ ID NO: 168105 - protein, 64 aa, Glycine max
  Clone ID: PAT_MRT3847_122814C.1.pep
DMVNTENNIYICKHNNLFPSCTLVIGGGYLTFSLSTSITRTFQQKLYFFPSCCFGFSLLDNGPA

SEQ ID NO: 168106 - protein, 135 aa, Glycine max
  unsure (1)..(135): unsure at all Xaa locations
  Clone ID: PAT_MRT3847_122815C.1.pep
KKFKIFVVAPPNQIFWVSKLKEIFFFSKRGQIGVFPNLAPIPPPVKKGILKKLFFKTQGLTRVLMGGFFKKNKKKIPFLEKNPEKGSAIFPQKAHQIFXKTKGNFNKGEGKSPPTEAKKIFIQVRTRERASNVIS

SEQ ID NO: 168107 - protein, 102 aa, Glycine max
  Clone ID: PAT_MRT3847_122816C.1.pep
YLDKTVDHRLLSSSSSSRCFWAVSRGFIACMVVNSLTSPRSRPSIPRLPAGPGPSPPHSTSTTPRDYFYTKKPNKQQPRPGSPDHTDFYTHKHKCARHLVHF

SEQ ID NO: 168108 - protein, 86 aa, Glycine max
  Clone ID: PAT_MRT3847_122817C.1.pep
KRLKVNKKNSNKTNSQTSSFHKISLEIISRSNALMILSVFHQTSLEIVSRSNALTILSAFQSLKHRFKVQSLKRFLFKIKINISKT

SEQ ID NO: 168109 - protein, 78 aa, Glycine max
  Clone ID: PAT_MRT3847_122818C.1.pep
LAPKDIRVNCVVPGILKTDFSKVFHGNESLWKNFKEHHQLQRIGESEDWAGIVSFLCSPDASYVNGENIAVAGYSTRL

SEQ ID NO: 168110 - protein, 46 aa, Glycine max
  unsure (1)..(46): unsure at all Xaa locations
  Clone ID: PAT_MRT3847_122819C.1.pep
REIVXRYYDLEGCSYKERKCSFVRVAFGSGWGTKCANEGLHWYYVQ

SEQ ID NO: 168111 - protein, 51 aa, Glycine max
  Clone ID: PAT_MRT3847_12281C.1.pep
HYSVSIRFSESARDLATTRDSGNRAHHLQVHRLLHHAPIGVGRSSPESIHG

SEQ ID NO: 168112 - protein, 50 aa, Glycine max
  unsure (1)..(50): unsure at all Xaa locations
  Clone ID: PAT_MRT3847_122820C.1.pep
DRGLWTLQGVYSHGWAANIASSNAANLHRFLCLLSNHVVGMAGRARDQXS

SEQ ID NO: 168113 - protein, 62 aa, Glycine max
  Clone ID: PAT_MRT3847_122821C.1.pep
EPVSNHHWPESQLAEGQLIQRSLSSAVVAFLLQDIADVHPCEVDRYLAFNPLETVGAESPRA

SEQ ID NO: 168114 - protein, 72 aa, Glycine max
  Clone ID: PAT_MRT3847_122822C.1.pep
TIRNGLNIVTPTEYFSDSTYPFFLAPIFFSSLHLFFLLPINSKKSNVNCSTLIHRFFYWIDPGIYRNNCMGI

SEQ ID NO: 168115 - protein, 352 aa, Glycine max
  unsure (1)..(352): unsure at all Xaa locations
  Clone ID: PAT_MRT3847_122823C.1.pep
MYGFEALTFNIHGGFLEAIVRGHRAGLLTTADYNNLCQCETLDDIKMHLSATEYGPYLQNEPSPLHTTTIVEKCTLKLVDDYKNMLCQATEPLSTFXLEYITYGHMIDNVVLIVTGTLHERDVQELLEKCHPLGMFDSIATLAVAQNMRELYRLVLVDTPLAPYFSECITSEDLDDMNIEIMRNTLYKAYLEDFYRFCQKLGGATAEIMSDLLAFEADRRAVNITINSIGTELTRDDRRKLYSNFGLLYPYGHEELAVCEDIDQVRAVMEKYPPYQSIFAKLSYGESQMLDKAFYEEEVKRLCLAFEQQFHYAVFFAYMRLREQEIRNLMWISECVAQNQKSRVHDSVVFIF

SEQ ID NO: 168116 - protein, 102 aa, Glycine max
  Clone ID: PAT_MRT3847_122824C.1.pep
MAVLPGLIFLHPNNSAPFLPQYPFPGLGRMPGVPKEAPVFLDQLRQILVELAKEGDGGQFHSPGTLLLALGGEVGELSEIFQWKGVVFLGFFFFYVFVRFFF

SEQ ID NO: 168117 - protein, 48 aa, Glycine max
  Clone ID: PAT_MRT3847_122825C.1.pep
ARAKILCSLVKWLFIFFYLLLGTEPVLRPEFSSPATMDSDVTVHTRVL

SEQ ID NO: 168118 - protein, 154 aa, Glycine max
  Clone ID: PAT_MRT3847_122826C.1.pep
IIKKGGGRFWGSSFSSPCLRRFTFFLGAPNFISLPGFFPRRAWETPGVPHFFRFAALPLFPGWVFTKGAPPVPLSHLLPPLFGFWAPPFSGPFAPGVGVFPPRVPFSFAGPFAPVLLVFFLSFFARFAGFPRKVLIGGLLLGFRFSVFRPLAPK

SEQ ID NO: 168119 - protein, 85 aa, Glycine max
  Clone ID: PAT_MRT3847_122827C.1.pep
RRTCPSLTSLPPFNPPVSTLTNPLRAQPPTGHVPQDAKGIAVGPRLVAHLPFNPTSFAKLLAHMGYPYITIQSNYTLHPHMAPNI

SEQ ID NO: 168120 - protein, 64 aa, Glycine max
  Clone ID: PAT_MRT3847_122828C.1.pep
SSQPSLPHILILLVQHYIKRLFLSFPKIFPLESHKASPSHVHIFLEKPLIYISTLLYLITKFIS

SEQ ID NO: 168121 - protein, 51 aa, Glycine max
  Clone ID: PAT_MRT3847_122829C.1.pep
VSIPHEQSGADLPPPAGILCWSEEFVHTLWQLSKSLSQSQSCLEFQLDIAL

SEQ ID NO: 168122 - protein, 217 aa, Glycine max
  Clone ID: PAT_MRT3847_12282C.1.pep
VDPRVRVVCVVVAVIGFVIRHKWQVSEARKEEIKRLFILAAEETARAEKEASYEYGTAVSAAPTNLCAVCYFPATARCAQCKSVRYCSFECQTVHWRQGHKLECRPPSTTHQSDGATSDLGSKVVEQGYSGIHVGKSESEGKECKIASERPPIFDICFSPKVSSGKDANIRVESLAEGNITDSNSELSSNSFSGFSACTGSSDSSGGSSVCGSVMWN

SEQ ID NO: 168123 - protein, 98 aa, Glycine max
  Clone ID: PAT_MRT3847_122830C.1.pep
TFTHTLCGLLLSGTTIMMIRKHMGVTRVLYTLRCHETRTTRYCCVPNLTYMYRAGAMLGKSALYRTIICSHLRKEAALYGLRMGAIPSVYYLTHLQHP

SEQ ID NO: 168124 - protein, 83 aa, Glycine max
  unsure (1)..(83): unsure at all Xaa locations
  Clone ID: PAT_MRT3847_122831C.1.pep
PAVGSIDDTDAHYGSTGVYGLYSDRLQRETTGGYASDSVXPLDIIGGPYYGTNSVYTGTGTRIGSTGGIRYGGTGGTDYGTTG

SEQ ID NO: 168125 - protein, 67 aa, Glycine max
  Clone ID: PAT_MRT3847_122832C.1.pep
NHTAIYKSIVDAHIILTPHVPINAMTQVLDNIDNIRDFIPWSSLSGPKIGFVAYLYINRGLASGAHI

SEQ ID NO: 168126 - protein, 46 aa, Glycine max
  Clone ID: PAT_MRT3847_122833C.1.pep
VCHKMWTIQVPPQLTCHKADQHMILPDPMQHAKPSLHMSSRCTYLM

SEQ ID NO: 168127 - protein, 87 aa, Glycine max
  Clone ID: PAT_MRT3847_122834C.1.pep
GVVFFFFFFFFTKKRQCPTFFFIPHSRFCQPNGHRENLQTGLKTLKGLILWLFSYWEPSLQEKKAAPTTYACLAMGAGRLSLLAPTP

SEQ ID NO: 168128 - protein, 39 aa, Glycine max
  Clone ID: PAT_MRT3847_122835C.1.pep
AALLFFFFFNKKGHGILYTPSSQQKILYKGRRHHPLPVD

SEQ ID NO: 168129 - protein, 79 aa, Glycine max
  Clone ID: PAT_MRT3847_122836C.1.pep
PNQLTIILLSIAFSISTKQNKSSKQKRGRVTHSLTHYTKHIKTHHLTPTSTHSLSYLFKKIITSLNPKLAHTFSLSLSQ

SEQ ID NO: 168130 - protein, 38 aa, Glycine max
  unsure (1)..(38): unsure at all Xaa locations
  Clone ID: PAT_MRT3847_122837C.1.pep
HALXEKLFHGSWCNHMISDVQVFGKLPASADQCSNLMI

SEQ ID NO: 168131 - protein, 150 aa, Glycine max
  unsure (1)..(150): unsure at all Xaa locations
  Clone ID: PAT_MRT3847_122838C.1.pep
SIWEELDNYRXSLPCACLTRSYHQQDLVIRFLKGLDERFFVVHSQVLLMDPLPTVNKVFSMVLQHESNIPRIPLPWKNKIVSLMLWTNASLPLLTKITTKTMRVRRETPRVGKSIKVCTYYGRTRHTINECYAKHGYTMASTLSWTSLVS

SEQ ID NO: 168132 - protein, 56 aa, Glycine max
  Clone ID: PAT_MRT3847_122839C.1.pep
LTVVLILLAGRDTELEVYLSYSALEEAQRLCVDLLVLLHLRSHRTLCLVSVWLCTI

SEQ ID NO: 168133 - protein, 47 aa, Glycine max
  Clone ID: PAT_MRT3847_12283C.1.pep
KRIFAAFSLLFMEGLRYSHGIGTKRMTPFYTLVSIAYETQVLSGSTL

SEQ ID NO: 168134 - protein, 48 aa, Glycine max
  Clone ID: PAT_MRT3847_122840C.1.pep
LFGRSFYLNWEQQCVVKSFNRTRRKICTRVRHGWFAPLLVKDSVPPSH

SEQ ID NO: 168135 - protein, 81 aa, Glycine max
  unsure (1)..(81): unsure at all Xaa locations
  Clone ID: PAT_MRT3847_122841C.1.pep
ASFLKPSLALDKSECVKGHTLRLPSAASIERSNHTTRSSLIIRAGIYGDELVXTCKTVAXPLKGIMAMEDYHASWEKRMPF

SEQ ID NO: 168136 - protein, 57 aa, Glycine max
  Clone ID: PAT_MRT3847_122842C.1.pep
TVIMLAIHNLLLLSSATLTYATITHRKRKNVSDATGKFWLPSVEKWLATAKKGPLFF

SEQ ID NO: 168137 - protein, 52 aa, Glycine max
  Clone ID: PAT_MRT3847_122843C.1.pep
MGKAVTDRGYGFGIRGTSQVFFFVPKRAADYVKRAEPYHMNWGNYGEGRTDK

SEQ ID NO: 168138 - protein, 42 aa, Glycine max
  unsure (1)..(42): unsure at all Xaa locations
  Clone ID: PAT_MRT3847_122844C.1.pep
PCLLTSLSVMWVNPXIPCLRPYLVVSYRLYKIMGLCYIKDNT

SEQ ID NO: 168139 - protein, 42 aa, Glycine max
  Clone ID: PAT_MRT3847_122845C.1.pep
IVKGPLKNLNNVKLHGPGLNTVACKGPKRSSFFFGLAWEPLQ

SEQ ID NO: 168140 - protein, 187 aa, Glycine max
  Clone ID: PAT_MRT3847_122846C.1.pep
NFSSPGRDLEHHSVTAQATFSSSDKTREVSEDKLSPKPATCIGLPDQEINNSEKQSSICDERSDNKVQEIKLVSNLSHDVNHVNTSEACYPVRDEIVTEGNVESTKEKNDLESSLDPNGFIIGKDQNIDISEIPDGAGCSECLNQDIPEENQSSSLLSSPQSSITKKIEELENGTDVSGRPSPVSGS

SEQ ID NO: 168141 - protein, 63 aa, Glycine max
  Clone ID: PAT_MRT3847_122847C.1.pep
LLHKDHFIQSFFFTLTTTLQRQKRKKVPGHLHSSTPTHVPSKHLTNDVHRHRQVVPMMSKMMW

SEQ ID NO: 168142 - protein, 76 aa, Glycine max
  unsure (1)..(76): unsure at all Xaa locations
  Clone ID: PAT_MRT3847_122848C.1.pep
SWWXXAXXXXRDLPXXKTLCFCXSLXASXRRXXCYCQXXXGIGRXIPEGXGTXXGKFTEAISRXWDXXXLXRXXRX

SEQ ID NO: 168143 - protein, 42 aa, Glycine max
  Clone ID: PAT_MRT3847_122849C.1.pep
KITHTGNIITDNKGRVNMCCGMNLKQGLHSCELNERSFDDIT

SEQ ID NO: 168144 - protein, 117 aa, Glycine max
  unsure (1)..(117): unsure at all Xaa locations
  Clone ID: PAT_MRT3847_12284C.1.pep
TACEKTTEGHAIIYNEPKKLFISTCVCECLXGGTEHWYITYCESXCNKLADHCLSNMNQYSDETRHGSHHTISWFNHXACSRSFILETRIPCNKHFLLEFLSYLTIYIAYYTDAHYL

SEQ ID NO: 168145 - protein, 99 aa, Glycine max
  Clone ID: PAT_MRT3847_122850C.1.pep
FAEGQKTIAFFGQQLKSLATLEDFLLDSDTPMESTCQVPKGPQNGGEHLKLHHSDLSLPKKNFESPISFNSPIPNEKTSNGFGKFIPRSKSVSKKGGPR

SEQ ID NO: 168146 - protein, 86 aa, Glycine max
  unsure (1)..(86): unsure at all Xaa locations
  Clone ID: PAT_MRT3847_122851C.1.pep
GKYERVGTTQKRARAGKVAPFTGLKYMAVVPTRKTNQELTFIDRNGGGVLCLQVWPRAGKXMRVTLFYVPDIDDAHVGDEVQYLLM

SEQ ID NO: 168147 - protein, 72 aa, Glycine max
  Clone ID: PAT_MRT3847_122852C.1.pep
KRKKKMFSSQEGLCDISFVYLFTVHFFFINMGAYQRQPQPTNVTHIAPKKRGSQLGENTHWGAFCPAALTKS

SEQ ID NO: 168148 - protein, 246 aa, Glycine max
  Clone ID: PAT_MRT3847_122853C.1.pep
HRTVSMDDIILVKNEMKTTINDVLLGVTQAALTRYLNRAYDVGANSNGVKQRSSVLKKIRLRASILVNIRPAGGIQELADMMAEKSKVKWGNCMGYIILPFSIVLYKDPLEYVRHAKATIDRKKHSLEAICSYACAKLVLNLLGVKVAAAITRRVLFNTTVAFSNVPGPVEEISFYGHPVAYIAPSVYGHPLALTIHFQSYANNMTISLAVDPLVISDPYLLCDDLEQSLKLIRDAIQKKHTVDAV

SEQ ID NO: 168149 - protein, 197 aa, Glycine max
  Clone ID: PAT_MRT3847_122854C.1.pep
GSSFIGRASAKNKGRIARYLANKCSIASRIDCFSERGTTTFGEKLREQVEERLDFYDKGVAPRKNIDVMKSAIESVETEYTAMETEAPVEVSGKKAKKKKHKASVTDDGDNMAVDKITETTNGDALEDHKSEKKKKKKEKRKLDLEVELNDQAMDGGANGVESEQDGAVKKKKKKDKRGDNGEVLEAAIETKKKKKK

SEQ ID NO: 168150 - protein, 109 aa, Glycine max
  Clone ID: PAT_MRT3847_122855C.1.pep
VWVGAEADGVSRMKEASILACSPSSMVQPRPRKVALAFKAQYGVFALVNPSTSNRRTQDSKASVASDEQTGHGLRLNASPQTSQEVNAGFMCPPNMPEVQLVRAKIMPP

SEQ ID NO: 168151 - protein, 396 aa, Glycine max
  unsure (1)..(396): unsure at all Xaa locations
  Clone ID: PAT_MRT3847_122856C.1.pep
SQQLKEKKAGQFKISLGVSDPKIGCQISELPKIPCQSNEFDSELLRGVRLHFDSPXDLEKAQLGLGHSYSRAKVKFNVNRADNIVIQAIFLLDTLDKDINSFSMRVRWFVLDKWYSWHFPELLKIINDNYLYAKVAKFIEDKSKLSEDKIAAVTDIVRDEDKAKEIVEAAKASMGQYLSPVDLINVQQFAQRVMDLSKYRRKLYDYLVAKMNDIALNLASLIGEVVGARLISHAERGTTTFGEKLREQVEERLDFYDKGVAPRKNIDVMKLAIESVENKDTAMEIEAPVEVSGKKAKKKHTAVVTDDMAVDKPTETTNGDALEDHKSEKKKRKKEKRKLDTENDQAMDDGANGVESEQDGAVKKKKKKDKKGDNGEVLVAAIETKKKKNKSKNRDT

SEQ ID NO: 168152 - protein, 137 aa, Glycine max
  Clone ID: PAT_MRT3847_122857C.1.pep
MADSKAGLRKPAFTKVDQLRPGTSGHTLTVKVVNAKMVMQKGRSDGPQSRQMRIAECLVGDETGMIIFTARNDQVDMMKEAATVILRNAKIDMFKGSMRLAVDKWGRVEVTEPASFTVKEDNNLSLIEYELVNVVVE

SEQ ID NO: 168153 - protein, 137 aa, Glycine max
  Clone ID: PAT_MRT3847_122858C.1.pep
MADSKSGLRKPVFIKVDQLRPGTSGHTLTVKVVNAKMVMQRGRSDGPQSRQMQIAECLVGDETGMIIFTARNDQVDTMTEGATVILRNAKIDMFKGSMRLAVDKWGRVELTEPASFTVKEDNNLSLIEYELVNVVVE

SEQ ID NO: 168154 - protein, 48 aa, Glycine max
  Clone ID: PAT_MRT3847_122859C.1.pep
LAAFKVPTQTCGDGFSLSKILDRYLTHSTATSTCTFIISYLFFVRVSK

SEQ ID NO: 168155 - protein, 281 aa, Glycine max
  Clone ID: PAT_MRT3847_12285C.1.pep
MLGAVAASTSLCFSPSTYSTRIVVLRRISNSTLALNNGHSFLLLSAKPMHFSSHKSSRRQPHFLAQAAASSAVNAEYVEEPATNVKFQTSLSFPGCSNSLTLFGTGYREKVFAIIGVKVYAAGLYLDQSIALELNAWKGQSKEAIQGNSSLFETIFQSSFEKSLQIILVRDVDGKTFWDALSDAISPRIQQPTTTDETALTTFRGVFLDRPLKKGAIIILTWLNPSGLLVSVSSNGLPSTMDATIESANVASALFNVFLGDSPVSPSLKASVAESLSKVLK

SEQ ID NO: 168156 - protein, 72 aa, Glycine max
  unsure (1)..(72): unsure at all Xaa locations
  Clone ID: PAT_MRT3847_122860C.1.pep
FDFYALKNLALLIITLGGXEVDGRSHVITGQRPSSPFRPGFFWYSPRLRAVGASNCISVSLLPRVGGGGPLA

SEQ ID NO: 168157 - protein, 137 aa, Glycine max
  Clone ID: PAT_MRT3847_122861C.1.pep
MADSKSGLRKPVFTKVDQLCPGTSGHTLTVKVVNAKMVMQRGRSDGPQSRQMRIAECLVGDETGMIIFTARNDQVDTMTEGATVILRNAKIDMFKGSMRLAVDKWGRVELTEPASFTVKEDNNLSLIEYELVNVVAE

SEQ ID NO: 168158 - protein, 137 aa, Glycine max
  Clone ID: PAT_MRT3847_122862C.1.pep
MADSKPGLRKPVFTKVDQLRPGTSGHTLTVKVVDAKMVMQKGRSDGPQSRQMRIAECLVGDETGMIIFTARNDQVDMMKEGATVTLRNAKIDMFKGSMRLAADKWGRVEVTEPASFTVKEDNNLSLIEYELVNVVVE

SEQ ID NO: 168159 - protein, 364 aa, Glycine max
  unsure (1)..(364): unsure at all Xaa locations
  Clone ID: PAT_MRT3847_122863C.1.pep
MSESNAIANGLAGAGGGIIAQIITYPLQAVNTRQQTERTLKRNKQSFTSNSTTAPGTLLQIFQVIGTEGWGGLYSGLKPSLLGTAASQGIYYYFYQVFKNKAVTIAAARKVKGRGDGTVGMFGWLVVAAIAGSLNVLFTNPIWVLVTRMQTHTQAQRKIMDEKKEALRKAASESTIADSTLQDKLAELNSIKPRPYGTIHAANEFYNEAGIVGXWKGIIPALIMVCYPSIQFMIYESSLKQLWAXRAAEELGKTRISALEVFLVGAIAKLGATVSTYPLLVVKSRLQAKQEIGGSSSYRYSGTFDAVLKMIRYEGLPGFYKGMSTKIVQSVFAASVLFMVKEELVKAFMVVADKSKKVVSNISS

SEQ ID NO: 168160 - protein, 155 aa, Glycine max
  unsure (1)..(155): unsure at all Xaa locations
  Clone ID: PAT_MRT3847_122864C.1.pep
LVLFLLVPLRFINXGMLRTCAPPHPGDFTNSKQLYRWSGFPLGCFIGSPLCRAPFGTMRIYGSGLYVFTHHSITGSGNGPPRVLYSFFVLSWGPFYTCLVLLFLRAFCLVSFYRSRFSLISFLYRKPTPLPVLLISPPPPPKEGGRHTVMTGNLP

SEQ ID NO: 168161 - protein, 151 aa, Glycine max
  unsure (1)..(151): unsure at all Xaa locations
  Clone ID: PAT_MRT3847_122865C.1.pep
KKNKIFYIIPHQKLPIKQLATLHTRLCDRCKILQSCIHETISWHIHGDYKRSPQKGKGRKGTTQSWQEWALSSKRIAPKHQTISCELRPGETADSTVPRMQSSLWTMATSVHRAPSTSKIQKLKKLWQPSTSLIXLFQFLPFSAQHAGQHH

SEQ ID NO: 168162 - protein, 71 aa, Glycine max
  Clone ID: PAT_MRT3847_122866C.1.pep
KKGLAALIFFYSNIHYTPLRLILSNISSLARNLCHKGHFEAHWILPLTQRGSCIIASLVSKSKDIMAYGFH

SEQ ID NO: 168163 - protein, 98 aa, Glycine max
  Clone ID: PAT_MRT3847_122867C.1.pep
AEQAKSFRPHDDDDDDSDDDFSDDEELQSPIDDVDPFVFFVDTIKVIQSSDPSRFVNLTQTLEFNYQALANGVAQHAEQRRAEIEKEKIEKSTAATAS

SEQ ID NO: 168164 - protein, 391 aa, Glycine max
  Clone ID: PAT_MRT3847_122868C.1.pep
MRRMLTTDGQEVFEEVLEIVSYMTFFSPTISLDMWSLWPLMMEALADWAIDFFPNILVPLDNYISRGTAHFLTCKEPDYQQSLWNMISSIMSDKNMEDNDIVPAPKLIEVVFQNCRGQVDHWVEPYLRITVERLRHTENRDLKCLFMQVIADALYYNAALTLSILQKLGVASEIFHLWFHLLQQVKKSGMRTNFKREHEKKVCCLGLTSLLALPADQLPAEALGRVFRANLDLLVAYKEQVAEAAKEEEAEDDDDMDGFQTDDEDEEGNGFDKEMGVDADEGEDADTITLRKLAEQAKSFRPNDDDDDDSDDDFSDDEELQSHKDEVDPFVFFVDSIKVIQSLDPSRFENLTQKLEFNYQALANGVAQHAEQRRAEIEKEKLEKSTAATAS

SEQ ID NO: 168165 - protein, 91 aa, Glycine max
  unsure (1)..(91): unsure at all Xaa locations
  Clone ID: PAT_MRT3847_122869C.1.pep
XLELXXVAIRTYAMXISQRXXPRXTXXEXGINXAXRXKXXLRLXXANILRRXSFDNICXFSFXLXPGXLLXNLPVXDLAVAFDXASKXSXE

SEQ ID NO: 168166 - protein, 72 aa, Glycine max
  Clone ID: PAT_MRT3847_12286C.1.pep
VTLIPCVAHTTSIARWFHSHLNYWTCDNSAPGPTLYFLQLIFHNLFQHLLFLAIFNLYNSLVLRVYVCAISA

SEQ ID NO: 168167 - protein, 76 aa, Glycine max
  Clone ID: PAT_MRT3847_122870C.1.pep
ILTSSKEGGCYTHYRTYFYYQTIKSLPTELIKERLMCIDTRGLKLMQTIWCEPTHYLSHKIEPNTTSVGTDRVISS

SEQ ID NO: 168168 - protein, 66 aa, Glycine max
  Clone ID: PAT_MRT3847_122871C.1.pep
PLVRPPVMVLPLGEDGTPPGYGPVIPGCPPGPGRGGFFQEGLREFRGFCFSPPEVGSLPKSLWAST

SEQ ID NO: 168169 - protein, 97 aa, Glycine max
  Clone ID: PAT_MRT3847_122872C.1.pep
DHNRQWVNIKEALARGRYDWMCKALEVFLRVMAEERKLKKEENNVDSSSSSVLDVSENQNMSSKYYKRTTTTQHHSMSSRTNILAHASQEIAIHFGY

SEQ ID NO: 168170 - protein, 301 aa, Glycine max
  Clone ID: PAT_MRT3847_122873C.1.pep
CMPAVCSIPYSAHTSNPGLSATTTRFLSASSPNSSVQNQVFRPINTPIMSPATNITMPNGANHGMRRGSRPTLVRNKYQPHSVPRPALGVRSHTIQRERGNGSSSLRPKVLRPHMMSRGVGSAGNTSMANNSHGSSVFGNAGNMTQQHLNYCTTTGMPNYRNCNGPSDLCHPTNISFYSQPSSLPASLSCVNQHNVAAETQAYSQPLPQSNIIQGFDQNCIQVSRAPSSYVAHPNSSQHGKEPQIRSQNGNASGITTQCGTVSQNTCQPHPHEESPRETAGKFSAFDSSWIDNTGQSILQS

SEQ ID NO: 168171 - protein, 90 aa, Glycine max
  Clone ID: PAT_MRT3847_122874C.1.pep
HMEPFRITLYRFGNTSSSSVWYELASCEAKGRIKKGDRVWQMAFGSGFKCNPAVWVALNTIEPGSVKSPWRDEIHSFPIKIDPLPVKNNK

SEQ ID NO: 168172 - protein, 58 aa, Glycine max
  Clone ID: PAT_MRT3847_122875C.1.pep
YAVVTVVSQCMYTISYKFHILNVDNEPSIDVYNRSRNFRTLTISYVPYVWFFKSLDLL

SEQ ID NO: 168173 - protein, 57 aa, Glycine max
  unsure (1)..(57): unsure at all Xaa locations
  Clone ID: PAT_MRT3847_122876C.1.pep
ASIFFSYVCLRFLIVLLXIQIHIRFHQVNLVFYHRXCVLTIVRCAHSNVRVVDAVIP

SEQ ID NO: 168174 - protein, 425 aa, Glycine max
  Clone ID: PAT_MRT3847_122877C.1.pep
PRVRIASSNTTATSWIRRNVAAYHPSTRIAAVSLGDEVLSSLPSAAPLLLPALRSLHAALVYSNLHNDVFVSTPHSASVILNPFPPSQAFFNQTLETFILPLLHFLSQTNSPLMLNLYPYYVFMQNRNLVPLENTLFKPLPFSKQMLDPNTLLHYTNLLDAMIDAAYFSMKNLNVTDVTVLVTETGWPSRGDSKEPYATPSNALTYNSNLIKHVLDRSGTPLHPETTSSVYIYELFNEDLRSPPVSEANWGLFYGNATPAYLLRMSGIGSFLASDNANQTYCVVEEDHGVDLKTLQAALDWACGPGRANCSEIQPGESCFQPNNVKNHASYAFDSYYQSQGKSPGSCDFKGVAMITTSDPSHGKCIFPGSKNLTNKTKEVVNTTQSSNAGDNLRFRTFRSMKISAINNILHNYFAAFTILLLFLL

SEQ ID NO: 168175 - protein, 99 aa, Glycine max
  Clone ID: PAT_MRT3847_122878C.1.pep
DLDGEIIVAALSRRRIHSLHSMNDDDDADYMIVSQKECFYFYICISFMSEKYNERILCYVSEDRDKERKWGERKEREKELCNEMKMGYNFISILHFLWA

SEQ ID NO: 168176 - protein, 103 aa, Glycine max
  Clone ID: PAT_MRT3847_122879C.1.pep
TDAPLIEPMLLSWTTGSTIDAHEGVNQYVKVSETFMKYLGDGHRREVLKEEVSHPTYNGETRKIDNPDIAKFWQVHVSPSTFCAFPGLCGIEKDRRTAVPYTA

SEQ ID NO: 168177 - protein, 98 aa, Glycine max
  unsure (1)..(98): unsure at all Xaa locations
  Clone ID: PAT_MRT3847_12287C.1.pep
TXXDXAFXXQXXXRXXXNXXTXXXXSCXXAXAXRLXIXYXXAXXLXATXXXLXXSXXNMXXDXCSHXRSTKNRXRXXXRXXXXXLEPNSELTYACXXR

SEQ ID NO: 168178 - protein, 92 aa, Glycine max
  Clone ID: PAT_MRT3847_122880C.1.pep
EREREREREREREREREREREREREREREREREREREREREREYSNRNFIIIITTLYVFRMITNPMTNFFVLNIFLTLGIALSSRNVEVLQL

SEQ ID NO: 168179 - protein, 38 aa, Glycine max
  Clone ID: PAT_MRT3847_122881C.1.pep
TFLYHRGLVSSPNKSCGDVLHKLAELISLPFQEMQFQE

SEQ ID NO: 168180 - protein, 254 aa, Glycine max
  Clone ID: PAT_MRT3847_122882C.1.pep
MAYRRRQQQGFSKPSFSTFEEKTTRNPNNPFPLPNDDVEGSASSSSSSSLAAKAIRASSARRDSSLSSLYGLSSASSSPVSSSQPTPTPPPSSKDSRPYEYTSMKNMNESKNGFWGVLARKAKSIIEDDNVPQQSEMSGTGRSQFPGVASRSKFQNSNHLEDSNLKRDGPSFIKGLDAITSSLTHIGGTIGKSLEEGLTIVENRTSDIIQETRKHIKKKPGNSVGQNQETNHSTTLHQSQLRNQMSPKTDQELH

SEQ ID NO: 168181 - protein, 32 aa, Glycine max
  Clone ID: PAT_MRT3847_122883C.1.pep
DERFLITLGVRYYIDLMYYLLNLIIKIVFLPL

SEQ ID NO: 168182 - protein, 88 aa, Glycine max
  unsure (1)..(88): unsure at all Xaa locations
  Clone ID: PAT_MRT3847_122884C.1.pep
VALLMPFWVSAXFHELCIAVPCHIFKLWAFGGIMFQVPLVFITNYLQNKFRNSMVGNMIFWFIFSILGQPMCVLLYYHDLMNRKGKLD

SEQ ID NO: 168183 - protein, 92 aa, Glycine max
  Clone ID: PAT_MRT3847_122885C.1.pep
RSTPRPPRVRPASGTTWGNITPNTGNFADSESSFHFSFNTMSPLPVRDTKTNDSVSDDAFSNRTGNDMGGLQTKCSVKDMMNSSKGRNYPPI

SEQ ID NO: 168184 - protein, 54 aa, Glycine max
  Clone ID: PAT_MRT3847_122886C.1.pep
FVFILALSLSLSLYLVAAVLKVGKRIKSKVNVGMKRDPLFIERTIERLASQGSN

SEQ ID NO: 168185 - protein, 54 aa, Glycine max
  unsure (1)..(54): unsure at all Xaa locations
  Clone ID: PAT_MRT3847_122887C.1.pep
VFGEFGDYXXLPSSXDSKLQAIXXSLAKQEDKPCCSVEEXXPVIHAAXLXEVXS

SEQ ID NO: 168186 - protein, 227 aa, Glycine max
  Clone ID: PAT_MRT3847_122888C.1.pep
MGAACCVAARDKTIQSGSTSDNLHRNVRCSPTWSFRWDHRGRVAGEDTSINWFSDGISRNDGSENKNESTYMSEDGSPLQNDQRKRCQKPSISQVTAAHRRNSTSDQSFSRTVSTDVSVEQVNRLAESSIVSCPSPTKPSLPSTSLSASPLSSQCHIPPSSSAPLRWPCHSPGHHLSQQAYYSRIPAVKSPSSFSLSDERPVFSSWSNEVGMHSHGGSSNCWSIPGF

SEQ ID NO: 168187 - protein, 477 aa, Glycine max
  unsure (1)..(477): unsure at all Xaa locations
  Clone ID: PAT_MRT3847_122889C.1.pep
MGGGFRVLHLVRPFLSFLPEVQTADRKVPFREKVIYTVISLFIFLVCSQLPLYGIHSTTGAXDPFYWMRVILASNRGTVMELGITPIVTSGLVMQLLAGSKIIEVDNIVPEXRALFNGAQKLLGILIAVGEAVAYVLSGMYGSVGQLGVGNAILIIIQLCFAGIIVICLDELLQKGYGLGSGISLFIATNICENIIWKAFSPTTINSGRGAEFEGAVIALFHLLITRTDKVRALREAFYRQNLPNVTNLLATVLIFLIVIYFQGFRVVLPVRSKNARGQQGSYPIKLFYTSNMPIILQSALVSNLYFISQLLHRKYSGNFFVDLLGKWKESEYGGGQSVPVGGIAYYITAPSSLADMAANPFHALFYLVFMLSACALFSKTWIEVSGSSARDVAKQLKEQQMVMPGHRESNLQKELNRYIPTAAAFGGICIGALTVLADFMGAIGSGTGILLAVTIIYQYFETFEKERASELGFFGF

SEQ ID NO: 168188 - protein, 29 aa, Glycine max
  Clone ID: PAT_MRT3847_12288C.1.pep
TLTNKTVITNVRAPEQSQIWNKLQSQLYD

SEQ ID NO: 168189 - protein, 141 aa, Glycine max
  Clone ID: PAT_MRT3847_122891C.1.pep
MMKNFAYYFSQKQQHQRFCRFFPHSLGFLVRFLAFHVHPFFIQLCYFVILSLLGYLGLKASKPRTPLRPNDLDLFYTSVSASTVSSMVAVEMEVVSNSQLILLTLLMFVGGEVFTSMLDLVFARYKFTRSVQNKVTPIILT

SEQ ID NO: 168190 - protein, 119 aa, Glycine max
  Clone ID: PAT_MRT3847_122892C.1.pep
WTLKWKEPFLFRHFLLLSVPTSLFINTSQNKLSHLLTLQIQISLFSIFHPLFSSLFFLYSQIHCFIPQLPPLHPNTPFSHVRTSLSLSLSPFHSFILLLLFVKLDCVCLFLCCWKERDY

SEQ ID NO: 168191 - protein, 70 aa, Glycine max
  Clone ID: PAT_MRT3847_122893C.1.pep
AGSCAQTPVSSSLFSLRGPCLDPCLMSFSLSLPLTTAPSTGPSHWMSQCRGQCKGSTFSSNSSVRSLVVR

SEQ ID NO: 168192 - protein, 198 aa, Glycine max
  Clone ID: PAT_MRT3847_122894C.1.pep
MKTTKGGKVMNPTDAYRKELRKKELKRNKKERKKVTEVGILKKDPDQLKKQIDNLEMMKADGALDKARKHKKRQLQDTLNLVLKKRREYEDKMREKGETPVMFSHLGLPRRRTTAEEEERVKHPKPEDSVYYHPTLNPTGAPPPGKPPMFKSSIGPRIPLSGASSSAGASSSGTELEDDVLTVPPPPPPPTLPDGSSA

SEQ ID NO: 168193 - protein, 602 aa, Glycine max
  Clone ID: PAT_MRT3847_122895C.1.pep
MVKHYRPPGKKKEGNAAKFVIRSQALKQLQISLPLFRKLCILKGVTPREPKKKFKGTHQTYYHVKDVSFLHHEPLVEIHRAIRVHERKIKKAEAKKNLERANRLREKTPKPKIARIIRQRYPRFVDALGELDDCLTVVHLFAALPASESKKIDVECVHKCRRLAHEWQAFVSRTHKLRKTFVSVKGIYYQAEVEGQTITWLTPHSLQQVVSDDVDITTMLNFLQLYEPLLSFVKVRRYHSINLKYPPILDPQLEALAADLYALSRYASANTRPSVLISEASQAESEQVETKQKEAETGDKTSELRLAQLQHQLPSNEPGALMHLVEEVTGEDEEDQDTKECKKLFKNMKFFISREVPRESMFFVIPAFGGIVSWEGEGAPFGESDQSISHQIVDREAQGHRFLSREYVQPQWVYDCVNARIILPTENYLVGRTPPPHLSPFINYDEEGAYIPDYAKTIKHLQAAARKEILPLPGVGKEDLEDPQNLLVEGIIDRAEANDAAQRKQKMMILEQQYRDDLKKELQGVTYTSAGSKETSTGVVQTGESTASVQENVDDDMSKVMMSRKKRKLAEAMKISKKLKEAQTDRIKQRKKKIDEAQRQRS

SEQ ID NO: 168194 - protein, 69 aa, Glycine max
  Clone ID: PAT_MRT3847_122896C.1.pep
WLKKKKAWFSLKHLSIKSRQAEKKGSRGVEGNKHSLYARLSTPNWCFELGLYFLGREMYANYHPTHILP

SEQ ID NO: 168195 - protein, 63 aa, Glycine max
  unsure (1)..(63): unsure at all Xaa locations
  Clone ID: PAT_MRT3847_122897C.1.pep
YFXXXSTIWXYVXHKFXLHFXRDXHNXXQDXTNKXLLXXAXVHLRXXXKLEPNSELTXAXXRR

SEQ ID NO: 168196 - protein, 50 aa, Glycine max
  unsure (1)..(50): unsure at all Xaa locations
  Clone ID: PAT_MRT3847_122898C.1.pep
XCHKSNXTXHLAXHXINCNXCLXXGXIYXRPXXQSXYXGYANVRXSXAVE

SEQ ID NO: 168197 - protein, 123 aa, Glycine max
  Clone ID: PAT_MRT3847_122899C.1.pep
QRCGLRLLRFCIFRTYCFTLISINCGLAFLGSSRTIRCFPSIGYCWRLTLPADSHFNSLFTLLHVWAVFGTGSHGRALSQCSLTPTSGRPPIELWQSCCLSLASLCPSKGPTQLNSSWQACCL

SEQ ID NO: 168198 - protein, 51 aa, Glycine max
  Clone ID: PAT_MRT3847_12289C.1.pep
FLYNCEILKIIMLKSLFFEIVIFILLLNNPDTKGKSIKLYFFVVIFLLFYD

SEQ ID NO: 168199 - protein, 121 aa, Glycine max
  unsure (1)..(121): unsure at all Xaa locations
  Clone ID: PAT_MRT3847_1228C.1.pep
KVGASFSEGGAVLTQNGRFYLGEQNNDPERAKKLPCLADLVGKDSXGTAHRAHASSEGGTKYLQXSAAGFLSQKEPVYLVAAXEGPKGPKVAXFGGSNVSYQTGEIDSLSQKADILLVVGG

SEQ ID NO: 168200 - protein, 87 aa, Glycine max
  unsure (1)..(87): unsure at all Xaa locations
  Clone ID: PAT_MRT3847_122900C.1.pep
DLTPRMAPNLDRHLVFPLLEFLQERHXYDDNHILKAKIDLLNNTNMVDYXMDIHKSLYHTEEVPHDMVDRRXEVVARLKSLEEAAAP

SEQ ID NO: 168201 - protein, 66 aa, Glycine max
  Clone ID: PAT_MRT3847_122901C.1.pep
KKLTGEGKKLGFERTKALIRRFHEGDKNSIRGHQSNHHKSYGFYRDLSTLEGLSGRASENHGRRPL

SEQ ID NO: 168202 - protein, 73 aa, Glycine max
  Clone ID: PAT_MRT3847_122902C.1.pep
NPVSFRGDPPIWKIHCTPRKPINHQGHCNCFQFVGEHPQKFNCSIISASLSFLLTLKDSEAGYKQGLIKTCCL

SEQ ID NO: 168203 - protein, 82 aa, Glycine max
  unsure (1)..(82): unsure at all Xaa locations
  Clone ID: PAT_MRT3847_122903C.1.pep
INSTPVLNRVLFPNSHKGGKPQHFYNSLLFTSFKHKYIFFFFLIYIFXFLYNLIFFYIFLFFFFFFFFFFFFFYFFIIFKFF

SEQ ID NO: 168204 - protein, 506 aa, Glycine max
  unsure (1)..(506): unsure at all Xaa locations
  Clone ID: PAT_MRT3847_122904C.1.pep
MEAGDEKKMELEHVTSLSRRDHERPNPFFRVRAVSLGGWLVTEGWIKPSLFDGIPNKDLLDGTSLRFKSVSTGKYLCAKSGGGNVLLANGTGASTAWETITLWRINEDTFRLRVFNKQFVGLDGINVVAVSDTPIHSDTFRIVKESDSSSRVRIKAPNGHFMQAKTEELVIADVSNANGWGDDDPTIFEMTIVATLQGEFQLTNGYGPNKAPEIMKEHWNTFIVEDDFKFMKSHGLDAARIPVGWWIASDPYPPPPYVGGSLHALDNAFKWAQKHGLKIIIDLHAAPGSQNGFDSSSTRDGSLEWGKTYENIKQTVYVIDFLTARYAXNPSLYAVELLNEPLFPNVTLESLTKYYNDAYNAVRRHSSTAYVVLSNRLDLSSQLEIPNTKELFPLATGLRRCVIDVHYYNLYYDIFEDMNAQENIDFIYKVRSSQLDNITTVDGPLTFVGEWTAEWKVEGATKKDYQRFVKAELDVFGRATFGWCYWTLKNVNNHWSLEWMIKNGYI

SEQ ID NO: 168205 - protein, 139 aa, Glycine max
  Clone ID: PAT_MRT3847_122905C.1.pep
MESLPLETAEKIILRWDSTASEDARDKMIFSGGVDRDEADLYLQAVDEIQRSLSSVSVSSSDKVNSAIQIAMARLEDEFRNILISHTIPFDPSTSEDDPSQTLPDLLPSSTSSPKHPLTNLEQDSTETEPETTNTTTTT

SEQ ID NO: 168206 - protein, 59 aa, Glycine max
  Clone ID: PAT_MRT3847_122906C.1.pep
NHRQLYTHHACTTHSCVTNLGLCIARHLLTILHTLDNWSTQYMILSGDGNEVFQRCHQT

SEQ ID NO: 168207 - protein, 65 aa, Glycine max
  Clone ID: PAT_MRT3847_122907C.1.pep
GAPPPPYLGSGQMPNLKTGNPTGQPEKKTPNPGGTTIWPPPPPGGVSLLPPGKTGEKTLCPPPPP

SEQ ID NO: 168208 - protein, 31 aa, Glycine max
  Clone ID: PAT_MRT3847_122908C.1.pep
YSTSKFINYLTHYVLFIGNVLLCIFFQIQHL

SEQ ID NO: 168209 - protein, 55 aa, Glycine max
  unsure (1)..(55): unsure at all Xaa locations
  Clone ID: PAT_MRT3847_122909C.1.pep
SLLLHILHSLSIIYHPFSLFCKENNLIKSICTKIGFYKFCGKLLVLSYNGWMXMG

SEQ ID NO: 168210 - protein, 60 aa, Glycine max
  Clone ID: PAT_MRT3847_12290C.1.pep
GASTLIFPALSGYIFVHHWCKSYGGSSLWVRLLVYSGNVIVLLRSLFFPPTPPPPPPPPP

SEQ ID NO: 168211 - protein, 62 aa, Glycine max
  Clone ID: PAT_MRT3847_122910C.1.pep
GRPNTNKQEGPRLKYLEPFYRLKRLSRNHLKNYVRRRPNHLVNQGNSLGTPLLRAEQPDPEM

SEQ ID NO: 168212 - protein, 62 aa, Glycine max
  Clone ID: PAT_MRT3847_122911C.1.pep
GLSFIKKIHRNIKNSQLTLHQKKTLFDKFFLTKVIPKAKGLKDNPLIVLRFWYKIFPPPPTH

SEQ ID NO: 168213 - protein, 67 aa, Glycine max
  Clone ID: PAT_MRT3847_122912C.1.pep
TILPWEYGTRMLFFSSFACQMLDHSFHYLQYQTMLVQRLKFHTFLIAFRKIQSELDFLKSNEKCKKQ

SEQ ID NO: 168214 - protein, 133 aa, Glycine max
  unsure (1)..(133): unsure at all Xaa locations
  Clone ID: PAT_MRT3847_122913C.1.pep
XLDSALGXFRTFNINPSPPSAESTTNSKNDSPSLPSVVQRFNICLPNLRTNKNEKHNAFKDSHDINTLNKLMDQTKHAVKXLESISPPTAYDLLNDAYMEECDKQFQHLTDSHDMESILHTIMHQLMSKEILH

SEQ ID NO: 168215 - protein, 141 aa, Glycine max
  unsure (1)..(141): unsure at all Xaa locations
  Clone ID: PAT_MRT3847_122914C.1.pep
TRPAEVRRSRRLTAPFLRTAANYEYGLFWHXYQEGKIESEVKLTGILTLGASQPGETGKYGTTIAPGLYAPVHQHFTGARMDMALQCKPGEASNQVRDVNVKDEKTGDNNVHNNAXNAEEQLLKSQMEAKRDCDPLSASNW

SEQ ID NO: 168216 - protein, 37 aa, Glycine max
  Clone ID: PAT_MRT3847_122915C.1.pep
DEEENCEVPLILRYLRLYRRNLPYLSLLESNSEFRYE

SEQ ID NO: 168217 - protein, 142 aa, Glycine max
  Clone ID: PAT_MRT3847_122916C.1.pep
MALVQPFASLSISFRDARVFTAPKCSPTTHFPHRNLVPTRASFIAGSPLLIRRNHGRNGACKAMPVSIRCEQSTQEGNSLDVWLGRLAMVGFAVAITVEIATGKGLLENFGLTSPLPTVALAVTALVGVLTAVFIFQSASKN

SEQ ID NO: 168218 - protein, 146 aa, Glycine max
  Clone ID: PAT_MRT3847_122917C.1.pep
MDKSCDPSADSTYTSLPANPNNNSRDQYLRHLNKLSQKISKPLIKKPTFDPPQAQAQAPNPNNQVQAQQNLQHQPQVYNINKNDFRDVVQKLTGSPAHDRISTPSSIQPPKPPSSRLQRIRPPSLPQITNRPPSLLNPTTLLPQLP

SEQ ID NO: 168219 - protein, 397 aa, Glycine max
  unsure (1)..(397): unsure at all Xaa locations
  Clone ID: PAT_MRT3847_122918C.1.pep
VGTCQAPVIQHFSETISGSTTIRSFEKESRFNDINMPTRPRXRQPKLYSATAIEWLNFRLDILSTLTFACCLVFLISFPSSMTAPGIAGLAVTYGLNLNAVQTKVIWFSCNLENKIISVERMLQYTSLPSEAPLVIKDNQPDYSWPSFGEVHIRDLQVQYAPHLPIVLRGLTCTFTAGAKTGIVGRTGSGKSTLVQTLFRLIEPVAGQILIDSINISFIGIHDLRSRLSIIPQDPTMFEGTIRTNLDPLEEYTDEQIWEALYMCQLGDEVRKKEGKLDSVVTENGENWSMGQRQLVCLGRVLLKKSKILVLDEATASVDTATDNIIQQTVKQHFSECTVITIAHRITSILDSDMVLFLNQGLIEEYDSPKKLLKNKSSSLAQLVXEYTRRSNSGFGN

SEQ ID NO: 168220 - protein, 72 aa, Glycine max
  unsure (1)..(72): unsure at all Xaa locations
  Clone ID: PAT_MRT3847_122919C.1.pep
TLIHAQSRVALLKLIMLSGCSQTSQLLFSHTNSWNFLRTKNFLVTNIPHPAFLFRSTFLTXIVSELDSTHRK

SEQ ID NO: 168221 - protein, 142 aa, Glycine max
  Clone ID: PAT_MRT3847_12291C.1.pep
SLPRDTAHSFKYRPYAKEDENYLKELNTRQQTRHYGIQNPNSVTSNYLSGSHNMGPSYPACGLASESPYVMNTPAMQRYAPRLDELNHARMDPLGSESAIVGRNGAFEHSAAPPGYGSRMPGFAAGSHHVSSRQNSADRFNG

SEQ ID NO: 168222 - protein, 201 aa, Glycine max
  Clone ID: PAT_MRT3847_122920C.1.pep
MGVLSNMIDREQLKPGDHIYSWRQAYIYAHHGIYVGDGMVIHFTRGAGQEIGTGTVLDNLLFSSSPSHSSDTPCPRCGDQTRTDGVISSCLDCFLYGGNLYIFEYGVSPAFFLAKARGGTCTLAPSDPTEDVLHRSSFLLENGFGVYNIFKNNCEDFAIYCKTGLLVSTSVSVGRSGQAASYLAAASTLVSTPLRFMTTSF

SEQ ID NO: 168223 - protein, 44 aa, Glycine max
  Clone ID: PAT_MRT3847_122921C.1.pep
THTYYTNKVGQLPTLSNSDFILFLSFIFLIFSYLYLNLLFFFSL

SEQ ID NO: 168224 - protein, 301 aa, Glycine max
  unsure (1)..(301): unsure at all Xaa locations
  Clone ID: PAT_MRT3847_122922C.1.pep
MSRTCSQCGNNGHNSRTCTDGGAAASCGGSPRENGIMLFGVRVMTEANSSFRKSASMNNLSQYDAESNAADAGYASDDVVHASGRTRERKRGVPWTEEEHRLFLLGLHKVGKGDWRGISRNFVKTRTPTQVASHAQKYFLRRHNQNRRRRRSSLFDITTDTVMGXSSTIMEEEQVPQETMAAPIPAAYPPFPGAGFPMSLSPVVLPVSGERLTKPIRPTPIVPVPPSSKMANLNLKGKASRTNLIEPLPLSLNLPSPTPRSQDQSPANSGHSSPSSSSAAAFQAMSAAKFGGGGDSIISVA

SEQ ID NO: 168225 - protein, 55 aa, Glycine max
  unsure (1)..(55): unsure at all Xaa locations
  Clone ID: PAT_MRT3847_122923C.1.pep
MAKDXVXVLXVTGAAGQIGXALVXXIXXGVMXXPDQXVILHLLDIXSSRRVGKVQ

SEQ ID NO: 168226 - protein, 125 aa, Glycine max
  Clone ID: PAT_MRT3847_122924C.1.pep
LPSYMCSTTTFLGGGGRGGGGWGGGRGKQGGRLAGMGGSLRRREGRDDASWPYLFKMTKKITTPCKNTNPHKKNPPKITPSPTTTYHAPSLYQIPFSDYPPFSSNQKNFTPHYIHAFLPIFKQPP

SEQ ID NO: 168227 - protein, 565 aa, Glycine max
  unsure (1)..(565): unsure at all Xaa locations
  Clone ID: PAT_MRT3847_122925C.1.pep
MSNNNSKKRRHAPPAAPDAVFRIVCPAAKTADVAAIGGDGAKILVEDLVGAEERVVVIVGDESAAQVALIRVLERTMDEETKNSTVSCKLVAPSYQVGCVLGRGGKIVEKIRQDSGAHIRVLPKDQPPPPPGDEFIQITGNFGAVKKAVLSVSACLHENNYGAFKPSGGGSYAPLDHHSRGAYSESAGHSSHMMFVEEDVVFKLLCHHEKVGSLIGPKGXVVRALQNETGASIQIVEAGLDSPVSGCXVTLPLTCEQKHSPAQEAVIRVHCRLTEIGFEPSAAVVAKLLVRSPQVGCLLGKGGLVISEMRRATGASIRIFSKEQIKYISQNEEVVQVIGSLQSVQDALFHITNRIRETIFPIRTPPNFSAPPHFPPFPEMPPPLFRPRNHLMSSGHPPPPQVGHPHDHSTVPPMPVDHQQHAFVHGMGRGPPNMDRVPYPRGYEGPNSPRSWNPLAVDRGNPGGTADTSSLTSRNETPGENGNPLQNPNSLTIEITIPHMYLTHVYGENNSNLTQIRQTSGANVVVHDPKPGATEGLVIVSGAPDQTHAAQSLIQAFILCGQTIA

SEQ ID NO: 168228 - protein, 251 aa, Glycine max
  Clone ID: PAT_MRT3847_122926C.1.pep
TRPRIVCPAAKTEDVATIGGDGAKILVEDLVSAEERVVVIVGEESAAQVALVRVFERTVDEETKNSTVSCKLVAPSYQVGCVLGRGGKIVEKIRQDTGAHIRVLPKDQPPLPPPPGEEFIQITGNFGAVKKAVLSVSACFYDNNSGAFKPLDHHSRGCYSESAGHSSHRMFLEEDVVFKLLCHHEKVGSLIGKGGSVVRALQNETGASIQIVEAGPDSDERVVVISARETSEQKHSPAQEAVIRVHCRLTE

SEQ ID NO: 168229 - protein, 81 aa, Glycine max
  Clone ID: PAT_MRT3847_122927C.1.pep
LLNQTKRNKRECYIIKLTTGEDQKYYEVSRCYILNLRATSHQLPNRIVFNKKNHDITYILLVQEKVFIKKVNVCLVGNYLT

SEQ ID NO: 168230 - protein, 82 aa, Glycine max
  Clone ID: PAT_MRT3847_122928C.1.pep
KAPLLNLVGTQKKGLGGSGIVKVANKAFSSLGGYKLVFCLGPEKEVMIHLCKNVGFRPNGKRIRPLVLLKHTPLVAQFQKLR

SEQ ID NO: 168231 - protein, 254 aa, Glycine max
  unsure (1)..(254): unsure at all Xaa locations
  Clone ID: PAT_MRT3847_122929C.1.pep
DLNILNKIVLSQVIGSLQSVQDALFHITNRIRETIFPIRTPPNFSAPPHFPPFPEMPPPLFRPRNHLMSSGHPPPPQVGHPHDHSTVPPMPVDHQQHAFVHGMGRGPPNMDRVPYPRGYEGPNSPRSWNPLVSFTFQIQGLMPGNLHIYGLNIFYFSIFRNGNPLQNPNSLTIEITIPYMYLTHVYGENNSNLTQIRQQFFDPWVFLXTSGANVAVHDSKPAATEGLVIVSGAPDQTHAAQCLIQGFILCGQTV

SEQ ID NO: 168232 - protein, 126 aa, Glycine max
  Clone ID: PAT_MRT3847_12292C.1.pep
MGSSSKKRNSASEEQTLAADEYPKMLNKKQKNTTTDDDSQQQQPSVKPMERKKKRKALDKGRRRTASQPDPKPVPPSTDSPSTSGGSAMPEFHIGVFKDLAAASKSAREAAAKQMVTELKAVQNAY

SEQ ID NO: 168233 - protein, 91 aa, Glycine max
  Clone ID: PAT_MRT3847_122930C.1.pep
VTKLNEGKSTSQPSNVLVNTTTETAIAEVEDELSLSLTLPNPSPQSSGSEISEAISSCPGFGNNYKDCSSSSTHTLKERINLDLSLALCGN

SEQ ID NO: 168234 - protein, 50 aa, Glycine max
  Clone ID: PAT_MRT3847_122931C.1.pep
QPNAAASSLRVFITPVSSSGLYHKSKFLAINYAIQVLFTEKKVLLKFLLH

SEQ ID NO: 168235 - protein, 145 aa, Glycine max
  Clone ID: PAT_MRT3847_122932C.1.pep
KKKTKPQPFFKATPGSPPETKGGGEGAKPPFGEPKREHQKLFLWEKKKKKIPLSLWGGKQQNSGNLPGPTGEQFGLKAWQRPPWVKRAPGKKKPWGGGERGPPGAPPILKKIFKASKTPWGGGRPQRIFKREPLAPKKKKRGPKF

SEQ ID NO: 168236 - protein, 59 aa, Glycine max
  Clone ID: PAT_MRT3847_122933C.1.pep
RWIIGECPSVSNLPVRSMWKKKGTCFIPWGDQTVRVSYPFPVSCGDINGFWQVNRDPYK

SEQ ID NO: 168237 - protein, 115 aa, Glycine max
  Clone ID: PAT_MRT3847_122934C.1.pep
KSPPFTPKERAPKGFLGEGPWFLIFPPGEAGKNSFFPESPFGGKVYFFGPQNGGVFSPLKPLWEYIILKGVKSPLVYNFKKTRGPRSFFFASEGGLKTPRFGGPRFFLKKGFFPF

SEQ ID NO: 168238 - protein, 86 aa, Glycine max
  Clone ID: PAT_MRT3847_122935C.1.pep
MKFYKFRFLVSISLGFKTINWLKTSLGRLLNRLVGQARLLCNPSRAFKKSLCQVMSQAQALRIQLKPNSSLIKLDLTRLISSPSRS

SEQ ID NO: 168239 - protein, 56 aa, Glycine max
  Clone ID: PAT_MRT3847_122936C.1.pep
HCSHKTICTKGHIYGVIVDTEKRHIDTVDMDVPTSAHYEKRKCGSNCSCTDCTCGH

SEQ ID NO: 168240 - protein, 139 aa, Glycine max
  Clone ID: PAT_MRT3847_122937C.1.pep
VGEATQGQPESNTLLWTKKMNSSHVVRNSSLSSEGNDNKVYPESIFREDSFVHSAVTGNGSPVKLWISTLIIPDFDKSESCSKLPTKDNNTLMAKLLEARLERQKSRSRASISKREVSDENHGNVSGSCNGINTLIFCQ

SEQ ID NO: 168241 - protein, 83 aa, Glycine max
  Clone ID: PAT_MRT3847_122938C.1.pep
RGALLFKKWGCLNFDQQILELFLKAFFKPHPLGDFFKREGEGSFKNGGEWPCPSLFILKRGFFNGLFKNKIVGVMNLCCLQCP

SEQ ID NO: 168242 - protein, 66 aa, Glycine max
  Clone ID: PAT_MRT3847_122939C.1.pep
SILKQSGISICDFMYKSGSSGTRDIQNYWFLLSVISIKSFFYFIIKIYIFYFYILKNGVLIMLNIK

SEQ ID NO: 168243 - protein, 89 aa, Glycine max
  Clone ID: PAT_MRT3847_12293C.1.pep
YSHQIDLIHITGFENLAGLLWIHIDLCDTESILMFYFLCASKGKLRKHLMFYFLCALKRSSWERNVYTDEMTWMHKCFRLCLLQLFIIN

SEQ ID NO: 168244 - protein, 82 aa, Glycine max
  Clone ID: PAT_MRT3847_122940C.1.pep
EGFNLLLINHLHLRAFRGTTKALVMEQWIFFMDQKKIEVDDLRQFPSLLIQRYDNWEAFRGWHFCPQYSDGTFDRQTIGGPI

SEQ ID NO: 168245 - protein, 130 aa, Glycine max
  Clone ID: PAT_MRT3847_122941C.1.pep
QKSNQKKTPPFWGKPKPPITIGKPKELGKQFWDFKPISPPPPPLKYKPVFGRGGGQQKSKGPREAQGPPLGALKKKNKQSFTQLNTKGALEAPELSTPQKKKPKAPAPKSFFKPPKPNWRVSTLKTAPPG

SEQ ID NO: 168246 - protein, 48 aa, Glycine max
  Clone ID: PAT_MRT3847_122942C.1.pep
YIVQQNTKNSDQRDLWLILISQLMGKGSKPGLLPKDNPISQSKLDTHT

SEQ ID NO: 168247 - protein, 52 aa, Glycine max
  Clone ID: PAT_MRT3847_122943C.1.pep
INSLKSVQNETTDEKALRLSIENLRGLCQICLCMPQNLDWNYIKMKNFIALE

SEQ ID NO: 168248 - protein, 87 aa, Glycine max
  unsure (1)..(87): unsure at all Xaa locations
  Clone ID: PAT_MRT3847_122944C.1.pep
VWVCVSACCLGVVWCVVLGVCGRRCGCFSFPWVVVCCVVGGRWGVLVVFVRVAFVSGVLVRLPVPAVXPCFRVCDCARGTSRVFRSG

SEQ ID NO: 168249 - protein, 160 aa, Glycine max
  Clone ID: PAT_MRT3847_122945C.1.pep
EDPSSPGSLGIAISEAVEVAAKNADTKYCLGSVLNHVLLHQSVIGEECIKQMEAIGETPDVIIGCTGGGSNFAGLSFPFLREKLNKKINPVIRAVEPAACPSLTKGIYTYDYGDTAGMTPLMKMHTLGHDFVPDPIHAGGLRYHGMAPLISHVFDLGLME

SEQ ID NO: 168250 - protein, 134 aa, Glycine max
  Clone ID: PAT_MRT3847_122946C.1.pep
TFPCRSPQIPPFKALFKGCPSPWKGFPILWGDPPKWFFFSQKNLKIGVGGSQNLTLGFPQKTWGVQGLTLSFPPKPWGGGMPIISPYPGGGLTNLKINFCFVLGEPNYSFFSPLLKSFPGGYFINCFFEPGGFF

SEQ ID NO: 168251 - protein, 73 aa, Glycine max
  Clone ID: PAT_MRT3847_122947C.1.pep
GIIKSPSTSPRTKAFTRLPLNFTHPLEQTNFTPLQNIFTPKKHMNYPQIRTNAFFFPNFPYSTNFFLTPYIHD

SEQ ID NO: 168252 - protein, 48 aa, Glycine max
  Clone ID: PAT_MRT3847_122948C.1.pep
RPLTFQIFQSLTVPNRSRHTSVSQLRKVWIISNSQSIRHKRVRPSFLS

SEQ ID NO: 168253 - protein, 47 aa, Glycine max
  Clone ID: PAT_MRT3847_122949C.1.pep
PPPLSAVNSDFEFQLLPYIYCSFLINFRLVKENDNKRKGQLTFLNSI

SEQ ID NO: 168254 - protein, 220 aa, Glycine max
  Clone ID: PAT_MRT3847_12294C.1.pep
YDISVGRHIRWTSDMDSCLSAILVQQIKQGARSKFDYTLRPDAFEASVLAINEKFQLYLTKEHVKNRLRTWKKQYAILKELMTQSGFEWDEKRKMVIANDSVWTEYIKKNPDARILKGRVIRNYNELCIILGHCDPADSSINGACANMGMTTDDGVMEVQETKEKEKVKNVVTWTDEMDHCLTELLVNQVMLGNRLEKFFKTSAYIAAQTALNERFEMNL

SEQ ID NO: 168255 - protein, 256 aa, Glycine max
  unsure (1)..(256): unsure at all Xaa locations
  Clone ID: PAT_MRT3847_122950C.1.pep
MGVFSTVLLCLMSLMWMVDARIPGVYSGGAWQNAHAXTFYGGSDASGTMGGACGYGNLYSQGYGVNTAALSTALFNSGLSCGACFEIKCANDKQWCHSGSPSIFITATNFCPPNYALPNDNGGWCNPPRPHFDLAMPMFLKIAEYRAGIVPVAFRRVACRKHGGIRFTINGFRYFNLVLISNVAGAGDIVHACVKGSQTEWMLMSRNWGQNWQSNAVXVGHPVCFTVTPSDSPASTSRNSVSGNGQIAQNNHRPSN

SEQ ID NO: 168256 - protein, 124 aa, Glycine max
  unsure (1)..(124): unsure at all Xaa locations
  Clone ID: PAT_MRT3847_122951C.1.pep
TLFGGLRRLCSERXNMASKLFNSKLSSELHKLNQSLPQAKVVYIHIYDSLLNIIQNPTKYGFEVADKGCCGTGTVEAAFLCNMLDPTTCSDDSKYVFWDSYHPTQKTYQILVGEILNKYTSNFS

SEQ ID NO: 168257 - protein, 259 aa, Glycine max
  Clone ID: PAT_MRT3847_122952C.1.pep
MAVANNVLCIAFIISLTWAVEARIPGIYSGGAWQSAHATFYGGSDASGTMGGACGYGNLYSQGYGVNTAALSTALFNSGLSCGACFEIKCANDRQWCHSGSPSIFITATNFCPPNFALPNDNGGWCNPPRPHFDLAMPMFLKIAEYRAGIVPVAYRRVPCRKHGGIRFTINGFRYFNLVLISNVAGAGDIVHAYVKGSRTGWMPMSRNWGQNWQSNAVLVGQALSFRVTASDRRSSTSWNIVPSNWQFGQTFTGKNFRV

SEQ ID NO: 168258 - protein, 55 aa, Glycine max
  Clone ID: PAT_MRT3847_122953C.1.pep
SLGREVRTQDVGVEGQGIIDQIQHGIDKNIDSSKYCVLVHRHPIMMESQTVSGRV

SEQ ID NO: 168259 - protein, 256 aa, Glycine max
  Clone ID: PAT_MRT3847_122954C.1.pep
MGVFSAVLCLMSLMWMVEARIPGVYTGGAWQSAHATFYGGSDASGTMGGACGYGNLYSQGYGVNTAALSTALFNSGLSCGACFEIKCANDKQWCHSGSPSIFITATNFCPPNYALPNDNGGWCNPPRPHFDLAMPMFLKIAEYRAGIVPVAFRRVACRKHGGIRFTINGFRYFNLVLISNVAGAGDIVHAYVKGSRTGWMPMSRNWGQNWQSNAVLVGQALSFRVTASDRRSSTSWNIVPSNWQFGQTFTGKNFRV

SEQ ID NO: 168260 - protein, 68 aa, Glycine max
  Clone ID: PAT_MRT3847_122955C.1.pep
PPPCFFLGSHAPIFGGGDSHPIGKCRAMLVFVCCLPLRARITVHDISLLMLKLVLILKATQKKNKIEG

SEQ ID NO: 168261 - protein, 72 aa, Glycine max
  Clone ID: PAT_MRT3847_122956C.1.pep
RRLEVNVYNDGNVLSTVTVSSPQGTQGACITSAGHPKEPLLNGGAPGAQIISRKNGDSRLGSMETRTGLTRA

SEQ ID NO: 168262 - protein, 61 aa, Glycine max
  unsure (1)..(61): unsure at all Xaa locations
  Clone ID: PAT_MRT3847_122957C.1.pep
CSLELNLYKSDYSXSDDESSKPCCDLCMCTGSMPPEXHWADIKXSSMYSACDRCACTRSMP

SEQ ID NO: 168263 - protein, 71 aa, Glycine max
  Clone ID: PAT_MRT3847_122958C.1.pep
FYFFKSGSLVTPSLSRRQRHSLTHSRARRRDSLRHSATKIHSPPRSRTPLINTARRPRRRATAFPRTRAAA

SEQ ID NO: 168264 - protein, 51 aa, Glycine max
  Clone ID: PAT_MRT3847_122959C.1.pep
KLKGPKLVNESWPYIHVWNPRAQIIITNPKFIFRKSFLAQAAQQGYSILGP

SEQ ID NO: 168265 - protein, 77 aa, Glycine max
  Clone ID: PAT_MRT3847_12295C.1.pep
PSDLWFVHCPWIYYPLYIAMKPIPLASIVLISIPSFPSVLMNTLGDPPRKGVARVVMVFFGKIPCLEQCIHGPEVTP

SEQ ID NO: 168266 - protein, 85 aa, Glycine max
  Clone ID: PAT_MRT3847_122960C.1.pep
KDLHPRVEETSVVDARHKEEDEEEAQEENKQEEQHKLDDVSGVQDEVLKHEQNDNEENSEHKQDSVDQETEENSENALTQVEGEQ

SEQ ID NO: 168267 - protein, 508 aa, Glycine max
  unsure (1)..(508): unsure at all Xaa locations
  Clone ID: PAT_MRT3847_122961C.1.pep
MANSETCCSTQLIDGDGTFNVFGVENFMKEVKLAECGLSYAVVSIMGPQSSGKSTLLNHLFGTNFREMDAFKGRSQTTKGIWMARCAGIEPCTLVMDLEGTDAXDTWCSPRVRAFEKQSALFALAVSDIVLINMXMMRLFSPRKTTLLFVIRDKTRTPLENLEPVLREDIQXKIWDSVPKPQAHKETPLSEFFNVEVVALSSYEEKEEQFKDQVASLRQRFHHSIAPGGLAGDRRGVVPASGFSFSSEHIWKVIKENKDLDLPAHKVMVATVRCEEIANEKYVSFVANEDWCQLEEAVQSGPIPGFGKKLSSLLDICFSEYDAEATYFDEGVRSSKQKQLQEKLFQLVQPAFQSALGHIRSGTLDKFKEAFDKTLKGGEGFSVAANNCIGSCMVQFDEACTDVVIEQTNWDTSKVREKLLRDIDAHVATVRATKISELTSSYEEKLKQALSGPVEALLDGANSDTWPSIRNLXRRETEXAVSGFSAALTGFDMDEETRQKIILSLEGY

SEQ ID NO: 168268 - protein, 213 aa, Glycine max
  unsure (1)..(213): unsure at all Xaa locations
  Clone ID: PAT_MRT3847_122962C.1.pep
MANSETCCSTQLIDGDGTFNVSGLESFMKEVKLAECGLSYAVVSIMGPQSSGKSTLLNNLFGTNFREMDAFKGRSQTTKGIWMARCADIEPCTLVMDLEGTDGRERGEDDTAFEKQSALFALAVSDIVLINMWCHDIXGREQAANKPLLKTVFQVMMRLFSPRKTTLLFVIRDKTRTPLENLEPVLREDIQKIWXDSVPKPQAHKETPLSEFF

SEQ ID NO: 168269 - protein, 98 aa, Glycine max
  unsure (1)..(98): unsure at all Xaa locations
  Clone ID: PAT_MRT3847_122963C.1.pep
VSGRVGAPAXXGWGAGAVGFSCGLVRALGCCCSGRPFRCSFSVRRGGGCLVRALACRSPPPVVLPGWXVSLGLGRAWGPVFVAPXACGALVXSWVWSL

SEQ ID NO: 168270 - protein, 86 aa, Glycine max
  unsure (1)..(86): unsure at all Xaa locations
  Clone ID: PAT_MRT3847_122964C.1.pep
NXFGHXTAKLGQTGSNRAKNRXPXPGSSSNLLGILXSHGXWKXNQRXKXNLXXMXWFAXXXXEXAXXNXXXLNEVYFTXNMGXIXX

SEQ ID NO: 168271 - protein, 58 aa, Glycine max
  Clone ID: PAT_MRT3847_122965C.1.pep
VGLPGFPSPPFKPRPLNSISVPLKRLLVGWGGINLGSFKGGNGLGHLFWWQSALQNTI

SEQ ID NO: 168272 - protein, 100 aa, Glycine max
  Clone ID: PAT_MRT3847_122966C.1.pep
NICILKPQAFGILVYKEIMSILYLPIFMFHVHVQGPLFSPFPALHSHKLLYNKPINILLVIILDLEMFYQQLMNYISPKILSQFVPASKDISHILIMSWI

SEQ ID NO: 168273 - protein, 45 aa, Glycine max
  Clone ID: PAT_MRT3847_122967C.1.pep
AQEQTTLFMGYGLTKQNNVIKKTNPFVQTFTPLLNKYKISFIEKP

SEQ ID NO: 168274 - protein, 59 aa, Glycine max
  Clone ID: PAT_MRT3847_122968C.1.pep
FGCFALPSAASPVALHLRPYSRPLPSPRLALWFHLSSAGVTHCPLRRISRRVLQLPKLP

SEQ ID NO: 168275 - protein, 60 aa, Glycine max
  Clone ID: PAT_MRT3847_122969C.1.pep
VSTIAADYNSRSIASRYSKHLSTTADAKICWLNCQVCPDSHVNNVTPFLRMSSIQHMLRN

SEQ ID NO: 168276 - protein, 76 aa, Glycine max
  Clone ID: PAT_MRT3847_12296C.1.pep
NRPHRKKSSGWGVFFFFPIPKNKTSFLYINVTFWGGGVWKKQLVIFFTNNTFFTQYVPTGLDNFNANVGVNGSIGN

SEQ ID NO: 168277 - protein, 132 aa, Glycine max
  unsure (1)..(132): unsure at all Xaa locations
  Clone ID: PAT_MRT3847_122970C.1.pep
DPSTNENPNNELCHSARLTIXXYLEFRTLWWEFFTWVKEDTVLHNSPMANFLQLSTTTGGKDITRRRKIWWSATTKSIWQFRNDLVFHNQAFDIHKLVDNSIFLTWTWLKGWEKNFCVPFHHWSSAMPLAFV

SEQ ID NO: 168278 - protein, 77 aa, Glycine max
  Clone ID: PAT_MRT3847_122971C.1.pep
GSVKVPANQIPNFGKDQINFRRGIISIVHYLNRGVNIRFLLFPAYGPFERQDRTLYTGSGQTPQVVEGLSNSFQSFI

SEQ ID NO: 168279 - protein, 60 aa, Glycine max
  Clone ID: PAT_MRT3847_122972C.1.pep
TANNLRNKISWPKRITKTDYCRDITQIISKPVNCLGLAMRKLRCHEVGLTHSKHHVTSSS

SEQ ID NO: 168280 - protein, 181 aa, Glycine max
  Clone ID: PAT_MRT3847_122973C.1.pep
MGASDNNNNFLQVVFNNFDVLALPLVTLVYPLYASIKAIETKSTTDDQQWLTYWILYSILTIFELTFAKVLELLPIWPFAKLIFSCWLVLPHFNGAAVVYRNYIRPFYMNPQIPIPQGSQIWYFPQKKSLFNQPDDVLSAAERYMEEHGTEAFERLISKNDRQARARRNGNYMIFDDDYRY

SEQ ID NO: 168281 - protein, 77 aa, Glycine max
  Clone ID: PAT_MRT3847_122974C.1.pep
NRRGLTEKYIDGNSGFSGKQDYSGDFRDSLESVVWVDGTMMIQVGEWSMIMQKVLGEGNGGLSGRRSYFFFVFCFFR

SEQ ID NO: 168282 - protein, 145 aa, Glycine max
  Clone ID: PAT_MRT3847_122975C.1.pep
LLLTLLLLSSVFSIASSRRRHSNNSNIDWWCNQTPYPEPCRYYIKHSHYQHKQLKHKSEFRTILVPLALERAVIMRRKARELGGNGVTKKQKSWFRDCLKLYDNTVFHLNRTLEGLHVKTSCSPLDAHTWFSTVRTNIETCQNWA

SEQ ID NO: 168283 - protein, 91 aa, Glycine max
  Clone ID: PAT_MRT3847_122976C.1.pep
IFFLGVLYFGQVRHWKKKHLPHSQIDEFYCLHMLITPSVCQPPLCRHAQFLLGETKLQGAGPVLRKKNGFFFIGTYFKEFCYKKNWLDLRG

SEQ ID NO: 168284 - protein, 74 aa, Glycine max
  Clone ID: PAT_MRT3847_122977C.1.pep
PATLSGFTFPLLRLTPYSKCNHTLAFNHPPTLHWASTPPPSCTSLSNSLYWWALGPHPPPYPPPAPPPPPPKQE

SEQ ID NO: 168285 - protein, 65 aa, Glycine max
  unsure (1)..(65): unsure at all Xaa locations
  Clone ID: PAT_MRT3847_122978C.1.pep
MQAGHGLRSRTRDSFSRPFRKKASIALTTYLRSYHVGDYDDXKVNVAVHKGIPHKXFYHGRTGRV

SEQ ID NO: 168286 - protein, 83 aa, Glycine max
  Clone ID: PAT_MRT3847_122979C.1.pep
CQLRCVNSAEIATAKLRKRMASSPVGGTFFICRHQSSCHHRLVNVGRCSQLLVMDRSLCIDICKVSQYHPGGRGLTIVLIVSL

SEQ ID NO: 168287 - protein, 54 aa, Glycine max
  Clone ID: PAT_MRT3847_12297C.1.pep
KLHLQTKHILFSTYTSFYQRFFLNLHIRLECCITCLCISFINTNHSNFINYNAN

SEQ ID NO: 168288 - protein, 60 aa, Glycine max
  Clone ID: PAT_MRT3847_122980C.1.pep
VTPRASSLALTSLLVGAIVCRAHLLHYLYSYHIIYTLLLTNAKIVNSGSLILAYLISLWT

SEQ ID NO: 168289 - protein, 92 aa, Glycine max
  Clone ID: PAT_MRT3847_122981C.1.pep
LLTNSMPMSPHRRHSHHRARPAQNRRPRTRRHGNSCNKSRGQARGSRRQNSSNRNGSNNNRSRQNRSRRKTTHYSNNNNLSSLINKKANLLI

SEQ ID NO: 168290 - protein, 75 aa, Glycine max
  Clone ID: PAT_MRT3847_122982C.1.pep
QWAEALPPLSCVTQRGMGAWGRRDVRSDTARFQQMRGIQGCLALFLQQKLNTTGLLDKILGVSGGSDLVRACVPS

SEQ ID NO: 168291 - protein, 120 aa, Glycine max
  Clone ID: PAT_MRT3847_122983C.1.pep
MVQRLTYRKRHSYATKSNQHRVVKTPGGKLVYQTTKKRASGPKCPVTGKRIQGIPHLRPAEYKRSRLPRNRRTVNRAYGGVLSGGAVRERIIRAFLVEEQKIVKKVLKIQKAKEKQASKS

SEQ ID NO: 168292 - protein, 38 aa, Glycine max
  Clone ID: PAT_MRT3847_122984C.1.pep
CSTSCALIHNYSLRAHILFISSCLNAMKSLLVKGSARK

SEQ ID NO: 168293 - protein, 52 aa, Glycine max
  Clone ID: PAT_MRT3847_122985C.1.pep
TQPLWGGHLTRKFEHFFNTGLSFTLTIYITNFRNDSFFKIKRAGTWPLLQGK

SEQ ID NO: 168294 - protein, 54 aa, Glycine max
  Clone ID: PAT_MRT3847_122986C.1.pep
WGSESQKMEESRSGGVWSCCAPLKITVESRRSTSCKKVVFASIMRRSSLPRSTL

SEQ ID NO: 168295 - protein, 75 aa, Glycine max
  unsure (1)..(75): unsure at all Xaa locations
  Clone ID: PAT_MRT3847_122987C.1.pep
KKMPKIFFRGGTSYPFFTRSLFTCSRPDPKVNDNPPSPPSNVKCCPQPFPPHYPNFHRVFPLIERLLQPQFSHTX

SEQ ID NO: 168296 - protein, 68 aa, Glycine max
  Clone ID: PAT_MRT3847_122988C.1.pep
AELFLLRKGKFQSVLINLLLGYCKCTVRIKTYVKDIPHKLHHHHQDISHIKQVPGYVDDYAALLEVKS

SEQ ID NO: 168297 - protein, 45 aa, Glycine max
  Clone ID: PAT_MRT3847_122989C.1.pep
IRVSSAHEGSTIHRALLVIIRRIVPDTVIECKTSKLRIDFHLKYT

SEQ ID NO: 168298 - protein, 240 aa, Glycine max
  Clone ID: PAT_MRT3847_12298C.1.pep
MNLIQNPSLSLLLHLYFFLLCLHCTSSYPTAMNCTDTSRVCTSFLAFKPHQNQTLAVIQSMFDVLPGEITVEGNGWDYIFIRKNCSCAAGMKKYVSNTTLTVKSNGGFEHDLVMEAYDRLALLPNTTTRWAREGGIISLSLFCSCSSGLWNYLMSYVIRDGDSVESLASRFGVSMDSIETVNGIDNPTVGSLVYIPLNSVPGESYHLMNDTPGAPTPSPSGNNFSADQVNQKAHVPHEWI

SEQ ID NO: 168299 - protein, 376 aa, Glycine max
  Clone ID: PAT_MRT3847_122990C.1.pep
WPHLYPANKILIISLSSKKKKGENKDNTFCSAEPGDAFLVPIPYYPGFDRDLRSGTGIKLVPVMCDSSNNFKLTKQALEDAYEKAKEDNIRVKGMLITNPSNPLGTVMDRNTLRTVMSFINEKRIHLVSDEIYSATVFSHPSFISIAEILEEDTDIECDRNLVHIVYSLSKDMGFPGFRVGIIYSYNDAVVHCARKMSSFGLVSTQTQYLLASMLNDDEFVESFLVESAKRLAQRHRVFTGGLAKVGIKCLQSNAGLFVWMDLWQLLKKPTLDAEIGHWRVIGDENSINISPGPSFHSHGPRWFKVCYVNMNVMAGQTSKQKSLMISRCHPDFPDTHRTHWVKGNLLVCLYTSTPDDIMMLTYSPIPQSPLVKATI

SEQ ID NO: 168300 - protein, 64 aa, Glycine max
  Clone ID: PAT_MRT3847_122991C.1.pep
RAITCPKLALSFSRTYTTFYVMTHKRGLTSKHIFLDNSNTTFMSAILIDATLFKICKGTHDQPN

SEQ ID NO: 168301 - protein, 58 aa, Glycine max
  unsure (1)..(58): unsure at all Xaa locations
  Clone ID: PAT_MRT3847_122992C.1.pep
AGERGAQVLSDPSLPXSGVYWSXLAACVSCHYQSSPKATDAQNARKVWETKFFFTGVS

SEQ ID NO: 168302 - protein, 39 aa, Glycine max
  unsure (1)..(39): unsure at all Xaa locations
  Clone ID: PAT_MRT3847_122993C.1.pep
HXILQITHSHRLYGLLDAIIICQVPTTVHRCFKDTQPAY

SEQ ID NO: 168303 - protein, 98 aa, Glycine max
  Clone ID: PAT_MRT3847_122994C.1.pep
CVKCVLFQQQQRLHKKQTNHHNKKSWSALFSCAHPPINTSLTCSCMPTTFPLKTTLIPWTYNMPIHFLCNINIPSHSHTSFDPLSYNAHPPVPNDSAT

SEQ ID NO: 168304 - protein, 53 aa, Glycine max
  Clone ID: PAT_MRT3847_122995C.1.pep
DIEMEMEMLGLESTARQQQQQQQQLIEEIDRISSTCFRSQEFSRIVDLNHYYP

SEQ ID NO: 168305 - protein, 48 aa, Glycine max
  Clone ID: PAT_MRT3847_122996C.1.pep
KTHQSCDFYLKCDSNVTEVHYAFSGYVFSSLCLNFYMRFLFCDFFLLS

SEQ ID NO: 168306 - protein, 76 aa, Glycine max
  Clone ID: PAT_MRT3847_122997C.1.pep
NFSPLFHPPREDFSKFFQTSGLKKKKIFGVQLVKEKQPWGVFFYKSKCPPGGLFFKSLAQPVSPFLKGNWTKSPQI

SEQ ID NO: 168307 - protein, 132 aa, Glycine max
  Clone ID: PAT_MRT3847_122998C.1.pep
SASSHTSAHPSNISSLLAISNIIALSSNQKYNMQALQSSISKHNLANIGALSASRIQSTLLPYSCKKSPIKPSLTLIHAMMHAQALTLPMLSGSTTYHYYDKLYIHPKPHANYIIPTPNVTQIVQYEPSCPF

SEQ ID NO: 168308 - protein, 156 aa, Glycine max
  Clone ID: PAT_MRT3847_122999C.1.pep
MNLDVPRFDDTNAPTLIFKISQFFDYHRTPEDERLQVTSFYLDGEALSWFQWLYRNDQLTSWSSFLQALEMRFAQSMYDDPRGTLFKLTQTGSVNSFLAMFEALANWIVGLPTPFLLSCFISGLLPDIRREVLAMQPLSLVQAVALSRLQEYKIND

SEQ ID NO: 168309 - protein, 65 aa, Glycine max
  Clone ID: PAT_MRT3847_12299C.1.pep
EIKVSSAGQTVRVDWMNFSVRRFQTVYPVMTQRIMSHYSHVRLFHGGVLNVNFNNGSENSEDRPV

SEQ ID NO: 168310 - protein, 52 aa, Glycine max
  Clone ID: PAT_MRT3847_1229C.1.pep
NCDDAIDFCVPICISLYQIGFMNDFFVYTGFMNDFHFVYEIKDLCFKYLLLI

SEQ ID NO: 168311 - protein, 95 aa, Glycine max
  Clone ID: PAT_MRT3847_122C.1.pep
FIRGLNFQGALWLIICVILLCNGHHVCYVHNLVLYSSPIKGVTFTWALRFPSHPSNSLLFAILFHSLLTVYYVSFSCLKVILFILLFLYNFTFIK

SEQ ID NO: 168312 - protein, 67 aa, Glycine max
  Clone ID: PAT_MRT3847_123000C.1.pep
EYLSEENNFCCFFISLLNNKKKMLKKCRSATTTLLCVGGRGGTTLLFFSFLLLSSYCCAVSPNEVLL

SEQ ID NO: 168313 - protein, 39 aa, Glycine max
  Clone ID: PAT_MRT3847_123001C.1.pep
LYSIYYDRYLNIFFREKMVFKTNKLFYILNQLFYFFGLN

SEQ ID NO: 168314 - protein, 112 aa, Glycine max
  unsure (1)..(112): unsure at all Xaa locations
  Clone ID: PAT_MRT3847_123002C.1.pep
MISRLKMHIFVRTLTGRTITLEVKTSDTIDHVKANIHDNEGIPPDQQRLSFAGRPLDDGRTLADYNIQKESTLHLVLXRLRGSMHIFVXDLXTGKTITLEVQSSDITDNVKA

SEQ ID NO: 168315 - protein, 90 aa, Glycine max
  Clone ID: PAT_MRT3847_123003C.1.pep
GDITHVRYYYDRRAMRLVNAANGPARLKSNRTYIHVMQRDICWSTFSLHRNCITAPSRTANGLVEGSKIFDNIAAEAHMHTHDIHTFTLG

SEQ ID NO: 168316 - protein, 54 aa, Glycine max
  Clone ID: PAT_MRT3847_123004C.1.pep
TNSLIPQNNKKINHIDPEMHCGQGVFLYRDANSCLRPIGHFPYSNFTPASLYVQ

SEQ ID NO: 168317 - protein, 77 aa, Glycine max
  Clone ID: PAT_MRT3847_123005C.1.pep
KPAKEIKLGGPKKKIFPCKQRGEKFGSLKRPPPFNVFFSWVCSFLPFSFLQFVFKFVLFFFFLFFFHLFFFFFFIES

SEQ ID NO: 168318 - protein, 225 aa, Glycine max
  unsure (1)..(225): unsure at all Xaa locations
  Clone ID: PAT_MRT3847_123006C.1.pep
MGDREQLLQRARLAEQAERYDDMASAMKAVTELNEPLSNEDRNLLSVAYKNVVGARRSSWRVISSIEQKTMADGNEKKLEKVKAYREKIEKELETVCNDVLALLDKFLIKNCNDFQYESKVFYLKMKGDYYRYLAEVASGEKKNSVVEASEAAYKEAFEISKEHMQPTHPIRLGLALNFSVFYYEIQNAPEQACLLAKQAFDDAIAELDTLNEDSYKDXTLIMQL

SEQ ID NO: 168319 - protein, 72 aa, Glycine max
  Clone ID: PAT_MRT3847_123007C.1.pep
SATIKPPRDGPPLGPKNPRERVNRWRTTQIYLLRHRRENKNPCKSRDPITQGVLLVLRPNPRTQNWQKRTGK

SEQ ID NO: 168320 - protein, 229 aa, Glycine max
  Clone ID: PAT_MRT3847_123008C.1.pep
MMMAHSRYLLHIPSLSSLSASLTSPPRSLLPVRTLQPKTLSCRVPSFPTRTPWHFKPLHFALSGALSLGLLFGGIGVAEAAKVGVNKPELLPKEFSTVIDVAGFLSDGQEKRLAEEIAALEADTGFKLRVLAQNYPVTPGLAIKDFWQVDDRTVVFVADPTFGNILNFNVGATVDLDVPSSFWNRLTGKYGIIFYWKEKGEDASIEAAVMAISSCLREPVGPNNCSEVN

SEQ ID NO: 168321 - protein, 67 aa, Glycine max
  Clone ID: PAT_MRT3847_123009C.1.pep
MLCPLKLGPFFFFGALGLIRALFIAMLLPGPKTFPLEERHPVWGSPGFWSKIVPHADDVPNPGGAQS

SEQ ID NO: 168322 - protein, 152 aa, Glycine max
  Clone ID: PAT_MRT3847_12300C.1.pep
ASQRGATATTQRTAGSKAFRAPAGTGYDAPRGPGYGASAGPAYDAQRVATYDAQRLTGYDAFRGSAYDSKRGPIFDAQRTGYDPQRGPGYDMQRGPAYDAPRADGYDAQSRGAAGPHGHAPPMNNMPYGSTTPPARSGGGYEAARGVNPARR

SEQ ID NO: 168323 - protein, 504 aa, Glycine max
  unsure (1)..(504): unsure at all Xaa locations
  Clone ID: PAT_MRT3847_123010C.1.pep
MEEHRLSLRMSTLVFTLSIIIIVLSYPAQPLALNHSPKFLGKFAATARTHSNSEPPPQFHYEKRYFQQRLDHFSFSELPTFPQRYLISTEHWVGPHRLGPIFFYCGNEGDIEWFAQNTGFVWEIAPRFGAMVVFPEHRYYGESVPYGSAEEAYKNATTLSYLTAEQALADFSVLITYLKHNYSAKDCPVVLFGGSYGGMLAAWMRLKYPHIAVXLASSAPXFPETFYDLVSNAFKRESTCFNYIKQSWNEIASTGQTNNGLELLTKTFNLCQKLKRTKDLYDWAEAAYSYLAMVXIEVNFXVVSRNMFELVASVCRRIDGGPAGTSILERIYEGVNVYYNYTGEAKCFELDDDPHGMSGWEWQACTEMVMPMSSSQESSMFPPYEYNYTSIQAECLKKFGVKPRPRWITTEFGGHDIHATLKKFGSNIIFSNGLLDPWSGGGVLQNISESVVSLVTEEGAHHIDLRSSTKNDPDWLVEQRETEIKLIEGWISDYHQKNEAMFDM

SEQ ID NO: 168324 - protein, 91 aa, Glycine max
  Clone ID: PAT_MRT3847_123011C.1.pep
AIPGRFGPGVAGRMSPPCRFLWVMPWVCRSWSAYSLRLRPPSWVSLAPQCSCFHRLRLIWRCVSFFVGVLRGASPFLCGVFLFSPWFGSPP

SEQ ID NO: 168325 - protein, 87 aa, Glycine max
  Clone ID: PAT_MRT3847_123012C.1.pep
PPYRSNAIVWYNTHQCNLCMTICVPYSSICLSLSVMKWVSWSQPCSLWCKVSRPPSTESCGPPTPSQVWSFSQCVARFVHSLVVLRA

SEQ ID NO: 168326 - protein, 176 aa, Glycine max
  Clone ID: PAT_MRT3847_123013C.1.pep
MGKNEFLTPKAIANRIKAKGLQKLRWYCQMCQKQCRDENGFKCHCMSEGHQRQMQIFGQNPHRIVEGYSEEFESTFLEHMKRSHRFSRVAATVVYNEYINDRHHIHMNSTQWATLTEFVKYLGRTGKCKVEETPKGWFITYIDRDSETLFKERMKNKRIKADMVDEEKRERNQETD

SEQ ID NO: 168327 - protein, 64 aa, Glycine max
  Clone ID: PAT_MRT3847_123014C.1.pep
ASGRPALRGFMAGLFQPITPLIQRPLAPPYVINPPLRISFGYLIFPPPPPPPPPPPPKKEDVIQ

SEQ ID NO: 168328 - protein, 105 aa, Glycine max
  Clone ID: PAT_MRT3847_123015C.1.pep
PLEARAAAREGEFNQNSKFVRANSIKMSPKYKLVLLIALVLVATSLAGRTKEHPKHPPSLQEQQHTPHLDSYPPKHRPKPPHPVHGAGEEPTSIPRKKGPRRPPN

SEQ ID NO: 168329 - protein, 116 aa, Glycine max
  unsure (1)..(116): unsure at all Xaa locations
  Clone ID: PAT_MRT3847_123016C.1.pep
YALTRRMGKLAFPQGTSXRGQRLPLSLGGGAGAKNALVMSWPNAELSISRYSGGXTAEKLVXMTSPYLKCAASFFLAPESLTDDTTNLEAFADRLVQLGEIQEQADWESTRRHAYS

SEQ ID NO: 168330 - protein, 132 aa, Glycine max
  Clone ID: PAT_MRT3847_123017C.1.pep
LFVGVSIITPLLVWEFLCGFVTGTIKVLCIWGLLQCHRKNLGQCDWVVDSLIKKTSYPIAQRLFAMRSMLEYQFCIHSSYRRLELLTSIDNCFEWFCVYSLMLDLVVSTPWILISQILPFVCNFGKNDDGSW

SEQ ID NO: 168331 - protein, 74 aa, Glycine max
  Clone ID: PAT_MRT3847_123018C.1.pep
LIRLVYSAAIGSSVEFHDQLHRNGSRRGSLWVRGRDRGDRGRGRGDPRRDRRRARRRERDSQLESRLKPLLSDP

SEQ ID NO: 168332 - protein, 389 aa, Glycine max
  unsure (1)..(389): unsure at all Xaa locations
  Clone ID: PAT_MRT3847_123019C.1.pep
LRRQRDVLNRRIEFCKQKDAIGMAARLAETTFFAFREYTEEELRLATDNFSERLRLKSGGDWTNVYRGRFNHSTVAIKMLPSLSPQHXESNEISLNDIRQPHREGPKTIFGEPICRVLAYMMPSGLRDMILQEAMTNPHVAADGFSYELEAIEHWLQSGRDTSPMTNLRLKHTFLTLLDRHLIAKITGFGLHECHDEHCNIESDLRAIGALLMHLLTGRNWAGLVEEVMTVDIDREALGGVLDEMAGQWPLDLARELAGLAMRCMSIKSEPNLELSIARVLEELNEIRRKGDEIVGRERRKTNTNGGCINREGSSDVPSVFLCPILQEVMKNPHVAADGFSYELEAIEHWLQSGRDTSPVTNLRLKHTFLTPNHTLRSLIEDWQTNKST

SEQ ID NO: 168333 - protein, 106 aa, Glycine max
  Clone ID: PAT_MRT3847_12301C.1.pep
GPGYGASTGSTYDAQRGATYDTQRLTGSNAFRGSAYDSKRGSGYDMQRAPAYDAPRAAGYDAQSRGVAGPHGHARPMNNMPYGSTTPPARSGGGYEPARGVNPARR

SEQ ID NO: 168334 - protein, 75 aa, Glycine max
  Clone ID: PAT_MRT3847_123020C.1.pep
QAGVLCRRLRSANHDGLIGDERSKWWHAHNLTQSGIRTVCIYLDELMLLKTLDFSRNTISCCDIPSRSLFFLFHT

SEQ ID NO: 168335 - protein, 69 aa, Glycine max
  Clone ID: PAT_MRT3847_123021C.1.pep
FSKSLKTDVSWCPPGKPSTSVTPLSTGGCCYSSFNFFVVVGGSSTTRVFLSLPTGKCGKPSSLEASLSS

SEQ ID NO: 168336 - protein, 88 aa, Glycine max
  Clone ID: PAT_MRT3847_123022C.1.pep
SWFLLYFFSWKEIRKPIKYFFKELLVLIVFTPFVISSFKTTLLCCCLPQPQFQILACLVQLLLLIITLVRFPILLFLLLVLLVFGMLD

SEQ ID NO: 168337 - protein, 148 aa, Glycine max
  unsure (1)..(148): unsure at all Xaa locations
  Clone ID: PAT_MRT3847_123023C.1.pep
LSRAYASNMGGYXNEGLAEVLAAQXSPKNSNGFHGTAYAERQTLRLSEEYNVIYFSILAGDHSNRNGLPRXIPAHTETDAAITVXALPMYETPAIAFGMMKIDKDGRILELADKPTGQQSKAMKAYTTILVLDDDRTKQSPYIGMMGV

SEQ ID NO: 168338 - protein, 53 aa, Glycine max
  Clone ID: PAT_MRT3847_123024C.1.pep
WVPLERPLFFFFFFFFFCSFILNRFRRISRVISRQPKNSACIYITRFNMTKSR

SEQ ID NO: 168339 - protein, 57 aa, Glycine max
  Clone ID: PAT_MRT3847_123025C.1.pep
LQPEFVVAWFIAQHFHYNLFFASSLPSPFSFIFETQSIGKTDYQNQKMESCFFFTFE

SEQ ID NO: 168340 - protein, 60 aa, Glycine max
  Clone ID: PAT_MRT3847_123026C.1.pep
NDIPYMNCNASLMRQIAEIEFIESYLCDVRCCAYRRGRLATNAMPYLYIVLSVKLENMWV

SEQ ID NO: 168341 - protein, 148 aa, Glycine max
  unsure (1)..(148): unsure at all Xaa locations
  Clone ID: PAT_MRT3847_123027C.1.pep
MYKQEEIIEADNNNLSFMHAEQQLVQLPHLESPSLPLAKKQSSVVSXISDNINNNEDDDNPQKGLSNTTKKVTTDWRALDKFVASQLSQEERHEIEGVSSFATHHTTTSSDMALLLLQNNSRENERNNKFNPFFNTSSTISDCDIGIC

SEQ ID NO: 168342 - protein, 131 aa, Glycine max
  Clone ID: PAT_MRT3847_123028C.1.pep
MNKVVLHVELHDGKIKKKAMKVVSNLSGVESVSMDMKDQKLTLIGDIDPVVAVEKLRKLCDTRIVSVGPAKEENEGKNNEVEAAENQNQNNLADSVNIYEAYHIHNQYQMRQHHYCCTSVEENPNDACVIC

SEQ ID NO: 168343 - protein, 38 aa, Glycine max
  Clone ID: PAT_MRT3847_123029C.1.pep
HKPILSSSPTSLPGSGPAPAPPPPPPPPPPPPPPPPPR

SEQ ID NO: 168344 - protein, 65 aa, Glycine max
  Clone ID: PAT_MRT3847_12302C.1.pep
CGDDDPSQLGALLSTSDLINMYQSSTCPFILMFSSAGGPSRTCYSNCCLALFCIIVFWLVSCKAI

SEQ ID NO: 168345 - protein, 61 aa, Glycine max
  Clone ID: PAT_MRT3847_123030C.1.pep
RGVSESFLVENNNGSSIAGRRLEITARTAGASKTIEVEVDKPLGLSLGQKSGGGVVITVSI

SEQ ID NO: 168346 - protein, 98 aa, Glycine max
  Clone ID: PAT_MRT3847_123031C.1.pep
MIKKRTNKSVETYLIYIFKVLEEDHPDIGISMDAMGIMNSFLNDIFHKLVHKASRLARYYKISTIASMDILTAVPLLLPGDVSQHALSEGTKADTDIT

SEQ ID NO: 168347 - protein, 79 aa, Glycine max
  Clone ID: PAT_MRT3847_123032C.1.pep
MHELSFNRYILEQVCYGLGGNISIVDIIMMINVPITITVRATTVRCCYIASISRVTHANVVLCELQLGFDRQHSRADAW

SEQ ID NO: 168348 - protein, 105 aa, Glycine max
  Clone ID: PAT_MRT3847_123033C.1.pep
MSAARCLLRSAASRAAGAANLAAGARPRPARSPFRLPKQTSISNRVFRLPVEASFCVESMLPYHSATASALLNSMLSGSRHSYGWTPEGISSLFSSLPFYEMRHD

SEQ ID NO: 168349 - protein, 73 aa, Glycine max
  Clone ID: PAT_MRT3847_123034C.1.pep
YVHMSFSSSENNVLSFMMGWLLMAMIDCLETVKGDICVHVSSVRIVIRYDRIRVSLIVLSNEMNLLIYEFAFL

SEQ ID NO: 168350 - protein, 158 aa, Glycine max
  Clone ID: PAT_MRT3847_123035C.1.pep
KEGCFSPPLFFVGVPGFFSSSPRFLKGAPLFFFLGPPKKNIFFCSPRGEKFPFLFAGVFFFFFYKERGGGAPFHQKRFFVGGPTPFFFQNLFLPPPAGGGFFFFPLGVDKKISAPARETTPLCGGVFTPPSINALYSLEGWQIFFFFVVAYLCWAPLK

SEQ ID NO: 168351 - protein, 83 aa, Glycine max
  Clone ID: PAT_MRT3847_123036C.1.pep
HCLQLSSLQVRPDSLVFQLVILLQEVCMSLVIIMGSMGEVNHDRTLSQTLSPKGAISFELSASLPLLKHCSPSVRLMQNFASG

SEQ ID NO: 168352 - protein, 48 aa, Glycine max
  Clone ID: PAT_MRT3847_123037C.1.pep
KASPSELLFSGFEKISKRCLCMLKKKLRVSQFNANPSFTLYPNVRDQC

SEQ ID NO: 168353 - protein, 54 aa, Glycine max
  unsure (1)..(54): unsure at all Xaa locations
  Clone ID: PAT_MRT3847_123038C.1.pep
RCTRTNSIRSDPSIQIKFFFFWWVAVRIKKGLMRPQAWFRGWFLQKPSPGXXPP

SEQ ID NO: 168354 - protein, 118 aa, Glycine max
  unsure (1)..(118): unsure at all Xaa locations
  Clone ID: PAT_MRT3847_123039C.1.pep
ADMKPVADNTISMDGRSYMISMRTEKSVPTYKIYIFNVXNQVLPYMSIFGQAMVIMISFVSNIFKKLAQESSRLARYHMKLSITSMEIHAAARLVLPGXLAMHAASGGALVVAIFSIS

SEQ ID NO: 168355 - protein, 93 aa, Glycine max
  Clone ID: PAT_MRT3847_12303C.1.pep
LWSNGKTLRMALAIYLHLPKSYTGVRTHLLVAYRNRRTSRPLLSTDLGSTAMESTYDTTGKGMRQPDSPESKYGAVQDSAVDPQWGEHTCLCS

SEQ ID NO: 168356 - protein, 73 aa, Glycine max
  Clone ID: PAT_MRT3847_123040C.1.pep
TAARRRQKGEDKFTTVNGYEHNAEVIYGDTDSVMVQFGVSAVEEAMNLGREAAEYISGTFTKVIVHFAFYFFL

SEQ ID NO: 168357 - protein, 38 aa, Glycine max
  Clone ID: PAT_MRT3847_123041C.1.pep
HRSFMLTIHKVQSYYSDQQSLEISIRNQTTSFIHDMVN

SEQ ID NO: 168358 - protein, 192 aa, Glycine max
  unsure (1)..(192): unsure at all Xaa locations
  Clone ID: PAT_MRT3847_123042C.1.pep
MEVEKENTTSTITAEPSVSASDGQDPVSSVNASLPDPMQPVIPQVIAPFVVPSLAPIPAIPPPRPLAPLPVRSPVIRPPVPQNGEVGSSDSDSDNDDSNARINQGGGEYEISEESKLVRERQEKAMQELMMKRRAAALAGPTNDMGVRARLRHLGEAITLFGEREMERPDRLRMIMAKLDAXGQLEKLMKAH

SEQ ID NO: 168359 - protein, 211 aa, Glycine max
  Clone ID: PAT_MRT3847_123043C.1.pep
MEVEKENTTSTITAEPSVSASDGQDPVSSVNASLPDPMQPVIPQVIAPFVVPSLAPIPAIPPPRPLAPLPVRSPVIRPPVPQNGEVGSSDSDSDNDDSNARINQGGGEYEISEESRLVRERQEKAMQELMMKRRAAALAVPTNDMAVRARLRHLGEAITLFGEREMERRDRLRMIMAKLDAEGQLEKLMKAHEEEEAVASASKMLRKNCSI

SEQ ID NO: 168360 - protein, 411 aa, Glycine max
  Clone ID: PAT_MRT3847_123044C.1.pep
NFSSSQLLIEIEFKFEKAYLCHCTFTDLRLRASLSYFCVDLVSVKRLPFHHSPLFISFFYIDLKLKMESEKKSSAISDVGAWAMNVVSSVGIIMANKQLMSNNGYAFSFASSLTGFHFAVTALVGLVSNATGYSASKHVPMWELIWFSLVANMSITGMNFSLMLNSVGFYQISKLSMIPVVCVMEWILHNKHYSREVKMSVVVVVIGVGVCTVTDVKVNLKGFMCACIAVLSTSLQQISIGSLQKKYSIGSFELLSKTAPIQALFLLILGPFVDYYLSGKLITNYKMSSGAILFILLSCSLAVFCNVSQYLCIGRFSAVSFQVLGHMKTVCVLTLGWLLFDSELTFKNIMGMVIAVVGMVIYSWAVELEKQSNAKTLPHAKNSMTEEEIRLLRDGVEKSPLKDVELGEAQG

SEQ ID NO: 168361 - protein, 214 aa, Glycine max
  unsure (1)..(214): unsure at all Xaa locations
  Clone ID: PAT_MRT3847_123045C.1.pep
KNSPDSLETHFLSFELYMRKQRILLAFQAVKQLLRLDAEHPDSHRCLIKFFNKVGSMIAPVTDSEKLIWSVLEAERQTISQLHGKSLFETNNSFLEKHEDSLTHRAAFGETLYILDPNRRSEAVKLIEGSPNNIVPTXCSYTTSSFMLLSINTTLCHVFKXNGVLGPIREWKLIDCVAVHKLLGTVLVDQDAALRWKVRCAEXFPYSTYFEGSR

SEQ ID NO: 168362 - protein, 102 aa, Glycine max
  Clone ID: PAT_MRT3847_123046C.1.pep
PIFNSFIINVGDMIQVWSNDAYESVEHRVMVNSEKDRFSIPFFLKPALYTDVKPLEELLDDRNPPIYRPVNWGKFRSARMRSNFAKSKVENLQIYDFKFPSN

SEQ ID NO: 168363 - protein, 64 aa, Glycine max
  Clone ID: PAT_MRT3847_123047C.1.pep
KRTAQALAPATASFLLLILQALLITQTQGCLDCADKREFYGVPNAINVISNFLFMLIALIGLVL

SEQ ID NO: 168364 - protein, 80 aa, Glycine max
  unsure (1)..(80): unsure at all Xaa locations
  Clone ID: PAT_MRT3847_123048C.1.pep
KFSKGVLKPTKGGVSFFPFGRGPKXSFGQNFSLLKKKKALPKILQHFSFELFPANAHAPTGFISIHPQYGAQILLRKVPI

SEQ ID NO: 168365 - protein, 50 aa, Glycine max
  Clone ID: PAT_MRT3847_123049C.1.pep
TRVYAIFWNLHESVCEFGFCIEDLTPYLTYALVFFFFFPISCFISLLVSS

SEQ ID NO: 168366 - protein, 66 aa, Glycine max
  unsure (1)..(66): unsure at all Xaa locations
  Clone ID: PAT_MRT3847_12304C.1.pep
LVDHHLANDNRTKPYVELIGESLDXVFTEYSRAITLLSARSTPLHWAQMXVRKQCNGADYHHYQDP

SEQ ID NO: 168367 - protein, 89 aa, Glycine max
  unsure (1)..(89): unsure at all Xaa locations
  Clone ID: PAT_MRT3847_123050C.1.pep
MCRSKFRHAGTMTGGGSTGRLPTWKERKNNNRRXIIRISIASNIYTSLRAHWNLKLPKHCYNNDVLKSLYTQSGWIVEQYSTSYLKGCN

SEQ ID NO: 168368 - protein, 68 aa, Glycine max
  Clone ID: PAT_MRT3847_123051C.1.pep
KIKCYTKSQNNYNVNLTPTSTTHPSITKSVPSSTKWKDNHNNFKIIQLMSRILSEIVMHLNLQIRSVT

SEQ ID NO: 168369 - protein, 80 aa, Glycine max
  Clone ID: PAT_MRT3847_123052C.1.pep
ANGHIIFSIYTTQAVYELNLLSYRLYNKCLRSIYKLSVFIIMINIDKEYTCSSYIGTGKVTLFKIDTAYCLLGKIREAHK

SEQ ID NO: 168370 - protein, 82 aa, Glycine max
  Clone ID: PAT_MRT3847_123053C.1.pep
WIMRKTGLQAVSILLSLRPCEHHALCPHKRFHPCRIHSHKSLCSVDHLHFWLYPRIVLQPLRHCRLPISHPNLSYGSIFNTT

SEQ ID NO: 168371 - protein, 69 aa, Glycine max
  Clone ID: PAT_MRT3847_123054C.1.pep
HAYVSVCSIGLSTPLLTRLIYINNADAKRRKVYPFKPVTLCLESREANHLEQSECHRSCVNECNDTDGR

SEQ ID NO: 168372 - protein, 154 aa, Glycine max
  Clone ID: PAT_MRT3847_123055C.1.pep
MATNIRRATYRFLPAMDTDSFSDSTFEFHESDLYNSARANSPELAKSVRSSRFHNYSSSSAARVGAPASLPVNVPDWSKILGDEYGRNQRRNYDDDDEARSDEEDGVGRVPPHEFLARTRIASFSVHEGVGRTLKGRDLSRVRNAIWAKTGFQD

SEQ ID NO: 168373 - protein, 72 aa, Glycine max
  Clone ID: PAT_MRT3847_123056C.1.pep
WRRSVENEKKSYYSCLAVLESHRRPVKCLAMAVNSNSGGGGGPHEDDDSRSYLVYSAGLDCDIKVWQIRVPL

SEQ ID NO: 168374 - protein, 66 aa, Glycine max
  Clone ID: PAT_MRT3847_123057C.1.pep
FTDMFEEFLVFCFILLKFNLYYSLLMLFYAKRIIFILTCNYFKCYKIVSRNIFPIMYSCKLLTKLY

SEQ ID NO: 168375 - protein, 61 aa, Glycine max
  Clone ID: PAT_MRT3847_123058C.1.pep
NDVQGVWSTLSTNYFLPYPEWSVYVFRILLLISPRPNFIFICTKKKKKGRGRPSERCPRRP

SEQ ID NO: 168376 - protein, 39 aa, Glycine max
  Clone ID: PAT_MRT3847_123059C.1.pep
HDMVEEWFDCVDEENYSVAAFSQNAFHIDEGLICDVLLT

SEQ ID NO: 168377 - protein, 153 aa, Glycine max
  unsure (1)..(153): unsure at all Xaa locations
  Clone ID: PAT_MRT3847_12305C.1.pep
RYAMESSKXCAAGLINLSDMGYKTLSKYYQDLIPDGSCSPVSSNSSWKVSRFASNSTETDPAGMVVVKDFVSRAVVAQFRAHTSPISALCFDPSGTLLVTASIHGNNXINIFRIMPSXLRNGSGSQSSDWSYSHVHLYKLHPGMTSAEYMIFV

SEQ ID NO: 168378 - protein, 49 aa, Glycine max
  Clone ID: PAT_MRT3847_123060C.1.pep
ILSSSCFCFFTPPGFGLFWFKKKKKKKKKKKKKKKKKKKKKKKKKKKKK

SEQ ID NO: 168379 - protein, 606 aa, Glycine max
  Clone ID: PAT_MRT3847_123061C.1.pep
MAAVRLLLLLLFPFSSLSLSENEALLNLKKSFSNPVALSSWVPNQNPCSSRWLGVICFNNIINSLHLVDLSLSGAIDVNALTQIPTLRSISFVNNSFSGPIPPFNQLGALKSLYLAHNQFSGQIPSDFFSQLASLKKIWISNNKFSGPIPSSLTNLRFLTELHLENNEFSGPVPELKQDIKSLDMSNNKLQGEIPAAMSRFEAKSFANNEGLCGKPLNNECEAGGSSEVGSGWGMKVVIVLIVAVALAFIFALTRSKRRHDDDFSVMSRDHVDEVVQVHVPSSNHSRGASEGGSKKESSSSKKGSSRGGMGDLVMVNDEKGVFGLPDLMKAAAEVLGNGGLGSAYKAAMNNGLSVVVKRMREMNKVSRDIFDAEMRRFGRLRNLNIITPLAYHYRKEEKLFVTEYMPKGSLLYVLHGDRGSSHADLNWPIRLNIVKGIARGLDFIYSEFSNEDLPHGNLKSSNVLLTENYEPLLSDFAFHPLINPNYAIQTMFAYKTPDYVSYQHVSQKTDVYCLGIIVLEIITGKFPSQYHSNGKGGTDVVHWVFTAISERREAELIDPELMSNHSNSLNQMLQLLQVGAACTESNPDQRLNMKEAIRRIEEVQV

SEQ ID NO: 168380 - protein, 137 aa, Glycine max
  Clone ID: PAT_MRT3847_123062C.1.pep
WFAYLIFWFLHIFKCSVASSLDNCRYIPARSEKNKGRSTRCPAALAHKNDSSPQGPDPVLWWAGAQNLHPEDFWGPRGPRKIKTGGRNTRGGGPSAKTTSTNGMGAGTKMSVALLTAFKMGIHRELFLLGAGLPPGA

SEQ ID NO: 168381 - protein, 135 aa, Glycine max
  Clone ID: PAT_MRT3847_123063C.1.pep
VHSAAMCNKGSSMLCSCSWRSTVFTVPRSLPCQISLSPPQASQYYRMVLWHSEQPSSPALLNERVSLGTIICIGSDRRYLSCGPSRMKAHCIIRTVISIWYHYSWPLVPPLAIPVTYRHHDQKHKDLHRSPLSSP

SEQ ID NO: 168382 - protein, 100 aa, Glycine max
  Clone ID: PAT_MRT3847_123064C.1.pep
RIARKENRICMTMPATNRSKRARNIMNPIHTICRCCKVRLGFLQVAPYTFINLHDFFQIFNMPVANDFIFSHKVDFCAPTATLVSLLLELSILDSSNPRA

SEQ ID NO: 168383 - protein, 84 aa, Glycine max
  unsure (1)..(84): unsure at all Xaa locations
  Clone ID: PAT_MRT3847_123065C.1.pep
KRRSSQWAGQPSGQGGFLIDNPKQSTVFAILLGISQDFXIGGNTHRPAFSVPQAPARSYKKRNLCRYALVFSSIRPKKELNKGN

SEQ ID NO: 168384 - protein, 60 aa, Glycine max
  Clone ID: PAT_MRT3847_123066C.1.pep
YKRYYTVMQTGRNSFQRSSFRRSKLPLKHWHAPQWPITPEVEVTRVRKTPFSIISSPQTP

SEQ ID NO: 168385 - protein, 128 aa, Glycine max
  Clone ID: PAT_MRT3847_123067C.1.pep
MGDTKERATKKPAAKWPLIKPKKNVQISRLRDFDLFTGSLGPTYGEAFRDNDRMLVDDPVLADTIWESGLSKLFSDIKIRGKVAVGLNPNIRFYRYKVGQRFGRHIDESVDLGDGKRTYYTLLVYWSG

SEQ ID NO: 168386 - protein, 155 aa, Glycine max
  Clone ID: PAT_MRT3847_123068C.1.pep
MTERPTRKRKMGDTKERATKKPAAKWPLIKPKKNLQISRLRDFDLFTVQNFFSSAESKAFVKIAEEIGFTHQGSLGPTYGEAFRDNDRMLVDDPVLADTIWESGLSKLFSDIKIRGKGAVDLNPNISFYRYKDGQRFGRHIDESVDLGDGKRTYY

SEQ ID NO: 168387 - protein, 167 aa, Glycine max
  Clone ID: PAT_MRT3847_123069C.1.pep
ILFPKGGGESEIELLGYSNSDWCGDKSNRKRTVVYVFLSGGAPVSWCSKKEVVVALSPCEVEYVAASMSACQVVWLDTLMQELQLKQVGVVKLLVNNKFVIDLAKHPAANGRSKHIKTRFHFLRDQVNNDKLVLEYCKTELQVADISTKALKGERYRDLREMLNLVN

SEQ ID NO: 168388 - protein, 55 aa, Glycine max
  Clone ID: PAT_MRT3847_12306C.1.pep
NVMTHFDKQNLMDIKKNPRKQGSPLKNSRKNFPRYSIAIGLQFNRHRNNKVPLTQ

SEQ ID NO: 168389 - protein, 33 aa, Glycine max
  Clone ID: PAT_MRT3847_123070C.1.pep
CLVCILYGYLSFSHGSRSLVCDPIQGRRFCYVC

SEQ ID NO: 168390 - protein, 137 aa, Glycine max
  unsure (1)..(137): unsure at all Xaa locations
  Clone ID: PAT_MRT3847_123071C.1.pep
SRSGYLQRCLMKNLECLKVCYDHTVRDADGSIIQFHYGEDGVDVHQTSFITEFGALSTNKELVFSNYCRQLDRSSPYINKLPEALEGKAEKFSKQRNLGSMEHADFXRLIEHKYVSCLTQPGEXVGVLAXXSVGGPA

SEQ ID NO: 168391 - protein, 68 aa, Glycine max
  Clone ID: PAT_MRT3847_123072C.1.pep
ITKWKSHSSRCYSSCEQEQPPRHNIIVKILAKRTKNFGCQCKKRSNRSDPIVISKNVATTNIFGITLG

SEQ ID NO: 168392 - protein, 68 aa, Glycine max
  Clone ID: PAT_MRT3847_123073C.1.pep
RGSLRSIITFHQKSSYLPSDNILHKTVFKRKIYVSGEKEKKLLNCSPYHDINVLRLNYINNYTRKYLK

SEQ ID NO: 168393 - protein, 49 aa, Glycine max
  Clone ID: PAT_MRT3847_123074C.1.pep
DAWVIQGNQAYKDKQWQKAIGFYTEAIKLCGDNATYYSNRAQAYLELER

SEQ ID NO: 168394 - protein, 33 aa, Glycine max
  Clone ID: PAT_MRT3847_123075C.1.pep
LGSNPILCCYTLFLCSQSTKTSVNNKKVMYWAV

SEQ ID NO: 168395 - protein, 88 aa, Glycine max
  unsure (1)..(88): unsure at all Xaa locations
  Clone ID: PAT_MRT3847_123076C.1.pep
KDAEPTEFEESDRQALPDLENTNNDLKSDLKDLYMNSAAQIDVSGNHEAVGIHMPYRLRKXWRRIMSCFVRQLDKKVXGKDVVLIATR

SEQ ID NO: 168396 - protein, 64 aa, Glycine max
  unsure (1)..(64): unsure at all Xaa locations
  Clone ID: PAT_MRT3847_123077C.1.pep
RKDNNTNLVRTRGANYLKLFKKNLYCCESPXGTWRSGIETTFLTXKFINKIDTDKEVAELSLYP

SEQ ID NO: 168397 - protein, 87 aa, Glycine max
  Clone ID: PAT_MRT3847_123078C.1.pep
WTSESTTNNVDRSGSFYEEHKEYVDGASCFEGKILYAAQSYKRCGNIRLKPPNTTLSTYFFCCRLEGSFEMIFLIAKDNLYTPPKWS

SEQ ID NO: 168398 - protein, 170 aa, Glycine max
  unsure (1)..(170): unsure at all Xaa locations
  Clone ID: PAT_MRT3847_123079C.1.pep
VVANVEXYSPTRVWGYFSQRTGLLXQLEDSHLIKLKSNASEAIFWETNMESLIQDYRIVDGINIAHAGKTWVTLSRLGECPESHSTTRIKEVWQIEEVDFNIKGLSMDCFLPPSDLKREEEKGVEECGVAASNAKLPYKIQSASFKISVSKVAAINVEDSSASESDDENV

SEQ ID NO: 168399 - protein, 93 aa, Glycine max
  Clone ID: PAT_MRT3847_12307C.1.pep
GALFFYGRVLPPFGVHVFAFTSRGLCRMFPVLRFRICIGGAVWPFSIHFLVPSFSRKTGASLFSPPCLYVGNPRVPIKKIKKPNKKKKKIKGL

SEQ ID NO: 168400 - protein, 73 aa, Glycine max
  unsure (1)..(73): unsure at all Xaa locations
  Clone ID: PAT_MRT3847_123080C.1.pep
PHILLCASLPTPQAISAFTAQADEQEVEIATGYTMTQFFDTMINLFLNEKTTSKELXKYLIFIEEWKKYSDRF

SEQ ID NO: 168401 - protein, 109 aa, Glycine max
  unsure (1)..(109): unsure at all Xaa locations
  Clone ID: PAT_MRT3847_123081C.1.pep
ATPQLAPPANRAQGPCLRPRLSKSPRPQRIRHAEAPPPPPXPTPPRSKSGAXKIPMPPHKSPTPSLXPSSHDQAHPKTHPSKTPPXQQKQPXPPPPLGXVSXPRPPPXP

SEQ ID NO: 168402 - protein, 80 aa, Glycine max
  Clone ID: PAT_MRT3847_123082C.1.pep
LKILGLSLPMLTETWQHQSMSLKKHTKKVFFLFGVLQCWQILHHLESCNLVKGFTKQIKNLSTTRPYEAFLASTCCFFGV

SEQ ID NO: 168403 - protein, 57 aa, Glycine max
  Clone ID: PAT_MRT3847_123083C.1.pep
IFKKFRENGPNKTMNQWKPCSLETFFLAHQNEKKPKPHLLESPPTACALKLGGGVDL

SEQ ID NO: 168404 - protein, 74 aa, Glycine max
  Clone ID: PAT_MRT3847_123084C.1.pep
MPIFLQTKTGKTTNLEVLSINTIDTVKANIYDREGITPNQGDALKNPSSSDIVSPSTVTPCSRNHTLCASSAPL

SEQ ID NO: 168405 - protein, 63 aa, Glycine max
  Clone ID: PAT_MRT3847_123085C.1.pep
KTQKKNLEPSMPVTSGKKDPKFFRGQEQYLGSNMKKNRFLFPSEWKSIFLIVAYKKLFCFLTP

SEQ ID NO: 168406 - protein, 80 aa, Glycine max
  Clone ID: PAT_MRT3847_123086C.1.pep
ESKGSYLAVDTILWIVRGLPIITYFIDGTSFCCSQIQSFYTREVLWTDELTAEKTKYLQLPQQLTLYRLEQNMDPIEDVA

SEQ ID NO: 168407 - protein, 475 aa, Glycine max
  unsure (1)..(475): unsure at all Xaa locations
  Clone ID: PAT_MRT3847_123087C.1.pep
MEILSQMWSLLGLLTVLQNVLPSQLLSLLHSLYESLQDLLSPYSYFEIPEFNGYCGVELNDLYRHVHLYLNAANHAPAAACRRLTLSCSPSSNRISFAVAPNHTVHDAFRGHRVGWTHHVETAQDSLEERRSFTLRLPKRHLHALLSPYLAHVTSRAEEFERVSRERRLFTNNTTASGSFVSPPFXSLSVHPSLKVPPAYKQIPLTRIKNHHRSFACFIEYKNRVDRALMRGYLSNGRRGSGKSSLIAAMANFLCYDVYDLELTKVSDNSELRSLLIQTTNRSIIVIEDIDCSVDITADRTVKVKKSQGAKLSLRSSNKKGQTGCEESGRVTLSGLLNFTDGLWSCCGEERIVVFTTNHRDSVDPALQVRCGRMDVHVSLATCGAHAFRELARNYLGLESHVLFQAVEGCIRGGGALTPAQVGEILLRNRGDADVAMREVLAAMQGRMLAVAAAANDQAENEEAVGVRSPESVLL

SEQ ID NO: 168408 - protein, 241 aa, Glycine max
  unsure (1)..(241): unsure at all Xaa locations
  Clone ID: PAT_MRT3847_123088C.1.pep
MRRHCRLWWPKQLLSNKESSSSILLGWFVTCSPSSLDIIAAFTCSEVLLSSYSPGIQMVSGMIQCNEGIIYGTWGSMPSVLEDKSKFSVLGLCVTDPTTSNGLMNGKEDDKKKFSEYGNALQEGGTDRKNNSRSCRCFQLDGSLRKSSQYVLGRSNWVLVMFDSPEQNDVXIHRLPKLHHIHWNGLTMSQYDVPDTIILAINCTAAAKRFLRHTLSKKIIEPALHIHALCCHGAPVFQILG

SEQ ID NO: 168409 - protein, 54 aa, Glycine max
  Clone ID: PAT_MRT3847_123089C.1.pep
KWRSNKVLFCYDHGKISTMVRAVTTPPYSNMHLKYFQIKIDCFIVHHSSNARVN

SEQ ID NO: 168410 - protein, 107 aa, Glycine max
  Clone ID: PAT_MRT3847_12308C.1.pep
PTAFSLVEGSCFLRSFFYFFSLFIGYNICGPVATGSCAPAQHEKQTFLKNHYPQPNLWVWREMFKGAHFFSIETTNTTQIKGSRGAPTIPKQGRPGFLISGRTSGGN

SEQ ID NO: 168411 - protein, 83 aa, Glycine max
  Clone ID: PAT_MRT3847_123090C.1.pep
RNPQSQYLLFIDDVFSIYNLMQLWKQNLFSKADHLSACNELEPREVLANFICLPHTSIAFARTKEIFQTRGNRTCQDCSMNLN

SEQ ID NO: 168412 - protein, 43 aa, Glycine max
  Clone ID: PAT_MRT3847_123091C.1.pep
RLGRRNKMYTGPGRRETHPQRAGANMPPQQGGGPHSTQSRRAA

SEQ ID NO: 168413 - protein, 64 aa, Glycine max
  Clone ID: PAT_MRT3847_123092C.1.pep
MSTKQGGKAKPLKKPRSDKKDYDEVDMANSQKKNEDEKALKELKAKAQQKGSFGGSGLKNSGQK

SEQ ID NO: 168414 - protein, 285 aa, Glycine max
  unsure (1)..(285): unsure at all Xaa locations
  Clone ID: PAT_MRT3847_123093C.1.pep
MANNEKDACSFTDFPEDIQVCILSFLGPPEIATLACTSKRMGSLCATDSKLWFSMCERRWGSYTRITQWAQXNPTLSFKHLYNTLHRWENLLGFWRRSGTGIPSLLFFEWGPSFISASRVSPSDSDSNTYGVTKTPFLWMSLSEEGHVVTFLDPDGRRSDFKPENRSELVAVDVSFMGKTHFVVEEKRVRGGDDDVVVAESGSPPERLMAEIYQHFANPRSPGSDRSRRQRRREKERLYGRKWEPQHFVKIVNCSPTPARPLQGLWKVFYCSKLLYFVLNSNVFS

SEQ ID NO: 168415 - protein, 239 aa, Glycine max
  Clone ID: PAT_MRT3847_123094C.1.pep
FGTRLVTTNYPFCTRCLIHSNNFKERSFSPSNMFSINHFSDPDATSPGSGGSSRPALSDEDFFLAASNPKKRAGRKKFRETRHPVYRGVRRRDSGKWVCEVREPNKKSRIWLGTFPTAEMAARAHDVAAIALRGRSACLNFADSASRLPVPATAEARDIQKAAAEAAEAFRPGKDDDAVAERVAATATEREEEQEEGMVPEYLRNMVLMSPTHCFGSDEYGSADVEFDDAEVSLWSYSI

SEQ ID NO: 168416 - protein, 75 aa, Glycine max
  Clone ID: PAT_MRT3847_123095C.1.pep
TPHDKNDAQKFDVSGGSKSTLSEADTEDNNVDDTQTDKYADVEKPKHVVIPVCVDSTEEETLSVSKSLKIIEDDV

SEQ ID NO: 168417 - protein, 56 aa, Glycine max
  unsure (1)..(56): unsure at all Xaa locations
  Clone ID: PAT_MRT3847_123096C.1.pep
AYSEVEYSCFICRLVWATDNQALERIFYQYGXINETKIINDRETGRSRGFGYMIIR

SEQ ID NO: 168418 - protein, 66 aa, Glycine max
  Clone ID: PAT_MRT3847_123097C.1.pep
LGIASNHLQCVFYLLLDYGKSPHPLGHSSALHMEAHCNYKCSVFLNAFMQSPQSVMSPFFVGKSMS

SEQ ID NO: 168419 - protein, 94 aa, Glycine max
  unsure (1)..(94): unsure at all Xaa locations
  Clone ID: PAT_MRT3847_123098C.1.pep
NKTVLLILSNVGQGVMLTGQINRTRVVVIXSRTKHSVSFDTIHVQDSTALDFATRMARVFCFGXATEPCLSLPCPKVSELSFLSVARIGIAAQP

SEQ ID NO: 168420 - protein, 56 aa, Glycine max
  unsure (1)..(56): unsure at all Xaa locations
  Clone ID: PAT_MRT3847_123099C.1.pep
PWVFKSXALGIPXXKXLKNQAKXRNYTNTKKPXRRPADGRGVDPXXVRPTRPRTGV

SEQ ID NO: 168421 - protein, 145 aa, Glycine max
  Clone ID: PAT_MRT3847_12309C.1.pep
MIDLNLPVALEVEADETFVNEVAEMQQNNTGKESDDLSVVTNAKLSEQPDIHTRRQSTRNRPPTTKVLEAFAFGYLDRKEKCRNRDYLQDSSTRPSRRVSRKLAGSRNGGTDLEKEEKTDVVCNGNGNHSIDSNVIYPGSTCNER

SEQ ID NO: 168422 - protein, 65 aa, Glycine max
  unsure (1)..(65): unsure at all Xaa locations
  Clone ID: PAT_MRT3847_1230C.1.pep
GWIYKKSPVPITRKTVLNDHVLRARLAKGMGRNYYGEPAWNNVPLYIFPAXTIGTMACTSTRSYL

SEQ ID NO: 168423 - protein, 37 aa, Glycine max
  Clone ID: PAT_MRT3847_123100C.1.pep
MFNSQLKITVLPRPNVENKNTHSYVFSVNTGIRHFVT

SEQ ID NO: 168424 - protein, 85 aa, Glycine max
  unsure (1)..(85): unsure at all Xaa locations
  Clone ID: PAT_MRT3847_123101C.1.pep
TLLEALDHNHEPHKPSDRPLQLVLQEVYIISXIGTGPVGRDDTSXLRTSNGATSESTGLYEGTQCVDIHXETLTEGHPNNNVASN

SEQ ID NO: 168425 - protein, 93 aa, Glycine max
  Clone ID: PAT_MRT3847_123102C.1.pep
NYEAKTKKIELQKEAHSHTLDLISITLSLYLSVSISLSIYIYLSLTQSLSISLYISNPANLLKYMLISAQPLYSMLARSTHITLDRHINNYTH

SEQ ID NO: 168426 - protein, 383 aa, Glycine max
  Clone ID: PAT_MRT3847_123103C.1.pep
MGWIPCSGSSNTKKKLKKKLEKMEGQSSLVDPIKATPGKLKRNPSMNSKNSSKNGNPEHIAAQTFSFRELATATRNFRAECLLGEGGFGRVYKGRLENINQIVAIKQLDRNGLQGNREFLVEVLMLSLLHHPNLVNLIGYCADGDQRLLVYEFMSLGSLEDHLHDISPGKKELDWNTRMKIAAGAARGLEYLHDKANPPVIYRDLKCSNILLGEGYHPKLSDFGLAKLGPVGENTHVSTRVMGTYGYCAPEYAMTGQLTLKSDVYSFGVVLLEIITGRKAIDNSKAAGEQNLVAWARPLFKDRRKFSQMADPMLQGQYPPRGLFQALAVAAMCVQEQANMRPVIADVVTALSYLASQKYDPNTQTLQSSRLAPGTPPRSKRGY

SEQ ID NO: 168427 - protein, 163 aa, Glycine max
  Clone ID: PAT_MRT3847_123104C.1.pep
MLFNVAAAAVALCAASASAIALPQNAGSSAGSNMCDASTFNNGADLDIPQANAQDCTDLVSGLDTSQTWSVSKSWARLSTQGTCAFSVRVIAGSKDGLVGGADLADLVRDSVNNFQQGGQVSCKGQFGQVVSAEGEVDCNTPSGGSQVRVEWVIAASSYNPSN

SEQ ID NO: 168428 - protein, 47 aa, Glycine max
  Clone ID: PAT_MRT3847_123105C.1.pep
KYLNGYLQIKHCNHRNKRTNKVFPLFRNVNCTPLHRKDNCSLEDNIN

SEQ ID NO: 168429 - protein, 54 aa, Glycine max
  Clone ID: PAT_MRT3847_123106C.1.pep
EPLVRRQQHHLECSCVCASHACRRALSLLTLFTCKCRPTIDPCLPAQNRNPGLG

SEQ ID NO: 168430 - protein, 67 aa, Glycine max
  Clone ID: PAT_MRT3847_123107C.1.pep
MSVLSIAMLPKKCSIYHFCNCVMHRNVVNKSFENYNIFIDYAKICFVTVFQELDQCHLLRFMFADYS

SEQ ID NO: 168431 - protein, 67 aa, Glycine max
  Clone ID: PAT_MRT3847_123108C.1.pep
KKKKKKKKKKKKKKKKKKKKKKKKKKKKKKKKKKKKKKKKKKKKRRGGPQKWAPSPGKLFRAGSWRG

SEQ ID NO: 168432 - protein, 116 aa, Glycine max
  Clone ID: PAT_MRT3847_123109C.1.pep
MNINPTIEFSYSQVTRKEKNLITTPIITMRTYFLKKFNVLLLVLLHTSESTLGFNWPGKLAEVKCIERERQALLKFKEGVLDDAGMLSTWNEDENNGDCCKWKGIQCNPFCRLLAA

SEQ ID NO: 168433 - protein, 199 aa, Glycine max
  Clone ID: PAT_MRT3847_12310C.1.pep
MELQLGLALSTHSRAYDQPFSHKKRTFSQLMMMEHAPPPHHVMLPTLSLLPLTPSHHVVDDHHSQCSNITKDEEEEGVVGWPPVNHWRKKLHVEEVVGNNNNIDHMVWVDHRQTHSLQGYSSNTLYVKVKMEGVGIARKVDLSMHQSFHTLKETLMDMFGKCHHQQSNNYELAYLDKEGDWLLAQDVPWRQVHPTYLSP

SEQ ID NO: 168434 - protein, 97 aa, Glycine max
  unsure (1)..(97): unsure at all Xaa locations
  Clone ID: PAT_MRT3847_123110C.1.pep
HYYIHSLIHINXYLHHMVLVYISXNQGPPITTYIKFLYITHLKLLTLNHIKFLTIISSIYYLNYPXNTNTYYIFKTSYIFSYSFKFINPIFTNIYNI

SEQ ID NO: 168435 - protein, 117 aa, Glycine max
  unsure (1)..(117): unsure at all Xaa locations
  Clone ID: PAT_MRT3847_123111C.1.pep
YAFCVVGRVGGEIHEKVVLKFLQEEFLTVWSTHVRSATTLLADGCSYSYAMVHDSSVSTIPVDFVFCVKXLSTINNMCSFGLNPGIXGSRLLGTISXFILQHTVWNQMATERTPFDF

SEQ ID NO: 168436 - protein, 105 aa, Glycine max
  Clone ID: PAT_MRT3847_123112C.1.pep
SLLLLLLLHDMASSTRFSPLPQSEPDRDNHEDQLPLSISVESTNTRSGISSEHYYAEEIFSISARTCEMIQDLLGLTLLMMLILLPSIQAFGDAKGKPYSPTFRS

SEQ ID NO: 168437 - protein, 192 aa, Glycine max
  unsure (1)..(192): unsure at all Xaa locations
  Clone ID: PAT_MRT3847_123113C.1.pep
MGSTFNPQILVEKLAKLNVSQTSIETFAHWCIFHMNKAKQVVETWDRQFHSSSREKRLAFLYLANDILQNSRRKGSEFVGEFWKVLPDALRDVIQNGDDFARNAALRLIGIWEERKVFGSRGQILKEEFVGSHVENNSRDVKPTNMKLLSQRPSVGNALEKIASGFHVVYGGQTDEDAVLSXCRNAINCLDK

SEQ ID NO: 168438 - protein, 74 aa, Glycine max
  Clone ID: PAT_MRT3847_123114C.1.pep
GVHKLITYISQNRKAIKSYIIHPLFDLLSVVSLERAAITSNTWHSKILLKTQQTPARDYRKLKPLWNPITQTSM

SEQ ID NO: 168439 - protein, 53 aa, Glycine max
  Clone ID: PAT_MRT3847_123115C.1.pep
WLGLNSTMAPFSYLQPNNPRPPRIPICFVVNHYSQFSLTQSSYFVYVINLIHI

SEQ ID NO: 168440 - protein, 236 aa, Glycine max
  unsure (1)..(236): unsure at all Xaa locations
  Clone ID: PAT_MRT3847_123116C.1.pep
RPWRVQAKESLDQGGIYQVHPLKIIIHVYEDEASGPKSAKLITLRFEYLVKLNVVCVGIEGSNDAPENDLLCNLFPNDTGLELPHQSAKLFVQDAITFNTQRTSRPYRWAQHLAGIDFLPEMSPLLLTDNSGAAKNENVISGLSLYRQQNRVPTVLQRIRARRKAQLALLEQLESLTKLEWPRLPCKSVPWALHTPLCNLDSWSPVKLPPVPREXSSXAVIDKEEHIXESMDADVI

SEQ ID NO: 168441 - protein, 88 aa, Glycine max
  Clone ID: PAT_MRT3847_123117C.1.pep
TCRKRSDNQLLFFNPHTETGLNDSKSVSVHDKFRTCTIVPLPRNSDRVWSWSNILEDLPDPQSPPQIFIYWFCYYLYVIIHIGNYIYV

SEQ ID NO: 168442 - protein, 50 aa, Glycine max
  Clone ID: PAT_MRT3847_123118C.1.pep
CIIKRGRPLLFNVQCPRELARPSFRHIFENITPYRKHVILLVAVLIAYKI

SEQ ID NO: 168443 - protein, 139 aa, Glycine max
  Clone ID: PAT_MRT3847_123119C.1.pep
FYLRLSCIQDSLMSVLRMVLEPYPAATPHPGNHDDSVLYSVTYGKAMLHQCGAPVSQPIAPVTYMWQPSSQQNMSTELDGRNHCTSFGQHDIGNDSNKHGVELSEKSGKIKHGSSFRCLWVWIHASAFEEGYDYLKIAC

SEQ ID NO: 168444 - protein, 44 aa, Glycine max
  Clone ID: PAT_MRT3847_12311C.1.pep
DRYVALPRNVEPLLKLADIAELSVRERPSERPPMSDIASWLEQL

SEQ ID NO: 168445 - protein, 92 aa, Glycine max
  unsure (1)..(92): unsure at all Xaa locations
  Clone ID: PAT_MRT3847_123120C.1.pep
ITKKSTAPVKDEIPNTKVPNTPSKRHWNCSSINKGKRFCNNGHVLCRGGGRATKHVLDFFHNTXCKVSERSKNIKFKRPLNRWHLNDTLKET

SEQ ID NO: 168446 - protein, 54 aa, Glycine max
  Clone ID: PAT_MRT3847_123121C.1.pep
KETVGGRGTLTTPPFDTRAWTGLLTLGLYGAPHYTGSCFIGLHYGIPIPYLIVV

SEQ ID NO: 168447 - protein, 59 aa, Glycine max
  unsure (1)..(59): unsure at all Xaa locations
  Clone ID: PAT_MRT3847_123122C.1.pep
PXXFHEXXPDRXSXSHEQXQHHQAPXXNXCSCXXQYAXLXNTXPCTXAEAFRXTDVXXR

SEQ ID NO: 168448 - protein, 41 aa, Glycine max
  Clone ID: PAT_MRT3847_123123C.1.pep
IYSPSDYLDIACFVCCYTSAILILLLLKVTELPSLTESSVS

SEQ ID NO: 168449 - protein, 148 aa, Glycine max
  Clone ID: PAT_MRT3847_123124C.1.pep
PRQKKRNLKKKKGKFPRVFKKGPRVFLGGHPHVFFKKKAPNVPFFFFHIFFQFLKQGAPFFIKPAPQGKTPPLRGTGVQKPKGGFKPPLREIRDPFPNFHPPRPLFGGPTPKHGLLIETLTPFPHGGPLNGNRPSFHRTGVGKQNPRF

SEQ ID NO: 168450 - protein, 157 aa, Glycine max
  unsure (1)..(157): unsure at all Xaa locations
  Clone ID: PAT_MRT3847_123125C.1.pep
ACTYLREDSDIFLLLEKQQXLKGKDTSKASTLQRRLXFDTLQEILNRNQQLPPWKAVSCGEQRQQIWSEFRRIREREEAESEDLFKVICGVLKKDMADEMRGWGEWPVEMGDVVLDIERLVFKDLVGETIRELASFSPQSQCNNKLQLPALRRKLVF

SEQ ID NO: 168451 - protein, 272 aa, Glycine max
  unsure (1)..(272): unsure at all Xaa locations
  Clone ID: PAT_MRT3847_123126C.1.pep
NPPPQRTDVIEKSRICFAIPRRCVNLHSHRFIAYISYGCGFGTRFGVDGYSDGGRRHAPNTRRKIIRFFRRRCYLRLRLCFSPLRRRHNLKRRLCVQGTPSFTRYNYSYNFLDTKXKAVVHDNRVGLLYEYTFPPSHAPSLSFVGIPRKILGITFFESQGKWIAQLLSGKKVLPSYEEMMESIEEFYHSNEVAGIPKRYTHVVDAFDYCDKYGENVGFPKTEEWRKELCISAGMNAFANLETYRDSWNDDIDEKLQEALRSPYFTQLEQLSL

SEQ ID NO: 168452 - protein, 102 aa, Glycine max
  Clone ID: PAT_MRT3847_123127C.1.pep
TKGDSSPAAKPLEKEGTRTRPTGVLPRLLVERRIATFERPRRNKFCPLTERKGLKKLLWPERSRTIKSRRYQPKIVSKFTSELSDPATATAYSTAWLAQLCL

SEQ ID NO: 168453 - protein, 78 aa, Glycine max
  unsure (1)..(78): unsure at all Xaa locations
  Clone ID: PAT_MRT3847_123128C.1.pep
QMTYKSLLSSHYLILYETKTKLGHVKPNKGARAXQNNLPIPTDLLFIPIETPIKSILIHFHSYFLPQNYFPSQVHTTY

SEQ ID NO: 168454 - protein, 60 aa, Glycine max
  Clone ID: PAT_MRT3847_123129C.1.pep
LQHINGQLSIQYFIFIKIITQCYLPSMVTNHTLISKLPYTSSDACYTGNKSGTAAINNCQ

SEQ ID NO: 168455 - protein, 33 aa, Glycine max
  Clone ID: PAT_MRT3847_12312C.1.pep
QGTQAKKERNQMTALIVCVLIKRVSQLRFLTDC

SEQ ID NO: 168456 - protein, 59 aa, Glycine max
  unsure (1)..(59): unsure at all Xaa locations
  Clone ID: PAT_MRT3847_123130C.1.pep
LYPTXLNTSYFPLFISTQHGLAGWSWGPIIHSSYTRYMNIHSISPFVMALLKSMTQMLI

SEQ ID NO: 168457 - protein, 58 aa, Glycine max
  Clone ID: PAT_MRT3847_123131C.1.pep
DVRLSFFSHPKQYDLWSPHNLPHKDVVSKLSMIPRPSFHHPSPTTVRIRFLGPFDQTA

SEQ ID NO: 168458 - protein, 77 aa, Glycine max
  Clone ID: PAT_MRT3847_123132C.1.pep
EELLGIYSSLYIGCPRPMKMRKIFFGNMRKLFYPLFNRFPGGPLLFQKASFWKKKAFVAPPFLLFCLSGKLARNFVV

SEQ ID NO: 168459 - protein, 504 aa, Glycine max
  Clone ID: PAT_MRT3847_123133C.1.pep
HASGGGNNGRTIKPLGVDISKRQHKGGLSKGIIAIIALSVFLVVVLCFVAALALFKYRDHVSQPPSTPRVLPPLTKAPGAAGSVVGGGLASASTSFRSNIAAYTGSAKTFSMNDIEKATDNFHASRVLGEGGFGLVYSGILEDGTKVAVKVLKREDHQGNREFLSEVEMLSRLHHRNLVKLIGICAEVSFRCLVYELIPNGSVESHLHGADKENSPLDWSARLKIALGSARGLAYLHEDSSPYVIHGDFKSSNILLENDFTPKVSDFGLARTAADEGNRHISTRVMGTFGYVAPEYAMTGHLLVKSDVYSYGVVLLELSTGRKPVDMSQPPGQENLVAWARPLLSSEEGLEAMIDPSLGHDVPSDSVAKVAAIASMCVQPEVSDRPFMGEVVQALKLVCNECDEAREAGSSSSSVDLSHSRQPSDNLQGQFSATNYDSGIDIENGLLASELFSSSARYGRRVSGSFRRHSYSGPLNTGRSKRLWQIIRKLSGGSISEHGTMFKL

SEQ ID NO: 168460 - protein, 87 aa, Glycine max
  unsure (1)..(87): unsure at all Xaa locations
  Clone ID: PAT_MRT3847_123134C.1.pep
EEKPSKPETETDKLIKAWVDSFYQTCPWLKATSESRAGIVELITHFEAGNPMPVGTDALTIFNGKWLLRDSSFAGLFXMSRSGTLPL

SEQ ID NO: 168461 - protein, 59 aa, Glycine max
  Clone ID: PAT_MRT3847_123135C.1.pep
MASGSSGRGNSASKGFDFASDDILCSYDDYANRDSSSNGNHTDPVIAPNSTNVYLPMCP

SEQ ID NO: 168462 - protein, 316 aa, Glycine max
  unsure (1)..(316): unsure at all Xaa locations
  Clone ID: PAT_MRT3847_123136C.1.pep
REYAWRKINKGIQLNRCENKTLCMEKLSLVLPDSPPYFPRQFGRCAVIXGNLGXDLLKTKFGNEIDGYEGCLXVVIRENGAPTQNYTDYVARKSTFRLLNRGSVKALDKVVELDEQRKEVWIINTTIHDIMNKMIREVPIKNRYHLTVGATFGSAAKGTGLKALEFALSMCDSVDMYGFTVDPGYKEWTRYFSESRQGHTPLHGRAYYQMMECLGLIKIHSPMRADLNRVVKWVPSHHIIRAARIASEKLLRRVGAGSEDPLAACSIIKKQVKRNLNAVSKLRKAALDHLRYVKRTTMYPLEHSPGHGSLCTVPTD

SEQ ID NO: 168463 - protein, 332 aa, Glycine max
  Clone ID: PAT_MRT3847_123137C.1.pep
MAAIVHHGLQSHLESQHTESIALKLRLPSSKPPLPQLIDLAFKPSFWDSSSTIKPHSEENNNNKKSTPANPNSWSFREALSNVTKEPSQNQTTYVHPQQKRFSLSLSPKSLQLCTENLGNESGSDSGSDSDENSIDMFSSVNGNSGTREQTQQRQPRQLSTAKKAKTQNFPPPLTTIRGGSESLRVRPHREDGRLVIEVTKVPPSSSCFHAERSHGRLRLCFLTNHTPSFETEAAAEEEDDVEEKEPFVNDKGFENEIGGQVKDTTKEEQEETEDETGEEEEQDEECVACGYVKSDVIIMEKYERLRRCKEGGDHENYEFLNWSEPRLVATS

SEQ ID NO: 168464 - protein, 50 aa, Glycine max
  Clone ID: PAT_MRT3847_123138C.1.pep
SKASFFIVVVLFKTYMQLVFVFWPQEDIWLGISLSRYVVLFFYNKPYEGV

SEQ ID NO: 168465 - protein, 60 aa, Glycine max
  Clone ID: PAT_MRT3847_123139C.1.pep
EGLTEEEINAFYQECMKLGTTTLKLCQGMQPKLSKFFEPYATTNLHGASAELSSDSRSEA

SEQ ID NO: 168466 - protein, 43 aa, Glycine max
  Clone ID: PAT_MRT3847_12313C.1.pep
RPRTAIQIGFPEWFLPHLTAAMVMTDPLRNCERASKRRKMERG

SEQ ID NO: 168467 - protein, 76 aa, Glycine max
  Clone ID: PAT_MRT3847_123140C.1.pep
KKAPLPLNPMNKLGVFKPWTLSFSFGGALHQSPLQTWGGKKENFPQAQKAFLAKCKAHFFAPLGKFFGGNGNGFPF

SEQ ID NO: 168468 - protein, 52 aa, Glycine max
  Clone ID: PAT_MRT3847_123141C.1.pep
SCDGRLLYNMPVSQASHSARWNLHSAGLYSSRLQSVHSHSILLNVHSSSTSR

SEQ ID NO: 168469 - protein, 185 aa, Glycine max
  Clone ID: PAT_MRT3847_123142C.1.pep
MISNSKQIKNEEKNPPLTPLGTDDSNNYNSSANHSNITVRVCSDCHTTKTPLWRSGPKGPKTLCNACGIRQRKARRAIAVAATANGMNPVEAEKSQVKKGNKLHSKGMKSKTKGAPHMKKKRKLGAKYRKRFGAFEDLTVRLSKNLALQKVFPPDEKEAAILLMALSYGLLHGFPTDRYVNYLDL

SEQ ID NO: 168470 - protein, 65 aa, Glycine max
  Clone ID: PAT_MRT3847_123143C.1.pep
VLTPKTWRWRRARNCIEMGVKDGSNNNVLISLVASEFDGFNEERKQNPHPYSPLSLPERIVIIQI

SEQ ID NO: 168471 - protein, 79 aa, Glycine max
  Clone ID: PAT_MRT3847_123144C.1.pep
PALPKQPVFQMSIGLQDDEIRQKMEDLRNERERRIAERTAFSGVGRASTNNDQIEGKTSRISAMSDKIMEFSSVKVRRI

SEQ ID NO: 168472 - protein, 93 aa, Glycine max
  unsure (1)..(93): unsure at all Xaa locations
  Clone ID: PAT_MRT3847_123145C.1.pep
MGDRCRHFSIEELPSHLVLEILCSGRLSAMDLVCLELTSKTFGGSHGLHPFKFIKSLVDFAAXCASHVTYARMGLNSQRELYDRCGGNWKRVL

SEQ ID NO: 168473 - protein, 50 aa, Glycine max
  Clone ID: PAT_MRT3847_123146C.1.pep
AFLFGPTDFLARYFSLQGPWGEKKPHFYPLVGLNSPFLKPNLSFLVPTRG

SEQ ID NO: 168474 - protein, 47 aa, Glycine max
  Clone ID: PAT_MRT3847_123147C.1.pep
RSSHMRLLFILPKFLMGVFYSLTAQKRILYSLKQKLEFEHYKDVCAV

SEQ ID NO: 168475 - protein, 72 aa, Glycine max
  Clone ID: PAT_MRT3847_123148C.1.pep
NPKLKRGGNLKPKIRGLPFNPKKTPSFYFFYFKNLPGWNKGKGVTGFNLFSLFSHLYPVGPIRIGSNVSWAS

SEQ ID NO: 168476 - protein, 36 aa, Glycine max
  Clone ID: PAT_MRT3847_123149C.1.pep
RGTSCGDLCRTLVRNLARAHGHKTRKNVSNHARAKS

SEQ ID NO: 168477 - protein, 62 aa, Glycine max
  Clone ID: PAT_MRT3847_12314C.1.pep
CAELCTLILPSCVFLSSVLSYLELRLGILILMVRHFVLHHNSHQTVIRDGLEFQGFMILVVL

SEQ ID NO: 168478 - protein, 211 aa, Glycine max
  Clone ID: PAT_MRT3847_123150C.1.pep
MSYDYLFKYIIIGDTGVGKSCLLLQFTDKRFQPVHDLTIGVEFGARMVTIDSRPIKLQIWDTAGQESFRSITRSYYRGAAGALLVYDITRRDTFNHLASWLEDARQHANPNMTIMLIGNKCDLSHRRAVSKEEGEQFAKENGLLFLEASARTAQNVEEAFIRTAGKILQNIQEGVFDVSNESFGIKVGYGRPQGQPGARDGTVSARGGCCS

SEQ ID NO: 168479 - protein, 61 aa, Glycine max
  Clone ID: PAT_MRT3847_123151C.1.pep
RTAQNVEEAFIRTAGKILQNIKEGVFDVSNESFGIKVGYGRPQGQSGAKDGTVSARGGCCS

SEQ ID NO: 168480 - protein, 338 aa, Glycine max
  Clone ID: PAT_MRT3847_123152C.1.pep
MAKLPVEYNGDCATTASASASAAAESQRSIPTPFLTKTFQLVDDQSIDDVISWNDDGSTFIVWNPTVFARGLLPKYFKHNNFSSFVRQLNTYGFRKVVPDRWEFSNEYFRRGEKRLLCEIQRRKISSPASSPTAPATVSVTAPMPLTAIPIISPSNSGEEQVTSSNSSPAELLDENERLRKENVQLTKELAEMRSLCNNIYSLMSNYANANGKGNSNGSYKTKGGAGVAHGSLESGMTAVKLLDLMPVMRSSDEDAAEMAPEEMNPKLFGVAIGAKRAREGGGGGDCGGGGEEDTLLRLHHAGSADVKSEPLDFQNHRENQKTPWLSPCYRTNQRVCN

SEQ ID NO: 168481 - protein, 199 aa, Glycine max
  unsure (1)..(199): unsure at all Xaa locations
  Clone ID: PAT_MRT3847_123153C.1.pep
MSLLQLQLTSHALRSVSSHNFRPLYSSKRVSYVRTKIRAVGTVPDEKDSDSDITTDPDEPPYVGLVFVSSVLLPDGTPDMHFRSACGGQRLRKIMLDSNVDLYGPYARPLLNCGGGGTWGTWMVEVIEGKELLNPRTDKEKNILKKKPINXKPKNWRLACQTIVGKPDSRGAVVIQQLPEWKGHEWKYAKPGESDWESE

SEQ ID NO: 168482 - protein, 362 aa, Glycine max
  Clone ID: PAT_MRT3847_123154C.1.pep
PAKIPIDLRLLFHGSTAAGGTQRRLRHYRLSIRLRAAESQRSIPTPFLTKTFQLVDDQSIDDVISWNDDGSTFIVWNPTVFARDLLPKYFKHNNFSSFVRQLNTYGFRKVVPDRWEFSNDYFRRGEKRLLCEIQRRKISSPAPSPTAPTTVTVPMPLTAIPIISPSNSGEEQVISSNSSPLRAPAELLDENERLRKENVQLTKELAEMRSLCNNIYSLMSSYGNKNGNSNGSYQTDGGAGGAQGSRESGMTAVKPLDLMPVKRSSGEDAADTVPKEINLIPNPKLFGVAIGAKRAREGGGGSGSGRDCGGGGGGGEEDTLLRLHHVGSADVKSEPLDCQNHRENQETPWLSPCHRTNQRVCN

SEQ ID NO: 168483 - protein, 131 aa, Glycine max
  unsure (1)..(131): unsure at all Xaa locations
  Clone ID: PAT_MRT3847_123155C.1.pep
AVLVEFESETLLKEVVRAHGTIKTKVGRFFSSSNPLVFRYRMAKQIRXLDKVAADRQKFVHRREMTHSYVTDSDVTGREQDKGEIIKLLNQQDPNDDCNSLYVIXIVGMEGLXKSTLAXFVFNDKRIHECF

SEQ ID NO: 168484 - protein, 313 aa, Glycine max
  Clone ID: PAT_MRT3847_123156C.1.pep
MDLLFLCLLPFLFYSFFTLYKLILERRGQPCYMLAYECFMPPEDTKLDTDSAAKIVLRNKKLRLEELRFLLKTIVSSGIGENTYCPRTVLEGREECPTLKDTYEEIDEIMFDTLDNLFKKTGISPSEIDFLVVNVSLFSPAPSLTARIINRYKMRENIKAFNLAGMGCSASVVAIDVVQQLFKTYKNSVGIVVSTEDLGAHWYCGRDKKMMLSNCLFRSGGCSMMFTNKASLKSRAILKLKHMERTQYGADDEAYNCCIQVEDELGYSGFRLTKSLVKSAAQALTVNLQTMAPKILPLWEMVRFFFASIRDSG

SEQ ID NO: 168485 - protein, 42 aa, Glycine max
  Clone ID: PAT_MRT3847_123157C.1.pep
SGRTTLRHRPKTGCAQQKCNRGTHDPNTLKHTDINDTRPLTS

SEQ ID NO: 168486 - protein, 67 aa, Glycine max
  unsure (1)..(67): unsure at all Xaa locations
  Clone ID: PAT_MRT3847_123158C.1.pep
SEGVFQSLGVILPXGGXGGXGGPCSAFEVFFVVTVSPFIWLVVHPGLWNKGLRNRVRGEGGSXXGAV

SEQ ID NO: 168487 - protein, 100 aa, Glycine max
  Clone ID: PAT_MRT3847_123159C.1.pep
GVRAAVPTGSAVPVCLSVRLTSSNTSASAANTLGALYPTGVLATSTEITSSLVSVSIFRKSGKGTRAKVLSGRTLDFSIKARLYVLGIPGVLRSRPRLHF

SEQ ID NO: 168488 - protein, 60 aa, Glycine max
  Clone ID: PAT_MRT3847_12315C.1.pep
GHSNFFRKHLCFAKSSFGSKYKNKGRPYPPHDGNCASRRLVGLIRLARSRGYTYIRQPRP

SEQ ID NO: 168489 - protein, 120 aa, Glycine max
  unsure (1)..(120): unsure at all Xaa locations
  Clone ID: PAT_MRT3847_123160C.1.pep
VFGSRGIYDASVKHLGVKRIELTPHSLQSDVQMHSMACFLNAPMNTESNYSNGSTWIYLXHFEYITXHNVIHIVXKLIHDDKPPHSTSKXPNKLTVLPDGWNTTLLSELKPAACRDLDHC

SEQ ID NO: 168490 - protein, 109 aa, Glycine max
  Clone ID: PAT_MRT3847_123161C.1.pep
LLACRSESQFPAQTHPFYVGAAWERECGALNAAALEAGTLEAKRVRDTCPLCNMDAAERLTDAYQADREKSSGTVNADAFNWITAKILRSFSDTNVRTEPNETALCEFL

SEQ ID NO: 168491 - protein, 67 aa, Glycine max
  unsure (1)..(67): unsure at all Xaa locations
  Clone ID: PAT_MRT3847_123162C.1.pep
RDPRFLTDXQXFFGLPKNPDGGPGAAAAXQKXXXRRRAKRTRFXGKVLVWLSFFSSLSLLNHXIWFP

SEQ ID NO: 168492 - protein, 47 aa, Glycine max
  Clone ID: PAT_MRT3847_123163C.1.pep
HASAHASAHASADAWVQPRLSARTFQRISISFLLTCLCICCAFLLAF

SEQ ID NO: 168493 - protein, 126 aa, Glycine max
  unsure (1)..(126): unsure at all Xaa locations
  Clone ID: PAT_MRT3847_123164C.1.pep
MSASVIFSGDNRLTAKTIFTCRDLDILVVYSTIATKFRKFLPHYIKRHLYTLXLIYILPSMLTAENKCKRXNLSNMHISGXFDDGRYKSWSKHEKNLGLTDXKRMEVIRNKGIXPAEVFANRAHEF

SEQ ID NO: 168494 - protein, 440 aa, Glycine max
  Clone ID: PAT_MRT3847_123165C.1.pep
RKWHQIKTGSTQINACIKETGSGNNAGDKNNGQKQKQSSSQDPSPLFIQIIDKKKAQNLLILLRALNVTMEEVCDALYEGHELPPEFLQTLLKMAPTSDEELKLRLFSGDLSQLGPADRFLKAMVDIPFAFKRMEFLLFMGSLKEELATIMESFAILEVACKELRNSRLFLKLLEAVLKTGNRMNDGTFRGGAQAFKLDTLLKLSDVKGTDGKTTLLHFVVLEIIRSEGIKAIRKAKESQSSSSIKSDGLPDSTQETEDYYHEIGLQVVSRLSSELENVKKAAVIDADSLTGTTAKLGYGLIKTRDLVTKTMKNVEEDRGFFETVKSFVQNAEADVTKLLEEEKKIMTLVKSTGDYFHGNAGKDDGIRLFIVVRDFLIMVDKVCKEVRDTRKKLAKTLKQETPRGASSSETRPPPDFRQRLFPAIAERRMDDISSDDESP

SEQ ID NO: 168495 - protein, 42 aa, Glycine max
  Clone ID: PAT_MRT3847_123166C.1.pep
KFKNFFFFFLVLEINSFYTLAGKKNISRQCMVINIDEKGDKN

SEQ ID NO: 168496 - protein, 50 aa, Glycine max
  Clone ID: PAT_MRT3847_123167C.1.pep
YLCYITKYITLFSLFFPSFEEILMKKICCGDNITIRRPGGGISFHVQTNL

SEQ ID NO: 168497 - protein, 63 aa, Glycine max
  Clone ID: PAT_MRT3847_123168C.1.pep
HLFIFNDSFKWCQKILATFLLSVKKILLKITCECSGNFEIVTRMDVRVGAHFGCESARFKTEA

SEQ ID NO: 168498 - protein, 51 aa, Glycine max
  Clone ID: PAT_MRT3847_123169C.1.pep
SGKKLGLSYEMDRHPSSIMLHSYFYKLNHGTTLTSFHFIPFPFHHKPSIRT

SEQ ID NO: 168499 - protein, 70 aa, Glycine max
  Clone ID: PAT_MRT3847_12316C.1.pep
VLLLWHKKKHASTGRLVIKRVLVSVLTVHQTEIKISSFYLNLMSLLRTWTMGPSLSEILLKKIWMHHGLK

SEQ ID NO: 168500 - protein, 43 aa, Glycine max
  Clone ID: PAT_MRT3847_123170C.1.pep
ISYGLNGQTPILREVSVGEHKGHFLTIFILLSKVMKHGLRAVI

SEQ ID NO: 168501 - protein, 67 aa, Glycine max
  Clone ID: PAT_MRT3847_123171C.1.pep
NFSCPAWSFGFLTLLCTKALDSPPYFLVVSFHLGGATSLCCYRVPPPSFTGLLSSPCHPRGGKFCFF

SEQ ID NO: 168502 - protein, 42 aa, Glycine max
  Clone ID: PAT_MRT3847_123172C.1.pep
ISSFLGTFHLEQRPIYIIHSQLTLPANFLHLGHYDLVWLAVM

SEQ ID NO: 168503 - protein, 57 aa, Glycine max
  Clone ID: PAT_MRT3847_123173C.1.pep
EVSMVVPMMILRADRIVGMRHGVSDHIDGSGMFSSMLATQHQATYQPSTPSTDYSYL

SEQ ID NO: 168504 - protein, 239 aa, Glycine max
  Clone ID: PAT_MRT3847_123174C.1.pep
MQSALRFHFQASNPGIVVPHTNHAFATNLNSHRTLSCTKRRSLPLCSFTAQPSNQTSAVGSPSLQHWNLTNRHVTVLNVFACATAICATWLFCSAIPTLLAFKKAAESMEKLMDATREELPNTMAAIRLSGMEISDLTTELSDIGQEITQGVRSSTRAVRLAEERLRRLTTVPSSASLQGMTINPKAEYDDDEPAVARTARGVREGIVKGRATLQMFFTLTRFSRFALNFITGRRKLSS

SEQ ID NO: 168505 - protein, 168 aa, Glycine max
  unsure (1)..(168): unsure at all Xaa locations
  Clone ID: PAT_MRT3847_123175C.1.pep
MRAHKLLLFFIQFCLINYSANIFPANGYFLGHQCSIVLHLKNNLIFNSTKSKKLTLWNQTEDCCQWHGVTCNEGRVIALDLSEESISGGLVNSSSLFSLQYLQSLNLAFNNLSSVIPSELYKLNNXRYLNLSNAGFEGQNPEENFNSKRRLWYSNTLMRMLTESSPSL

SEQ ID NO: 168506 - protein, 46 aa, Glycine max
  unsure (1)..(46): unsure at all Xaa locations
  Clone ID: PAT_MRT3847_123176C.1.pep
LKLYFAFFYDFFLVFLMVFVFFLLFLGSLLSSFTSFISRXLNFLFY

SEQ ID NO: 168507 - protein, 298 aa, Glycine max
  unsure (1)..(298): unsure at all Xaa locations
  Clone ID: PAT_MRT3847_123177C.1.pep
FPSCFGENAVQVADSSSSSASQTAQNLVICVYQCRIWGKCCFITITWTKSLMGQGLSVGIDDSSSNQCLCKVDIKPWVFSKRRGCKSLEAYSCKIDVYWDLSNARLGVGPEPLEGFYVGVVVDRQMVLLLGDLRKEAFKKSSAIPLPSNAVFVAKKEXHVFGKEMFGNKAVFCDNGQIHDLVIECDTSGVSDPCLIIRIDSKTVMQVKRLKWKFRGNHTILVDGLAVEVFWDVYNWLFGTSLGNAVFMFRTCISEEKLWVGQPLSDANVVQWSFSQRFSETKSQGLGFSQILYAWKND

SEQ ID NO: 168508 - protein, 91 aa, Glycine max
  Clone ID: PAT_MRT3847_123178C.1.pep
RICQHRYMYGVPLLGEAYALADLAEHFRTHPVENLSINNVSLLQRILCLSLVSNSAAAVTSRAVSQVHERLGRCVSLYQIIRTEDGRYLLA

SEQ ID NO: 168509 - protein, 59 aa, Glycine max
  Clone ID: PAT_MRT3847_123179C.1.pep
LLFDDVLLDAASVPAEAVRGHRLHFFRAVVHLLVVSHWCRRCGSLCAAPVRRESVCVDA

SEQ ID NO: 168510 - protein, 328 aa, Glycine max
  Clone ID: PAT_MRT3847_12317C.1.pep
IRLEVAVFGVDCASGDTFTDGSVKYTMTSMNVPEPVMSLAVQPVSKDSGGQFSKALNRFQKEDPTFRVGLDPESGQTIISGMGELHLDIYVERIRREYKVDASVGKPRVNFRETVTQRADFDYLHKKQSGGQGQYGRVIGYIEPLPAGSSTKFAFENLLVGQAIPSNFIPAIEKGFKEAANSGALIGHPVENLRVVLTDGAAHAVDSSELAFKLASIYAFRQCYAASRPVILEPVMLVELKVPTEFQGAVAGDINKRKGVIVGNDQEGDDSVITAHVPLNNMFGYSTALRSMTQGKGEFTMEYKEHLPVSHDVQTQLINTYKGNKEGE

SEQ ID NO: 168511 - protein, 103 aa, Glycine max
  Clone ID: PAT_MRT3847_123180C.1.pep
NRAETGKNRGPRGKKESVPKTKQPKSWKQKVQSPGGLRKHPHPIKGGGPTAPFKNEKPPVPHEIKKRPTPGGKGFCSMSPQVVFFFHTGETGENGKWRPPPPP

SEQ ID NO: 168512 - protein, 80 aa, Glycine max
  Clone ID: PAT_MRT3847_123181C.1.pep
SSKSKGWLPKGARLLMVKLLKFSPPIIFFGPPIPGVKGFFHPVFKPKINLLAPARLSAPKKCSPPPDSNFSTNYFPQMLL

SEQ ID NO: 168513 - protein, 105 aa, Glycine max
  Clone ID: PAT_MRT3847_123182C.1.pep
AVYNVICYDDNPRLRTGMELLRTTKEIESQVHKVSAPLLILHGAEDKVTDPLVSKFLYERASSKDKTLKLYEGGYHCILEGEPDDRIFAVHDDIVSWLDFRCSIK

SEQ ID NO: 168514 - protein, 101 aa, Glycine max
  Clone ID: PAT_MRT3847_123183C.1.pep
QWEHASLTNRGLHHKQTDAIAQQRSDTCCQETPLWLFRANFTHSVASSFASDPDPILYLSILNTIFGASKTAHNMDYIRSCTNSSDVITDDFVVSRRIQSS

SEQ ID NO: 168515 - protein, 298 aa, Glycine max
  unsure (1)..(298): unsure at all Xaa locations
  Clone ID: PAT_MRT3847_123184C.1.pep
HTTEPAVFECSTANAVHATAAFTSDYLRKISLKMLTMETKSQNTLANNMPPNQVGXAINLLIKSQVHNLGQQHSIPLPGQLQPHQQLLSQNVQNNVASQPNLPPVSSLAQTPSQNIVQNSNIQNITGPNSVGTTISQNSNLQNMFPGSQRQMPGRQQIVPPQNSQQYLYQQQFKQKLQLQSQMQQQQQNLLQPNQLQSSQQSIMQTSSVMQPSMMQTSSLSSIPQNQQSTNVQQPMQSMPQQHSQVIRHQQQTAVTHQPSLPSQQQQQLMGHQPNTTNMQHAQMLGQQNNVGDIQQRK

SEQ ID NO: 168516 - protein, 39 aa, Glycine max
  Clone ID: PAT_MRT3847_123185C.1.pep
LVILEYAAPLSTLSNHKYSSKKQGSILFSFEPIGKGCHL

SEQ ID NO: 168517 - protein, 64 aa, Glycine max
  Clone ID: PAT_MRT3847_123186C.1.pep
CTQISLIRRRQSNSFLLYDNAKASRPMDRMATLILKNFHGKLPAPFECIVSHGIFSHNPDQTLS

SEQ ID NO: 168518 - protein, 44 aa, Glycine max
  Clone ID: PAT_MRT3847_123187C.1.pep
SSGKFQIITFEEFITIALDAPRVVGIYPEIKNPVFINQHVSISF

SEQ ID NO: 168519 - protein, 55 aa, Glycine max
  Clone ID: PAT_MRT3847_123188C.1.pep
NSARGSDRIYVFRIYNGHFPNSDKELSLKVEINMNNFKCYCKLVSISFSRRTWML

SEQ ID NO: 168520 - protein, 383 aa, Glycine max
  unsure (1)..(383): unsure at all Xaa locations
  Clone ID: PAT_MRT3847_123189C.1.pep
ENTITLHTYSSFGQVSFFCNKPQTSMVEAHEFCKVLRLDKKSFTEILKIYFLDGRIVLNNLLEVKDLSLQRKLLESDFNLTIGNMETELAIRMNFAAHDGHLDLVKRLIGFGADPNKTDYDGRTPLHISASKGYVDISSYLVEQGVNINCADKFGTTPLLECIKNGHXEVASILVNAGAIFTIDDVGNFLCMTVARLLSGLFRRVLGRGVHPFPKNYDQRTPLHIAASEGLFTMAEVLLEAGASVLSKDRWGNTPLHEAHTGGDRNMIKMLEVAKASQLVELSNNIHETQGIYLMFATPTDEGSRKRCIVFPFHPWDDQKADRKEGVVLTVPQSIEELIKEATKHLEIPNASCILSEQCGKIVYVGTINNDEKLFLVSEAQNE

SEQ ID NO: 168521 - protein, 57 aa, Glycine max
  Clone ID: PAT_MRT3847_12318C.1.pep
AIPQTGTVLIYPTQILTSEQGPDSEDIRDGNKTSRLKIQTFKTFKPQTVPKTMNCNH

SEQ ID NO: 168522 - protein, 83 aa, Glycine max
  unsure (1)..(83): unsure at all Xaa locations
  Clone ID: PAT_MRT3847_123190C.1.pep
VQPDTIVHIRRVIAVLRCLSRAPRLTSLDCGSSIRCCMRYEAKVAELLPKNSACKNVXTLMEECIMFAIAHAYQXDSLLTXHD

SEQ ID NO: 168523 - protein, 95 aa, Glycine max
  Clone ID: PAT_MRT3847_123191C.1.pep
TRLSTSSSRAITQGHTIPTMLGHGVTAALSTRIGTGEVTNQAETSVKTRDQITFRNYGVVRTSKTTPVSSTRNFAHTYSKYQYLPPHSYAERKKS

SEQ ID NO: 168524 - protein, 70 aa, Glycine max
  Clone ID: PAT_MRT3847_123192C.1.pep
PFVVTIANVATSHGHRCRPPSSLSSSTCPLCHFPIAGAIGSYKEHRLHGVFTDDHSKKLDKDIAGTWLHY

SEQ ID NO: 168525 - protein, 82 aa, Glycine max
  unsure (1)..(82): unsure at all Xaa locations
  Clone ID: PAT_MRT3847_123193C.1.pep
LFLKRPEPKPFLGILKERIGCFTRVGFRPIFLFLKHFFFNFCFKKSYRGSLAPGNFSPTPFWFLGKAKVGQLVPSPPXSSFY

SEQ ID NO: 168526 - protein, 86 aa, Glycine max
  Clone ID: PAT_MRT3847_123194C.1.pep
VCHFQETQANEFFMEARKVPIRISHPVLIRSLKSCFYKIFFSKNNRVFMKNMGQNQNMTCLPLQKCNEGEGKETCNLVTRGVNASD

SEQ ID NO: 168527 - protein, 134 aa, Glycine max
  Clone ID: PAT_MRT3847_123195C.1.pep
MKLMLWINVLEHQMMIQIVYRKRQMVLWWLLMDKKRVKSRVQKVSKNKNLSNRQSLAAAGTSWTFGLRRSTRIRTRPLEYWKGERPVYGRVHQSLATVIGVKCISPGSDGKPIMKVKSYVSNKYKELFELASLY

SEQ ID NO: 168528 - protein, 96 aa, Glycine max
  Clone ID: PAT_MRT3847_123196C.1.pep
ITLLRHQWTLKVRYLLIKWIGSNSESRRLYWGWGESQEVCNNWDPFNNHILSVTTHTLPGCLMKLISIRGNWILEPNGERNLAMLPSHRFLKGLPK

SEQ ID NO: 168529 - protein, 131 aa, Glycine max
  unsure (1)..(131): unsure at all Xaa locations
  Clone ID: PAT_MRT3847_123197C.1.pep
GKKPPGRRASQPRRADPKKGGAIETKVSARHTTNQKRAEQRKNQQTKRGPPKEPPESPKKEPNTPKKRNPDPNXPKKQRKKPHPSGNKEGPTGGAKKPPKKGKKNPGATKTRRKKRGGPPGDRKKKPGPGP

SEQ ID NO: 168530 - protein, 559 aa, Glycine max
  unsure (1)..(559): unsure at all Xaa locations
  Clone ID: PAT_MRT3847_123198C.1.pep
MEEEQNGGRFDLIILGASGFTGKYVLREALKFLNTPSSPLKSIAIAGRSPQKLTQALQWASRPNPPPSLPILTADTADPSSLRSLCARTGLLLNCVGPFRGSVEVEENGRAAKXKFRCGNPRSLRSHQQSCPQTSPSIPHHPFHSPLWASPNGPCPHHPYRNPRMPLPAQCSPLSPHPPIDHHEKSTPTGPLRSFRAKRQPREPFPRSMAKSVVAACDARGCDYLDITGEPEFMERVEGEHHAEAAEIGAFVVSACGVDXSVPAEMGVILQSRQWLGPSGPNRVGAYLRLDSENRIVGNFGTFESAVIGVANAHQLQELRRSRPRKPRPQIPGPPTSKGETIENNKKIGLWAVKLPSADSIVVRRTLGILTENLHGLPGLNESAETVEKREAFWSSVKPAHFGVKIGSKSFLGILRIIMVGVFIGLFGSIGFGRQLLLKFPEIFSLGWFRKNGPSEEEVESASFKMWFVGHGYSDGSIASQGNTKPDMEIVTRVMGPEVGYLTTPIILIQCALVLLCQRDNLPKGGVYPPGIIFGPTDLQERLQQNGISFDVISKSTIS

SEQ ID NO: 168531 - protein, 36 aa, Glycine max
  Clone ID: PAT_MRT3847_123199C.1.pep
ITSPSQPPFSRQKFNPLLFFRFKFGLPSELQLVQVI

SEQ ID NO: 168532 - protein, 95 aa, Glycine max
  Clone ID: PAT_MRT3847_12319C.1.pep
IVSLSVLFSLALASDIHAKHHYFSLAVCPLTPIPSSLRDLLTPAPVRVAFCALPMPLYESLYPLSFFYNDDLRPSITLLVHFPSPPCQHPCGAGS

SEQ ID NO: 168533 - protein, 41 aa, Glycine max
  Clone ID: PAT_MRT3847_1231C.1.pep
ARGPHHNFLIPLLLHVNYIACLWCSSITVSTLLTKILTLHP

SEQ ID NO: 168534 - protein, 195 aa, Glycine max
  unsure (1)..(195): unsure at all Xaa locations
  Clone ID: PAT_MRT3847_123200C.1.pep
QIALAISSPTSMWVSWVTGDAQIGLNVTPVDPASVGSEVWYGKKSGXYTSVGKGDSVVYSQLYPFEGLWNYTSGIIHHVKLKGLEPGTRYYYKCGDSSIPAMSQEHYFETFPKPSPNNYPARIAVIGDLGLTSNSTSTIDHLNYNDPSMILMVGDLTYANQYLTTGGKGASCYSCAFPDAPIRETYQPRWDGWGR

SEQ ID NO: 168535 - protein, 38 aa, Glycine max
  Clone ID: PAT_MRT3847_123201C.1.pep
LLAMSNRVGLLPIPLGTAHFLVHHIHAFTIHVTGLILL

SEQ ID NO: 168536 - protein, 184 aa, Glycine max
  Clone ID: PAT_MRT3847_123202C.1.pep
MQCYGLTVPGSVPTVSPVFLRPNRPIIATRIAFPKATLNKNQGFVVELSFYELLGIPESVSVTEIKNAYKQLARKYHPDVSPPGRVEEYTKRFIQVQEAYETLSDPSRRAMYDKDMARGINLAFNARRRYNYHDQVVEQKSEWKVRWKSQLSELKRRSNSKDVGGNMSWAARMRQQRDDLQMNH

SEQ ID NO: 168537 - protein, 84 aa, Glycine max
  Clone ID: PAT_MRT3847_123203C.1.pep
FLGLFFAPLFLFPKGLAPSYNPIKNPPFYNPPLSNPPLSNPPVFNPKPPVYNPKPPFYNPPFKNPPSKKPPFGKCPPVKNNPHP

SEQ ID NO: 168538 - protein, 74 aa, Glycine max
  Clone ID: PAT_MRT3847_123204C.1.pep
VSVKLRFIIVHMEILRSLNKLVSGTSVVTQSSTVHPVLVASSVSGMDFFGVLDTCRCSQGLLNQIADICSQYIT

SEQ ID NO: 168539 - protein, 58 aa, Glycine max
  Clone ID: PAT_MRT3847_123205C.1.pep
DSSNFSFDCSARIFKRHREEEEIVVPFSCQRVRLISLFENIILQIPTINEFEIVVLLG

SEQ ID NO: 168540 - protein, 551 aa, Glycine max
  Clone ID: PAT_MRT3847_123206C.1.pep
TSLNFPCYYHSPPFRSTPPSDPPTTALNHLLSAARRSDRRASALPSLRSLSASTAVAPASSSPPAPPPPTAMIYDRAAEAVKSKLRLLDNPDPRFLKHGSPRPTLSDHTRILSAPETRVTTLPNGLRIATESTLSARTATVGVWIDAGSRFETEETNGTAHFLEHMIFKGTERRNARELEEEIENMGGHLNAYTSREQTTYYAKVTDKDVPQALDILADILQNSRFEENRISREREVILREMEEVEGQTEEVIFDHLHATAFQYTPLGRTILGPAQNIMTITKAHLQSYIQTHYAAPRMVIAASGAVKHEDIVEQVKKLFTKLSTDPTTTSQLVAKEPAIFTGSEVRMLDDDIPLAQYAVAFEGASWKDPDSIPLMVMQAILGSWNKTAGGGKHMGSELAQRVGINEVAESMMAFNTNYKDTGLFGVYAVANNDCLDDLSYAIMYETTKLAYRVSEDDVTRACNQLKSSLLLHIDGTSPVAEDIGRQLLTYGRRIPFAELFARIDAVDASTIKRVANRFIYDKDIAIAAMGPIQRLPDYNWFRRRTYWNRY

SEQ ID NO: 168541 - protein, 221 aa, Glycine max
  Clone ID: PAT_MRT3847_123207C.1.pep
EPCCRKQKDLQLLPARYPSNHRYYNCGDGYDDSGGCTMAYEDSDIDDYEYDWEDDNEFDDDEYDWDDDGSDGSLENDEAEVCNGNSKQKELSEPCYPSLAQDKIKNQMLDDAKLKSNLRGRDRSKDMHSVLIPVENLTQWKAIKTKVVSSSKHTRKENVPSKQHTNMPSVSEASLNFSPCSLESNALQSMPLLPEIAVDASLSNWLVSPNYRVSSTTIHCQ

SEQ ID NO: 168542 - protein, 62 aa, Glycine max
  Clone ID: PAT_MRT3847_123208C.1.pep
GCVMVSLNRVVIVVGRGCQCNRARVRYNDWHCAVRIRVRSRVSPTVLTSQSAGYTCSKCLEP

SEQ ID NO: 168543 - protein, 67 aa, Glycine max
  unsure (1)..(67): unsure at all Xaa locations
  Clone ID: PAT_MRT3847_123209C.1.pep
PVTVPYGKTFRRLTVNLPSVNYVQCLKFKSSRRQINSVNACXCVRRHHSKSCVKCQLKRQTKVTPNG

SEQ ID NO: 168544 - protein, 73 aa, Glycine max
  Clone ID: PAT_MRT3847_12320C.1.pep
SYPICRSQNFIVSRTFLWKIIGNPMWLYILCLSHRISTELDFVFYRHQLILQQYQHKISAELKFGHLYFKKII

SEQ ID NO: 168545 - protein, 32 aa, Glycine max
  Clone ID: PAT_MRT3847_123210C.1.pep
FGVFFFFFFFEHRENSYFPQILEFNENSALIN

SEQ ID NO: 168546 - protein, 90 aa, Glycine max
  Clone ID: PAT_MRT3847_123211C.1.pep
MSSATSKAWIVAASVGAVEALKDQLGVCRWNYVLRCAQQHMKNHFRSLSQAKNVSSSSALVASKLKGDEKAKKAEESLRTVMYLSCWGPN

SEQ ID NO: 168547 - protein, 96 aa, Glycine max
  unsure (1)..(96): unsure at all Xaa locations
  Clone ID: PAT_MRT3847_123212C.1.pep
YSTLSIVITFTVFLLLHCLLKTYKQKSSHKFPPIPWKLPITGNLHHLSLSYSLXPDQTLQKLVLKYLPLIHIQLCEILTLFVSXSPKNIIPHMKTH

SEQ ID NO: 168548 - protein, 328 aa, Glycine max
  unsure (1)..(328): unsure at all Xaa locations
  Clone ID: PAT_MRT3847_123213C.1.pep
MEANGIGELKIPLLQTPEDGAVRTVYFQLSDIKCASCVNSVESVVKNLDGVKSIAVSPLDGRAAIKFDPKFVTVKQIKESIEESGFRVNELHEQDIAVCRVRIKGMACTSCSESVENALQIVEGVKKAIVGLALEEAKVHFDPNLTNVDKIIEAIDDAGFXADLISSGNDAXKVHLKLEGVDSAEDVNAVMSSLELAVGVNHVEMDLSEHKVTVSYDPDITGPRSLIYCVQEEASCGSKKYQATLYSPSGQRERDKVNEIRMYRDQFLFSCLFSVPVFVFAMVLPMLPPYGNWLNYKVHNMLTLGLFLRCILSTPVQFIVGKRYINYE

SEQ ID NO: 168549 - protein, 60 aa, Glycine max
  Clone ID: PAT_MRT3847_123214C.1.pep
YGSMTQEKRNELPNKVHSNWKPIGNLNKFKITIHSISEIFNRMEFYIPLNLLHTCLTSDN

SEQ ID NO: 168550 - protein, 83 aa, Glycine max
  Clone ID: PAT_MRT3847_123215C.1.pep
CFLKLLSFFFEILQYLSFVLSFIGFDLFLSLKAMVLLLCQEPTLLKGLCCWVMTDAGNQLFQKLKPLGKGSEPILYSTYRKEV

SEQ ID NO: 168551 - protein, 49 aa, Glycine max
  Clone ID: PAT_MRT3847_123216C.1.pep
VALNTLAAPASAVDPAARPYFKAPPAVIPIYDWSGFYVGSAGTWSTPAA

SEQ ID NO: 168552 - protein, 117 aa, Glycine max
  unsure (1)..(117): unsure at all Xaa locations
  Clone ID: PAT_MRT3847_123217C.1.pep
ARASISRSSIWVIRIIYTNGGDANEALAXNAVHKLWEWQRNQRTAAANAIRCIHADLLHVLLGILLTNDRDDAHPEDALSCVAPGIHGXYVLTASWTKMLVFHKLTIETMSTLMPAY

SEQ ID NO: 168553 - protein, 57 aa, Glycine max
  Clone ID: PAT_MRT3847_123218C.1.pep
SRIFEAYHLIPSKNSLGGNLNLSVTTRGINFTVYSFLKKRCYYHFLSNICTLQHKST

SEQ ID NO: 168554 - protein, 54 aa, Glycine max
  Clone ID: PAT_MRT3847_123219C.1.pep
LTQQAEIPQLGLLQCAIIPEFNPSRMLMKRHRSQQTLWLAMCKTPNSPLRSNLP

SEQ ID NO: 168555 - protein, 87 aa, Glycine max
  Clone ID: PAT_MRT3847_12321C.1.pep
MAKHLKFIARTVMVQEGNVEGAYRTLNRILTTDGLIDVIKRRRYYEKPCRRRQRESYETCRRIYNMEMARKINFLMRKNRADPWLGC

SEQ ID NO: 168556 - protein, 102 aa, Glycine max
  unsure (1)..(102): unsure at all Xaa locations
  Clone ID: PAT_MRT3847_123220C.1.pep
VIGALAAGKAVALKPSEIAPATSSLFTKLLPEYVDTSCIKGVGGSVPETTALSEQRWDTIFYTGNGTVXPIAMAAGAXHLTPVALELGGKFPSIVDSNVELH

SEQ ID NO: 168557 - protein, 29 aa, Glycine max
  Clone ID: PAT_MRT3847_123221C.1.pep
NAYSRIWGKIVNPILGLKLKVSSHYNALI

SEQ ID NO: 168558 - protein, 97 aa, Glycine max
  Clone ID: PAT_MRT3847_123222C.1.pep
YWYCDVHPNALVGMSVPRIRDRPWQWMLCSLSHISICVLELTMGYPRATTCMHRMRSHILAVIVKWPYNIVYSHCHTHCCDILTLVLSSSYSFTVVI

SEQ ID NO: 168559 - protein, 95 aa, Glycine max
  Clone ID: PAT_MRT3847_123223C.1.pep
FAQLVEGGSVPSLFNWGPPGFSRAPRCGTPPGVPSFGAVKKRSIHCLSGAFRSHFGLAITRPAPGFQLGGGSRGEHLLAKDWNPVSSPGPPFPGN

SEQ ID NO: 168560 - protein, 82 aa, Glycine max
  unsure (1)..(82): unsure at all Xaa locations
  Clone ID: PAT_MRT3847_123224C.1.pep
SXQRKEKSAIRSSLGKVKTRSTNERXXXXXGGRRRGARSPPCPPGCPPRRNCLFPGGGRAAAWKTPISCKLKLGERGTTIPT

SEQ ID NO: 168561 - protein, 70 aa, Glycine max
  unsure (1)..(70): unsure at all Xaa locations
  Clone ID: PAT_MRT3847_123225C.1.pep
PCVNKNWVSNSEINLSPNEFKEPHNLLPXXXXXXXXXXXXXXXXXXXXXXXXXXXXXXXXXXXXXXXXXX

SEQ ID NO: 168562 - protein, 288 aa, Glycine max
  Clone ID: PAT_MRT3847_123226C.1.pep
FVKPSFRKILVHSGADVKLNVSHDGVLLPMSQSLVKYKKGTNAQTATALDRANAEDALLPIPKVFDSHEKEKAFQNSLDKDVIDDFHRSSKDDSVEIEDDMAQSEIDVICMEDRMRSLGMISSESDYASNIELCCKLLKGIDLEATIPVKKIRAAVLSMKSTKAWKLLEVLLAAWKSRSSSGKYILPWIYSILVNHDLNHIPRQYVTCTLNSLDKITNFRGATHQPLLQLSGRLQLLTSQIEKASQTISHPVHELQMQESEDEDEDEVEDEYYHEEDDGSEMSTDDES

SEQ ID NO: 168563 - protein, 269 aa, Glycine max
  unsure (1)..(269): unsure at all Xaa locations
  Clone ID: PAT_MRT3847_123227C.1.pep
TLHRALIRSAKLSRSQDFHKLRRIKLQKTPPTWVKEKKSHINVVVIGHVDSGKSTTTGHLIYKCGGIDKRTIEKFEKEAAELGKGSFKYAWVLDKLKAERERGITIDIALWKFETPKYNVTVIDAPGHRDFIKNMITGTSQADCAILIIAAGTGEFEAGISKDGQTREHALLAYTLGVKQLIVAINKMDTTKWSEARFQEIIKETSSFIKKVGFNPKHVPFVPISGFNGDNMLDVSXNCPWYXGWEKENKARAPGKTLLEAIDSIEPPN

SEQ ID NO: 168564 - protein, 140 aa, Glycine max
  Clone ID: PAT_MRT3847_123228C.1.pep
MGKEKMHINVVVIGHVDSGKSTTTGHLIYKCGGIDKRTIEKFEKEAAELGKGSFKYAWVLDKLKAERERGITIDIALWKFETPKYYVTVIDAPGHRDFIKNMITGTSQADCAILIIAAGTGEFEAGISKDGQTREHALLA

SEQ ID NO: 168565 - protein, 122 aa, Glycine max
  Clone ID: PAT_MRT3847_123229C.1.pep
MGAFTDKQEALVCTSFEAFKTNIPQYSVVFYTSILEKAPVAKDLFSFLANGVDPTNPKLTGHAEKLFGLVRDSAGQLTASANSARFPPDLTRSHVFFSLPASPIPASPPPPPHPLLPNPPPS

SEQ ID NO: 168566 - protein, 75 aa, Glycine max
  unsure (1)..(75): unsure at all Xaa locations
  Clone ID: PAT_MRT3847_12322C.1.pep
GDPACQNTHQRINIYKTTCHHTEDLITEHHNHLYSHHKNTHHHWLHNMXLDYTIKNMNHLMVMTSTRKSLTKTET

SEQ ID NO: 168567 - protein, 61 aa, Glycine max
  Clone ID: PAT_MRT3847_123230C.1.pep
LFFWGSQGGIEDGEEPKSAAVRELREETGIVSAEIIAEVCTKSFLIRLSFFCKNSKFVVDI

SEQ ID NO: 168568 - protein, 208 aa, Glycine max
  Clone ID: PAT_MRT3847_123231C.1.pep
MVATAATFFNPLFLHTHGRVNIWALSRISYLSGNVKSRFPIYRSEIHHQVHYFSHLAPICATFKEPKGFGPTPKKKKKSKKMRRDYEEEDDEEEEEEEEPDRGVIPEVVTNRMMSRMAVSVGIPLGIGLLFFPFFYYLKVGLKIDVPTWVPFIVSFFFFGSALLGVSYGIVSSSWDPLREGSFWGWTEAQKNWPVFWQSLRGGESRKN

SEQ ID NO: 168569 - protein, 351 aa, Glycine max
  unsure (1)..(351): unsure at all Xaa locations
  Clone ID: PAT_MRT3847_123232C.1.pep
MATDSSNGNGHHQTTTKQPPLPSPLRFSKFFQSNMRILVTGGAGFIGSHLVDRLMENEKNEVIVADNYFTGSKDNLXKKWIGHPRFELIRHDVTEPLIIRXDLIYHLACSVSPVIYIYKPIKTTKTNVICTLNMLGLANRVXQGRLLTXDVIIGSELSDRLIKMENIEAMVTQLEVRGCXDKGKTVAEXYIFDFNWQHVIEIRISGIFYSXGPRMNFDXGRFGNNLIMPIIQXETLNLQMPRNTKLEGSENVSDLFYDLFRIMRGYNNVPIKLGNQTEIAMSELVETVKELIKPGVVIKMVEHTPDDPRERKPFIKIAKELLGWEPKVKLSDGPSXMEEDFRLRIELGKKN

SEQ ID NO: 168570 - protein, 88 aa, Glycine max
  unsure (1)..(88): unsure at all Xaa locations
  Clone ID: PAT_MRT3847_123233C.1.pep
THDSSFSVPITQEGTLPRDSQFSMNVASLCLAKDIVRVVACEGEXIIGRYVAPVKWRARLLMAGFCPFPMSSNVREAIRNISVKQSWP

SEQ ID NO: 168571 - protein, 94 aa, Glycine max
  Clone ID: PAT_MRT3847_123234C.1.pep
WQVELVRFLCLWKGNPIRIEPTRKRLGCSGRVTRPYNKILKKCKLCGSLAKKTCQCEPSMDIHQGPLQGLSSETTSVTTPQHSFTPFLMKILHK

SEQ ID NO: 168572 - protein, 68 aa, Glycine max
  Clone ID: PAT_MRT3847_123235C.1.pep
GLVPKASLNIRKEIYIYIYIYIYIYIHIYISFALMGKTIVLLTSLHNHVKILVNITSVNFMFNFMLKN

SEQ ID NO: 168573 - protein, 130 aa, Glycine max
  unsure (1)..(130): unsure at all Xaa locations
  Clone ID: PAT_MRT3847_123236C.1.pep
PFSLSHRAIPPFLKGLQYAGSPPLLSFSEPFLLGGRALPPFWYSSFLFFSSPPFFFFFPPPPPFFFSPPXQKPPPPPLFFPPSPPPPPSPPPPPPPPPPPPPPPPPPPPPPPPPLPLSSFLFPSYYKFSN

SEQ ID NO: 168574 - protein, 86 aa, Glycine max
  Clone ID: PAT_MRT3847_123237C.1.pep
ESLCHTNLFDEEFLRDILQRPQEGAPNLNNSSIMSSLCAQDIKPTTLFPTTYILSFDNSAALLPTETDRDFSSSKLPSSNSRANHG

SEQ ID NO: 168575 - protein, 120 aa, Glycine max
  unsure (1)..(120): unsure at all Xaa locations
  Clone ID: PAT_MRT3847_123238C.1.pep
HEFVVSYKLLYRVENMSLSVFSAAAVLLVPWPCHGARYXMFPLRMKTGYGDRSSDVQCASFMLAVEAHNIRAFITIPEXCVEPTTDYINGEHFRSYSITVNHQAFFYATEREVHHNDIFI

SEQ ID NO: 168576 - protein, 56 aa, Glycine max
  Clone ID: PAT_MRT3847_123239C.1.pep
SFQIKKLTDKKTIDSSTLCYYYNIRHTDKTIQILEGLNNLKTSILTKTTASKPPIA

SEQ ID NO: 168577 - protein, 78 aa, Glycine max
  Clone ID: PAT_MRT3847_12323C.1.pep
ERTGFKGLKLVFPRDPMDFWLGNPFLKTKGGKPTPSLLHLLKGVVTLHAPRKKAGKISGATREQWHWGAEEFQPPSMP

SEQ ID NO: 168578 - protein, 158 aa, Glycine max
  Clone ID: PAT_MRT3847_123240C.1.pep
VDEPAIREGLPLRKADWDNYLEWAVASFRLSTAVAESKTQIHSHFCYSDFNDIFAHIKALDTDVISIEASKADMKLIQTFKNEGYNSGIGPGLYDIHSPRVPSEEEMKEKVKTMLEILDANNFFINPDCGLKTRGWTETEQSLNNLVGTAKWARATYA

SEQ ID NO: 168579 - protein, 69 aa, Glycine max
  Clone ID: PAT_MRT3847_123241C.1.pep
RTEVTPSTFIKTQGVHFLFFKNILIKNFLFLNHTLHFWNNNSVIIILPFSKIFNFASTQSYFCLGHFTL

SEQ ID NO: 168580 - protein, 163 aa, Glycine max
  Clone ID: PAT_MRT3847_123242C.1.pep
ALARRIAKVGTACRPLVDHPSGDPYTMAFSKLSMLAEQRVDAYANADVRVSLEQIASKQGHDHVWKLTPTDIGIESFHKIENFVIEHPVVHPVGDSQADSRAQRIQTVYNFDLFCTLEKPCSAVELFVRCAGKMMKRTGSVFSLYSVKKRNNGANQKISVWLQ

SEQ ID NO: 168581 - protein, 108 aa, Glycine max
  unsure (1)..(108): unsure at all Xaa locations
  Clone ID: PAT_MRT3847_123243C.1.pep
RLPRSSPHQHTSCPLPHPLPPHHHPSQKTSTSKASXIPRGAVNASLSFYKSPEDGAPPHNYVEPLPGVPQRNWGDNWQNVTHNDLRGSEQQFTLDHNAFDTYSNIPSN

SEQ ID NO: 168582 - protein, 75 aa, Glycine max
  unsure (1)..(75): unsure at all Xaa locations
  Clone ID: PAT_MRT3847_123244C.1.pep
ISYFHLXILGLIMKLXTCNLLFSRGMGGSSFYSFLKYLNSTHWPHWDFTGKQNGRKNRKLTPKVIELPFYDFTVS

SEQ ID NO: 168583 - protein, 75 aa, Glycine max
  Clone ID: PAT_MRT3847_123245C.1.pep
SQILLPPFFNLHININIIPSKFFFNLLTKPPGLFFTFIMRPSISTLLFFYTLLLFFHLTPACNLMIIYFPFLPDF

SEQ ID NO: 168584 - protein, 64 aa, Glycine max
  Clone ID: PAT_MRT3847_123246C.1.pep
YSCICSFNKFVTNSISRMILLIISGRSRLPVIGFVFQLYAEEYVLFSCVCCAKFLCSLSQLQCH

SEQ ID NO: 168585 - protein, 104 aa, Glycine max
  unsure (1)..(104): unsure at all Xaa locations
  Clone ID: PAT_MRT3847_123248C.1.pep
WNALISNPDTVVIDVRNNYETRIGKFKGAVDPCTTSFREFPSWVDEHFQLTETDDWAHPKVEVNSVQPAEKEMDNKRQHMPRVAMYCTXGIRCEKATSLLLNKG

SEQ ID NO: 168586 - protein, 258 aa, Glycine max
  Clone ID: PAT_MRT3847_123249C.1.pep
MSYSGSSMSSGSGSSRRTFEFGRTHVVRPKGKHQATIVWLHGLGDNGSSWSQLLETLPLPNIKWICPTAPTRPVALFGGFPCTAWFDAGEISEEAPSDLEGLDASAAHVANLLSTEPPNIKLGIGGFSMGAATALYSATCHVLGHYGNGNIYPINLSAIVSLSGWLPCSRTLKNQIERSRDGIRRAASLPLFLCHGRGDDVVAYEHGERSAVTLSSSGFQNLIFRSYNGLGHYTVPEETDEVCRWLTANLGLEGFRLN

SEQ ID NO: 168587 - protein, 621 aa, Glycine max
  Clone ID: PAT_MRT3847_12324C.1.pep
MKKRSHAGTHRPRNARPRHLRHHRSPNDAVPVALAEAQDHDDDLTVPTTRPVFKVLPGQIAFRLVCHASIVGGLIGSSGSIVSQLRRETACKIHCEDSLSSAEDRVILVIGSVSPRKGLQLGDGGEVEVSCAQEAIVRVFERVWDLEAEKGVNSNRAVNGEVFSKLLAHTSQIGAVVGKGGKNITAIRNNTGAKIRVFPPPQCATKDEELVQITGGILAVKKALISVSHCLQDCPPLCKVPVTSSTPTVSSSDRLSSDPNAELFPRLNSLLTSMEGLSIYERTTNSNESSNRDSKGGEHEVVFRLLCSNNVAGSVIGKRGAIVRALESKTGASIIFAAPLSEHAERIVTISAIESLESCNSPAQDAVILVFARIIEDHIGKGFLQVSSMESPVTARLLVATSTVNSWSGNEGQVILELREVTGADIQILHGESVLKGASDEDVVVQITGEYRCVQNALYKITSRIRDNLSPNEVVAEARPKSNWKVNKDPVKGKPFARGKSAFPSGRFLPRNAGVHAETILQNGELHTDLSENLERGRGNMFATVTNTTVEIIVSEHVFGSVYGEDGGNLDRIRQISGAIVTVYDPSVGTSGGKVVISGTPDQTFAAQSLLQAFIQTGQAS

SEQ ID NO: 168588 - protein, 66 aa, Glycine max
  Clone ID: PAT_MRT3847_123250C.1.pep
APVGFTPPELDPPGPSPIFGGSTGGLLRKAQVEELDVLTWHSPKELIFDVPTGGAGVVTVGPRLFR

SEQ ID NO: 168589 - protein, 83 aa, Glycine max
  Clone ID: PAT_MRT3847_123251C.1.pep
TINLDVGSYDTIDNVKAMIHDKEGIHPDQQRLIFTRKQLEDGRTLADYNIHKESTLHLVLRLRSGMQIFFKTLTGKTITLDVE

SEQ ID NO: 168590 - protein, 70 aa, Glycine max
  Clone ID: PAT_MRT3847_123252C.1.pep
MMGLIPIMMSAGALESGNTGEPAQLIKQRYREPADLIKKGHLCALFINDLDARAGHLDGTTQYTVNNQMV

SEQ ID NO: 168591 - protein, 415 aa, Glycine max
  Clone ID: PAT_MRT3847_123253C.1.pep
MDPCPFVRILVGNLAVKSPASSKPSSFSGKVHPSSSPFFCKILLQGLDSNSTSPRVSSVPLISDSDPHPHSFAASFDFSKAQILKASKKPLMKISVYKGPTTPSCVFTSAKLLGKVSIPLDLTLAESRPCTFHNGWLSLSKNTNPSQLLHLTVRAEPDPRFVFRFDGEPECSPQVFQIKGDVKQPVFTCKFSFRDKDKAHFPSLNANHAAERKGWSITVHDLSGSPVAAASMATPFVPSPGSQRVSRSNPGAWLIIRPDGDGTWKPWGRLEAWREPNNSNAVGYRFEVLPGTADPVTLAASTISSQHGGKFAIDATSGVTPVNTPRGSWDLGSGSGSGSNSDFGLEPNFFYNKGFVMSAMVSGEGKCSKPEVEVGVQHVTCTEDAAAFVALAAALDLSIDACKLFSQKLRKELRQ

SEQ ID NO: 168592 - protein, 62 aa, Glycine max
  Clone ID: PAT_MRT3847_123254C.1.pep
IKGGVVNLHFHHYKSNHNAINSFSIISGIYSIFMHMNEKKLTVYGYINPVNVVSKFIKTCHP

SEQ ID NO: 168593 - protein, 337 aa, Glycine max
  Clone ID: PAT_MRT3847_123255C.1.pep
MAGLLAWAVGGGGGKEAEDDGIIPILFSADQQKYVNELDQKASSLRRWIHDLRQRLPPQDISQSLPHLHAHSLASNAALALQLNSHSTTRQQAQLREVTLKEENAAFENAISDCENKIKEKLQEADLLREKLKEMDETEKKLKAEVENMKQPSWVSDGWEEEKKANSKAGLEAESALLDELEKKKKDMSSMENAVHELEKKWAQVQENALKQPSPGQREKTLDKHLHGLIEQLAVKQAQAEGLLGEIHLKEMELERLNGLWRRTESSNSEANTAARNRFSKGSSDKLHSLSDYEGHQRLPYHSAGRTESQQRLMLLRSAFVLYILALHILVFIRLSF

SEQ ID NO: 168594 - protein, 552 aa, Glycine max
  Clone ID: PAT_MRT3847_123256C.1.pep
PTRPPHASAHASAHASAAIGMSNCKWIGTGENILEDLDINSCHGLKSKLSEHWMDVYRTAGGKDISSPKQKIFFSLCSSYRDILYCNKRPFYLKGLEDTSIMDAYIMHSLNHVFRTRDCVKKNDSKLTKLKENADSDKFRDQGFTRPKVLILLPLASIVYRVVKRLIQLTPSAFKVNVEHMDRFSTKFGSEEHKGNTENDDESENAKPQKSSKATDFQILFGGNNEDDFMIGIKFTRKTIKLFSDFHTSDIIIASALCLVNKIEEAGSNKEKDVDFLSSIEVLIIDHADVISMQNWSHVHTVIEHLNRLPSKQLGTDVMRIRPWYLDDHARFYRQTIILGLYSNPDVNASFNHQCLNYEGKVKLISEYKGVLHKVVPEIRQIYERFNVDSIVEADDARFDYFVKKVFPRIKDLDQGGTMLFTNSYFEFIRIRNFLKSQNASFCLLGEYTTQSDISRARLWFYEGKRKIMVYTERSHFYHRYKIRGVQNLIIYSLPERKEFYPEIVNMLDGSDNMTCTVLFSYLDKLRLERIVGTTPAKRMVAAEKGVFVFCH

SEQ ID NO: 168595 - protein, 113 aa, Glycine max
  unsure (1)..(113): unsure at all Xaa locations
  Clone ID: PAT_MRT3847_123257C.1.pep
FDVFIKGMVPKKGDIVEVRKGHFVVNGVEKNEEYILEPPAYEMKPTRVPKNYVFVMGDNPNNSYDSHVXKNIIGRSVFRYWPPNKIAGPVFKESCSVETPQTQESAETSLPFQ

SEQ ID NO: 168596 - protein, 95 aa, Glycine max
  Clone ID: PAT_MRT3847_123258C.1.pep
MADFQTSTHRAKWIFSPQQLVEKYRAANQRAKQILEKCGATLMEVDVNGSLSYPEPHMTAKDSGNVISVNFTHFPPQYVDSIMSFNLLIVFKVFH

SEQ ID NO: 168597 - protein, 83 aa, Glycine max
  Clone ID: PAT_MRT3847_123259C.1.pep
FSFYFLFFLSRLFFVSKGANMGTLIKLLIPAIKISYQKSETGRMKNCPHNWNQSYILSVSHLPHQFWDLWAWHPLKYIIPLEN

SEQ ID NO: 168598 - protein, 158 aa, Glycine max
  Clone ID: PAT_MRT3847_12325C.1.pep
MQDPATSDTDHQTTPSPKRSNTTTTNRSSKRPVFKVLPGQIAFRLVCHASTVGGLIGSSGSIVSQLRRETGCKIHCEDSLSSAEDRVILVIGSLSPRKGLLLGDGGEVEVSSAQEAVVRVFERVWDLEAEKGVNSNRAVNGEVFSKLLAHTSQIGAVV

SEQ ID NO: 168599 - protein, 75 aa, Glycine max
  Clone ID: PAT_MRT3847_123260C.1.pep
DPTITFLGSRKARARGPSDASTSTPAPTLAPAPALVPSLAPSGPFTSSTNVIVPMLQSLHHGLCLVMQSIYDLAQ

SEQ ID NO: 168600 - protein, 119 aa, Glycine max
  Clone ID: PAT_MRT3847_123261C.1.pep
LNRWFDWRFPHACISSKLLTISSLHMSLYGQIANNADGFFISYMYPSVKVFSSQPENNFLAILLQDEAFLLTFIFFLFPLEMTVENSSSLGSFLVFIHIISPKVREQLEMLLNLNKPKI

SEQ ID NO: 168601 - protein, 122 aa, Glycine max
  Clone ID: PAT_MRT3847_123262C.1.pep
NESVKVVVADNLQDIVFNSGKNVLLEIYAPWCSPCKKLAPILEEVAVSYQSNPDVIIAKLDATANDIPRDTFDVQGYPTVYFRSASGQISQFDGSRKKEALIDFLEKNRDKVVQQESVKDEL

SEQ ID NO: 168602 - protein, 100 aa, Glycine max
  unsure (1)..(100): unsure at all Xaa locations
  Clone ID: PAT_MRT3847_123263C.1.pep
CPTADRQLITHYXDXXXXRLXXXXQSXSRXRXSXLHLXHSYLXCXMXTRLXXXFXPXXAIXVXQNXXIVXXSFPVFXXQXTSXXXXNPXTIRFXPXXAXX

SEQ ID NO: 168603 - protein, 48 aa, Glycine max
  Clone ID: PAT_MRT3847_123264C.1.pep
YKPFLVNEVSPSTITLGCTEIRPPPEVGGFDGGPLFIGKTTGISGGLL

SEQ ID NO: 168604 - protein, 196 aa, Glycine max
  Clone ID: PAT_MRT3847_123265C.1.pep
FLVESKQQKIKFDCCLLKRGGGRQDTPKSSLMEDLLGLLRIHIKRGVNLAVRDVNTSDPYVVVKMGKQKLKTRVIKKDVNPEWKEDLTLSVTDPIHPFILTVYDYDTFSKDDKMGDAECDISAYIEALKMNLEDLPSGTIITRIQPSRQNCLAEESCITYSNGKVIQDLVLRLRHVESGEVEIQLQWINLPGSKGL

SEQ ID NO: 168605 - protein, 63 aa, Glycine max
  Clone ID: PAT_MRT3847_123266C.1.pep
YNKFIDFYKKNIKYCFLLVHTDKSVWMGGENKMLKLNDTERWDGCRGIVENPNSCQCIMAIKL

SEQ ID NO: 168606 - protein, 84 aa, Glycine max
  Clone ID: PAT_MRT3847_123267C.1.pep
TAILLSSNIKDVYSIRKRTEKKDVATPNTLPYVAREADLYPCLQHELRIAPLQSLGSFFNNPEELVEEKWGNYKPEQLYYSGFS

SEQ ID NO: 168607 - protein, 103 aa, Glycine max
  Clone ID: PAT_MRT3847_123268C.1.pep
RSLITLTWEPVHMDRSHTFVHFQSRRHFWNAKFVRYRRKIDQKLEARAFLLHLTREGKLKTTEHLYEHSGCVVITYGLGAFFNSEASNDFRGVSRAWLHSIVQ

SEQ ID NO: 168608 - protein, 47 aa, Glycine max
  Clone ID: PAT_MRT3847_123269C.1.pep
RGIITSVYNDGWCTNLFKLSSSKEMSRYILTHQIILTKRTAFFPKNY

SEQ ID NO: 168609 - protein, 384 aa, Glycine max
  Clone ID: PAT_MRT3847_12326C.1.pep
MEGRRRGGYSGRRIVASRRGSGKSNANNNNNNNNKNNNNINVIKKLQSREIWSKPHRAFASVTASHRFRSMCLTHQYDTHDPSKTPSSLWPFLMKRTKVVEIVAAKNVVFALYHSGLCAAFSRVFFIRSLFYNKNNDSLITVSVYASENFCSLKCRSTKIEYIRRGKPDAGFPLFQSESLKWPGFVEFDDVNGKVLTYSAQDCIYKVFDLKNYTLLYSISDRNVQEIKISPGIMLLIYNRTSGHIPLKIISIEDGTILKVFNHLLHRNKKVDFIEQFNEKLLVKQENENLQILDVRSSELMEVSRLEFMTPSAFIFLYENQLFLSFRNRTVSVWNFRGELVTSFEDHQLWHPDCNTNNIYITSDQDLIISYCKADSDDQWIEAL

SEQ ID NO: 168610 - protein, 181 aa, Glycine max
  unsure (1)..(181): unsure at all Xaa locations
  Clone ID: PAT_MRT3847_123270C.1.pep
TLHSLLLLILSLSLFWCFVCSRRICFCTLGFPRALHAAPDAAANAFVHDVASLRDFLADTRRDDATVQVPVPKVLPPPPPPPPPSDAVSLGADALDESASMKAKRIALQRKGAAAMIAAEEYARRFESGDVVNTPGNVTGDDQGQANRXIGRICKCGENEGSEKASKMLSVQSCGKKYHRN

SEQ ID NO: 168611 - protein, 93 aa, Glycine max
  unsure (1)..(93): unsure at all Xaa locations
  Clone ID: PAT_MRT3847_123271C.1.pep
MLHDLAYRFRKSVFRLHRGGKRPRTLSLLSYEILNLEKLSSDEASAQIPAPISTGTKVAPSPALNYAALSSLNXDQDIDKINIYLSMEVIHDE

SEQ ID NO: 168612 - protein, 87 aa, Glycine max
  unsure (1)..(87): unsure at all Xaa locations
  Clone ID: PAT_MRT3847_123272C.1.pep
MDVDGGNKRVYNRLGGDAKHQKVCYHWQAXKCNRYPCPFLHSESPANSHHANGTSSKRTYDNSGFSGPRRSPNFNNTWGRGGGRGGG

SEQ ID NO: 168613 - protein, 296 aa, Glycine max
  Clone ID: PAT_MRT3847_123273C.1.pep
MGTKVRRPSHAGSWYTDNPKQLSEELEGWLQSCGLTKSSDVRGVIAPHAGYSYSGRAAAYAFGNIDPSNITRVFLLGPSHHYYTPKCALTTATVYKTPIGDLPIDLEVTEELKATGKFELMDIRVDEAEHSMEMHLPYLAKVFEGHQVKIVPILVGAVSAENEAMYGQILAKYVDDSNNFFSISSDFCHWGSRFNYMHYDKKHGPIYKSIEALDKMGMDIIETGDPDSFKQYLLEYDNTICGRHPISVFLHMLRNCSTKIKIKFLRYEQSSQCKSNRDSSVSYASAAAKTDDSSSS

SEQ ID NO: 168614 - protein, 58 aa, Glycine max
  Clone ID: PAT_MRT3847_123274C.1.pep
NLENLFAATSVLINFWEGLENHWRYLPLGCLLKGDRWCNRTLSLVNSQVVFKFIKQRL

SEQ ID NO: 168615 - protein, 102 aa, Glycine max
  Clone ID: PAT_MRT3847_123275C.1.pep
VKPRFFPTALLEKGYGEGLRPIFPPPPQNKEESCCPSRILLKNPKGGFSTKKNFFLIGGTLWYLYTPCGFPENFSQGGKKPLVFGKKKKKKKRAQKRNKLIS

SEQ ID NO: 168616 - protein, 71 aa, Glycine max
  unsure (1)..(71): unsure at all Xaa locations
  Clone ID: PAT_MRT3847_123276C.1.pep
KVFLEMLNNCLDQVRTHSVHRVVMRCYIHFEGSXNGTLSFNTLIGRAAHIEFLECDIFVKFIMWSFPELFS

SEQ ID NO: 168617 - protein, 67 aa, Glycine max
  Clone ID: PAT_MRT3847_123277C.1.pep
HPGSLLSSSLATISSCTTLFAISEMTLFSGTLCSCTTLTDGTRQSPYSALLETEKGSMRMGTRFPRF

SEQ ID NO: 168618 - protein, 161 aa, Glycine max
  unsure (1)..(161): unsure at all Xaa locations
  Clone ID: PAT_MRT3847_123278C.1.pep
DETHVSTRVMGTYGYAAPEYVMTGHLTARSDVYSFGVVLLELLTGRKXLQIIDPRLENQYSVRAAQKACSLAYYCLSQNPKARPLMSDVVETLEPLQSSSVGPGEVSLSGSNSGSAGPFAMNKISDCRMRHKFSNNVGPGATCRSPNPNCSPGGPATLRVR

SEQ ID NO: 168619 - protein, 238 aa, Glycine max
  Clone ID: PAT_MRT3847_123279C.1.pep
MGNCGSREESAVVSKAQVVQQLHHATSLGASARTDKKHAHRHNLSECASDLSESCSTPRGNNSSNTLLYTHVIAFTLYELETITKSFRADYILGEGGFGTVYKGYIDENVRVGLKSLPVAVKVLNKEGLQGHREWLTEVNFLGQLRHPNLVKLIGYCCEDDHRLLVYEFMFRGSLENHLFRKATVPLSWATRMMIALGAAKGLAFLHNAERPVIYRDFKTSNILLDSDYTAKLFDFGT

SEQ ID NO: 168620 - protein, 56 aa, Glycine max
  Clone ID: PAT_MRT3847_12327C.1.pep
LNSLLIVYIVYICPLIQFSDLVRHICRGFRTLLTVPACIQCSVLMCSSYILPPSDS

SEQ ID NO: 168621 - protein, 430 aa, Glycine max
  Clone ID: PAT_MRT3847_123280C.1.pep
LLSSLTRILSSLLASVVQQLHHATSLGASARTDKKHAHRHNLSECASDLSESCSTPRGNNSSNTLLYTHVIAFTLYELETITKSFRADYILGEGGFGTVYKGYIDENVRVGLKSLPVAVKVLNKEGLQGHREWLTEVNFLGQLRHPNLVKLIGYCCEDDHRLLVYEFMFRGSLENHLFRKATVPLSWATRMMIALGAAKGLAFLHNAERPVIYRDFKTSNILLDSDYTAKLSDFGLAKAGPQGDETHVSTRVMGTYGYAAPEYVMTGHLTARSDVYSFGVVLLELLTGRKSVDKTRPGKEQSLVDWARPKLNDKRKLLQIIDPRLENQYSVRAAQKACSLAYYCLSQNPKARPLMSDVVETLEPLQSSSVGPGEVSLSGSNSGSAGPFAMNKISDCRMRHKFSNNVGPGATCRSPNPNCSPGGPATLRVR

SEQ ID NO: 168622 - protein, 94 aa, Glycine max
  unsure (1)..(94): unsure at all Xaa locations
  Clone ID: PAT_MRT3847_123281C.1.pep
PQGQXTISDLDKYLEEPIFPRKSDYNKLNFWKGHMPRNPIVSMMGRDDLGTPMTTMAPELAFSTGGRVLESSRRGLNPDTRKAMRSTEEWLQNE

SEQ ID NO: 168623 - protein, 253 aa, Glycine max
  Clone ID: PAT_MRT3847_123282C.1.pep
MVSNSAFEDNGTDNNHNSNNKYTSIKAKFMDSELKSSPLKSWVNNNKNSEGEFSKSSNKRGKFECTTCKKIFHSYQALGGHRASHKRIKGCFASRNESSENSTELEAELSPDPTTESKLLKNEYVEEHEMVTNVTTATTTTQFDNEVETVRDSKKGKGHECPICHKVFPSGQALGGHKRSHHLAGGSESARNFQSQTIVLEEAAPEIRDFFDLNLPASTEEEGTGHGHAEHYRPWWVVGGNHKQEALVGLISN

SEQ ID NO: 168624 - protein, 66 aa, Glycine max
  Clone ID: PAT_MRT3847_123283C.1.pep
PFPSNLSYGVLCKTIERPLSTDMSSLYSSVISSVSGETASEFRVLLPLLFSVLSPIHIRKSIAARS

SEQ ID NO: 168625 - protein, 151 aa, Glycine max
  unsure (1)..(151): unsure at all Xaa locations
  Clone ID: PAT_MRT3847_123284C.1.pep
KVXXNDXXMKXXREXXYXKRXXXXIWSXXIRGECXRGXEWXYRNEMXVIGELXXXNIKDCFYGVNDXVXLKXFGKAGEMXXXEXXEDEXIKXXYVGGIDGKVXEXDLGDXFYXXGEIEXIKMGXXRDCGFVKYKXREGGEKGEEEFXKKWV

SEQ ID NO: 168626 - protein, 148 aa, Glycine max
  Clone ID: PAT_MRT3847_123285C.1.pep
GMEGHGAGSALNGAVMSFPRHSLFVKECLEEFYMTYDDTSLRGNGADLLTRVARKYLGDENKSVKHLELKVEPSYIFFPVSSQNITRYFIAPTTETEKAQQDVLLENILHNSLTFHFWNSVTFSLIPEPDSLVSKLLNYACIRCSELP

SEQ ID NO: 168627 - protein, 73 aa, Glycine max
  unsure (1)..(73): unsure at all Xaa locations
  Clone ID: PAT_MRT3847_123286C.1.pep
XQXXXXSDGLIXHQLXXPSYLVSHLKVXTREIKDXXNVTSSQEGLKRDXYEYXXXQXRPNHLPKHYSXMKATF

SEQ ID NO: 168628 - protein, 210 aa, Glycine max
  unsure (1)..(210): unsure at all Xaa locations
  Clone ID: PAT_MRT3847_123287C.1.pep
MANAASGMAVHDECKLKCTAERRQKGPIPKISHSPFPLRTLDHSHALLYPLLHRRSLQQPQHHLHPMANAASGMAVHDDXCKLRFLELKAKEDTPFXIVFKIEEQQKQVIVEKLGEPAQXYEDFTASLXADECRYAVYDFEYLTEGNVPKSRIFFXIAWSPDTSRVRSKMIYASSKDRFKXRELDGIQVXELQATDPTEMGLDVFKSRAN

SEQ ID NO: 168629 - protein, 145 aa, Glycine max
  Clone ID: PAT_MRT3847_123288C.1.pep
HASHLLTWQRGGGGGGHDDCKLRVLELKAKRAHRFIVFKIEEQQKQGIVEKLGEPAQGLEEGGGSLPADECRYAVYDFEYLTEGDVPKSRIFFIAWAPDTSRGRSKMIYASSKDRVKRELGGIQVEVRATDPTEMGLECGKSRAN

SEQ ID NO: 168630 - protein, 138 aa, Glycine max
  Clone ID: PAT_MRT3847_123289C.1.pep
ANAASGMAVHDDCKLRFLELKTKRTHRFIVFKIEEQQKQVIVEKLGEPAQGYEDFTASLPADECRYAVYDFEYLNEGKVPKSRIFFIAWSPDTSRVRSKMIYASSKDRFKRELDGIQVELQATDPTEMGLDVFKSRAN

SEQ ID NO: 168631 - protein, 50 aa, Glycine max
  Clone ID: PAT_MRT3847_12328C.1.pep
SETKQGIFVCESSTARANKGYALIMGKTKENTTTIEVGVCRPNHSQHIVH

SEQ ID NO: 168632 - protein, 141 aa, Glycine max
  Clone ID: PAT_MRT3847_123290C.1.pep
YGTEHHVNDPESDPVLLDAIPTLKFNQEAFSSLEHTQCVICLADYREREVLRIMPKCGHTFHLSCIDIWLRKQSTCPVCRLPLKNSSETKHVRPVTFTMSQSLDESHTSDRNDDIERYVEPTPTAASNSLQPTSGEQEARQ

SEQ ID NO: 168633 - protein, 81 aa, Glycine max
  Clone ID: PAT_MRT3847_123291C.1.pep
GYQTSFNWCSEIEKPCTNLFKNFYQVPCFLLEYSLKVKKHYRYQKGYWAFFEHWAKGISAFFFLPILEPKLARKGIFNTLL

SEQ ID NO: 168634 - protein, 76 aa, Glycine max
  Clone ID: PAT_MRT3847_123292C.1.pep
SSTATSLKGELNNVSSENGPVESVYQTDGQKANDKTCTSEYEASPPSSTPGCKQAWVLTRCTYVILNCKHAIHIQV

SEQ ID NO: 168635 - protein, 204 aa, Glycine max
  unsure (1)..(204): unsure at all Xaa locations
  Clone ID: PAT_MRT3847_123293C.1.pep
MAISVALILGLCLAMNMALPTGAATHTVGDTSGWALGVDYSTWASGLKFKVGDSLVFNYGTGHTVDEVKESDYKSCTMGNSLSTDSSGATTITLKTAGTHYFMCAAPGHCDGGMKLAVKVKAKNASASAAAPSPAKESPSESDDAKDTPTTPTSTTNPKTSTSTTPSTETXTTTTSSYTSSAIGGSPIVAMFVVSWISYLLLMM

SEQ ID NO: 168636 - protein, 121 aa, Glycine max
  Clone ID: PAT_MRT3847_123294C.1.pep
MNPVDWEQELKKYEDVIASGTNCMKIKAMVMLTRLSKHAPEDVLARTIPILTEILGHNVSNDSAPTLQEAAAYCLKCIACRGDGELAVEIGGHGATRSLMRLLPHSEGRMQKVLTKWMLVI

SEQ ID NO: 168637 - protein, 33 aa, Glycine max
  Clone ID: PAT_MRT3847_123295C.1.pep
IHLNYICETGPSMERKITLPRIAISTYSKIRSF

SEQ ID NO: 168638 - protein, 47 aa, Glycine max
  Clone ID: PAT_MRT3847_123296C.1.pep
AGHSETPSKKKHVESHVALTGEAGSSTQEEEELSPPHGTSRKRKEKV

SEQ ID NO: 168639 - protein, 60 aa, Glycine max
  Clone ID: PAT_MRT3847_123297C.1.pep
FKRHRVLQIRPHHFSIISRQLNPSRVIRGTWWPDNLKMGNPRPFKNWELNPTPLERNNKA

SEQ ID NO: 168640 - protein, 63 aa, Glycine max
  Clone ID: PAT_MRT3847_123298C.1.pep
SRKRFSLADRRVPLGLLMQGLGWKRVNQEEIDMREANWVPLSRLAPLYAMCKGRALVYKINLK

SEQ ID NO: 168641 - protein, 85 aa, Glycine max
  Clone ID: PAT_MRT3847_123299C.1.pep
FLSCWWVWPEFPKERPKTMLPLFFSVAFSAVPLILYIPPLRSLNLFVETIEDMARESRIHTNRIYPRLRVAWSRVMNCILCNRTR

SEQ ID NO: 168642 - protein, 69 aa, Glycine max
  unsure (1)..(69): unsure at all Xaa locations
  Clone ID: PAT_MRT3847_12329C.1.pep
IGYDAEXDEQEPPHELQWRAIPDPXXAITSLFLNSICWRIIEPSLTTFMGTLRLDWAASVMSAHFDRCL

SEQ ID NO: 168643 - protein, 55 aa, Glycine max
  Clone ID: PAT_MRT3847_1232C.1.pep
CHGPCRTLNYWDGQLICLNGRCNHDREGGTHICGGGMAPNSSTKGGSWRSSRNLN

SEQ ID NO: 168644 - protein, 48 aa, Glycine max
  Clone ID: PAT_MRT3847_123300C.1.pep
RILLDYVLHASVTWQYNMGWWVPYSQTIKLQNPKINLPPICELVHPLI

SEQ ID NO: 168645 - protein, 74 aa, Glycine max
  Clone ID: PAT_MRT3847_123301C.1.pep
TGNRFFSLTYRGYTNWNNLTTRFFFFGTINPMRVFSCPNFGFLPPGSPKRLRGGNPPKRGCSVGPDSKAFAKHI

SEQ ID NO: 168646 - protein, 74 aa, Glycine max
  Clone ID: PAT_MRT3847_123302C.1.pep
RKKKRGKENWGKGGVCQKAFLMGAKCEPLDFSGVFFSNRNGKQVNKIPLRSPRASPVPLGPFFFPHSPPFFPPQ

SEQ ID NO: 168647 - protein, 69 aa, Glycine max
  Clone ID: PAT_MRT3847_123303C.1.pep
YKSTVASSTTYANPMSSASTQPSHCHALILILSLAHPLRFFAITKLNMVLSPLSSYHLRFSRQSPAYLS

SEQ ID NO: 168648 - protein, 68 aa, Glycine max
  Clone ID: PAT_MRT3847_123304C.1.pep
INRDNSLNLYIINLLLIHYLHNSEGKKKKNLTKKKGAPSELIAFFLLHKGCAFYSSFNRSVKLHKCLI

SEQ ID NO: 168649 - protein, 80 aa, Glycine max
  Clone ID: PAT_MRT3847_123305C.1.pep
DLQYRQLSHLLRNPPWTHNTLKLTHYTVHSMTCTQFTIGYQNSLHRHIPTSNRLLFFLPKTAIKSSFIDAFPIQYRISQL

SEQ ID NO: 168650 - protein, 48 aa, Glycine max
  Clone ID: PAT_MRT3847_123306C.1.pep
SHGISIKLRAHDFFYFFRKITNLRDKRKIVKPAKLCIIKNYSKRSESN

SEQ ID NO: 168651 - protein, 90 aa, Glycine max
  Clone ID: PAT_MRT3847_123307C.1.pep
PFYDRVTTMPFYDLLTTMAVYDLLTTMPVDHLLTTMPFYDLLTTMPFYDLLTTMPFYDPVTISGSLTSHDHARLSASHDRHISRHINQPK

SEQ ID NO: 168652 - protein, 204 aa, Glycine max
  Clone ID: PAT_MRT3847_123308C.1.pep
MGLASVVHNGVRIPFNLEHIHTPPFRCSALHHPISSFCSVYHYRPPHRFPLLCSRRIGHHNYASEVKRISAQQNDDIGKVEKSPTQESLGNEDYSSSVRTVALWVCTAVAFGVGLGFKEGFDKASEFFAGYILEQSLSVDNLFVFVLIFNYFKVPVAYQNRVLSYGIAGAVVFRLTLILIGTATLQTCQKFIPVTTYYDGNRFI

SEQ ID NO: 168653 - protein, 194 aa, Glycine max
  unsure (1)..(194): unsure at all Xaa locations
  Clone ID: PAT_MRT3847_123309C.1.pep
WVFTAVAFGVGLGFKEGFDKASEFFAGYILEQSLSVDNLFVFVLIFNYFKVPVTYQNRVLSYGIAGAVVFRLTIILIGTATLQRFEAVNLLLAAILLYSSSKLFASEEDESDLSDNFVVKTCQKFIPVTTYYDGNRFITNLDGVLXKATPLLLTVAVIELSDIAFAVDSIPAVFGVTRDPFVVFTSNLFAILGL

SEQ ID NO: 168654 - protein, 45 aa, Glycine max
  unsure (1)..(45): unsure at all Xaa locations
  Clone ID: PAT_MRT3847_12330C.1.pep
MGIPQKDPLSQLSLRPGLRFXLTDDELLIQYLDINVAGNQFYLPI

SEQ ID NO: 168655 - protein, 82 aa, Glycine max
  unsure (1)..(82): unsure at all Xaa locations
  Clone ID: PAT_MRT3847_123310C.1.pep
XSNGTRXFTTPIKIQQDQVXXKXIIGSEEPKICLPREKQXFXXFPKXFWXVFXFLKEFKTTNXQKDXTAEXKVXYVQPQDPK

SEQ ID NO: 168656 - protein, 51 aa, Glycine max
  Clone ID: PAT_MRT3847_123311C.1.pep
KLSTFHKNPLHTQNRSIERFRSAKTWRMESYHLGPLEGHTKMGHLVTSSIE

SEQ ID NO: 168657 - protein, 80 aa, Glycine max
  Clone ID: PAT_MRT3847_123312C.1.pep
PTKQKCTTHDITNLCFCATLLQSLQISDYGHGPTCLAIVIVCFYDSDHHENYKLDIFCIWVILGLAIYIGLKPLSLVFFV

SEQ ID NO: 168658 - protein, 110 aa, Glycine max
  Clone ID: PAT_MRT3847_123313C.1.pep
RERCHDLDKISAQPFFFPGEEKKNPPLPKINPQFFLVSITRPIFLNNWDPSWGGLPLLLKPPKENLNFPPDLKQGVGFIFPLKHFFLGFFLHFFSHGGPGEKGLRTEVPH

SEQ ID NO: 168659 - protein, 51 aa, Glycine max
  unsure (1)..(51): unsure at all Xaa locations
  Clone ID: PAT_MRT3847_123314C.1.pep
AGIFWVWTGYFLKFISSXXCRLVLSGFGLGISISLVAHPSAMDGKVGLLLL

SEQ ID NO: 168660 - protein, 66 aa, Glycine max
  Clone ID: PAT_MRT3847_123315C.1.pep
RIRRQMRKGEPVIRVNSGIARYSRMRRIIIECPILTRSVLCSVHNAVSGCRYIQSTLPPSVVFSQP

SEQ ID NO: 168661 - protein, 107 aa, Glycine max
  unsure (1)..(107): unsure at all Xaa locations
  Clone ID: PAT_MRT3847_123316C.1.pep
YRGSWRSHTAGQELAVCYKRARLYLAYTSVEYLSDSCKXQQAGDLXSLSALLGDYMYNVGELLGHTIMKSLLGTKVEWLYYILKAINSGDLKRTQQLCRLHNAVLRA

SEQ ID NO: 168662 - protein, 55 aa, Glycine max
  Clone ID: PAT_MRT3847_123317C.1.pep
VSTKKNSEREVSLMLLLKICSIIGAYVIPILVPKFQLKITVKTSAKARGLLSLFL

SEQ ID NO: 168663 - protein, 65 aa, Glycine max
  unsure (1)..(65): unsure at all Xaa locations
  Clone ID: PAT_MRT3847_123318C.1.pep
VEIAGVRSLNIQTCINYWELVTMNFELKFLLNFLDIWPXIIIKKEGSYLEKKKKKKKKKSGRSRG

SEQ ID NO: 168664 - protein, 65 aa, Glycine max
  Clone ID: PAT_MRT3847_123319C.1.pep
VIACLFVSLFVGCHIGNWKEDWCHPLKNLSQEKRANHLKSYWTKKNSKLSESPKREQPPKLRTVL

SEQ ID NO: 168665 - protein, 37 aa, Glycine max
  Clone ID: PAT_MRT3847_12331C.1.pep
RFPSFRETTLYLFLNSLSLSMIAAASRRSCGPDLMTF

SEQ ID NO: 168666 - protein, 106 aa, Glycine max
  Clone ID: PAT_MRT3847_123320C.1.pep
SNMYKDNWTQPWPMGSEIYPKVHENPRAFFSSSSPIFLEPLAHGSSDWSLPREDCIICYHQNFFESILIHHEACFYRIVLSKTIGHKQTQIVTIQALSNIITTLDF

SEQ ID NO: 168667 - protein, 174 aa, Glycine max
  Clone ID: PAT_MRT3847_123321C.1.pep
MANQGLDLPLYEKIWFKRTFQRVIDTLILVLLLLNLSYRVFSSNNFTFPWFLAFICESWFTFIWIVILNTKWSPAVTITHPNRLLQRVPELPPVDMFVTTADPVLEPPIITINTVLSLLALDYPANKLACYVSDDGCSPLTFYALVEASKFAKFWVPFCKKYNVQVRAPFRYFS

SEQ ID NO: 168668 - protein, 107 aa, Glycine max
  Clone ID: PAT_MRT3847_123322C.1.pep
SRGSTHARPKKKKKKKKKKKKKKKKKKKKKKKKKKKKKKKKKMEGNLFLQPHFLRRHWPLFLGFFCFVSMSCFFPGGWPGNPLGFPGFFPFAGRAPVPPPFRRAVGA

SEQ ID NO: 168669 - protein, 58 aa, Glycine max
  Clone ID: PAT_MRT3847_123323C.1.pep
GALFLMLNMTTVEYVVAAAPLSDNTNPDAADALMISPPPRCVCVVLCVLGSMLGDLKR

SEQ ID NO: 168670 - protein, 117 aa, Glycine max
  unsure (1)..(117): unsure at all Xaa locations
  Clone ID: PAT_MRT3847_123324C.1.pep
CFLTHHAVKSVLQDAGATFAPTTIAPFFFGGGXPPHXPKPPXXAXRAPPPPPPPPPXPPPPPPPPPPPPPPPPPTPPPPPPPPPTHPPPHPPPPPPPXHHPPPPPTPPPPPPPPPPP

SEQ ID NO: 168671 - protein, 83 aa, Glycine max
  Clone ID: PAT_MRT3847_123325C.1.pep
NTIVQLWLSSQVNQYIKGMQRTLKTLFACNGAWLTKSIGFSRYFKVSQRKESISLFTSFHSLPTNPWHPRFSISYILCYVLNF

SEQ ID NO: 168672 - protein, 135 aa, Glycine max
  unsure (1)..(135): unsure at all Xaa locations
  Clone ID: PAT_MRT3847_123326C.1.pep
ATHPQRASYTAAELLTHCKAQFHAWPGATVTSRGARPIRDQRGTPTGEVDQTSSQGTGATPARPSGEELXTEAVDQSDARSDHQGKAAXNAGEPVNTRMGRATIAKDQTQLTATDSEPRQEHDGTANKWNKRTPN

SEQ ID NO: 168673 - protein, 272 aa, Glycine max
  Clone ID: PAT_MRT3847_123327C.1.pep
RGGCGGGWRHRWGASLWCVPCSLVPLSGCGGAHGLEGCLAGCSACPGGADHIYCNDDKLDKLPEGDWWVCEDCRKSPGSPLLNSEFKGQLAKARYFPKQNAEKNIAIYDTRKRKNLGLLSKSGSFDNASSSVKLNGKCSEVVANDLANTPGSNSLKRKYRDMVGAHEIGEFDAMDTRSPGDRILLGGDNYNSGCSDLRQSLDGKKETPEDVKGKMPMKENNNADNGKLPMDQKNNDSLSVASPTSYEEYMELLYWGAVETMATLLWIKRNLV

SEQ ID NO: 168674 - protein, 91 aa, Glycine max
  unsure (1)..(91): unsure at all Xaa locations
  Clone ID: PAT_MRT3847_123328C.1.pep
NNLANLINTCRLPKKKPXNTYLSTSLLLKSLHNYTSLYFHLLLFILLNLPNPLHLLYNINLIPNILTLIKIYYLITQILLSLHHNSYNLHL

SEQ ID NO: 168675 - protein, 115 aa, Glycine max
  Clone ID: PAT_MRT3847_123329C.1.pep
QDLLLTCCEGFGTTALAALASNCRLLRVLELVECVVEVGDEELDWISCFPEIDAQTYLESLVFDCVECPINLEALERLVARSPSLRKLRLNRYVSMSQLHRLMHRAPQLTHLGTG

SEQ ID NO: 168676 - protein, 85 aa, Glycine max
  Clone ID: PAT_MRT3847_12332C.1.pep
LKLFPLESVDFFFSVRPSKHFFVVVSGSLACVRTPLRGSPIITFFSLPLFFLSHYLFVSPFLSYCFPPPFYDIPGYVCIQFFLPL

SEQ ID NO: 168677 - protein, 69 aa, Glycine max
  Clone ID: PAT_MRT3847_123330C.1.pep
GSKRTLPLPKFSIFFCNSSDLFVLKASRIDFNVIGCSFYVPGMAYISIIPLPLMKKVIVLFFPRPKSLG

SEQ ID NO: 168678 - protein, 58 aa, Glycine max
  Clone ID: PAT_MRT3847_123331C.1.pep
WERLRINVKKKGGPQVMFSPCPLNHYWGTANGGVHFSPGTPPTNPSMRRRGCPIKGPK

SEQ ID NO: 168679 - protein, 84 aa, Glycine max
  Clone ID: PAT_MRT3847_123332C.1.pep
APCYYWEVVFSLVAPGFSFYPSGLLAVCTPGPFTISHREQLCPSGGRAGIPRATPPAGLWARPGCDALRFFGARGGTISGVCPP

SEQ ID NO: 168680 - protein, 84 aa, Glycine max
  Clone ID: PAT_MRT3847_123333C.1.pep
RTYFTSGEKETKAWQYFAGMTAPQAAGVIHSDFEKGFIRAETVSYEDFVAAGSLSAAREKGLLRSEGKDYVVQEADVMLFRFNV

SEQ ID NO: 168681 - protein, 48 aa, Glycine max
  Clone ID: PAT_MRT3847_123334C.1.pep
MEPDTEQQQGGVADEAEPFMGSGRFARAYLLGYNCADEKELEATLRFC

SEQ ID NO: 168682 - protein, 113 aa, Glycine max
  unsure (1)..(113): unsure at all Xaa locations
  Clone ID: PAT_MRT3847_123335C.1.pep
VXXKVAXNAYVSSEFGXXVXXXHXXXVEVIQXXVXRXTXXLVGDSPXRGXPXXPXSVXXXXXTYRXXIGXNSSXXTSPXXXXGXMTGNXXXGXXMFSXXXXXRXXXXNXAXXX

SEQ ID NO: 168683 - protein, 49 aa, Glycine max
  unsure (1)..(49): unsure at all Xaa locations
  Clone ID: PAT_MRT3847_123336C.1.pep
NYFTVSHKELDLCWNHHISTCEALKDRYLILGDSLSTHPIXYQTQLAIM

SEQ ID NO: 168684 - protein, 119 aa, Glycine max
  unsure (1)..(119): unsure at all Xaa locations
  Clone ID: PAT_MRT3847_123337C.1.pep
ASLKIDGKDPVGSLGANIFPDRHSIATAAHSHDDLKDYHEPEPVPFGGTDCVQVMVVFRARIAXFAANFLFVYFTVLTDKGVAGAKSXSEYPLGLNEFDWTFGGMIFHLSFCTAGISLG

SEQ ID NO: 168685 - protein, 98 aa, Glycine max
  unsure (1)..(98): unsure at all Xaa locations
  Clone ID: PAT_MRT3847_123338C.1.pep
FISMDTEFPGVFFLPHLDPTGACNHRNSNRNLHFYHYXLFKFNVDALNLIQVGLTFTDASGNLSDLSGYRFICEFNNRDFIFSRVVYFLDYIYSFFTR

SEQ ID NO: 168686 - protein, 116 aa, Glycine max
  unsure (1)..(116): unsure at all Xaa locations
  Clone ID: PAT_MRT3847_123339C.1.pep
EKEGEKEPVDPPAAKKKKKKKEKGKEKKAVSGAAAAAAAVAGTVPENXPPEDKAWVIYPKKNDSKAXKAADKKVPKPVREMPKALAXAQRLXERKKKKKEERLRKEEKERRWPKEL

SEQ ID NO: 168687 - protein, 65 aa, Glycine max
  Clone ID: PAT_MRT3847_12333C.1.pep
YHEHILPQMILLRGSMFRTKTSYEEQTLQPKDLGHCIFLYMNQFRKLMVLIINGVNAAGIARENF

SEQ ID NO: 168688 - protein, 111 aa, Glycine max
  unsure (1)..(111): unsure at all Xaa locations
  Clone ID: PAT_MRT3847_123340C.1.pep
KETVDPPAAKKKKKKKEKGKGKKAVSAAAAAAAAVAGTVPENEPAEDKAGVIDPKKNDSKAKKAADKKVPKPVREMQKALARSPKAXERKKKEKEERLRKEEKEPRRQKEL

SEQ ID NO: 168689 - protein, 104 aa, Glycine max
  unsure (1)..(104): unsure at all Xaa locations
  Clone ID: PAT_MRT3847_123341C.1.pep
PKEWHLDLPCGKIXSVSTTTDQRLVGTEHEVYDPFCGGVQKYATPIMPVNEEILSKVAQNMXVKEWFXDCVDEEDSFQEVSLSAALNGVKGSYYMERIPLDYFQ

SEQ ID NO: 168690 - protein, 117 aa, Glycine max
  unsure (1)..(117): unsure at all Xaa locations
  Clone ID: PAT_MRT3847_123342C.1.pep
HHFDSEADAGASKTYSQLAGTMRKNGXLAIRSMPCRAVECCTXNTGEHGPAKWHSVAIDIINGKEIEDVERSSDKCDVTHVNRTDYELIDIYEDGYVSVMTDNGHTKDDLKLSTDEA

SEQ ID NO: 168691 - protein, 87 aa, Glycine max
  unsure (1)..(87): unsure at all Xaa locations
  Clone ID: PAT_MRT3847_123343C.1.pep
RAGARGRPAAIRHQHGGVLIXXWSAIGPRYTSHLTDCYGTGKPEINCLSIIVMGTDFMLTQLSHELNDQHLQLTQSMPLSKPHDRSL

SEQ ID NO: 168692 - protein, 70 aa, Glycine max
  Clone ID: PAT_MRT3847_123344C.1.pep
NGEHTLPLCLHVTGEHRALSISVSLTSREHHQRGPASESLIVGGWPGQVVKLKRILSDGQGKEFSIVGQG

SEQ ID NO: 168693 - protein, 81 aa, Glycine max
  unsure (1)..(81): unsure at all Xaa locations
  Clone ID: PAT_MRT3847_123345C.1.pep
XNGGGYXGNXGGCYGGRXGYSGKPWXXLWRNRRRGXVVVKVAGEXXXXXXXXXXFNAEIXVVXVAVXAAAXAXVEMETGXS

SEQ ID NO: 168694 - protein, 405 aa, Glycine max
  unsure (1)..(405): unsure at all Xaa locations
  Clone ID: PAT_MRT3847_123346C.1.pep
MAGETSWISHYDDRQRETGAFDSFLELGEEGEKEATAVSLDVLPDDLLERILAYLPIASIFRAGCVSKRWHEIVNSERFVWNLSHVLPQKPWYFMFTSSDEPDGYAFDPVLRKWYRYRIELPCIGTSNWFIASSYGMVCFMDNDSRSEICICNPITKTYRKLEEPPGLKVSDYSALAISVNRESHCYTVAIVKSKQVPENFVQWDISIHLYNSENATWVTSLTEVLMGSRGGNESVIFNEMLVMVGGIGKPDRPDIIKGIGIWLLNDKKWEEIARMPHIPVPFSLTXDDVFTXQRWLVMVGGIGKPDRPDIIKGIGIWLLKDKKWEEIARMPHKFFQGFGEFDDVFASSGADDLIYIQSYGGPALLIFDVNHKQWKWSQKCPVGKRFPLQLFTGFCFEARLEIAP

SEQ ID NO: 168695 - protein, 62 aa, Glycine max
  Clone ID: PAT_MRT3847_123347C.1.pep
RNYKFSVSYSFSCCWEAKENLISKDHTLHIIVSDNHEIRTALSRETQIVLRLEFTYDIIYVV

SEQ ID NO: 168696 - protein, 58 aa, Glycine max
  Clone ID: PAT_MRT3847_123348C.1.pep
KKKKKKKKKKFKNNKKKKKQRGIHKHTPYPTLKYNHLTPLHFPHIHNFLPNLSITLPI

SEQ ID NO: 168697 - protein, 127 aa, Glycine max
  Clone ID: PAT_MRT3847_123349C.1.pep
FLQVCKRRRVYKGCFHPSIGIITGRVQDRSGSFSFCHDIKPSLKELVARELVEPGYCSRVPDFTVGRFGYGYVRYLNETDVRGLRIDEIVKFHRHEIVVYSDENDKPAVGQGLNKAGEVVLVLDSEI

SEQ ID NO: 168698 - protein, 50 aa, Glycine max
  Clone ID: PAT_MRT3847_12334C.1.pep
QVSVYHEVLYVHSCVLSRSTRRGKAPDSPSLWSAQRGILFPLRSRSHTSP

SEQ ID NO: 168699 - protein, 137 aa, Glycine max
  Clone ID: PAT_MRT3847_123350C.1.pep
MECDVGGVSDSCILHTCKRRRVYKGCFHPSIDIMTETEASLPILNSSGYYTKPSLKELVARELVEPGYCSRVPDFTVGRFGYGYVRYLNETDVMGLRIDEIVKFHRHEIVVYSDENDKPAVGQGLNKAAEVVFGITQ

SEQ ID NO: 168700 - protein, 393 aa, Glycine max
  Clone ID: PAT_MRT3847_123351C.1.pep
VRIPGSAPPFRNHGLSPPVLSHKWGRHSCCVKQKLRKGLWSPEEDEKLFNYITRFGVGCWSSVPKLAGLQRCGKSCRLRWINYLRPDLKRGMFSQQEEDLIISLHEVLGNRWAQIAAQLPGRTDNEIKNFWNSCLKKKLLKQGIDPSTHKPLTEAHVKEEKKIIETSPMQTPLSQGPSVPLIFPSSQGSSLLISDSSYYDGGLTEASREIFMTKPALDPLSYYDFPMGVAQSGFNLPVSQYQTSLKASDQNPFGPNSSYVFSSMPSLTNSDHGNVSVTEFSDNNSASKISSLFMNDQVKESSSNSSNLSTIYHGGGCHISSMMENAGFSWEGDNKFDPLFQFQVNATKSEDFKTSSWEEGQLHTQNSIDFTSFPLTSLSEDLTGANFDVFQHI

SEQ ID NO: 168701 - protein, 307 aa, Glycine max
  Clone ID: PAT_MRT3847_123352C.1.pep
MVWFQCEDCGDNLKKPKLSSHFRTCSAYKLSCIDCGEIFGRDTVQDHTQCITEAEKYGPKGQGKTFNVATAKPNKDSKQRPEVDINVGLSDRPPWFCSLCNTKATSKQTLLLHADGKKHRAKARAFHASKQPPVEADKSATDAKVAVEIAPNDEVRDDKIGELPKLQESSKQNNSKPGNEISSAKKKRKLEALEDDRIKKTKNDTSVDMGNGEVIQGEEATGESNLKKERSAVKNKIKWKKFIKSALKSHPDRILKMKKLRKVVLRALQECGIVVDDTELSEALEQKINSSSRFAVENKYVRLLAKD

SEQ ID NO: 168702 - protein, 82 aa, Glycine max
  Clone ID: PAT_MRT3847_123353C.1.pep
SVPIVGFKPGLHGTDEHSMNFSTNFRYKYFGHSPPTHLQMFSNKRYQLRSLKILIFSMKKDILWAPPILLKYEYTFTRSLTK

SEQ ID NO: 168703 - protein, 133 aa, Glycine max
  unsure (1)..(133): unsure at all Xaa locations
  Clone ID: PAT_MRT3847_123354C.1.pep
LYEDENKNRMMETKELFEWVLRQPCFEKTSFMLFLNKFDIFEKKVLNVPLNVCEWFKXDYQPVSTGKQEIEHAYEFVKKKFEELYFQSTAPDCVDRVFKIYQATALDQKLVKKTFKLVDETLRRRNLFEAGLL

SEQ ID NO: 168704 - protein, 75 aa, Glycine max
  Clone ID: PAT_MRT3847_123355C.1.pep
KGFIQLPFDSCIMLFLDQCHRNASFSSLNNKHDNLNLKVEYTPILKVYLFMTASFTFKMKSCVDFDEVIPFYYYL

SEQ ID NO: 168705 - protein, 93 aa, Glycine max
  Clone ID: PAT_MRT3847_123356C.1.pep
LINVKHNILLQSIYSDKHTVLNVSLYVLWISILVVTLIYKIEIVDHLCSWEIFAVGSCTSRLTSREVLWMWKYNTYRNEVNMCNIIIVASFDI

SEQ ID NO: 168706 - protein, 47 aa, Glycine max
  Clone ID: PAT_MRT3847_123357C.1.pep
GQNITIYDIIQSQFHIPAIPGLYIRTQTKGPLVNTTFNTYQLFKFYC

SEQ ID NO: 168707 - protein, 48 aa, Glycine max
  Clone ID: PAT_MRT3847_123358C.1.pep
PWPPLSWQFHSTNLMNYNNVNRQRKRVIQRSAQATQKNIKDVINGPTS

SEQ ID NO: 168708 - protein, 84 aa, Glycine max
  Clone ID: PAT_MRT3847_123359C.1.pep
GICLENCQAHPYSLITCNHELDNNNNNNTATRIDPPLKRSSLLPISDFTATILCGHLFSNANLPHHGGCMSQDRQCTGNLHLFS

SEQ ID NO: 168709 - protein, 186 aa, Glycine max
  unsure (1)..(186): unsure at all Xaa locations
  Clone ID: PAT_MRT3847_12335C.1.pep
QMLVYEFMSNGTLRDHLSVTAKDPLTFAMRLKMALGAAKGLLYLHSEADPPIFHRDVKASNILLDSKFSAKVADFGLSRLAPVPDMEGVVPGHVSTVVKGTPGYLDPEYFLTRKLTDKSDVYSLGVVFLELLTGMHPISHGKNIVREVNVAYQSGVIFSIIDGRMGFYSSEXWEKILTLALKCCRR

SEQ ID NO: 168710 - protein, 68 aa, Glycine max
  Clone ID: PAT_MRT3847_123360C.1.pep
KPLDLNQRVTRIRASISRITPYLLCSLRMKTMRSINLCKRASAFALSLVLDTHTRRPSCWSCRITTHT

SEQ ID NO: 168711 - protein, 87 aa, Glycine max
  Clone ID: PAT_MRT3847_123361C.1.pep
NEESVCQRSDEEGNCSPPTQEELAAEIHRLELHAYHCTIEALHASGPLSWEQEALMTNLRLSLHISNDEHLMELRNLISSENSIPFR

SEQ ID NO: 168712 - protein, 116 aa, Glycine max
  unsure (1)..(116): unsure at all Xaa locations
  Clone ID: PAT_MRT3847_123362C.1.pep
MSQLLESAKNFALEKVNDQAKPEASGTDPNVTRVSRDNVXYLSMDSARNPYSTFIPNCEINYTXKAASSDIASGNIRDPGXSMNAKDATMXEAPVQVPYSLXAELGEDIEADWHLD

SEQ ID NO: 168713 - protein, 66 aa, Glycine max
  Clone ID: PAT_MRT3847_123363C.1.pep
SMQHTYYQASVIHRLSLRYMGAFEIRSSRPDFCNAHRHASSDLILTRHVDLDDQTEKELEAGHRDA

SEQ ID NO: 168714 - protein, 112 aa, Glycine max
  Clone ID: PAT_MRT3847_123364C.1.pep
SGIHHSMFSFSSITRTLHLLSHPLNVPPWTFLNPFFLAPSTTPHTASTHSSQCQRWRRSASLTACMRSSTSRKATSMTNEGGGDLSTTTTTTNEIHTRRQATVKELCARPRL

SEQ ID NO: 168715 - protein, 102 aa, Glycine max
  Clone ID: PAT_MRT3847_123365C.1.pep
MGYIHHGRTGLRHMVRFRTATGVVSNSGRSQSRAAFPSHSPILGNVLFFSTGDEYLNEITAEVERDRRRERNERLRLGLDTVDIDTESEQDYMGVGPLIAKL

SEQ ID NO: 168716 - protein, 81 aa, Glycine max
  Clone ID: PAT_MRT3847_123366C.1.pep
TSGNFQTPPFFGRNSIEAKALPDRVLYNTFPTNPFWDSPYIPLETGLPFFCIWMAIQAMNMMRPSTGPIQKFMSGDREHIL

SEQ ID NO: 168717 - protein, 64 aa, Glycine max
  unsure (1)..(64): unsure at all Xaa locations
  Clone ID: PAT_MRT3847_123367C.1.pep
NIKFNWVIEEGDLKACASPIILLRGIPFFFRAFPIGGVPERIXNTTVLYINRAMTEFWRQYFWN

SEQ ID NO: 168718 - protein, 29 aa, Glycine max
  Clone ID: PAT_MRT3847_123368C.1.pep
TIGDSLIMTAGATQLLYSKPLSLYSSYID

SEQ ID NO: 168719 - protein, 122 aa, Glycine max
  Clone ID: PAT_MRT3847_123369C.1.pep
MIIWVQRSLEDPTILVTTYEGEHNHGHQRAEISLVSNQSEALPPLKGSSPVSSPNTATIRSAVCPTVTLDLVKSGLVEFESAQKSSIQQFLVQQMATSLTRDPNFTTELATAISGKILEAQW

SEQ ID NO: 168720 - protein, 116 aa, Glycine max
  Clone ID: PAT_MRT3847_12336C.1.pep
ISRRINIFSSHSHSKHKILTKVKMKASRIALFTLVVLLFVAEVQVSKAVTCSPVQLSACVSAITSSTPPSNLCCSKIKEQKPCLCQYLKNPNLKKFVDSPNARRVANTCGTPFPRC

SEQ ID NO: 168721 - protein, 98 aa, Glycine max
  Clone ID: PAT_MRT3847_123370C.1.pep
MSYWNFPFTLQRKMEFNSQNPNQSEIRWSSDDQAGPGQVKYSCSFCQRGFSNAQALGGHMNIHRRDRAKLKQSAEEKLLSLDISIKTTGDPNDPSDLE

SEQ ID NO: 168722 - protein, 156 aa, Glycine max
  Clone ID: PAT_MRT3847_123371C.1.pep
RIDMKNILKKLHIMSNQSEDAQGATSSKSNKSSSDGSSSSTAPKKLSNWLHSVSNRQSPSPPSPNLARGEIMDPSDSVSSGGLDVVSDSARRDSESSTSRDPEVEEEYQIQLALELSAKEDPDAVQIEAVKQISLGSCDPGNTPAEVVAYRYWMFL

SEQ ID NO: 168723 - protein, 44 aa, Glycine max
  unsure (1)..(44): unsure at all Xaa locations
  Clone ID: PAT_MRT3847_123372C.1.pep
TFIAIHGAFSLIPIILLQFXLSLSFQLLPYNIISFSVSNTFLVS

SEQ ID NO: 168724 - protein, 365 aa, Glycine max
  unsure (1)..(365): unsure at all Xaa locations
  Clone ID: PAT_MRT3847_123373C.1.pep
MKNPRKKKRPKPAQKKVLEENNKGVVVAGNENEEEEKRKRSVLEALVEAFSLSSIREASMAYEIAGGDPDRALEILRKGSSDRFEDSFSCFSYGSSSSGGSSGGGGSSSCSGLELGSKGGRQQKKKVVASTGTVSTVLGKEYVRRNNIRNKGFSSNGVFEMEEAEQFLCSMLGDDSDINLAVVRDVLCQCGYDIETASDVLLDLAASTNDKPNTDRHPNYRVDNIDDERFFADPNDSLIDRRSECTSLSSEGYLSDNPWPXEAKGDEYHVFREDSKQQWDSVKSYYTKAATAYTKRERAYAAYLSDQGKEQTRLAQKADTKASHDIFIARNXGIEXMITIDLHGQHVKQSMRMLKLHLLFGSYVP

SEQ ID NO: 168725 - protein, 232 aa, Glycine max
  Clone ID: PAT_MRT3847_123374C.1.pep
EQFLCSMLGDDSDINLAVVRDVLCQCGNDIERASDILLDLAASTNEKPNTARHPNYGCEKTTEGDDERFFADPNDSYLSDNPWPFGRKYVEVLNSSKADSAISPGCTKSEIPQKVLESLFNIPKSTEHDKDTMNWRNVVKKIQSLGPGFNVSPHVAESQQHTCAKGDEYHVFREDSKQQWDSVKSYYTKAATAYTKRERAYAAYLSDQGKEQTRLAQKADTKASHDIFIARN

SEQ ID NO: 168726 - protein, 94 aa, Glycine max
  Clone ID: PAT_MRT3847_123375C.1.pep
SSRFVSTARAARAARDGCEKTTEGIGIMDYYSGLEMKQMENDIFVSQESYGKVLKKFQKFDYNFLNTPMEGNLILSRLDGGNKEDPNSLKSLAG

SEQ ID NO: 168727 - protein, 47 aa, Glycine max
  Clone ID: PAT_MRT3847_123376C.1.pep
YMSEVTNFMRSQGHELNMSSNHISNKSSVKYCLFILRTKIAVTFIEM

SEQ ID NO: 168728 - protein, 70 aa, Glycine max
  Clone ID: PAT_MRT3847_123377C.1.pep
ESVGTQAEVKSKKSKKILEITSIFCESCLKQRQDDQFSLFSVKILNISEYFNHSFRLLVFTMCKNSQIIK

SEQ ID NO: 168729 - protein, 75 aa, Glycine max
  Clone ID: PAT_MRT3847_123378C.1.pep
TPFRQGFRNLQRLMRFSGKTNGEGNFKGPPKGLKGILKTIVPANGRRLVHSSINWKEFGSGLLCFQGLGNGKGKE

SEQ ID NO: 168730 - protein, 267 aa, Glycine max
  Clone ID: PAT_MRT3847_123379C.1.pep
GIRHEADAEFSDFDKGKNKECFTAGQIWAIYDTSEGMPRFYALIRKVLSPGFRLQIIWFEPHPDCKDEINWVNRLEYGCEKTTEGGDTDITEDHLMLSHLVLCEKISRNTFKVYPRKGETWALFKNWDIKWYMDVKSHQLYEYEFVEILTDYVEGKGVYVAYMAKLKGFVSLFLRNINEENKSFQIPPQELFRFSHRVPSFKLTGQEGVGVPAGSYELDPGALPVNLEEIAVPENSDVKVGRSSSGGENTRPSNRSEPLMTSGDASI

SEQ ID NO: 168731 - protein, 44 aa, Glycine max
  unsure (1)..(44): unsure at all Xaa locations
  Clone ID: PAT_MRT3847_12337C.1.pep
FVITLNEAFFYCRIAHLRCSMYREMKMYTIXHITVEVNGIKIHV

SEQ ID NO: 168732 - protein, 83 aa, Glycine max
  unsure (1)..(83): unsure at all Xaa locations
  Clone ID: PAT_MRT3847_123380C.1.pep
GRLRQMSTPLGTCWRVKSFDQCAIFYXDFFVIYVPFSLSFCPYLYITFAMLLCLVCVFLSITFVVRNIFSLCTHGTYTFGTHV

SEQ ID NO: 168733 - protein, 205 aa, Glycine max
  unsure (1)..(205): unsure at all Xaa locations
  Clone ID: PAT_MRT3847_123381C.1.pep
MVTKNQNRPPLSLTSTPPPPSNSKNFEGDVLLLDNKEQRVGAEKMVGTPINGRTRQAFTVVNGGVHDLGPSSAPPSNAGSDYGVIEFTREDVEALLSEKAKRKDRFNYKERCENMMDYIKRLKVCIRWFQDLEMYYSLEQEKLKNSLELTQQKCIEIELLLKIKEEELNSIISEMRRNCLXYRKNXLXEEPEKSVEPESLVKERE

SEQ ID NO: 168734 - protein, 45 aa, Glycine max
  Clone ID: PAT_MRT3847_123382C.1.pep
INISYLLSNNKHTNSRYILKMSPRIKYYLHYIQFTEPNSIQPSKF

SEQ ID NO: 168735 - protein, 94 aa, Glycine max
  unsure (1)..(94): unsure at all Xaa locations
  Clone ID: PAT_MRT3847_123383C.1.pep
XVRKLGIXLEXXXXXLXXAVYXGXXXXXXDTSXXQXPXXPSXAXTSXYSAXSSKSSPRTSAPTWLPXPRIRXCIXVXXXGFXXDXIGXVWCWKX

SEQ ID NO: 168736 - protein, 59 aa, Glycine max
  Clone ID: PAT_MRT3847_123384C.1.pep
IAVQSVYVVGVHVQNMHCLSLAMFVYSVAFSTQSIRPHLNIYGSGDCSLAPFGHSTNTS

SEQ ID NO: 168737 - protein, 75 aa, Glycine max
  Clone ID: PAT_MRT3847_123385C.1.pep
KPPKLNPQVYLIWKLIKIKNRRLKNRPVESNSPTPHLWENHISLNEDIHPSLCQGLWAYITSLLGASGWPYKPHL

SEQ ID NO: 168738 - protein, 87 aa, Glycine max
  unsure (1)..(87): unsure at all Xaa locations
  Clone ID: PAT_MRT3847_123386C.1.pep
MSSTSLGVAMTSAMTSALSIPIYYALLDHNLPSMHXLVDYNLTNSISSMRIYYPDXQTLYALIDSLFHYILNVSNETHSSMTDPFAA

SEQ ID NO: 168739 - protein, 55 aa, Glycine max
  unsure (1)..(55): unsure at all Xaa locations
  Clone ID: PAT_MRT3847_123387C.1.pep
VCLRVKKKKKKXKKKKKKKKKKKKKKKKKKKXXGEKGRPPTKEPRKPGKKNRTEP

SEQ ID NO: 168740 - protein, 90 aa, Glycine max
  Clone ID: PAT_MRT3847_123388C.1.pep
KLIMHTNQCEICQKKCSSDATYEFPFHKREKKKQLKSLLLNYMEVLTKSPECQKNTKNRIELPRRTCHMHKTVGEVASSKCSESPYSFGA

SEQ ID NO: 168741 - protein, 80 aa, Glycine max
  Clone ID: PAT_MRT3847_123389C.1.pep
GKKVRILFLSPCQILIQRHQTLQCLKSNQLSSLACIKMGTFPRTKKNAGSAKSVQAVGAKKARGIFRTREKVFSIRSVYT

SEQ ID NO: 168742 - protein, 89 aa, Glycine max
  Clone ID: PAT_MRT3847_12338C.1.pep
VRFEKVDISLRSTAKILGTVCCVAGALTMALVKGQKLLHTEFLPSIHLTGSQGDDWLLGCLLLLASSVFWSCWMILQVNKSRFIFSSFL

SEQ ID NO: 168743 - protein, 219 aa, Glycine max
  unsure (1)..(219): unsure at all Xaa locations
  Clone ID: PAT_MRT3847_123390C.1.pep
MPQSRHRRVTVVDLAASLARRRVSFIFNEAPTLRTPPRTAAFGRGRARASPRSQNIPPSTARRGRGRVPLRSVLPAWFPRTPLRDITAVVQAIERRSARQGVVLLLRFRHTRGCERGQENPTFRNSDCPFPLRIDXKSTKSDGLKLRTPFGSRDPKMFSDRPELPEHDESEALTPQKKLLDNIDQVEEAVREELNKLKRTPSAKKTEREKRVRTLMSMR

SEQ ID NO: 168744 - protein, 60 aa, Glycine max
  Clone ID: PAT_MRT3847_123391C.1.pep
PSKPLSMPHNITFSLELIFAIFRSIINPTPKIITITHMKYSMYSFFCKLYFKIHFILLQN

SEQ ID NO: 168745 - protein, 44 aa, Glycine max
  Clone ID: PAT_MRT3847_123392C.1.pep
MCLYTVILLNRPIKRIKRNRAIKLTTIYTGFRDTIFEKLIHFIF

SEQ ID NO: 168746 - protein, 37 aa, Glycine max
  unsure (1)..(37): unsure at all Xaa locations
  Clone ID: PAT_MRT3847_123393C.1.pep
CALEKKKKKKKQKKKKKKKKKKKKKPQKKKIKXXKET

SEQ ID NO: 168747 - protein, 151 aa, Glycine max
  unsure (1)..(151): unsure at all Xaa locations
  Clone ID: PAT_MRT3847_123394C.1.pep
KCRCPIIPNTHHPCSKTLLHLTLPISPNFSTYFPTLIHFTFFHIFYKFYSFTIXFFYYFSTIFKLFFXFFHILSLFRLLLLFIFIYFFLPFSLIIFLLYSFLYIYTLYLFILLITILFTYLIFLLYLLSIFNFYIILILFFSISKIFFLLI

SEQ ID NO: 168748 - protein, 63 aa, Glycine max
  Clone ID: PAT_MRT3847_123395C.1.pep
IPFSLFQGRLFAITFNFCLVLQLLGKTAINNPWVAGNAIQIFGKIPPVKIVEGNGLPLRAFFP

SEQ ID NO: 168749 - protein, 76 aa, Glycine max
  Clone ID: PAT_MRT3847_123396C.1.pep
APAVVMIKNPVFVSPTASPVFDLSRLVTTRKFRRGYLGIANSSRRVKRVLYLLHTGWRRRRSDTGASQAHRNGVYT

SEQ ID NO: 168750 - protein, 46 aa, Glycine max
  Clone ID: PAT_MRT3847_123397C.1.pep
RDYKENDFYLQLKSITRSPKSVDRCIKDFVLQTFFMSTLRGYIVTT

SEQ ID NO: 168751 - protein, 84 aa, Glycine max
  unsure (1)..(84): unsure at all Xaa locations
  Clone ID: PAT_MRT3847_123398C.1.pep
KNPIXKIKNNLVFKFDQGSFSYLKLVEEIYIFTFKKVVQRKKVTSDPKGKKKMGILKKAFWDKSKVWIFILFSNLAGVFFFFFA

SEQ ID NO: 168752 - protein, 86 aa, Glycine max
  unsure (1)..(86): unsure at all Xaa locations
  Clone ID: PAT_MRT3847_123399C.1.pep
HVLRPHPMSKPIAEDDVFFFNHQFTXKFFKVKIGTVVAXRQSDLENLALRHRVQPDRHSXIEVVIVRIMKSRRTLDYNNIVXEVIK

SEQ ID NO: 168753 - protein, 44 aa, Glycine max
  Clone ID: PAT_MRT3847_12339C.1.pep
ALFIISKFKKFIDDDDNLHKFITTYVLRLLNIDIIADLTELELQ

SEQ ID NO: 168754 - protein, 165 aa, Glycine max
  Clone ID: PAT_MRT3847_1233C.1.pep
MATLQASLLCRTSLPFSSHHPQLYKLHPHSFNFLSPCKMFQPRLHSSVSRSVASRSQSNPSGADSSVIENEATPSVVDAESSDPSIGEEKSESAKEEERLPIVALYEGARESVEKAFADFMTWLPLWQQERRLARLIVDAEANPNDVAKQTTLLIELNKHRFELN

SEQ ID NO: 168755 - protein, 69 aa, Glycine max
  Clone ID: PAT_MRT3847_123400C.1.pep
PSLSDTVGKLDPSHAKQQTASMMKTDSKPVCSESLWYRPYRLKFLGTFSEDPTSYLTRDLPGDYSWDTA

SEQ ID NO: 168756 - protein, 47 aa, Glycine max
  unsure (1)..(47): unsure at all Xaa locations
  Clone ID: PAT_MRT3847_123401C.1.pep
CGXXXXXFSFPXGFVLPRVXXLXXXLGFEXRLLLFPVFRCGXLWSRN

SEQ ID NO: 168757 - protein, 207 aa, Glycine max
  unsure (1)..(207): unsure at all Xaa locations
  Clone ID: PAT_MRT3847_123402C.1.pep
EVKKALSLFDEMKGLSLKPDSFTYCTAILCLVDLGEIKEACACHNRIIEMSCIPSVAAYSSLTKGLCQIGEIDEAMLLVRDCLGNVSDGPLEFKYSLTIIHACKSNVAEKVIDVLNEMIEQGCSLDNVIYCSIISGMCKHGTIEEARKVFSNLRERNFLTESNTIVYDELLIDHMKKKTADLVLSSLKVFGLESXLKSKGLLSCCQV

SEQ ID NO: 168758 - protein, 78 aa, Glycine max
  Clone ID: PAT_MRT3847_123403C.1.pep
RWGPVEECDVISNVGGKAMALRVRGCGRFGAYCSREPARCLLDSAEVEFSYDADTGLVSVDLPVPEQELYRWTLEIMV

SEQ ID NO: 168759 - protein, 57 aa, Glycine max
  Clone ID: PAT_MRT3847_123404C.1.pep
INNMNQCNWTKISQIHYFLHSLFLLNCSILRLHAAMMYLLFSNENLHEGRFFFLFLF

SEQ ID NO: 168760 - protein, 106 aa, Glycine max
  unsure (1)..(106): unsure at all Xaa locations
  Clone ID: PAT_MRT3847_123405C.1.pep
GTEKDXGGKNKKGAGXKSLRERGKKPXXRXXKEGXPXPXGRRGPHXKKGRHAQRXGTGXPGDEAXXPEDRAGEAREPAGNXARDNKKNRTTPRQGPPGGRNDEGGG

SEQ ID NO: 168761 - protein, 43 aa, Glycine max
  Clone ID: PAT_MRT3847_123406C.1.pep
SQLSVWNQMAMVFSLLAFDSKQFGVNSTRLLCPNSHSFNVFAL

SEQ ID NO: 168762 - protein, 159 aa, Glycine max
  Clone ID: PAT_MRT3847_123407C.1.pep
MQLNLYHVKGLDSSQTSTSPFSFSDMITKDEERVRFLHSRLTNKESASNSATTDKLGGPSLVSTPLKSGLSIGSGNYYVKIGVGTPAKYFSMIVDTGSSLSWLQCQPCVIYCHVQVDPIFTPSVSKTYKAFVLRHPLQCSSLKSSTLNAPGCFKATGAW

SEQ ID NO: 168763 - protein, 472 aa, Glycine max
  Clone ID: PAT_MRT3847_123408C.1.pep
MLQSLPSGVYKMSLFWFLVFSAHLALASSLVEFQDNDNPRQKQEGMQLNLYHVKGLDSSQTSTSPFSFSDMITKDEERVRFLHSRLTNKESASNSATTDKLGGPSLVSTPLKSGLSIGSGNYYVKIGVGTPAKYFSMIVDTGSSLSWLQCQPCVIYCHVQVDPIFTPSVSKTYKALSCSSSQCSSLKSSTLNAPGCSNATGACVYKASYGDTSFSIGYLSQDVLTLTPSAAPSSGFVYGCGQDNQGLFGRSAGIIGLANDKLSMLGQLSNKYGNAFSYCLPSSFSAQPNSSVSGFLSIGASSLSSSPYKFTPLVKNPKIPSLYFLGLTTITVAGKPLGVSASSYNVPTIIDSGTVITRLPVAIYNALKKSFVMIMSKKYAQAPGFSILDTCFKGSVKEMSTVPEIRIIFRGGAGLELKVHNSLVEIEKGTTCLAIAASSNPISIIGNYQQQTFTVAYDVANSKIGFAPGGCQ

SEQ ID NO: 168764 - protein, 121 aa, Glycine max
  Clone ID: PAT_MRT3847_123409C.1.pep
FLRKIYLILYLVDNNWLQTDKKYVYRNPPQPQLLLRSHHKPPSTETEAEPKSREESENGNYDWCEPFMPQGFLQRIRLTAKRACCKVLFVMHVHLIVHRINFSYGKDFKVSNDLHLFQLSA

SEQ ID NO: 168765 - protein, 119 aa, Glycine max
  Clone ID: PAT_MRT3847_12340C.1.pep
LSPLILFPRGFSPVAGFFFFWKACPPPLFFLWEDFSVSPPFFFFLGAPGFFFFSFPPLLSPLGLLVSPRFLSSDYCLLRSANINVDCKYYPVITGLRSLFTDINTKRPQKKKYKIYGNI

SEQ ID NO: 168766 - protein, 97 aa, Glycine max
  Clone ID: PAT_MRT3847_123410C.1.pep
ANKFDRRTGSNASANAAIIDDDLDRSYANTEMIDENMVTTTAANESRAYTMESSTGAYSERSYAWQDLARQKTENFISDDEQLECEREDLYKCDSNV

SEQ ID NO: 168767 - protein, 67 aa, Glycine max
  Clone ID: PAT_MRT3847_123411C.1.pep
SALLATLNRVQLNWVRQANKVEKTNQRTKMQVFFRQVAQYSSLGGISFSTTMFWRTEKLVCGLWHLK

SEQ ID NO: 168768 - protein, 108 aa, Glycine max
  unsure (1)..(108): unsure at all Xaa locations
  Clone ID: PAT_MRT3847_123412C.1.pep
MVSLAAVHHRRRFLVPSWLHPLTVLKSKAGSPTWMTYNDMTFIARRRRREQSMHVCEPNHTKKIKTHDYLPDRPDAQAAQEVDYLAWIGXIPRLQFHSKHCYADHEHN

SEQ ID NO: 168769 - protein, 27 aa, Glycine max
  Clone ID: PAT_MRT3847_123413C.1.pep
NFYLPNIPLRTPRTKQLSPTINTNFYT

SEQ ID NO: 168770 - protein, 119 aa, Glycine max
  unsure (1)..(119): unsure at all Xaa locations
  Clone ID: PAT_MRT3847_123414C.1.pep
DGSQHLIAVGEIQFQRTERLVIAKHLFGGGQWLDPVVRQRRIERRCGCPVEENHTFVGKAPIADRCAQVVFLVQPELVVNRAEGQGFVEVGLEGELLDIFVAVEQQVVADHXPDQPRAP

SEQ ID NO: 168771 - protein, 36 aa, Glycine max
  unsure (1)..(36): unsure at all Xaa locations
  Clone ID: PAT_MRT3847_123415C.1.pep
RHXISLXXXXASVIMSLXYYCNCDLISYSSISNWGN

SEQ ID NO: 168772 - protein, 36 aa, Glycine max
  Clone ID: PAT_MRT3847_123416C.1.pep
HTSRQNTVSCWLSRSIVGDSLSLSLNMCEADREKDS

SEQ ID NO: 168773 - protein, 51 aa, Glycine max
  Clone ID: PAT_MRT3847_123417C.1.pep
MGRIMEKPSQDLFQQQQQALKCPRCDSSNTKFCYYNNYSLSHPRHFCKACK

SEQ ID NO: 168774 - protein, 53 aa, Glycine max
  Clone ID: PAT_MRT3847_123418C.1.pep
CGYFHIAGASPPRRSRFISFVAFPRRSTARGESPPLIHSTPRIRKLGYDSVSH

SEQ ID NO: 168775 - protein, 55 aa, Glycine max
  Clone ID: PAT_MRT3847_123419C.1.pep
RTRSAPRNMFDWFTIGYGHLGTYRVLRLRGETTNIWSLFILHMWLLLGKLMVRCL

SEQ ID NO: 168776 - protein, 63 aa, Glycine max
  unsure (1)..(63): unsure at all Xaa locations
  Clone ID: PAT_MRT3847_12341C.1.pep
IFVSFFSLLFDSYLKKQNNEIESFTYKTHCRATKTISHIKHTHTQKXXCNSHXXVSCYQQVPM

SEQ ID NO: 168777 - protein, 82 aa, Glycine max
  unsure (1)..(82): unsure at all Xaa locations
  Clone ID: PAT_MRT3847_123420C.1.pep
DISNNSLSGKIPPSLARSSRIFRINLSFNSLSGSIPSSLTMSXSLTILALQHNNLSGFIPDSWGGTGKKKASQLQVLTLDHN

SEQ ID NO: 168778 - protein, 63 aa, Glycine max
  Clone ID: PAT_MRT3847_123421C.1.pep
AADLIFYCLRAGTGTANTTTGGGRMAAMRPQLTITRIRPVVMAGATGMYGLIKNELMETVINR

SEQ ID NO: 168779 - protein, 55 aa, Glycine max
  Clone ID: PAT_MRT3847_123422C.1.pep
LSKYQFELIIWLLHSSHLSEMQISTFKHFFYTSIRTHLAILRGKFVNNLHPSHHP

SEQ ID NO: 168780 - protein, 34 aa, Glycine max
  Clone ID: PAT_MRT3847_123423C.1.pep
VIVKATNDLIHLRHCVEASVPPLASYMASKPTCH

SEQ ID NO: 168781 - protein, 612 aa, Glycine max
  unsure (1)..(612): unsure at all Xaa locations
  Clone ID: PAT_MRT3847_123424C.1.pep
PQGAWFQDGGFETAGEGVVIGFVDTGIDPTHPSFDDNKYEKPYPVPAHFSGICEVTRDFPSGSCNRKLVGARHFAASAITRGIFNSTQDYASPFDGDGHGTHTASVAAGNHGIPVIVAGHHFGNASGMAPRSHIAVYKALYKSFGGFAADVVAAIDQAAQDGVDIISLSITPNRRPPGVATFFNPIDMALLSAVKQGIFVVQAAGNTGPSPTSMFSFSPWIYTVGAASHDRVYSNSIFLGNNVTIPGVGLAPGTDESKLYKLIHAHHALSNDTTVADDMYVGECQDAYKFNKSLIKGNLLMCSYSIRFVLGLSTIKQASETAKNLSAAGVVFYMDPFVIGFQLNPVPMKMPGIIIAFTNDSKVLMHSSRFGSRIDAVSKKIVKFGAVATICGGLKPNYSNVAPKVMYYSARGPDPEDSLPHEADILKPNLLAPGNFIWAAWSSVGTDSVEFLGENFALMSGTSMAAPHVAGLAALIRQKFPNFSPAAIGSALSTTASLYDKSGGPIMAQRSYASPDQNQPPATPFDMGSGFVNASGALNPGLVFDSGYDDYMSFLCGINGSAPVVLNYTGQNCALYNXTVYGPDLNLPSITISKLNRSRIVQRTMQNIAQDE

SEQ ID NO: 168782 - protein, 96 aa, Glycine max
  unsure (1)..(96): unsure at all Xaa locations
  Clone ID: PAT_MRT3847_123425C.1.pep
LRPHNHSPSKADIEPVEPAGTGPPANALDSMSSPDQGIRRLCYGTLDKLXNATECQKKKDVLGPRLLINPAQKSLEEPWQRIPPEIALFAGEASGE

SEQ ID NO: 168783 - protein, 75 aa, Glycine max
  Clone ID: PAT_MRT3847_123426C.1.pep
LLCLPYLANPPPFFGAGFFHRVTEPPPGFYSRVFSVYNIVATRARVGNQTVFCLPLFFGGSLLKAKRKNKEQIKN

SEQ ID NO: 168784 - protein, 98 aa, Glycine max
  unsure (1)..(98): unsure at all Xaa locations
  Clone ID: PAT_MRT3847_123427C.1.pep
PIINSPMVQYERALSPSPKPRATVWHKVSAQVKKAVRXAKPHGEAAMHRLFPDTSPHAHGIIMRTISKSLLXSHAPALSAYWKEVGSNKVEGSPPRCM

SEQ ID NO: 168785 - protein, 81 aa, Glycine max
  unsure (1)..(81): unsure at all Xaa locations
  Clone ID: PAT_MRT3847_123428C.1.pep
VFAXPXSXXRGARXXLFLAXLVVVXXXRXXXPLVSXLLCXXLFSXXXXSLXVLWGXLXXXXXAXLGRXXXXXXXXPXLXXP

SEQ ID NO: 168786 - protein, 40 aa, Glycine max
  unsure (1)..(40): unsure at all Xaa locations
  Clone ID: PAT_MRT3847_123429C.1.pep
QIVWKSTXRIGCARVACDDEDVFMTCNYDPVGNYVGERPY

SEQ ID NO: 168787 - protein, 141 aa, Glycine max
  unsure (1)..(141): unsure at all Xaa locations
  Clone ID: PAT_MRT3847_12342C.1.pep
TIYCVTTHCIYGTTVHELIIGLXGCKTTAGLDPDDWVEHLMYYWIHAPSMSWSVPGTLIIEPTVTDSNAELDRYXDAFICIRLEIAVIERRNADINSTVLNSAPYTPSLFMADAWTKPYSRECADFPATWLRASKFWPTTG

SEQ ID NO: 168788 - protein, 111 aa, Glycine max
  Clone ID: PAT_MRT3847_123430C.1.pep
IKMAGFMKNPDSLTACGLKRMNRQVATQLSWADVWRHRTTNFLAKSMGLLFLGIIGNCEGAYHGRVVYSSWHLEELYTFGRLRKNNLQHRESLLPFETNETKEHYPNMVGV

SEQ ID NO: 168789 - protein, 78 aa, Glycine max
  Clone ID: PAT_MRT3847_123431C.1.pep
KKVFKKRLFPPFQEFYAPQGVFPAPHPGEFHPWGALPPKKGPNPFWGGVRGVPLFNSKCCQGGKVPPPAIKRGPPPPP

SEQ ID NO: 168790 - protein, 62 aa, Glycine max
  unsure (1)..(62): unsure at all Xaa locations
  Clone ID: PAT_MRT3847_123432C.1.pep
FXVVHASMCTGPARSHSDKATLDPLVXXLRLSPXLRQLNSWPASFANVDHLWCXQDRRSSPS

SEQ ID NO: 168791 - protein, 66 aa, Glycine max
  Clone ID: PAT_MRT3847_123433C.1.pep
YLISSGSAKLEDSSVTIYIYNKFFMPIDFAFLFIKGKDNDNGHFTTNHLLLLIKPYSSFLIFKKIT

SEQ ID NO: 168792 - protein, 48 aa, Glycine max
  Clone ID: PAT_MRT3847_123434C.1.pep
LTPSDCAAVYSTPVEDNIPISNDMAHIAVSPPQVLILNMNMQKIQRIL

SEQ ID NO: 168793 - protein, 353 aa, Glycine max
  Clone ID: PAT_MRT3847_123435C.1.pep
TIEQPFNNTTSSDLNVVSVSQAAQPSDASLQPRAAFLSSASVSNGKNEGLDFGISHEDEMEEEAPETSNNTTELSLGSFGGFGISSSPNPSMPKTNPFGGSFNNVGTSLSCSTVTFSVPSGELFKPASFNFSSPQSSSPTQTTNSGAFSGGFNAVAAVPAQAPGGFGQPAQIGSGQQVLGSVLGGFGQSRQLGSGFAAPSGFGGGFAGSSSPSGFSNTAIGGGFAGIASTGRGFGSVASTGSGGFSGIASGGGFGGGAAPGGGFGGAAAPGSGFGAAAAPGGGFGAAATPGGGFAGAAAPGVGFGAASSTGGFAGAGSGGGFGAFSSQGSGGFGAFGSGGGSKPPELFTQMRK

SEQ ID NO: 168794 - protein, 338 aa, Glycine max
  Clone ID: PAT_MRT3847_123436C.1.pep
MDARIENVHAGSSADGMTRGLGSEKKRHSVSGFTPQHANSQATEKIRMSERQILGINRTKIEEIWLEVLERIQITGLKEFLFKEGKLISVSFGAAPTVQLMFSSQLTKSTAEKFRGHILQAFESVLGSSITIEIRCELNKDAASAVQQPLTLPSTNDSSSQIRDFNGVGTLAHPSVTDSVEKRRGEIVEEAASQVEHMNSEQQVDAHGTSYKSLEGTSIGQSSASQKMPIVKSHLDERKLMEQGQSRSLVRSKVSLAHVIQQAEGQRSGWSKRKAVSIAEKLEQENLRLEPRSRSLICWKASRVTRRKLSRLKIRSRKPRALLNLVSCGKCLSTKSPR

SEQ ID NO: 168795 - protein, 96 aa, Glycine max
  unsure (1)..(96): unsure at all Xaa locations
  Clone ID: PAT_MRT3847_123437C.1.pep
GQAYQVISDPEKKELYDQHGEDVLKXGMWGGGSLHTPFDIFESFFGGAXLAVGGXPRRRTQNHGEHVAHSLHVLLXDAHNGTTTKLSLFTTILCPN

SEQ ID NO: 168796 - protein, 51 aa, Glycine max
  Clone ID: PAT_MRT3847_123438C.1.pep
FGGLAAYYNHRFLLRPIGKPLLVGGPPPPPPPPPPPPPQRRRTSYSDDGKP

SEQ ID NO: 168797 - protein, 123 aa, Glycine max
  unsure (1)..(123): unsure at all Xaa locations
  Clone ID: PAT_MRT3847_123439C.1.pep
LDADSLSTTGDLVTLDNACGMGILTVNLYDALPSHAKDRIQHTCGDISPSMIDAVRSRIDENGWKGASAKVIDAQNMDVPSNTFTHXLTNFGFVGIADPRRVLSEWRRVLRPAGVCGFTIWES

SEQ ID NO: 168798 - protein, 50 aa, Glycine max
  Clone ID: PAT_MRT3847_12343C.1.pep
FNWFSLQCTCGKQTPKYTYNYSHIHIEEHTYFLVNIFDAKLQKLHFHEGN

SEQ ID NO: 168799 - protein, 70 aa, Glycine max
  Clone ID: PAT_MRT3847_123440C.1.pep
SSVARSSRADPDCLNQSIRHQISLCSVENKLNECSFASSTPILFFRLFLIDRIYTKLTYQAKLTKHASSV

SEQ ID NO: 168800 - protein, 83 aa, Glycine max
  unsure (1)..(83): unsure at all Xaa locations
  Clone ID: PAT_MRT3847_123441C.1.pep
RNYVDLLKXNXXKXKINISNFKDPFSPCFCYALKFEMFIFHLSRCAVYFNFCGYAFADNQMXXXXPSFNXAGXATXLQLNQTR

SEQ ID NO: 168801 - protein, 62 aa, Glycine max
  Clone ID: PAT_MRT3847_123442C.1.pep
ARGPYSLEHSSAPYTIGCARQVHPVNQGDLIQHDFMGSLHFVLDFGGPGIWLTGALKCKLTG

SEQ ID NO: 168802 - protein, 374 aa, Glycine max
  unsure (1)..(374): unsure at all Xaa locations
  Clone ID: PAT_MRT3847_123443C.1.pep
KMVSINLFRTFISPPRENKVLEAFDVDEEEPSMDPAWPYLQIVYELLLRFVMSTETDAKLAKRYIDHSFVLRLLDLFDSEDPRERDYLKTVLHRVYGKFMVHRPFIRKAINNIFYRFIFETEKHNGIAELLEILGSIINGFALPLKEEHKLFLVRALIPLHKPKCIPMYHQQLSYCITQFVEKDCKLADTVIRGLLKYWPITNSSKEIMFIGELDEVLEATQPAEFQRCMVPLFRQNXRGSPSSHFQVAERALFLWNNDHIENLIKQNYKIILPIVLPALENNARNHWNQAVQSLTINVRKIFADTDPEFYEEYMIKVRENEAQEKDMKSKREARWKRLEDMGGMKATTNEAVLVSPRTASHTPSGKASRAQLE

SEQ ID NO: 168803 - protein, 125 aa, Glycine max
  unsure (1)..(125): unsure at all Xaa locations
  Clone ID: PAT_MRT3847_123444C.1.pep
EGIPPMRSGVFNPPGKIQCRLISKTSIFNDVGLFRLAFPSDALLRGWPVGRHIFLWATVAGKLCLRASTPPGRVYEVGSLALVVKVYLKGGPPKFPTGGIMFNHLDFFPIGXSALDVKGPLGPIE

SEQ ID NO: 168804 - protein, 157 aa, Glycine max
  unsure (1)..(157): unsure at all Xaa locations
  Clone ID: PAT_MRT3847_123445C.1.pep
LSGKETHALRLISFVFTSTNLTGVLSPSIGSLKELKEPSLSXQTTLGRTPPQIFDCKKAHNTRPRQPPSFFRPNPPQVLPSHKRLRVAXHILHHRLFRXLNFLKSFPNLETLSVADNLFPGXVPPSVRCFRNPPQFNFSGNRFLEPSLQSSSPKPIL

SEQ ID NO: 168805 - protein, 43 aa, Glycine max
  Clone ID: PAT_MRT3847_123446C.1.pep
MISYGVSEHYLLPTFQPSMHLWCLSTVAAVMSFTYSFIGLGLG

SEQ ID NO: 168806 - protein, 70 aa, Glycine max
  Clone ID: PAT_MRT3847_123447C.1.pep
PGYEHPHCFPHLRSFQDYRMIMQTLGVRSSQLIYNGNRLLSDLLKTRNPLRDLECVFPSAGSIVQYKKGN

SEQ ID NO: 168807 - protein, 101 aa, Glycine max
  Clone ID: PAT_MRT3847_123448C.1.pep
IALYPLDAKIGLGLGVVESKSVNLTQTVTQMQTLGLLVAPVLGFYQRFLRFSLRFLLLMFMDFPSTFKFITQASELGCGFLLLGYFSRLFNLLGLLLIFFF

SEQ ID NO: 168808 - protein, 136 aa, Glycine max
  unsure (1)..(136): unsure at all Xaa locations
  Clone ID: PAT_MRT3847_123449C.1.pep
NKITSSIVTPKIQLTGRPFYRVQIWEPPGATQIXFIGAPTSFARGRINQEAPGESPGQPQLSLIGEWPPPCSGAISEEAVAVTLSKTWSLVSGIGPPPCTGLFSFVAGLVPSPGQALFAGLLLRGLFSAFRYFFPK

SEQ ID NO: 168809 - protein, 100 aa, Glycine max
  unsure (1)..(100): unsure at all Xaa locations
  Clone ID: PAT_MRT3847_12344C.1.pep
IGQSPYGICKTGEVKIWGGNSNPKLFVGKKKEKEIRVYRILQHLKPPPPRNLSAAGSLENVDKKLGKLHEKKLSHVHIKKNXGEKKGKKKKKKPKKKKGG

SEQ ID NO: 168810 - protein, 293 aa, Glycine max
  Clone ID: PAT_MRT3847_123450C.1.pep
METHHHHHHFQCCHGSKFLSHPLPLPPSSWRPLLLARPFSPSLVSCSSNKRWDSNAETFRPRNFTPNDVRKGQEQEQELKEGFGKKRRWWSDEDREFEDKEEEVVEETSSGILEDAIDSVWFLQIFKSYGWTLPVILMSWLISSGPKAFLMALILPLGQSALALAFEKLWGPSERKPKRKYRMRRKPRVRNYTRVEEEPEEKQKTKKGYQSWVVEDKGSVDTGSREAAPSFGGWDDLERSRPATKSSRGMDGSRRTPMEGGRLSRRQRKSDTPLLLRVLFAIFPFLGTWTKML

SEQ ID NO: 168811 - protein, 59 aa, Glycine max
  Clone ID: PAT_MRT3847_123451C.1.pep
KGGAPVETWNPKNNVSPSKKNQDLILFAPWRGPKIYLIMKNSLPCFNTHFFGGFQALKQ

SEQ ID NO: 168812 - protein, 51 aa, Glycine max
  Clone ID: PAT_MRT3847_123452C.1.pep
IYARQICCKCLSRSSVGGANSNKSKPNSKVWKAPGLTLGYHFFFKGSKFQV

SEQ ID NO: 168813 - protein, 41 aa, Glycine max
  Clone ID: PAT_MRT3847_123453C.1.pep
FPHFCYALFISPPMIVSWAYGSTAFLVYLSAHIMHIWLRFS

SEQ ID NO: 168814 - protein, 170 aa, Glycine max
  unsure (1)..(170): unsure at all Xaa locations
  Clone ID: PAT_MRT3847_123454C.1.pep
KKPKTGPVLTILKNSPLKKNLFLGFGKRGKKKQGPPPKGKKKKGGKKTLVYPPLNQNGGGPPQKNRPQGPRGLGKKGKNPGQKTPPPRGNXKGPIPGLGPPLLLKGALFWAEKGPPRGLANWGFREKNTPGQMGPKRGPQKPKPPGVQPKGPVGGQPRGQGPPGLKTRFF

SEQ ID NO: 168815 - protein, 84 aa, Glycine max
  unsure (1)..(84): unsure at all Xaa locations
  Clone ID: PAT_MRT3847_123455C.1.pep
ETINIVVSTQILDLDNRITLRLYYIISHNILKHAHIFRAXTNIADLYIMLLKFSSLVFYTIPCHRDYISYSHFIKETFINKLIY

SEQ ID NO: 168816 - protein, 299 aa, Glycine max
  unsure (1)..(299): unsure at all Xaa locations
  Clone ID: PAT_MRT3847_123456C.1.pep
HADQRLNDVVGSAYYVAPEVLHRSYSVEGDLWXSIGVISYILLCGSRPFWARTESGIFRSVLRANPNFDDSPWPSISPEAKDFVKRLLNKDHRKRMTAAQALAHPWLRNEKNAIPLDILIYKLVKSYVRASPLRRAALKSLAKALNEDELIYLRAQFNLLEPKDGCISLENFRVALMKNTTDAMKESRVPEILNLMEPLSYKKMDFEEFCAAAISVYQLEVHQEWDRIATTAFEYFEETGNRVISVEELAQEMNLVPSAYSLMGDWIRKSDGKLSLVGYTKFLHGVTMRSSNTRHRQLV

SEQ ID NO: 168817 - protein, 108 aa, Glycine max
  unsure (1)..(108): unsure at all Xaa locations
  Clone ID: PAT_MRT3847_123457C.1.pep
WSPAVPVXIPGRPRVRWVILGLLPFMIHILGFNSPMICIFTFKQRFGGTWALKGNNITLLLHCFRWASIVLTTLLIRSATVPLLINQLKATSKLTVCCATCIFITFSF

SEQ ID NO: 168818 - protein, 100 aa, Glycine max
  Clone ID: PAT_MRT3847_123458C.1.pep
FLQPHTRFCYMHACCVLERKLFQFGQLEYCFISCMLIAYGSFSVVLFIFTTIVPKVTLLCPFKGSNNRIHRVVLKNKGVIFIFTYVATLLNFNCIYFLFN

SEQ ID NO: 168819 - protein, 44 aa, Glycine max
  Clone ID: PAT_MRT3847_123459C.1.pep
FIFDITPLFYHKITSKLVQNKVKSQKHINMKTPIFSFSLFFSCL

SEQ ID NO: 168820 - protein, 52 aa, Glycine max
  Clone ID: PAT_MRT3847_12345C.1.pep
FWVVEFNGFLSEFFGAAFMCRKLNEKDYFVKNWSMMAFHGFTYISRSLSSKN

SEQ ID NO: 168821 - protein, 94 aa, Glycine max
  Clone ID: PAT_MRT3847_123460C.1.pep
LRVREILINREHRLPYLKTGNKSNRFLISRISQFLPTCFGHDFIRGKKITLCAGHRLRESFSFTLLDYLLNTLLFDIRLRVRLKLFLSLSQFFV

SEQ ID NO: 168822 - protein, 57 aa, Glycine max
  Clone ID: PAT_MRT3847_123461C.1.pep
SSRLAETGWRKKYYSRSSTEREGYILCRGQGGENITLDQIKNQMVADVKKIGRVFLI

SEQ ID NO: 168823 - protein, 76 aa, Glycine max
  Clone ID: PAT_MRT3847_123462C.1.pep
LFLLLRKMHVVRSHSPLEKIAKYLSILRISHEHRFWLSLARSDIPLTCGRRRPIRISMISHVVKQCLHVPGGAKKV

SEQ ID NO: 168824 - protein, 111 aa, Glycine max
  Clone ID: PAT_MRT3847_123463C.1.pep
VNPLSLASQRHFSKWVDKPEFIFTLVYKITRDYVDSMDELLQPLVDEAKLLGYSCREEWISAMVTSLTTYLAKEIFPSYISQLDEESVIGIQSSARISWLHLIDLTIAFDK

SEQ ID NO: 168825 - protein, 256 aa, Glycine max
  unsure (1)..(256): unsure at all Xaa locations
  Clone ID: PAT_MRT3847_123464C.1.pep
MMHLLKILRKLIMSRLELFIALNILAFLRIEKNSQDPEVFRQRNQKMLKVWQXEKEQKLSTFLKYSLQPFIVCREDEFTAWAKSEARSLSKAAFGXTMLHKIGYNYTRKAAKELGKDIRYMNVPFLTEWVRGKGHCIKSQVTAASGAVSLIQIQEELKKLNQGENKEESIVKAIEDKKDAMINSLWQINVIDIESTLSHVCQTVLKDPSASKDVLKSRAKALKKLGTIFQGAKIAYNRENSLRRESGKTPDAASSS

SEQ ID NO: 168826 - protein, 109 aa, Glycine max
  unsure (1)..(109): unsure at all Xaa locations
  Clone ID: PAT_MRT3847_123465C.1.pep
VSLIQIQEELKKLNXGETKEXSIVKAIEDKKDAMINSLWQINVIDIESTLSRVCQAVLKDPSASKDVLKSRAKALKKLGTIFQGAKSAYNRENSLRKESDKTSDAASSS

SEQ ID NO: 168827 - protein, 252 aa, Glycine max
  unsure (1)..(252): unsure at all Xaa locations
  Clone ID: PAT_MRT3847_123466C.1.pep
MLDMDGFGGGGGVGGAPNAENLRELGNVSSEGAVFDASQYAFFGKEAVQEVELGGLEDDGWVPIVESNEEECSGHRRLEVDVRSLSDIDDLTTTFLKLNKAVSGPRSPGVIGERGSRENSXASEWSQRDDIPYWFDQHAYDPEGQGFQDGKRWSSHPHSSLTQLHDSRPLYRTSSYPEQQRQLQHQLQHCSSEPVSNWFDQHFNDSETTEDGKRWSSQPHSSIAHLQESKPLYRTSSYPDKRQELTRSSEPI

SEQ ID NO: 168828 - protein, 66 aa, Glycine max
  Clone ID: PAT_MRT3847_123467C.1.pep
FFFLIASSFFFFLLKMGKLVELKSIWPIIQPSKAIHGIERDCAIYHEKRNIEMPQIYTGSNLIFCF

SEQ ID NO: 168829 - protein, 79 aa, Glycine max
  Clone ID: PAT_MRT3847_123468C.1.pep
MRFRFRERGGSGQGRRWRPPATSTSSARSVSSPESPPCARAAPCRATPPSPSATLPEPRSAPPPPPPAPAAPSPPPPPT

SEQ ID NO: 168830 - protein, 61 aa, Glycine max
  unsure (1)..(61): unsure at all Xaa locations
  Clone ID: PAT_MRT3847_123469C.1.pep
FILDRLVQNALDGYLVSIFAYGQTGSGXTYTTMGMPAHAKKSGXIPRSLNQILYTHHSQPP

SEQ ID NO: 168831 - protein, 96 aa, Glycine max
  unsure (1)..(96): unsure at all Xaa locations
  Clone ID: PAT_MRT3847_12346C.1.pep
SYLGRRSPVYECTEVQIKAAKGFLSVLRSYLDSLCYNXRSHTITNVQSNDDKVSLLLKESFIESFPYRDQPFMKLFVDTQLFSVHTDLVLSFLQKE

SEQ ID NO: 168832 - protein, 177 aa, Glycine max
  Clone ID: PAT_MRT3847_123470C.1.pep
GEAGVAAHGVFEIGLEGRGISINSHHTISKGKMSADLERSTSRIPQLDGPIPYDDDDVLSTPNIYNYGEVFSEDYNISNTPAPPEVPASTPALLVQNEVGNDFDDDDDDEPPLNEEDDDDLDDMEQGEDQNTHHLVLAQFDKVTRTKSRWKCTLKDGIMHINNKDILFNKATGEFEF

SEQ ID NO: 168833 - protein, 51 aa, Glycine max
  Clone ID: PAT_MRT3847_123471C.1.pep
GFGTVSSICIMNKGHRMHLGQIRIWSGRIDLGCIDPDRMSGSDQHQPWWLH

SEQ ID NO: 168834 - protein, 73 aa, Glycine max
  unsure (1)..(73): unsure at all Xaa locations
  Clone ID: PAT_MRT3847_123472C.1.pep
QTRILNMRDAELLAAKEEISSLEKEFSSYKVRAHALLQKKDAELAAAXDSEQLKALKETLKGYLINILEKNLV

SEQ ID NO: 168835 - protein, 314 aa, Glycine max
  unsure (1)..(314): unsure at all Xaa locations
  Clone ID: PAT_MRT3847_123473C.1.pep
MSFYIGREASKLWKRICAETTTEVNLLAENWKYLLAGLVCQYIHGLAARGVHYLHRPVPTLQDVGFFLLPELGQDKAYISETLFAMIFISFVLWTFHPFILNNRKIYTALIWCRVLAFLVASQALRIVTFYATQLPGPNYHCREGSKLATLPRPDSAFEVLLINFPRGVIYGCGDLIFSSHMIFTLVFVNTYHRYGTRRXIKQLGWTLAVGQSLLIIASRKHYTVDVVVAWYTVNLVVFFVEKKLKELPDRTNAAAALLPLSTKDNKNRTKEENHKLLNGNSGDPADWRQRTQANGKILEDGHAHHVDTAMNGA

SEQ ID NO: 168836 - protein, 55 aa, Glycine max
  Clone ID: PAT_MRT3847_123474C.1.pep
FHNPHITSMLPIHCTSHLNNISHPHLNKHIPYHHHHSYDTNPSTSIKNLTTLTSI

SEQ ID NO: 168837 - protein, 205 aa, Glycine max
  unsure (1)..(205): unsure at all Xaa locations
  Clone ID: PAT_MRT3847_123475C.1.pep
MSFYIGREASKLWKRICAETTTEVNLLAENWKYLLAGLVCQYIHGLAARGVHYLHRPGPTLQDVGFFLLPVCNCHSRFSLLEKPVHRMIRMPLKFLILVLLLQELGQDKAYISETLFAMIFISFVLWTFHPFILKNRKIYTVLIWCRVLAFLVASQVLRIITFYSTQLSGPNYHCREGSKLATLPRPDTVLXEVLLINFPRGVGY

SEQ ID NO: 168838 - protein, 116 aa, Glycine max
  Clone ID: PAT_MRT3847_123476C.1.pep
MAAKILANLIVMGGGILARAVVQAYRQALTNASKNGVAQETIQNTIRRASKVMTEQEARQILGVTEETPWEEIIKKYDNLFENNAKNGSFYLQSKVHRAKECLEAVQQGKSQGTPS

SEQ ID NO: 168839 - protein, 116 aa, Glycine max
  Clone ID: PAT_MRT3847_123477C.1.pep
MAAKILANLIVMGGGILARAVVQAYRQALTNASKNGVAQETIQNTMRRASKVMTEQEARQILGVTEETPWEEIIKKYDNLFENNAKNGSFYLQSKVHRAKECLEAVQQGKSQGTPS

SEQ ID NO: 168840 - protein, 49 aa, Glycine max
  unsure (1)..(49): unsure at all Xaa locations
  Clone ID: PAT_MRT3847_123478C.1.pep
AHSQGKITVFLTRAGPSPVAALAVPLAVDNXSVSSNATARMLTCLLDSC

SEQ ID NO: 168841 - protein, 320 aa, Glycine max
  unsure (1)..(320): unsure at all Xaa locations
  Clone ID: PAT_MRT3847_123479C.1.pep
MKVSILNFGSSTNQFHDHNKHACNEVTNIINPVNNEGKYSQLCDKSGRYDRLLKLSQDDLETVIRRVSRDSCLDPQKKSYIIQNLLMSRWIIRQQISSTEANIKNDELEFPGKHPSYRDPHKLIXSCNHYKRNCKLFAPXCNQLHTYIHMANEXSDHSVDRKSITXMMCMKCLVIQPISATCSTISCNLSMAKYYLSRCKLFDDEREKHLEDNCPICHEYIFTSCSPVKALPCGHVMHSTCFQEYTCFNYTCPICSKSLGDMQVYFRMLDALLAEERISDEISSQTQVLLCNDCEKKGETPFHWLYHKCPSCGSYNTRVL

SEQ ID NO: 168842 - protein, 89 aa, Glycine max
  unsure (1)..(89): unsure at all Xaa locations
  Clone ID: PAT_MRT3847_12347C.1.pep
PGTTPAVPRKYQGGYKSPWGVKNKIDFLSXSYTRHAEDVRQAREFLSKIGERSQTHISAEIEHVPASTHFDEILQQADGIILSRGHLGY

SEQ ID NO: 168843 - protein, 102 aa, Glycine max
  unsure (1)..(102): unsure at all Xaa locations
  Clone ID: PAT_MRT3847_123480C.1.pep
MSESNAIANGLAGAGGGIIAQIITYPLQTVNTRQQTERTLKRNKQSLPSNSTTAPGTLLQIFQVIGTEGWGGLYSGLKPSLLGTAASQXYYYFYQVFKTHTP

SEQ ID NO: 168844 - protein, 162 aa, Glycine max
  Clone ID: PAT_MRT3847_123481C.1.pep
MKKKTIDDVWNLFIEWSKHLHPTEVIKRIEKYFSELLGGGSCLVTQRKISSLLKPELLRKSIELKKNGLELARNYYDKYKHHPPAVASFFKEMIQIERNQNPIDYKRIVNIYEDLISYFGENDHQIWLDYCKFTLENKKPTTVGTIHNRACKTLIASEVSRF

SEQ ID NO: 168845 - protein, 108 aa, Glycine max
  unsure (1)..(108): unsure at all Xaa locations
  Clone ID: PAT_MRT3847_123482C.1.pep
VLTAHIFLYGGAYLTIPRLDEPDSEKAKWHGNTALDASLNAQCMDHMGVLTADAMIMVFILELGLLTAGLNSITMQLQEXSVFSTFSLGTITHYCGRSILHGGALNRA

SEQ ID NO: 168846 - protein, 162 aa, Glycine max
  Clone ID: PAT_MRT3847_123483C.1.pep
MISLRRSVNKIPAKSKRFKCRLVKFEELPEYLKDSEFILDYYRSEWPVKEALWSIFAWHNETLNIWTHIGGFLIFAVLAAMSTTSELWNLLRSSTALGLSTTTAAEMNGSNSDAFPVMFYKIYFKFIFKFLFKRTVIVIVNKLPLLVFIEGLVRLLSGRSVA

SEQ ID NO: 168847 - protein, 79 aa, Glycine max
  Clone ID: PAT_MRT3847_123484C.1.pep
NRGFRLVELFSSNYTCCNRSNAEKYKECRSWSASVLKSVECILQDSYIKGLSFCSEGVILSQSVMPRLHKYFSLILVIF

SEQ ID NO: 168848 - protein, 95 aa, Glycine max
  Clone ID: PAT_MRT3847_123485C.1.pep
LPLPVFLVFPSLFLMWGPSLVFRSFISTNLICIMKGGIVCSPLLGNYFGMCSSLVLPLLPPLFSRVFLVVSGFNLVVSNSSSFSSLVQIKKKKKK

SEQ ID NO: 168849 - protein, 66 aa, Glycine max
  unsure (1)..(66): unsure at all Xaa locations
  Clone ID: PAT_MRT3847_123486C.1.pep
TRTGRAHVNKHLLSYITGNHLKHADVMGLDXLVWDHRTLFPPNKRGEPTAMINDCKDPVSLASRGL

SEQ ID NO: 168850 - protein, 64 aa, Glycine max
  unsure (1)..(64): unsure at all Xaa locations
  Clone ID: PAT_MRT3847_123487C.1.pep
LENMFNCTCGXYSVREGINGFXYAPTYENQDGDNMLVGYVPWYLFVSIGNTLMMTIGIKPKGYG

SEQ ID NO: 168851 - protein, 90 aa, Glycine max
  unsure (1)..(90): unsure at all Xaa locations
  Clone ID: PAT_MRT3847_123488C.1.pep
AKKEVIWSMMGRQTXDQGXCSKFKGGIPHWCKKDPTGGDLLPGTPYHQPIANWFKSGVLKXWCQDQPKAVLTFKDSVDXSGPTYSSVKVP

SEQ ID NO: 168852 - protein, 81 aa, Glycine max
  Clone ID: PAT_MRT3847_123489C.1.pep
KKNSGGWVKKESWVKKKMGFFWEPWGFFFREIVFWKKFLSPPLPLQHLFPKTGFLIWGGKKPLQKVGLKGCFWERPSYFFG

SEQ ID NO: 168853 - protein, 132 aa, Glycine max
  unsure (1)..(132): unsure at all Xaa locations
  Clone ID: PAT_MRT3847_12348C.1.pep
LQGLLAVARLIDCDLRRKTKADLFNHLKDLKADLALLRVANDTGGAPNMLSTNKAKMVNIGHVHTVISDKHNAAXRDAYNNNKYLTLDIRPNKTKDHFVTKLTKHPSSLXTREGNDERIYFPLRKYAIKVYL

SEQ ID NO: 168854 - protein, 181 aa, Glycine max
  unsure (1)..(181): unsure at all Xaa locations
  Clone ID: PAT_MRT3847_123490C.1.pep
LEGIEKPLFGCDPHIHGRKSKKHGRCTLLVRSSNKGSNSESDGFVPYMGKRTVLAWLIDSGTVELSQKVQYRRRKKVMLEGWITRDGIHCGCCSKILTVSKFELHAGSKLPQPYQNIYLESGVSLLQCQIDAWNRQEHAEKIGFHSVDIDGNDPNDDTCGICGDGRDXLICCDGCPSTFHQ

SEQ ID NO: 168855 - protein, 43 aa, Glycine max
  Clone ID: PAT_MRT3847_123491C.1.pep
VWCITPWALFAFNESGLLISIYHLPNFMLAISGRVVDAGNSGP

SEQ ID NO: 168856 - protein, 62 aa, Glycine max
  Clone ID: PAT_MRT3847_123492C.1.pep
ALSQGPAKLIFLTWGFKEGQGKAQKYPFPLFFFFFPITIKLEGAPHIFFIFFRLESSLLFNL

SEQ ID NO: 168857 - protein, 49 aa, Glycine max
  Clone ID: PAT_MRT3847_123493C.1.pep
LKNWTYRNRYYLHSVIDDVFSNMIHVSQIRGSVFISGSLSNIRITMYAF

SEQ ID NO: 168858 - protein, 35 aa, Glycine max
  Clone ID: PAT_MRT3847_123494C.1.pep
KQISLEKKAVTIPLQKHVHLKKKVKSEKCIKGPNH

SEQ ID NO: 168859 - protein, 47 aa, Glycine max
  Clone ID: PAT_MRT3847_123495C.1.pep
ILLKKNILSQDLLLQQQRLFSFWGMADRELTVLRSILITCQTLLTML

SEQ ID NO: 168860 - protein, 111 aa, Glycine max
  Clone ID: PAT_MRT3847_123496C.1.pep
PFRFPGANKLLVTKFMAVMDDYMVLHRYDMLSQPCKHNDLPPTLSLSLMWSPSNKELLISVKTHTFPMFYINTNKTPELELKTRQQLQVGTLKIQSFGFGLLQVKKKKGRE

SEQ ID NO: 168861 - protein, 92 aa, Glycine max
  unsure (1)..(92): unsure at all Xaa locations
  Clone ID: PAT_MRT3847_123497C.1.pep
ALLCLVLSLCVLFTLGVARDSHAXYEYFWLAVWPSTLIPCSLXDLLMPVSASVDIYDLLMLIDVTLFLDTFFYIEDFHLCLSMYVLFCNAPF

SEQ ID NO: 168862 - protein, 26 aa, Glycine max
  Clone ID: PAT_MRT3847_123498C.1.pep
EIISNNECINTQKSYSEEASLFLLIS

SEQ ID NO: 168863 - protein, 95 aa, Glycine max
  unsure (1)..(95): unsure at all Xaa locations
  Clone ID: PAT_MRT3847_123499C.1.pep
QDXSIEYDACTIPNXCGXXVXAKVGNHKQIVGXHVAGSXGRLGYASLIPYXEXVVQAQXAEVYFDFXPVEXDSXEGXAHIXEXXSGVYVXXPTKX

SEQ ID NO: 168864 - protein, 74 aa, Glycine max
  Clone ID: PAT_MRT3847_12349C.1.pep
FAVKNQDGPFWGGPSYLFQFWRVIILDRSNPFKKLLLLYKKLSKSWPIVIPLDVIVRKIDPVKYKKSQIYVISF

SEQ ID NO: 168865 - protein, 43 aa, Glycine max
  Clone ID: PAT_MRT3847_1234C.1.pep
LQFIIINHILIPEPNEYSFAGLGHSHDGYQEGDATGDHACEAP

SEQ ID NO: 168866 - protein, 51 aa, Glycine max
  unsure (1)..(51): unsure at all Xaa locations
  Clone ID: PAT_MRT3847_123500C.1.pep
QFPSFGETCITQDKEKSLXLRLAXILESGHINXQFEXHXFCLDXKQKSLLK

SEQ ID NO: 168867 - protein, 64 aa, Glycine max
  Clone ID: PAT_MRT3847_123501C.1.pep
RTSLFFIFCTAKDSTVMFFLLHFLGEASIHQNTIDKLNFLNHPPLGFPFIGILSISISPWQKGL

SEQ ID NO: 168868 - protein, 116 aa, Glycine max
  Clone ID: PAT_MRT3847_123502C.1.pep
STSNLDVRRCYSMGSFQYVVADSDLQVALCPNRGDGGGVNGDSMRQLKGRLVNYGNSSTDDVEGKKINIARKGESFSVSKIWQWSKKDKVSISQENHLGGSNVTAALPWMHRAQGA

SEQ ID NO: 168869 - protein, 76 aa, Glycine max
  unsure (1)..(76): unsure at all Xaa locations
  Clone ID: PAT_MRT3847_123503C.1.pep
MNQEKLMNMDGSVRTGXKGSVRRKKKAGHTTTTTHDRQLDTNLTRIRVSAIHASEXVGIFNDGVLIQLLTHTLHAS

SEQ ID NO: 168870 - protein, 287 aa, Glycine max
  Clone ID: PAT_MRT3847_123504C.1.pep
HASERRLEDNTRERASRSTPGGQGGVDIRRPKKRRGCETSDTSALGWIPTVLTTHETLCTKRNNPKGNFPDDPLCAASSKRLKANPEAQPMKKNPNSVKPKINQMCNFGDNLEGYYSPIDQVEQKPLVNQYVNRAPFAGNGVQVSPVTPSADVTAYFSSEHSSSSFDYSDLGWGEQVPKTPEISSMLSAAPLDGESQFVQGAADQNQKKNNLLDMASVQDDSAKTLFEELADIESQLKFFETPSFLDEAWADAALASLLSEDASQDAAGNPMNLWSFDDLPSMAGVF

SEQ ID NO: 168871 - protein, 156 aa, Glycine max
  Clone ID: PAT_MRT3847_123505C.1.pep
KPLVNQYVNPAPFPGNGVQVSPVTPSADVTAYFSSEHSSNSFDYSDLGWGEQVPKTPEISSLLSAAPLEGAADQVQKTNNSQDVVAAQDDSAKTLSEELADIESQLKFFETPSFLDEAWADATLASLLGGDATHDAAGNPMNLWSFDDLPSMAGVF

SEQ ID NO: 168872 - protein, 57 aa, Glycine max
  Clone ID: PAT_MRT3847_123506C.1.pep
MSIRIINYVIYGLGYSLDLQFLTWLFSLLWQKKKNKKKKKKKKKKKKKKKIKKKKKK

SEQ ID NO: 168873 - protein, 392 aa, Glycine max
  Clone ID: PAT_MRT3847_123507C.1.pep
MCGGAIISDFIPAGPAGGAQRVTADILWPNLRKRFSKSLLDDDFEAGFREFEDDSEIEDVDDEDDEEEEELKKKKPFGFSRSNNKAASKPLSRGATTVKSVESKGQAEKCAKRKRKNQYRGIRQRPWGKWAAEIRDPRKGVRVWLGTFSTAEEAARAYDAEARRIRGKKAKVNFPDEPSGAASSKRLKANPEAQPMKKNLNSVKPKINQMFNFGDNLEGYYSPIDQVEQKPLVNQYVNRAPFAGNGVQVSPVTPSADVTAYFSSEHSSSSFDYSDLGWGEQVPKTPEISSMLSAAPLDGESQFVQGAADQNQKKNNLLDMASVQDDSAKTLSEELADIESQLKFFETPSFLDEAWADAALASLLSEDASQDAAGNPMNLWSFDDLPSMAGVF

SEQ ID NO: 168874 - protein, 403 aa, Glycine max
  Clone ID: PAT_MRT3847_123508C.1.pep
MDASKLNQLKHFIEQCKSNPSLLADPSLSFFRDYLQSLGAKLPESAYSESTGVERDEDIEDLTEEHEKVEEEEEEEDDVIIESDVELEGETCEPDDDPPQKMGDPSVEVTEENRDASQMAKIKAMDAISEGKLEEAIENLTEAISLNPTSAIMYGTRASVYIKMKKPNAAIRDANAALEINPDSAKGYKSRGIARAMLGQWEEAAKDLHVASKLDYDEEINAVLKKVEPNAHKIEEHRRKYERLHKEREDKKKERERQRRRAEAQAAYEKAKKQEQSSSSRNPGGMPGGFPGGFPGAGGMPGGFPGAGGMPGGFPGAGGMPGGFPGAGGMPGGFPGAGGMPGNIDFSKILSDPELMASFGDPEIMAALQDVMKNPANFAKHQSNPKVAPVIAKMMTKLGGGPK

SEQ ID NO: 168875 - protein, 43 aa, Glycine max
  Clone ID: PAT_MRT3847_123509C.1.pep
RPRVRAPTLNGFPSSSLRLRVELASLLHSKLKQARFSVSAVSL

SEQ ID NO: 168876 - protein, 158 aa, Glycine max
  unsure (1)..(158): unsure at all Xaa locations
  Clone ID: PAT_MRT3847_12350C.1.pep
TASVFFGRDSSHSWGMGGVAFLNPEKSFQHNTXMCLYKISLEQFNDILFQENGLSLDAGSPLFDITTLNAISYKEFHSLEVVKGAWYGNVVYLGKELDIPVITMTCSLLDIERFKSGKLPLRAPNKAYANTLIKGLVDGEQLSEVEAIAYIEGAAKSL

SEQ ID NO: 168877 - protein, 382 aa, Glycine max
  Clone ID: PAT_MRT3847_123510C.1.pep
MCGGAIISDFIPAGPASGARRVTADILWPSLRKRFSKPLLDDDFEAGFREFKDDSEIEDVDDEDDEDEEELKKKPFGFSRSSNKAASKPLSRGSATVESKGQAEKCAKRKRKNQYRGIRQRPWGKWAAEIRDPRKGVRVWLGTFSTAEEAARAYDAEARRIRGKKAKVNFPDEPSGAAASSKRLKVNPEAQPMKENLNTVKPKMNQMFNFGHNLEGYYSPIDQVEQKPLVNQYVNPAPFPGNGVQVSPVTPSADVTAYFSSEHSSNSFDYSDLGWGEQVPKTPEISSLLSAAPLEGAADQVQKTNNSQDVVAAQDDSAKTLSEELADIESQLKFFETPSFLDEAWADATLASLLGGDATHDAAGNPMNLWSFDDLPSMAGVF

SEQ ID NO: 168878 - protein, 400 aa, Glycine max
  Clone ID: PAT_MRT3847_123511C.1.pep
MDASKLNQLKHFIEQCKSNPSLLSDPSLSFFRDYLESLGAKLPESAYSESTGVESDEDIEDVTEEQEKVEEEEEDDEIIESDVELEGETCQSDDDPPQKMGDPSVEVTEENRDASQMAKIKAMDAISEGKLEEAIENLTEAILLNPTSAIMYGTRASVYIKMKKPNAAIRDANAALEINPDSAKGYKSRGVARAMLGQWEEAAKDLHVASKLDYDEEINAVLKKVEPNAHKIEEHRRKYERLHKEREDKKKERERQRRRAEAQAAYEKAKKQEQSSSSRNPGGMPGGFPGGMPGGFPGAGGMPGGFPGAGGMPGGFPGAGGMPGGGFPGAGGMPGGVPGNIDFSKILSDPELMAAFSDPEVMAALQDVMKNPANFAKHQSNPKVGPVIAKMMTKLGGGPK

SEQ ID NO: 168879 - protein, 103 aa, Glycine max
  unsure (1)..(103): unsure at all Xaa locations
  Clone ID: PAT_MRT3847_123512C.1.pep
LIXXSLSXXXALXSXXPVXLLSSXSXSXLSXXXXLXXSXFSXISSSXXXLXXYXXXVAXSXLGGWSXRXFXXFXXXXXXVXSAXXLXCXXSLLFFGXXCXXXS

SEQ ID NO: 168880 - protein, 127 aa, Glycine max
  unsure (1)..(127): unsure at all Xaa locations
  Clone ID: PAT_MRT3847_123513C.1.pep
AIHSIPQGAVMCNVDHHIRDRRVLHRRLGDYAIGIRXKPDYYKCRIKLPSAVKKTEPSVRWALSALVAGGGMTEKTVIRLXAYHAIRVMRRMMXMVRGVEKNPDQHANGGGYDDYIIVMSTERRDAP

SEQ ID NO: 168881 - protein, 112 aa, Glycine max
  unsure (1)..(112): unsure at all Xaa locations
  Clone ID: PAT_MRT3847_123514C.1.pep
SWDASRVPVPNSPHAPRFRFKLTFPHGTFRSVKRTPPFIGGGAGAKNALLMNMPNAPFSMWRYCAGHLXFQGPKMTDAYINCADSFFIALENHDDYTINIDASHDNLVHDGE

SEQ ID NO: 168882 - protein, 57 aa, Glycine max
  unsure (1)..(57): unsure at all Xaa locations
  Clone ID: PAT_MRT3847_123515C.1.pep
VHLCGDGACTNARTMSFKTNAGCDAWKRDFLQRSGCXWDVICVTGWTGTPMQDVQVT

SEQ ID NO: 168883 - protein, 199 aa, Glycine max
  Clone ID: PAT_MRT3847_123516C.1.pep
MATETKSSTVKLKSSAPDGSSKGKIDSSAVRKKVESSSKLPADSKMKSVSTVTKSEVKSKSTSSSSKTVTKTTTKVREKKVYSLPGQKHDPPEQKEPLRVFYESLSKQIPTSEMAEFWLMEHGLLSPERAKRAFEKKQRKQKQLRTGTPVKSSRQPETKTETSQKQQQTSKNGDIKAKKRIVESDDDDDFILSHKRRKA

SEQ ID NO: 168884 - protein, 104 aa, Glycine max
  Clone ID: PAT_MRT3847_123517C.1.pep
SSSEKAEDDDLEQQYRDDLKKELQGITCTSAGSIETSTEVVQTGESTTSVHENVDHDDMGKLMLSRKRRGLVKAIEKSRERNKAQTDLIKQRKKKIDEEQRQRS

SEQ ID NO: 168885 - protein, 76 aa, Glycine max
  Clone ID: PAT_MRT3847_123518C.1.pep
ILNFSYKKKSKFFLFQKPILNQKLPLFVKNIRGTCITACVNFLQRLSMGWYQTTISPKQFFIAKFYITLYNLAYRP

SEQ ID NO: 168886 - protein, 72 aa, Glycine max
  Clone ID: PAT_MRT3847_123519C.1.pep
FLVMFFCHVIVCSRGDTTIPFGCILRKITFIIFNLLRIVIRGVSWVFISLIMFFHVIVILLRHIKILHGRNR

SEQ ID NO: 168887 - protein, 62 aa, Glycine max
  Clone ID: PAT_MRT3847_12351C.1.pep
NGGSSQSALHRQEVDVAQMTRCSGSAPPCSSCGPNSKRVSRHRFKRDFENPQKPKERGKHRK

SEQ ID NO: 168888 - protein, 83 aa, Glycine max
  Clone ID: PAT_MRT3847_123520C.1.pep
RIHIDTYITQRMLHNNNIHTNEHVDYIERRRQHSFLFTMGNDTISHIRAYITHADMYDKRMVQTPFTNLTDYIRTKTFTPWFC

SEQ ID NO: 168889 - protein, 77 aa, Glycine max
  Clone ID: PAT_MRT3847_123521C.1.pep
ARNEARGDTNTEHYSPFHREAPAFVEHETGQQILATGIKAVDLLAPYHRGGKIGLPGGAGASKTELIMELMNKAAKA

SEQ ID NO: 168890 - protein, 283 aa, Glycine max
  unsure (1)..(283): unsure at all Xaa locations
  Clone ID: PAT_MRT3847_123522C.1.pep
VKRKDLAGALRFLKSLESEQXRKRRFSVERVDSAPVRRVGAVRXQRDWEVLDTCLNADDMKLVANAYRFLRDRGFLPNFGKCRNIVLEGPRKVTPDVLSSSTGLEVTKLAPKKWGLSDGSSIVLVAFLGGVSFLISQGIDLRPNLAVILGLAAADAILLGGTCLAQISSYWPPYRRRILVHEAGHLLTAYLMGCPIRGVIXDPIVAMQMGIQGXAGTQFWDEKVANDLAEGRLDGTASDRYCMVLFAGIAAEALVYCEAEGGENDGNSIRCICLVLDPPLSTA

SEQ ID NO: 168891 - protein, 73 aa, Glycine max
  Clone ID: PAT_MRT3847_123523C.1.pep
GTPLRTLGGYHLKPNHLKKKNWKRRETKTLERLETKGVPPWEATKGVGLLRCPNPWAMIKLPKQALKWALNFY

SEQ ID NO: 168892 - protein, 44 aa, Glycine max
  Clone ID: PAT_MRT3847_123524C.1.pep
DSGHYVGWVKQENAKWIEFDDDNPDPKLEDAHIYYSQKVKRTRR

SEQ ID NO: 168893 - protein, 70 aa, Glycine max
  Clone ID: PAT_MRT3847_123525C.1.pep
SDLDMAVKPTVALRAILVGGIAAFAKIAGAMKAAGGAKMGAAAAAMTAAATAAVAGSKQEQTDASQQSPK

SEQ ID NO: 168894 - protein, 77 aa, Glycine max
  Clone ID: PAT_MRT3847_123526C.1.pep
SVSCAAVVCDRDVVLVLGDLEKEAYRWTGCRRPLIRPILVTPKQHIDGTKRVSTRAKHHDKGKGHEMSIECMSNGNY

SEQ ID NO: 168895 - protein, 45 aa, Glycine max
  unsure (1)..(45): unsure at all Xaa locations
  Clone ID: PAT_MRT3847_123527C.1.pep
INQPLIRHLGMKSFLMVWSNSLKETSFLMANGXXXTSAKPRHLST

SEQ ID NO: 168896 - protein, 77 aa, Glycine max
  Clone ID: PAT_MRT3847_123528C.1.pep
SNISVNVILKNSMLYFQTNVLIACFIVVLTAGHRNGLANLYKDMEPFEENDDIQVMWKMIQVQSSTPQWYCTRQKGQ

SEQ ID NO: 168897 - protein, 97 aa, Glycine max
  unsure (1)..(97): unsure at all Xaa locations
  Clone ID: PAT_MRT3847_123529C.1.pep
AAAPAGLXDRAWLGDRNIAHPLXLLLTDPSHTPXASQDGALIXTWXKRQAXCXLMRFPSXXXYTTXLEASVTSPQVSGLANPAGFQNHILWAPXLLX

SEQ ID NO: 168898 - protein, 759 aa, Glycine max
  unsure (1)..(759): unsure at all Xaa locations
  Clone ID: PAT_MRT3847_12352C.1.pep
MNLTLSYQNARVAPPSTNSNLFKLWSLYFGDYQSMFSVDQYTWPKLIQHATNLRELSQDGLKMYSIGHRSMSFIIKLSSSLISLTLSFTELQGNLSSDILSLPNLQQLDLSFNKDLGGELPKSNWSTPLSFLCLSFTAFSGNIPDSIAHLESLTTLFLERCNFDGLIPSSLFNLTQLFSIDLSFNKLVGPIPYWCYSLPSLLELDLNNNHLTGSIGEFSSYSLEYLSLSNNKLQXNFPNLIFXLQNLTQLSLSSTDLSGHLDFHQFSKLKNLNYLELSHNSFLSINFDSIADYFLSPNLEYLNLSSCNINSFPKFIAPLQNLIRLDVSHNNIRGSIPQWFHEKLLHSWNNITHIDLSFNKLQGDLPIPPNGIRYFLVSNNELTGNIPSAICNASSLYILNLAHNNLTGQILQCLATFPSLLALDLQMNNLYGNIPWNFSKGNALETIKLNGNQLDGPLPWSLAHCTNLEVLDLADNNIKDTFPHWLESLQELQVLSLRSNKFHGVITCFGAKHPFLRLRIFDVSNNNFSGSLPASYIKNFRGMMSVNDNQTGSKYMGNQYFYNDSVVVVMKGQYMELERILTIFTTIDLSNNMFEGELLKVLGELHSLKGLNLSHNAITGTIPRSFGNLRNLEWLDLSWNQLKGEIPVSLINLNFLAVLNLSQNQFEGIIPTGGQFNTFGNDSYAGNPMLCGFPLSKSCNKDEDWSPHSTFHLEESGFGWKAVAVGYACGFLFGMLLGYNAFMTGKPQWLARLVEGVLN

SEQ ID NO: 168899 - protein, 109 aa, Glycine max
  Clone ID: PAT_MRT3847_123530C.1.pep
NEISIALASSVPHIQSLLHSSSDQHQKPKGCEMRDGYYVRGSKISEGEEERVVREFRIKMMEAVPRGRTTKEEGTMCCFCIILLLISGSGVDKYCPATIFLAPNSGREN

SEQ ID NO: 168900 - protein, 76 aa, Glycine max
  Clone ID: PAT_MRT3847_123531C.1.pep
SSGYRSCEVIHLDLGSLNESVSSLLPYSSSRPLNSEIINYFFGSLWQKYGRGGEEKSEENSCIQAKKHPSQKTVKI

SEQ ID NO: 168901 - protein, 277 aa, Glycine max
  unsure (1)..(277): unsure at all Xaa locations
  Clone ID: PAT_MRT3847_123532C.1.pep
GESSLFHAASLSNKDETVKGPSGKFMHNVTSVLCSNDTEARRTEANESSGNKKILGIPIFDMAHISPKKEFSSITSLSVLNPTPSDLEAVGNKKKWIFDINLPCDAAVVELDKEAFTETAVGKTRSPTTEADSRNQIDLNLSMSEKDXSSQLYSSDNVKMKAQIDLEAPAPPETEEDAVLEEKLLETSLASLQVPQDTVELAKDELMTNAAEAIVVLSSLTCDQGDDCVISKSPSESPKVDLLNWFADVVSSCKDNVRETVMFQGKKMAKTTKGIPL

SEQ ID NO: 168902 - protein, 191 aa, Glycine max
  Clone ID: PAT_MRT3847_123533C.1.pep
MQSSIAFFPHMYVYGGVVRVQSHSHTNFVPTTNSVPKTITPKPNHFTSTQIKSTYRITLRCNSQPQPLPNLFASKSPRVSGSNVAPLRCGISSNEYSANEGRSVGEWLVLAGEVLSTGFPLWVTIASVLGLMKPSYFNWVTPKLSIMGLNIIMLGMGMTLTLDDLRGVLAMPKEVLSGFLIQYSVMPLSGF

SEQ ID NO: 168903 - protein, 189 aa, Glycine max
  Clone ID: PAT_MRT3847_123534C.1.pep
LCFHNPSPNRRSSETMGFNKSYLLFTVSLSFLLLSTHAISSIIAPSPSPFPTHTNTKTKTIDSIFKKALSKTQNMLKSPNPKVLDFCKSTENPTLCGDTIAPFFQGSFFDPIKALLNEVEATHNQTLKVADVIANTLNDPNTNRNAREPLDICRSRYKSIVSTIKEAVELLNQQNVVDAYYKFSSVISD

SEQ ID NO: 168904 - protein, 141 aa, Glycine max
  unsure (1)..(141): unsure at all Xaa locations
  Clone ID: PAT_MRT3847_123535C.1.pep
MALVEAYASLSISSVARLFTPPKCSPTAHFPHRNFVATRPSFIVGSPLLIQRNHGRKAACKAIPVPIRCEQXTQQGNGLDVWLGRLAMVGFAVAITVEISTGKGLLENFGVPTPLPTVALAVTALVGVLTAVFIFQSASKS

SEQ ID NO: 168905 - protein, 64 aa, Glycine max
  unsure (1)..(64): unsure at all Xaa locations
  Clone ID: PAT_MRT3847_123536C.1.pep
PPGVPYPPCDRTFEVAEKVWAEVFFYLAXNNVLFEGILLKPSMVTPGSESXDNATPQTVADYTL

SEQ ID NO: 168906 - protein, 83 aa, Glycine max
  Clone ID: PAT_MRT3847_123537C.1.pep
DATPPPHQASQSPNPWHVSFSDARALQNTALKTWGGRPENVKAAQDALLFRAKSNSLAQLGKYTGEGESEEAKKELFVKGYSY

SEQ ID NO: 168907 - protein, 78 aa, Glycine max
  Clone ID: PAT_MRT3847_123538C.1.pep
LMNGQHIHLKDSPDLVIVVKLVPMDSMVLTQVVKLFERNEPLIKRILERSKDGIRLVTRPERYLLCLMTDSNSSDDKN

SEQ ID NO: 168908 - protein, 196 aa, Glycine max
  Clone ID: PAT_MRT3847_123539C.1.pep
KQEKMKMEIEEVGNCEALPLLSLNHVSLLCRSVWESMRFYEDVLGFVPIKRPSSFKFTGAWFYNYGIGIHLIENPNIDEFDTCVVEERPINPKDNHISFQCTDVELVKKRLEERGMRYVTAVVEEGGIQVDQVFFHDPDGYMIELCNCENIPIIPISSCSFKPRGHSFKKAAPNKCGFMENVMMESLSTDMINFSF

SEQ ID NO: 168909 - protein, 431 aa, Glycine max
  Clone ID: PAT_MRT3847_12353C.1.pep
YIDLSFNKLQGDLPIPPNGIHYFLVSNNELTGNIPSAMCNASSLKILNLAHNNLTGPIPSAMCNASSLYILNLAQNNLTGHIPQCLGTFPSLWALDLQKNNLYGNIPANFSKGNALETIKLNGNQLDGQLPRCLAHCTNLEVLDLADNNIEDTFPHWLESLQELQVLSLRSNKFHGVITCFGAKHPFPRLRIFDLSNNNFSGPLPASYIKNFQGMVSVNDNQTGLKYMGNQYSYNDSVVVVMKGQYMKLERILTIFTTIDLSNNMFEGELLKVLGELHSLKGLNLSHNAITGTIPRSFGNLRNLEWLDLSWNQLKGEIPLALINLNFLAVLNLSQNQFEGIIPKGGQFNTFGNDSYGGNPMLCGFPLSKSCYKDEDWPPHSTYQHEESGFGWKAVAMGYACGLVFGMLLGYNVFMTGKPQWLGRLVEGVLN

SEQ ID NO: 168910 - protein, 399 aa, Glycine max
  Clone ID: PAT_MRT3847_123540C.1.pep
MASASASLLKSSLVLDKSEWVKGQTLRQPSAASVVRCNPTTPSGLTIRAGSYADELVKTAKTVASPGRGILAMDESNATCGKRLASIGLENTEANRQAYRTLLVTVPGLGQYISGAILFEETLYQSTTDGRKIVDVLLEQNIVPGIKVDKGLVPLAGSNDESWCQGLDGLASRSAAYYQQGARFAKWRTVVSIPNGPSALAVKEAAWGLARYAAIAQDNGLVPIVEPEILLDGEHGIDRTFEVAKKVWAEVFFYLAENNVLFEGILLKPSMVTPGAESKDKASPQTVADYTLKLLHRRIPPAVPGIMFLSGGQSEVEATLNLNAMNQSPNPWHVSFSYARALQNTALKTWGGRPENVKAAQDALLFRAKSNSLAQLGKYTGEGESEEAKKELFVKGYSY

SEQ ID NO: 168911 - protein, 88 aa, Glycine max
  Clone ID: PAT_MRT3847_123541C.1.pep
IAASAVDLGANSSSTMSTVELPARDWLTSISSCGVLLFWCLHNKLVRLGANQMRMMGSGTGRGVKSMLVQETLSRSHSALCLRSLSLT

SEQ ID NO: 168912 - protein, 398 aa, Glycine max
  Clone ID: PAT_MRT3847_123542C.1.pep
MASASASLLKSSLVLDKSEWVKGQTLRQPSASVVRCNPTTPSGLTIRAGSYADELVKTAKTVASPGRGILAMDESNATCGKRLASIGLENTEANRQAYRTLLVTVPGLGQYISGAILFEETLYQSTTDGRKIVDVLLEQNIVPGIKVDKGLVPLAGSNDESWCQGLDGLASRSAAYYEQGARFAKWRTVVSIPNGPSALAVKEAAWGLARYAAIAQDNGLVPIVEPEILLDGEHGIDRTFEVAQKVWAEVFFYLAENNVLFEGILLKPSMVTPGAESKDKASPQTVADYTLKLLHRRIPPAVPGIMFLSGGQSEVEATLNLNAMNQSPNPWHVSFSYARALQNTALKTWGGRPENVKAAQDALAFRAKSNSLAQLGKYTGEGESEEAKKELFVKSYSY

SEQ ID NO: 168913 - protein, 86 aa, Glycine max
  Clone ID: PAT_MRT3847_123543C.1.pep
CAFIKWTIEYERVGEEVDLKDLFLENLILVCQIVDAHLLKVLLQHLSRVFLERDYRSCSCFEDNVVDFFIHSVIGSKDAYQLDPFF

SEQ ID NO: 168914 - protein, 77 aa, Glycine max
  Clone ID: PAT_MRT3847_123544C.1.pep
SLTGISSSNCARVRYLNQDRQGSRKYRRLCNPLHVPISDSITQKTSSYKVPLTTQPHPNLETTHGGLADQDNKKFNE

SEQ ID NO: 168915 - protein, 135 aa, Glycine max
  Clone ID: PAT_MRT3847_123545C.1.pep
EYFYQESYDGEVVFRALEELSLRQLPNLKMLSRQYGENMFPRFSILEIDGCPKFLGEEVLLHRLHSLSVISCGKFNLSAGFKCLQKLWISECKGVKNLQALQYMTSLKEIRLRNLHELESLPDCFGNLSLLHTLS

SEQ ID NO: 168916 - protein, 258 aa, Glycine max
  unsure (1)..(258): unsure at all Xaa locations
  Clone ID: PAT_MRT3847_123546C.1.pep
ERETFEKQHGWVIKTMEREPSLVRDEYAPVIFVQDTLSYLESIDMMSGEEDRENILRARATGKAVLTSPFRLLGSHHLGVVLXIFPVYKSKLPPKPTMEERIKATAGYVGGSFDVESLVENLLGQLAGHQAILVNVYDITNSTNPLIMYGNQNEEGDMSLVHESKLDFGDPYRNHTMICRYHQKAPTNWIALTTAFLFFGILLLVGYILYGAGNHIVKXEDDFHQMEELKVRAEAADVAKSQFLATVSHXIRTPMNGI

SEQ ID NO: 168917 - protein, 72 aa, Glycine max
  Clone ID: PAT_MRT3847_123547C.1.pep
LVLKFLENILIVNVFCFFNDFRHDNFLQIQSFHPCATFAFLAHASADRSDYLILFYKTVPTISLLIDLFFDL

SEQ ID NO: 168918 - protein, 71 aa, Glycine max
  Clone ID: PAT_MRT3847_123548C.1.pep
IQTTLNFNLFQDVLFIEQRENPITQLPMLKADLAQQNIPNCCLLLQLFNIFHSLVQNQHAGTNYMSQEQSN

SEQ ID NO: 168919 - protein, 80 aa, Glycine max
  unsure (1)..(80): unsure at all Xaa locations
  Clone ID: PAT_MRT3847_123549C.1.pep
KIHTMGGYCDVTFPRRLEGPLYYQGAMXLSYEKEVFAGLLYSMKQPTIVAPKVVSVKIALTRAKVIDKAYTFLSRHILWP

SEQ ID NO: 168920 - protein, 267 aa, Glycine max
  unsure (1)..(267): unsure at all Xaa locations
  Clone ID: PAT_MRT3847_12354C.1.pep
MHINYDDYDGHRHXVNCVKNTPLCHCFQGEEEEKEEGEEMEILVNSYHHQGVKKLAERFIPMAFASDGLIEGFYDPECYNPQDGKFIMGLQFHPERMRKPDSDEFDYPGCPFAYKEFVKAVIAYQKKLNSLTSVPKPLKLNKEMESKRKIIVRSFSLAKNLYTMGRGNCSSKDSELEIGAEFLESNTALSVQQENRLKQMGATVRNGGSYVERLKLNEVREKMAKNVMGKMSVEQLSDLLSFYRTMDQICSQVLERKLHDVVNDFTS

SEQ ID NO: 168921 - protein, 160 aa, Glycine max
  unsure (1)..(160): unsure at all Xaa locations
  Clone ID: PAT_MRT3847_123550C.1.pep
KKVDMEVIMILLCTTLACVFVGLQLYHVKRNPDMLPLISFVMSLILTLGNMVPLVLNFESLFAQNHDKKRILLGSEWLEVNEIAVRLIVMVAFLLQFRLLQLTWSAXKVYTKQKDLWIAEKKVVYVILTLYAAGFLIALLVHQSNTLQGDVVYSFSLSNN

SEQ ID NO: 168922 - protein, 82 aa, Glycine max
  Clone ID: PAT_MRT3847_123551C.1.pep
MSYRERNKGKGEEKEYENSTTVGLDSKSVSHNNGSIEEELLTIDENLLIDPKLLFIGSKIGEGAHGRVYEGRSVWQSLECIA

SEQ ID NO: 168923 - protein, 48 aa, Glycine max
  Clone ID: PAT_MRT3847_123552C.1.pep
LPILTPARPLCGLCDICEHSYQPGLLISNLLCQYSSCHGVHLKLCAST

SEQ ID NO: 168924 - protein, 305 aa, Glycine max
  Clone ID: PAT_MRT3847_123553C.1.pep
MESPISICDTEIPLLMQSIDAFTASYVKSLHSLRARAQETARCQVQLDEVKSKLRETEDDFVKALAVKTRKEAKRMALMDAIASAKARVEDLNASIQEQRTKKQEYAAFISQQSLALAASEGKLNESIEQNDETQAISWYNRVLGFHVKGGRGVKFTFKNINMNNLDEEYFFTIFHENDTYSLLSCEHSLRDTKELIHELNKTNDLFKFVRIMRKKFQEVVAQGNLVVTKDEHEESAFNSASAPVLSMSSVRSDFLGKENEHQAEPIEGNKQFKKQNVHRRLKSSVLSPGSASSVRQSPRLKARK

SEQ ID NO: 168925 - protein, 95 aa, Glycine max
  unsure (1)..(95): unsure at all Xaa locations
  Clone ID: PAT_MRT3847_123554C.1.pep
MASVSSMALSSPSLAGKAVKLVPSSPDVGRVSMRNTVTKHVFSGSPWYGPNRVKVLGPFFGEPPSYLTGEFPGDYGWDTCXLFSNPYTFPNNREL

SEQ ID NO: 168926 - protein, 85 aa, Glycine max
  unsure (1)..(85): unsure at all Xaa locations
  Clone ID: PAT_MRT3847_123555C.1.pep
MTLKNSMVVLKVCMMLHFLVGVTTARMELSFFNSXSHQVRMKTXYSKPCCDRXMCTRAMSPQCRXRDITTNXLHSDCMSAMYTRS

SEQ ID NO: 168927 - protein, 39 aa, Glycine max
  Clone ID: PAT_MRT3847_123556C.1.pep
MAASKDRENFVYIAKLAEQAERYEEMVESMKNVAKARRE

SEQ ID NO: 168928 - protein, 59 aa, Glycine max
  unsure (1)..(59): unsure at all Xaa locations
  Clone ID: PAT_MRT3847_123557C.1.pep
FXKIEIKYTLPLTSFQIHVFWVLKLCYIIIKLNNYELCVLFFFFELFSFSYEFCVVWCS

SEQ ID NO: 168929 - protein, 41 aa, Glycine max
  Clone ID: PAT_MRT3847_123558C.1.pep
GVFIVQVLKVLLSRIHISHSSLVMLFIVAVRYCVMFIWPPE

SEQ ID NO: 168930 - protein, 89 aa, Glycine max
  Clone ID: PAT_MRT3847_123559C.1.pep
PAREIKKPPWLSSHKPPFPVRWGFHSFIWRKWFSSWAAPIGRPSFILCEFPHWARPPCFFFLRLGGFAVFPVNNNSPRLATYLPFYTNV

SEQ ID NO: 168931 - protein, 49 aa, Glycine max
  Clone ID: PAT_MRT3847_12355C.1.pep
DHITTVFPYTYHIKQTFSKPLSLYPYLYLINFRFNFSTTPGRPPITLGP

SEQ ID NO: 168932 - protein, 125 aa, Glycine max
  Clone ID: PAT_MRT3847_123560C.1.pep
MEIESVKCECCGLKEDCTQDYISEVKSKFDGKWLCGLCSEAVRDEVSHGGKKASSAMDEAVKAHMSFCRKFKSNPAVRVAEGMRQMLRRRSDLSSSSSSSSPSSSKKYTRSTSTSQVGDSSSFHL

SEQ ID NO: 168933 - protein, 75 aa, Glycine max
  Clone ID: PAT_MRT3847_123561C.1.pep
IYVTVNWQSRYTCMDLQNIAVMLKLQRMSREILQKSKDTGVLWKIDLRLSQPENFKTLYVVFFVDYFKSFKSCIE

SEQ ID NO: 168934 - protein, 55 aa, Glycine max
  Clone ID: PAT_MRT3847_123562C.1.pep
RRLEIVVGRHNIRVVTDRSSLQELSWSNSLLVINYFISMNTGSRNGQHIISFLSV

SEQ ID NO: 168935 - protein, 37 aa, Glycine max
  Clone ID: PAT_MRT3847_123563C.1.pep
MTVGNNVLSLCIKCVHYVTPFSNNPPREVVGKIVKEV

SEQ ID NO: 168936 - protein, 73 aa, Glycine max
  Clone ID: PAT_MRT3847_123564C.1.pep
YTKCLDLICSDVQRFEQNRDLCLDLPLLYRFYDATQRLNNDDPDHEADPTDAPQRRRLILERPLDSGHGGEPL

SEQ ID NO: 168937 - protein, 137 aa, Glycine max
  Clone ID: PAT_MRT3847_123565C.1.pep
EMGACDLELLLPGILKCLVLVNEPQVKKLATENLQCMVQTCQVGSEGGPATQLTSLFRQFIQDYGMQYSYQVYSILETVATLNQHVVIQLIPTLTQSLKDSELKWGLGRNIAQREAYSRLLSGLGQVGQGEKQRLEK

SEQ ID NO: 168938 - protein, 103 aa, Glycine max
  Clone ID: PAT_MRT3847_123566C.1.pep
QCHFSGWKPFLLAQISHFMQHICVVPAGMQGKRWQWWWFALTYSIWKQRNNIIFSNAVFDGQKLMDDAVFMLWSWLRCFEENFSLHFNQWSSNLKDVFLRTAI

SEQ ID NO: 168939 - protein, 232 aa, Glycine max
  Clone ID: PAT_MRT3847_123567C.1.pep
MKKSAADSKDFRNHPQPNGSSMKNEQDLPLPLQDHQLQRAELGSSDVLESELVANPPALDEEEQYIESDDELPSYSDVEAMVLDMDLDPHDHQDSYYNEEVSRYQHVESKRAIMRLEQGSHSCIQRAIDSHGAFAILYSRHSKHYIKKPEVLLGRATESVPVDIDLGKGGHGNAISRRQAIIKMAKDPTFYIKNFGTTSILSNATQSITLTVSRSAFELSLNVPSHAFVIIA

SEQ ID NO: 168940 - protein, 257 aa, Glycine max
  Clone ID: PAT_MRT3847_123568C.1.pep
MPSLIAIVTLIAVVLTSTEARIPGAYSGGAWETAHATFYGGSDASGTMGGACGYGNLYSQGYGVNTAALSTALFNNGLSCGACFEIKCANDPSWCHAGSPSIFVTATNFCPPNYALPNDNGGWCNPPRPHFDLAMPMFLKIAQYRAGIVPVAYRRVPCRKHGGIRFTINGFRYFNLVLISNVAGAGDIVRTYVKGTRTGWMPMSRNWGQNWQSNAVLVGQALSFRVTGSDRRTSTSWNIAPPNWQFGQTFTGKNFRV

SEQ ID NO: 168941 - protein, 52 aa, Glycine max
  Clone ID: PAT_MRT3847_123569C.1.pep
DIYIYFNKKNPVILIQGYCVLKVGLVSGPSWIPEILQSRICPLSHMKIILAN

SEQ ID NO: 168942 - protein, 65 aa, Glycine max
  Clone ID: PAT_MRT3847_12356C.1.pep
NEVRMGGYTIDGLLICENLVQIPFWMCHSHDIYHEQAMVESDFKFESFWGVPCLWCLPQTGCGTS

SEQ ID NO: 168943 - protein, 260 aa, Glycine max
  Clone ID: PAT_MRT3847_123570C.1.pep
MALVNLSYIGIVTLITLLASTEARVPGVYSGGAWETAHATFYGGSDASGTMGGACGYGNLYSQGYGVNTAALSTALFNNGLSCGACFEIKCANDPSWCHAGSPSIFVTATNFCPPNYALPNDNGGWCNPPRPHFDLAMPMFLKIAQYRAGIVPVAYRRVPCRKHGGIRFTINGFRYFNLVLISNVAGAGDIVRTYVKGTRTGWMPMSRNWGQNWQSNAVLVGQALSFRVTGSDRRTSTSWNIAPPNWQFGQTFTGKNFRV

SEQ ID NO: 168944 - protein, 58 aa, Glycine max
  unsure (1)..(58): unsure at all Xaa locations
  Clone ID: PAT_MRT3847_123571C.1.pep
SLALSSIKAVSYRRVRLNHVIYDSCXPESRFPVPPPKCLAGIYFGSLFSGSPHSCIPH

SEQ ID NO: 168945 - protein, 89 aa, Glycine max
  unsure (1)..(89): unsure at all Xaa locations
  Clone ID: PAT_MRT3847_123572C.1.pep
CXXAXALPXCGRXAXXXXRLCPXPXXLGXXRRSGAXVXXPPARXAXAAGXPXCVRVRXXGXFXALRGXCFSGXXPXXXXXXLPASARWV

SEQ ID NO: 168946 - protein, 65 aa, Glycine max
  Clone ID: PAT_MRT3847_123573C.1.pep
YACSFNTNLCYIDYLDETPILIEEQRKMYLSFALLICLGVLGLVNTILNYVIFLIAIELTFTFIN

SEQ ID NO: 168947 - protein, 73 aa, Glycine max
  Clone ID: PAT_MRT3847_123574C.1.pep
YERLSLLDVVIRLHTAFNSFVYHTYAQTLTHILSTWLQSLVFNPHILLPPATPPYHDTTQSLSYHGYSTPTQH

SEQ ID NO: 168948 - protein, 79 aa, Glycine max
  Clone ID: PAT_MRT3847_123575C.1.pep
GPRFFKKKSLWTPEQKNSFFPKRWTQRKEGVRLQKRAYFVRPHYFILRESPPSPKKQIFSQINLASPFFPSFVNWGPLL

SEQ ID NO: 168949 - protein, 106 aa, Glycine max
  unsure (1)..(106): unsure at all Xaa locations
  Clone ID: PAT_MRT3847_123576C.1.pep
GDQPGGRLLWRPSEWVLFRFLWHYQILGVKKKKIFFKKKIYLKKKKKKKKIIPPQKKKKKKKKKKKKKKKKKKKKKKKKKKKKKKKKKKKKKKKKNKKTKKKXKKX

SEQ ID NO: 168950 - protein, 74 aa, Glycine max
  Clone ID: PAT_MRT3847_123577C.1.pep
CQSIQLCPSFHSFLWYDECIANPLQLYKCLHVNDIVNSSVRTVVPPSLSLERSVLISELASPLMEPFVAPARES

SEQ ID NO: 168951 - protein, 409 aa, Glycine max
  Clone ID: PAT_MRT3847_123578C.1.pep
MASMPLGPQQQLPPPPPQQPPPAENDAMKVDSRGGSDAGTEKEMSAPVADGNDALTGHIISTTIAGKNGEPKQTISYMAERVVGTGSFGIVFQAKCLETGEAVAIKKVLQDRRYKNRELQLMRVMDHPNIISLSNYFFSTTSRDELFLNLVMEYVPETIFRVIKHYSSMKQRMPLIYVKLYTYQIFRGLAYIHTVPGICHRDLKPQNLLVDRLTHQVKLCDFGSAKVLVEGESNISYICSRYYRAPELIFGAAEYTTSVDIWSAGCVLAELLLGQPLFPGENQVDQLVEIIKILGTPTREEIRCMNPNYTDFRFPHIKAHPWHKVFHKRMPPEAIDLASRLLQYSPKLRYSAVEAMAHPFFDELREPNARLPNGRPLPPLFNFKQELDGAPPELLPKLIPEHVRRQTQM

SEQ ID NO: 168952 - protein, 79 aa, Glycine max
  Clone ID: PAT_MRT3847_123579C.1.pep
RSFHWWLLLKVEAMAHPFFEELREPNARLPNGRSLPPLFNFKKEVYGAPPELLPKLIPEHVRRQTGLGFLYSAETQTQM

SEQ ID NO: 168953 - protein, 65 aa, Glycine max
  Clone ID: PAT_MRT3847_12357C.1.pep
KARVSLSRYLNEYLCSSSPNPQHPFTKYSSSEYSQFSGQKPARSPEKSSFSQTCSLLSQYIKEKG

SEQ ID NO: 168954 - protein, 227 aa, Glycine max
  unsure (1)..(227): unsure at all Xaa locations
  Clone ID: PAT_MRT3847_123580C.1.pep
MASMPLRPQQLLQPPPPLVENDAMKVDSRGGSDASAEKEMSAPVADGNDALTGHIISTTIGGKNGEPKQTISYMAERVVGTGSFGIVFQAKCLETGEAVAIKKVLQDRRYXNRELQFMHVMDHPNIISLSNYFFSTTSRDELXFLNLVMEYVPETIFRVIKHYSSMKQRIPLIYVKLYTYQIFRGLAYIHTAPGIYHRHVKPQNLLIDRLIHQVKLCDFGSAKVLIF

SEQ ID NO: 168955 - protein, 115 aa, Glycine max
  Clone ID: PAT_MRT3847_123581C.1.pep
SRRRSPRFSTPVKWQGSRGPELPLNAYLKDQNVDSNLHSDAKPIKNSHGKFFGEKHLRQCPGLDPSCEAYAEKLEVKLHGTLEPRRSPRLSSSNGNENTEINASPVKRTSKVVPP

SEQ ID NO: 168956 - protein, 62 aa, Glycine max
  Clone ID: PAT_MRT3847_123582C.1.pep
LINIYLQNDLPRPKEKRVKKQWHSRKHVPTHIYNIFRNIFLKNELFHLFVIYQNLFSFWSSF

SEQ ID NO: 168957 - protein, 98 aa, Glycine max
  unsure (1)..(98): unsure at all Xaa locations
  Clone ID: PAT_MRT3847_123583C.1.pep
KGNFLKNWTCCFTPTQDESHSVSPPKPIXNWVEEVDLPTEDQNDTINDLRDKCAILLESFSKNQSRDRFTWQDIAQRRVLLGRIEPWERIYRAITFFG

SEQ ID NO: 168958 - protein, 76 aa, Glycine max
  unsure (1)..(76): unsure at all Xaa locations
  Clone ID: PAT_MRT3847_123584C.1.pep
LIKKKKXGXPPTXXPVXPGXNXGPXPXXXXXFXXXXXXXVWXNQGXSXSPRXIXIXSKXHTXXXXXKTXRSLXRLG

SEQ ID NO: 168959 - protein, 40 aa, Glycine max
  Clone ID: PAT_MRT3847_123585C.1.pep
LGFLSKHLFPISLHDIAQRTRPLSQESGPTSHYMTFTKTL

SEQ ID NO: 168960 - protein, 172 aa, Glycine max
  Clone ID: PAT_MRT3847_123586C.1.pep
EDVSTGTEDTNSAWTDSTMGDSDDSDNDSDNEFEQEYSKVENNIDNSIRTLKQGIMSDLKEMKRQAKIMSEDLKRQKREMIETKRRAFRADASAVAMRRIIFNEWSPADQSEANLSDSRGKEAVDPRKRIMEVVGGQSTNSQGMGIHRTGGMPHQSALTYVVHQANDHQRNR

SEQ ID NO: 168961 - protein, 174 aa, Glycine max
  Clone ID: PAT_MRT3847_123587C.1.pep
TTRKIPTLINLIESSRGIRKRGKLCIYAMHLMELSERSSAITMVHKARKNGMPFWNKKPDDKDQMIIAFQAYEKLRSVNVRPMTAISALNSIHEDICTSAHQKRAAMIILPFHKHQRVDGSMESLGHSLHVMNQLVLSHAPCSVGILVDRGLGGTSQVQASDVSYKVVVPFFGG

SEQ ID NO: 168962 - protein, 64 aa, Glycine max
  Clone ID: PAT_MRT3847_123588C.1.pep
VRSYSAYAMVGCTCIVTIAAAFNPPALPYLPCFFCSCSFFVLLSPYYVYISFCICVFLTLGITH

SEQ ID NO: 168963 - protein, 125 aa, Glycine max
  Clone ID: PAT_MRT3847_123589C.1.pep
KKYKTPKKKGVKEKNKKKNKNKRGEPPPKKKGGGTKKAGKRAPQPPPPRKNQGPGNQGGGQQKAPTPPPAWGGGKKRGGTRRAPPPPPPKKRPPNTGRALETKPKKGGNWEMAGKKRGGGLRGQF

SEQ ID NO: 168964 - protein, 107 aa, Glycine max
  unsure (1)..(107): unsure at all Xaa locations
  Clone ID: PAT_MRT3847_12358C.1.pep
MSILXKGXXAXITEXXNDNLKEEFXLIRXIVDKYNYXAMDTEXPGXVLXXVGNMKNIDHYNYQTLTXNVDMLKLXQLGXTFYDENXNLXPAXGEPLLWQFNFRESTS

SEQ ID NO: 168965 - protein, 62 aa, Glycine max
  Clone ID: PAT_MRT3847_123590C.1.pep
NFGFCYSSIYALYHCLLDFCLICPSIKVLTCSLSYIKFWLLSISLLSYIYWLLVAFSFHIGI

SEQ ID NO: 168966 - protein, 153 aa, Glycine max
  Clone ID: PAT_MRT3847_123591C.1.pep
MASLCTTLLFCLLLLLPLSSHFVAEAERHGIPGFLYTRSRGRCTAQFWSGRREAWPGMVPETSTVSNVFGSRVYERYRSDLTLLEATARNDEESNPFGGLVKEGTAALLNSYAREGFPFKPWQVKTLLIKALVSHAEAASQANNFLLANQACS

SEQ ID NO: 168967 - protein, 86 aa, Glycine max
  Clone ID: PAT_MRT3847_123592C.1.pep
MLNNYFSQCSALLYFRRNCLGRVINKGFQTRPLAGIHLDLMVATGIPRHDEGKEKGRLSVRYLWKNRAARLRLLAVSALYILPYDD

SEQ ID NO: 168968 - protein, 46 aa, Glycine max
  Clone ID: PAT_MRT3847_123593C.1.pep
KTKKGKAARTMARNNERDRMRKTSALGILITRKLLGFRAAIVLPSC

SEQ ID NO: 168969 - protein, 165 aa, Glycine max
  unsure (1)..(165): unsure at all Xaa locations
  Clone ID: PAT_MRT3847_123594C.1.pep
MEKQQPTQPQPHHDFIFRSKXSPDIYIPTHLPLHTYLFQNLSQFKDLPCLINAATGETFTYAAVELTARKVASGFNKLGIQKGDVILLLLQNCPQFVFAFLGASYRGATVTAGNPFYTPGEVAKQATASNSKLIITQAFYVGXRKDFARENDVKVICVDFAAGGY

SEQ ID NO: 168970 - protein, 83 aa, Glycine max
  unsure (1)..(83): unsure at all Xaa locations
  Clone ID: PAT_MRT3847_123595C.1.pep
RREARKTVGPFGTIKQPSGTRSRALTKVLTSLLRLLEPLKAEFPXLSYADFXQLAGVVAVEVTGGXEVPFHPGREDKLSHTRG

SEQ ID NO: 168971 - protein, 46 aa, Glycine max
  Clone ID: PAT_MRT3847_123596C.1.pep
GERKKRRLDMHEKLNERQWNWMVGNGKPRACGDWDGNGIMPFLFEI

SEQ ID NO: 168972 - protein, 126 aa, Glycine max
  unsure (1)..(126): unsure at all Xaa locations
  Clone ID: PAT_MRT3847_123597C.1.pep
MHTMTKDIMPDDVWRDAPHKVVMDYALLAELDLTVLAGVYKRHMKDRQGEIHWXMNTAMTQDRIVLIAEELYGFDKSTLPWPRVMVEVELVDYIAIDAAYRIETTTNKVNERLGRTAARLILERGN

SEQ ID NO: 168973 - protein, 49 aa, Glycine max
  Clone ID: PAT_MRT3847_123598C.1.pep
ISRGLVLSSIRIINGYYVFDPDFIVGNLCVVLQSKLVKSVYLGDLFINE

SEQ ID NO: 168974 - protein, 182 aa, Glycine max
  Clone ID: PAT_MRT3847_123599C.1.pep
SSGTQLTGVDLDVSEIQNVNIYTYRELRIATEGFSNANKIGQGGFGVVYKGKLRNGSLAAIKVLSAESRQGVREFLTEIKVISSIEHENLVKLHGCCVEDNHRILVYGYLENNSLAQTLIGSGHSSIQLSWPVRRNICIGVARGLAFLHEEVRPRIIHRDIKASNVLLDKDLQPKISDFGLA

SEQ ID NO: 168975 - protein, 55 aa, Glycine max
  Clone ID: PAT_MRT3847_12359C.1.pep
RKKLTIIISIVQPVDQFLWKVSSNLWILMFFSKGLFGFDFFLLVIKLRVFPLFLD

SEQ ID NO: 168976 - protein, 62 aa, Glycine max
  Clone ID: PAT_MRT3847_1235C.1.pep
CGRDKPQSLTGLLKHVLGQLSTSWAPKAEGKVTTRRGMTRTPREHLAAYLAQNQCTGSARST

SEQ ID NO: 168977 - protein, 157 aa, Glycine max
  Clone ID: PAT_MRT3847_123600C.1.pep
MQKLLISANVGMKAYLSLTTLLNKQVGRYQSLQEKTDDLCKRMHENDLYANRGDVSAARAKEKTSTLEHFLEETFQLQRYIVATGQKLMEIQSKILSGFVGVAEEMGKSSGIDMNRFADSIRNLFHEVQRGLEVRTARIIGDLEGTLAREGMTCLRR

SEQ ID NO: 168978 - protein, 221 aa, Glycine max
  Clone ID: PAT_MRT3847_123601C.1.pep
MAGFFSLLRRLYLSLYNWTVLFGWCQVLYFVLKTLNESGHQHVYSAAEKPLHYAQSAAVLEILHGLVGLVRSPVTATLPQISSRLFLVWGILWSFPETRSHVLVTSLLISWSITEIIRYSFFGFKETFGFTPSWLLWLRYSSFLVLYPTGISSEVGLIYIALPFIKASGKYCIRMPNKWNSSFDYFYAAIVAMGIYVPGSPHLYTYMLAQRKKALSKSKRE

SEQ ID NO: 168979 - protein, 153 aa, Glycine max
  Clone ID: PAT_MRT3847_123602C.1.pep
ILHGLVGLVRSPVTATLPQISSRLFLVWGILWSFPETRSHVLVTSLLISWSITEIIRYSFFGFKETFGFTPSWLLWLRYSSFLVLYPTGISSEVGLIYIALPFIKASGKYCIRMPNKWNSSFDYFYAAIVAMGIYVPGMSKTSFSLLTMMSLG

SEQ ID NO: 168980 - protein, 112 aa, Glycine max
  Clone ID: PAT_MRT3847_123603C.1.pep
QIESELYMAIDGSRNFIVVFTKNYASSTWCLHELARICMNIETSTRRILPIFYVVDPLKVQKQSGCYEKAFMDYEERFRGAKEREQVWRWRKGLKQVSHLPCLHIQNDMKRS

SEQ ID NO: 168981 - protein, 135 aa, Glycine max
  Clone ID: PAT_MRT3847_123604C.1.pep
MNLVIESAWNSLMKRKVLALFVASILVACQCHAYDMFPLRMNTGYGARTHDVKCASRMLAVEAHYIFGFETIPEECLESTKEYIHGKQYRSDYKTVNQLTYFYATNLEIHTKDTFLLSIHGTVLSNISYYLKHGY

SEQ ID NO: 168982 - protein, 59 aa, Glycine max
  Clone ID: PAT_MRT3847_123605C.1.pep
FGSASLNKQAIPSCIRCAISANNVVLYVKECDRPLRHHNAVTTMMKCMTYEFMKPRHAT

SEQ ID NO: 168983 - protein, 351 aa, Glycine max
  Clone ID: PAT_MRT3847_123606C.1.pep
MSSTPTNLIDFLVNQANGVKGLADLNLASVPHQYIQPLQARLDHTKIVTQKSIPIIDFTKWEDPDVQDSIFDAATKWGFFQIVNHGIPSEVLDDLKDAVHRFFELPAEEKQCLKDNSPPEVVRLASSFSPYAESVLEWKDYLQLVYASEEKIHAYWPPICKDQALEYMKHAEALIRKLLKVLLKKLNVKELDKAREHTLMGAMILGFNYYPACPDPEVVAGVGPHSDVSSITVLLQDDIGGLYVRGSDGDSWIYVPPVEGALVINIGDVLQIMSNERCKSIEHRVVANRSKTRISIPIFVNPAPDAVIGPLSEVLDDGDEPKYKQLLYSDYFKYFFSKAHDGKKTIEFAMI

SEQ ID NO: 168984 - protein, 35 aa, Glycine max
  Clone ID: PAT_MRT3847_123607C.1.pep
QKKIKPGQEFFSKLCPIYLNPTRALNDNLTPLILI

SEQ ID NO: 168985 - protein, 62 aa, Glycine max
  Clone ID: PAT_MRT3847_123608C.1.pep
RPTRTIFFHSTLFSVFQTMNLIMIFGFFYNLQILNLIILSFNLHHYSSLIVPINTPQKTSKP

SEQ ID NO: 168986 - protein, 63 aa, Glycine max
  Clone ID: PAT_MRT3847_123609C.1.pep
KTEDTIFLREYQTRQNQCFYNSSYLNVQRENGTVSRYEGGREHVAHMLFLRDTKTLMFGSYLD

SEQ ID NO: 168987 - protein, 40 aa, Glycine max
  Clone ID: PAT_MRT3847_12360C.1.pep
DAAVVLVVLACPVNPDRQGDAASPGIDVALRGANLLDQDA

SEQ ID NO: 168988 - protein, 115 aa, Glycine max
  Clone ID: PAT_MRT3847_123610C.1.pep
RKKKELLQQTDPPSISVIDLFPSGDFPEGEIQQYKDDNLWRTTSEEKRELERLQKPLYNSVRRAAEVHRQVRKYIKGILKPGMLMTDICETLEKHCRKLISEDGLQAGICIPTRC

SEQ ID NO: 168989 - protein, 224 aa, Glycine max
  Clone ID: PAT_MRT3847_123611C.1.pep
HVDGYIVDCAFTVAFNPMFDPLLEASREATNTGIKEAGIDVRLCDIGAAIQEVMESYEVEINGKVYQVKSIRNLNGHSIGRYQIHAGKSVPIVKGGEQTKMEEGEFFAIETFASTGKGYVREDLECSHYMKNFDVGHIPLRLPRAKQLLATINKNFSTLAFCRRYLDRLGETKYLMALKNLCDSGIVQPYPPLCDVKGSYVSQFEHTILLRPTCKEVISKGDDY

SEQ ID NO: 168990 - protein, 97 aa, Glycine max
  unsure (1)..(97): unsure at all Xaa locations
  Clone ID: PAT_MRT3847_123612C.1.pep
KSVPIVKGGEPPKMEEGEFFAIEPFASPGKVYVQKDLEFSPYMKNFDVGHIPLRLPRAKQXPYPPLCDVKGSYVSQFEHTILLRPTCKEVISKGDDY

SEQ ID NO: 168991 - protein, 104 aa, Glycine max
  unsure (1)..(104): unsure at all Xaa locations
  Clone ID: PAT_MRT3847_123613C.1.pep
KSKTNAGPANTKATEPMHKVEDGVFGTVGRFXCTNQNEPFAATVAMLASATXLMGERITGTXMLSQLNTGTGTPIYEXAEPIDPLHMLITLLRAIGGTRDRGKF

SEQ ID NO: 168992 - protein, 521 aa, Glycine max
  unsure (1)..(521): unsure at all Xaa locations
  Clone ID: PAT_MRT3847_123614C.1.pep
MAEELISQLKKNLLDEENGTPSHVERAADADADAELSPPSQKGDDTKEVSKKKKKKSKSKKKKELLQQTDPPSISVIDLFPSGDFPEGEIQQYKDDNLWRTTSEEKRELERLQKPLYNSVRRAAEVHRQVRKYIKGILKPGMLMTDICETLENTVRKLISEDGLQAGIAFPTGCSLNWVAAHWTPNSGDKTILQYDDVMKLDFGTHVDGYIVDCAFTVAFNPMFDPLLEASREATNTGIKEAGIDVRLCDIGAAIQEVMESYEVEINGKVYQVKSIRNLNGHSIGRYQIHAGKSVPIVKGGEQTKMEEGEFFAIETFASTGKGYVREDLECSHYMKNFDVGHIPLRLPRAKQLLSLLYMIXKGSYVSQFEHTILLRPTCKEVISKGDDYXCGFEGFFFFFKCDTLSKIIFYNCFHYNFSTLVFCRRYLDRLGETKYLIAYFNIYYRSWWSALIIPSSLRVFICADPHSLXXFNNLKNLCDSGIVQPYPPLCDVKGSYVSHSDHTILLRPTCKEVISKGDDY

SEQ ID NO: 168993 - protein, 77 aa, Glycine max
  unsure (1)..(77): unsure at all Xaa locations
  Clone ID: PAT_MRT3847_123615C.1.pep
HFXKPFFLLYCITIIMATLILSVFFTQFYSFSFIKIFFSIFFFSLLHYSFLSFLIYFIYLYFFHLHFFLNFFYIILF

SEQ ID NO: 168994 - protein, 255 aa, Glycine max
  Clone ID: PAT_MRT3847_123616C.1.pep
MDRSPDKAIILLRKLNRHCRRVMLAELDADQITGIHKKFQKLEEVSPAMEKQITKWTKVLLSSERELRERLVGFSFSAFQTSMSNPETNSKSGCWYPVGLAQMEQWIALDQEHIHDQLKAIASEVKHEKRFLSSRCSAVETCSFCSASVPFESPEFGFCQGENSTSGDVKNHRLLRCVVSMQVCPTTPLWYCVCCHRSGFRLAPEPLFRMSSFHLDSDSSSKSFTQAVSSKPFCPFCGILLRRKQPDFLLSPTPV

SEQ ID NO: 168995 - protein, 64 aa, Glycine max
  Clone ID: PAT_MRT3847_123617C.1.pep
QILSETYFRGRHHETLHTSILQHLPNHPIELLNLNITLVYKTWESQRSAFIMVISTWEKESFRT

SEQ ID NO: 168996 - protein, 130 aa, Glycine max
  unsure (1)..(130): unsure at all Xaa locations
  Clone ID: PAT_MRT3847_123618C.1.pep
SNTTLTPFTGSYTTEAEGEHAGAHDDMSSLLSVFYYHSSVEYAEECXLALSTNLSSNTRHDHVDLGPDNTGIXALDLSNSXYEKGHVHSGGELNIPRLLALFVRTTTETEFGRRTIIMMTVWRFGVEVMN

SEQ ID NO: 168997 - protein, 67 aa, Glycine max
  Clone ID: PAT_MRT3847_123619C.1.pep
LTSRGLVDKDFEQIREFLHRALIFTLDIQKEYGKLLKDFNNRAIEELKADVDNNMPGFLVSELKYKD

SEQ ID NO: 168998 - protein, 70 aa, Glycine max
  Clone ID: PAT_MRT3847_12361C.1.pep
HELVLGQPSSIKPEVVSMSQEVLYQIGECAANLTKSGKGHESRSVWPAQRVIFFPLSHRAQRSREHLRDS

SEQ ID NO: 168999 - protein, 88 aa, Glycine max
  Clone ID: PAT_MRT3847_123620C.1.pep
RSRVLNLCDVYGLYGLSFFFTTQGGRSAYHVVSRLAALERENPRLNPKPSRVVPGLNKTGGFTIPITAQPPSLAFPLVESQPFYRGGP

SEQ ID NO: 169000 - protein, 35 aa, Glycine max
  Clone ID: PAT_MRT3847_123621C.1.pep
LIKFFVLYYSLTLQKPVKPLYSSLTYPVPSIHSSW

SEQ ID NO: 169001 - protein, 47 aa, Glycine max
  Clone ID: PAT_MRT3847_123622C.1.pep
KKLLHLSFSKIEMHKLNLTCERWKLEAFYILIFFFISIYRKEIFKHD

SEQ ID NO: 169002 - protein, 129 aa, Glycine max
  unsure (1)..(129): unsure at all Xaa locations
  Clone ID: PAT_MRT3847_123623C.1.pep
LHFWGVGTWLREVKDTTKEGYSFEELCIKKEAIVGEEKFCAKXLRTEIDFAISKLGKNIKVLLSSFDNKQDQYTEEGVQNLGDKAKKRDRLNLRTAVLYXHEVRETPNCMGSLLDGDGTKTXALAICHS

SEQ ID NO: 169003 - protein, 35 aa, Glycine max
  Clone ID: PAT_MRT3847_123624C.1.pep
VLQFLECYSSSLFSPFYQLVLSRPSTNLTDHQQNI

SEQ ID NO: 169004 - protein, 109 aa, Glycine max
  Clone ID: PAT_MRT3847_123625C.1.pep
MDRERLSLASPGSARRTAERSELERCMIKTECSDPGCGRAEQAGSYFGGQNYQNLGQYPKLEHQHYFDYSTMIRDDGYSDDTAHDVVHRHSIDSVLNVTTIEIKTINTD

SEQ ID NO: 169005 - protein, 122 aa, Glycine max
  unsure (1)..(122): unsure at all Xaa locations
  Clone ID: PAT_MRT3847_123626C.1.pep
KPRKPDTEATPHYQHKNNPTTGPRPDKXRPEATRRKAEQXEXKNPQQTKEKTKRSHXEDQRLDQXPGETALKMXTARDDPNGKKKEKQQXSKKRXXXKKXGTPRXKKKKKRAAAHEKPSIRK

SEQ ID NO: 169006 - protein, 60 aa, Glycine max
  Clone ID: PAT_MRT3847_123627C.1.pep
ENRISESDDVKCATRRKRNRKKEQHEGEDRVLVFTVGRRRYQLELDRICACMRHVLVLSP

SEQ ID NO: 169007 - protein, 86 aa, Glycine max
  Clone ID: PAT_MRT3847_123628C.1.pep
RELEKVDAVRLINIVFDETGHFVLYGTMLGIKVINVETNRCVRILGKQENIRVMQLALFQGIAKKHRAATTIEMKASENPVLQNIQ

SEQ ID NO: 169008 - protein, 74 aa, Glycine max
  Clone ID: PAT_MRT3847_123629C.1.pep
PAKGPTKLSPKKRTENKLCAKKKNWSSRIKISNPVSKRPKKKNFFLGGGIVSVPFLKKNPLKILPKKMLSKRPS

SEQ ID NO: 169009 - protein, 57 aa, Glycine max
  Clone ID: PAT_MRT3847_12362C.1.pep
WQRSIDYLSDLLSITIAYWTGLFKLRVSNFKISGFKKNAYLISRLDLFIRIIRKLLF

SEQ ID NO: 169010 - protein, 150 aa, Glycine max
  unsure (1)..(150): unsure at all Xaa locations
  Clone ID: PAT_MRT3847_123630C.1.pep
RAELEKRKEKFDIIVGDLADPLEDGPCYQLYTKSFYEKILKPKLNDNGIFVTQAGPXGIFTHTEVFTSIYNTIKQVFKYVIAYTTHVPSFADTWGWVMASDQPLSICANEMDRRIEARIDGELLYLNGGXFHSSXTMNXTVYQSLQMKLT

SEQ ID NO: 169011 - protein, 278 aa, Glycine max
  Clone ID: PAT_MRT3847_123631C.1.pep
MGEAPEVFYINGFSKFEHEIETQQNHHVNDQNHDSSWYEEIIDEDLKWSFKLNSVLHKAISEYQDIALLDTKRFGKALVLDGKMQSAETDEFIYHECLIHPPLLCHPNPKTVFIMGGGEGSAARENSARGSMDRVIMCDIDKEVVNFCRKYLIVNKEAFSHKKLDLVINDAKAELEKRKEKFDIIVGDLADPLEDGPCYQLYTKSFYEKILKPKLNDNGIFVTQAGPAGIFTHKEVFTSIYNTIKQVFKYVIAYTTHVPSFADTWGWVMASDQPLSIC

SEQ ID NO: 169012 - protein, 63 aa, Glycine max
  Clone ID: PAT_MRT3847_123632C.1.pep
MHPYLNFEIRSCHYNNIYSFTPFTPRAENINGGTHISPYNTMQQNDTLRVCCRPPLQYSPHFP

SEQ ID NO: 169013 - protein, 171 aa, Glycine max
  Clone ID: PAT_MRT3847_123633C.1.pep
RVRLQAGGFETAGEGIAIGFVDTGIDPTHPSFADDKSEHPFPVPAHFSGACEVTPDFPSGSCNRKLVGARHFAASAITRGIFNSSQDYASPFDGDGHGTHTASVAAGNHGIPVIVAGQVFGNASGMAPHSHIAIYKALYKRFGGFAADVVAAIDPAAQDGGGIICLAITPN

SEQ ID NO: 169014 - protein, 60 aa, Glycine max
  Clone ID: PAT_MRT3847_123634C.1.pep
KGQFFLKKKLFLPTLGYNGGPGFSMLGIQVMPTLFFHSTLEKGDFFFKELAFFLNFCFRF

SEQ ID NO: 169015 - protein, 467 aa, Glycine max
  Clone ID: PAT_MRT3847_123635C.1.pep
MAQRQIFAHVVILLLMVLVGARFAKAEGGGEAADRILELPGQPKVSFQQFSGYVTVNKVAGRALFYWLTEAAQNPLTKPLVIWLNGGPGCSSVAYGASEEIGPFRINKTASGLYINKFSWNTVANLLFLEAPAGVGFSYANRSSDLLDTGDRRTAQDSLEFVIQWLERFPRYKNRELYITGESYAGHYVPQLAKEILTYNAKTKHPINLKGIMVGNAVTDNYYDNLGTVTYWWSHAMISDQTFRQLMSTCDFHRQKESDECESVYSYAMDQEFGNIDQYNIYAPPCNNSDGSSSSATRRTMRLPHRPHVDFRHWSGYDPCTEKYAEIYYNRPDVQKALHANKTGIPYRWTACSEVLNRNWNDTDVSVLPIYRELIAHGIRVWVFSGDVDSVVPVTATRYALAQLKLSTKIPWYPWYVKNQVGGWTEVYEGVTFATVRGAGHEVPLFKPRAALQLFKSFLTGKPLPKS

SEQ ID NO: 169016 - protein, 101 aa, Glycine max
  Clone ID: PAT_MRT3847_123636C.1.pep
PWNPTTICTTPTMWSPSSTRNTVARPRTLPWITTGTTTTTPARTYKTPYKTDRNATSRPDPGYTILRELDSTPRQEHDITTPAAVLSIPRVSESLLLENYN

SEQ ID NO: 169017 - protein, 43 aa, Glycine max
  Clone ID: PAT_MRT3847_123637C.1.pep
PIFLLRWLGPSSSMFIDGCVRRRYKETTVLLLTAQLLLRKVFV

SEQ ID NO: 169018 - protein, 45 aa, Glycine max
  Clone ID: PAT_MRT3847_123638C.1.pep
CNHRAQPPLMENWSLGSDLRSGSIRLFPAISKKRVEVLFFTWSTS

SEQ ID NO: 169019 - protein, 364 aa, Glycine max
  unsure (1)..(364): unsure at all Xaa locations
  Clone ID: PAT_MRT3847_123639C.1.pep
MNSASPQFVSPRSMSVYDPIHQISMWGEGFKSNGNLSAAMPLIDEADMKFDSQSEDASHGILXEPNKYDQEARLEIDSLSDTQLVFRYTTDHVVADIALQAYVQQLESSRLKLMQLEQELERARQQGMYIGGGLDSNHLGFAGSVNSGITTFEMEYGHWVNEQNRQITELRNALNAHIGDVELRILVDGMMSHYAEMFRMKSAAAKADVFYVMSGMWKTTAERFFLWIGGFHPSELLKVLGPLIEPLTEQQRLNIYNLGQSCQQAEDALSQGMDKLRQTLADSVAAGQFMEGTYIPQMTSAMEKLEDLVSFVKQADHLRQETLEQMSRILTIRQAARCLLALGEYFQRLRALSSLWSNRPREPA

SEQ ID NO: 169020 - protein, 375 aa, Glycine max
  Clone ID: PAT_MRT3847_12363C.1.pep
MAEEESYPLFETRRAKGRVIYTIFSLSLFVGILFIWVYRVSHIPREGEDGKWAWIGLLCAELWFGLYWLLRHPFRWNPVFREPFRHKLSQRYEEILPRVDIFVCTADPGIEPAVMVMNTVLSVMAYDYPTEKLSVYLSDDAASDITFYALLAASLFAKHWLPFCKKFKVEPTSPAAYFKSIASCTHPNNHVNELVPIKKLYQDMESRIENAAKVGQVPEEVRPKYKGFSQWDSYTSRRDHDTILQILLHGKDSSAKDVDGNVMPILVYLAREKRPQVAHNFKAGAMNSLLRVSSMISNGEIILNVDCDMYSNNSQSLRDALCFFMDEVKGHEIAFVQTPQCFENVTNNDLCCSALRVVAELEVGGITRRCGLFKN

SEQ ID NO: 169021 - protein, 383 aa, Glycine max
  Clone ID: PAT_MRT3847_123640C.1.pep
MNSASPQFVSSRRMSVYDPIHQISMWGEGFKSNGNLSAAMPLIDETDMKFDSQSEDASHGILGEPNKYDQEANKPTDKGDNDKYVSPAILDFEESVFNLDIQRRLAQNREAARKSRLRKKAYVQQLESSRLKLMQLEQELERARQQATKLQGIYIGGGLDSNHLGFAGSVNSGITTFEMEYGHWVNEQNRQITELRNALNAHIGDVELRILVDGMMSHYAEMFRMKSAAAKADVFYVMSGMWKTTAERFFLWIGGFRPSELLKVLGPLIEPLTEQQRLDIYNLGQSCQQAEDALSQGMDKLRQTLADSVAAGQFMEGTYIPQMTSAMDKLKALVSFVNQETLQQMSRILTIRQAARCLLALGEYFQRLRALSSLWSNRPREPA

SEQ ID NO: 169022 - protein, 115 aa, Glycine max
  unsure (1)..(115): unsure at all Xaa locations
  Clone ID: PAT_MRT3847_123641C.1.pep
MNSASPQFVSSRRMSVYDPIHQISMWGEGFKSNGNLSAAMPLIDETDMKFDSQSEDASHGILGEPNKYDQEANKPTDKIQRRLAQNREAARKSRLRKKAYVQQXESSRLKLMQLE

SEQ ID NO: 169023 - protein, 153 aa, Glycine max
  unsure (1)..(153): unsure at all Xaa locations
  Clone ID: PAT_MRT3847_123642C.1.pep
MQSTLFNPTHSLIHTSPHSIRPNPGHAALSDRAFIAVETPTETVNLHKDCYRITEPKLYGASQAVLYGDCLSADDMAKPHADACSAWYEGITCNMHLLHLSEAVRDSAAAADMDTFRFXTVGVNDAIYMSTRGMCYSLQSSDLIAYRIDTXMA

SEQ ID NO: 169024 - protein, 330 aa, Glycine max
  unsure (1)..(330): unsure at all Xaa locations
  Clone ID: PAT_MRT3847_123643C.1.pep
MNSASPQFVSPRSMSVYDPIHQISMWGEGFKSNGNLSAAIPLIDEADMNFDHQSADSFHGISVYPNKSDHAAGLSSERTHSTSGQTPRTTMLSVLFKNLQGHPFLADRVRRAHGGVAPRLLPPRRNLANSSFGMXLNQATAVLAYRYGXLTVVLLLLTGAIGNILVALLDRSGVDSGARDIXKPMICSWTKKRRKVSLLWISFGVFGSVIEPMTKQQRLNIYNLGQSCQQAEDALSQGMDKLRQTLADSVAAGQFMEGTYIPQMTSAMEKLEDLVSFVKQADHLRQETLEQMSRILTIRQAARCLLALGEYFQRLRALSSLWSNRPREPA

SEQ ID NO: 169025 - protein, 488 aa, Glycine max
  unsure (1)..(488): unsure at all Xaa locations
  Clone ID: PAT_MRT3847_123644C.1.pep
MASAASPTTFSLLHSTTPSSSSSATSASPSPSRVQLSSSLRARPLRRLGFAAADPLLAASVAARVAAVRGGGKGARGVVSMAKKSVGELSAADLKGKKVFVRADLNVPLDDNQNITDDTRIRAAIPTIKHLIQNGAKVILSSHLGRPKGVTPKYSLAPLVPRLSELIGIQVVKAEDSIGPEVEKLVASLPDGXGVLLLENVRXYKEEEKNGSPSMQKSLPLWHYLYXVNDAFGTAHRAHASTEGVTKYLKPSVAGFLLQKELDYLVGAVSNPKRPFAAIVGGSKVSSKIGVIESLLEKVDILLLGGGMIFTFYKAQGLSVGSSLVEEDKLDLATSLLAKAKEKGVSLLLPSDVVIADKFAPDANSKVVPASAIPDGWMGLDIGPDSVKSFSEALDTTQTIIWNGPMGVFEFDKFAVGTEAIAKKLADLSGKGVTTIIGGGDSVAAVEKVGVASVMSHISTGGGASLELLEGKELPGVLALDEAVPVAV

SEQ ID NO: 169026 - protein, 204 aa, Glycine max
  unsure (1)..(204): unsure at all Xaa locations
  Clone ID: PAT_MRT3847_123645C.1.pep
MNSASPQFVSPRSMSVYDPIHQISMWGEGFKSNGNLSAAMPLIDEADMKFDSQSEDASHGILGEPNKYDQEASKPTDKIQRRLAQNREAARKSRLRKKAYVQQLESSRLKLMQLEQELERARQQGMYIGGGLDSNHLGFAGSVNSGITTFEMEYGHXXVNEQNRQITELRNALNAHIXGDVELRILVDGLMSPYAEMFPMKSAA

SEQ ID NO: 169027 - protein, 152 aa, Glycine max
  unsure (1)..(152): unsure at all Xaa locations
  Clone ID: PAT_MRT3847_123646C.1.pep
PPWLDGTVPGNFCYDPLELGSDPYSLIWNVQADLVHCXWTMLGAAGIIISXFLTTIGVLNTHSWYSTGQLEYFTDTTTLFILELFFIDWAXGRKRADIIKPCCVNTDPIFPNIKLTETDVDYPCGLWFDHPGWGTGSSQRIRDLTTDEITNG

SEQ ID NO: 169028 - protein, 79 aa, Glycine max
  Clone ID: PAT_MRT3847_123647C.1.pep
MVSASRYEHSSMSEDQISELVTETLAAVGLKGVEDRLPSELSGGMKKRVALARSIICDTTEESKDPEVLLYDEPTAGLD

SEQ ID NO: 169029 - protein, 136 aa, Glycine max
  Clone ID: PAT_MRT3847_123648C.1.pep
VNMHQGIGNGLPLAAVVTTPEIASVMAQKLQFNTFGGNPVCSAGGLAVLRVLDKEKRQSHCADVGSHLIQRLRSLMQIHDIIGDVRGRGLMVGIEFVTDRKEKTPAKAETTALHERFRELGILSGKGGLHGNVFRI

SEQ ID NO: 169030 - protein, 59 aa, Glycine max
  Clone ID: PAT_MRT3847_123649C.1.pep
RTFSMVQDLGSIEDPSSDICFQHGQSRLVVLFKLFIQMVYDISLHSKLGASSHEGCLKL

SEQ ID NO: 169031 - protein, 49 aa, Glycine max
  unsure (1)..(49): unsure at all Xaa locations
  Clone ID: PAT_MRT3847_12364C.1.pep
LIQPTNRDPFIGSMDTPVTSSPKTAXKLXSNLPAYKTALSPLLRRIDVS

SEQ ID NO: 169032 - protein, 183 aa, Glycine max
  Clone ID: PAT_MRT3847_123650C.1.pep
MASAASPTTFSLLHSATPSSSSTATSASPSPSRVQLTSSLRARPLRRLGFAAADPLLAASVAARVAAVRGGGKGARGVVSMAKKSVGDLSAADLKGKKVFVRADLNVPLDDNQNITDDTRIRAAIPTIKHLIQNGAKVILSSHLGRPKGVTPKYSLAPLVPRLSELIGIQIVKAEDSIGPGSR

SEQ ID NO: 169033 - protein, 382 aa, Glycine max
  Clone ID: PAT_MRT3847_123651C.1.pep
MNSASPQFVSSRRMSVYDPIHQISMWGEGFKSNGNLSAAMPLIDETDMKFDSQSEDASHGILGEPNKYDQEANKPTDKGSNMIQRRLAQNREAARKSRLRKKAYVQQLESSRLKLMQLEQELERARQQGIYIGGGLDSNHLGFAGSVNSGITTFEMEYGHWVNEQNRQITELRNALNAHIGDVELRILVDGMMSHYAEMFRMKSAAAKADVFYVMSGMWKTTAERFFLWIGGFRPSELLKVLGPLIEPLTEQQRLDIYNLGQSCQQAEDALSQGMDKLRQTLADSVAAGQFMEGTYIPQMTSAMDKLKALVSFVNQFFGLRVLLKLFEAIDLADHLRQETLQQMSRILTIRQAARCLLALGEYFQRLRALSSLWSNRPREPA

SEQ ID NO: 169034 - protein, 319 aa, Glycine max
  Clone ID: PAT_MRT3847_123652C.1.pep
TKKIILVVYDKKILPFFSFAMEVRNKPSIDDYVNLWNDWESSVEQLSYDKCYKFWMFMLKHFSTETKKLSNCLVKLPATSGNNEIVLLDKNDVFIPDNLHLKKLFQQEKVFVWYPQNLAPLSRCELFDVYRKIGARNISESICMEEPSLLNGVELKQVDPGNICNVKVLAKLILSFLSSSSLKMEPNKRREAVQGLLNLSFFETKEAVNVSYSLSLSSGAIITKKADRMVRWQGQSSKFFTQTNWQSGNASLIKYATYFSEAISEGVLRENHDHVPALSELITLAFVLKFNNETIEFLMESKNLHCEDEEFLSSAFPSN

SEQ ID NO: 169035 - protein, 57 aa, Glycine max
  Clone ID: PAT_MRT3847_123653C.1.pep
LKGFFQDNLPTIFLCFTTHPLYLIKFSIQPYKTHTLSSTFYFHFFHSNTFSIFLLPL

SEQ ID NO: 169036 - protein, 122 aa, Glycine max
  Clone ID: PAT_MRT3847_123654C.1.pep
VVPASAIPDGWMGLDIGPDSVKSFSEALDTTQTIIWNGPMGVFEFDKFAVGTEAIAKKLADLSGKGVTTIIGGGDSVAAVEKVGVASVMSHISTGGGASLELLEGKELPGVLALDEAVPVAV

SEQ ID NO: 169037 - protein, 130 aa, Glycine max
  Clone ID: PAT_MRT3847_123655C.1.pep
SLVSLSTTPFLPFTAKNASTRIPPPTSFSYSKQRSNRDPRKVVCACIAPPQNFKSQDSSAIHFNGSSKSEQLSTARDHEDDSDVLIECRDVYKSFGEKKILNGVSFKVRIMYLTMTLFWINLSIRIELLS

SEQ ID NO: 169038 - protein, 91 aa, Glycine max
  Clone ID: PAT_MRT3847_123656C.1.pep
AGLDPIASTVVEDLIRSVHIKGQDARGKPGNISSYVVVTPQHSTIKRAIDRLLFLHKGKIVWEGMTHEFTTSTNPIVQQFASGSLDGPIRY

SEQ ID NO: 169039 - protein, 73 aa, Glycine max
  Clone ID: PAT_MRT3847_123657C.1.pep
RDFIAPNNLRVTSMEISDYGPLTAPSFSEHHVNDVLMSFTNSMSILKNNPTCASHEVSNGQHGECSTAADSHV

SEQ ID NO: 169040 - protein, 255 aa, Glycine max
  unsure (1)..(255): unsure at all Xaa locations
  Clone ID: PAT_MRT3847_123658C.1.pep
ASAASPTTFSLLHSATPSSSSTATSASASPSRVQLISSLRARXVRRLGFAAADPLLAASVTARVAAVRGGGKGARGVVSMAKKSVGDLSAADLKGKKVFVRADLNVPLDDTXRITDDTRIRAAIPTIKHLIQNGAKVILSSHLGRPKGVTPKYSLAPLVPRLSELIGIQVVKAEDSIGPEVEKLVASLPDGGVLLLENVRXYKEEEKNDPEHAKKLASLADLFVNDAFGTAHRAHASTEGVTKYLKPSVAGFLLQ

SEQ ID NO: 169041 - protein, 70 aa, Glycine max
  Clone ID: PAT_MRT3847_123659C.1.pep
RGKSWSDAEKGQDQDLYFKNAVKYVEEPMIRLESIASSAVRAAIKVNAFVIICFTSSGIACILIAEFIPT

SEQ ID NO: 169042 - protein, 142 aa, Glycine max
  Clone ID: PAT_MRT3847_12365C.1.pep
MEIKPGLSALITGGASGIGKGLALALAEMGVFITIVDFSEERGRQVASLVEKINTKFHSKLGFPSAIFVKCDVTNARDLAAAFETHLLTYGGLDICINSAGISSSIPFQKDQTDGTQTWRHTINVNFTAVIDSTRLAIKIME

SEQ ID NO: 169043 - protein, 121 aa, Glycine max
  Clone ID: PAT_MRT3847_123660C.1.pep
LSLKCADSSFGDKNSSLGGDVGTSCMVFAPPQNFTGGSSTTDKPLDDDFLKPIAGVCAKSDIAEADASTMPPTSDSGVKGKCKAYEEDDIGSGCYKEKVNTAATAPNLANEQNGNLTNNWE

SEQ ID NO: 169044 - protein, 188 aa, Glycine max
  unsure (1)..(188): unsure at all Xaa locations
  Clone ID: PAT_MRT3847_123661C.1.pep
LTNKKKLVPILLLILSIISILMLLSLILRSSSSAMSPPSSPLFXLTTKAASHAPESSKHPNSTLTEKEFKVLSNLVALKSPCNLLIFGFQPQYLTLSSMNAPGSTIFLYDHDDMIAKVATNSNNTQTYQLGYNVPSKKAFNLLKHARQNQACAPSYPTQLLQKSKCKFALRNLPSEVYEKKWDIIVVD

SEQ ID NO: 169045 - protein, 169 aa, Glycine max
  Clone ID: PAT_MRT3847_123662C.1.pep
EEGYKISSYPRLFVDRYGYHLDFQKLGYQKLAPLLQIMPEVKVESTYIFPSVPAVSASDGESFILQTQVNNASHAHHAKAEELDTPKLPDYEPIVSDYDSSESEGDSQPEKQGKLKCNKHDISLWQALDLWHNKKEGENSVKKPDNVGHLNKTLVADILNSSAKSTRGT

SEQ ID NO: 169046 - protein, 36 aa, Glycine max
  Clone ID: PAT_MRT3847_123663C.1.pep
KLRRTVINVRHPFKIVHQHDRRPEQHCLTFKSESII

SEQ ID NO: 169047 - protein, 74 aa, Glycine max
  Clone ID: PAT_MRT3847_123664C.1.pep
MSNAAEQARSLFGICLSHRPKWQQFLICSSGFFFGYLVNGICEVLYRVYTQVHVLINWLIFFNIIWWFESVKPL

SEQ ID NO: 169048 - protein, 177 aa, Glycine max
  Clone ID: PAT_MRT3847_123665C.1.pep
MSYPHFLVMPYPILGHMNPLLQFSQVLANHGCKITFLITEFNQKRMKSEIDHLGAQINFVTLPDGLDPEDDRSDQPKVILSLRNTMPTKLHRLIQDINNNNNALDGDNNKITCLVVSKNIGWALEVAHKLGIKGALLWPASATSLASFESIPRLIDEGIIDSETGLPTRKQEIQLLP

SEQ ID NO: 169049 - protein, 54 aa, Glycine max
  Clone ID: PAT_MRT3847_123666C.1.pep
MFFFLHNSKFYFKLNRSESLGKMAKILTIRITFNISVALLSEIHSLIAYVHSAV

SEQ ID NO: 169050 - protein, 50 aa, Glycine max
  Clone ID: PAT_MRT3847_123667C.1.pep
TACGRSMAGVAIKGETLIRLPNRGHFSQLNFETFRRICWGPKLILYAPSQ

SEQ ID NO: 169051 - protein, 63 aa, Glycine max
  Clone ID: PAT_MRT3847_123668C.1.pep
FWKRVKRKLKKGPSLTLGPPAPSKEVPRLKGVFKKKKKKKKKKKKKKKQIKKKKKKKKKKRPL

SEQ ID NO: 169052 - protein, 70 aa, Glycine max
  Clone ID: PAT_MRT3847_123669C.1.pep
KGGPIRLHWVFQGFQKARHGLGCVIPSISAWMPHIQLGRIRFVLFNKESSPPMVFHVLLSQMFDSPNKTL

SEQ ID NO: 169053 - protein, 108 aa, Glycine max
  Clone ID: PAT_MRT3847_12366C.1.pep
RGGGSPVSESFFFLHVWGFFLFSSTRGHPALFFFKYGSPECVRLAGVLLYFFGPPYFFLTISVELFLFYSGGWRVLSFLSGGFLLGLSPGRSFVYTGLFFFFVWAYLI

SEQ ID NO: 169054 - protein, 67 aa, Glycine max
  Clone ID: PAT_MRT3847_123670C.1.pep
SNAPQYVKIMNHMYTRLLYKMYNILTDHGYLNAQQAPQYKKGCLPYFFILCLLLLSMVYPIDLPSSQ

SEQ ID NO: 169055 - protein, 88 aa, Glycine max
  unsure (1)..(88): unsure at all Xaa locations
  Clone ID: PAT_MRT3847_123671C.1.pep
SLEVISKASSETSGWHAIQAILNVQGXQVKEXNPAMGMDCLPKGSNDMQNQHVIXTLIGKKHQICLHTQMVRKVLKNDLHGECEKSQE

SEQ ID NO: 169056 - protein, 46 aa, Glycine max
  Clone ID: PAT_MRT3847_123672C.1.pep
LKLVMNQATLFLDPRRALLQSLRMLMVCTGCRVLMACCREYCCVRP

SEQ ID NO: 169057 - protein, 60 aa, Glycine max
  Clone ID: PAT_MRT3847_123673C.1.pep
SLIGCVPLLRSASHDGGAEATLWLEHHRLRFHQDRAWLLSVTFDLGPAALKVGRMASYPG

SEQ ID NO: 169058 - protein, 59 aa, Glycine max
  Clone ID: PAT_MRT3847_123674C.1.pep
FNAGGILLFCSFVLASSNVLFMLMRKCLDLLDAESQRTGLRSMHFVKQRSPMRGGSTRF

SEQ ID NO: 169059 - protein, 96 aa, Glycine max
  unsure (1)..(96): unsure at all Xaa locations
  Clone ID: PAT_MRT3847_123675C.1.pep
VVKLYLAMVITLSVHMQKEGRLSFTVKQYLKCLSWRCFLGGCGHXSVRSAKVHFIRMFSAQVGIVQFFTDEKRHRKIWLKQNCNWTDGTSKFCQGI

SEQ ID NO: 169060 - protein, 83 aa, Glycine max
  unsure (1)..(83): unsure at all Xaa locations
  Clone ID: PAT_MRT3847_123676C.1.pep
PARKRLMRDFKRLQQDPPAGISGAPQDNNIMLWNAAIFGPDDTPWDGGTFQLTLHSTEEYSKXSPTALYLSSMVHTLMSPDGG

SEQ ID NO: 169061 - protein, 82 aa, Glycine max
  Clone ID: PAT_MRT3847_123677C.1.pep
FGRCLEEGAEDFLLKPVKLSDVRRLKDFIMKGKVKEGEKISHKRMRSIDCSPPLTATCSLLSLPCDPSPSLLSPLSTKKARL

SEQ ID NO: 169062 - protein, 164 aa, Glycine max
  Clone ID: PAT_MRT3847_123678C.1.pep
MAITGDIFRQSITEMLAESPSGAPELHVLAVDDSLVDRKVIERLLKISSCKVTVVESGTRALQYLGLEGENGSLGFDSVKVNLIMTDYSMPGMTGYELLKKIKESSVFREIPVVIMSSENVLTRIDRCLEEGAEDFLLKPVKLSDVRRLKDFIMKGKVKEGENI

SEQ ID NO: 169063 - protein, 73 aa, Glycine max
  Clone ID: PAT_MRT3847_123679C.1.pep
ISSKTSLGSIFFLTGFCTALDKTSVRVLYRESESHRLHTDVAPVIHNAVRTSSHLAVPSILIYFESGSLVDLG

SEQ ID NO: 169064 - protein, 72 aa, Glycine max
  Clone ID: PAT_MRT3847_12367C.1.pep
FLFFFFFFFFCFFFFCFFFFFLYPSHWGLPWRLKRGVVLFYPKPQIKGWANGAFSLCNINFSWGRKSKIHSK

SEQ ID NO: 169065 - protein, 48 aa, Glycine max
  Clone ID: PAT_MRT3847_123680C.1.pep
WSVKPHIFASPLLRKSSNLIQKIDFSLGPFTDGPIGPKNYFFKKHHLS

SEQ ID NO: 169066 - protein, 151 aa, Glycine max
  Clone ID: PAT_MRT3847_123681C.1.pep
ADSSVYQERLHMCCNRDTTPLNSKRSAKYILKLTRPRISDIKMLEQEGSIQKHHQASTSICETSMNFIDEVQKADSKRSQTCEPVSNLVHPFHSDKCEVDANAAKVKGTLESDSSVYQERLQMSCNSVTTPLKSKRSARTEISSGDCLVEG

SEQ ID NO: 169067 - protein, 128 aa, Glycine max
  unsure (1)..(128): unsure at all Xaa locations
  Clone ID: PAT_MRT3847_123682C.1.pep
SFSRARRVKRMPLYIGGGAGAKNAVLMNMPNAVLSMWRYFAGDLDFEVSKMTCAYIKCTDSFSIAFGNCXDDTTYFEGFPHKLAQLGEIQEKAVLKLSQAELPPFSSTHVRAATSQLADGRPYWCALV

SEQ ID NO: 169068 - protein, 52 aa, Glycine max
  Clone ID: PAT_MRT3847_123683C.1.pep
SLRQLKQVWKFSNRQSILNKRGQALIPLSELNCGSHRREIQFPVHAKVSAFS

SEQ ID NO: 169069 - protein, 160 aa, Glycine max
  unsure (1)..(160): unsure at all Xaa locations
  Clone ID: PAT_MRT3847_123684C.1.pep
FPWFEPTPXPAXRRVAXTRGAELRGSXRRWVSFFQRTFLRXXXPQFFLSPSFKTPLIPFISHWXSXRRPTCRGWEPRFPEPCQPARSLPPGGRKGGSLQTLEAQGLKKNQGKPKTLKRFFQYHXKPLPTQSFPYEGDGIKERQLPSLERRKTGSSQHADC

SEQ ID NO: 169070 - protein, 82 aa, Glycine max
  unsure (1)..(82): unsure at all Xaa locations
  Clone ID: PAT_MRT3847_123685C.1.pep
MAVQALVSSASLTFAAEVTRQSLGSTSLESPIGVSRXATFRVIAAGPRHVKQGSARPLWFASISSLSHVHGSLPGAYGFEPP

SEQ ID NO: 169071 - protein, 81 aa, Glycine max
  Clone ID: PAT_MRT3847_123686C.1.pep
SFITTMPSYDSTKSTNTSTPTDKCHFAATQLNQNNFIFRFQHWAGTSVIKRQMADHVNKPKIFLKKIWLRVLQIIAETWWL

SEQ ID NO: 169072 - protein, 73 aa, Glycine max
  Clone ID: PAT_MRT3847_123687C.1.pep
SLIVLPPLVLPACLNPFLLIIRLSTRDCMGLPHQKDANLENFSRKPGVYRIENQLFFWVVLKNYYFLSLSRQG

SEQ ID NO: 169073 - protein, 67 aa, Glycine max
  Clone ID: PAT_MRT3847_123688C.1.pep
DDCKDLLQSAIESLQLSTDMVHNNNVQAVHNQQADFKNWLSAVISYQQACTEGFDDAKDGGMSLYGF

SEQ ID NO: 169074 - protein, 160 aa, Glycine max
  unsure (1)..(160): unsure at all Xaa locations
  Clone ID: PAT_MRT3847_123689C.1.pep
GLCIGPNNDRSRRKRAVRRGHTYTSDPRSPPRELRHAKRGIHHESPNLDSYVYTEHHDTARQCGRARTLDRLEVTLLSCAKGVLWDRRKRSEKTTYAHYTMIGQRVGSVDLAWEASCKLTLVXYFDTCGCACTYPLARTNGCKVICHTHDATITSDMLAR

SEQ ID NO: 169075 - protein, 210 aa, Glycine max
  Clone ID: PAT_MRT3847_12368C.1.pep
GRVTSDGKDIRKYNLKSLRRHIAVVPQEPCLFATSIYENIAYGHDSASEAEIIEAATLANAHKFISSLPDGYKTFVGERGVQLSGGQKQRIAIARAFVRKAELMLLDEATSALDAESERSVQEALDRACSGKTTIIVAHRLSTIRNANLIAVIDDGKVAEQGSHSLLLKNYPDGIYARMIQLQRFTNNQVIGMASGSSSSARPKDDEREG

SEQ ID NO: 169076 - protein, 45 aa, Glycine max
  Clone ID: PAT_MRT3847_123690C.1.pep
MDQTTNEILGSCSSHKSDKRVHHCNWYTLRLTRPPAIEIHSSSSV

SEQ ID NO: 169077 - protein, 58 aa, Glycine max
  Clone ID: PAT_MRT3847_123691C.1.pep
DSHDHHGTSQSCPADKDPMRPSKWKEEHFVIVSLTGRGLLIYGIYPLFHEARPREKTN

SEQ ID NO: 169078 - protein, 42 aa, Glycine max
  Clone ID: PAT_MRT3847_123692C.1.pep
HRVLDYVLLSPRLCSNCATYNVTARNYYVVYYYPGSVVFSQP

SEQ ID NO: 169079 - protein, 110 aa, Glycine max
  Clone ID: PAT_MRT3847_123693C.1.pep
IKLGLKTTMVVLKGCLWLFSLVGVPPARMELGFFKSVRSPGFDDDGFSNPCCVFGMCPRSMPPQCSCEDIGLNSSPPNCKTCLGPRSHPGQGGFFAPTDFCSNPCKSRDA

SEQ ID NO: 169080 - protein, 24 aa, Glycine max
  Clone ID: PAT_MRT3847_123694C.1.pep
ISVSYSCSLDLIIIVGFYLIICRS

SEQ ID NO: 169081 - protein, 53 aa, Glycine max
  Clone ID: PAT_MRT3847_123695C.1.pep
YKVITIYYICFTKSTCWDVGYNRDGTRLGRRKFVLTIGSLTINYWVYTSRFIF

SEQ ID NO: 169082 - protein, 84 aa, Glycine max
  Clone ID: PAT_MRT3847_123696C.1.pep
NVFPFVSPKKTTRAEPSKTSRPYPFTLTPPPKTTGLVHRDGSTMDKSYQYPKENYLNDQTLPRRVYSYSTSCTTSDHVTALDGL

SEQ ID NO: 169083 - protein, 244 aa, Glycine max
  unsure (1)..(244): unsure at all Xaa locations
  Clone ID: PAT_MRT3847_123697C.1.pep
MIVSALLTSVGINTALCVLFFTLYSILRKQPSNYEVYVPRLLTEGTSKRRSRFKLERLIPSAGWVAKAWRLSEEELFSLSGLDGVVFMRMITFSLKTFTFAGIIGIFVLLPVNCWGNQLKDIDIADFVNNSLDVFTISNXNGSHWLWVHFSAVYIVTGFICILLFYEYKYISSRRISYFYSSEPQPHHFTILVHSIPTSSSGSISDSVQSFFSELYPSTYLSHVVVRRTGKIRKNVQKGYSITI

SEQ ID NO: 169084 - protein, 52 aa, Glycine max
  unsure (1)..(52): unsure at all Xaa locations
  Clone ID: PAT_MRT3847_123698C.1.pep
VEHAVEFPDESPHPHCSQLIENVSADPKGFGIGPAGKNKCXDPKFTEGTAHV

SEQ ID NO: 169085 - protein, 98 aa, Glycine max
  Clone ID: PAT_MRT3847_123699C.1.pep
CKVGPGVPAFNVSGPAHWAPPGSAFLGWACPSFGCFIGEPFGSGSSCSVLSPTVFITPHREIWDAFWDGPGIPGWPRARSLGCFLVKKSFLSEKKQNS

SEQ ID NO: 169086 - protein, 59 aa, Glycine max
  Clone ID: PAT_MRT3847_12369C.1.pep
PTEDILYTGERGCWLVTTRQFEDEGLDLNRTNLECATACTEAYCLPEELDAGDLVSEDR

SEQ ID NO: 169087 - protein, 102 aa, Glycine max
  Clone ID: PAT_MRT3847_1236C.1.pep
SVPHTLQVILLHKASKLSLGEVFKHPANSFIIIKKESVFNASVFSQPSHPTARTCTFCFLSQNRNLAYTKPLLKFRWAHKSSTYICPAEQERSSEFHPTKCT

SEQ ID NO: 169088 - protein, 84 aa, Glycine max
  unsure (1)..(84): unsure at all Xaa locations
  Clone ID: PAT_MRT3847_123700C.1.pep
NSISSLATFTSLRPSTINGLSLNSLSXTKLSFKPSRHTFKSNNFISNSFLTNYCHNTVYFYFYHLGNTTYPSYLYTSYAPSPYN

SEQ ID NO: 169089 - protein, 90 aa, Glycine max
  unsure (1)..(90): unsure at all Xaa locations
  Clone ID: PAT_MRT3847_123701C.1.pep
QKLITIEDVFLLCLGLHVKSLDMGXKIYVHLAYQKFDGEAWMPGFERHGEIFCALNCTYCQSTRLVFRIRAAFDEQAPSSSKFFGIFSPP

SEQ ID NO: 169090 - protein, 777 aa, Glycine max
  unsure (1)..(777): unsure at all Xaa locations
  Clone ID: PAT_MRT3847_123702C.1.pep
CLSIYKNRVFFTNTGYSSKENIGRNCRFPQGPETDKNEVAKIRDATRNGRSYCGRLLNYKKDGTPFWNLLTVTPIKDDHGNTIKFIGMQVEVSKYTEGMNEKALRPNGLPKSLIRYDARQKEKALGSITEVVQTVKDPKSIINDRNGDTATMPEEQEKFNFDFVLPKSADIGNTSTPGRQASPLNIQRMSSSHDKSKTSSRSGRISFKGLKGISPSSAEEKXIICPEIMMTKDIEWSEAFELXQRMRDIRKVFNVSTKFDVTEKTEIILDQIDPDIRVVFASDSFLELTEYTREEILGRNCRFLQGPETDQATVSRIRDAIREQREITVQLINYTKSGKKFWNLFHLQPMRDQKGELQYFIGVQLDGSDHVEPLKNRLSETTEQQSAKLVKATAENVDEAVRELTDANLXTDYFWSNHTQPVFSGQHKDVKSSTIVIQKLTARVDXFGMQHFQSIKSGDIIEYFLTXAMFTQDLWSASXSDFMLQRSRGLCHSSVIVSVDLVMVQYYHHXSANRQLQTNSKLCRISRKVECTLNKVIFRXNKHPSYMLIDDTSIIHFCIWLIKKSNIIQIXNILLQKDGHVVLADFDLSFMTSCKPQVVKQAVPGKRRSRSEPPPTFVAEPVTQSNSFVGTEEYIAPEIITGAGHTSGIDWWTLGILLYEMLYGRTPFRGKNRQKTFSNILHKDLTFPSSIPASLAARQLINALLQRDPTSRIGSTTGANEIKQHPFFRGINWPLIRNMTPPPLDVPLKLIGNDPVAKDIKWEDDGVLVSSIDMDIF

SEQ ID NO: 169091 - protein, 651 aa, Glycine max
  unsure (1)..(651): unsure at all Xaa locations
  Clone ID: PAT_MRT3847_123703C.1.pep
MEKLKVSAKNDPAGKPEEQEKFNFDFVLPKSADIGNTNTPGRQASPLYIQRMSSSQDKSRTSQSGRISFKGLKGRSLSSAEEKSIVEPEVLMTKEIEWSNNLEHSLRERDIRQGIDLATTLERIEKNFVISDPRLPDNPIIFASDSFLELTEYTREEILGRNCRFLQEPETDQATVSRIRDAIREQREITVQLINYTKSGKKFWNLFHLQPMRDQKGELQYFIGVQLDGSDHVEPLKNRLSETTEQQSAKLVKATAENVDEAVRELPDANLXKRPEDLWAIHSQPVFPRPHKKENPSWIAIQKVAARGEKIGLQHFVPIRPLGCGDTGSVHLVELKGTGELYAMKAMEKSVMLNRNKVHRSCIEREIISLLDHPFLPTLYTSFQTPTHVCLITDFFPGGELFALLDKQPMKIFKEESARFYAAEVVIGLEYLHCLGIIYRDLKPENILLQKDGHVVLADFDLSYMTSCKPQVVKQAIPGKRRSRSEPPPTFVAEPVTQSNSFVGTEEYIAPEIITGAGHTSGIDWWTLGILLYEMLYGRTPFRGKNRQKTFSNILHKDLTFPSSIPASLAARQLINALLQRDPTSRIGSTTGANEIKQHPFFRGINWPLIRNMTPPPLDVPLKLIGNDPVAKDIKWEDDGVLVSSIDMDIF

SEQ ID NO: 169092 - protein, 73 aa, Glycine max
  Clone ID: PAT_MRT3847_123704C.1.pep
GITWKTERNGAGSHYAEEHPETEDEQRPRKIDARLRQTIVPHSDEVYALMETNLLNVTLDDVVAGKGCMKDTK

SEQ ID NO: 169093 - protein, 42 aa, Glycine max
  unsure (1)..(42): unsure at all Xaa locations
  Clone ID: PAT_MRT3847_123705C.1.pep
SLCFGCGRKIMALSLWXXGSCLLSSSXSSTMXSPXIRNPHFH

SEQ ID NO: 169094 - protein, 52 aa, Glycine max
  Clone ID: PAT_MRT3847_123706C.1.pep
GLLSTQKVLFRFIGEMSLVTSVFRVVWFQTLCYMILNILFHFNFDQFYIFEL

SEQ ID NO: 169095 - protein, 54 aa, Glycine max
  Clone ID: PAT_MRT3847_123707C.1.pep
RELPPFFFFLGPNDCRRLRLIQAFDLGFRGNVIPGNIWGKVLLISKNFFPLRNI

SEQ ID NO: 169096 - protein, 42 aa, Glycine max
  Clone ID: PAT_MRT3847_123708C.1.pep
LIDCSRGRPVFHSGCPTVGKAHWYVAYLIYWELQALGCILRA

SEQ ID NO: 169097 - protein, 65 aa, Glycine max
  Clone ID: PAT_MRT3847_123709C.1.pep
FRLIQYCSSEMLAMPTLPSFSFFGRSPFNNCLALVHTDNHYTKKQPFQGFHWTQIFSDTDSKQSY

SEQ ID NO: 169098 - protein, 76 aa, Glycine max
  Clone ID: PAT_MRT3847_12370C.1.pep
KLLKDVLWTIGPEFVSPSFGAFFCSEKEVVTLVCWLFPVEFFQRYFSLDISLFFFPLGFYVCVSSLKIALFLLLVD

SEQ ID NO: 169099 - protein, 63 aa, Glycine max
  Clone ID: PAT_MRT3847_123710C.1.pep
EFIHAPGFFQGTSSPKHKDIKGMGGKLNGAASYDPLKATTLLGQGKGTKANALKDVVPINTGK

SEQ ID NO: 169100 - protein, 49 aa, Glycine max
  Clone ID: PAT_MRT3847_123711C.1.pep
LNDSIKNIHIINVFLLNKKTYVLDLYGFETKEIPNNTLKYPVQLFHLSL

SEQ ID NO: 169101 - protein, 88 aa, Glycine max
  Clone ID: PAT_MRT3847_123712C.1.pep
TGQVNRELLSVCTAFLPSEPANHLRSQELRELITALLDLMDVGTRAIHVHVILHWGRNITYFPPPVASGFHPLTANLSHYIPAILSHL

SEQ ID NO: 169102 - protein, 59 aa, Glycine max
  Clone ID: PAT_MRT3847_123713C.1.pep
MGLAFTNLFIKLFAMKDIRILLVSLDAAVKTTMLYNFLLVYIGAIIPTPRFNVDTGEYK

SEQ ID NO: 169103 - protein, 84 aa, Glycine max
  unsure (1)..(84): unsure at all Xaa locations
  Clone ID: PAT_MRT3847_123714C.1.pep
VLEKMAQLFTPPFWLPLCKFCIYLSPVLHPSHWARYVYLGFGLLLSPISREGGILMFPPLPPPIECFYPGIFPXWFNPPPEKAG

SEQ ID NO: 169104 - protein, 89 aa, Glycine max
  unsure (1)..(89): unsure at all Xaa locations
  Clone ID: PAT_MRT3847_123715C.1.pep
PDPAKYLWPFSEQIPSYLTGEIPGDYGWDTAGLLTEXKTLSGTRSWWGNHKKRASAGRFGLPLPEILKRIGAKFXGEVVWIKAGATNLF

SEQ ID NO: 169105 - protein, 40 aa, Glycine max
  Clone ID: PAT_MRT3847_123716C.1.pep
RLERLERLETAARRRQKGSKVTKDRSFMEDSIGTWRTLKA

SEQ ID NO: 169106 - protein, 53 aa, Glycine max
  Clone ID: PAT_MRT3847_123717C.1.pep
VAPWVSSTRSRCHNRHDSSTEPRVRSSQIRCTCLFIITHPAFFMSCRVERGLH

SEQ ID NO: 169107 - protein, 74 aa, Glycine max
  unsure (1)..(74): unsure at all Xaa locations
  Clone ID: PAT_MRT3847_123718C.1.pep
VLQIIRDRHFCNEDKYDLRHRVERSSVKFMRRFVLPSNAKVIXVKVSRAKGVPIGTVPNTEVRNHNVTAIEISG

SEQ ID NO: 169108 - protein, 90 aa, Glycine max
  unsure (1)..(90): unsure at all Xaa locations
  Clone ID: PAT_MRT3847_123719C.1.pep
HYQKFPLQMKTGFGGQYIIDVACTIWRLGVKANNVLXLQTVDAPCGEYIVDYFLRDLYRSHCKTDHQHAYLYAKFVKLTNKDVFVLDVDN

SEQ ID NO: 169109 - protein, 56 aa, Glycine max
  unsure (1)..(56): unsure at all Xaa locations
  Clone ID: PAT_MRT3847_12371C.1.pep
VGGATGKIKGGAPSISERLDKYSLLLKIXKKLCFEAVFTGAYYRTPVEPHKSFQVD

SEQ ID NO: 169110 - protein, 77 aa, Glycine max
  Clone ID: PAT_MRT3847_123720C.1.pep
TGEHHDACWSPLCLVEMLHWLIKSTDHPRMAHDMERLFYACSCCHHGRGLLLEYLPWCLRPADEFLVLQGAAMSIWI

SEQ ID NO: 169111 - protein, 70 aa, Glycine max
  unsure (1)..(70): unsure at all Xaa locations
  Clone ID: PAT_MRT3847_123721C.1.pep
NSLHLKIAHKFFNANCLMNCEFALILYHNYHQLXHTSDYPMNQISHVFXKSLHYVNLFIHFINPYSFIQF

SEQ ID NO: 169112 - protein, 175 aa, Glycine max
  unsure (1)..(175): unsure at all Xaa locations
  Clone ID: PAT_MRT3847_123722C.1.pep
SSGSFESGWVSVPFRHPSTFETLAMEPELKKNIKNDLTAFAEGXEFYKRVGRAWKRGYLLHGPPGSGKSSLIAAMANFLCYDVYDLELTKVSDNSELRSLLIQTTNRSIIVIEDIDCSVDLTADRTVKKTQAGKLSLRSSNKKTTTTSSFTRCEESGRVTLSGLLNFTDGLSDAW

SEQ ID NO: 169113 - protein, 113 aa, Glycine max
  Clone ID: PAT_MRT3847_123723C.1.pep
PHLAARVPLAAYHAVSRYCKSSGTAPVLTACQSQLPQMCTSFGPPHPTLFAPPGFALGLAYRGPGVLALQHQPVPLTPPPGHLAALNTPYPARPFISQAGRFLPEHTRALEPG

SEQ ID NO: 169114 - protein, 140 aa, Glycine max
  unsure (1)..(140): unsure at all Xaa locations
  Clone ID: PAT_MRT3847_123724C.1.pep
QTEIIAPLSRSRSLTPHHIGVFTRTNNKTLFFLFPHSLCLSLSINAIPFFSKITLPYLPLNSSSSVFSLLRIRTIAYTAATLRRLLKRLRLGILVNHLPIPLLGLVSSPLFLSLSNSPKISPLSVTLASGGFFPLTCVSX

SEQ ID NO: 169115 - protein, 64 aa, Glycine max
  Clone ID: PAT_MRT3847_123725C.1.pep
YCYVLRLFNILCTICVVCTHILSLFLHLNLVSLTYLAFCLCFVTVKHENEPFTGSTPFPIFLPF

SEQ ID NO: 169116 - protein, 55 aa, Glycine max
  Clone ID: PAT_MRT3847_123726C.1.pep
DSRKSYPSGPKGKPLKACLVMALNLKTLVKNLPQNHYRKTPPQPSAQHFQRWNPK

SEQ ID NO: 169117 - protein, 86 aa, Glycine max
  Clone ID: PAT_MRT3847_123727C.1.pep
QASLGMKRNLCRCIKGNHLLAVVVAAVASLITFYRTQFLGFHSSIGTLTCLSLLLMVVLWTLVEGPLTDPASCMPQRSTIEYILYI

SEQ ID NO: 169118 - protein, 295 aa, Glycine max
  Clone ID: PAT_MRT3847_123728C.1.pep
MHFHFHLTHIIFSLIFNLSKAQSSMEPVPAYITHHSWEPSVAITVAAIIFALLLMAIISVYLRRCAQSHIIITTTTLPCSCSQGINKDLLNTFPTLFYSNIKDLNKANQTLECAVCLTDFTHKDSLRLLPKCNHVFHPHCIDSWLTSHVTCPVCRANLSQESSCHVSITVPPHGEEGSLGNMTTTTTTTEATQTNVRNSTITNIGDGVVASERNLSRSNSTGHSLVEEQGKGVERYTLRLPEDVRRYILVNHGRSVQRSASVKGGCWSDSEESYVGKRVEKRWVICTPPFVAQHD

SEQ ID NO: 169119 - protein, 103 aa, Glycine max
  Clone ID: PAT_MRT3847_123729C.1.pep
RRLNVRRNSSAMSHKWWCADHPPLLHPHLSIDPLSLITLFTITPTHPLNTRGTLNTPPMVHQNVPPHIFGQPQRVPLHTLPLLLHNAMPRRVRPRKVPLGHNN

SEQ ID NO: 169120 - protein, 93 aa, Glycine max
  unsure (1)..(93): unsure at all Xaa locations
  Clone ID: PAT_MRT3847_12372C.1.pep
GVGKERSKEHRKVFCYNIQGITKPPIGRLVPKGGVKKISGLIYXKTRGVLKIFLENVIRNAVTYTEPAKRKTVPAMDVVYALKRKGRTFYGFG

SEQ ID NO: 169121 - protein, 53 aa, Glycine max
  Clone ID: PAT_MRT3847_123730C.1.pep
NVKAKIPAKEGIPPGHQRLIFAGQQLEDGRAPPGSNIQKESTLPLVLRLRGGF

SEQ ID NO: 169122 - protein, 66 aa, Glycine max
  unsure (1)..(66): unsure at all Xaa locations
  Clone ID: PAT_MRT3847_123731C.1.pep
WRSMAAYRTRARXRVMGEVEEVQXQMKADMKAMKXKIATMVEAMMSMKKIMXANMVXXAATSAVAK

SEQ ID NO: 169123 - protein, 57 aa, Glycine max
  Clone ID: PAT_MRT3847_123732C.1.pep
MCKCSMQTSLDLIPDYFIQNERGVSNNRQCKKLKRRRKNAERRKKKKEQLPGYQTLK

SEQ ID NO: 169124 - protein, 60 aa, Glycine max
  Clone ID: PAT_MRT3847_123733C.1.pep
IFACSPPKPFKGDAVWSTTLDPLGKPPLGGQAPAYGNRVKAGDPKKFPPKREVFPLGVAI

SEQ ID NO: 169125 - protein, 60 aa, Glycine max
  Clone ID: PAT_MRT3847_123734C.1.pep
DLKFYLKIFLHRHDSFLFSLYDFAVFFNYFRRIFKNIFSHAEQITQVYFIFTLSSCFAIF

SEQ ID NO: 169126 - protein, 81 aa, Glycine max
  Clone ID: PAT_MRT3847_123735C.1.pep
LIIRLAPTKEPLSIDARARVYLYNLRYSYLPPNTEDRTFMHHHKANHALQLRIIHLNKTYKMTYGALIIRTIYMEQVVWIS

SEQ ID NO: 169127 - protein, 78 aa, Glycine max
  unsure (1)..(78): unsure at all Xaa locations
  Clone ID: PAT_MRT3847_123736C.1.pep
NSARERIIILSSINHPNLVILHGYXIHPRGLFLVYEDVLNGALTLHLHNTIGTLTXHVRLDIDFQTALAMEYPTLYLA

SEQ ID NO: 169128 - protein, 55 aa, Glycine max
  Clone ID: PAT_MRT3847_123737C.1.pep
GKLGARRQTDPALPTRLRLCLKGSGDARYKTPLAPYEKSKGWDYEGSIAAWLTLI

SEQ ID NO: 169129 - protein, 42 aa, Glycine max
  Clone ID: PAT_MRT3847_123738C.1.pep
LTFKKQYFYTQDKQTVRTGLNNPVAHIKFDDYSLQKNLCLYL

SEQ ID NO: 169130 - protein, 48 aa, Glycine max
  Clone ID: PAT_MRT3847_123739C.1.pep
LWLVIIMNCLRWLFSLSMQIVYIFVVAHLSQLYLCSHISSLVESSPIR

SEQ ID NO: 169131 - protein, 48 aa, Glycine max
  Clone ID: PAT_MRT3847_12373C.1.pep
VRLSAQSQAQYEPPTAVSHMFETQATMQMYAPHQVEHVHIAIRAVAKC

SEQ ID NO: 169132 - protein, 60 aa, Glycine max
  Clone ID: PAT_MRT3847_123740C.1.pep
SKGTHHTHADNMGQQRSLCAQSANFSQFTADEITAIMNNFNEPGSLAPTGLFLAANKYMV

SEQ ID NO: 169133 - protein, 88 aa, Glycine max
  Clone ID: PAT_MRT3847_123741C.1.pep
KKKKKKKKKIKKKKKKEKKRKKKKKKKKKKKKKKKKKKRGRPPFRDLATPEKNSDPGPEGDPFFLKGGRIKPGRKKGKSFSRGKIVTR

SEQ ID NO: 169134 - protein, 48 aa, Glycine max
  Clone ID: PAT_MRT3847_123742C.1.pep
DVSGLKNNRVKLNGPATVLLLYILISLVFFGMPVTVLVCRSPIICSYA

SEQ ID NO: 169135 - protein, 77 aa, Glycine max
  Clone ID: PAT_MRT3847_123743C.1.pep
TLVSNPIILDRLTQPKHLAHKVKVTPFSYTLFWGILQLYVESPTLIYYQDSEIMNGIRSYWSTIPNIEKKIIKPDDI

SEQ ID NO: 169136 - protein, 591 aa, Glycine max
  Clone ID: PAT_MRT3847_123744C.1.pep
MIGVKMALTHSTSFPQMFQRAASAQFRRPLLHLVSTQESRHRYLTQCVPLHKAALKGDWKEAKKILDQDPTLELNSAITKGWATVLHIAVGANHESFVEELLKLMSREDLELQDIKGNTAFCFAAAVGNVHIAERMRIKNASLPMIRGGEGVTPLHLAVLQGRSEMARYLFDKTRETLYDDDWFQLFLICVNSRLYELALEMLNQKESLAFARGDNDETALHVLARKPLDCGCRSPLRYPKHVLHLCKNMKDPPVLKLTRRVWDIFLTLDDSKMMTAIREPSQVTFIAAEVGNFEFLSVIMSTYPDLIWELNTMGQSIIHVAALHRHASIFNLIHEIGPSKDLLLTFWDDEGSTLLHSVAEIAPTDRLNVVSGAALQMMLELTWFEEVKKNMQPSYIERPNHEGIVPRELFTEKHKELLKKGESWMKRTASSCMVVSTLIATGVFSAAFSVPGGTKDDSGSPNYLKKHLFTVFAISDALALTLSTASTLIFLSILISRYAEEDFLRSLPFKLIFGLVSLFLSIVSMMGAFSSAFFITYYHAKTWVVPITIAVFVLFPILLFIYLQFRLWHDIVYSHYMCGSLFRPRKRMIH

SEQ ID NO: 169137 - protein, 39 aa, Glycine max
  Clone ID: PAT_MRT3847_123745C.1.pep
LLQLVLSELGAHSAEYRSKISLGWKVGFGVPAALMFMCT

SEQ ID NO: 169138 - protein, 118 aa, Glycine max
  Clone ID: PAT_MRT3847_123746C.1.pep
MGLTNTMVVLTVCMVLLFLVRGTTSANLMLSNLGLRMKSDHHQHSNHDQSSKPCCDQCACTKSYPPQCRCSYMRLNSCHSACRSCNCTLTSPAQCFCADISAFCYEACRPSEDDNDFY

SEQ ID NO: 169139 - protein, 39 aa, Glycine max
  unsure (1)..(39): unsure at all Xaa locations
  Clone ID: PAT_MRT3847_123747C.1.pep
KHVYLXIXDRNNRNGKPLVNXSXGELXRXXDSGXXQPQW

SEQ ID NO: 169140 - protein, 158 aa, Glycine max
  unsure (1)..(158): unsure at all Xaa locations
  Clone ID: PAT_MRT3847_123748C.1.pep
KFPIPIIDELLDELGAAMXFLKSGYHQIIPKTAFGTHHEEHYEFLVMPFSLTNALSTFQALMNXLLQPFLCKFVFFXDILIYSINEGKHEKHLKIVLQTFKEAKLXANRKKCSFGCKKFEYLVHMISVKGVSADPKKLEVMVAWPIPKEMRTKKVARI

SEQ ID NO: 169141 - protein, 41 aa, Glycine max
  Clone ID: PAT_MRT3847_123749C.1.pep
FFNHLYYLSFYYQTHLNNFLYLNNIHKLHLKLNLFIISFQL

SEQ ID NO: 169142 - protein, 69 aa, Glycine max
  Clone ID: PAT_MRT3847_12374C.1.pep
DIIFTCGAINTMDTRAFYKVLVALVTRMVFTFAMYHRFTIKTNINSTTVWINSSTNLLATCLGTTPLTS

SEQ ID NO: 169143 - protein, 51 aa, Glycine max
  Clone ID: PAT_MRT3847_123750C.1.pep
LSSLTQGFRILSPRDTDSYHEMVVFQLNQFWIAKSFGRCCPPILIDTEPVF

SEQ ID NO: 169144 - protein, 47 aa, Glycine max
  Clone ID: PAT_MRT3847_123751C.1.pep
TMTHSNLFTTHIFYIGVREGFYSLEKLFLRKYNTLIFSNMQKSVYVF

SEQ ID NO: 169145 - protein, 177 aa, Glycine max
  unsure (1)..(177): unsure at all Xaa locations
  Clone ID: PAT_MRT3847_123752C.1.pep
RLDPRVRLCPTTVQLQVIEEVWDLLNEDEVSATVETTSEQLLMAISNAAWSGIGSITTLRLQGSIQQHELMILIDSGSSHTFINDKWLSELKGVRPLHNQLNVRVANGQILTCSHHLPQAVWHMSGHQFVNDLIFLPLPSVDLVVGMDWLQLHSPMRVDWAXKWMIIPYRGPLVCLQ

SEQ ID NO: 169146 - protein, 73 aa, Glycine max
  Clone ID: PAT_MRT3847_123753C.1.pep
IPLSLIPYVYTKCNTILWHLKPNYLAYEKNKTNVSYNSLRKEGWTYIAFMLKKTQTTPYHNSKHGSSNMDLSH

SEQ ID NO: 169147 - protein, 137 aa, Glycine max
  unsure (1)..(137): unsure at all Xaa locations
  Clone ID: PAT_MRT3847_123754C.1.pep
ANAASGMAGHDDCKLRFLELNTKRTLRFIFVXIEEQQKQVIVEKLGESAHGYEDLTVSRSADECRYAAYDVEYLTEGNVPKSXMFIIAWSSDSSRVRSNMIYASYIEICIXELDRIQEELRATDPTETGIDVFNNRT

SEQ ID NO: 169148 - protein, 67 aa, Glycine max
  Clone ID: PAT_MRT3847_123755C.1.pep
LTQNTTLLTKGHTTCYKQILFAQGTVLKPPHPDYKLGQSLCYRGRHVLATSTTPNKCRNWIIQTTLS

SEQ ID NO: 169149 - protein, 79 aa, Glycine max
  Clone ID: PAT_MRT3847_123756C.1.pep
SLTPPSKFYIIPQFIHLHFIYSVLIEKCTFTKDPFLLPANTHKPRILRPPPPPPPIRNHNLMLFSLSTSPTPYSSEYSS

SEQ ID NO: 169150 - protein, 90 aa, Glycine max
  Clone ID: PAT_MRT3847_123757C.1.pep
PALPKYFCALKLCLCKLVVIVKHTSSVVVKHASSFIIVINHSPSLSWVIFHHCRRPFSITVVGQLPGHVPFSLSFLYIVSKVKGLCGALL

SEQ ID NO: 169151 - protein, 254 aa, Glycine max
  Clone ID: PAT_MRT3847_123758C.1.pep
GCAIVAGRTDKGVTGLQQVCSFYTWKKDVKPRDIEDAINHAAPGKLRVISVSEVSRVFHPNFSAKWRRYLYIFPLTNGGYTDQSSDNGEFYDSFKYNEIHDSASKDELENEKKSYAFSISKVNRLLRKLEGKLLSYKMFARDTKASRNDGPPTECFVYHARAMEVKLPATDHGEETNVMCVELVANRFLRKMVRVLVATSIREAAAGAEDDALIKLMDATCRRATAPPAPPDGLCLVDVGYTEFEPQKCFILIE

SEQ ID NO: 169152 - protein, 514 aa, Glycine max
  Clone ID: PAT_MRT3847_123759C.1.pep
MENKSDMGSSTPQDPHGSDDISSSLANEMNDECSDASQELNNQVLVDGIICSKSHSGEMMSDPVSDKCISPSRTSHSELEMKNKVVAAPPCGICGDGGDLICCDGCPSTFHQSCLDIQMLPPGEWHCPNCTCKFCGIASGTSDKDDASVYILQTCILCEKKYHNSCTKEMNTLPNKINSSSLSFCGKECKELSEHLKKYLGTKHELEAGFSWCLIHRLDEDSEAACRGLSQRVECNSKLAIALTVMDECFLPVIDRRSGINLIRNVLYNSGSNFSRLSYSGFYTATLERGDEIIASASIRFHGTQIAEMPFIGTRHIYRRQGMCRRLFSAIESALCSLKVEKLVIPAIAELTHTWTTVFGFTYLDESLRQEMKSLNMMVFPGIDMLQKLLVEQGNREGSEKMENGNNDFIKTKMGNRSDMGFSTPQGPRGSDDVSSNPANETNDECSDASQELYNQVLVDGIICSQSHSEEMMSDPISDKCDSPSRTSHSELKIEVIHVPQKKTLTRSVTRPLL

SEQ ID NO: 169153 - protein, 48 aa, Glycine max
  Clone ID: PAT_MRT3847_12375C.1.pep
SCPRAVLSSIKLYHTALYGKLVKQVIGHFTSVLQRPGLVELKKMGCLF

SEQ ID NO: 169154 - protein, 135 aa, Glycine max
  unsure (1)..(135): unsure at all Xaa locations
  Clone ID: PAT_MRT3847_123760C.1.pep
MSRNPKGISLFCSCWWRLTREPHSLATPFSNSKNDLHERDEGEVKWTGQPLCIYEPYFEGFWSFPHQKSLYRGIGLVSYRRLGRNDVDAPSCPPLLNNSYYQDLLGEYGAFFELXKQIERLHKNAWIGFQSWRAT

SEQ ID NO: 169155 - protein, 34 aa, Glycine max
  Clone ID: PAT_MRT3847_123761C.1.pep
RGILVNHKLWFLLKHNQFCPSYKSPIPFNNFSLF

SEQ ID NO: 169156 - protein, 234 aa, Glycine max
  Clone ID: PAT_MRT3847_123762C.1.pep
KNVRVLFSLAAKVAPTIIFIDEVDSMLGKRTKYGEHEAMRKIKNEFMAHWDGILTKPNERILVLAATNRPFDLDEAIIRRFERRIMVGLPSAENREMILKTILAKEKYENIDFKELSTMTEGYTGSDLKNLCTAAAYRPVREVLQQDRLKEKEKKKAEVEVQRSEDASDAKGDKDEEAQEMTLRPLNMEDMRQAKSQVAASFASEGSVMNELKQWNDLYGEGGSRKKQQLTYFL

SEQ ID NO: 169157 - protein, 74 aa, Glycine max
  unsure (1)..(74): unsure at all Xaa locations
  Clone ID: PAT_MRT3847_123763C.1.pep
XXXXXXXXFXXTNKNFNLKSLLGSFFHFHCFNDDEVTKLILASLVYCRVPLYLLDACLFISCQDGGEVSLHSSL

SEQ ID NO: 169158 - protein, 29 aa, Glycine max
  Clone ID: PAT_MRT3847_123764C.1.pep
IAAGGIVDARGYVAALALGAQGVCLGTRF

SEQ ID NO: 169159 - protein, 194 aa, Glycine max
  unsure (1)..(194): unsure at all Xaa locations
  Clone ID: PAT_MRT3847_123765C.1.pep
AXDXXIKXXXYARHXXXXHIENXHELGMIVGDEQGSGNWSENFERFDVNLTPNYEEHAEAPALVLADVQISPDANASDEVQGSSEQTRARPSSSQSHSKQPSKRRRTSDVMLEMMSVMAADISRIADALSENNKTVCLEEVVEKVQNMPDFDDDLIIEACEYLCFDEKRALMFLKLDERLRKKWLLKRLRGQGS

SEQ ID NO: 169160 - protein, 391 aa, Glycine max
  Clone ID: PAT_MRT3847_123766C.1.pep
MVTVEEIRNAQRSHGPATILAFGTATPSNCVSQADYPDYYFRITNSEHMTDLKEKFKRMCEKSMIKKRYMHLTEEFLKENPNMCEYMAPSLDVRQDVVVMEVPKLGKQAATKAIKEWGQPKSKITHLVFCTTSGVDMPGADYQLTKLLGLRPSVKRLMMYQQGCFAGGTVLRLAKDLAENNKGARVLVVCSEITAVTFRGPSDTHLDSLVGQALFGDGAAALIIGSDPDPAVERPIFEMISAAQTILPDSDGAIDGHLREVGLTFHLLKDVPGIISKNIEKSLVEAFEPIGISDWNSIFWIAHPGGPAILDQVEEKLRLKPEKLQSTRHVLSEYGNMSSACVLFILDEMRKKSKEEGKSTTGEGLEWGVLFGFGPGLTVETVVLHSVPLEG

SEQ ID NO: 169161 - protein, 202 aa, Glycine max
  Clone ID: PAT_MRT3847_123767C.1.pep
LSVRPPQRLYKGLRMGNIETVLSSSIAAVFFAAFVVAGTMWYGSATTPIELFGPTRYQWDQGYFQQEIYRRVGAGLAENQSLSEAWSKIPEKLAFYDYIGNNPAKGGLFRAGSMDNGDGIAVGWLGHPVFRDKEGHELFVRRMPTFFETFPVVLVDGDGIVRADVPFRRAESKYSVEQEVKGWRKALKSVGIGWHIRIRMNG

SEQ ID NO: 169162 - protein, 62 aa, Glycine max
  Clone ID: PAT_MRT3847_123768C.1.pep
RGGGGDYNTRPIRLVDELFLECKNEWWQRGKPMKKNERTYWECLALYGRVRDEGVSVHQWWG

SEQ ID NO: 169163 - protein, 57 aa, Glycine max
  Clone ID: PAT_MRT3847_123769C.1.pep
GPEFPVDDAYVHSFYDNTTDCYAYIVTSGITAKNLITGGPKLISSLKHSIFLTYPNT

SEQ ID NO: 169164 - protein, 40 aa, Glycine max
  Clone ID: PAT_MRT3847_12376C.1.pep
VSIKTNALAECIFITVVLDSSHPYLPMTLLYIGTKLTRIE

SEQ ID NO: 169165 - protein, 84 aa, Glycine max
  Clone ID: PAT_MRT3847_123770C.1.pep
DLDDPTPFLQNLEQTRERDRAHLEKGGVLTRVSVELFNSILLVFFLLLLLLYPDNPTTVLFGPTEPPPSTSSHDHQAHKSAQRF

SEQ ID NO: 169166 - protein, 38 aa, Glycine max
  Clone ID: PAT_MRT3847_123771C.1.pep
PTTQWPNLIHKQYSPSPFRIHILNILLFYMTNQFTYLK

SEQ ID NO: 169167 - protein, 71 aa, Glycine max
  Clone ID: PAT_MRT3847_123772C.1.pep
FSLIKPFRILKYCSPANSVFQIVLACEGVPPSFVFISKPRNHLSRSIFTCFCCENCQLHYVWVHGVMQNLI

SEQ ID NO: 169168 - protein, 147 aa, Glycine max
  Clone ID: PAT_MRT3847_123773C.1.pep
MRVLQLGLFLALASGFAAISIYITGLSDPFVYPSYHLTDEDTQALLSLHDTFQKCVTANGLGLKATRGTDYCQTTISFPSDTIPKWRDPKTGELEALSFDFNLCEAVATWEQVRNSTTILTKEFIAIIKKRWERNAWRSIKAQKGLT

SEQ ID NO: 169169 - protein, 66 aa, Glycine max
  Clone ID: PAT_MRT3847_123774C.1.pep
LVSGFRLGPPFLWLLDLFISACVMDLGIQFHVLLPPHHFAFVWLRLFLEFFFSKSLEAGNYLSKIS

SEQ ID NO: 169170 - protein, 130 aa, Glycine max
  Clone ID: PAT_MRT3847_123775C.1.pep
DPRVPLRVQCPQGCWAKHFEKLIQCDARLNFLSQQPEIILDSPHFDTQPAAFENLDNPEDHDLHLVNGKGSTTSCLQVIESPQASQSPSFKVEHNGRLGINFDFPPDIGTFHSFVNLPNIHPLRLYLYFV

SEQ ID NO: 169171 - protein, 69 aa, Glycine max
  Clone ID: PAT_MRT3847_123776C.1.pep
VGKILKGRGRRNFKSPENLKKRLGKFVKNVIRVPHYVKKNPCHGGIYTQANKFSSLASPSFQSRKLVGL

SEQ ID NO: 169172 - protein, 109 aa, Glycine max
  Clone ID: PAT_MRT3847_123777C.1.pep
MLISRSRGFSPQIRAYAAVSSRPSRPSGRRKLPSIGLDHFIQRQRVVSLWRDIVRALNKIPPSPTRDELRRYARTEFERNRNVTDITHIRYLISTGKTEFDSMKRYIEE

SEQ ID NO: 169173 - protein, 130 aa, Glycine max
  Clone ID: PAT_MRT3847_123778C.1.pep
HSSFQPRKMSTFDLAIIIIHCYPGLVEMRNKDGATPLKVLACKPSAFRSGINLPWWKKILYYGILVEHLDAEKAIKSYMDKVEKYDQDNELKVNIHLESSEAKKAQIFVEKQYAISVRFVKSAVRLAFKV

SEQ ID NO: 169174 - protein, 41 aa, Glycine max
  Clone ID: PAT_MRT3847_123779C.1.pep
VGIKKVNCFYMSLCRVNRLVIRELLMLCMEERCVLNLNYWV

SEQ ID NO: 169175 - protein, 95 aa, Glycine max
  Clone ID: PAT_MRT3847_12377C.1.pep
ALFGAFPPESGVSVCPVKVLSKFNPFLRGCPSKPHVTVYRFSLGRPAHLFPPRSFLKFWEPISLHYPGPFWQGGRLILCGAPAIYWLILPLTFVP

SEQ ID NO: 169176 - protein, 131 aa, Glycine max
  Clone ID: PAT_MRT3847_123780C.1.pep
VYDPTLKAAVNVVGPKWAPLPAVFGTFVVSGLMHELILFYMGRLQPTFWMTWFFVLHGIFLTLFFAFKRALTARCRLPRFVSGPLTVGFVLATGISLFLPEFIRCQIDVKAFQEYAELGQLLNNLHLRHLS

SEQ ID NO: 169177 - protein, 107 aa, Glycine max
  Clone ID: PAT_MRT3847_123781C.1.pep
FMCLHGREKMIEGDLIQNPTSDKKEKRDEQREFNTLKSVISPIPVSSSSPNPTHVLCLNFLSTSALLPYGDAVVIKVEETDGESREEGIEERPVRRISVVYSDHTHI

SEQ ID NO: 169178 - protein, 86 aa, Glycine max
  Clone ID: PAT_MRT3847_123782C.1.pep
MASSMISSPAVTTVNRAGAGMVAPFTGLKSMAGFPTRNTNSDITCVASNGGRVRWVRVWPPIGEREWESVCSLPNVPDRAVRGDVQ

SEQ ID NO: 169179 - protein, 54 aa, Glycine max
  Clone ID: PAT_MRT3847_123783C.1.pep
FFFFWCCKHCRFHHVLFSSYVYLIQNECIIRHGLQHIILLPTIYYKVIKKNLSK

SEQ ID NO: 169180 - protein, 113 aa, Glycine max
  Clone ID: PAT_MRT3847_123784C.1.pep
MKAQPPDGAAAVAPNAGEGGEKKTINAELWQACAGPLLNLPSPGTHVVYFPQGHSEQVAASLKKDVDAQVPNYTNLPSKIPCLLHNVTLHADPDTDEVYAQMTLQPVPSFDTD

SEQ ID NO: 169181 - protein, 83 aa, Glycine max
  Clone ID: PAT_MRT3847_123785C.1.pep
LRWQSPLDLPGWFEAACNLLVRLLWTALFFLVMLPIPPIVTEPAILENHHRFMTMKDVISYVLGANDNNSLYENLPKCSPFSA

SEQ ID NO: 169182 - protein, 68 aa, Glycine max
  Clone ID: PAT_MRT3847_123786C.1.pep
IINMRNVRVFAVPKCCTRAPVVTIGDPISEPLRRLLEWLTLDPSMSRPSVQWSSATPLKKRNTFGLCI

SEQ ID NO: 169183 - protein, 54 aa, Glycine max
  Clone ID: PAT_MRT3847_123787C.1.pep
KLLVDFFSCTIQNKMILTYQLTFYDIKRLTYISVQKKRLTLYNLICFLLFLQFL

SEQ ID NO: 169184 - protein, 82 aa, Glycine max
  Clone ID: PAT_MRT3847_123788C.1.pep
PSRTLHPSFYLSFNVSPKHNKPFLQRDLHQGCLIDEVMYLYSEYENPHICETIVYISTLPGTVFLQIRLKFTIQNYCITKTQ

SEQ ID NO: 169185 - protein, 560 aa, Glycine max
  Clone ID: PAT_MRT3847_123789C.1.pep
MAESRDAAAAAADGVPGTPAIREVRPESGTHAGIATFSLSETRFSLFQWKWPKLETPPPMGCPERPAIREMRPDTTTEDFDLKKVEEQAAELEKDLIVKELETLDVLEELGATKRIVEDLKQQLQKEAMKCLATRDVNSYEEAGTPVIKEKDEDNCGNIVNDEEQVMQIPSPCSMSSSPDMILMELKKAKLNLGKTINELGVIQSSIESLNKKMKKEKNFLERTREKLASKFAAESAQERVQEQTRLNPPAPHVEFTFGNPANNFNSDSGQCNGMAETRRPEPSKPLSVYEEYGFSVKTAEIRWLAAKKMEEAARAAEAIALAEIKALSNAQRSLGFVLPEPEKVTFAFGERSPLNPKAQIPKESTLKKVIDSNFQVDETKISKLTILKKLEEAAEEVLHSKQVLTDALNRIETANRKQHAAKEALRRWIPEDDMKEYSTINCNKFNQTGIYQDSLQDVTRSTTANNDPKPALRPTISMRDVLSRKQVPEGYATRKEMEEHTERQKVALSQMLQALREDLTLPPKTEKDGSNQKPYVAQRKKFGFIQISLPLAKPNKKRG

SEQ ID NO: 169186 - protein, 102 aa, Glycine max
  unsure (1)..(102): unsure at all Xaa locations
  Clone ID: PAT_MRT3847_12378C.1.pep
KSYKQNITYLRITHVISPLCRVTSHHNTTHLIHFHNIHVLNDQNTVSLNQSILINTQALCNIYTKTQSYMQCGTMLVKNLVRRXXVHDKTNHTLASQXIFTW

SEQ ID NO: 169187 - protein, 201 aa, Glycine max
  unsure (1)..(201): unsure at all Xaa locations
  Clone ID: PAT_MRT3847_123790C.1.pep
MAETRDAAADGVPGTPAIREMRPETATHAGIGSGGIRRVNFRAEIDTSPPFGSVKEAVTRFGGSGPWIPFFXNIEDFDLKKVEEQAAELEKDLIVKELETLDVLEELGATKRIVEDLKQQLQKEAMKCLATQDVNSYEQVGTTVIKEMDKENCGSNVNDQEQVMQIPSPCSMSSSPDMILIELKQAKLNLGISINELGVIQ

SEQ ID NO: 169188 - protein, 92 aa, Glycine max
  Clone ID: PAT_MRT3847_123791C.1.pep
LTFSPLKPAFLVSLEMAESRDAAAAAADGVPGTPAIREVRPESGTHAGIGSGGIRRVNFRAEIDTSPPFGSVKEAVTRFGGSGPWIPYFFTF

SEQ ID NO: 169189 - protein, 139 aa, Glycine max
  unsure (1)..(139): unsure at all Xaa locations
  Clone ID: PAT_MRT3847_123792C.1.pep
MWVTTMANTSLLPKPYYYRNFHYQHQRCFKINLPKWTTRASSAAPGVDLNTLESAISKKDSDAVKEALNQLSEVGWAKKWSSQPYVSRRTTSLRELTSLGIKNAENLAIXDRNDAAFLFTFLXTGFLGVLAGQLXGDWG

SEQ ID NO: 169190 - protein, 263 aa, Glycine max
  unsure (1)..(263): unsure at all Xaa locations
  Clone ID: PAT_MRT3847_123793C.1.pep
EALNQLSEVGWANKXKFQPYVSXRTTSLRELTSLGIKNAENLAIPSVRNDAAFLFTVVGTTGFLGVLAGQLPGDWGFFVPYLIGSISLVVLAVGSISPGLLQAAIGSFSTLFPDYQERIARHEAAHFLIAYLLGLPIFDYSLDIGKEHVNLIDERLEKLIYSGQLDAKELDRLAVVSMAGLAAEGLTYDKVVGQSADLFSLQRFINRTKPPLSKDQQQNLTRWAVLFAASILKNNKVTHEALMAAMAKKASVLECIRVIENAA

SEQ ID NO: 169191 - protein, 87 aa, Glycine max
  unsure (1)..(87): unsure at all Xaa locations
  Clone ID: PAT_MRT3847_123794C.1.pep
PPAAVKAGAFSLFFLLGXLLGITDNIPWGSXESIFSITSWAGQGLSLGVLNLAIVIPHMVVSVISGPWDALFGGGNLPSFLVGAVAA

SEQ ID NO: 169192 - protein, 38 aa, Glycine max
  Clone ID: PAT_MRT3847_123795C.1.pep
SNHSLTPTRNQGIFYCEPIILKIIKAPQEHQFRGPDGQ

SEQ ID NO: 169193 - protein, 54 aa, Glycine max
  Clone ID: PAT_MRT3847_123796C.1.pep
KSKNLKQHCLNQYFLNLMTVFICFKLNYKGDFFNSENIMVQERKYIPSEHMQIY

SEQ ID NO: 169194 - protein, 63 aa, Glycine max
  unsure (1)..(63): unsure at all Xaa locations
  Clone ID: PAT_MRT3847_123797C.1.pep
ASGRLRNATGASYVAASXEKFVENGGARVIPLIXMSKXDNLNKKFDLVNGELFPGGGAVSGLF

SEQ ID NO: 169195 - protein, 60 aa, Glycine max
  unsure (1)..(60): unsure at all Xaa locations
  Clone ID: PAT_MRT3847_123798C.1.pep
QNSVLKHGFGYSLCSQTSPSXXXEGSXILGSEAHQXLPFQKISRFHSVTXQXEALXRSXX

SEQ ID NO: 169196 - protein, 122 aa, Glycine max
  Clone ID: PAT_MRT3847_123799C.1.pep
APKGSWVSVGPMPPGSCISFREPSGRKDSRSQRRFRFCMAILLTLSIRILYQSSGLEPVIETASNVSTRIANVPIPQVKKVEVSTNQVAKYLIGKCDNFNYCAEWGFILRKKGRSCKLVIIF

SEQ ID NO: 169197 - protein, 79 aa, Glycine max
  Clone ID: PAT_MRT3847_12379C.1.pep
EPHSWELFFPKEGRGPNKGFEMGSSEGGNQTSWRLSFLNYKPQQSTVFEIFLGNSQDFAIAGKTFKPGFFVPQGNARFF

SEQ ID NO: 169198 - protein, 62 aa, Glycine max
  Clone ID: PAT_MRT3847_1237C.1.pep
KKKQDFVTFLRVLDALQHTPSYLAISHSKDTKRFELPHSGWHLAGTSEHAEMEMQRQHLKQP

SEQ ID NO: 169199 - protein, 85 aa, Glycine max
  Clone ID: PAT_MRT3847_123800C.1.pep
GFHRRAILLQGQVECIVTTVTLCFLQLIALNRTGPIPGRFLSRWRGYYCERQVTRCCSLEIPPLSLEHKSGFLVFLCGVIARDSD

SEQ ID NO: 169200 - protein, 40 aa, Glycine max
  Clone ID: PAT_MRT3847_123801C.1.pep
AYWDWSWDELARYDLPAFVQYVYNQTGQRMHYAGHSLVCS

SEQ ID NO: 169201 - protein, 56 aa, Glycine max
  unsure (1)..(56): unsure at all Xaa locations
  Clone ID: PAT_MRT3847_123802C.1.pep
VPPERVVYLVIYGCARXEIPGGPLGRINSQCWSNPHDRPRCEDILSRIGVPGVIHV

SEQ ID NO: 169202 - protein, 138 aa, Glycine max
  Clone ID: PAT_MRT3847_123803C.1.pep
SLSRPNRSSLEYKLFLQRCQRYRSAHDGILVNSFMELEEEATKAITQHAKGNGNCSYPPVYPIGPITHTGPSDPKSGCECLLWLDKQPPNSVLYVSFGSGGTLCQEQINELALGLELSRHKFLWVNLRAPNDRASATY

SEQ ID NO: 169203 - protein, 61 aa, Glycine max
  unsure (1)..(61): unsure at all Xaa locations
  Clone ID: PAT_MRT3847_123804C.1.pep
KYVSELXRKKQSDVMRFLQRVKCWEYKQQPSIVHLTTSSRPDQDRRLGFKAKQGYVTYRVR

SEQ ID NO: 169204 - protein, 49 aa, Glycine max
  unsure (1)..(49): unsure at all Xaa locations
  Clone ID: PAT_MRT3847_123805C.1.pep
HKYCVLGRLSFXVGWSLYDTLRELEKKKKEKATVVFQKKKPLHQFRVKT

SEQ ID NO: 169205 - protein, 71 aa, Glycine max
  Clone ID: PAT_MRT3847_123806C.1.pep
PLRNSRLDPRVHCYKTTAGDCKPFITMHINFIVLLYEQKSIFRWITRKHLPICAIKCYICILIRMIWIPIF

SEQ ID NO: 169206 - protein, 65 aa, Glycine max
  unsure (1)..(65): unsure at all Xaa locations
  Clone ID: PAT_MRT3847_123807C.1.pep
PGAMMSKVTASSVPXXXALXALSPLHNXQLAVYSIILVXHTNILXTLSNNSSRGHCQLEXEKFKL

SEQ ID NO: 169207 - protein, 98 aa, Glycine max
  Clone ID: PAT_MRT3847_123808C.1.pep
ELGFRLECTSMTALLVYVQRQSLLAQQPNVAETKPTPDMRVGRYHSVAGGYRLGATECPAGEICGATLTSTAIDCTQQPRSPFMRGKSLRQGEEGKVN

SEQ ID NO: 169208 - protein, 77 aa, Glycine max
  Clone ID: PAT_MRT3847_123809C.1.pep
WDTNSHRCSQLYPIVSSQAATTSPSSTQTLGTHDPNTAITRSAMLVGVISQSLVIPDGAITVEDQQNYYTPDASSSN

SEQ ID NO: 169209 - protein, 64 aa, Glycine max
  Clone ID: PAT_MRT3847_12380C.1.pep
GEGEEEQKCERCCGSSRSTGCCPFMSSRGLYHTDYCCGGAAGDRLLAHCLLFMVQPVDICYPGE

SEQ ID NO: 169210 - protein, 98 aa, Glycine max
  unsure (1)..(98): unsure at all Xaa locations
  Clone ID: PAT_MRT3847_123810C.1.pep
XXXXRLXXRXSXKXXFFHFGXLXYXTFPSPSVXXXTTTXIXXKHDHXXXAXXQXSVSTTHGSXEEDEHITXIREIXALTXXXDTWQXLGDSAYAQVKL

SEQ ID NO: 169211 - protein, 82 aa, Glycine max
  Clone ID: PAT_MRT3847_123811C.1.pep
KKEITSIFMLKHERLSFISKNLTDLYETAFFIKTIYIQHEQNHHSIIRFQNSPYSAIKLKNARNLPLPPEAPGALPLLCTVP

SEQ ID NO: 169212 - protein, 76 aa, Glycine max
  Clone ID: PAT_MRT3847_123812C.1.pep
SLTCLSPSTPILLSNLGQNRIILLRHFPKSLHASTWILRSRWDLHLMAVQSYCRFLFYLCVCERGEGLQNGPIGRV

SEQ ID NO: 169213 - protein, 104 aa, Glycine max
  unsure (1)..(104): unsure at all Xaa locations
  Clone ID: PAT_MRT3847_123813C.1.pep
LPSLLAESRDNSDLLLSILAKHLDHKSVATMPILQIDIINTTTQLAHLVMHQASFALVGALCDLIIYSRXCLQHLSEACSNGHDAYQWNAELHSALDMCLLQLS

SEQ ID NO: 169214 - protein, 524 aa, Glycine max
  Clone ID: PAT_MRT3847_123815C.1.pep
MRRSPPFLSSLFLSFFYHLSTMVLSKTASESDVSVHSTFASRYVRTSLPRFKMAEESIPKEAAYQIINDELMLDGNPRLNLASFVTTWMEPECDKLIMAAINKNYVDMDEYPVTTELQNRCVNMIAHLFNAPLEETEAAVGVGTVGSSEAIMLAGLAFKRKWQNRRKQEGKPYDKPNIVTGANVQVCWEKFARYFEVELKEVKLRDDYYVMDPEKAVELVDENTICVAAILGSTLNGEFEDVKRLNDLLIEKNKITGWDTPIHVDAASGGFIAPFIYPELEWDFRLQLVKSINVSGHKYGLVYAGIGWVIWRSKQDLPEELIFHINYLGADQPTFTLNFSKGSSQVIAQYYQLIRLGFEGYRNVMENCRDNMLVLKEGLEKTGRFSIVSKDNGVPLVAFTLKDHTHFDEFQISDFLRRFGWIVPAYTMPPDAQHVTVLRVVIREDFSRTLAERLVSDVEKVLHELDSLPARVISSTTVTLSAEENGKVVVAKKNPMETQREITAIWKKFVLERKKNNDKMNGVC

SEQ ID NO: 169215 - protein, 197 aa, Glycine max
  Clone ID: PAT_MRT3847_123816C.1.pep
MDSYEATRIVFSRIQNLDAENASKIMGLLLLQDHGEKEMIRLAFGPEALVHSVILKARKDLGLPSNSPPTPCTPPSPSPFISRQNSNTSSRLSVSGINLPPPLTIPNPSASWPTMSELQTDLVAGSSTSLSSLPFYANGGSDPIDEFQLQDQLSFLNDGSNTSISHKNNPDLFYPTLLVCSQAPVDQLAFSFLMFRK

SEQ ID NO: 169216 - protein, 173 aa, Glycine max
  Clone ID: PAT_MRT3847_123817C.1.pep
NTLISVFSQYFHGIRCLSTDVEMCNLGFKPNFMTYGSVLSACASISDLKWGAHLHARILRMEHSLDAFLGSGLIDMYAKCGCLALARRVFNSLGEQNQVSWTCLISGVAQFGLGDDALALFNQMRQASVVLDEFTLVTILGVCSGQNYAATGELLHGYAIKNGMDSSVPVGNA

SEQ ID NO: 169217 - protein, 309 aa, Glycine max
  unsure (1)..(309): unsure at all Xaa locations
  Clone ID: PAT_MRT3847_123818C.1.pep
LYASEGWFMKLMEENKHFVLKDPAKAHLFYMPFSSRMLEHALYVRNSHNRTNLRQFLKDYTDKISAKYRYFNRTGGADHFLVACHDWAPVETRHHMEYCIKALCNADVTQGFKIGRDVSLPEAYVRSVRDPQRDLGGKPPHQRPILAFYAGNMHGYLRPILLKHWKDKDPDMKIYGPMPHGAASKMNYINHMKNSKYCICPKGYEVNSPRVVEAIFYECVPVIISDNFVPPFFEVLNWDAFSIILAEKDIPNLKQILLSVSQEKYLKLQLGVRKAHKHFFWHVKPXQYDLFHMTLHSMWYSRVFQLKVR

SEQ ID NO: 169218 - protein, 90 aa, Glycine max
  Clone ID: PAT_MRT3847_123819C.1.pep
QQALSQASGPDICLVQVAKAAETTAAVRWIVAVKSGVDNLWVSLDGVPQVVQIAYGVFVLICMCVMGRVVTGCVVQVQLVIFMFTFPIFF

SEQ ID NO: 169219 - protein, 51 aa, Glycine max
  Clone ID: PAT_MRT3847_12381C.1.pep
TAREVQECLTMVSTSLDCCSTFFRVLFLFGYCFWRSANTTLVTNNFDVFMH

SEQ ID NO: 169220 - protein, 111 aa, Glycine max
  Clone ID: PAT_MRT3847_123820C.1.pep
SGKAENGAYCNISTEMTHLYYANMLKLTPREEIPLDVILWGCQTILFSGRAFCNMTLCWYINGHSLSHDELIADRIDGACHAERAKFDTELLDIYNKFYQNHTPQPMLKLT

SEQ ID NO: 169221 - protein, 56 aa, Glycine max
  Clone ID: PAT_MRT3847_123821C.1.pep
KDHRRGIRLLAAAVKNKTEPLPHRIHRAEIESEQKAESGLSCLYDLSHGNNNTLKP

SEQ ID NO: 169222 - protein, 176 aa, Glycine max
  Clone ID: PAT_MRT3847_123822C.1.pep
QGILKDGQVVAVKQLKFGGSQADLDFCREVRVLSCAQHRNVVLLIGFCIESNLRILVYEYICNGSLDLYLYGDESMPLDWNSRLKIAIGTARGLRYLHEDCRVGCIAHRDLRPKNILVTHDFEPMVADFGLARWHSEWNIDTEDRVIGTSWYLAPEYLDAGYLTYKVDVYAFGIVL

SEQ ID NO: 169223 - protein, 85 aa, Glycine max
  Clone ID: PAT_MRT3847_123823C.1.pep
FHHSDHITLDICLACMYKNFSFCICSSLILPFSTTIQSMNGLHRVQDTQRHLLIHLKRGIRMVELLFPFISSCPYWDKTFSTISS

SEQ ID NO: 169224 - protein, 30 aa, Glycine max
  Clone ID: PAT_MRT3847_123824C.1.pep
LITPRTLQEGTMETYNVTHTPKVSVFLSGY

SEQ ID NO: 169225 - protein, 158 aa, Glycine max
  Clone ID: PAT_MRT3847_123825C.1.pep
MTKFTILLISLLFCIAHTCSASKWQHQQDSCRKQLQGVNLTPCEKHIMEKIQGRGDDDDDDDDDNHILRTMRGRINYIRRNEGKDEDEEEEGHMQKCCTEMSELRSPKCQCKALQKIMENQSEELEEKQKKKMEKELINLATMCRFGPMIQCDLSSDD

SEQ ID NO: 169226 - protein, 50 aa, Glycine max
  Clone ID: PAT_MRT3847_123826C.1.pep
EFATIFHARDVQFYFQGCALHESFGASKLTSVTSSNMGVGAVQNLGRWMN

SEQ ID NO: 169227 - protein, 56 aa, Glycine max
  Clone ID: PAT_MRT3847_123827C.1.pep
IVLKPCHDLVLWCTSHVPCVVILWPPITRTTATTCIRRVTSWRVRTMFISAVFARA

SEQ ID NO: 169228 - protein, 129 aa, Glycine max
  unsure (1)..(129): unsure at all Xaa locations
  Clone ID: PAT_MRT3847_123828C.1.pep
DADSDTEAQPDAGEDAYSCDHFLMYEFKVRLCARDMTHDWTECPYAHPGENARRRDPRKFHYFGAACPXFRTGNCKKCDTCEFGHSVFECWLHPALYRTXTCKDGTTCLRRLCLFEHTPEHMRVLPMHN

SEQ ID NO: 169229 - protein, 97 aa, Glycine max
  Clone ID: PAT_MRT3847_123829C.1.pep
ATFVTNNSSGTQQGPVGGSDAQINCSDGGGLTELEKLLKQKTFTRSEIDHLTALMRSRTVNAPVREEEKGTEMVPSEPMLLSGQKEYPKSTALENGT

SEQ ID NO: 169230 - protein, 46 aa, Glycine max
  Clone ID: PAT_MRT3847_12382C.1.pep
SSFLFRSVLSSLKLCPGILILMVRRVKLLHHSSHQIEDRGVRTSLH

SEQ ID NO: 169231 - protein, 158 aa, Glycine max
  unsure (1)..(158): unsure at all Xaa locations
  Clone ID: PAT_MRT3847_123830C.1.pep
MVIVESVLRGDSEVSGTVTFEEDDENSPTTISXDISGKDPNANGVFHVAHXHDDNSSGXISAGPHLNPHGTRXNGAPSDEARDVGDVGNVETDGHGNAEGSETDNLIKVIGXTDVYGRNGGIHAXGTDDLLQGVATXESLKTGNAGPRPACGVIGISQ

SEQ ID NO: 169232 - protein, 46 aa, Glycine max
  Clone ID: PAT_MRT3847_123831C.1.pep
YRGPSARVCVGVLWPAITLIVYVFLCSVSTCPFFVVSKGDSLRLVP

SEQ ID NO: 169233 - protein, 73 aa, Glycine max
  Clone ID: PAT_MRT3847_123832C.1.pep
CMVNIMYEFGFGFVPLEIHVRELRCDSEADIFPRDNSFCSTSISSCYKRDMMCSRIPDQVTVRIRPIVNNTTE

SEQ ID NO: 169234 - protein, 293 aa, Glycine max
  unsure (1)..(293): unsure at all Xaa locations
  Clone ID: PAT_MRT3847_123833C.1.pep
VSGFSAFPPSNASVPSPGLTSVSPLNNAGQWANLQQQQPFFPVAVSQSSAQQFTPPLGGTANNQPWNVPSAPTVQGHPSTPMPHTYPHASKPANETISGVVSQPPVAEVRASGRKELPEDLFTVKYSSFPAPVLGWQMGVPHDGYLXQYNNVVPVPSFPQPSKSINPFDVSSEPTANQAPTFPSMSSLQGALPGVPPPGAVHPSSMGNPTHGWTPLSSSFLPAQTQMRATALGPRPYMGQQMPTNMPMPRQEVGNFGNQGAVFGLSNPDQQLTGRLSNTPTSNSFPTGGNPFG

SEQ ID NO: 169235 - protein, 96 aa, Glycine max
  unsure (1)..(96): unsure at all Xaa locations
  Clone ID: PAT_MRT3847_123834C.1.pep
XXSXXHAXXXSRXCXXXXXXSXXCXXLXVPVXPXXHXXXXPGAXVXSXXXWRSVXGXXXCQXMXXMXSXASXDXXXXXXGXPCRXXXHTLXXXXXN

SEQ ID NO: 169236 - protein, 82 aa, Glycine max
  Clone ID: PAT_MRT3847_123835C.1.pep
KKKGFKSPHPKKPVGVLTAKLNQPLGKRKIKTPPPPGGEGGLKGGQFFFQNPNGPKIKISNGKTLPDIPLAGGGKNKGGAPP

SEQ ID NO: 169237 - protein, 73 aa, Glycine max
  Clone ID: PAT_MRT3847_123836C.1.pep
WGKSWRITVICRLCIRYSVLFVDGQGSTTLLSLDKALRPSLSQVTASVTSVMPTLTFHAFICIVFLFHRGGAC

SEQ ID NO: 169238 - protein, 308 aa, Glycine max
  Clone ID: PAT_MRT3847_123837C.1.pep
MASLVSSSVLLHLFLIISALHLGAAARILSEKDQQQQLQFQYHKGPLLSGKISVNLIWYGNFKPSQRAIISDFITSLSSHKSTAQPSVATWWKGTQKYYQLIKSSPKLTLTLGTQILDENYSLGKSLTNDNIVSLASKGASKDAINVVLTSSDVTVEGFCSSRCGTHGSSVGPRKFAYVWVGNSETQCPGQCAWPFQQPIYGPQNPPLVAPNNDVGLDGMVINVATLLAGTVTNPFGNGYFQGPKEAPLEAASACTGVYGKGAYPGYAGELLVDPTTGASYNANGVSDRKYLLPALFDPTTSACSTLA

SEQ ID NO: 169239 - protein, 307 aa, Glycine max
  Clone ID: PAT_MRT3847_123838C.1.pep
MEACFLSHNSFTKTTDQLIPTIRNGSLPHPKRSSQHFHYRKARIPLPISCCHMSSPSPFDDDEKSTLSGDWRSFRAKLVAGEQLTRPVEEVSFSSVNDLDIVVDHPPLITIGDKWAHVIHEPEKGCILIATEKLDGVHIFERTVILLLSTGPLGPSGIILNRPSLMSIKETRSTALDVEGTFSNSPLFFGGPLEEGLFLLSPKEGGGGGDGVGKSGVFEEVMKGLYYGAKESVGCAAEMVKRNVIGLGDFRFFDGYCGWEKEQLRDEIRAGYWTVAACSPSVVGLGSVGSVGLWDKVLGLMSRRKVM

SEQ ID NO: 169240 - protein, 78 aa, Glycine max
  Clone ID: PAT_MRT3847_123839C.1.pep
SWRGDPPQCLDRSPKKKKPPQQALVNCSPATSFARKDRPSSLRVDFSSSSNGDGDDMWQPVITSQILRLKGVDLETMK

SEQ ID NO: 169241 - protein, 59 aa, Glycine max
  Clone ID: PAT_MRT3847_12383C.1.pep
TLSTSLDESLLSSITYILLMCFSWYQMIIFSISFAALVCYNIAIRQIICYIRHLANDVR

SEQ ID NO: 169242 - protein, 36 aa, Glycine max
  Clone ID: PAT_MRT3847_123840C.1.pep
IDKIKLRAWIFCLFQQSFDKLHALMGGGTKYPGLFE

SEQ ID NO: 169243 - protein, 71 aa, Glycine max
  Clone ID: PAT_MRT3847_123841C.1.pep
FVLDLIMNICTKIELMMDVSEEELAVEIIIPILWMISTQLITLLILFVLLFFFTLLLSDPDDHHHNNLDSV

SEQ ID NO: 169244 - protein, 38 aa, Glycine max
  Clone ID: PAT_MRT3847_123842C.1.pep
VLYYKNPSLTGCNKLLTWGSLLWSFIKCPADVRVHATY

SEQ ID NO: 169245 - protein, 76 aa, Glycine max
  Clone ID: PAT_MRT3847_123843C.1.pep
LFFFFFFFFFFFFCWCCLFFVSPVECYENIFKNIGAGCLYQLPGFENVTDDVVGVPFKISTRHKCVGQNQVLWVWS

SEQ ID NO: 169246 - protein, 54 aa, Glycine max
  Clone ID: PAT_MRT3847_123844C.1.pep
SMFHNNGDTMVTKKQNIHVKSRDSCKFNTQYIENVLFSNLYMITNMTLKFFLIG

SEQ ID NO: 169247 - protein, 82 aa, Glycine max
  Clone ID: PAT_MRT3847_123845C.1.pep
STTTKPNQLILEFSNGLDFLSRNRERRNRHTIPIPHKALALFQTYNQILKHLNIQSLKIRTGNYQNTKYAQHMYLRRFRTLH

SEQ ID NO: 169248 - protein, 87 aa, Glycine max
  Clone ID: PAT_MRT3847_123846C.1.pep
REIYSYTYLSFHARCDLLNAELLSGCSVGCVPRPRPRHPWWCRRPCGSLPAFDVLASTIVRILSLTLQSFGVRSGAEGRARFPSHCG

SEQ ID NO: 169249 - protein, 51 aa, Glycine max
  unsure (1)..(51): unsure at all Xaa locations
  Clone ID: PAT_MRT3847_123847C.1.pep
XKXXXXXLSCPVXPLXGTDQVYLXGIFLXGLRXXVXAXFKVAPSKDIXXND

SEQ ID NO: 169250 - protein, 82 aa, Glycine max
  Clone ID: PAT_MRT3847_123848C.1.pep
VSLLQRSLISRNTHTIVTSSCGLRYRSLIKGRKLPRVVSAEANVRSARTTEREQSPANGDFVRERRGQSPRTEPYDQAPRPS

SEQ ID NO: 169251 - protein, 235 aa, Glycine max
  Clone ID: PAT_MRT3847_123849C.1.pep
PHIRITGIDDSTSAYARGGGLHIVGRRLSKLAEHFKVPFEFHAAAISGFDVQLHNLGVRPGEALAVNFAFMLHHMPDESVSTQNHRDRLLRLVRSLSPKVVTLVEQESNTNTAAFFPRFLETLDYYTAMFESIDVTLSREHKERINVEQHCLARDLVNIIACEGVERVERHEVLGKWRSRFAMAGFTPYPLSSLVNGTIKKLLENYSDRYRLQERDGALYLGWMNRDLVASCAWK

SEQ ID NO: 169252 - protein, 139 aa, Glycine max
  Clone ID: PAT_MRT3847_12384C.1.pep
PSRPRTRGVILLGDLNYRISLPEETTRLLVENEDWDYLLEYDQLTMELMRGNMLKEWHEGAITFAPTYKYCPNSDMYYGCCYQGKKAGKKRAPAWCDRIIWFGDGLKQMQYARCESRLSDHRPVNALFIAQVRVSGATR

SEQ ID NO: 169253 - protein, 94 aa, Glycine max
  Clone ID: PAT_MRT3847_123850C.1.pep
QGTSPQEKKQPGFEIKGEILKIKKGARKSSFIYIVFSAHPNLLYGHWSTYAEVSPTALSWFQFGRNNPRLCDGFCNLQQHWRSPSRCPPSPPFP

SEQ ID NO: 169254 - protein, 147 aa, Glycine max
  unsure (1)..(147): unsure at all Xaa locations
  Clone ID: PAT_MRT3847_123851C.1.pep
ACRRCVDLGLRTVLIVTPVNVLHNWRQEFIKWRPSELKPLRVFMLEDLSRDIRAQLLAKWRSKGGVFLIGYAAFRNLSFGKHVKDLHMAIXICHALHDGTDILVCDEAHMIKNTNDDVTXALKQVKCQRRIALTGSPIQNNLMEYHC

SEQ ID NO: 169255 - protein, 147 aa, Glycine max
  Clone ID: PAT_MRT3847_123852C.1.pep
VPPPPPREKFCVEMKRIPRWKIEKKTQGIRLLGRDPFFWKPGLERTNPDPNLSSPPKNAPKGKGGGLIYKKSKGGESERAPLLGWGKSPFFSLTSFSRNPNPRKRKGAFAFLFFFLAAPHLGRKTPFCIGFQGPLWSKSKAKGFFFF

SEQ ID NO: 169256 - protein, 156 aa, Glycine max
  unsure (1)..(156): unsure at all Xaa locations
  Clone ID: PAT_MRT3847_123853C.1.pep
CPSVACSCPSPGWSAASFCWGFPCSASRWLFCRPRSCGFCSVCAGRRPALFPAGLRSPPFXSCCGCRSRCSPAFSSSVAPRSSLLLCPVRPLPFVGCFFACAFXWGCSSSLKPRGXKQLLSFHYGPPRSWVDEILIHFSWYLFLLRFTYHPICSLX

SEQ ID NO: 169257 - protein, 121 aa, Glycine max
  unsure (1)..(121): unsure at all Xaa locations
  Clone ID: PAT_MRT3847_123854C.1.pep
AVARSPALLPSFLETTRTFNLIYTKEIRPWTHMMAAPQLHGFGPPANRLLEXYAFVVFVLGNLXRDSHATLAFGSFLTSDGPSSVTRXIISECESALTVLNRDLGILSASIAREQGEKMNI

SEQ ID NO: 169258 - protein, 82 aa, Glycine max
  unsure (1)..(82): unsure at all Xaa locations
  Clone ID: PAT_MRT3847_123855C.1.pep
PVNNHIPAGLPGSLRFNDLRADGQKFGNFFTDRPSTKVQLAPGGGFSYGLPVXGGPPGLSFSTVFRPSFAMYPGHQYTLALF

SEQ ID NO: 169259 - protein, 65 aa, Glycine max
  unsure (1)..(65): unsure at all Xaa locations
  Clone ID: PAT_MRT3847_123856C.1.pep
LTSASSPIPSFHSITPVXEHRXAVNXAXSXCTXXXTNTVPTXAQSXGLRLXLQIXEYYTRVXNXT

SEQ ID NO: 169260 - protein, 133 aa, Glycine max
  unsure (1)..(133): unsure at all Xaa locations
  Clone ID: PAT_MRT3847_123857C.1.pep
TRPLDGRRVEVKFAIERSHGFGGGGFGGSYGNTPYDAGAGTGHPGSYGNTPYGAASGGYDNTGGGNAAGVYGRGEDGGGGNWPSGNFGGSSFGNNYGDAGVYAGNXCGGYDNNGYGGGSGGDAGPYGSAADCD

SEQ ID NO: 169261 - protein, 81 aa, Glycine max
  unsure (1)..(81): unsure at all Xaa locations
  Clone ID: PAT_MRT3847_123858C.1.pep
GIWREHTEKFSPTWIXAIHAADSFIANLRKFVLIPKSXMHLLIAASMLEPVIGSRAQRSRLHAHAAQQVPITETCGAGPLL

SEQ ID NO: 169262 - protein, 76 aa, Glycine max
  unsure (1)..(76): unsure at all Xaa locations
  Clone ID: PAT_MRT3847_123859C.1.pep
CFFLIIYYFFFLFIFYNIFLSYYFILLLXFNIIVFLYYFFIIIIFYSIYLFFIIIYXYCNYIFFVLLILYFIFFIL

SEQ ID NO: 169263 - protein, 86 aa, Glycine max
  Clone ID: PAT_MRT3847_12385C.1.pep
VSSTTTVELRGRNNDDDDDDKATSFLFPFFPKFGVLGQKDLKLQLGKLSQKEKFLTHRDDGDGSGVVAVDSSSVFPVSGNVYPDGL

SEQ ID NO: 169264 - protein, 76 aa, Glycine max
  unsure (1)..(76): unsure at all Xaa locations
  Clone ID: PAT_MRT3847_123860C.1.pep
GYPGGLWFYPLGWGSGFLXKIKELRPKEIKNGGLPLLVLMGAWFQPIYTGPGPIYNLFVPLADPGQAKIFAAFPPK

SEQ ID NO: 169265 - protein, 52 aa, Glycine max
  Clone ID: PAT_MRT3847_123861C.1.pep
RYRLCLCLRSSSRDHSEPDRSVPSVLFVVLVSHAERRRRSVICPSQQISMYS

SEQ ID NO: 169266 - protein, 43 aa, Glycine max
  Clone ID: PAT_MRT3847_123862C.1.pep
ARRHKGWTTLIFERSFILLPSIHTHKVYRSRHVSRQQQLLNIS

SEQ ID NO: 169267 - protein, 66 aa, Glycine max
  Clone ID: PAT_MRT3847_123863C.1.pep
TLYMNVLSLYYTSQLWTLVLSHKKNVKVSQCLLAGDMFSNVCYTFVTGVDRCSKFTISSDGTFCGP

SEQ ID NO: 169268 - protein, 69 aa, Glycine max
  Clone ID: PAT_MRT3847_123864C.1.pep
QALILPLIVVLHPAGANIEAQKAKSKFLQEKYTPPYNFSGSNLAYDANANAHYLPVNILIIPQSNITLT

SEQ ID NO: 169269 - protein, 71 aa, Glycine max
  Clone ID: PAT_MRT3847_123865C.1.pep
IHRHHLPAGGPKLVILLEVIFTNAPRNAFPLKGGINKASYLMADSTSFTLAYWPLLHKNSTQMGPRNISPL

SEQ ID NO: 169270 - protein, 333 aa, Glycine max
  Clone ID: PAT_MRT3847_123866C.1.pep
MAGKGTHSDSKAATIVIKDLRFTYPGIDGHPPPGSTPLIQDFNLTLSSGHRCLLVGSNGAGKTTLLKILGGKHLVEPDMVRVLGRSAFHDTTLISSGDLCYLGGEWRRDVAFAGFEVPIQMDISAQKMIFGVPGIDPQRRAELIKVLDIDLSWRLHKVSDGQRRRVQICMGLLKPFKVLLLDEITVDLDVLARADLLRFLRKECDERGATIIYATHIFDGLEDWPTNIVYVAHGKLQLAMPMDKVKEISKLSLMRTVESWLRKERDEDRKKRKERKAAGLPEFGKRVEESRVTGDPARAAVRVINNGWAAGRLTSTVAGEENFLLSSNRVLRQ

SEQ ID NO: 169271 - protein, 123 aa, Glycine max
  Clone ID: PAT_MRT3847_123867C.1.pep
MLEEGEESYNLELEVPVTNRPYPHHHRRKKVLAKDIPKGFLPIKVGQGEEQQKIVMPIVYLNHPLFSQLLKEAEEEYGFDQQGTIIIPCHVKDFRYVQGLIDKEKSSQHQHHVISCLEEYGLY

SEQ ID NO: 169272 - protein, 153 aa, Glycine max
  unsure (1)..(153): unsure at all Xaa locations
  Clone ID: PAT_MRT3847_123868C.1.pep
NLGIFADALAKRAHEFEKHVAHESLKDQIPAGDKLYSTKVNTSAKIXNLRQSVGGDLKLLTDGKLNEVKHITVSNITAXENHVIQIPLMAQEETLTSSGSDSRTAMVSKQSQPQATAMHVGAIEIIIDSSTSPDCNIGGALLLVDTYHTNPEN

SEQ ID NO: 169273 - protein, 88 aa, Glycine max
  unsure (1)..(88): unsure at all Xaa locations
  Clone ID: PAT_MRT3847_123869C.1.pep
MGSKFLFLFRCALPPSLINEFFSYTMGSFNNHYNPHPQPSHVTSLITLPNCPDLSIFLTNLCGTLLTFYNSLSLIXCSGDILAIVCLF

SEQ ID NO: 169274 - protein, 76 aa, Glycine max
  unsure (1)..(76): unsure at all Xaa locations
  Clone ID: PAT_MRT3847_12386C.1.pep
TGKENQEKPEKKDARLRHSIDAHYNEGEGQMETELVKXSLDDVETPKGSMWGTQIXRFKXALAKNTLGGTILSSEL

SEQ ID NO: 169275 - protein, 38 aa, Glycine max
  Clone ID: PAT_MRT3847_123870C.1.pep
NPHALSVTLVKNKSICKKGPRIAQYPYYGNLGHDTSRY

SEQ ID NO: 169276 - protein, 73 aa, Glycine max
  Clone ID: PAT_MRT3847_123871C.1.pep
PGKKFNSGKGLTLIWPSPNLKPLWGRWEPFLLRARNKFRGGGAQFWGPGFFFFFFFFFWGEMLQFPSVVFSQP

SEQ ID NO: 169277 - protein, 65 aa, Glycine max
  unsure (1)..(65): unsure at all Xaa locations
  Clone ID: PAT_MRT3847_123872C.1.pep
IPAEGGWXIIITLTAXHRAWEGHSHCAIELXTPKTYIYARXGLXXXYLKLGFMFIILRRSRXWLV

SEQ ID NO: 169278 - protein, 39 aa, Glycine max
  unsure (1)..(39): unsure at all Xaa locations
  Clone ID: PAT_MRT3847_123873C.1.pep
FLSGGGRPXKGTGFKYKWPKTCHETTQRMEIHKGDKQTR

SEQ ID NO: 169279 - protein, 637 aa, Glycine max
  Clone ID: PAT_MRT3847_123874C.1.pep
CCLLNVQFAYHRVHVCRIKEMDENESLELFSWHAFRQAHPREDLIKLSMDIVAYCGGLPLALEVLGSYLCERTKEEWESVLAKLRKIPNDQVQEKLRISYDDLDCEEKNIFLDICFFFIGKDRVNVTEILKGCDLHAEIGITILVERSLIKLEKNNKIKMHNLLRDMGREIVRQSSLEEPEKRSRLWVHQEVLDLLLEHTGTKAIEGLALKLQRTSGLHFNTKAFEKMKKLRLLQLDHVQLVGDYEYLNKNLRWLCLQGFPLQHIPENLYQENLISIELKYSNIRLVWKEPQLLQRLKILNLSHSRNLMHTPDFSKLPNLAKLNLKDCPRLSEVHQSIGDLNNLLVINLMDCTSLSNLPRRIYQLKSLQTLIFSGCSKIDMLEEDIVQMESLTTLIAKDTAVKEMPQSIVRLKNIVYISLCGLEGLARDVFPSLIWSWMSPTANLRSCTHSFGSMSTSLTSMDIHHNNLGDMLPMLVRLSKLRSILVQCDSKFQLTQKLSKVMDDLCQVKFTELERTSYESQISENAMESYLIGMGRYDQVINMLSKSISEGLRTNDSSDFPLPGDNYPYWLACIGQGHSVHFQLPVDSDCCIKGMTCVVYSSTTKNMAKECLTGVSINYTKCTIHIYKRDTIIFFN

SEQ ID NO: 169280 - protein, 199 aa, Glycine max
  Clone ID: PAT_MRT3847_123875C.1.pep
MKGVLSISFLFCCLLLLLDSSISLPLCVDSRAPFTLNKTLGFCPYNGSTCCNSTQDAQIEKQFRASNVSDPGCALVLKSILCARCDPFSGELFTIQSSPRSVPVLCNSTIPANSSQSKTEVEDFCSQVWDTCNDVSIVNSPFAPSLQGQAGAPAHSNATKLSDLWQSKTDFCTAFGGASDNSSVCFEGEPVSLDKTGTL

SEQ ID NO: 169281 - protein, 540 aa, Glycine max
  unsure (1)..(540): unsure at all Xaa locations
  Clone ID: PAT_MRT3847_123876C.1.pep
MKGVLSISFLFCCLLLLLDSSVSLPLCVDSRAPFTLNKTLGSRDSISHRHYFSLVRIGNGSYLNMVAHPDGSNRAFFSNQMGKVFLATLPDEGSXGTLKLDESSPFVDLTDQVYFDTQFGMMGMAFHPDFAKNGRFFASFTCDKSKWSGCTGRCSCNSDVNCDPSKLGTDHGAQPCQYQTVIAEYSANSSGSQPSSVESAKPTEVRRIFTMGLPFTSQHGGQILFGPDDGYLYLMMGYGGGAGDPYNFAQNKKSLLGKIMRLDVDNIPSAADISKLSLWGNYSIPKDNPFSEDKDLQPEIWALGLRNPWRCSFDAERPSYFLCADVGQDVYEEVDLITKGGNYGWRVYEGPYPFQPTQSPGGNTSVNSINPIFPIMGYNHSELNKNEGSASITGGYVYRSTTDPCMYGRYLYGDLYAGAIWAATEDPQNSGNFSTSRIPFSCARDSPIQCDSAPGNLLALGYIFSFGEDNNKDVYILASTGVYRVVRPSRCSYACSQEKATTTTTSAPSPSPSHATRWSVLSGYLFLQCSFLLLLLLGSM

SEQ ID NO: 169282 - protein, 79 aa, Glycine max
  Clone ID: PAT_MRT3847_123877C.1.pep
MLGELIKRAEMGATNSRAEKNEALRLCRERKRFVKVAIDSRYAIAAAHVTYIQSLRSVGVALRRYAESEVEVESSLSIS

SEQ ID NO: 169283 - protein, 80 aa, Glycine max
  unsure (1)..(80): unsure at all Xaa locations
  Clone ID: PAT_MRT3847_123878C.1.pep
SPDSRPSGLILFGRRSSAHEXTQINGSNLKPGXKFTLYTTXEGSLKYVICITSGRSMQPRPIYNGTRGVGLYNLGILFQH

SEQ ID NO: 169284 - protein, 81 aa, Glycine max
  Clone ID: PAT_MRT3847_123879C.1.pep
ANFKVGNHKISELQAHEIDYTTSVTLFSSVVGVSIFSLSPFGVIAVTLTSDFFPCLFTMPFSLFGSCLLGFSNFLTNLLFL

SEQ ID NO: 169285 - protein, 65 aa, Glycine max
  Clone ID: PAT_MRT3847_12387C.1.pep
MPQFSPTFATAIHFPLIFAPKVPQAPLQRPDEMHVSSCAWAETTSCYEDCARMVRISAPITCSYD

SEQ ID NO: 169286 - protein, 53 aa, Glycine max
  unsure (1)..(53): unsure at all Xaa locations
  Clone ID: PAT_MRT3847_123880C.1.pep
WLEKTLTCMRDTHTQGHKINIKVTKNKGLITHVLYSFTICIFLVLIIYIXIXF

SEQ ID NO: 169287 - protein, 55 aa, Glycine max
  Clone ID: PAT_MRT3847_123881C.1.pep
MLCGGSPLSSNSKLGLILLVFEPSDSWWTELVACRVVMAGMFVAIVVSCSGGIIS

SEQ ID NO: 169288 - protein, 58 aa, Glycine max
  Clone ID: PAT_MRT3847_123882C.1.pep
GEREKERRRQNRRVSLFLSLSFNVRAQIFHLDFFGFFILTYIRRKRGKRKKRNWQTIL

SEQ ID NO: 169289 - protein, 73 aa, Glycine max
  Clone ID: PAT_MRT3847_123883C.1.pep
QKVRCVIQGQPGQEKSSKNVDALQIFLSLAWDHPGPSRVGVFLSSFETNFRNQSKVFYTDENKKGFFFSKKAF

SEQ ID NO: 169290 - protein, 70 aa, Glycine max
  Clone ID: PAT_MRT3847_123884C.1.pep
IKLRGLYKYHFATKGLNTLKEGHQNGGPNLYGTMNPFGGWPPEKKNFYWHSPLATKSKTFSFFGGKGRKV

SEQ ID NO: 169291 - protein, 125 aa, Glycine max
  Clone ID: PAT_MRT3847_123885C.1.pep
LRLATLDPHTLSLDHPSLRLVCTVFSFNTVLHHPTLVLHNFLATCSNHTLLMALLPLPGCHTYLVHTFRTQRLLLVINPLSHPMMAPPSSSNKFHLLLTFPRLSFQIQVLHTMQPMIHIISFRAV

SEQ ID NO: 169292 - protein, 42 aa, Glycine max
  Clone ID: PAT_MRT3847_123886C.1.pep
VELLVTFQLVGPPPCPRFCLSLKSESQYPDFYSFVPHNPLAF

SEQ ID NO: 169293 - protein, 73 aa, Glycine max
  Clone ID: PAT_MRT3847_123887C.1.pep
GLVGMKTTSIEVNKIKFKIPGRFELLPLVVSFVLLPTIHLERTLTHKKWLETRQVDCWTIYQVKGRRVGKITS

SEQ ID NO: 169294 - protein, 46 aa, Glycine max
  Clone ID: PAT_MRT3847_123888C.1.pep
DLPPFFAILFSQYVKHENISFSSQTFPSNNVSLTAEICYTAKSVEA

SEQ ID NO: 169295 - protein, 57 aa, Glycine max
  unsure (1)..(57): unsure at all Xaa locations
  Clone ID: PAT_MRT3847_123889C.1.pep
XXXVXSRNXXRDXYTWXPXVXXCSXXLXXQSXSHXXXXSASCXFSSXTXQKXSXQXT

SEQ ID NO: 169296 - protein, 43 aa, Glycine max
  Clone ID: PAT_MRT3847_12388C.1.pep
KKKKKKKKKKKKKKKKKKKKKKKKKKKKIKKKKKKKKRKKKKK

SEQ ID NO: 169297 - protein, 137 aa, Glycine max
  Clone ID: PAT_MRT3847_123890C.1.pep
VQIFVERLREDDRRACSTSSSSGNIQQLQNSTLTFGAARPLPSLLPMTDRKDPYGFKSGDLLDQVCFRNLGFVGKDSCIPSRFVENEIESSVSDFTQMKVNVDISGNRQKEEPNIPKVSHPIIERYPSRDHSSVFAE

SEQ ID NO: 169298 - protein, 143 aa, Glycine max
  unsure (1)..(143): unsure at all Xaa locations
  Clone ID: PAT_MRT3847_123891C.1.pep
GKRVIKLLRQNGPFLVLHLRYEMDMLAFSGCTQGCNNDEVEELTRMRYAYPWWKEKIINSDLKRKDGLSXXVLKDTXIFSFQIYIATVEIYGGDRRMASLAKNYPKLVRKETLLEPFDLQFFQNHSFQMAALDYLVSLESDIF

SEQ ID NO: 169299 - protein, 59 aa, Glycine max
  Clone ID: PAT_MRT3847_123892C.1.pep
LTNSRGERKKRRMNDSLKSHKANGKLSPETRKDHKSDTGLSGSSNNGGHRGKFTWIRHR

SEQ ID NO: 169300 - protein, 54 aa, Glycine max
  unsure (1)..(54): unsure at all Xaa locations
  Clone ID: PAT_MRT3847_123893C.1.pep
PRXNICINIQLISIPLPXTNITFEYNXDHARVSSSXIYLQLCKSNLRFNHPKLG

SEQ ID NO: 169301 - protein, 63 aa, Glycine max
  Clone ID: PAT_MRT3847_123894C.1.pep
ERNLDVRRIYRSMNDMLSLDSTGLEINLPPSVVFSQPYSIRFGSSLSLFGSSSSEIRATTRQR

SEQ ID NO: 169302 - protein, 191 aa, Glycine max
  unsure (1)..(191): unsure at all Xaa locations
  Clone ID: PAT_MRT3847_123895C.1.pep
YSVIDLMESSNQFNESFRQGLTAGYVFAATFVIVLYMSSCLPAQLIKNRKNRTGGFKKATQKRKLPLQELKQEKNKEKRKRARQIDRDLPVELLERRIKINDIGWLTCRTSFAELYEATEHFSEDSVIGEGRTGTMYKATLPNGWFLLAVKKLYDSELGYKKFRFRIMMGEVQVQKHNXSPSSSCLEEEKX

SEQ ID NO: 169303 - protein, 81 aa, Glycine max
  Clone ID: PAT_MRT3847_123896C.1.pep
YSVIDLMESSNQFNESFRQGLTAGYVFAATFVIVLYMSSCLPAQLIKNRKNRTGGFKKATQKRKLPLQELKQEKNQEKRKR

SEQ ID NO: 169304 - protein, 117 aa, Glycine max
  Clone ID: PAT_MRT3847_123897C.1.pep
MVELLAVICTIFSALAFVYLLKYRNKNKQDSPHKLPPGSMGWPFSGETLGFLKPHRSNSLGSFLQERCSRYGKVFKSHLFGSPTIVSCDFEFNMYILQNEGTLFPVDYPKVMHNILG

SEQ ID NO: 169305 - protein, 119 aa, Glycine max
  unsure (1)..(119): unsure at all Xaa locations
  Clone ID: PAT_MRT3847_123898C.1.pep
MASGWMKSLQCKSRAYQDVYHPNSKYLIPSSSCRKTIKDVVVDTTKPRPKPNPKPEKPLQKHPSSRYPSSAAKPDFETTINRSRSVTXTRHADPXLPFLTELTEGHPSRNVVEIIFHTS

SEQ ID NO: 169306 - protein, 110 aa, Glycine max
  unsure (1)..(110): unsure at all Xaa locations
  Clone ID: PAT_MRT3847_123899C.1.pep
DFNAITSIRKGGVIDTATGIXRQSVSXVEVVRESDTDYVAQSIFMRLFNATHTDGXSNGEKXKGVYVVERESRCADLGNNAGCIQYSTYEWEASCGMPRRVDIKNSITRE

SEQ ID NO: 169307 - protein, 41 aa, Glycine max
  Clone ID: PAT_MRT3847_12389C.1.pep
SQTRFGTSGPHIWEGPMGDVDVSVPGIGSGGTVNGTGRYLL

SEQ ID NO: 169308 - protein, 119 aa, Glycine max
  unsure (1)..(119): unsure at all Xaa locations
  Clone ID: PAT_MRT3847_1238C.1.pep
DIMELGAMVAMNKSVVRAAQHISVLGYIHPXATSCXILRLITIKRVFRLLRLSSVQGVKRLSQVQVVQVNQLLPLSLIKKTASLGALTHSATQRALQVSLMQMGQQVSRMESEQCAPFS

SEQ ID NO: 169309 - protein, 53 aa, Glycine max
  Clone ID: PAT_MRT3847_123900C.1.pep
MLSFMHGLQIAWDAGFRQLILICDSDSLIVLQLLDVNGTAYHPYSKDQQLQSS

SEQ ID NO: 169310 - protein, 491 aa, Glycine max
  Clone ID: PAT_MRT3847_123901C.1.pep
MVKKEEFLRENGDNENRSVSRSDFPPNFIFGVATSAYQIEGACKEGGRGPSIWDAFTHTEGKILDKSNGDVAVNHYHRYMEDIDLIAKLGFDAYRFSISWSRIFPDGLGTKINDEGITFYNNIINGLLERGIQPYVTLYHWDLPLHLHESMGGWLNKQIIEYFAVYADTCFASFGDRVKNWITINEPLQTAVNGYDVAIFAPGRRENSLIEPYLAAHHQILAHAAAVSIYRSKYKDKQGGQVGFVVDCEWAEANSDKIEDKSAAARRLDFQLGWFLHPLYYGDYPEVMRERLGDQLPKFSEEDKKILLNALDFIGLNHYTSRFISHVTECAEENHYYKVQEMERIVEWEGGQAIGEKAASEWLYVVPWGLRKILNYVSQKYATPIFVTENGMDDEDNDNLPLHEMLDDKLRVRYFKGYLASVAQAIKDGADVRGYFAWSLLDNFEWAQGYTKRFGLVYVDYKNGLSRHPKSSAYWFSRFLKAGENKKGKEE

SEQ ID NO: 169311 - protein, 81 aa, Glycine max
  Clone ID: PAT_MRT3847_123902C.1.pep
HEGSAARRLHKVTAAKIPERGAVARRLHNGSWTMIRSFHLAIPYDGISLMLWARFKRIKAYCVYLCTQSLMKVVLSDEMLF

SEQ ID NO: 169312 - protein, 183 aa, Glycine max
  Clone ID: PAT_MRT3847_123903C.1.pep
MKTPQSASKLKRKREEGKGKKKKKAGNKEEKRKIADIPESRSMLEYDHDEGEGFDHESPRSKVVESLWQDPDVNDSGLTEGSETKEDVGFHSDEEDIGITGQPTSDDSLHLSSFDLHLQHNLSKEEIDGQRNRKFSWETPAIGMSNCKWIGTGENILEDLDINSCHGLKSKLSEHWMDVYRTA

SEQ ID NO: 169313 - protein, 102 aa, Glycine max
  unsure (1)..(102): unsure at all Xaa locations
  Clone ID: PAT_MRT3847_123904C.1.pep
RKXLXXRVGILXQXWVLIXDGXGTKGXXXXGLVXRXXERXXFXAXWXXXXXXXXXXTXXPXXGXKRXPXWDRQXGEXKASGKGPXQGEDGXARRRAPGRRGG

SEQ ID NO: 169314 - protein, 105 aa, Glycine max
  Clone ID: PAT_MRT3847_123905C.1.pep
PPNCWKPSTGISLHRTDQLWIQRAPALAHLKRLPRRGFLPPPGGRRPILPIRWRTLRVRDQTEATVRHLLLSVRATHQPEIPSSLLKQSALLPLEHRLPMKTGPL

SEQ ID NO: 169315 - protein, 86 aa, Glycine max
  unsure (1)..(86): unsure at all Xaa locations
  Clone ID: PAT_MRT3847_123906C.1.pep
GVGVXLVGGKKPTPGFFPIFFFLIYLGVPGKNSPGNPSGGLKKYLPMGPGNKHKTPFQKGPWQNFPSPNKMKIFPKIKKGWVFEHK

SEQ ID NO: 169316 - protein, 46 aa, Glycine max
  unsure (1)..(46): unsure at all Xaa locations
  Clone ID: PAT_MRT3847_123907C.1.pep
GMTLVNTVNIMREAHGNGLSVVIFCHQPDVXDHCMQLKGNGLLIPI

SEQ ID NO: 169317 - protein, 91 aa, Glycine max
  unsure (1)..(91): unsure at all Xaa locations
  Clone ID: PAT_MRT3847_123908C.1.pep
MLGACYLHIHVQANAFIAFGNAPDDTSKSEAVAPMLEPIGQIEPKVVSRFXQEESITDGATEERTEPTMVDDGGPYAYAMVHDSSASTIPG

SEQ ID NO: 169318 - protein, 72 aa, Glycine max
  Clone ID: PAT_MRT3847_123909C.1.pep
ERERGYALADQSCDESPAKRHTDYDEQNDVPVPMDAEVCNYPLKIRLTSRIPASISPRRPTRTGAAYFLTVP

SEQ ID NO: 169319 - protein, 150 aa, Glycine max
  Clone ID: PAT_MRT3847_12390C.1.pep
MAGKVLKETKSLSAAEVAGAEAEMTVSSVKCCCCGLMEECTHAYIGRVRDRYGGRWICGLCSEAVKEEREREKIVISTDEALKRHMGFCQQFKSSGPPDNTNEDFILAVKQILFRTLDSPRKDRFTCRPLGRSHSCFSTMQGTPTQAETE

SEQ ID NO: 169320 - protein, 163 aa, Glycine max
  Clone ID: PAT_MRT3847_123910C.1.pep
DPYANSINYLLASYVIPYVGLTGYVGANPLLQNATSKRLVAGLLGVESGQDAVIRALLYEYRTLSVQPYNVTVAEFTNRISMLRNNLGGSGLKDEGLVVPREQGAEGRVTGNILVGDKDSLSYPRTPREILRIIYGGGDEHVPGGFYPKGASGRIAKYYLKTT

SEQ ID NO: 169321 - protein, 34 aa, Glycine max
  Clone ID: PAT_MRT3847_123911C.1.pep
YSISAKPCNIRVHTLVSSPNHTISYLSSPIGTLC

SEQ ID NO: 169322 - protein, 225 aa, Glycine max
  unsure (1)..(225): unsure at all Xaa locations
  Clone ID: PAT_MRT3847_123912C.1.pep
HASEPLEKRCVKPSPPSRTKNTALRSRTGIALQKKSRVTLIRAQNKQHFELWEMGELYHSHAPLDINSSGSEENLISHSPEEIKLEPISFDENDACPVPRPGMVFSSEAEARFYYTKYAHQMGFGIMTRTSKKGHDGKVKYLILVCSEITRSDALRKQYCAARINLTLRKDGTYRINAATLGHSHELGSHHLLSSDIEMRGKRTLDQEVIDMGXNRISYXNEMQT

SEQ ID NO: 169323 - protein, 200 aa, Glycine max
  unsure (1)..(200): unsure at all Xaa locations
  Clone ID: PAT_MRT3847_123913C.1.pep
RFFCIYEFWILKFISSFEQHCSNEDGTARPLLLVTASVDKMVLKKAIHIDADLTIVGAVTWVGRSSMEIQLELTQSEQXLQVDSRGSPGTETXIFVARDSTTGKAAAINQISPESEQERLLWEEAEERNILMKRQNQEEKHGESEDTAMLIALSAEWRIFSDMPALANRYSILMDDTRLQYSFICHPQLRNTHVRIFGGF

SEQ ID NO: 169324 - protein, 54 aa, Glycine max
  unsure (1)..(54): unsure at all Xaa locations
  Clone ID: PAT_MRT3847_123914C.1.pep
RNKKTSLITIMAPXDHXTXNAKANGNGNSXVXXVHXRGVRXXPXGXYAXEIXDP

SEQ ID NO: 169325 - protein, 45 aa, Glycine max
  Clone ID: PAT_MRT3847_123915C.1.pep
LNPLNMDSIHDCVNTKEIVKRDFFLTEKLLREIKFTWLNSFILKS

SEQ ID NO: 169326 - protein, 60 aa, Glycine max
  Clone ID: PAT_MRT3847_123916C.1.pep
FLPCSSFPGLKKGTYKLSKFRGYIFYISRGHSQLLESLILLGFPAKKGFVPPPHMGKNKI

SEQ ID NO: 169327 - protein, 60 aa, Glycine max
  Clone ID: PAT_MRT3847_123917C.1.pep
RETILFIGTCLILSLPRQSKVLYDVGSLKSPCHSLQKVKGGLFGFSKGCLHMKRWDELNQ

SEQ ID NO: 169328 - protein, 89 aa, Glycine max
  Clone ID: PAT_MRT3847_123918C.1.pep
IGTGFFHGFLARRRFGSNKKELGPRKLVVRLFPPLGGSHEGQMGQKRASAIQKMKGLKAGGVNGAFFCVNSEPASYELAMEHSPRLLVL

SEQ ID NO: 169329 - protein, 74 aa, Glycine max
  Clone ID: PAT_MRT3847_123919C.1.pep
SVSLDLTTFAKCSASASSLTSPQAFKSLQNLQSICSHPTLFVVLKLHSHLFLLYEISSSCIFGFCFRTSMEINP

SEQ ID NO: 169330 - protein, 103 aa, Glycine max
  Clone ID: PAT_MRT3847_12391C.1.pep
MNFLGGVHTFIVFHVFAATPHFFLLADSSEQLPTNFLDAAKKPEVFDWMVRIRRKIHENPELGYEEFETSKLIREELDKLRIPYKHPVAITGVIGFIGTKRSP

SEQ ID NO: 169331 - protein, 47 aa, Glycine max
  Clone ID: PAT_MRT3847_123920C.1.pep
RKLGGLYYNIPIKTCVAFFIAGARTLIINSNITNTIIHLLQYYSNIP

SEQ ID NO: 169332 - protein, 47 aa, Glycine max
  Clone ID: PAT_MRT3847_123921C.1.pep
SRSMHAIYLCFAFKSFTYLMLVSHTLHFSKTRPYIKRFYKPNSADAW

SEQ ID NO: 169333 - protein, 40 aa, Glycine max
  Clone ID: PAT_MRT3847_123922C.1.pep
RRGGKKRGGSEKTTGPWYWLKGCATMFESRSINRRVKTLN

SEQ ID NO: 169334 - protein, 60 aa, Glycine max
  Clone ID: PAT_MRT3847_123923C.1.pep
HDWAYDDTNLANAWELRARTTTLALNAYQHEGALANTHHASSGNAKVELALPHKHYILRR

SEQ ID NO: 169335 - protein, 134 aa, Glycine max
  Clone ID: PAT_MRT3847_123924C.1.pep
RTDLPNGAYHPSLKCNGTVLTFGTDTPLCESMASVLNLADKTMHNYTRNGFHKPEELRIPVSHASGEKGDDQSNKSSVTSTTSVEGASTNRPKEQVMQNCQSFPSQVPYFPATPWPIPWNPVQWSSPVPPPAFC

SEQ ID NO: 169336 - protein, 76 aa, Glycine max
  Clone ID: PAT_MRT3847_123925C.1.pep
LLIVKFVLRWRILIMCFFALWPELFGTCCFQLIPTLILIQTCLWLRSNLLSDKVVDNRKWNTIFLCRVVCDLEIYE

SEQ ID NO: 169337 - protein, 140 aa, Glycine max
  unsure (1)..(140): unsure at all Xaa locations
  Clone ID: PAT_MRT3847_123926C.1.pep
WKVQLHIKXNYPVGIKNVIRKLYLSIISWNVNDHNKIETSTTTHQYKPQIIYMSCFHGCRCYVSHPLFICLSFLCFIFLISMTSFCNFCLAYFLVLISLLFLGVYPLGMKLIIIFLRTYVVNRMSQVFPKRREQLLHSCF

SEQ ID NO: 169338 - protein, 178 aa, Glycine max
  unsure (1)..(178): unsure at all Xaa locations
  Clone ID: PAT_MRT3847_123927C.1.pep
MSKTPKEKETEEPLPDHLRCGRTDGRQWRCRRRVKENLKLCEIHYLQGRHRQYKEKVPESLKLQRKRKSNNDEEEEPEPDNNNNNNVLDDNVESRARRTSRIVKKKRMLSGDSDDGSPARKKALKQGDMQLELLRMVLKREAEKKKSKNKRNNNNKKKNXKKKENKKKKEEKEEFVLH

SEQ ID NO: 169339 - protein, 184 aa, Glycine max
  Clone ID: PAT_MRT3847_123928C.1.pep
MSKTPKEKETEEPLPDHLRCGRTDGRQWRCRRRVKENLKLCEIHYLQGRHRQYKEKVPESLKLQRKRKSNNNNNNNNEEEEEEEEEEKPEPDKKNVLDDNVEFRARRTSRIVKKKRMLFEDSDASAFSPPASQKETKQGDMQLELLRMVLKREAEKNKNKSKSKNQKNYNKKKNKKKKKKKKRN

SEQ ID NO: 169340 - protein, 76 aa, Glycine max
  Clone ID: PAT_MRT3847_123929C.1.pep
FIPHYHGASYPPPLLSPSLQRTLLLDSHLPIHSTTTSNVDLWIPVMFVSPAFDPTITFKTKTLPTLITMVPPNHNN

SEQ ID NO: 169341 - protein, 51 aa, Glycine max
  Clone ID: PAT_MRT3847_12392C.1.pep
VALLVPKIRIKLYTKDKDQLFMCVMDLCFLLPPLINNMCMCMCCVLFCVCV

SEQ ID NO: 169342 - protein, 53 aa, Glycine max
  Clone ID: PAT_MRT3847_123930C.1.pep
RLCLGFTHVYVDREGQTEQDLPLLNLLQLMIQQNHLQRHKRGVDHQICDLDRA

SEQ ID NO: 169343 - protein, 145 aa, Glycine max
  unsure (1)..(145): unsure at all Xaa locations
  Clone ID: PAT_MRT3847_123931C.1.pep
RNLAREKGHKTNRTKEITKSKEEDDKGNSNAIKYEAGEHPEQEVANKNVQYDGDSKRDMEEKKSEREKGFFLKKRKKKSREEKLLAAPKIXDEEKRRELSTRKEGKVEKEGKLERNRKKETRHKKMNKGTWVPPSTTEEKEMAKE

SEQ ID NO: 169344 - protein, 69 aa, Glycine max
  unsure (1)..(69): unsure at all Xaa locations
  Clone ID: PAT_MRT3847_123932C.1.pep
MMRARFPLLLLGVVFLASVSVSFGIAYWEKQNPSHNXCLRSCNSEIDSYRFQAWHARXQLLKVEDEENA

SEQ ID NO: 169345 - protein, 199 aa, Glycine max
  Clone ID: PAT_MRT3847_123933C.1.pep
GGSPFSSVSAAAPGFSCISLIVWVDCIHIFCYFFQFPHDVWIIFLARPQFSFTSATATTNTQPAFGSSSPSPGFTFGGSAPAPVNNDQMSMEDSMAEDTVQATPPATPPATPIFGQQPAPLQSNFAFGASASTGASPFQFARQQNIAPPSNPSPFQASGSLEFNATGSFSLGTGGDDKSGRKYIKVRHNRSRKKGAYFI

SEQ ID NO: 169346 - protein, 524 aa, Glycine max
  Clone ID: PAT_MRT3847_123934C.1.pep
MAQINNMAQGIQTLNPNSNFHKPQVPKSSSFLVFGSKKLKNSANSMLVLKKDSIFMQKFCSFRISASVATACMLHGASSRPATARKSSGLSGTVRIPGDKSISHRSFMFGGLASGETRITGLLEGEDVINTGKAMQAMGARIRKEGDTWIIDGVGNGGLLAPEAPLDFGNAATGCRLTMGLVGVYDFDSTFIGDASLTKRPMGRVLNPLREMGVQVKSEDGDRLPVTLRGPKTPTPITYRVPMASAQVKSAVLLAGLNTPGITTVIEPIMTRDHTEKMLQGFGANLTVETDADGVRTIRLEGRGKLTGQVIDVPGDPSSTAFPLVAALLVPGSDVTILNVLMNPTRTGLILTLQEMGADIEVINPRLAGGEDVADLRVRSSTLKGVTVPEDRAPSMIDEYPILAVAAAFAEGATVMNGLEELRVKESDRLSAVANGLKLNGVDCDEGETSLVVRGRPDGKGLGNASGAGVATHLDHRIAMSFLVMGLVSENPVTVDDATMIATSFPEFMDLMAGLGAKIELSDT

SEQ ID NO: 169347 - protein, 149 aa, Glycine max
  Clone ID: PAT_MRT3847_123935C.1.pep
KSLQLELLDAVSKDVGFEEKEEGKDRDKNHLRLTFRATLMGQACGLGQEDCVGNATNAFKALRDSSTLVPPSVRSTVYCTGLRNGTTSDWDFLWKRYGDTASPGERSLILWALGCTRDEGKLNEYLANSLNGKVRAHDASAVFSSVLGG

SEQ ID NO: 169348 - protein, 69 aa, Glycine max
  Clone ID: PAT_MRT3847_123936C.1.pep
ESIFTDGFSGVRKSSSASSLREQEKNNSAAAWPPAIWSLKPDLQAAISKPIFDGLPIPISGRRSKAALD

SEQ ID NO: 169349 - protein, 48 aa, Glycine max
  Clone ID: PAT_MRT3847_123937C.1.pep
QVFLLLLTVYSSAALGQLFFFHVVLIRKVVLFPVFETINDHILLCFDI

SEQ ID NO: 169350 - protein, 59 aa, Glycine max
  unsure (1)..(59): unsure at all Xaa locations
  Clone ID: PAT_MRT3847_123938C.1.pep
YFKVSLNIXLGENICFLIKSLQVPQMKFFLLVLELKMVILKSSEYKFLACYRSSVEPFL

SEQ ID NO: 169351 - protein, 84 aa, Glycine max
  Clone ID: PAT_MRT3847_123939C.1.pep
SSHHSSALQAITAPKLITKENIQGKTPSKHMYTSRAIISIQAPSDYGKYHYKIHTKHWKHNDILNPPIPSPSFNELINAFFSTR

SEQ ID NO: 169352 - protein, 39 aa, Glycine max
  Clone ID: PAT_MRT3847_12393C.1.pep
KKKFKKWRTENFRRNHNHIPLLFNLLKILTEKKQLKPPI

SEQ ID NO: 169353 - protein, 64 aa, Glycine max
  Clone ID: PAT_MRT3847_123940C.1.pep
CWVDCFGLGSMLVSWLVVSYVLSAACWFCLPVAVVVCLRVWASCWGLAASLLCCPPFPVFLWRG

SEQ ID NO: 169354 - protein, 61 aa, Glycine max
  Clone ID: PAT_MRT3847_123941C.1.pep
PYFTAQSVKALPDMTIAEFSNQRAFRISHYSEVQFTYALSFTVVSYQVSKAFYVRKWVAFV

SEQ ID NO: 169355 - protein, 61 aa, Glycine max
  Clone ID: PAT_MRT3847_123942C.1.pep
KTPYFSSFPKANICHNKLNNLKVYTFTSHSNSQKFLYIVQPLKREEKVLYFNVCSRLRKKF

SEQ ID NO: 169356 - protein, 170 aa, Glycine max
  Clone ID: PAT_MRT3847_123943C.1.pep
WSNRNGVQRGSAKFDRPLKPRPRPSSPSPGSALRRPNAAARNGDAVPGRVRVVVRLRPQNAEEMIADADFADCVELQPELKRLKLRRNNWDSDTYEFDEVLTEFASQKRVYEVVAKPVVESVLDGYNGTVMAYGQTGTGKTFTLGRLGEVDASDRGIMVRSMEDIFADLS

SEQ ID NO: 169357 - protein, 86 aa, Glycine max
  Clone ID: PAT_MRT3847_123944C.1.pep
GPGFRKQPQLARPKQTVRKSTGGKAPRKQLAPKVERRFEPTTGGVKKPNRFGPGPVVFVEFRNSQKSPELLFRKLPFQRLFRELVK

SEQ ID NO: 169358 - protein, 94 aa, Glycine max
  unsure (1)..(94): unsure at all Xaa locations
  Clone ID: PAT_MRT3847_123945C.1.pep
KNIQVLSSSFVNKQERYXVERVHNLGDTSAMCHGLDFRTAEFYCHKARETTAIMIPLVTADGTKTQALADCHSNTSGMNHHMLHELMGVDPGTN

SEQ ID NO: 169359 - protein, 125 aa, Glycine max
  unsure (1)..(125): unsure at all Xaa locations
  Clone ID: PAT_MRT3847_123946C.1.pep
TLALAXYFTALLIKRTFVLRHPAVVRVGSRPPLYPDATSVLWSRWANSLGRRVVTDDSEDSRDGWLWISRHKHVGGGATGMGAHLVGGNHGGPHRWGASYSSFVAVAGPTGDKKREKRHLCGHRR

SEQ ID NO: 169360 - protein, 59 aa, Glycine max
  Clone ID: PAT_MRT3847_123947C.1.pep
NPLYYSFNTTFSNLQHLLTHFNKFLSLSYPQTLFQIPPLNILIPSLSSPKSHLPFLHLT

SEQ ID NO: 169361 - protein, 99 aa, Glycine max
  Clone ID: PAT_MRT3847_123948C.1.pep
ESMHTCHSHIIASLTYFLCSNAFDIFLYSKRICIDLICLPMFVPKTEFEHLRKTQALRSFSYASLMFRKTGPLWFTSCSTIVTPLGFNFLTVSTDQFIN

SEQ ID NO: 169362 - protein, 71 aa, Glycine max
  Clone ID: PAT_MRT3847_123949C.1.pep
GLGSSRKGLSYMAVCCILSFRWFGCRVNSIYLRGNLSNLLWDNIHKVSTSLAFSLFQQDGNKILAFLEYRE

SEQ ID NO: 169363 - protein, 211 aa, Glycine max
  Clone ID: PAT_MRT3847_12394C.1.pep
MSNRGSSWIALKFRGVVDVIRASRYQSSYVALQRNRPIVSAARTERGYWMHPGQQFYSNNTSTNPKGIKDVKAQPEAPAPASKIFTFFPHWLRWVLGMVLSLLLPFWKSYWRKLQIIQAEAEFVVEEAEAVAKVVEKVATVAEKVSEDVAEMLPENGKLRKAALVVERASKEAAHDAQLTEEFIHKVEELKNDLDDLEAFVEPVIDKIVKI

SEQ ID NO: 169364 - protein, 59 aa, Glycine max
  Clone ID: PAT_MRT3847_123950C.1.pep
EHTWHILEITVVVYKRELVSIVYACYPPTFLGNRLAFFLFETNSLIETGLSEESRQIPK

SEQ ID NO: 169365 - protein, 54 aa, Glycine max
  Clone ID: PAT_MRT3847_123951C.1.pep
RLGRQGSPLLFLGPIGLILLCLLVSFGREYNPLRVGGLSFGLGKAFLVGLNARW

SEQ ID NO: 169366 - protein, 54 aa, Glycine max
  Clone ID: PAT_MRT3847_123952C.1.pep
GGGKTFFAKCPFRKKKISGPQFLPPFFLWGQNKNPYFFPLGGNPFYNKARVLNV

SEQ ID NO: 169367 - protein, 55 aa, Glycine max
  Clone ID: PAT_MRT3847_123953C.1.pep
SSLHVAFCALRHIPPMTELTYDYGLAQSDRAEGSMAAKGRKKCLCGSSKCRGSFG

SEQ ID NO: 169368 - protein, 57 aa, Glycine max
  Clone ID: PAT_MRT3847_123954C.1.pep
FYRYFLGYPLKVALLYLAVSCVLITPRLVHREALLQESALNPGDDFWTTMQAHKSAQ

SEQ ID NO: 169369 - protein, 563 aa, Glycine max
  Clone ID: PAT_MRT3847_123955C.1.pep
MAAAEDKWCVVTGGRGFAARHLVEMLIRHNEYCVRIADLEANIVLEPAEQLGLLGQALHSGRAQYVSLDLRNKAQLLKALEGVEVVFHMAAPNSSINNYQLHHSVNVQGTKNVIDACVELNVKRLVYTSSPSVVFDGVHGIHNGNETMPYAHSPNDHYSATKAEGEALVIKANGTNGLLTCCIRPSSIFGPGDRLLVPSLVDAARKGKSKFLIGDGNNVYDFTYVENVAHAHICADRALVSEAPVSEKAAGEAYFITNMEPMKFWEFVSVVVEGLGYEGPRIKIPTFVIMPFAHLVEWIYRLLGPYGMKVPQLTPSRIRLTSCSRTFDCSKAKDRLGYAPIVTLQEGLRRTIESYTHLKAENQPKTKREGSSKASIYLGSGRVADTLLWKDKKQTFIALLVLIAIYFNFIASENTIISALTKLLLFASIFLFIHGILPAKILGYTLEKIPKSWFHLSEDMSHQIALSVASSWNIAVNVLKSLADGNDWVLFFKAVLSLFILSFLGAFSLQSLYTIGVTFAFIAFYVYEQKEEEIGGLFIKTHSLGCKLKSDLTRKFLSSKKID

SEQ ID NO: 169370 - protein, 286 aa, Glycine max
  Clone ID: PAT_MRT3847_123956C.1.pep
MAEAKLRYAVVTGANKGIGFETVKELASNGVKVVLTARDEKKGHEAFERLKECGFSDLVIFHQLDVTESASISSLVEFVKTNFGKLDILVNNAGISGANLDEVEGSTFKWEELTQTNEMTEKCLTTNYYGAKKTTEAFLTLLQLSNSPRIVNVSSQAGLLKNISNEWAKGVLDDADNLTEERIDEVLKEFIKDFKEGSLATKGWPTFLSAYIVSKAAMNSYTRILAKKHQNMCINSVCPGFVKTDINKNTGILTVDQGAASVVKLALLPDGSPSGLFYIRQELSNF

SEQ ID NO: 169371 - protein, 307 aa, Glycine max
  Clone ID: PAT_MRT3847_123957C.1.pep
MEQTLSFEFEHEFVQNTARVKSVDMHPTEPWILLGLYSGTISIWNYQTKTEEKSLKISESPVRSAKFIARENWIVAATDDKNIHVYNYDKMEKIVEFAEHKDYIRSLAVHPVLPYVISASDDQVLKLWNWRKGWSCYENFEGHSHYVMQVAFNPKDPSTFASASLDGTLKIWSLDSSAPNFTLEGHQKGVNCVDYFITNDKQYLLSGSDDYTAKVWDYHSRNCVQTLEGHENNVTAICAHPELPIIITASEDSTVKIWDAVTYRLQTTLNFGLKRVWSIGYKKGSSQLAFGCDQGFLIVKISEGRPQ

SEQ ID NO: 169372 - protein, 151 aa, Glycine max
  Clone ID: PAT_MRT3847_123958C.1.pep
KRGNQNWPQKKKRGGARGGKKIFFFKGGPQISKGTRETKKKKFSPGEKKKRARGKKKNCFNWGGEKRGFFSPLKKVKKGPRGVFPGPTFFKKPKTRGPWLFKKKKPPFPKVFGGKRNNGNKNFNLKKTWKKFPKSGGLLGDKKRPLGPGPI

SEQ ID NO: 169373 - protein, 911 aa, Glycine max
  Clone ID: PAT_MRT3847_123959C.1.pep
MNPEKFTHKTNEALASAHELAMSSGHAQLTPIHLAHALISDPNGIFVLAINSAGGGEESARAVERVLNQALKKLPCQSPPPDEVPASTNLVRAIRRAQAAQKSRGDTHLAVDQLILGILEDSQIGDLLKEAGVAVARVKSEVDKLRGKEGKKVESASGDTNFQALKTYGRDLVEQAGKLDPVIGRDEEIRRVVRILSRRTKNNPVLIGEPGVGKTAVVEGLAQRIVRGDVPSNLADVRLIALDMGALVAGAKYRGEFEERLKAVLKEVEEAEGKVILFIDEIHLVLGAGRTEGSMDAANLFKPMLARGQLRCIGATTLEEYRKYVEKDAAFERRFQQVFVAEPSVVDTISILRGLKERYEGHHGVRIQDRALVMAAQLSNRYITGRHLPDKAIDLVDEACANVRVQLDSQPEEIDNLERKRMQLEVELHALEKEKDKASKARLVEVRKELDDLRDKLQPLMMKYRKEKERVDEIRRLKKKREELLFALQEAERRYDLARAADLRYGAIQEVETAIQQLEGSTEENLMLTETVGPEQIAEVVSRWTGIPVTRLGQNEKERLIGLGDRLHSRVVGQDQAVNAVAEAVLRSRAGLGRPQQPTGSFLFLGPTGVGKTELAKALAEQLFDNENQLVRIDMSEYMEQHSVSRLIGAPPGYVGHEEGGQLTEAVRRRPYSVVLFDEVEKAHTSVFNTLLQVLDDGRLTDGQGRTVDFRNTVIIMTSNLGAEHLLSGLSGKCTMQVARDRVMQEVRRQFRPELLNRLDEIVVFDPLSHDQLRKVARLQMKDVASRLAEKGIALAVTDAALDYILSESYDPVYGARPIRRWLEKKVVTELSRMLVREEIDENSTVYIDAGPNGGELVYRVEKNGGVVNPTTGQKSDILIQIPNGHAPKTDAVQAVKKMKIEEIDDDEMEE

SEQ ID NO: 169374 - protein, 97 aa, Glycine max
  unsure (1)..(97): unsure at all Xaa locations
  Clone ID: PAT_MRT3847_12395C.1.pep
ENFAFFKNPSGQVIAQDLFSSGAIKSATDFXVYKEVLAFLGLTSYLDNTAVYHTKNDKLELLKTGSLXHLGENMLAFLLHIGHLLIFRGNSTESGKI

SEQ ID NO: 169375 - protein, 135 aa, Glycine max
  Clone ID: PAT_MRT3847_123960C.1.pep
YVYNFAHLLQKNSKKHKKASAMCYGPEENSHVANYRMVLERFPLSLDRKKWSSVERESLLKGIKQQFQEMVLQLSLSVDSSEGLLGDANDMDNVIASVKDLEITPERIRQFLPKANWDLIASMYVGGRNGAVCES

SEQ ID NO: 169376 - protein, 123 aa, Glycine max
  unsure (1)..(123): unsure at all Xaa locations
  Clone ID: PAT_MRT3847_123961C.1.pep
VLSRGTKWYTGLYENGMNRFCPLTYGLXKMPLIHSLCLPWITYMPIYCTPLWCLATMPHLCLLNEIPLYPLVIDSFFIISXCIFLSPLIIHLLDVSLTGGTLIKWINRAMIWMMKSVTCHLYG

SEQ ID NO: 169377 - protein, 96 aa, Glycine max
  Clone ID: PAT_MRT3847_123962C.1.pep
VRKKKIWEVQINSPWRGKRLTNQVIAKIVGRGQKKKGVVLKVKPGKHTPVKEKPKKWVGVGIKRNGVLKKKKNSRGAANFGFGRKKGLKINQIFSF

SEQ ID NO: 169378 - protein, 65 aa, Glycine max
  Clone ID: PAT_MRT3847_123963C.1.pep
NKYSHFFTCILFHQLSPPPTFSRIEHNIGVSAECGVLQKRVLPIRGEGFSQQKEKGFFSLFKCSH

SEQ ID NO: 169379 - protein, 45 aa, Glycine max
  Clone ID: PAT_MRT3847_123964C.1.pep
VAPFFIFVACGYKLCSKNFWVVLGTSEEHIIYSCYFLARAETDVT

SEQ ID NO: 169380 - protein, 94 aa, Glycine max
  Clone ID: PAT_MRT3847_123965C.1.pep
MKLVRFLMKLNNETVSIELKNGTIVHGTITGVDISMNTHLKTVKLTLKGKNPVTLDHLSVRGNNIRYYILPDSLNLETLLVEETPKIKPKKPTG

SEQ ID NO: 169381 - protein, 86 aa, Glycine max
  unsure (1)..(86): unsure at all Xaa locations
  Clone ID: PAT_MRT3847_123966C.1.pep
IWDLRCWIAKNYLYTCYAYTGKVTXAIVIRIMQTGQSECNRFIDFNSPALVETILQTYNVAILPNGGHSFKAHWATLIASERSRHD

SEQ ID NO: 169382 - protein, 170 aa, Glycine max
  Clone ID: PAT_MRT3847_123967C.1.pep
LIYKLISTYEISLIQFFYLFIFFPTSTYLKMYPKRVQISYLPLHTVLEGLKVAPLVRTPATQVHDSSKRFFSFFKSISSINITVLGCLMKHIFIAITSNTVLWLRETWDSCGATFVRRTNEVFFSWCSIFDSFLHVWNHLENEYLSSCSSPGSNDDTYFTLGCFRKRVRT

SEQ ID NO: 169383 - protein, 165 aa, Glycine max
  Clone ID: PAT_MRT3847_123968C.1.pep
MIKNMIIGSKGGSSKRHTPVEMEDNIISINRIRILLAVYDGEVDPDFSLKDLYFDDVQVMNQDGSLNFQNVKAEFRPGTQTQDYIQGFTDTASEITVARDVTAATRYIISVTNKNLCEIGIKILMPSRVTEEDKRDLKGVGVEYDVDMAVDGAEYIEATDGDPKS

SEQ ID NO: 169384 - protein, 314 aa, Glycine max
  Clone ID: PAT_MRT3847_123969C.1.pep
AGHEGLKFWDLRNPFRPLRSLNPMPRIIYSLDWLSNPSCIIMSFEDGTMRTISLVKAANDLPVTGEIYSGKKQPGLHGSAYSSFAIWSVQVSRLTGMVAYCGVDGAVIRFQLTTKSVETDHSRNRSRRFLCGSVTEEDSTLIINTPLSDAPFQWKKPPEKGRCAESFRDLLAKSNPFRSASNQMAETSNPDSQTIAIGAGEDVGLESGSEEALCSVKQPKRPKLNSGRKKKPEGLALVCGDDDAPPIPPEADNEKSDFGNIPETFPPKVAALHRVRWNMNKGSERWLCFGGACGLVRCQEIVYSNIDKRWALKK

SEQ ID NO: 169385 - protein, 112 aa, Glycine max
  Clone ID: PAT_MRT3847_12396C.1.pep
MPCLYITTNLNLDGVDTNPVFSEATTAVSTIIGKPEKFVMVILKSSVPISFEGNKEPAAYAEIVSMGGINTEVKRKLIATIGTILQSNLSIPRTRFFLKVFDVSAFRTNSKM

SEQ ID NO: 169386 - protein, 52 aa, Glycine max
  Clone ID: PAT_MRT3847_123970C.1.pep
TNYYLYYISHLTMITISMPEHKPFHARTGALPTFKGQTRQNTPVSYRTTFPK

SEQ ID NO: 169387 - protein, 59 aa, Glycine max
  Clone ID: PAT_MRT3847_123971C.1.pep
GCQVVNILFINHCTKNFALTLADGLHSFPSDNYLNEYTLARHCTSDAFKTFTMDERILS

SEQ ID NO: 169388 - protein, 80 aa, Glycine max
  unsure (1)..(80): unsure at all Xaa locations
  Clone ID: PAT_MRT3847_123972C.1.pep
XXDASXDGDSPMIXLXSXFGTGITATWCMXXKLXEWXNGVXXAPSWXSXPXEXXXQKGSXQKXFRGGSVHQVXXXMMMSR

SEQ ID NO: 169389 - protein, 227 aa, Glycine max
  Clone ID: PAT_MRT3847_123973C.1.pep
SPETISLESNSYQSTKVFTDDWELNSPFSVVSSLYQEPEAKFSVHDRVLSDQIIEDDDDDDDDDIMSSYVIELNSNLRREECGESAIDEAIAWAKEKFQSQSSDEESSIRNDGKEQTFKLREKQQTETEKLDRDIRLWSSGKETDIRLLLSTLHHILRPESGWYAIPLKSLLESSQVKKAYQKARLCLHPDKLQQRGATLLQKYVAEKAFSILQDAWAAFISIDVSF

SEQ ID NO: 169390 - protein, 117 aa, Glycine max
  unsure (1)..(117): unsure at all Xaa locations
  Clone ID: PAT_MRT3847_123974C.1.pep
MALDQYFEEAMPQLDSFEDKSFLETWKCDSDDIADSDRNASGVFDCNICLECVQDPVVTLCGHLYCWPCIYKWLNFLSASCENEEKQQCPVCKSEISQSSLVPLXGRGQTELPSKGK

SEQ ID NO: 169391 - protein, 78 aa, Glycine max
  Clone ID: PAT_MRT3847_123975C.1.pep
LIPPKALSDKSAMRENLLRQGYRIVGIIGAQWSDLLGAHRGESRPFKLPNPMYSIGWSLPLFQQFSKGWLLSICKRER

SEQ ID NO: 169392 - protein, 82 aa, Glycine max
  Clone ID: PAT_MRT3847_123976C.1.pep
VRQGFLWWPREIIESPHPLESKAIALPPSFAPALFWCPMCTSSLEIHASTPRALEPLFYGLQRAAFSPFTSCRLRRIFAIRQ

SEQ ID NO: 169393 - protein, 103 aa, Glycine max
  unsure (1)..(103): unsure at all Xaa locations
  Clone ID: PAT_MRT3847_123977C.1.pep
SQQRSGHVCIHSTHPWYHQVCWADKPKFPFPKSSAQCRSVHIRLCVXVQPEWAPEVLISKRGCVTTHVSYSAHTNSVLGKRLRSFGVISLAHPFPSIFGGRVG

SEQ ID NO: 169394 - protein, 93 aa, Glycine max
  Clone ID: PAT_MRT3847_123978C.1.pep
WSLAWCVPVNLACAFLLERASRICQLVTCPNCLTPICTTVRLSLVAPSFFLSRGCFSSVSQLNSGDVITHFSSCMHGFVSASPPGGPPLFFFL

SEQ ID NO: 169395 - protein, 162 aa, Glycine max
  unsure (1)..(162): unsure at all Xaa locations
  Clone ID: PAT_MRT3847_123979C.1.pep
SVNPNKLNDVGLXRLDARMTIIRTMILYKLPDSADTPAFRKIELRSVPAVTRLLTSYXTRLLLHMIVXEHVALHWLLTNENVVDSFLVHSSHYHETTIFSSFYSLSSFILGYXGHSFFKASYSYYNVCTITTLTELMNYELIVYIQNDFDVALAXDVMHNES

SEQ ID NO: 169396 - protein, 52 aa, Glycine max
  unsure (1)..(52): unsure at all Xaa locations
  Clone ID: PAT_MRT3847_12397C.1.pep
LNNPVLIQKLMGPCQTYLKGKGTWKLVFQPKCXEDGECQAPGIRVTLIARLI

SEQ ID NO: 169397 - protein, 56 aa, Glycine max
  Clone ID: PAT_MRT3847_123980C.1.pep
TRPGRSSSGSSGRTPNGSSGRLTVTKLPPFFPASSTLRFIYPKVQLTYPKCYTYSA

SEQ ID NO: 169398 - protein, 101 aa, Glycine max
  Clone ID: PAT_MRT3847_123981C.1.pep
MGSSKPRSFILLLFVFLCVFATAQEQQQPIKTVVVLVMENLPFDHMLGWMKESINTLINGVTGDECNPVFTKSPRKDSICFIDDAEFVDPDPGPLFEDVLQ

SEQ ID NO: 169399 - protein, 102 aa, Glycine max
  Clone ID: PAT_MRT3847_123982C.1.pep
MKLCYSALLDVFEETEQEMRKQGKNTLRQIKRLVQAYITEARWFHCNHTPTMEEYMQVATMSCGFAMLTIVSFLGMEDTTEEVLIWATSDPKIVAAASIISR

SEQ ID NO: 169400 - protein, 378 aa, Glycine max
  Clone ID: PAT_MRT3847_123983C.1.pep
MLRLCYGPLDCCFGRRGADGLLWHTDLKPHASGDFSIAVAQANYSLEDQSQVFTSPYATYVGVYDGHGGPEASRFVNKRLFPYLHKFATEQGGLSVDVIKKAFSATEEEFLHLVKLSLPISPQIASVGSCCLFGAISNNVLYVANLGDSRAVLGRRDTVRKNSPVVAQRLSTDHNVADEEVRKEVEALHPDDSHIVVYNRGVWRIKGIIQVSRSIGDVYLKKPDFYRDPVFQQFGNPIPLKRPVMTAEPSIIIRELESQDLFLIFASDGLWEQLSDEAAVQIVFKHPRAGIAKRLVRAALHEAAKKREMRYDDIKKIDKGIRRHFHDDITVVVIYLDHHAGSSNGRFKQTAVGYTTAPVDIFSLNADEGEKRMLGTVA

SEQ ID NO: 169401 - protein, 122 aa, Glycine max
  Clone ID: PAT_MRT3847_123984C.1.pep
MLRLCYGPLDCCFRRRRADGLLWHTDLKPHASGDFSIAVAQANYCLEDQSQVFTSPYATYVGVYDGHGGPEASRFVNKRLFPYLHKFATEQGGLSVDVIKKAFSATEEEFLHLVKLSLPISP

SEQ ID NO: 169402 - protein, 99 aa, Glycine max
  unsure (1)..(99): unsure at all Xaa locations
  Clone ID: PAT_MRT3847_123985C.1.pep
PEYALHGKLLKKADTYRCGIVELEIISGQKSTDVRVDERVRKSXILRHAWRGHERGMHLEMVVYTLNDNYDAYYVKNIIENAWLCTQTLDAIRPPVSEV

SEQ ID NO: 169403 - protein, 60 aa, Glycine max
  Clone ID: PAT_MRT3847_123986C.1.pep
GCLYLDDIKFGTVIRLYPISMIDVLAFAVIVFYNHACHDFLSACQMWSCLTVIWILMFKR

SEQ ID NO: 169404 - protein, 123 aa, Glycine max
  unsure (1)..(123): unsure at all Xaa locations
  Clone ID: PAT_MRT3847_123987C.1.pep
MEAVGKKKEEGYSLFKAGGCARAXKGYKMAVNIIEFDTGHVANXEKMSCKALKVAVSSNQCNLLVGDYRIIDRSEKLCTXVLDLEITKSQAIYRMACTYIQVGDLYLAEFDIMKALEIDPHTR

SEQ ID NO: 169405 - protein, 38 aa, Glycine max
  Clone ID: PAT_MRT3847_123988C.1.pep
HASEHTYNFLDLDADLGLWINVLSNLDELTDHLERVCC

SEQ ID NO: 169406 - protein, 180 aa, Glycine max
  Clone ID: PAT_MRT3847_123989C.1.pep
GSRIHLHIPENAIWVTSLTEVLMGWRGGNESVICNEMLYFLVYSTGGGQSENRHALVAYNMSNHSSQGSLTRNFIPVPCSLTCGRLMNLKEKLVMVGGIGKPDRPDIIKGIGIWLLNDKKWEEIARMPHKFFQGFGELDDVFASSGADDLIYIQSYGAPALLIFDVDHKQWKWSQKCPVS

SEQ ID NO: 169407 - protein, 73 aa, Glycine max
  Clone ID: PAT_MRT3847_12398C.1.pep
GNIRVEYCCFQFGYGFSSYVSQKGRSYKLFKLYTMNLKNSFMLLEPNRATSEGIKVSTEGPQLNYMQKQEAKD

SEQ ID NO: 169408 - protein, 155 aa, Glycine max
  Clone ID: PAT_MRT3847_123990C.1.pep
QAAELLNHPHLQPYIHKIHLKLNSPIRSTFPFQWPESNYIRRTQFVEPESVSTLSDLDKCLSFNNDRTLNPSISGTEQISQCSTERADGLSTCSEEKIYELSVGCVRGKYKTDKSKATKFSTVERTPRSRGVTVSATQRATWQHQRQPILVQVIH

SEQ ID NO: 169409 - protein, 166 aa, Glycine max
  Clone ID: PAT_MRT3847_123991C.1.pep
SNSRVDPRVRGELSLLDESNQATISVFDEDVEVLESWKEEFPYNGGVGIVEDSSEEGLLESAEIDENVKDTDTDGDITEEAVEESSSADDDRINEEAAGLLKLELEANQRTQEIERIAEEKLSQGIKLVVYPPVGKPDQDIELFLNKNLSTLSEEPDILIMGAFND

SEQ ID NO: 169410 - protein, 37 aa, Glycine max
  unsure (1)..(37): unsure at all Xaa locations
  Clone ID: PAT_MRT3847_123992C.1.pep
XCAXXCXLXXPNIXVXXXLXHNTTHXSNLGCSKXGXK

SEQ ID NO: 169411 - protein, 156 aa, Glycine max
  Clone ID: PAT_MRT3847_123993C.1.pep
MLPKFIISPFKVESQEGKHVNKRRKHVRSFESTNMDVGLRLLPQITSSKNTSNVLLKSAMRKTNQQSIPQDFCFLKTCNLCNKQLSPDKDIYMYRGDQGFCSVECRNRQIVLDDMRELENSTKKIVAAYRQCSSEAHRETRLILEDLRMQRLKSRV

SEQ ID NO: 169412 - protein, 52 aa, Glycine max
  Clone ID: PAT_MRT3847_123994C.1.pep
QSTSHAAAPLFWSGGKDKCVVLWSVHDHIKNFTQQKQGSNVKPWLLKTWGQV

SEQ ID NO: 169413 - protein, 57 aa, Glycine max
  Clone ID: PAT_MRT3847_123995C.1.pep
KRFKSHHTNYRITLQYRFNEIPLRNTSTERLGHHRMLLCPYPQKDKATPSLKNYSPT

SEQ ID NO: 169414 - protein, 358 aa, Glycine max
  Clone ID: PAT_MRT3847_123996C.1.pep
MGGDCGTWAPHLESPNLNLLDTGKPVGISAAMNPGFNMVSSNATVPAFGSSTVPHLQLGHSYEPSGWSYCLPCFPQGFAPALNFNAEGNPPADHVKTFGDKIGPYGESSSLQKQILVIDQTGGQTTIVYSSRFGSPGECLASWHSKLHGANYLRGNEPSFRRGLNLNLNLNMTEPTLADKVDGNPGTSIESEMHEDTEEINALLYSDSYGYSTQDDDDEVTSTGHSPSTMTTHDNCETFRRDTAEEVASSARKTKKRKLLDGYYDDIQLIDTASSQNLNKSSATGDDDAESRCSSNNNEGSLSGNKKIKKEKIRDVLSILQSIIPGGKDKDPVMLLDNAIHCLKSLKHKAQALGLDAL

SEQ ID NO: 169415 - protein, 98 aa, Glycine max
  unsure (1)..(98): unsure at all Xaa locations
  Clone ID: PAT_MRT3847_123997C.1.pep
VATNSARGICMHARTTYVKNISDTLCYLANRVNAPLRXELEYHLKQGXTTCLKSNLQHPILYCYHDLPPRYCDRHSSCMWKVTMNRCTDASHLPNDFR

SEQ ID NO: 169416 - protein, 54 aa, Glycine max
  Clone ID: PAT_MRT3847_123998C.1.pep
VYGRAKSLNIHRNLVVSERNISDQNLGCCLGFGLLTFGNRIVFGLSSGLELLFT

SEQ ID NO: 169417 - protein, 518 aa, Glycine max
  Clone ID: PAT_MRT3847_123999C.1.pep
MAAKTSTNGTHYSRSRPEYIPNRIPDPHYVRILDTTLRDGEQAPGASMVSSQKLARQLAKLGVDVIEGGFPSASQEDFNAVKMIAQEVGNNCDADGYVPVIAALCRCNEKDIATAWEALKYAKRPRLMPFIAVSPIHMEYKLNKTKEEVLQIAKDMIKFARSLGCSDIQFCSEDAARSDREFLYQILEEVIKAGATTLGIGDTVGITMPFEIRQLIADIKANVPGAENVIISMHCHNDLGHATANAIEAAQAGAMQLEVTINGIGERAGNASLEEVVMALKCRGDQVLGGLYTGINTRHLLKTSKMVEEFSGMYLQPHKAVVGDNAFLHESGVHQAGLLKHRATYEIMSPEDIGHEKSSGVNMVLGKLSGRQALKSRLKELGYELRDEEVESVFRNFTAIAVEKKRATDELVTREVSTHVACAVGVGPVDSAYVTINTMGSSTVNIKLVTSGGVTGGADAIATTRVVFRRKNKQSPTPALNGNVIYPTFSGTGGRVDIATSSVKAYIAALNKMLDSKE

SEQ ID NO: 169418 - protein, 73 aa, Glycine max
  unsure (1)..(73): unsure at all Xaa locations
  Clone ID: PAT_MRT3847_12399C.1.pep
HRINEQKEDDGNDLEXKSNKLSEELIRANADVDSLYGSKNGYSXVQHVRYRLNQLRVRLYRSILLPRIDNDTD

SEQ ID NO: 169419 - protein, 144 aa, Glycine max
  Clone ID: PAT_MRT3847_1239C.1.pep
MKFPLAFFSLSILAFAEVAADRVLLLIDNPTIRESHSVFIKSLEERGHSAIIAMADDPNLSLMKFGEYVYNHLIIFAPSVDDFCGNINVDEITKFIDGGGNVLFAADKNLGDAIRDLATEVGYEFGEDQSMVIDHHNYNTDLDD

SEQ ID NO: 169420 - protein, 57 aa, Glycine max
  Clone ID: PAT_MRT3847_123C.1.pep
LLVIIVFPLSLRLEITSLFFLKVNAYMKSQYLFDIYVDLKWKCGKKHCSNFSEGYLM

SEQ ID NO: 169421 - protein, 104 aa, Glycine max
  Clone ID: PAT_MRT3847_124000C.1.pep
KGSFITSTGALATLSGAKTGRSPRDKRVVKDDLTENELWWGKGSPNIEMDEHTFMVNRERAVDYLNSLDKVFVNDQFLNWDTENRIKVRIVSARAYHSVVSHNM

SEQ ID NO: 169422 - protein, 120 aa, Glycine max
  Clone ID: PAT_MRT3847_124001C.1.pep
YCKRNRALIAFQAAQAGAMQLEVTINGIGERAGNASLEEVVMALKCRGDQVLGGLYTGINTRHLLKTSKMVEEFSGMYLQPHKAVVGDNAFLHESGVHQAGLVKHRATYEIMSAEDIGHE

SEQ ID NO: 169423 - protein, 47 aa, Glycine max
  Clone ID: PAT_MRT3847_124002C.1.pep
SNIRLGSHGKQKKGKSFFLKEQLKHHHVISQNKYLSWIRRLSKRARA

SEQ ID NO: 169424 - protein, 107 aa, Glycine max
  unsure (1)..(107): unsure at all Xaa locations
  Clone ID: PAT_MRT3847_124003C.1.pep
XCXXNQPSXLSXXXXDXSXPCXHXAXNTEXPXXGXQIXVXLXLXXRLLDQLXPQLQPXKNFTXQDRHRXXTVSIXNRELGXAXXXFXXSAVSXXXSXRIPSLRTXAX

SEQ ID NO: 169425 - protein, 95 aa, Glycine max
  unsure (1)..(95): unsure at all Xaa locations
  Clone ID: PAT_MRT3847_124004C.1.pep
FSSXRXTXSSQDFELWNPACTQALTMXFNPNPCTDAWSLESLKRTGSHCDIICVTGWTATPMQDVQVTIDWAIYCQECAPRTYCVLKPQTPFVLY

SEQ ID NO: 169426 - protein, 64 aa, Glycine max
  Clone ID: PAT_MRT3847_124005C.1.pep
IQILDCVIDYTILIIDYQQLIKRFDLNFKTCNRLPDEIFRKLFLRVSSFQMVFTWPPKVYIYVT

SEQ ID NO: 169427 - protein, 57 aa, Glycine max
  Clone ID: PAT_MRT3847_124006C.1.pep
TSPLGNNFKGKKKKHHTGVIADDTGAHLLTRSLVERNKGGKLMTCHEGFIALNFGIE

SEQ ID NO: 169428 - protein, 582 aa, Glycine max
  Clone ID: PAT_MRT3847_124007C.1.pep
MDHHRHPHHTTPLSEPTTPTTPRPTLFLSTSGKALLLSNSNKSLLLSNSSKRLDTPRKKYVKQVTGRHNDTELHLAAQRGDAASVRQILAEIDSIMMGSFEFDAEVASVRSAIFNEVNELGETALFTAAEKGHLDVVKELLPHTSHDALSSKNRSGFDTLHIAASKGHLAIVQALLDHDPGLIKTFAQSNATPLISAATRGHADVVEELLSRDPTQLEMTRSNGKNALHLAARQGHVSVVKILLRKDQQLARRTDKKGQTALHMAVKGVSCEVVKLILAADAAIVMLPDKFGNTALHVATRKKRTEIVHELLLLPDTNVNTLTRDHKTALDLAEGLPISEEILEIKECLIRYGAVKANDLNQPRDELRKTMTQIKKDVYFQLEQARKTNKNVSGIANELRKLHRAGINNAANSVTVVAVLFAAVAFAAMFTVPGGDNDQGVAVMAHTASFKAFFISNAIALFTSLSVVVVQITIVRGEIKAERRVVEVINKMMWLASVCTSVSFISASYIVVGRRSQWAAILVTIVGAIVMGGVLGTMTYYVVKSKRSRRMRRKKGKFSKTGTQSWRLSSSDDSEINPIYAI

SEQ ID NO: 169429 - protein, 144 aa, Glycine max
  Clone ID: PAT_MRT3847_124008C.1.pep
MLAIGKATSVDICRFFSKPGPYVSCDTMEFLLARYDGELDVDAVDSEGRTTIHVVVREGHTRVIRFCVTMGGNPNRVDSKGWTPLYYAAWKGHVKAAECLLECSNVKCVRDREGRRTFSVVAESEHEHSVIDKVQKETKSRAGF

SEQ ID NO: 169430 - protein, 42 aa, Glycine max
  Clone ID: PAT_MRT3847_124009C.1.pep
GCEKTTEGLDITLDIMCSNSSFPSLSKCLCFNKILANLLNTQ

SEQ ID NO: 169431 - protein, 77 aa, Glycine max
  Clone ID: PAT_MRT3847_12400C.1.pep
SGGSSFSFRSKRYVRPWQYSCSGCPAYAVRFVAFGLHPEFKPGLWLFICFNAPYAASSVDSIECVCNPFYGAITIKW

SEQ ID NO: 169432 - protein, 70 aa, Glycine max
  Clone ID: PAT_MRT3847_124010C.1.pep
KKHKAKKAETSCLKPNKNTIEDPHNKLSSWKNFNNKTNGYICEYVGEECWHPGENKVLHHNLTNMGLKGE

SEQ ID NO: 169433 - protein, 97 aa, Glycine max
  Clone ID: PAT_MRT3847_124011C.1.pep
GVLSYDPGVGRGPWTMEEDLIWITYIANHGEGVRDSLVKAGGLKHSGKRCRLRWLNYLRADVRRGNITLDEQLLIMGLHAEWGNRWFKIAKLVPGRT

SEQ ID NO: 169434 - protein, 54 aa, Glycine max
  Clone ID: PAT_MRT3847_124012C.1.pep
IYPRIHVMILQYLSLNICAFEESTPHDTQLISDFKCISKSDGSIPWCIVMFVSP

SEQ ID NO: 169435 - protein, 67 aa, Glycine max
  Clone ID: PAT_MRT3847_124013C.1.pep
VLGATISFSPDRVLLFFPGLNLPWVRVVHSLLLKICFPKLLGLACPFLKWDLKDFRLCKNSKCVNFF

SEQ ID NO: 169436 - protein, 66 aa, Glycine max
  Clone ID: PAT_MRT3847_124014C.1.pep
MFHALMSLIARCWKPFGHGDDAANAAAAAGRECKDGLLWFRDIGKFAAGDFSMAVVQANQVLEDQS

SEQ ID NO: 169437 - protein, 315 aa, Glycine max
  unsure (1)..(315): unsure at all Xaa locations
  Clone ID: PAT_MRT3847_124015C.1.pep
MMEKIQHSEVEVKGLKLHVAEIGSGSKTVVFLHGFPEIWYTWRHQMISVANAGYRAIAFDFRGYGLSQQPAEPEKETMFDLVHEIVGLLDALNISKAFLVGKDFGAIPGHLTTAVHPERVAGIITLGIPFMLPGPSAVESHLQLPKAPTLLSGXEPGRAEADFGRFDVKSVIRNIYTLFSGSEIPIAGDNQEIMDLFDPSTALPPWFSEEDLATYASLYEKSGFKYALQVPYRSINVDAGLSDVKVTIPSLLIMGEKDYVFKFPGMEDYIRSGAVKNFVPDLEIVYIPEGSHFVHEQMPEKVNQFIIEFLDKQNI

SEQ ID NO: 169438 - protein, 47 aa, Glycine max
  Clone ID: PAT_MRT3847_124016C.1.pep
LNTVEIQLSSYDHPNSIHVPRLLHLGSHFISAFGYKKKKKKGRPLES

SEQ ID NO: 169439 - protein, 55 aa, Glycine max
  Clone ID: PAT_MRT3847_124017C.1.pep
NLILHRAPIKLGNLEIIQENFLQLKPFKKKKPFFKKKKTQRKFFLRTGIHPAFTG

SEQ ID NO: 169440 - protein, 48 aa, Glycine max
  Clone ID: PAT_MRT3847_124018C.1.pep
DQKINQSAALKDGRSIRSTLTCACLQQHNPTIMQRKFNSTAVILNSLA

SEQ ID NO: 169441 - protein, 98 aa, Glycine max
  Clone ID: PAT_MRT3847_124019C.1.pep
VVDELLKRREETEWFIEGDFDTYLQRIQQPYVWGGEPELLMASHVLKTPISVFMRDTGSVELVNIAKYGEEYRNDKDISINVLFHGYGHYDILETLRP

SEQ ID NO: 169442 - protein, 107 aa, Glycine max
  Clone ID: PAT_MRT3847_12401C.1.pep
SASRPPPSPDGRSTPTSRSAWSPSDPPPLPMMCSRSSVSLWTRYPSVSPSSSTPPRPSPPRLVYRSPPDSCLPTSTCLMLPSPSSPATPSRTAASIKRSNRGSRRAC

SEQ ID NO: 169443 - protein, 53 aa, Glycine max
  Clone ID: PAT_MRT3847_124020C.1.pep
HVLKTPISVFMKDTGSVDLVNIAKYGEEYRNDKEISINVLFHGYGHYDILETL

SEQ ID NO: 169444 - protein, 131 aa, Glycine max
  unsure (1)..(131): unsure at all Xaa locations
  Clone ID: PAT_MRT3847_124021C.1.pep
KGELTYGKIGEWSFDKRSXIRCASPKNLTLPPPGVPESVVTLVKMVNEASANIPNWWSKGRLKVLQISLVGKCVEPLVILNGRALYRSLDMNLYFLRIIYENDVIKVGGIDTPGAIYILVSDFRKKKYLNM

SEQ ID NO: 169445 - protein, 76 aa, Glycine max
  unsure (1)..(76): unsure at all Xaa locations
  Clone ID: PAT_MRT3847_124022C.1.pep
TPNYYTSIXDILLSTSQFSFAKFITKGRAASHIFSPFTVLIYMTYSPTPYTHLSHFLHFYQPLKTQLTHILSPFSS

SEQ ID NO: 169446 - protein, 113 aa, Glycine max
  Clone ID: PAT_MRT3847_124023C.1.pep
TQCGDYSSFFATPPKIHIPSFALPFLANSVLIQPLLEGELKNKNNPSHFYRAVQSAFIHLISAETHKNPAKKAAGSWFKPMSPGSKLTVILQSYVPIESTSHQLSYLLIATTL

SEQ ID NO: 169447 - protein, 134 aa, Glycine max
  unsure (1)..(134): unsure at all Xaa locations
  Clone ID: PAT_MRT3847_124024C.1.pep
MSCTHVPKKGGAFGLIDGLHAVLLTRLGYKTPIQADYLPNXHAILCVGVXGLWPLEAGILRSXTAHLIQSDHDTRGYYRAPGAFLYMIAGXTCXPGDIDYKQDRVLLDEKTGIVTRWRAHRHLRRKKVPYCELP

SEQ ID NO: 169448 - protein, 85 aa, Glycine max
  Clone ID: PAT_MRT3847_124025C.1.pep
GFARISSTYPSSRCRFANSSLNLLMNLANPSARRHCPRTRSTSACTPDTIRTGFVVSSTHDAPAAAHSSTATEHHTTVINRAILS

SEQ ID NO: 169449 - protein, 69 aa, Glycine max
  unsure (1)..(69): unsure at all Xaa locations
  Clone ID: PAT_MRT3847_124026C.1.pep
AHRINHDYYYLFKIVLIGDSRLXNSNILSRYXTETSFCLESNSTLGVEFATRILQVDGXTVKSQILDTS

SEQ ID NO: 169450 - protein, 630 aa, Glycine max
  unsure (1)..(630): unsure at all Xaa locations
  Clone ID: PAT_MRT3847_124027C.1.pep
TNKCYILDCGFEVFVWLGRNRSLDERKSVFEAAQERDGRNAHMKLHMIRVRVGCETVAGFSKSKSWPQTTDVRLCVDGRGELAAMLKRIXVNKKGLLKADXLREKPLPHIDCKGNLQVWKLNGPEKILLQASDQSKFYSGDCFIFQYTYPGEDKEDCLIGTWIGKNSVEEERASANSLASKMVESMKFLASQARIYEGNEPIQFHSILQSSIXYLTCVKSGSDXYWINPESDHEHLMGKGVVLCQIQSSRLHIVEGLSVKXSFIVLGFPLVFNTLEDPYLFSCHWKXKLXQVTEIYNYSQDVLIAEDIFISECHSVIFVRVCQQVDXKSEKPGQTIREKFVEHDFLLEKLSHVAPVYVVIEGSEPPFFTRFFKWDSAKSTMLGNSFQRNLTIVKSGGAPVLDKPKRRTPVSYGGRSSSVPDKSSQRSSRSMSVSPDRVRVRGRSPAFNALAANFENPNARNLSTPPPVIRKLYPKSVTPDSAILAPKSAAIAALNVLSSSFEQPPTARETMIPRSLKVSPVMPKSNPEKNDKENSVSTRVESLTIQEDVKEDEVEDEEGLVIYPYERLKIMSTDPVPNIDVTKRETYLSCSEFKEKFGMSKDAFYKLPKWKNFYFYILGTHVSLHFIFLI

SEQ ID NO: 169451 - protein, 54 aa, Glycine max
  Clone ID: PAT_MRT3847_124028C.1.pep
IVSLRAAPYMESVFFQFFLYDHEYHDQMCLTHDAELIDQIEMFSCGSQALTSHS

SEQ ID NO: 169452 - protein, 534 aa, Glycine max
  unsure (1)..(534): unsure at all Xaa locations
  Clone ID: PAT_MRT3847_124029C.1.pep
DYRSRRLIGTWIGKNSVEEERASANSLASKMVESMKFLASQARIYEGNEPIQFHSILQSFIVFKGGLSEGYKTYIAQKEIPDDTYNENGVALFCIQGSGPDNMQAIQVEPVASSLNSSYCYILHNGPAVFTWSGNSTSAENQELVERMLDLIKPNLQSKPQREGSESEQFWDFLXGKSEYPSQKILREPESVFFHRLTEQHAGNLKVTEVYNFSQDDLMTEDIFILDCHSEIFVWVGQQVDSKSRMQALTIGEKFLEHDFLLEKLSRVAPVYVVMEGSEPPFFTRFFKWDSAKSSMLGNSFQRKLTIVKSGGAPVLDKPKRRTSASYGGRSSSVPDKSSQRSSRSMSVSPDRVRVRGRSPAFNALAANFENPNSRNLSTPPPVIRKLYPKSVTTDSAILAPKSSAIAALSSSFEQPPSARETMIPRSLKVSPVMPKSNPEKNDKENSVSTRVESLTIQEDVKEDEIEDEEGLVIYPYERLKIMSTDPVPNIDVTKRETYLSSAEFKEKFGMSKDAFYKLPKWKQNKLKMAVQLF

SEQ ID NO: 169453 - protein, 92 aa, Glycine max
  Clone ID: PAT_MRT3847_12402C.1.pep
VCSIHSFLSLFFFVINYIPFSLCCFFLFWGKTHNPARGRGPPKTDPLFEAPIADIPSPASRVRIFCVGTPKLKLPRPCDTRTDREPPGEPTN

SEQ ID NO: 169454 - protein, 52 aa, Glycine max
  Clone ID: PAT_MRT3847_124030C.1.pep
LCLLLYSYELPDTHPLLQGVSKLMYLLIKAMLYPVCSSFINYLCITVGHTRA

SEQ ID NO: 169455 - protein, 36 aa, Glycine max
  Clone ID: PAT_MRT3847_124031C.1.pep
ILLLLYDPLITHSNKYLHLWDFTKGLNTSVLIQFFH

SEQ ID NO: 169456 - protein, 62 aa, Glycine max
  Clone ID: PAT_MRT3847_124032C.1.pep
YPQNIVLVSVISSISITTTPSVLTSRWPLSSKAVALKFYDAEYLSQLGLTPKAIGLEFLGVK

SEQ ID NO: 169457 - protein, 73 aa, Glycine max
  unsure (1)..(73): unsure at all Xaa locations
  Clone ID: PAT_MRT3847_124033C.1.pep
MYWLQGDTLGLXSFTTVSLAIPSTNPYQFPDVTIVKFAEAQTLCCLINEKHMLDRLSSSYTMIIRCFRDYFSF

SEQ ID NO: 169458 - protein, 84 aa, Glycine max
  Clone ID: PAT_MRT3847_124034C.1.pep
FYHIYLVQLEMSFSYITLCGPTSTSHHMPLLVISSFSRLIACFQSNHNPHEIIDEGSHCVFEFLVPFSLFPVMQHILFKCNELK

SEQ ID NO: 169459 - protein, 120 aa, Glycine max
  unsure (1)..(120): unsure at all Xaa locations
  Clone ID: PAT_MRT3847_124035C.1.pep
LSSVTAQVALFSVFPFQQHPHFSQAIFLSLHDIINIYNILFIFLINITLKSNQISNIYYKKKTLAYSLEEQQQVFTSKVAKSNQSHQAQQDLKQIQGFKRGSYQIHXDLVSESTNAVSNP

SEQ ID NO: 169460 - protein, 81 aa, Glycine max
  Clone ID: PAT_MRT3847_124036C.1.pep
YIDMPLLLSFPFQFHTCLHKLCYCPFLSAPTRANAYVCTRDNYLGIVFLSQSKYSIGSTGFHESTPLSKDTVPTVFDFDLV

SEQ ID NO: 169461 - protein, 105 aa, Glycine max
  Clone ID: PAT_MRT3847_124037C.1.pep
REESRVAVDLESVATHEIGHVLGLGHSSVKEAVMYPSLSPRRKKVDLRIDDVAGVQALYGSNPNFTFSSLLQSQNSLNAAVGLETGFYKWTLTLPLAFFLLFLSA

SEQ ID NO: 169462 - protein, 38 aa, Glycine max
  Clone ID: PAT_MRT3847_124038C.1.pep
QELADGKLIKKSHYKIVLPIKNGLINVNLTGYKTFTNL

SEQ ID NO: 169463 - protein, 146 aa, Glycine max
  Clone ID: PAT_MRT3847_124039C.1.pep
LGCIIVIEYTILLENIFVCLNPKGEKKGPTTLLCASQTPFSYIAHIYLCFPFGVGSPSRSFPSINHHSFIQFFSQIKPHYTHYTFFFFFLVLLLMITLSFSYYIYIYIYIIKTQHFDDGEEDDAMEHHHQCYGVADHSLLQPRSLP

SEQ ID NO: 169464 - protein, 185 aa, Glycine max
  Clone ID: PAT_MRT3847_12403C.1.pep
LVDVHLPNMDGYEFLKHINKEIDIPVIIMSVDGSTSAVRKAITHGACDYWTKPFSENQFKIMWKHVAMKAWNEKKLQKKDFSEFASSVLDANLKDQKEISSNSKESDVDDCDAQPKKPRIAWKGELHCQFVKAVMHIGLDKAQPKKILEVMNIPGLTKDHVASHLQKYRFDLKKSNEVAVQQNEM

SEQ ID NO: 169465 - protein, 321 aa, Glycine max
  Clone ID: PAT_MRT3847_124040C.1.pep
MGKSSKKSALKVDAVPAVVPPSKRRKKGGKRQAQDEIEKQLSAKKQKINEVAQKQKEAKVQKKESSSDDSSSESEDEKPAPKSAVLSKKIPAKNGAAPPKKGKLASSSSEDDSSDEDGVRAKKPQKMVAEKQKNGATVQKKKVESSSDDSSSESEAEKPAVKATVPSKKTPTKNGNLSTPAKKGKAASSSSSSDSSEDDSSDEDEVATKKQTKEVKVQKGKEESSSDDSSSESEDEKPAAKVAVPPKNQSAKNGTLSTPAEKGKPAASSSSSESSDDDSDEDEAPKSKVAPAAGKNVPASTKITQPSESSESDSDSSSDED

SEQ ID NO: 169466 - protein, 98 aa, Glycine max
  Clone ID: PAT_MRT3847_124041C.1.pep
MMVSVFKIIACPLVFSTATAKSWIHFLSAPPEMKKDLSPVTWWNPRFGFFGASQNHFHFRVRSIPSIFLKGNASIPHWKIKSIASSFILSPRGVSTLV

SEQ ID NO: 169467 - protein, 129 aa, Glycine max
  unsure (1)..(129): unsure at all Xaa locations
  Clone ID: PAT_MRT3847_124042C.1.pep
MAXYGEKERHXGTRRDRKHPNGPRPNREXGTGNRKATGADKPGGEPKPDGNKKATGKNAGKAPKGEKTNRNRHEKSPANGERAGRKKNKKKPDDRKPRRNDNKKGATEKNNHQHRGETAKGKARKEDES

SEQ ID NO: 169468 - protein, 73 aa, Glycine max
  unsure (1)..(73): unsure at all Xaa locations
  Clone ID: PAT_MRT3847_124043C.1.pep
SHFSSMTQTXVRDKLAPVFQMAPILNLEKVFHTPDFWGENSVPKARRSTPAXVKRISGLRSXFKSEAITALNL

SEQ ID NO: 169469 - protein, 54 aa, Glycine max
  Clone ID: PAT_MRT3847_124044C.1.pep
APLFFSGRSKRRGVWSSLGSWPTILFLKAPRPSPNSPGFDWFGVFMSGFFVSPI

SEQ ID NO: 169470 - protein, 75 aa, Glycine max
  Clone ID: PAT_MRT3847_124045C.1.pep
KFRAGKPENLYMKKRKEKKGTGARAMAKVTVTVRVNITTTAVDVNATGTGPVSTFTFSLPFGKEMRSGLFYFISR

SEQ ID NO: 169471 - protein, 99 aa, Glycine max
  unsure (1)..(99): unsure at all Xaa locations
  Clone ID: PAT_MRT3847_124046C.1.pep
VLMQESSSVFTKAILKLQLVSAVGPXAAAKWQPMSDAAQASYVHQSQPRTVEHDKHIRVYNNTXVHGLTGADEQASHKSVSEVNHAHDDEEGSGEQEDD

SEQ ID NO: 169472 - protein, 55 aa, Glycine max
  Clone ID: PAT_MRT3847_124047C.1.pep
ATWIAFTARTLGAYAATTTSTLLPEEDKESLTHDTHGFSNSARWTVEYVAYYNNI

SEQ ID NO: 169473 - protein, 174 aa, Glycine max
  unsure (1)..(174): unsure at all Xaa locations
  Clone ID: PAT_MRT3847_124048C.1.pep
KESHRRTSTNQGLPSLTSIRWTEGPPHQGLVVIATPLFRTPPSLLQANDSVSASTVRGGRMHECSIFHKSFPSGXALGGYKRCHYDGVKQPXNSNANGNNSSGVTTSDGGAASSSSHAFRGFDLNLPAPLTEFWSPAGFDFGKKKVGVEQEVESPLPVTAKRPRLFSGEDNEEA

SEQ ID NO: 169474 - protein, 53 aa, Glycine max
  Clone ID: PAT_MRT3847_124049C.1.pep
LFLLTFSLSPNTMGDMATTTLSSNPKLSFFNGKRVTYSARVAPITKLSSSIQG

SEQ ID NO: 169475 - protein, 75 aa, Glycine max
  Clone ID: PAT_MRT3847_12404C.1.pep
NFAEGKNRLIICPVRELNESARKPQPGYPPLLKGKEKTGEAMAASSPKKLCNWIQTFNLSLLFITFYIIFFTNLV

SEQ ID NO: 169476 - protein, 134 aa, Glycine max
  Clone ID: PAT_MRT3847_124050C.1.pep
LDFKPVNLNKMVQRVLACFPPPKLFVALHVEGTNKLFEQTSFLDVKGTCFKEKTPKGLGRGGFFFSQKFGKKRDWGSPRSTLKCWNKENEEKEFPKGSLLFGPCEKKSGFPHTEGVFRGVHLEAFGIKTQCGRL

SEQ ID NO: 169477 - protein, 75 aa, Glycine max
  Clone ID: PAT_MRT3847_124051C.1.pep
LVKLIKKRFCSDTKCEPRTYKLWALPLSLSYYFFWENILINFLFIGCASKKKTKRLVLLLEAAINVKALAHHFHQ

SEQ ID NO: 169478 - protein, 57 aa, Glycine max
  unsure (1)..(57): unsure at all Xaa locations
  Clone ID: PAT_MRT3847_124052C.1.pep
GCFVWFFKVGTAVVTRQDGRLAVGKLGALCEQIKELNFLGYEIILVSSXLVSLGRQR

SEQ ID NO: 169479 - protein, 82 aa, Glycine max
  Clone ID: PAT_MRT3847_124053C.1.pep
IRLSSVTVYEIMNYFYYYHHSLASFNITTVYLLGSTYLFVLSSLCSLVMMYVEEFAKEKCLSLNLFSISLSYIHVSTHTSKT

SEQ ID NO: 169480 - protein, 181 aa, Glycine max
  unsure (1)..(181): unsure at all Xaa locations
  Clone ID: PAT_MRT3847_124054C.1.pep
MSTFIMLESLAWCQSFKGYDLTKQKSPGYSHAISRVYRNSIFMLYSVKKQVPLLPHGASHGIFHRTCVSEKFFKRSPLNVPSWRGLCKSRWERLQTNVAYDVAGAVEVINDLGLDTLTFLAVTVLIVPTFKSIKASPILGFFCAGVVLNQFGLIRNLTDVKVLSEWXILFLLFEMGLELSL

SEQ ID NO: 169481 - protein, 229 aa, Glycine max
  Clone ID: PAT_MRT3847_124055C.1.pep
DEFGTEEILRKKGKQLGKSLLVFEDIFDQEQLEYIVKVASDCFSFNSKVIITAEKNCFLRWPEIEIYEVERLTKQESTDLFILKAFNCRNPKIKHLKIITQAVTMAPWVPYTLELIASYFREKSAEHCQRILDEYEKIPNEKKKQVIVQMIFDALSCDQKKMLIHIAYNLIGQEKAIVEDRLHRLFGVWAKDGIDMLLDKSLVKIDEQGQVTMHHLTHNMVEDMEYGDK

SEQ ID NO: 169482 - protein, 133 aa, Glycine max
  Clone ID: PAT_MRT3847_124056C.1.pep
LEVQMIFDALSCDQKKMLIHIAYNLIGQEKAIVEDRLHRLFGVWAKDGIDMLLHKSLVKIDEQGQVTMHHLTHNMVKDMEYGKKEDQPASNYGSMCDLMELDKNGYVMEEIQPSSNDYEPMEYEYQNCSTSSS

SEQ ID NO: 169483 - protein, 49 aa, Glycine max
  Clone ID: PAT_MRT3847_124057C.1.pep
CLLVNLDCASRFSKSLVGLLLLCRRYFKCWMLEMYKFDVEIISYDLPHF

SEQ ID NO: 169484 - protein, 59 aa, Glycine max
  unsure (1)..(59): unsure at all Xaa locations
  Clone ID: PAT_MRT3847_124058C.1.pep
STIQSRWFGYFLKCHFSIMEVIIPKITLSNKKLLCLKKKEKKKKIKDGRGXSEXGRSGI

SEQ ID NO: 169485 - protein, 52 aa, Glycine max
  Clone ID: PAT_MRT3847_124059C.1.pep
VFIWVLYGVSKGKKAFFMSGGLESWYRLFPAYNSENKSLKSLKAQVTIPKFF

SEQ ID NO: 169486 - protein, 58 aa, Glycine max
  Clone ID: PAT_MRT3847_12405C.1.pep
RKKKKGLLCNGSVMYVMPSATAHEYEYDSVLLFSIFFSLFLGPKYGDTKSTNRNTPQI

SEQ ID NO: 169487 - protein, 40 aa, Glycine max
  unsure (1)..(40): unsure at all Xaa locations
  Clone ID: PAT_MRT3847_124060C.1.pep
XSESLFPNPFIAFFFFFXRFITYKLHINKPKTVRFNAIYP

SEQ ID NO: 169488 - protein, 52 aa, Glycine max
  Clone ID: PAT_MRT3847_124061C.1.pep
GGLHTVCHSIVLSACILQHWCSRFVATAASPVTHQNKGRNNQRLGSITRQPS

SEQ ID NO: 169489 - protein, 34 aa, Glycine max
  Clone ID: PAT_MRT3847_124062C.1.pep
HQIKKTSPTLFYPKYLLFWNVDGKNGAGRKPPAP

SEQ ID NO: 169490 - protein, 61 aa, Glycine max
  unsure (1)..(61): unsure at all Xaa locations
  Clone ID: PAT_MRT3847_124063C.1.pep
ITIPSGFPSLIYNNEXTPIIAGWIIHTNIFKNHLNHIPIKFYLSFNQYQQFLKYHQNQLIH

SEQ ID NO: 169491 - protein, 90 aa, Glycine max
  Clone ID: PAT_MRT3847_124064C.1.pep
VFFFFFRYSCVFWFFFFLCYLNLIYWPCFSTKKGPFWGFFQPNLRAKFPLFAAGVRTKKFFFGGPTKKCPAGFLKQTRWENPGDPQINGG

SEQ ID NO: 169492 - protein, 67 aa, Glycine max
  Clone ID: PAT_MRT3847_124065C.1.pep
STAQLQRKLLGLMLSLISILQVVECRFRFNHSQVRHRIVNLSRAQSVSKYIIWLLHAKIIISNNDAV

SEQ ID NO: 169493 - protein, 90 aa, Glycine max
  Clone ID: PAT_MRT3847_124066C.1.pep
LWSNASVFIHKSSLHIPHVALPEECVHQVASALTIEINRAFVIVREIGTGRDLKKFLSVIAVLWVISVIGSWFNFMTLFYLFFVSLFTLP

SEQ ID NO: 169494 - protein, 52 aa, Glycine max
  unsure (1)..(52): unsure at all Xaa locations
  Clone ID: PAT_MRT3847_124067C.1.pep
KESLKNPSKFAVAPVLAPAAACGAPAASAKXEEKKKQPPEESVHAMGFSLFD

SEQ ID NO: 169495 - protein, 65 aa, Glycine max
  Clone ID: PAT_MRT3847_124068C.1.pep
VLRGCDIPSSKCHYECIDVRYAHLILFLLGLEYLHLTWNTDHSMLLWRLMYFTLLYLDCYHLVGN

SEQ ID NO: 169496 - protein, 118 aa, Glycine max
  Clone ID: PAT_MRT3847_124069C.1.pep
MAAVYSGISLKLKSKTTSWEDKLKLAHFAWISHQCFLPNKEQVLLDWARQSLVVFYKKKLELKEDIVERLWIYIDNILHSRKLQNLLKNGKTINLQISLVKEAEDGIIAYDDWVKLTI

SEQ ID NO: 169497 - protein, 76 aa, Glycine max
  unsure (1)..(76): unsure at all Xaa locations
  Clone ID: PAT_MRT3847_12406C.1.pep
DPIIYGDVFVVYGDLSQMPIAPEDAALMQSAXSRVLGLTQPGVCSSVMXSAATTNEQAGLVGHLDVTDFTGDHRVT

SEQ ID NO: 169498 - protein, 42 aa, Glycine max
  Clone ID: PAT_MRT3847_124070C.1.pep
HFYTETKCNSFCVVLQRLNCEKRCMPQHNRRALHSYFAQRPN

SEQ ID NO: 169499 - protein, 102 aa, Glycine max
  Clone ID: PAT_MRT3847_124071C.1.pep
HVITYSQTPWRRRETHAPVMLPLTDASRSPVRTLALLLRRAGRLGTCMLVRETVARELDETGSDWGYSKLQEALDMSRYMVLWAVTEEMLACTTAKRPITPI

SEQ ID NO: 169500 - protein, 122 aa, Glycine max
  Clone ID: PAT_MRT3847_124072C.1.pep
SMAGKTKNKVEVQLGCGLVGRIFHLKTNNRPRKSSVHSLPLKPCNTAQQRDQGKNESKAPPNHEPKDSSIETIPTLKGEQNPARKSRQQQKDHPVVNSLELAKISTSTSHHQNYGTKSPAKE

SEQ ID NO: 169501 - protein, 57 aa, Glycine max
  Clone ID: PAT_MRT3847_124073C.1.pep
ALRDRKFCEWEFSSASSDLAILGLDSAQQHQLLLCVAPTLVPYPPRLSSPHLPLLAG

SEQ ID NO: 169502 - protein, 67 aa, Glycine max
  Clone ID: PAT_MRT3847_124074C.1.pep
MQCHQKSCPLFSRRLYLCRGIVRLTHLAGKKPRLHGFVWLTRSWSLLYISPLAWYVYDSHSIMAFQC

SEQ ID NO: 169503 - protein, 44 aa, Glycine max
  Clone ID: PAT_MRT3847_124075C.1.pep
QLATMNMHDLKGNYFNSINQLFKAKFAHFPHYSSLFKLINDQYA

SEQ ID NO: 169504 - protein, 78 aa, Glycine max
  unsure (1)..(78): unsure at all Xaa locations
  Clone ID: PAT_MRT3847_124076C.1.pep
GAAISSQSVHTNNSFSFYTRSLFHEESSHEPYPFARKVTLDVRMCQCRQDIPAQRLCLVSKYQKNGAXRRQHDPLTQT

SEQ ID NO: 169505 - protein, 255 aa, Glycine max
  Clone ID: PAT_MRT3847_124077C.1.pep
MVGPVRPQFVLFGSSIVQLSYSLQGWGAILAHLYARKADIILRGYSGWNSRRAVQVLDEIFPKNATEQPDLVIVYFGGNDSLLPHPSGLGQHVPLQEYIENMRKIGTHLKSLSKKTRLIFLSAPPVNEAQIYGTSVPLGQRLRNNESCQKYSEVCLKLCHEMNIKAIDLWSALQKRGNWRDVCFTDGIHLTSEGSNIVAKEILKVIKEAEWEPCLHWNSMPTEYGEDSPYDPVGPDGKTTVNVSNWTFLETKEWD

SEQ ID NO: 169506 - protein, 60 aa, Glycine max
  Clone ID: PAT_MRT3847_124078C.1.pep
ADALFFGSFTTGFYPSGRRPPFILSSHCRVSPSFPLLSRASSHLGPYYHLWVLQVFPPCS

SEQ ID NO: 169507 - protein, 284 aa, Glycine max
  Clone ID: PAT_MRT3847_124079C.1.pep
LEGYNNIQVQWNGKAFQKMKNLRILIIENTTFSTGPEHLPNSLRFLDWSCYPSPSLPSDFNPKRVEILKMPESCLKIFQPHKMLESLSIINFKGCKVLTHLPSLREVPLVTFLCLDYCSNLVKIDCSIGFLDKLLTLSAKGCSKLKILAHCIMLTSLEILDLGDCLCLEGFPEVLVKMEKIREICLDNTAIGTLPFSIGNLVGLELLSLEQCKRLIQLPGSIFTLPKVEVIFGFRHWRYLFFEENQDGKELSLEVFPKAILVCHLDPRHYHHLDLYYLYMSPNN

SEQ ID NO: 169508 - protein, 82 aa, Glycine max
  Clone ID: PAT_MRT3847_12407C.1.pep
KASAIDWYAKGTVLGGIYSPPEFYMLPESFPDFRETGAFREARVKNAFDIKKPFQEAQFLAKAVSTGVGNSFQGFVGKVFQK

SEQ ID NO: 169509 - protein, 151 aa, Glycine max
  unsure (1)..(151): unsure at all Xaa locations
  Clone ID: PAT_MRT3847_124080C.1.pep
MCDFTEDQTAEFKEAFQLFDRTGDGKILYSQCGDVMRALGQNPTNAEVLKVWGTPRAIXMNVKVLDFEHXLPMLQTVAKNKDQGTYEDYVEGLRVFDKEGNGTVMGAEIRHVLVTLGEKMTEEEVEMLVAGHEDSNGCINYEELVRMVLNG

SEQ ID NO: 169510 - protein, 92 aa, Glycine max
  Clone ID: PAT_MRT3847_124081C.1.pep
WFVVAQSVSYEVHMGYDFPFMLHRFLPFYAGAPAHDMHHMRPLTCFQPWFNYLDRLFGYYLSYDDLKKMSKDKLERYGRYSNEDEKGLKKIN

SEQ ID NO: 169511 - protein, 53 aa, Glycine max
  unsure (1)..(53): unsure at all Xaa locations
  Clone ID: PAT_MRT3847_124082C.1.pep
RAPKKSEXTRXDENXGGXKNAPQEEXKKADKKAAXKKHPDKGXXPEKXKEXAQ

SEQ ID NO: 169512 - protein, 44 aa, Glycine max
  Clone ID: PAT_MRT3847_124083C.1.pep
IAAQFGISSIPTVLFFKNGETRVSIIGAGPKSALSAAVEKYVPL

SEQ ID NO: 169513 - protein, 116 aa, Glycine max
  Clone ID: PAT_MRT3847_124084C.1.pep
PRVRWRPVHLTMIKSTTGLGISILVLSLASQFSWCAEAAEGSAGISTEPDLQVQEQVHGDMKNRLEMQGRNRKLGHEVTTVESKHHMRITSGHNGGSADGGAGAGAEGAGTGGHNV

SEQ ID NO: 169514 - protein, 51 aa, Glycine max
  Clone ID: PAT_MRT3847_124085C.1.pep
IQRLPLTRLSTELATYMAAPTSGAASNGFGSSFSSGRPGATPLALLLEAKL

SEQ ID NO: 169515 - protein, 260 aa, Glycine max
  unsure (1)..(260): unsure at all Xaa locations
  Clone ID: PAT_MRT3847_124086C.1.pep
MADSVVVFLLXNLSRLLEDEHKLLSGVEDKINSLCNELKFIHIFLKNSEGKRSHEMVKEVVSQIRDVALKAQDVVDTYLSNIAPQKQRSKLSKLFHLKEHVMVLHQVNSDIEKIRSRIDEIYKNRDRYGIGESEFRSEEAAAEAESLLKRRREVEEEDIVGLVHDSSHVIHELMESESRLKVVSIIGMGGLGKTTLARKIYNNNQVQLRFPCLAWVSVSNDYRPKECLLSLLKCSMSSTSEFEKLSEEDLKKKVAEWLKG

SEQ ID NO: 169516 - protein, 372 aa, Glycine max
  unsure (1)..(372): unsure at all Xaa locations
  Clone ID: PAT_MRT3847_124087C.1.pep
MDTEIDESNDEADISFDARSYSSRLNSMIRSDTESISGASQVCSYSFRVDSAIASPLGSFASREHSAIRSQTASILGASPVHEGAAAEAESLLKRRREVEEDVIQELMESESRLKVVSIIGREGLGKPTLARTIYNNNQVQLQFPCLAWVFVSIPYSVCRLFNIVLKRVKYYTTEXSEEELAXRKVADWLKGKKYLVVLDDIWKNQIGXRIKEFSDKXHTGNNFLITSRIKEVAYYAGTALPYYLPILNENESWELFTKKIFRGEECPSDLEPLGRSIVKTCGGLPLAIVGLAGLVAKKEKSQREWSRIKEVSWRLTQDKNGVMDMLNLRYDNLPERLMPCFLYFGICPRDYVESYEERKAKELETVEVFIH

SEQ ID NO: 169517 - protein, 83 aa, Glycine max
  unsure (1)..(83): unsure at all Xaa locations
  Clone ID: PAT_MRT3847_124088C.1.pep
GTIFLVVPWLSPIRKPCYSPRNWVKYSLRNSTSGYFSPWSNSVRLVIFPTQGSLSPFKIFPKGSRGLNKTSLSHRGRLGSLLX

SEQ ID NO: 169518 - protein, 66 aa, Glycine max
  Clone ID: PAT_MRT3847_124089C.1.pep
EHKLAPFHKLLTNILTKTTRRLLKPKHPVGGFHWFSQTASYSFFWNKNPSPGTLQAYGPLQKPPRH

SEQ ID NO: 169519 - protein, 136 aa, Glycine max
  unsure (1)..(136): unsure at all Xaa locations
  Clone ID: PAT_MRT3847_12408C.1.pep
NNYHQAPXGEQEGNKAAKRPDPKXAEGPTREADKDTKAHTQTNPKTGNTGQEGPQEHPPEAKTRPTQGDNQKDNEDRDPRDNPHDTAAKATKPEEATSSGPTPTDRAGLSPQTDNHEPKRGAQHQNPGAEGADNAP

SEQ ID NO: 169520 - protein, 105 aa, Glycine max
  Clone ID: PAT_MRT3847_124090C.1.pep
TLLFRVIRGKAFAQTSKCFSNANTNGPFTTYTYATNLFEDPFGFYDPVDKCLNEIEFEDEVSALLRVACDCVHPLPPKRPPMLEVYSKMTNIWERDGLFEDFSTF

SEQ ID NO: 169521 - protein, 48 aa, Glycine max
  Clone ID: PAT_MRT3847_124091C.1.pep
VHYVKNFMDSAVANICSDHSGILHQILTRFMPPLRRSTRWRVDSFWML

SEQ ID NO: 169522 - protein, 42 aa, Glycine max
  Clone ID: PAT_MRT3847_124092C.1.pep
EIMTLTLESVSHYLPYKFFHGDDWIKVTGIPYSSAVTAPNKH

SEQ ID NO: 169523 - protein, 41 aa, Glycine max
  Clone ID: PAT_MRT3847_124093C.1.pep
YLERDRSPSLRSLRFILRDHHALIPLDFLSGYSEGLLEDYS

SEQ ID NO: 169524 - protein, 52 aa, Glycine max
  Clone ID: PAT_MRT3847_124094C.1.pep
VQGSKTCLIGFSRVKAFQVKFTLSSRVVLQPNTGEVVCVNVPLESSIYKANG

SEQ ID NO: 169525 - protein, 678 aa, Glycine max
  Clone ID: PAT_MRT3847_124095C.1.pep
ICALADRCDQKGLSVNERLGRMAETLEKMMESCTQKDTQQMAGSTDVAKVSNSSMTEESDVPSPKLRDWSRRGSEDMLDCFPEADNSVFMDDLKGLPLMSCKTRFAPKSDQGMTTSSAGSMTPRSPLMTPRTSQIDLLLAGKGAYSEHDDLPQMNELADIARCVANAPLDDDRTTSYLLSCLDDLRVVVDRTTVLPGNFDALTVETFGTRIEKLIREKYLQLTEMVDVEKIDTESTVDDDILEDDVVRSLRTSPIHSSRDRTSIDDFEIIKPISRGAFGRVFLAKKRTTGDLFAIKVLKKADMIRKNAVESILAERDILITVRNPFVVRFFYSFTCRENLYLVMEYLNGGDLYSLLRNLGCLDEEVARVYIAEVVLALEYLHSLRVVHRDLKPDNLLIAHDGHIKLTDFGLSKVGLINSTDDLSGPAVNGTSLLEEDETDVFTSADQRERREKRSAVGTPDYLAPEILLGTGHGFTADWWSVGVILFELLVGIPPFNAEHPQIIFDNILNRKIPWPAVPEEMSPEALDLIDRLLTEDPNQRLGSKGASEVKQHVFFKDINWDTLARQKAAFVPASESALDTSYFTSRYSWNTSDGFVYPASDVEDSSDADSLSGSSSCLSNRQDEVGDECGGLTEFDSGTSVNYSFSNFSFKNLSQLASINYDLTKGWKDDPATNSSA

SEQ ID NO: 169526 - protein, 81 aa, Glycine max
  Clone ID: PAT_MRT3847_124096C.1.pep
FFFLKLFFSSPTTINDLFRSKGLPPGFFPGGGKSSTFFETGHLEGFLDAPCLTNYETRVLFDQVVTVNLTYGGLIGVGGFQ

SEQ ID NO: 169527 - protein, 52 aa, Glycine max
  Clone ID: PAT_MRT3847_124097C.1.pep
QYNMFYKTTRFLFPLNKILVLFFSEFVSLLYHQSSRTKVGSHYSLTFIKMAS

SEQ ID NO: 169528 - protein, 198 aa, Glycine max
  Clone ID: PAT_MRT3847_124098C.1.pep
SVGVILFELLVGIPPFNAEHPQTIFDNILNRKIPWPAVPEEMSPQAQDLIDRLLTEDPNQRLGSKGASEVKQHVFFKDINWDTLARQKAAFVPASESALDTSYFTSRYSWNTSDGLVYPASDDEDSSDADSLSGSSSCLSNRQDEVGDECWGLTEFDSGTSVNYSFSNFSFKNLSQLASINYDLTKGWKDDPPTNSSA

SEQ ID NO: 169529 - protein, 101 aa, Glycine max
  Clone ID: PAT_MRT3847_124099C.1.pep
RSSRMATQLLHRYPLHLIWMLIFSSARNAWREPIATLHLLHHESVRKSILYFLIPSYWMGKGGQKVKEGGVLLMQMLLFRYVALQRHILEHVALVAALNVK

SEQ ID NO: 169530 - protein, 53 aa, Glycine max
  Clone ID: PAT_MRT3847_12409C.1.pep
MGGGQGHCTTYKGVTIHQPKRWHAITGKGLCAVMWFWVFYRAKQDGPVVLVTL

SEQ ID NO: 169531 - protein, 79 aa, Glycine max
  Clone ID: PAT_MRT3847_1240C.1.pep
GSIPDVFGSHSYFMALDLSFNNLKGRVPSSLASAKFIGHLDLSHNHLCGSIPLGAPFDHLEASSFTSNDCLCGNPLKTC

SEQ ID NO: 169532 - protein, 45 aa, Glycine max
  Clone ID: PAT_MRT3847_124100C.1.pep
LPELVKSDIYIFIFIQHMSSDQNCSQVRINFNYVTIYTLIKNKIK

SEQ ID NO: 169533 - protein, 169 aa, Glycine max
  Clone ID: PAT_MRT3847_124101C.1.pep
ARDDIEPWMMWGYYLSPMMYGQNAIVMNEFLDKRWSKPNTDPRINAPTVGKVLLKSRGFYTEEYWFWICIGALLGFSLLFNLLFIVALTYLNPLGYSKAVIADEGDKKNNKSSSSQHILEGTDMAVKESSEMASSLNHEPRRGMVLPFQPLSLAFNHISYYVDMPAVSL

SEQ ID NO: 169534 - protein, 86 aa, Glycine max
  Clone ID: PAT_MRT3847_124102C.1.pep
SVADRLARMKVDYMREGMRTSVEAILLVQEHNHPHILLLQIGNAFCKLPGGRLKPGENEIEGLKRKLCSKLAVNSPSFPPNWQVGE

SEQ ID NO: 169535 - protein, 42 aa, Glycine max
  Clone ID: PAT_MRT3847_124103C.1.pep
IYLMQRYLLSIIISHIEVKHQPFNMFFKCRLKLALLTCLGCN

SEQ ID NO: 169536 - protein, 248 aa, Glycine max
  Clone ID: PAT_MRT3847_124104C.1.pep
MGSRTQPAAADRVYEDFVPLYEWDRNERLVNVMLPGFRRDQLKVQVTSKLTLRLMGERLITDNRWRRFNLELPLLSDYDTDNVTAKFEGAKLSIKFGELSQTKPKETLIAPPSQKIEQQKPTQEGKVSDQKTPQNKEETNKSETKGALEAKTNEGSSDTKEAPTPPTAPKTKPVSRTKTRLIDFSLGSGSNHVDDEVIEDLEAGKNKCKKLVKWMLIIYLVVALVGLGVYYGKNALTSYSEESYFQEL

SEQ ID NO: 169537 - protein, 249 aa, Glycine max
  Clone ID: PAT_MRT3847_124105C.1.pep
MEAKLVAQCNSPTLTLAHWKLKQPCVVGVLARPADDISGEARKTNHVYKDGLFDRIAINYLSKCVQEATGLKNSKSGYESLVEAATLASQRFSPIEQHQLVIQSLDRAFPKPMLLLIRTLLPPSKFARKLFAIFTTLFFAWLVGPSEVRESEVEGRRERNVVHIKKCRFLEETNCVGMCINLCKLPSQSFIKDSLGMSVNMVPNFDDMSCEMIFGEDPPESTDDPALNQPCFKLCKAKRSHGTNCLVIN

SEQ ID NO: 169538 - protein, 89 aa, Glycine max
  Clone ID: PAT_MRT3847_124106C.1.pep
KLWSYGLTPGLSCSRVARTIPKCILQQTVWNLLASVRPPLGRDSSLCTVRQIPIDLPGGGILVHMTADLVKLRLHAAISLLLRVAAWYK

SEQ ID NO: 169539 - protein, 51 aa, Glycine max
  Clone ID: PAT_MRT3847_124107C.1.pep
FLYHMSAIRVIRDHLVPLVNRTRPQYTELEYDAKPIPLPILEEPPILATWI

SEQ ID NO: 169540 - protein, 162 aa, Glycine max
  Clone ID: PAT_MRT3847_124108C.1.pep
MAPSGRTTTASTRTTSKTTTTTRRTRQQRRTTATTTNFKKKQHNTKSNNKKQQEQVLVPTVLPSSCSSSSISSQDSSNSKEVNNNMHGSAEVIDVVCNSNTNSPCSTPKGQKFRIPEISTCPPAPKKPRVLSNCSLRRSPLSFFAPPDLEHFFFVALRDVSV

SEQ ID NO: 169541 - protein, 66 aa, Glycine max
  Clone ID: PAT_MRT3847_124109C.1.pep
SSNFNFKKWKIIELPHCKLSSHAFEQKNTNLKQSEWFVSQLKTQHIKYLNTTRTEEWSAMISFRCY

SEQ ID NO: 169542 - protein, 139 aa, Glycine max
  unsure (1)..(139): unsure at all Xaa locations
  Clone ID: PAT_MRT3847_12410C.1.pep
EKALNRVTQSRQRQKPQASNYRWKEPMRXPSXTGXSXRLSCSTGEPLPLSLSSFAESIRSFVFATKKTLKNEQRKVRRKRSESARGCEGRVSASKTEFGGLQTEGPRQLSRRSNPWCRLFLLRPLTGSIFFEGLIFSFC

SEQ ID NO: 169543 - protein, 81 aa, Glycine max
  Clone ID: PAT_MRT3847_124110C.1.pep
DKDQISQFFKCEMYCCTMYCKHEFYKQHDNFTPKDHHSSCCVQMPILKEQHCHVSKIPFCFTCCHLAYYFLFLGLYFLNCK

SEQ ID NO: 169544 - protein, 89 aa, Glycine max
  unsure (1)..(89): unsure at all Xaa locations
  Clone ID: PAT_MRT3847_124111C.1.pep
ECFAHMKDRKGAARLRALDFAERHGYIKVIVKDIIHYLFRGAPFAKVVFRDPYRFKKRTELFIAVXGIHTGQFVYCFKNAHLNIGNVLP

SEQ ID NO: 169545 - protein, 90 aa, Glycine max
  unsure (1)..(90): unsure at all Xaa locations
  Clone ID: PAT_MRT3847_124112C.1.pep
KTWCIQRVVLCCCCLQPVQLSXFAVMAALILGDQLYSEGLIGAILIVLGLYLVLWGKNNEKKVTEPSLTNPLLKAEEENKETVSVPKDIP

SEQ ID NO: 169546 - protein, 305 aa, Glycine max
  Clone ID: PAT_MRT3847_124113C.1.pep
MPRPHSPSFLLCQEHYSFTFQQHSQTLSNTQPSPLTFPDNLQHDLLLSLLSKQRATHSTLSPRHHVVRLISKLSNFHGFSPLTTVLAVNYFDRFVATLRFQSELKPWMTQLTAVACVSLAAKVEETRVPLLSDFQVEESKFLFEAKTIQRMELEPLEPLEWKMNPVTPISFFQHFLARLGLKRHLHSEFLCRCQRLLLSVIADSRVMSYLPSTLAAAIMIHIIKEIEPLNATEYQNQLPGLLKTSEEQVNECYKLILGLYVCSNGIHNLRRKRLSEPSSSPDGVIDASFSCDSSNDSWTVASPSV

SEQ ID NO: 169547 - protein, 75 aa, Glycine max
  unsure (1)..(75): unsure at all Xaa locations
  Clone ID: PAT_MRT3847_124114C.1.pep
YXXVHDXXMXXXXXEXVIXVKLTXINNMCAYGXNXGMSGXXLXGXXPQSMSQXTVWNXMAXVRTPFEFDSSKQQL

SEQ ID NO: 169548 - protein, 30 aa, Glycine max
  Clone ID: PAT_MRT3847_124115C.1.pep
DPYNFIGVRTLLVYESIYVNPNASVQSNEI

SEQ ID NO: 169549 - protein, 226 aa, Glycine max
  unsure (1)..(226): unsure at all Xaa locations
  Clone ID: PAT_MRT3847_124116C.1.pep
MVKDTAYYDILGVNYDASAAEIKKAYYVKARIVHPDKNPEDPKAAENFQKLGEAYQVLSDPGKRAAYDEHGKEGVPQDSMMDPTTVFGMIFGSEFFEEYIGQLALASLASIEIEEDSQDPEVLRQRIQEKMKAWQKEREQKLSTFLKDRLQPFVDGREDEFTAWAKSEARSLSKAAFGEAMLHTIGYIYTRKAARELXKDIRYMNVPFLAEWVRGKGHCIKSPVTA

SEQ ID NO: 169550 - protein, 122 aa, Glycine max
  unsure (1)..(122): unsure at all Xaa locations
  Clone ID: PAT_MRT3847_124117C.1.pep
GKMGPCARWSKPIQYTDSIKDSSKNXRXNGWLLDASHMCGQSLNGKDADALLEKQVIADEDRLAPGTGTXTVCTEERRGAKEESESTRVTDDHIDKAVNAGGXDKELAHMEEHMKVVMGKGG

SEQ ID NO: 169551 - protein, 60 aa, Glycine max
  unsure (1)..(60): unsure at all Xaa locations
  Clone ID: PAT_MRT3847_124118C.1.pep
RTXARNSARXLXXXXXXXFGLRRXXXXXVTXGXFWLCLXXFXSYXSGXXQXRTIXXXFCA

SEQ ID NO: 169552 - protein, 62 aa, Glycine max
  Clone ID: PAT_MRT3847_124119C.1.pep
ATTLRIKALLTDVVIDVVATGASATLASIALAIEVMLDGHDWSLADVSNNVSLTYVEKIVFQ

SEQ ID NO: 169553 - protein, 46 aa, Glycine max
  Clone ID: PAT_MRT3847_12411C.1.pep
ARYEDKRMVSICNHFLTIQNQIEEVSIEILMCVLNVNSLILKYYSA

SEQ ID NO: 169554 - protein, 178 aa, Glycine max
  unsure (1)..(178): unsure at all Xaa locations
  Clone ID: PAT_MRT3847_124120C.1.pep
FXXXAXLFXAXLXLPXLVPPXAPXXXXXSXXFXLPLPXXXVGXXLLXWXXRLCXXXLXXRSLXSLXAGXVSFFFSXAVRPXXVXPXLXXALSXXXXXCXFXSXXPLPGAXLPFXXXXALGGXSPPXLXXXPCLXXSXLXFGXAXVVAXXSXXXVXFXCXXLRLGINKKKKEKKKEKTG

SEQ ID NO: 169555 - protein, 64 aa, Glycine max
  Clone ID: PAT_MRT3847_124121C.1.pep
GFPLRSYICHWFVALLQLNDGALRPNVCCDGWGCYRISSHLLTLVLAPEAGPFVHSAALCDRLP

SEQ ID NO: 169556 - protein, 74 aa, Glycine max
  Clone ID: PAT_MRT3847_124122C.1.pep
FSMRCSNNSEALAPGNLAPTLPLLLLPLPPLVPLPILGQIWESPTARVTWPTSHINYGSIDDQRQFSTGTTGSS

SEQ ID NO: 169557 - protein, 88 aa, Glycine max
  unsure (1)..(88): unsure at all Xaa locations
  Clone ID: PAT_MRT3847_124123C.1.pep
IDTGGLAPFKKHPFNITLSLSMLVSSPPHEIFPXKSFIDFAQKVNAIKLAKKSVKNINMDALPXQTYRVIPNLNPKHLFSGKQFQFKN

SEQ ID NO: 169558 - protein, 61 aa, Glycine max
  Clone ID: PAT_MRT3847_124124C.1.pep
RPLCQSAAASVIQIERKEVASYCSLLEEFYTRYDTGSILPNISAQCNSASYRDIDVESHVV

SEQ ID NO: 169559 - protein, 261 aa, Glycine max
  unsure (1)..(261): unsure at all Xaa locations
  Clone ID: PAT_MRT3847_124125C.1.pep
MIWSRLSRRTHLLPYLRALQTDSIESRCLSIIPKGSSYKFINPNTSFQHNFSCNIRLSKFKQELSTKPFHLCYRSSALASQYVGKSCSMPGFRHFSSHASKEQKSRKMLYXLTGLVFAMVGCTYAAVPXYRRFCQATAMGDWEIVVQFNADIADGMQWKFVPTQREVRVKPGESALAFYTAENKSSTPITGVSTYNVTPMKAAVYFNKIQCFCFEEQRLLPGEQIDMPVFFYIDPEFETDPKMNGINNIILSYTFFKVSEE

SEQ ID NO: 169560 - protein, 283 aa, Glycine max
  Clone ID: PAT_MRT3847_124126C.1.pep
MIWSRLSRRTHLLPYLRALQTDSIESRCLSIIPKGSSYKFINPNTSFQHNFSCNIRLSKFKQELSTKPFHLCYRSSALASQYVGKSCSMPGFRHFSSHASKEQKSRKMLLYLTGLVFAMVGCTYAAVPLYRRFCQATGYGGTVTRRETVEEKIARHDSNNTVTTREIVVQFNADIADGMQWKFVPTQREVRVKPGESALAFYTAENNSSTPITGVSTYNVSPMKAAVYFNKIKCCCFDELRLLPGQQIDMPVFFYIDPECETDPEMNGINNIILSYTFFRVAE

SEQ ID NO: 169561 - protein, 150 aa, Glycine max
  unsure (1)..(150): unsure at all Xaa locations
  Clone ID: PAT_MRT3847_124127C.1.pep
RLCLQDFARIDGWFLPNSSSKLSPFSQSEFGRTESGAIIFTDINMISGMEQTSFLFQQASKVSFQAXSKSLQRNKSFSRREGTRKVFVIFGGNTSERQVSLMSGTNVWLNLLAFHDLEVTPCLLSPTRECASSIDMGKKADDVMNRTVWS

SEQ ID NO: 169562 - protein, 86 aa, Glycine max
  Clone ID: PAT_MRT3847_124128C.1.pep
LYTNQIHVPTRLTVRSVVPLKPTHPTRFLLFSLSQFFATPNCDTAILASLKHEVTLKHKALTVSPRVIEWTEADLFSKNQNRGRVG

SEQ ID NO: 169563 - protein, 541 aa, Glycine max
  unsure (1)..(541): unsure at all Xaa locations
  Clone ID: PAT_MRT3847_124129C.1.pep
KLCLSDLAKHLATLFPYLSGIHWPFCESGGIQQLLEKYNVPFVGTGSKECCQAFDKHKASLELRKHGFITVPSFLVQGYETDKSELSEWFKKHQLDPDLGKVVVKPTRGGSSIGVGVAYGVNDSLVKANEIMSEGIDKKVLIEIFLEGGNEFTAIVLDVGSDLDSFPVVLLPTEVELQFRGANDVKENDAIFNYRRKYLPTQQVAYHTPPRFPLDVIENIRKGASLLFQRLCLQDFARIDGWFLPNSSSKLSPFSQSEFGRTESGAIIFTDINMISGMEQTSFLFQQASKVGFSHTNILRSIIHHACLRFPNLASVSGISGQLPSRSKSLQRNKSFSRREGTRKVFVIFGGNTSVRQVSXMSGMKIWLNLLSIFDPFIETDEIIVTSKFEDATGHGLTWKGHSRWVEITVGVIGKRGSMHSLSPSVTVKESGDILSLEEKFQGGTGINLTPPPLSIMSENALKRCKQHIELIANTLQLEGFSRIDAFVNVDSGEVLIIEVNTVPGMTPSTVLIHQALVEQPPLYPHQFFRKLLDLASERSM

SEQ ID NO: 169564 - protein, 92 aa, Glycine max
  unsure (1)..(92): unsure at all Xaa locations
  Clone ID: PAT_MRT3847_12412C.1.pep
TSRLTEILYLYYTSIPQLALLSVEPMGNVGLIGLDDMRDSLILNMXHEGCTDRGYNRTTFXVDHLLENEDRGTNIICPVSVEELCRNLKRPR

SEQ ID NO: 169565 - protein, 64 aa, Glycine max
  unsure (1)..(64): unsure at all Xaa locations
  Clone ID: PAT_MRT3847_124130C.1.pep
LKKIKKMFILTKVDPFPXALTGXLFGVKEXILSSNATNPILTQLLKTCKSPKNLVNECPFAFVN

SEQ ID NO: 169566 - protein, 83 aa, Glycine max
  unsure (1)..(83): unsure at all Xaa locations
  Clone ID: PAT_MRT3847_124131C.1.pep
MRKNGWQLPYHPLQVVAIAVFMALGFAFYVFFAPFVGKKMYQYVVMGLYTPLITCVFGLXILCAASXPAILGVFKSKNILNSR

SEQ ID NO: 169567 - protein, 43 aa, Glycine max
  Clone ID: PAT_MRT3847_124132C.1.pep
RISICNHVSLSINYVFNKKKKKGRQGGSQLVSPSTQSVTSHMS

SEQ ID NO: 169568 - protein, 152 aa, Glycine max
  Clone ID: PAT_MRT3847_124133C.1.pep
MEDEVNRELDLLPSSRSNSSLLRLCSAVSSSSTTDCGGGGGGAPSLDLQLSISVRPPAAVLMCDGVEALKWQAAEQIRLAAMEKAYAERVRELTRREMEMAQTEFARARQMWERAREEVERAERIKERATRQQVDSTCMEITCHSCRQRFRP

SEQ ID NO: 169569 - protein, 129 aa, Glycine max
  unsure (1)..(129): unsure at all Xaa locations
  Clone ID: PAT_MRT3847_124134C.1.pep
FNLFFWRLDYAGISLMIVSSXFAPIYYAFFCNPNARLFYLASISVLGVLAIITLLAPSLFTPRFRPLRASLFLSMGFXRVPERWKPGAFDIAGHSHQIFHVFVVLGALAHSVATLVILDFRLGSPTCAN

SEQ ID NO: 169570 - protein, 103 aa, Glycine max
  Clone ID: PAT_MRT3847_124135C.1.pep
TGRDGCGGGVLERESWKSGIGKRKLGFEERESEREKEKEKRQGERVGRVGDNTVRSPGRGACCWGNPQCVSGSRHRIGSACPLQLLLSETPNYYFFSNFKFPN

SEQ ID NO: 169571 - protein, 167 aa, Glycine max
  unsure (1)..(167): unsure at all Xaa locations
  Clone ID: PAT_MRT3847_124136C.1.pep
XFWRLDYAGISLMIVSSFFAPIYYVFFCNPNARLFYLASISVLGVLAIITLLAPSLSTPRFRPLRASLFLSMGFSGIIPAAHAVALYWGHPHIFVALGYELVMAILYATGAGFYVARVPERWKPGAFDIAGHSHQIFHVFVVLGALAHSVATLVILDFRLGSPTCAN

SEQ ID NO: 169572 - protein, 87 aa, Glycine max
  Clone ID: PAT_MRT3847_124137C.1.pep
PKNSILLNSKGKKTSFKSKQFFFSKQKEKKERLKILYCLKNSLNRTKEMGREGLIFARVKTPPSQGFKKKEKPPLYWPFLGKKGKVF

SEQ ID NO: 169573 - protein, 133 aa, Glycine max
  unsure (1)..(133): unsure at all Xaa locations
  Clone ID: PAT_MRT3847_124138C.1.pep
ASRTSTRPVLNPQNPLVLNRWMGKLTLPQGTSRSXKELPLSIGGGAGAKNAILMNMPHAAISMRRYFVVHPVFGACTMTHSYIKXTVSLFIXALGNLADDTINCEGFDHKLASFGEIQAKGVXKLSQDEFLTA

SEQ ID NO: 169574 - protein, 93 aa, Glycine max
  Clone ID: PAT_MRT3847_124139C.1.pep
NRRLRRSLSFQILKPQTHFSNQEKKSPFSSAHITATNHHEPRRHRIPNPPLHNGATLRPKPNALTKKSCCQRQHRATSATVARDIMSPNLRLL

SEQ ID NO: 169575 - protein, 194 aa, Glycine max
  Clone ID: PAT_MRT3847_12413C.1.pep
MTTVVPTSEEDAALSVVRFASELAWADAGPEVAEPQVSRLCMEAEEFIVMGKWLELASLMITSAELVFSKVSETDIESIFTIICNLVTKTENPDEVMEIVKVITAKIIQQPNEKPAVRLKTLINLYNLLETPYCQFYVYMKALNLAVNGKVTEYIIPSFKKIDSFLKEWKIGIPEQRELFLTISNILKENKSMS

SEQ ID NO: 169576 - protein, 91 aa, Glycine max
  unsure (1)..(91): unsure at all Xaa locations
  Clone ID: PAT_MRT3847_124140C.1.pep
MATMSLTFAVAAPSLNYPPSTTQTVIMCEPCNGTGWLVCDFCNGQKTNVKAQNNKRIYXRCPSCKALGYVLCSNCKVFKCVTFPNFNDSQN

SEQ ID NO: 169577 - protein, 37 aa, Glycine max
  Clone ID: PAT_MRT3847_124141C.1.pep
SPYETDPSASQNSVSEGHAKSFSCLASWPVTMPPSCF

SEQ ID NO: 169578 - protein, 80 aa, Glycine max
  Clone ID: PAT_MRT3847_124142C.1.pep
ACANPFVDARPPFARLHYLYVQVTTHTPTLRLLRLRLAPHCRFPKVNLLTITVILMAAGFGFCFILGNCTHKNIFSLHGP

SEQ ID NO: 169579 - protein, 176 aa, Glycine max
  Clone ID: PAT_MRT3847_124143C.1.pep
DLYRAIDIYLKAHPELSKSERKRLCRILDCKKLSMEACMHAAQNELLPLRVVVQVLFFEQVRAAAAGGKVSDMPSNIKALLTAHGIDPSKHTAPLSTTTSIHADDNWSVSGFKSPKSTTRNPTLRMKLAEDDLDENVVPRDEIGRTSKFKGLGLPTQPKRMFSKLWATNRSATEKN

SEQ ID NO: 169580 - protein, 97 aa, Glycine max
  Clone ID: PAT_MRT3847_124144C.1.pep
FLLQILGIILTDFGIICLGGIVKLQNRRGQHLTVISSAELVDSASGRYCQLSITWPRNPPGTLVCCFHVLVCHCFHSFLLPALFLHNSLGFALCSGS

SEQ ID NO: 169581 - protein, 182 aa, Glycine max
  unsure (1)..(182): unsure at all Xaa locations
  Clone ID: PAT_MRT3847_124145C.1.pep
MSQVAMAMAAKAXKLLLRELKTVKADLAFAKDRCAQLEEENKILRENRERGDSHDDDDLIRLQLESLLAEKARLAHENSVYARENRFLREVVEYHQLTMQDVVYLDESNEEVTEVNPLNLPPVPNMALDSITPSATSLLHSPEPNLGMASELTRGTSSTISGKDAKSNEITIKDSRSSEATR

SEQ ID NO: 169582 - protein, 46 aa, Glycine max
  Clone ID: PAT_MRT3847_124146C.1.pep
DLLLFFTQNHSYYFTFYHKQTTIHICLITYIYLLLSKLKINYKLST

SEQ ID NO: 169583 - protein, 47 aa, Glycine max
  Clone ID: PAT_MRT3847_124147C.1.pep
RLVHNPVARSLPCVGLSLHPSQSQSGLVAPRAPPVRLPSISRGPRPP

SEQ ID NO: 169584 - protein, 83 aa, Glycine max
  unsure (1)..(83): unsure at all Xaa locations
  Clone ID: PAT_MRT3847_124148C.1.pep
ATXRPRSRTNIXQAXYNXTLIHXHTDSVSMAXLKVAFLAGVXXMXVVSDXHGHXQLSRAXRXXXXXXIXSVTXXXEERPXSGX

SEQ ID NO: 169585 - protein, 100 aa, Glycine max
  Clone ID: PAT_MRT3847_124149C.1.pep
MMEEMKVSRRVEWWQNMMFPVRRVWFVVAKRLGIRKTGLLKLSNDVRACEYEDIQVMWEILNRNESEFGRSSSTRKGNNKKGHCWKLLRWARCAPCMCRT

SEQ ID NO: 169586 - protein, 97 aa, Glycine max
  unsure (1)..(97): unsure at all Xaa locations
  Clone ID: PAT_MRT3847_12414C.1.pep
MVSLGYMHSQGVHTLFIXHSQESKLMVLFFLVYLHDIIIVGDNGLMTLKNKXIREKLATXFEKNDLRKLKYILGIEVAYSKXGIFNSQRKYVLDLLK

SEQ ID NO: 169587 - protein, 180 aa, Glycine max
  Clone ID: PAT_MRT3847_124150C.1.pep
MNGVSPLEAQAFNYLSFGFLTLLNNFWTWLAFTFWRTRAPTSELLPPPDDPVRDESDPVAVTGPSPTVVDVDGARKGKFTLYYEDESERECESHQETTALTERDGRGLKWWESWEELLKIRRGEDQNGWYTCQDLTVLNGSVVRLWDGGFGFGTSPQNPGTLQDVFLYGKLYNSISTDIY

SEQ ID NO: 169588 - protein, 90 aa, Glycine max
  unsure (1)..(90): unsure at all Xaa locations
  Clone ID: PAT_MRT3847_124151C.1.pep
TRGASFSYNSIRCGFEGRVVSQALVWCCKQFGACLCSCSSFFSSSSSSRNRARGCREFFRGLVRSPKRCSVTNPCLEMGGVKSEGKXXWP

SEQ ID NO: 169589 - protein, 284 aa, Glycine max
  Clone ID: PAT_MRT3847_124152C.1.pep
LVALKKVKMNIERDGFPMSSLREINILLSFNHPSIVNVKEVVVDDFDGTFMVMEHMEYDLKGLMEVKKHPFSMSEIKSLVRQLLEGVKYLHDNWVIHRDLKSSNILLNHDGELKICDFGLSRQYGSPLKPYTPVVVTLWYRAPELLLGAKEYSTAIDMWSVGCIMAELIAKEPLFRGKSELEQLDKIFRTLGTPDEKIWPGLSKLPGAKANFVKQLFNTLRKKFPAASFIGLPVLSELGFDLLQQLLTYDPEKRITAEDALLHDWFHEAPLPKSDFKPIFPSWQ

SEQ ID NO: 169590 - protein, 62 aa, Glycine max
  Clone ID: PAT_MRT3847_124153C.1.pep
TRPPTRPPTRPVLSELGLDLGKRLLTYDPEKRITAEDAPLHDWFHEAPLPKSDFKPIFPSWQ

SEQ ID NO: 169591 - protein, 206 aa, Glycine max
  Clone ID: PAT_MRT3847_124154C.1.pep
LTTRPTKTRQRRRLLSLVSAFLLSFAFAFRVAGRKSVSLRREFCKYGSTIGFDHHSTRSFDVEVGGSRNHHLSRSGVERFHVEKEEGEIYVEHELASVVPPPEKRRKFSPIIWDLAVKEERVSSKSRISQIAALSPPRPSLPSSPGAYVVDCGNVMEGGFCQIHEATNKMWRKRMMCKVGQSKSQDGIVMMFRHQGGLMKNRSPVK

SEQ ID NO: 169592 - protein, 115 aa, Glycine max
  Clone ID: PAT_MRT3847_124155C.1.pep
LKFARKSKGDAGSTGWSSPSVFSEGEDDAEEFKNSNKRNADNLLRKAALNVKSYGQPKNSVHEGYERNLGRDDGKGSYKMQDGRDLGAGSTTRASRSFFSLSAFRGSKPSESKFH

SEQ ID NO: 169593 - protein, 350 aa, Glycine max
  unsure (1)..(350): unsure at all Xaa locations
  Clone ID: PAT_MRT3847_124156C.1.pep
MVDVGEQSDDDYSLSDSDETGGLMHGQRNINMLQSCRSVCEFEMIKKINEGTYGVVYKARDKKTGELVALKKVKMNIERDGFPMSSLREINILLSFNHPSIVNVKEVVVDDFDGTFMVMEHMEYDLKGLMEVKKQPFSMSEIKSLMRQLLEGVKYLHDNWVIHRDLKSSRELKICDFELSRQYGSLPKPYAXVLIKLWYRGLDYWLXSPELLLGAKEYSTSFDMWSVGCIMAELIVKEPLFRGKSELEQLDKIFRTLGTPDEKIWPGLSKLPGAKANFVKQPINTLRKKFPAASFTGLPVLSELGFDLLKRLLTYDPEKRITAEDALLHDWFHEAPLPKSDFKPIFPSWQ

SEQ ID NO: 169594 - protein, 185 aa, Glycine max
  Clone ID: PAT_MRT3847_124157C.1.pep
MPKPCEDDTFQSASLANAAPVGSASPRVRHSLSQMLQEESSEPDTCEWGNAENPPAMIYQKNAPKGLKRLLKFARKSKGDTGSTGWSSPSVFSEGEDDAEEFKNSNKRNADNLLRKAAQNVKSYGQPKNSVHEGYERNLGRDDGKGSHKMRDGRDLGAGSTTRASRSFFSLSAFRGSKPSESKFH

SEQ ID NO: 169595 - protein, 46 aa, Glycine max
  Clone ID: PAT_MRT3847_124158C.1.pep
PDIRFLNTNELRCYGRSITTLYTHVGFTLDCLCRSHLYESYKPKTQ

SEQ ID NO: 169596 - protein, 168 aa, Glycine max
  unsure (1)..(168): unsure at all Xaa locations
  Clone ID: PAT_MRT3847_124159C.1.pep
LITRLPAPISIIGIGLLAAQEQSQGIERKKFSIAVDQLHHPHILMIMRFFTPVGVKDEGLHVFVRYFYIVIAMMFRMENEHMVQTMDQHIDNDVVRSTNMFHDYVRAMNGNSDTLSGLFQXDAIVNAICELHHEWDSRGTAILNNLLEYMQVAKVVSDIYAHHTNMVA

SEQ ID NO: 169597 - protein, 410 aa, Glycine max
  Clone ID: PAT_MRT3847_12415C.1.pep
MATVVPTSEEDAALSVVRFASELAWADAGPEVAEPQVSRLCVEAEEFIVMGKWLELASLMITSAELIFSKVSEKDIESIFTIICNLVTKTENPDEVMEIVKVITTKILQQPNEKPAVRLKIMISLYNLLETPYCQFYVYMKLLNLAVDGKVTEHIIPSFNKIDNFLKDWKIGIPEQRELFLAVSNILKENKSMSKDAFKFLTSYLATFSGDDSHVLSEAKEEAARAIVEFVRAPDVFQCDLLDLPAVTQLEKDAKYALLYQLLKIFLTQRLDAYLDYHAANSTLLKSYGLVHEECIAKMRLLSLVDLSSDGSGQIPYELIRDTLQISDDEVELWVVRGLTANLIDCKMDQMNQVVVVSHPTERVFGQHQWQALRTKLVTWRGNIANVISTIQANKITEDGSQAAQGLVVR

SEQ ID NO: 169598 - protein, 108 aa, Glycine max
  Clone ID: PAT_MRT3847_124160C.1.pep
ADCPMPRWDGHPPPPAHSLPTCCPPTAATREVWIETLQLGDSQTPAAALSPSWTREQRPRPAQARPQLGRGGGKEWAGLTPHILRTMAILAANGNSFIFQLCVGRKNS

SEQ ID NO: 169599 - protein, 60 aa, Glycine max
  Clone ID: PAT_MRT3847_124161C.1.pep
KQPGTPFYIRTFLNTNKTQLPKGPSGKKPLPVVGPWRAVTLVAITKVGPSNFFKGRRTLF

SEQ ID NO: 169600 - protein, 37 aa, Glycine max
  Clone ID: PAT_MRT3847_124162C.1.pep
RNNRVDAQNHETPPLPHAGLRIQHTAKNYKPQGHTNP

SEQ ID NO: 169601 - protein, 143 aa, Glycine max
  Clone ID: PAT_MRT3847_124163C.1.pep
VGEEARNNLYQMLPTSLRLSLKGKLKSYVKNLAIYDAPLAHDWKVTLDGILKWLAPLAHNMIRWQSERNFEQHQIVSRTNVLLFQTLYFADKDKTEEAICQLLMGLNYICRYEQQQNALLGCASSFDFEDCMEWQLQCGAFPS

SEQ ID NO: 169602 - protein, 87 aa, Glycine max
  Clone ID: PAT_MRT3847_124164C.1.pep
YISMAYQLSALYKAHLGAAMRQPNLVKLSGLARPRQASHRKPTRSPERNVKSAKTDDMICWICWISWVFLGIRMVLVNLYARLTVLT

SEQ ID NO: 169603 - protein, 488 aa, Glycine max
  Clone ID: PAT_MRT3847_124165C.1.pep
MDQATTFNKYAFACAAVASMVSIISGYDTGVMSGAMIFIKDDIGISDTQQEVLAGILNLCALGGSLAAGRTSDYIGRRYTILLASLLFMVGAILMGYGPNYAILMLGRCIGGVGVGFALMIAPVYSAEISSASSRGFLTSLPELCIGIGILLGYISNYFLGKLTLRLGWRLMLGVAAFPSLALALGILGMPESPRWLTMQGRLGDAKKVLLRVSNTEHEAKLRFREIKVAMRINDCDGDDNNVKPSYKSQGEGVWKELLVRPTPEVRWMLIAAVGIHFFEHATGIEAVMLYSPRIFKKAGVTSKDKLLLATVGIGLTKIIFLVMALFLLDKVGRRRLLQISTGGMVCGLTLLGFSLTMVDRSSEKLLWALSLSIVAIYAYVAFFNVGLGPVTWVYASEIFPLKLRAQGASIGVAVNRTMNAVVSMSFISVYKAITIGGSFFMFAGISIVAWVFFYFFLPETKGVPLEEMEMVFSKKYSGKNVAIETGP

SEQ ID NO: 169604 - protein, 46 aa, Glycine max
  Clone ID: PAT_MRT3847_124166C.1.pep
SCPTYHSMIFTISFTSLSIIKSLVISLQNSLLSVHFLSVNNIFKFN

SEQ ID NO: 169605 - protein, 80 aa, Glycine max
  Clone ID: PAT_MRT3847_124167C.1.pep
GLGDGVECVEEPPPEIFLIEEHDDHQKFQPRYPSNQQPHRQVDADTDPALGHPIEFICLDLPEPAVCKYCGLRYVQDHHH

SEQ ID NO: 169606 - protein, 71 aa, Glycine max
  Clone ID: PAT_MRT3847_124168C.1.pep
SVSDPLSSSSSPTSNSSVSSSSSSFSSSFKTKLLPFSCPSSTKTIFSMFSCTSSSAQFSISITCSTAVFCS

SEQ ID NO: 169607 - protein, 54 aa, Glycine max
  unsure (1)..(54): unsure at all Xaa locations
  Clone ID: PAT_MRT3847_124169C.1.pep
YVILELWWSFMCIYEAVNGLCGLRKVFKSPXYESEFLMNIKKESPQSLKGGVVS

SEQ ID NO: 169608 - protein, 128 aa, Glycine max
  unsure (1)..(128): unsure at all Xaa locations
  Clone ID: PAT_MRT3847_12416C.1.pep
ALAPVGCRSLGGLCSCWFFXXSFLPLSSWGLSLPRPRSFFLLSPCVWXXCXXLXRRPSFLCPPLVRXSCGGLXCSLLFCCFFFRLGGRLPGGVAAAFPLPLWCVXVSSRRRCAPPXLASSIVXPXAWV

SEQ ID NO: 169609 - protein, 92 aa, Glycine max
  Clone ID: PAT_MRT3847_124170C.1.pep
LNASSHLPMYRCPHTAQVQCIASHMPGANYRSRVIRIIIDSRSRPSISLVLVSMRNRCISRILNAADIINGPWLASSEASRLPLPLNLKPNS

SEQ ID NO: 169610 - protein, 50 aa, Glycine max
  Clone ID: PAT_MRT3847_124171C.1.pep
TSPGIKPITRQREKYTDAEDEGQSSMAEKTEMIPQQCDIDATWDACIDLP

SEQ ID NO: 169611 - protein, 156 aa, Glycine max
  Clone ID: PAT_MRT3847_124172C.1.pep
MADEWVELAYARDDNNETALHLLAVNQNPLDSCCHCPEMEGSFRINPDTKHVMFQLVNFLWKKILQHKDHSEAMRIISEPSQLLYDAAEVGNFGFLSELISAYPGKIIWEVDNNGQSIIHTAVSYRHASIFNLVHEIGFIKDILISYIVKENNTLL

SEQ ID NO: 169612 - protein, 67 aa, Glycine max
  Clone ID: PAT_MRT3847_124173C.1.pep
LNKSLFPPRHIIIITTRISTWPDHHLRLKTVATEYYQRLGIFFISNILEEKNKELPKIRLTSSCINS

SEQ ID NO: 169613 - protein, 75 aa, Glycine max
  Clone ID: PAT_MRT3847_124174C.1.pep
IGYDSFCGILPRSKRKNEKCRIYKLTKKKPCNVKVLEIQEDKQNVAYYSRIQFGVVKETLKFEVYKTCVMEYVLI

SEQ ID NO: 169614 - protein, 147 aa, Glycine max
  Clone ID: PAT_MRT3847_124175C.1.pep
KKKLIPPWWHAVFNLKRPTTRLRCSKSKSTRSTHARPGYPGKQAEKKTGHACHRNNRFLALEREFFPPKLRGLTVYPQNVLARHICEAKLRWVPRVPSKGIWERPYLVPLNLNFTFNPLTMGFPRALMDSNLKPILLRLMERGGAIV

SEQ ID NO: 169615 - protein, 117 aa, Glycine max
  unsure (1)..(117): unsure at all Xaa locations
  Clone ID: PAT_MRT3847_124176C.1.pep
RVRRKPACTKAMTMSFKPNPSTDAWSXEYLKRTGIQSDXLRDTGWTATPKKDVQVTTDWLKTYKERVPRTKGVTNTQKPSEQNRRMGKQTYPQGTNRSVKRKPXIKGGGAGAKKAIL

SEQ ID NO: 169616 - protein, 110 aa, Glycine max
  Clone ID: PAT_MRT3847_124177C.1.pep
REHALLAFTLGVRQLIVAINKMDTTKWSEARYQEIVKETFNFIKKGGFNPKTGAFVPIFGLDRDHMLEESSNINWFKGLKKGNQFWQFQGKNLLEGIELIQAPLGTNHQA

SEQ ID NO: 169617 - protein, 51 aa, Glycine max
  Clone ID: PAT_MRT3847_124178C.1.pep
SFYPFFLLTQRALEGSIDFGQSICISHIHLLKGIKYITNNRLYNNNLFSNN

SEQ ID NO: 169618 - protein, 117 aa, Glycine max
  Clone ID: PAT_MRT3847_124179C.1.pep
LGAWDANAADQTKSNEWSDWGKKKEVTQEGNVQDSWGSGKRKDKVTQEDNSGSGGWGANRTDLAKSKSSEWSSWGKNKSEIPAGGSENVQNDSWGSGKLEDDTQKENSGSAWVRNKA

SEQ ID NO: 169619 - protein, 64 aa, Glycine max
  Clone ID: PAT_MRT3847_12417C.1.pep
SVSGCYWNLFFCCCGSEFEFALTCQLITACCTGNCGCGSCCKCGSDCGRCTMYRDSMYTASTTT

SEQ ID NO: 169620 - protein, 83 aa, Glycine max
  Clone ID: PAT_MRT3847_124180C.1.pep
PSPAARHFFARLVDLELLPFPFFPPTRQHQQHQQQHLHHSTSSLDTHTLTSSNSVQPWPLANAPSSTPTLAAAAPGTATGGPT

SEQ ID NO: 169621 - protein, 78 aa, Glycine max
  Clone ID: PAT_MRT3847_124181C.1.pep
YIWLFKYSELYDLLFYFIILLKYLISMLLIDILLLFLYEIDSYKSNNGVYKTLTSLITLTDTTNNGRASHSQVGNLIS

SEQ ID NO: 169622 - protein, 232 aa, Glycine max
  Clone ID: PAT_MRT3847_124182C.1.pep
MMSRAAVLLHAPEEDAAAEECCTSTSSSSIGRNSDVSSERSMEEGENEVESAYHGPLHAMETLEEVLPIRRGISNFYNGKSKSFTTLADAVSSPSVKDIAKPENAYTRRRRNLMALNHIWDKNNRNYPLRSSGGGICKRSISLSRSSLALAVAMNNSDSSSSITSDDSGSSSNSIPPPSPLPPLHPRNRVSSLRNFSPWRSFSLTDLQQHCAIAATIKISSPSIGNETAHPS

SEQ ID NO: 169623 - protein, 239 aa, Glycine max
  Clone ID: PAT_MRT3847_124183C.1.pep
MMSRAAVLLHAQEEEEEECSTSTSSSIGRNSDVSSERSMEEGENEVESAYHGPLHAMETLEEVLPIRRGISNFYNGKSKSFTTLADAVSSPSVKDIAKPENAYTRRRRNLMALNHVLDKNNRNYPLRSSGGGICKRSISLSRSSLALAVAMNNSDSSSSITSEDSGSSSNSLHSPSPLPPLHPRNRVSSSSGSGPSSPLLRNFSPWRSFSVADLQQHCAIAATIKISSPSVGNKTAHPS

SEQ ID NO: 169624 - protein, 94 aa, Glycine max
  unsure (1)..(94): unsure at all Xaa locations
  Clone ID: PAT_MRT3847_124184C.1.pep
AWVRVGAFLNTIAPIAPDMNSRFXLLSTTTNGDFVQGKDLAMVKVHVAXAVAGLTLSYTLTSLLHTGLQKDRGXIVEYFGGRWYYDNKGCLAPH

SEQ ID NO: 169625 - protein, 206 aa, Glycine max
  Clone ID: PAT_MRT3847_124185C.1.pep
KKKRRRNRRESKTAVPSLIGREEHSQPRQDYSLESGSVFFIAADLTTLHAYGSSGCLGPFKKPPLIATADVPPKGLRKQGKAAKKPSTSEDFWITSTHDMDNSAVQSQGSISSASITNQAADPHGGSCNPTEFVNHGLILWNQTRQGWIGNKRSKNQTEQLREPKLSWNATYESLLGSNKPFPQHIPLAEMVDFLVDIWEQEGLYD

SEQ ID NO: 169626 - protein, 56 aa, Glycine max
  Clone ID: PAT_MRT3847_124186C.1.pep
FIAMLIQIILLFKIIFINITITYIFYIFTLPIYLLIYAHTKYTPLYLHTILVLINK

SEQ ID NO: 169627 - protein, 66 aa, Glycine max
  unsure (1)..(66): unsure at all Xaa locations
  Clone ID: PAT_MRT3847_124187C.1.pep
SYSIDIDKIXVLXSTVIVRLYEYYESEXXTIIYXQSTSNHIPRTXVMRNIRLTESKQAAFLICEVK

SEQ ID NO: 169628 - protein, 59 aa, Glycine max
  Clone ID: PAT_MRT3847_124188C.1.pep
GANCPKRKKRQFHVPVLLPRLFVSHHTQDQIGMPLVQVLIFENLHHHQNINLSRQKFCL

SEQ ID NO: 169629 - protein, 175 aa, Glycine max
  Clone ID: PAT_MRT3847_124189C.1.pep
LEWILHCDVKPQNILLDSDFQPKVADFGLSKLLNRDERGNSTFSRIRGTRGYMAPEWVYNLPITSKVDVYSYGIVVLEMVTGRSPMEIHSLENSRGIEQRRLVMWVTDKINDAPTSGFWIEEILDPNLEGQCQVSQVEVLVKVALQCVQDDMNQRPSMSQVVEMLLSHENNVLPR

SEQ ID NO: 169630 - protein, 54 aa, Glycine max
  Clone ID: PAT_MRT3847_12418C.1.pep
PGGLPRCSLGGDPPFGAGGTCGVSCTKTPPAWLVRWPGNQLVCSKSHLEPNSEL

SEQ ID NO: 169631 - protein, 27 aa, Glycine max
  Clone ID: PAT_MRT3847_124190C.1.pep
MLVALLFSCIKALLIVVMFSSLLCGGF

SEQ ID NO: 169632 - protein, 418 aa, Glycine max
  Clone ID: PAT_MRT3847_124191C.1.pep
MAASSLLRSALLAPSSCDRPKVYTNASSSNLKSKGLHSSIFGTSIQCDSLVLQNCNGRGIQPIKATATEIPLPTQQSRSTGKTRVGINGFGRIGRLVLRVATFRDDVDVVAINDPFIDAKYMAYMFKYDSTHGPFKGSINILDDSTLEINGKHVKVVSKRDPAEIPWSDFGADYVIESSGVFTTVEKASSHLKAGAKKVVISAPSADAPMFVVGVNEKTYNPKMDIVSNASCTTNCLAPLAKVVNEEFGIVEGLMTTVHATTATQKTVDGPSMKDWRGGRGAAQNIIPSSTGAAKAVGKVLPELNGKLTGMAFRVPTPNVSVVDLTCRLKKNASYEDVKAAIKYASEGPLKGILGYTDEDVVSNDFVGDSRSSIFDAKAGIALSASFVKLVSWYDNEWGYSNRVLDLIEHMALVGAQN

SEQ ID NO: 169633 - protein, 77 aa, Glycine max
  Clone ID: PAT_MRT3847_124192C.1.pep
SRSETLEATIFVLLLLLVDTEMMGPTMEADARTCEYQRHRFKGPCLSDTNCGFFCQNEQATGGHCLGFRRRSRCTKH

SEQ ID NO: 169634 - protein, 48 aa, Glycine max
  Clone ID: PAT_MRT3847_124193C.1.pep
YVVMNGKLRFRHRDSFGFYVEFLAMSSKKSPSWFLTPMGRYLFSIKGG

SEQ ID NO: 169635 - protein, 248 aa, Glycine max
  Clone ID: PAT_MRT3847_124194C.1.pep
SARAPGLNILAAWSPASAGMKFNIISGTSMSCPHITGIATLVKAVHPSWSPSAIKSAIMTTATILDKHHQPIRADPDRRRANAFDYGSGFVNPARVLDPGLIYDSHPEDFVAFLCSLGYDQRSLHLVTGDNSTCDRAFKTPSDLNYPSIAVPNLEDNFSVTRVVTNVGKARSIYKAVVVSPAGVNVTVVPNRLVFTRIGEKIKFTVNFKVVAPSKDYAFGFLSWKNGRTQVTSPLVIKVAPASHGLVR

SEQ ID NO: 169636 - protein, 62 aa, Glycine max
  Clone ID: PAT_MRT3847_124195C.1.pep
GFMLPLHVDCLAVFLFLHFFNKNAHPNLRFLANLTCYFTAFFFILPLVYTTLCISLHAGLLL

SEQ ID NO: 169637 - protein, 72 aa, Glycine max
  Clone ID: PAT_MRT3847_124196C.1.pep
GRPSLIKNIVRTTKTSHLLFAPKTLRKLKMLHPSSIKTSITWITSTTFTNRNIYLPRVLLLHIKTGKKFPFE

SEQ ID NO: 169638 - protein, 57 aa, Glycine max
  Clone ID: PAT_MRT3847_124197C.1.pep
NQEKLMKMAGSAGTGGKGTERRKKKAGHKTTTADDERLYSTLERIGVNAIPAIEEVN

SEQ ID NO: 169639 - protein, 50 aa, Glycine max
  Clone ID: PAT_MRT3847_124198C.1.pep
IEYLLHPAVSASVADICTPSDRQSQNLGIKSHSQALYSKHSMFDCDTQRK

SEQ ID NO: 169640 - protein, 92 aa, Glycine max
  Clone ID: PAT_MRT3847_124199C.1.pep
FLLGKLEEAHQRSFFRLRTKISKALMEVFSSKNRKLGWLLKAQKIGSGGSFQGFLILSQWKVGPFKRKEWEGIMNRKKPLIQVELKKGRFPG

SEQ ID NO: 169641 - protein, 101 aa, Glycine max
  Clone ID: PAT_MRT3847_12419C.1.pep
LYDDSLFHYHLNYAGHSTTVEEDTTFLIMISHLSQNTTPCHPKALLAPPYTQALCNRLPLYHEIGLLEWLTWLKDTIPSQGSIMHLPLPADITTIFNSWST

SEQ ID NO: 169642 - protein, 367 aa, Glycine max
  Clone ID: PAT_MRT3847_1241C.1.pep
MAWHSFLLLATAILAVVCSAVSGCSPSDRAALLAFRKALSEPYLGLFNSWTGSNCCLDWYGISCDATTGRVTDINLRGESEDPIFEKAGRSGYMTGKLSEAICGIDTLTTLVVADWKDIAGEIPTCVTALPSLRILDLIGNKLSGEIPADVGKLSRLTVLNLADNALSGKIPASITQLGSLKHLDLSNNQLCGEIPEDFGNLGMLSRMLLSRNQLTGKIPVSVSKIYRLADLDLSANRLSGSVPFELGTMPVLSTLNLDSNSLEGLIPSSLLSNGGMGILNLSRNGFEGSIPDVFGSHSYFMALDLSFNNLKGRVPSSLASAKFIGHLDLSHNHLCGSIPLGAPFDHLEASSFTSNDCLCGNPLKTC

SEQ ID NO: 169643 - protein, 98 aa, Glycine max
  Clone ID: PAT_MRT3847_124200C.1.pep
AASLIDRDHRTPPLRNGHKMANMTSCEESTQFLPTYYGTIAGGKANHSLSWTETTRIILCGTVKIFAGHWTHRYRTWCQRKTTCENDSGRVESASPSW

SEQ ID NO: 169644 - protein, 210 aa, Glycine max
  Clone ID: PAT_MRT3847_124201C.1.pep
MSLDSSRSGNSKRSFSNSISSNDYIKKKKKKKTTPNQKTLGAAWGSKSNSRKPAFSDFASYMTEKNRKLHNQFEAQASTSSLTLSASLFSGVSIFVDGFTIPSNQELRSYMLKYGGRFENYFSRHRVTHIICSNLPDSKVKNLRAFSAGLPVVKPTWILDSVAANRLLSWVPYQLDQLANNQPKLSAFFTLKSSKMSEDAYTNDLCQVVS

SEQ ID NO: 169645 - protein, 42 aa, Glycine max
  unsure (1)..(42): unsure at all Xaa locations
  Clone ID: PAT_MRT3847_124202C.1.pep
XLXXXXSXXAMHILXADCRRGVLQSYYXXXPMSSXVRTXNXK

SEQ ID NO: 169646 - protein, 56 aa, Glycine max
  Clone ID: PAT_MRT3847_124203C.1.pep
GKKKRPRPLKSPGYLGGNNILSFLLAPKLGPCNRGRDMFIWMVWASSPWVPLVYLG

SEQ ID NO: 169647 - protein, 192 aa, Glycine max
  Clone ID: PAT_MRT3847_124204C.1.pep
MVLWEITLGTAYFLGLKRTYRLALRIQRRIVSPKYPKLLQFLHRRTRAVFDVAIRVHRNIQVRDIEVGRNFGNFILRWLDRMKPSAQIRGPPPSNGITSRESVGKRLSAGRSSNQKGSGTSRRDSDRHLFTSSRIMHFPTVARMMRPPNPAGITIHGRHFSTSTPQTVGSIYRVNWSEGVIRKDIMQWLRHN

SEQ ID NO: 169648 - protein, 41 aa, Glycine max
  Clone ID: PAT_MRT3847_124205C.1.pep
TMILMAPSSTCITCLLLTTLLGAFQSRGRYCPILIHEIHTY

SEQ ID NO: 169649 - protein, 90 aa, Glycine max
  unsure (1)..(90): unsure at all Xaa locations
  Clone ID: PAT_MRT3847_124206C.1.pep
SVHLCLFGRKRLHLFCAVMLLLVCDSGGLGSVLVCFVAQFARIVWLVAVVSPHSSPAFAWVLLLVXXXCRVSAVIFRWLPRXRWLAPGVV

SEQ ID NO: 169650 - protein, 162 aa, Glycine max
  Clone ID: PAT_MRT3847_124207C.1.pep
DFPKINLTAPASSVFIKIQKKKVEVVFRWQIGPLQAEGGSYFTHGDGGAPGCGSVMDRPSHLARTPAGETQASCQRVQVGPRVGWVCRLPLGLAHTKYKPGPAPHNGSQPTLGNRVSTSTSTMLWNAGDPKTGESRGLYCDHAADGGLFITFSPVPTAKQVI

SEQ ID NO: 169651 - protein, 48 aa, Glycine max
  Clone ID: PAT_MRT3847_124208C.1.pep
IKLTHCQIFLLVVLLFRAPTEKIHPRNGDSSYPNNPKAHFNFEAPAKG

SEQ ID NO: 169652 - protein, 68 aa, Glycine max
  Clone ID: PAT_MRT3847_124209C.1.pep
PKLPSGFNIDSSWGCCPACLRLKNDTLGSGIFFPLVLKGFKDLKGKKTLPPRYYYYYLKQIFMYCIVN

SEQ ID NO: 169653 - protein, 73 aa, Glycine max
  Clone ID: PAT_MRT3847_12420C.1.pep
KDPQGNLSKLYLRGPFLDSKRSKSNQFPNPSLIQIEGVIAKKKVPCVAAKKLAYIYKAKVKKIGSHYRCFWGK

SEQ ID NO: 169654 - protein, 108 aa, Glycine max
  unsure (1)..(108): unsure at all Xaa locations
  Clone ID: PAT_MRT3847_124210C.1.pep
MDKRMRTALGKGQKIDLITRVXPLSTWTLLGLATVRGGKGYEIXLSCNATNAMLRRLHENCKRDKYQVEEGPLCIGELVCAILYTSIKGVTSEQCVCFMYLSGYTTSI

SEQ ID NO: 169655 - protein, 168 aa, Glycine max
  Clone ID: PAT_MRT3847_124211C.1.pep
MLVYQDLLTGDELLSDSFPYKETENGMLWEVEGKWVVQGAVNVDIGANPSAEGGDEDEGVDDQAVKVVDIVDTFRLQEQPPFDKKQFITYMKRYIKLLTAKLEGEQQELFKKHIEGATKSLLSKLKDLQFFVGESMHDDGSLVFAYYKEGATDPTFIYFAYGLKEIKC

SEQ ID NO: 169656 - protein, 106 aa, Glycine max
  Clone ID: PAT_MRT3847_124212C.1.pep
SCSFLECEDTSSTIFVMLSGRSSLSYNRSTLLVAVAIQELYQPLQLPHLHSVPVSHIIERAGVRVHFDVLVIGHGAVFGLIVVAVSATICILCGHYGCDAQVVLVV

SEQ ID NO: 169657 - protein, 90 aa, Glycine max
  Clone ID: PAT_MRT3847_124213C.1.pep
LDMVEKLPQQGVYLFKGSYRIVLNSLTQKCELKRAKELLGLMLRRGFQPHYATSNELLVCLCKAGMVDDAAVALFDLVEMGFQPGLETWE

SEQ ID NO: 169658 - protein, 56 aa, Glycine max
  Clone ID: PAT_MRT3847_124214C.1.pep
RPLCLHRRPHHSPNAAYPRGHHSLNPSRRRSCLTLIQYSCTPPLILKDNKNPQTII

SEQ ID NO: 169659 - protein, 45 aa, Glycine max
  Clone ID: PAT_MRT3847_124215C.1.pep
TKPPSKKPFFLDTQQLFDQLFMTKIKHDPFKTTSGSYENYEQFEA

SEQ ID NO: 169660 - protein, 135 aa, Glycine max
  unsure (1)..(135): unsure at all Xaa locations
  Clone ID: PAT_MRT3847_124216C.1.pep
AVFTPTLNLAISSSTYCCRRRTSSTTRRVVTVRASSTEKDESKDKDASAFNPFGFVTDNPSSRNAIQLPENPAEDGNVGQMLYGQQXGRRGTIVFLHGAPTQSFSYRVVMSQLSDAGFHCFAPDWIGFGFSDKPQ

SEQ ID NO: 169661 - protein, 33 aa, Glycine max
  Clone ID: PAT_MRT3847_124217C.1.pep
IFSHFFNIFFFFFFFFFFFFFFFFFFFFFFLNF

SEQ ID NO: 169662 - protein, 74 aa, Glycine max
  Clone ID: PAT_MRT3847_124218C.1.pep
SHEGGVQESFYSGRHMGGLHQGKGHTPSDRVLHHRKGLDTRMAMVNPWPKGSSKDVVEGEIMPGHYRGGFEWEA

SEQ ID NO: 169663 - protein, 375 aa, Glycine max
  unsure (1)..(375): unsure at all Xaa locations
  Clone ID: PAT_MRT3847_124219C.1.pep
MVFSAVFTPTLNLAISSSTYCCRRRTSSTTRRVVTVRASSTEKDESKDKDASAFNPFGFVTDNPSSRNAIQLPENPAEDGNVGQMLYRIEDKGKEYGSYVKSGKLRWFVRETGSANGRRGTIVFLHGAPAQSFSYRVVMXSQLTDAGFHCFAPDWIGFGFSDKPQPGYGFNYTEKEFHDALDKLLEVLGVKSPFFLVVQGFLVGSYGLTWALKNSSKISKLAILNSPLTDSSPIPGLFQKLRIPLYGEFTSQNAIIAERFIEGGSPYVLKNEKADVYRLPYLASSGPGFALLEAARKANFKGTFSEISAGFTTERWDKPILLAWGLSDKYLPQSVAEQFQKGNPAQIQLKLIEGAGHMPQEDWPEKVVDAFRMFF

SEQ ID NO: 169664 - protein, 29 aa, Glycine max
  Clone ID: PAT_MRT3847_12421C.1.pep
IPDDVRCFNLESGAAGLEVSLCVFPLLPY

SEQ ID NO: 169665 - protein, 58 aa, Glycine max
  Clone ID: PAT_MRT3847_124220C.1.pep
LNFFFIKGGGPSLRWHGPKKMVHLYEWEPLLGVRRKLFINTALLKLCKRRLFSQLGAK

SEQ ID NO: 169666 - protein, 141 aa, Glycine max
  Clone ID: PAT_MRT3847_124221C.1.pep
MFPPRTTSSQFPKKSARMLIVPVMMRVMPKEDDDEEPHPKNKKADLGKKRPNESASKTPVSSKKAKNATPEKTDGKKGGHTATPHPAKKGGKTPSSEAKAKTPNNEAKTPMSGGLSCKSCSKSFNSESGLQQHNKAKHGGQ

SEQ ID NO: 169667 - protein, 309 aa, Glycine max
  unsure (1)..(309): unsure at all Xaa locations
  Clone ID: PAT_MRT3847_124222C.1.pep
MEFWGAEVKVGESVKVDPAEFEACIHLSQAALGEAKKDKSNEPVVLYLKVGQQKFVLGTLSREKIPQIPLELVLEKEFELSHNSKNASVHFCGYKAFYDAGDDSEEDEFTDSEEDVPLLKAENGKPETKAEELKVPESKKAVAKASASAKQVKIVEPKKDNEEDSDDDSDEXDDFGSSDEEMEDADSDSDDESDDKEDDDEETHPKNKKADLGKKRPNESASKTPVSSKKAKNATPEKTDGKKGGHTATPHPAKKGGKTPNSEAKAKTPNSEAKAKTPKSGGLSCKTCSKSFTNESGLQQHNKAKHGGQ

SEQ ID NO: 169668 - protein, 309 aa, Glycine max
  Clone ID: PAT_MRT3847_124223C.1.pep
MEFWGAEVKVGESVKVDPAEFEACIHLSQAALGEAKKDKSNEPVVLYLKVGQQKFVLGTLSREKIPQIPLELVLEKEFELSHNSKNASVHFCGYKAFYDAGDEYPCQLLIDEFTDSEEDVPLLKAENGKPETKAEELKVPESKKLLPRLVHQQNKSRLLNRKKDNEEDSDDDSDDDDFGSSDEKMEDADSDSDDESGDEDDDEETPPKKVDLGKKRPNESASKTPVSSKKAKNATPEKTDGKKGGHTATPHPAKKGGKTPNSEAKAKTPNSEAKAKTPKSGGLSCKTCSKSFTNESGLQQHNKAKHGGQ

SEQ ID NO: 169669 - protein, 408 aa, Glycine max
  Clone ID: PAT_MRT3847_124224C.1.pep
PRVRPRVRNYFVFCLSFGALIAVTFVVWVEDNKGWEWGFGISTITIFVSIPVFLAGSTTYRSKIPSRSPLTTILKVLVAASLNSCFNSRNSSSAVVNMTSSPSNLNSGRKQVGKEASNIANKEPEAPITNTLKFLNKAVENNPIYSSIKCTVEQVEDVKIVLKVLPIFACTIMLNCLLVQLLCFSVEQVVTRDTKLGTLKVPPASLPIFPVLFIMVLAPIYDHIITPFARRVTKTEMRITHLQRIGIGLVLSVVAMAVAAVVEVKRKRVAIMATHSNSLLDDATKPLPITFFWIAFQYLFLGSADLFTLAGLLEFFFTEAPSSMRSLATSLSWASLAVGYYLSSAIVSIVNSVTGNTSHRPWLSGTNLNHYHLERFYWLMCVLSALNFLHYLFWAIRYKYRGTGTTNN

SEQ ID NO: 169670 - protein, 68 aa, Glycine max
  Clone ID: PAT_MRT3847_124225C.1.pep
FAKYHLFRNISMNLVFLYVYFFPCHMKKNLQSLPLIAVSFMKNNHCDFQNSDRCTSRSISVIVTRYLT

SEQ ID NO: 169671 - protein, 90 aa, Glycine max
  Clone ID: PAT_MRT3847_124226C.1.pep
KPDTWDNGGVDRKNEDRYRKANNVYKGGAKKSAAQPWKKILTGEKPRSEKKTKQLNDRNQKYQRPGSLRREGTNMNCGSPYRHANKGKKL

SEQ ID NO: 169672 - protein, 184 aa, Glycine max
  Clone ID: PAT_MRT3847_124227C.1.pep
HASVRLREDDRREEKGLSSSVEDKVSCVGDKVVVVEKVSSVEDKQVVSKTIEQGKRVVEPVEEEKTVTITRSVKLVFGEDIRWAELPVNCSVKLVRDIARDRYPGLKGALVKYKDKEGDLVTITATDELRLAEKSAPEKASFRLHITEVSPDQEPSYDGNGTTNGDEVRRGDGKPSDGAENGDM

SEQ ID NO: 169673 - protein, 357 aa, Glycine max
  Clone ID: PAT_MRT3847_124228C.1.pep
DPRVRRRTPTLTKSVFAAVTASRTSRSRSHSARRLFPAIPRASENSLSRSQIIDPTNVASAKFLSRSFTRTFHATNPSLRSAASSQVAQTDFTDMAWEGIVGAVDAARVSKQQIVESEHLMKALLEQKDGLARRIFTKAGLDNTSVLQATEDFIAKQPKVTGDTSGPVVGSHFSSLLDNSRKYKKEMGDEYVSVEHLLLAFHSDKRFGQQLFKNLQLSEKALKDAVQAVRGSQRVTDQNPEGKYEALDKYGNDLTELARRGKLDPVIGRDDEIRRCIQILSRRTKNNPVIIGEPGVGKTAIAEGLAQRIVRGDVPEPLMNRKYRGDFEERLKAVLKEVTASNGQIILFIDEIHTVVG

SEQ ID NO: 169674 - protein, 49 aa, Glycine max
  Clone ID: PAT_MRT3847_124229C.1.pep
PNCVYRSISAARNTMPKDKAEMGALPLYSPGTENALATNVYVLRNKLND

SEQ ID NO: 169675 - protein, 417 aa, Glycine max
  Clone ID: PAT_MRT3847_12422C.1.pep
MWLGFAGGHGTQNTQVFLAANFFSCHLRSLRTNTSNDTVLGFVGFRSSFFLPQVMATLKSVCFRGSTFPVCPSNFTNTRNTRSSCWRPTQAAVKSNFHLPMRSFELKNRTSPEDIKALRLITAIKTPYLPDGRFDLEAYDDLVNMQIGQGAEGVIVGGTTGEGQLMSWEEHIMLIAHTVNCFGGKIKVIGNTGSNSTREAIHATEQGFAVGMHAALHINPYYGKTSLDGMVAHFQSVLSMGPTIIYNVPARTGQDIPPHVIQTLAESVNLAGVKECVGNDRIKQYTDDGIVVWSGNDDQCHDARWGYGATGVVSVASNLVPGLMRELMFGGVNPTLNSKLLPLIDWLFHMPNPIGLNTALAQLGVIRPVFRLPFVPLPVDKRIEFANLVKEIGREHFVGNKVVEVLDDDDFFLVSRY

SEQ ID NO: 169676 - protein, 471 aa, Glycine max
  Clone ID: PAT_MRT3847_124230C.1.pep
MDITLNQAPDQVQQDQATPISLQPASLMDQTILVDPATPIDLELTMKKIKKKQRKKTTSTELPEISIQTSTCLIEASPIDPAIPMDPCLAISTGPEQEMSKKKKKRKSKLESEAAELNEHYKLPEAAPPEAPVQKSIYHTDAPSIDPVGPSPPVDTETPIDQGQQMTKKKRKKKKRIVIIIEGTETNEHGVKPPETLVQKFAYPTVTTSIDPTIPVPAPPIDQGQKMRKKMRKRSALISKGAEPDEHDDKPPGTPVQRSIHPIAEPSIDPTIPASQTPPVDPATPVDPEPMTKKKRKKKRNSAKNEGLESEKHNADRIAETPVQKTEGSTTENSMGRCNVEPAGKTLVQITDTLRVTKSPFKHHGESSLRCRACRQPGHRFQQCQRLKCLSMDEEVCFFCGEIGHSLGKCDVSQAGGGRFAKCLLCYGHGHFSYNCPQNGHGIDPKVLAVNGAINRTAVEARRELLPRFNM

SEQ ID NO: 169677 - protein, 39 aa, Glycine max
  Clone ID: PAT_MRT3847_124231C.1.pep
ECLIDSSILYLPDPTTVVIMGGGDGPSAGATLKHRSMHR

SEQ ID NO: 169678 - protein, 61 aa, Glycine max
  Clone ID: PAT_MRT3847_124232C.1.pep
YSGLHVQCASWFLSYPAMRASTMCLCIARGAYTDAMEIVLCRSCDEDGDRLLSGIASGRRE

SEQ ID NO: 169679 - protein, 101 aa, Glycine max
  Clone ID: PAT_MRT3847_124233C.1.pep
DRDPSSALNLVCFCCFYNCLCCRMGHPVVSGTGFSFLMFDTFCWIQVVYVRLMLLAQNNVVTAFANQHDLLFASLKKKKKKKKKKKKKKKKKKKKKKKKGA

SEQ ID NO: 169680 - protein, 69 aa, Glycine max
  Clone ID: PAT_MRT3847_124234C.1.pep
KRRGFKKPFVLISGLRKNLMSGGLVTHKKRQLLYSLDKKSFYLNPFHCPWGDLVTPKNMKAKKMYFFFA

SEQ ID NO: 169681 - protein, 102 aa, Glycine max
  unsure (1)..(102): unsure at all Xaa locations
  Clone ID: PAT_MRT3847_124235C.1.pep
FQPHIVPTSAMSPPPFSPPLSISLLFVFLLAPLLLAQSPPSPSPSSSSSSSVACTCTXSHQLCRSILSVIRSSPSDPYGYGRFSISQSLSQARVLTKVFEDF

SEQ ID NO: 169682 - protein, 40 aa, Glycine max
  Clone ID: PAT_MRT3847_124236C.1.pep
NSPPPPPPPPPPPPPPPPPPPPPPPPPPPPRRRTYTHVEG

SEQ ID NO: 169683 - protein, 56 aa, Glycine max
  Clone ID: PAT_MRT3847_124237C.1.pep
NYFTEVLFVFNYFSCLKHATCSPCLLMYLLMYIISRKHTHSTVVGRNVLQFIELIL

SEQ ID NO: 169684 - protein, 94 aa, Glycine max
  Clone ID: PAT_MRT3847_124238C.1.pep
KEPDKSVIDTNVEKLKKVLYVYEAKLSSTKYLAGDFYSLADLSNVFETHYLMQTPCASTVNERPHVKAWWENIFSRPAFTKVVGGMTFGQNQEE

SEQ ID NO: 169685 - protein, 89 aa, Glycine max
  Clone ID: PAT_MRT3847_124239C.1.pep
EGLCGWTKSFIIEILSRHASDEFYLGQIDGGDYWTSDAGPLEAFKMFGKNLEEIEKKLIEKNNDETLRNRYGPAKMPYTLLYPSSEEGL

SEQ ID NO: 169686 - protein, 53 aa, Glycine max
  Clone ID: PAT_MRT3847_12423C.1.pep
YEGTLEDDFLTTLYYGMPTSFGMGLAMHRLGMLFTNSPRILVVIGFAVLMGQQ

SEQ ID NO: 169687 - protein, 300 aa, Glycine max
  Clone ID: PAT_MRT3847_124240C.1.pep
MDLETENRLAAMLMREAAELRRQSEREGVLAYLRKPNIRTRPNSRFLTATVRGVQQANRAVEVNEMWRLRQKELELDKRVKEKSLGKSSRDRSHGDDNSSRGTGRHASIDNSTSSSSASCSGKREYELEKWVKDTSKDKSSSERSHRDGNSSRSAGRHAVVDKSTIAYTSSSSERAHEHGLEGLKDDELEEFLHSRTKRGRGAVGPRMDETGPYLPHSDREPNTSPDVRERRVIYGPEKPLSLRPYESSDEEELHEQRRKKSKKSHSKNSDKERSKKHRSKDKSKHKKKKREEKRSKHHH

SEQ ID NO: 169688 - protein, 295 aa, Glycine max
  Clone ID: PAT_MRT3847_124241C.1.pep
MDLETENRLAAMLMREAAELRRQSEREGVLAYLRKPNIHTRPNSRFLTATVRGVQQANRAVEVNEMWRLRQKELELDKWVKEKSIDRSHRDDKSSRGTGRHADIDNSTRTSSASCSSKREYELERWVKDTSKDNSSSERSHNHGNSSRSPGRHAVVDKSTIAYTSSSSERAHEHGLEGLKDDELEEFLHSRTKRGRGAVGPRMDETGPYLPHSDREPNTSPDVRERRVIYGPEKLLSLRPYKSSDEDELHEQRRKKSKKSHSKNSDKERSKKHRSKDKSKHKKKKREEKRSKRHH

SEQ ID NO: 169689 - protein, 41 aa, Glycine max
  Clone ID: PAT_MRT3847_124242C.1.pep
CVHLSPMEVCVLCFGPELGYLNSRNVRLCLKKRGPTPLWCI

SEQ ID NO: 169690 - protein, 75 aa, Glycine max
  Clone ID: PAT_MRT3847_124243C.1.pep
SSWKSCMEFTTLSVLDSNIKCLYPLIPHTEAIGELRAFKRAVSMNYKECPMLYLNFSNVRVNVICPDISLIIPES

SEQ ID NO: 169691 - protein, 65 aa, Glycine max
  Clone ID: PAT_MRT3847_124244C.1.pep
THNSNDRLGYQVRPAKEQEVFGFYFTVHYKEILVAGQPELLRKRPVYTNVFFRGNRTNKKCTSGG

SEQ ID NO: 169692 - protein, 55 aa, Glycine max
  Clone ID: PAT_MRT3847_124245C.1.pep
KEKRPEQKKLALKLCGWLNRTYKGKNILKTKFSMFYLHFIFQNFFSLLFFPLIQI

SEQ ID NO: 169693 - protein, 966 aa, Glycine max
  Clone ID: PAT_MRT3847_124246C.1.pep
MEREKTENATKGETDMLLTSSPEGIALPITCHKLNGQKFIQWERSIRIFLQGKGKGRYISGDPKQPEKRDSNLQKWQLENSLVMSWLLNTMTNEIGENFMDLDEVRGRVLGTKPDPKLREVFSEVRREESRRKFMLGNITLAPYIENSALASGGNQTRPPQKKNRPWCDHCRKLGHTKETCWDIHGKPLDAKSFRNKETRGNTTYNTSQEGEVSSDPSPFSREQIESLQKLLQQTLLSTRKPTSTTKVAQKGNFSHTLNTSKGKRRSWIIDSRASDHMTGDITVFDNYSPCHEHSTVRIADDTLSKVVGKGSVVILEHITLNFVLYVPKLDCNLLFISKLINDLNCVTKFSHNVCVFQILRSGKTIGSAEECDGLYLLQEKSEVGQILEIFHTMVQTQFQTNIKKNGIVHQSSCVDTPQQNGVAERKNRHLLEVTRSLMLATNVPKQFWGEVVLSATYLINRVPSSVLNFNTPHTVLQTTYPTNKSLTSIPLKVFGCSYFVRNLDPHRNLEKDEMAAPLETTETAPAEPEIEETISAVLTEIASAKPEEAQPRSQDQNWRVYVRKRRNQKAGYKAFVALLDSTHVPRNIQEAFQHPKWTTTVNEEFQALAKNNTWEITTLPKGKRLVGCKWIFTIKYNVDSSINRYKAKLVAKGFTQSYGVDYEETFAPVAKLNSLDIKNVFLNGELEEEVDIQIPPGCEAANTSNKVCKLRKSLYGLKQSLRAWFERLTRAVKKEGFTQCQSDHTMFVKHSLEGKVTLFIVYVDDIVITGDDHNQINPLKSFLAREFEHGIYMSQRKYTLDLLQEIGMLGCKEANTPIEPTNQNNFEDDSPPSDKTRPDIGFAVSMASRHMSNPTDVHEKAMRRILQYLKGTLGKGLYFKKNSDKGIEQACLAELELVTGRLVDVDALSVRSDKGCAFDRKSTTGYCTFVWENLVTWRSKKQSMVARSSAEAELRVMAHDICEGI

SEQ ID NO: 169694 - protein, 50 aa, Glycine max
  unsure (1)..(50): unsure at all Xaa locations
  Clone ID: PAT_MRT3847_124247C.1.pep
LKRHIHKKAKPISCRCVRYHITPLVLYRVHSRITHSLNMPFTQYRLPHXX

SEQ ID NO: 169695 - protein, 62 aa, Glycine max
  Clone ID: PAT_MRT3847_124248C.1.pep
NGRLFFFFFFFFFGEGIKGPLHLKGEVFFFPYRNNLGDIFNLNIVNKTKFLTFGVTFPVLET

SEQ ID NO: 169696 - protein, 539 aa, Glycine max
  unsure (1)..(539): unsure at all Xaa locations
  Clone ID: PAT_MRT3847_124249C.1.pep
GTLSKVFGKGSVVISEDITLDLVLYVPKLDCNLLSISKLTNNLNCVIKFSPNVCVFSDXGSGKMIGSAKECEGLYLLXVKDSNKKHKANSCVVIPSKSEESVILWHYRLGHPNFMYLKXMFPSLFNKRLRNSHCETYXLSKHTRSTYPLQPYKPSQPLSVIHSDVSGPSRASNMTSSRWFVMFIDDHIRVTWVFLMKEKSEVGXIFEIFHTMVQTQFQTNIKVLRKNNGRPSDXYPTSKILTSIPLEVFGCSAFVHNLDPHHSKLDPKSIKSIFLRYSPHQKGYKCYSSKKSIXTMDVTFFEHQPYYPKVGIQGEKXQFLTDITKFQLLESEKDEMDAPLETAKLKIEETVSAIPIETASTEPEEAQPRSQVQNXRVYIRKRRNQKAVEPIAVPMQSHESDQAPKNEIPTGNSVPISESIHTNTSNLDMPISLRKGVITCTQHPIEKYMSYGKLSQGYKAFVALLDSTHVPRNIQEAFQHPKWTALVNEELQVLGKNNTXEITTLPKGKRPVGCKWDFTIKYNADGSIKSVQARLMAKD

SEQ ID NO: 169697 - protein, 73 aa, Glycine max
  Clone ID: PAT_MRT3847_12424C.1.pep
LRMNAMAKTTKNCLWTCILCSAVPTPLPFHVPIASLALYHTTQPECLTVGYIRIEDSSELVLRDQYIYESITA

SEQ ID NO: 169698 - protein, 277 aa, Glycine max
  unsure (1)..(277): unsure at all Xaa locations
  Clone ID: PAT_MRT3847_124250C.1.pep
IHSDVWXPSRASNIIGSRWFLTFIDDHTRVTWVFLMKEKSEVGQILEIFHTMVQTQFQTNIKVLRIDNGREYYNSMLNFYLQKNGIVHQSSCVDTPQQNGVAERKNRHLLEVTRSLMLATNVPKQFWGEVVLSATYLINRVPSSVLNFNTPHTVLQTTYPTNKSLTSIPLKVFGCSYFVRNLDPHRSKLDPNSIKSIFLGYSPHQKGXKCYSPTTRKFYHTMDVTFFEHRPYYPKVGIQGEKMPVLTDMTEFQLLDLEKDEMAAPWRLQKLILQACK

SEQ ID NO: 169699 - protein, 241 aa, Glycine max
  Clone ID: PAT_MRT3847_124251C.1.pep
VDRKEQQIFLDLACFFLRTHTTVNVSNLKSLLKGNESQETVTFRLGRLKDKALITYSDDNVIAMRDCLQGMAVASVRRQACGAPRGPCRLWVPYHLWEAVINVSSTKAIRSILIHLPTFMKQELDPHIFGKMNRLQFLEISGKCEKDIFDEHNILAKWLQFSANELRFLCWYRYPLKSLPEDFSAEKLVILKLPKGEIKYLWHGVKNLMNLKELHLTDSKMLEELPDLSNSPNLEELVLQG

SEQ ID NO: 169700 - protein, 514 aa, Glycine max
  unsure (1)..(514): unsure at all Xaa locations
  Clone ID: PAT_MRT3847_124252C.1.pep
GSSLEANAGMVSQIRVARPPAEGRGRNQLLPRYWPRITDQELQQISGDSNSTIVPLFEKMLSASDAGRIGRLVLPKACAEAYFPPISQPEGLPLRIQDVKGKEWMFQFRFWPNNNSRMYVLEGVTPCIQSMQLQAGDTVTFSRMDPEGKLIMGFRKATNSTAVQLQKGCSETHLNALSKKWNSAGGDMSWHNIDMPESRKRDELPLPPVMVPEKKRTRNIGSKSKRLLIDSQDALELKLTWEEAQDLLRPPPTLHFLXPSFVALKNHFPRDLDKLLRLKKEFKYESLSARQRLALEHESSGLDALANAAILGDDASDSGRTPVVTTTKHPRHRPGCSCIVCIQPPSGKGKHKPTCTCNVCMTVKRRFKTLMMRKKKRQSEREAEIAQRNQLSWRTKDESEVDSTSRHLTPVDAAKGQLDLNCQPDREDVQAGPNSLSMTSLLEEANLPLETYLKRNGLSSLISEQQTNSASNVQAQTTNDSEVKHNEDCGTASVIHEQESSPEENSGQDKEQNN

SEQ ID NO: 169701 - protein, 197 aa, Glycine max
  unsure (1)..(197): unsure at all Xaa locations
  Clone ID: PAT_MRT3847_124253C.1.pep
QRPAGDTVTFSRMDPEGKLIMGFRKATNSTAVQETLPSNMPNGSHSSETSYSGVYENLPILSGYSGLLQSQKGCSETHLNALSKKWNSAGGDMNWHSIDMPESRKRDGLPLPPVMVPEKKRTRNIGSKSKRLLIDSQDALEVKLTWEEAXQDLLRPPPTVKPSIVMIEDHVFEEYEEPPVFGKRSRFGSSAMGSQGK

SEQ ID NO: 169702 - protein, 100 aa, Glycine max
  Clone ID: PAT_MRT3847_124254C.1.pep
SCLLSYVRVIPMDTAIYIKTDRQVALFRALHGHLHRAAKLALLRRNLKCRVTYYHSSSNCCRMPSSFGCEPTPIWLGSFRGLLPLTPRCIMSFEAYLATS

SEQ ID NO: 169703 - protein, 27 aa, Glycine max
  Clone ID: PAT_MRT3847_124255C.1.pep
LIIMLHDVRVQAVTSAEGAGDHMDQHH

SEQ ID NO: 169704 - protein, 88 aa, Glycine max
  Clone ID: PAT_MRT3847_124256C.1.pep
FPRIPCALRGLSSKLSQCGTQMSALVNQYISAVAFTVMIANVVIVVSRSPDPVMVTCSVRDISVTQMKLPSERCSSPSVDTLGGVRTR

SEQ ID NO: 169705 - protein, 105 aa, Glycine max
  unsure (1)..(105): unsure at all Xaa locations
  Clone ID: PAT_MRT3847_124257C.1.pep
MHGSVGRVDRLGALEMGSCPGPIETPVLWLSTAKGLPHLIFPDLRTRIRSPDCHILQISPLHFVEGRAXSTISKVGGLHQKLGLNQSGTAAAARDFIQCLPEAKG

SEQ ID NO: 169706 - protein, 80 aa, Glycine max
  unsure (1)..(80): unsure at all Xaa locations
  Clone ID: PAT_MRT3847_124258C.1.pep
QVAVDQILGVVFIDAERPCPALRKLVRQLADADAALEARKNPAEHAGPQIIGEGLVMQEWXERRERCLAKHQGEVAVDSV

SEQ ID NO: 169707 - protein, 467 aa, Glycine max
  Clone ID: PAT_MRT3847_124259C.1.pep
MEVETHSLSPTFELIHLLSQSTTDTYFPPNNAVNQPSLGHATAALKLQKVYRSYRTRRRLADSAVVAEELWWQAIDYVRLNHSTISFFNLPETAASRWSRVKLNAAKVGKGLSLDAKAQKLAFQHWIEAIDPRHRYGHNLQYYYKEWCKTDSGQPFFYWLDLGNGKNIDLEQCPRSKLRKQCIKYLGPQEREHYEYIVCEGNIIHKQSGDFLHTREDSKDAKWIFVMSTSKKLYAGKKKKGLFHHSSFLAGGATVAAGRLEAEHGILKSISAYSGHYRPTNDALNSFISYLKENGVDIDEVEIRNPKDDTDIYEDGKLSEIATAPEDSSNGNIPELGVSEEADNTTSSNTEEPQLGSVGSYKRTLSGGLQSPRADVPKKAILQRINSKKATKSYQLGHQLSHRWSTGAGPRIGCVADYPVELRLQALEMLNLSPKVPPSPSSYRLVGGLVPPTTNGTRIDTDENSVH

SEQ ID NO: 169708 - protein, 51 aa, Glycine max
  Clone ID: PAT_MRT3847_12425C.1.pep
LVLTSSQIVVVKLVLKRCKMSLPLSLNDFIIRLLRYRFNLSLNLLFDFIME

SEQ ID NO: 169709 - protein, 102 aa, Glycine max
  Clone ID: PAT_MRT3847_124260C.1.pep
LNASHFRKVFRCSCGKLETSVGYDYVEVHVWGDSFMLHQIRKMVGTAVAVKRNLIPRDAILLSLSKFSRIVFPLAPPEVLILRGNAFKMRASAGNTRQEMVS

SEQ ID NO: 169710 - protein, 144 aa, Glycine max
  unsure (1)..(144): unsure at all Xaa locations
  Clone ID: PAT_MRT3847_124261C.1.pep
DSPKRQQLNGNEINERYRGSPDDLILNHKTGKSLGDIIPCSDEXYSECVQKSGRITTGIXVLIRNKSKKNGDMNEAIYSLYFDDYGNIXAHGTYLTYEDTYLDVTGGSGINEEDDDIIELDASEIPFKLLYTSYLNGHGDLPQE

SEQ ID NO: 169711 - protein, 42 aa, Glycine max
  Clone ID: PAT_MRT3847_124262C.1.pep
KPSQCILQFMFYMSENGSDVTFVIYNYKTIYMPVEQRLFKQL

SEQ ID NO: 169712 - protein, 66 aa, Glycine max
  Clone ID: PAT_MRT3847_124263C.1.pep
ACDIARNVLFSTSFRHYFKECNNGPNSAGPRQRPIQKKCSTVNSMLPSICRPQYGVLLNDGYSLFL

SEQ ID NO: 169713 - protein, 101 aa, Glycine max
  Clone ID: PAT_MRT3847_124264C.1.pep
ALPVDNKNIQTRFQKISRIPHRHGGTLAASTGLLPAIRFCLLSMHQISLLCMIMGAVVVLDPLCNPPHNCYCRCSAKTIYESKCGSRQSYHITRFLDHQHA

SEQ ID NO: 169714 - protein, 111 aa, Glycine max
  Clone ID: PAT_MRT3847_124265C.1.pep
MDSEHVLILLESRETLERVKVCLWLTFIVKCDLEVAVYEGVIREKPTSKEEARQFLKDYSGKLAATVGSVLVTNLKTGLRKGDLDRVDVGTTDSMMGLPKALTEKLLKEAL

SEQ ID NO: 169715 - protein, 69 aa, Glycine max
  Clone ID: PAT_MRT3847_124266C.1.pep
HPILGPQTKPAPVTARVIQHRQLANIKEVYARLGVGGFVANDQYRSTDRSAYNATAQAMDVETLDIDTE

SEQ ID NO: 169716 - protein, 68 aa, Glycine max
  unsure (1)..(68): unsure at all Xaa locations
  Clone ID: PAT_MRT3847_124267C.1.pep
XXKLQPFXFHFVPXQSIXIXLXLIXQXNIILXNWPNXSWRKHNXERGXMXRDYSFHFKNLGXTQLVSL

SEQ ID NO: 169717 - protein, 217 aa, Glycine max
  Clone ID: PAT_MRT3847_124268C.1.pep
HASGDVDGNGDECRLCGMDGTLLCCDGCPAVYHSRCIGVMKMHIPEGAWYCPECKINLIGPTIARGTSLKGAEVFGKDLYGQVFMGTCDHLLVLNVKSDDFCLKYYNQNDIPRVLQVLYASEQHRPVYNGICMAMLEYWNISENFLPLCVSKLPPMIEEEHKAVSSVKADYSLTFGNGICDNLVPSLDASLVTTRNPAPGSSGNARTTVNLELHEGN

SEQ ID NO: 169718 - protein, 433 aa, Glycine max
  unsure (1)..(433): unsure at all Xaa locations
  Clone ID: PAT_MRT3847_124269C.1.pep
KTTACKDAETKKYVSELNAEEDDVDGNGDECRLCGMDGTLLCCDGCPAVYHSRCIGVMKMHIPEGAWYCPECKIDMIGPTIARGTSLKGAEVFGKDLYGQVFMSTCNHLLVYXTSFVDGFCLKYYNQNDIPRVLQVLYASEQHRPIYNGICMAMLEYWNISEKFLPICVSRLTPMVEEEHKAVSSVKEEYSLMFGNGICGDNLVPSLDASLVTTRSPAPGSSGNARTTCKGSLTNDFVYMGCSYKPQSYINYYMHGDVAASAAANLAVLSSEDSRSEGHVSGNLGKATSGNTYLLAKAFSQTASRFFWPSSEKKLVEVPRERCGWCISCKASVSSKKGCMLNHAAISATKSAMKILSGLAPVRSGEGIIPSIATYVMYMEESLRGLIVGPFLSECYRKHWRKQVERAKSFSDIKPLLLKVSDCYFESRRFINF

SEQ ID NO: 169719 - protein, 120 aa, Glycine max
  unsure (1)..(120): unsure at all Xaa locations
  Clone ID: PAT_MRT3847_12426C.1.pep
VVPLGTVHGDFKPYFSGTISKRPLTHLFISLADGFVRPIAACPYSKLAPCDRFHRNDEELILDXRIATVASVRLSAHIIAEADIYMLDPWDYPANATYVEQEWYLLSPRDGKHPNGAGPY

SEQ ID NO: 169720 - protein, 63 aa, Glycine max
  Clone ID: PAT_MRT3847_124270C.1.pep
LGGRKGRDEFVGLERNRRARYSSPNSIDNNGLLRLYLGSRRNGSGKGRSNQAHSIARSVLRLY

SEQ ID NO: 169721 - protein, 58 aa, Glycine max
  Clone ID: PAT_MRT3847_124271C.1.pep
VCAKMRNLYKNPDLELKLLGKTSHHSTLERISFMNAHEENDGGALSKLSSADDTTVDQ

SEQ ID NO: 169722 - protein, 87 aa, Glycine max
  Clone ID: PAT_MRT3847_124272C.1.pep
RARIRSPLWTSGLKEDALEVVLKGSHNVGIAMATPHGLVAPNIKNVQSFSIREITKDLAGIQHWVRDNKLTCEEIYGGTITLSNMGA

SEQ ID NO: 169723 - protein, 54 aa, Glycine max
  Clone ID: PAT_MRT3847_124273C.1.pep
RHFLFNIVNLVGAIYCFTSYHTRGSVIRKILVPNANSDFPLFLLRFLVITLSYP

SEQ ID NO: 169724 - protein, 270 aa, Glycine max
  unsure (1)..(270): unsure at all Xaa locations
  Clone ID: PAT_MRT3847_124274C.1.pep
NGCEKTTEGGDNNNTQNQFHTYISTTPWPPPPCSHHHQPFYPXTTTTTTPKPSSSAPPSPSCKPLLPFKQPLTTLTAAAAIATILTTAPAPSLAQESPYQVYYGTAASAANYGGYGGNSSKKDSAEYVYDVPAGWKERLVSKVEKGTNGTDSEFYNPKKKAEKEYLTFLAGFRQLAPKDVILNNLALSDVDLQDLIANADSVTSDEVKDDKGQLYYVYEIDGVGTHSLISVTCAKNKLYAHFVNAPTPEWNRDKDMLRHVHESFKTVGSF

SEQ ID NO: 169725 - protein, 99 aa, Glycine max
  Clone ID: PAT_MRT3847_124275C.1.pep
VSPLAPKDVILNNLALSDVDLQDLIGNADSVTSEEVKDDKGQLYYVYEIDGVGTHSLISVTCAKNKLYAHFVNAPTPEWNRDKDVLRHVHESFKTVGSF

SEQ ID NO: 169726 - protein, 142 aa, Glycine max
  unsure (1)..(142): unsure at all Xaa locations
  Clone ID: PAT_MRT3847_124276C.1.pep
VEWKSGVYVSVPTKTNXVETPREWXLDLPWDKIPSGLTTTEERLVGSEHEGYEPFLGGIXKYATTMTPLDEEILSKGAQDMDEEWIDCDDEEDSFEEDTVRAGLNGAEGLDYLERNTVATCEGVAHVLTRKNGEKRIKRFVS

SEQ ID NO: 169727 - protein, 62 aa, Glycine max
  Clone ID: PAT_MRT3847_124277C.1.pep
KIYIPQFVLFCASAVSFSQPILSSAPFSLVSTNMTKVVNDLSMISASQRANACSFVPNQNST

SEQ ID NO: 169728 - protein, 86 aa, Glycine max
  Clone ID: PAT_MRT3847_124278C.1.pep
NENNKCLNKSNNPSEFIDFPIVGGKTHLTKVQRREAYKTELPNQCKRTSWQSETDDKFCSSNNLSTDNEFCSVNNQSTNEKKGRRF

SEQ ID NO: 169729 - protein, 162 aa, Glycine max
  unsure (1)..(162): unsure at all Xaa locations
  Clone ID: PAT_MRT3847_124279C.1.pep
PIYAFYLELIIXMLHFPMYMCFFLMIFVNYGIPFLLIRQLSRTFCDFKVRVADYIRYRKITSNMNDRFPDATPEELNASDATCIICREEMTTAKKLICGHLFHVHCLRSWLERQHTCPTCRALVVPPENGTTAAAGQQGSQSDVHQRGTTGTGSGSTAPGLI

SEQ ID NO: 169730 - protein, 142 aa, Glycine max
  Clone ID: PAT_MRT3847_12427C.1.pep
NSARARAESARGRSRRSGREDALGACADDGVLAAQCAACHVDVRDHLLERVALAYARPLFVASGSHQRFRAAERRGGGAADGHVSCGWRAFCARVAVGSVVRLLVLSGAELDGAVWLPAAGLDLVLRAGHALCAHHAAPTMD

SEQ ID NO: 169731 - protein, 52 aa, Glycine max
  Clone ID: PAT_MRT3847_124280C.1.pep
CFTLSFIPIINAALKQITGLIYSITHTSINHLPILFNTYIIFLHSLLFYHFH

SEQ ID NO: 169732 - protein, 128 aa, Glycine max
  unsure (1)..(128): unsure at all Xaa locations
  Clone ID: PAT_MRT3847_124281C.1.pep
MRPPTRPPTRPVGLTSSYTPTPLLESGLQKDRGLIVEYFGRMSYVAHNVNQPQEKDLLEGNFSFDIKSRSRLEKVSSTKAQFVSGKTFNYDIFCAGSHSSXDFSEKEDQEKTHNDCCXLRHRIDPQYN

SEQ ID NO: 169733 - protein, 128 aa, Glycine max
  unsure (1)..(128): unsure at all Xaa locations
  Clone ID: PAT_MRT3847_124282C.1.pep
MSSSPLSNVEPNSVTNEHSNTVSDLNRYPSELSSTSSSQSHTVSSPSYNHVLPPQNVHPMQTRFKFGIHQSRLHPSLFMAHCEPKTVKQALADPXWFAAMNQEYEALLNNKTWDLVPLPKDKQVVGCK

SEQ ID NO: 169734 - protein, 110 aa, Glycine max
  unsure (1)..(110): unsure at all Xaa locations
  Clone ID: PAT_MRT3847_124283C.1.pep
MASSMIWDRAVTTVNRAGAGMVAPFTGLKSMAGFPTRKTNNDITYIASNGGRVQCMHVWPPIGKRKSRLFSTWQNLVNPNLPKEVXFLLRKGWIPCLEFELEHGFLYRGP

SEQ ID NO: 169735 - protein, 127 aa, Glycine max
  unsure (1)..(127): unsure at all Xaa locations
  Clone ID: PAT_MRT3847_124284C.1.pep
PDRPIRAFTPENSERGRRGFQTADREXQALTSATSVEQGYNKLVAELRISGPTMGGVACPKDEKLSGRKTQGRPKTRLMTIPSEEINFGVRPKILHMVWTGWNNRDQLDWQVRINPYSMEGTGLGNR

SEQ ID NO: 169736 - protein, 61 aa, Glycine max
  Clone ID: PAT_MRT3847_124285C.1.pep
VLIISALKQDYQKLRRSVNFTVSLPGSSLCCHSCFGCTGKIGPAISHDLTPRSSLLLESGT

SEQ ID NO: 169737 - protein, 83 aa, Glycine max
  Clone ID: PAT_MRT3847_124286C.1.pep
GHDVALGLFHELVDSLCKILPGGGASISRMATNILIDSAYTIPCYIITSTKGVEGSARAVLLSSCYKTFNFRHLYMYLCCLLP

SEQ ID NO: 169738 - protein, 131 aa, Glycine max
  unsure (1)..(131): unsure at all Xaa locations
  Clone ID: PAT_MRT3847_124287C.1.pep
MKGRVRWNEDNIGEIEANKPMRQKITEPKTPYHPMLDDDSSPSPVLGDFDGYNGDKNLSPNAEQTGYNNGAYCSRKGTRQSDGWTSSEDEAEDXXEDDEDRSXSFREHRKAHYYEFRIVKELAQRASLRME

SEQ ID NO: 169739 - protein, 69 aa, Glycine max
  Clone ID: PAT_MRT3847_124288C.1.pep
STKRKKIGCKKRDFSHPSSTMQEKHIKPKCHLIITSLITVPITGQDIKRHHPTCITSPSKNIIKRFQTI

SEQ ID NO: 169740 - protein, 34 aa, Glycine max
  Clone ID: PAT_MRT3847_124289C.1.pep
YPLLTLPVASMGMPPQGFIVAPEGEVIQNSNPCA

SEQ ID NO: 169741 - protein, 54 aa, Glycine max
  Clone ID: PAT_MRT3847_12428C.1.pep
TDLIPVGFPRLSSFLPLEVWNWLASLDIPTTRAYANDSIISLLKYVPFFHLSVS

SEQ ID NO: 169742 - protein, 81 aa, Glycine max
  Clone ID: PAT_MRT3847_124290C.1.pep
MGFFLKIHKIDNLTRKKKKKKKKKKKKKKKKKKKKKKKKKKKKKKKKGAGRLKRNQTYNSIACNVKFFLWGHLKQFHWPKF

SEQ ID NO: 169743 - protein, 76 aa, Glycine max
  Clone ID: PAT_MRT3847_124291C.1.pep
TSSTFALVTHRNIGTFMGQPVARMISYAAVTALTMATSADRSLSSHRLRLSLPNASTIKPSSQSIKSLPCSATAPF

SEQ ID NO: 169744 - protein, 51 aa, Glycine max
  unsure (1)..(51): unsure at all Xaa locations
  Clone ID: PAT_MRT3847_124292C.1.pep
IYFKVIRILLSLLCVECKKLNFXHINQIILDLLLTELKFTKISLIKFYILS

SEQ ID NO: 169745 - protein, 52 aa, Glycine max
  Clone ID: PAT_MRT3847_124293C.1.pep
TRSRDTSFVLSLLTKGVNDVNAVHEQRHMRQPSVPTQVALLNNLFMTWRSTY

SEQ ID NO: 169746 - protein, 177 aa, Glycine max
  unsure (1)..(177): unsure at all Xaa locations
  Clone ID: PAT_MRT3847_124294C.1.pep
RRKEIDXCISNAIHYIENTQXNPDGSWYGCWGICYTYGTWFAVVGLTACGKNYHNSPSLRKACKFLLSKQLPNGGWGESYLSSQNKVYTNLEGNRANLVQTSWALLSLIDAGQAEIDPTPIHRGIKLLINSQMEDGDFPQQEITGVFMRNCTLNYSSYRNIFPIWALGEYRCRVLCG

SEQ ID NO: 169747 - protein, 86 aa, Glycine max
  unsure (1)..(86): unsure at all Xaa locations
  Clone ID: PAT_MRT3847_124295C.1.pep
ARVRKLGIRLEPLLVXXXXXRXXXSXXTKXXQXRXXXTPXWKXVXXXXKKXAXGXKCPVTGKRIXGIPHLRPAEYXRSXXPRNRRX

SEQ ID NO: 169748 - protein, 148 aa, Glycine max
  unsure (1)..(148): unsure at all Xaa locations
  Clone ID: PAT_MRT3847_124296C.1.pep
SLAGKITTGMGVHAFAAKRFXFFGAQLHFVLNXXGXVHGTKLPQGEDWPATETVKHWXSSIDXKASXCLAGLESIAERPRPIPSSSAGATLVSVCEIKXTFPALGRAQGGASLQWPGAVERLAGGVDPSIGFLGSLHNGARGVAVRLL

SEQ ID NO: 169749 - protein, 69 aa, Glycine max
  unsure (1)..(69): unsure at all Xaa locations
  Clone ID: PAT_MRT3847_124297C.1.pep
SLDDRWILVSSFSHVLTFDGVNRVLIGYYASSVKIFLEACHENLLMVGGVVKERVYTFGSVRASSLLAX

SEQ ID NO: 169750 - protein, 60 aa, Glycine max
  Clone ID: PAT_MRT3847_124298C.1.pep
GLLVSYTTRYLIPDLYLHAYELSLGGVALKLVGIITIKTSCEIMQCRDNSTQHTSRKHKW

SEQ ID NO: 169751 - protein, 40 aa, Glycine max
  Clone ID: PAT_MRT3847_124299C.1.pep
LEITLGLADISEDDYPVNKDNHPLEITLGLADISEDDYPY

SEQ ID NO: 169752 - protein, 55 aa, Glycine max
  Clone ID: PAT_MRT3847_12429C.1.pep
LRDFFDVCPQGLYSIMCNAVLTIGLLNGMVSDACNHGNLTNLSRSLYRTKKKGRT

SEQ ID NO: 169753 - protein, 140 aa, Glycine max
  unsure (1)..(140): unsure at all Xaa locations
  Clone ID: PAT_MRT3847_1242C.1.pep
MNAIRSRWLTRMAEDMGKSNLESSSASTTSRGFWPSVLRWIPSSTDHIINAEKRLLSLVKTPYAQEQXDDSPTLVMVHGYAASQGFFFRNFDALASRFRVIAIDQLGWGGSSRPDFTCRSTEETEAWFIDSFEEWRKAKN

SEQ ID NO: 169754 - protein, 58 aa, Glycine max
  Clone ID: PAT_MRT3847_124300C.1.pep
LLKFFLPSYCIFIHPTYSCITKILPLASSTNIFLLMMLPSFLFYLYLRKPINLLEWPS

SEQ ID NO: 169755 - protein, 94 aa, Glycine max
  unsure (1)..(94): unsure at all Xaa locations
  Clone ID: PAT_MRT3847_124301C.1.pep
RDSAGGGXERPAAGEEPGEPPEKEGXQHEPCSVRRFFLVSCSLTRQPSFVWLIWIGIESCDTFSVSYDSIYHAGDPYCISKVCFLKGILFFLLL

SEQ ID NO: 169756 - protein, 60 aa, Glycine max
  Clone ID: PAT_MRT3847_124302C.1.pep
HRDITCATEDPNVTHGSILVLLPLLRQIKPLYGFPFCIGICYPFSINISVELKVGVPILD

SEQ ID NO: 169757 - protein, 400 aa, Glycine max
  Clone ID: PAT_MRT3847_124303C.1.pep
AILLCAFCIFLSNLQSTRGSKQVNCNTLRCGNIDIQFPFGLRGSNQDRGCRYYPVQSFQLSCLHGGTQTILTLPGFGNLTVKSIDYESQSIRVNDPDGCLPKRFLQKWSLSVSDSPFVLNPMIYGTIPFNLTFLRCPSNVTDSSQYPLVPISCLSNNSNYSVIASWSQPIMSSPSLSQQCQVMSRALARLPLLDMPMWPFWPDLNTDLDLVWTEPDCRNCALSGQVCGFSKEKTKTPQVRCFARDSTKGLSRSAKYGLAIGVGIPGLLCLIGISCCICGKLTNRRRSADLPVTISLEPVPFVMGLDGATIDKYPKTLIGESGRLLKPNDNTCAICLSEYQPKETLRSIPECNHYFHADCIDEWLRLNATCPLCRNSPEASSTASFFSLSPTSSSSSRSPQ

SEQ ID NO: 169758 - protein, 61 aa, Glycine max
  Clone ID: PAT_MRT3847_124304C.1.pep
FSPECSNGASKTGCQKVAIKSHVQIKTKNKEKPWQTGNKSTSIKSKQSTDECTTQIIHGIR

SEQ ID NO: 169759 - protein, 56 aa, Glycine max
  Clone ID: PAT_MRT3847_124305C.1.pep
DLPFILFFGSQQDKVFFSIFVVKNNSKGIQFQIPVLIPVISALHRFRFGFGILQGT

SEQ ID NO: 169760 - protein, 111 aa, Glycine max
  Clone ID: PAT_MRT3847_124306C.1.pep
MERLQRMFAGAGGALGHPPPDSPTLDSSEQVYISSLALLKMLKHGRAGVPMEVMGLMLGEFVDEYTVRVVDVFAMPQSGTGVSVEAVDHVFQTNMLDMLKQPRRPEMGVGW

SEQ ID NO: 169761 - protein, 310 aa, Glycine max
  unsure (1)..(310): unsure at all Xaa locations
  Clone ID: PAT_MRT3847_124307C.1.pep
MERLQRMFAGAGGALGHPPPDSPTLDSSEQVYISSLALLKMLKHGRAGVPMEVMGLMLGEFVDEYTVRVVDVFAMPQSGTGVSVEAVDHVFQTNMLDMLKQTGRPEMVVGWYHSHPGFGCWLSGVDINTQQSFEALNQRAVAVVVDPIQSVKGKVVIDAFRLINPQTMMLGQEPRQTTSNLGHLNKPSIQALIHGLNRHYYSIAINYRKNELEEKMLLNLHKKKWTDGLTLRHFDTHSKTNEQTVQEMLNLAXKYNKAVQEEDELPPEKXLAIANVGRQDAKKHLEEHISNLMSSNIVQTLGMMLDTVVF

SEQ ID NO: 169762 - protein, 130 aa, Glycine max
  Clone ID: PAT_MRT3847_124308C.1.pep
HHHLVSPHQCELYDRHGHFNLPLKITPSMSSLEALLSKLPSVVPPTTTQQQPLLPSNSQQQQRRPLEFIMGMQKVAKEELEQEEVYRPELDIGESSSSLPGGGYHQHQHQHHFHQDQNNNVTRSGANNGF

SEQ ID NO: 169763 - protein, 60 aa, Glycine max
  Clone ID: PAT_MRT3847_124309C.1.pep
SLAAKYNKAVQEEDELPPEKLAIANVGRQDAKKHLEEHVSNLMSSNIVQTLGMMLDTVVF

SEQ ID NO: 169764 - protein, 67 aa, Glycine max
  Clone ID: PAT_MRT3847_12430C.1.pep
KHKWMVFSHPGTNNLKPSYFWGFWSCQLPEKIRQTLLFNLYAFIYPKFSETHVQVTRHGYVNKATFL

SEQ ID NO: 169765 - protein, 346 aa, Glycine max
  Clone ID: PAT_MRT3847_124310C.1.pep
FGYGASLSIETYKKQMHLLWYKPELPIICVGEKIQWAQCEDCFKWRKLPASALLPSKWTCSDNSWDPERFSCSAAQELTAEQLENLLPPCNSAVPKKMKATKQDPDNAEALEGLDTLANLAILGEGEALPASAQATTKHPRHRPGCSCIVCIQPPSGKGPKHKQTCTCNVCLTVKRRFRTLMLRREKKQSEKEAETTRKKQQQQHPLPLPSSEILLDEDSLPCSNTGDSSPNQNKEGNDGSDDDPSRIKSSASPFKGKIDLNIQPEREEELSPGSDSGGMMKLLHDATERYLKQQTVNSGTGDSSGSQSQLVGDAMREDKLSNGVAHGSSSHNTDKEHAQSLPMNV

SEQ ID NO: 169766 - protein, 91 aa, Glycine max
  unsure (1)..(91): unsure at all Xaa locations
  Clone ID: PAT_MRT3847_124311C.1.pep
NRERXPTPGPTNHGRPGPGXXGQPXALVSWXRAEGKXHRSEREGXSXXAXXXERXVEXERSPEXXRAPSRXXXXPXXDDPXRGRGKGXXEG

SEQ ID NO: 169767 - protein, 388 aa, Glycine max
  unsure (1)..(388): unsure at all Xaa locations
  Clone ID: PAT_MRT3847_124312C.1.pep
MQNVIDSGGGCKGRDHIIALLICEDLMEEHLTPLAVTHLLQHTLRSLCIHENSQWVYAVFWRILPRNYPPPKWEGQGAYDRSRGNRRNWILVWEDGFCNFAASAAPEVNSGDCSTPPVYGNCEFQPYQGLQPELFFKMSHEIYNYGEGLIGKVAADHSHKWINKEPNDQEINFLSAWHNSADSHPRTWEAQFLSGIKTIALIAVMLXIRAVHKVIEPXHVVLLRKXFSYIESIPGVLLPHPSSSAYPYKIEGGGYGAPEQWHYQGGNNHHHLASPQQTELYDHHGHFNLPLKITPSMSSLEALLSKLPSVVPPTTTQQQPLLPSNSQQQQRRPLEFIMGMQKVAKEELEQEEVYRPIYICVCVCVWGDCCCPVFKKKTLKNYSREDAK

SEQ ID NO: 169768 - protein, 119 aa, Glycine max
  Clone ID: PAT_MRT3847_124313C.1.pep
GLFWHPPSYGPPQNGGGPFFPQNPISRGFFAVNFLKDYFGAGGHFKTCFTQGGPDFPPGSFFPCFRTPKKGSKSATNSGGGGAFKKKVGGEKKKKKKKKTKKKKKKKKKKKKKKKKGRQ

SEQ ID NO: 169769 - protein, 159 aa, Glycine max
  Clone ID: PAT_MRT3847_124314C.1.pep
MEKVREMLRLTQQESVAMSRLNSVPSLRAGDNSSFYEHFILSGIRVDRVQPGLVSCTFKVPSRLADRSGKLASGAIANLVDEVGGAVIHEEGLPMNVSVDMSISFLSSVRVGDELEITSRLLGRKGGYSGTIVLLKNKATGELIAEGRHSLFGRHNSKM

SEQ ID NO: 169770 - protein, 49 aa, Glycine max
  Clone ID: PAT_MRT3847_124315C.1.pep
PAGSCGPPRRLLFCFAPVLWRRLSQLARPYRLHLSSCFLVRPPLFPFVQ

SEQ ID NO: 169771 - protein, 67 aa, Glycine max
  Clone ID: PAT_MRT3847_124316C.1.pep
VFFFFIFFFFFFFFLFFFFIKKNIGVVNPKIFFLFPSFGKNRGGQNKKKVFKGGVKLGGNLKRVIPL

SEQ ID NO: 169772 - protein, 33 aa, Glycine max
  Clone ID: PAT_MRT3847_124317C.1.pep
YTSHADAVIFCFVYMRKGLLDFFLYGFKHQFRN

SEQ ID NO: 169773 - protein, 154 aa, Glycine max
  unsure (1)..(154): unsure at all Xaa locations
  Clone ID: PAT_MRT3847_124318C.1.pep
SKCTGSFLIAPGKSADDTINFEAFPHKLVQSGEIQEKVVSKFTQEELLTAWSTQERPATTLLADGRPXKYAMVHDSTVSTIPGDCAIGVKLATINNMSAYGLNPGIPGSXRLLGTIPQSIXSKLSRNQMATGRTPXLNPDPSKQSYXQFSIDLL

SEQ ID NO: 169774 - protein, 115 aa, Glycine max
  unsure (1)..(115): unsure at all Xaa locations
  Clone ID: PAT_MRT3847_124319C.1.pep
FLFLFFFFFFFFFLVFFXXWWFFFFAFFFKKTRVRATFHFWGELLKNFGPRPRERPPRGVSITPPQNILLFTPGIKPATRVNPPLGTGRGPPHSLPKWYLGNLFEQTIFTVPPSG

SEQ ID NO: 169775 - protein, 55 aa, Glycine max
  Clone ID: PAT_MRT3847_12431C.1.pep
FYLKTIIECDVSKSVFSQNRFRMFFLKKIKNANTSNKYCNHQIWCPCINFSNSTN

SEQ ID NO: 169776 - protein, 130 aa, Glycine max
  Clone ID: PAT_MRT3847_124320C.1.pep
FFFLFLLRGKTLFQFLEDKKMWGKILPTRRGGDQPRIPKRKRRAGDPHLQKIRGFPLFGKHLNKFSGAKGKTPEMITKNQGGVSLCPNPKRGHRNHVGKHSTPLARKKHQLENIRTTRPYFLYTANPPKG

SEQ ID NO: 169777 - protein, 54 aa, Glycine max
  Clone ID: PAT_MRT3847_124321C.1.pep
DIFTSSRSFKKYLGTRSSSKVTNLNELLIYLITTIAIQLVLSRPFTPHKVYNQC

SEQ ID NO: 169778 - protein, 120 aa, Glycine max
  Clone ID: PAT_MRT3847_124322C.1.pep
DRRRARRSMVQCHMSVTVRYEPVDLRIIVSGDDHNIHAEVAVVLAVIKRDLVVTPWRAASQPMRHSTCRERTLHALLATAISILRAITTLQLPARALAITVFGDIRAMSLFARPRDSMDV

SEQ ID NO: 169779 - protein, 134 aa, Glycine max
  Clone ID: PAT_MRT3847_124323C.1.pep
RGPTPGFFVRRGNENPRRGGPRRNFRPGPGGRRVIPKWGADKRGANYGKEADAGGKGVPAKIIPKGQGREHKREARGGPKGGKSPKWWGTRQGPFSEGKTEGAGRYKKSPRPRGEGETFWGHQGGFCFNPGKGK

SEQ ID NO: 169780 - protein, 69 aa, Glycine max
  unsure (1)..(69): unsure at all Xaa locations
  Clone ID: PAT_MRT3847_124324C.1.pep
MGKPFFTLSLTSLCLLLLSNACFAITXSKFNECQLINLNASEPDHRVESEGGLIGTWNSQHAELQCACV

SEQ ID NO: 169781 - protein, 76 aa, Glycine max
  Clone ID: PAT_MRT3847_124325C.1.pep
SSKAGFICYLGCKIVCKAFSLVLSRYCTRCQMWYVLQIYSVCYRQSSGGEVVSNRHISWFINAIILIMLVVVYVVK

SEQ ID NO: 169782 - protein, 245 aa, Glycine max
  Clone ID: PAT_MRT3847_124326C.1.pep
MLMETSHARNRRNHSRTIAGGAVARRSSTMLLETSRCRTSRLQKNLSECGDFSSRHGSLMPPESTSIILKEIMTALTQPNIGLLGLYGSSNANTENAVEKVTRRVERDGLFNVVVKTCVMKKPDLKRIQGELGNALGLQLHQKTLVERATRLCERIKMEDNILIILHDLQAQINLAKIGIPFGNDHKGCKILLVAKNKEVLSHKMKTQIEFAVDEEPSSSGLTRSHQVQTRGVIVWIKRWWCPVQ

SEQ ID NO: 169783 - protein, 56 aa, Glycine max
  Clone ID: PAT_MRT3847_124327C.1.pep
RSILQREDHLNLEVSDSIKKALWYLVPERKTRKFKGTSAPDLGQGYCFSLSLYVVY

SEQ ID NO: 169784 - protein, 123 aa, Glycine max
  Clone ID: PAT_MRT3847_124328C.1.pep
FPGSFRVLALFRFWFQAHAFFQGHFFCTPVLVPLRGPLLPGNFAAFGLGAWPWAPFAGVHYFKDMVSPSYRSPILGLSLASQAIYFPPSQKFGSPWSNLVIAYLHLSSIALGCLLFCTLRDYP

SEQ ID NO: 169785 - protein, 111 aa, Glycine max
  Clone ID: PAT_MRT3847_124329C.1.pep
KEIVKVFGPSKKKGKFPKIFLKRLQANPVVEKKFFFKSFFSKAELNSPLLKKTFLLHPHVVVIERAPVNSKKTFPAKLPKFYFYLLKFRKGKFFPFPPFCFKTDFPHGKKM

SEQ ID NO: 169786 - protein, 73 aa, Glycine max
  unsure (1)..(73): unsure at all Xaa locations
  Clone ID: PAT_MRT3847_12432C.1.pep
IRVKYYDGNFKFVFKVIKYGENLKGYXAWLFLVIFEWKDGFKVRFGVIYVDYKSILKRMVKLSGFWLEKLLFK

SEQ ID NO: 169787 - protein, 158 aa, Glycine max
  Clone ID: PAT_MRT3847_124330C.1.pep
MENQPPSSKASEVDAPLQSIGFEIQELSPQRVSGHLPVTQKCCQPFKVLHGGVSALVAESLASIGAHMASGYQRVAGIQLSINHLKSAVLGDLVYAEAIPLNVGKTIQVWEVRIWKLDPSNKQKKTLVSSSRVTLLCNMPVPDNAKDAGDKLRKHARL

SEQ ID NO: 169788 - protein, 201 aa, Glycine max
  Clone ID: PAT_MRT3847_124331C.1.pep
MTSTSSSAPHYSSLPSPSSSNSTNYYFVTRPATTTRSSFATRRPWEEVFALYSFTRPYSIGEATMRVRRNLDHFRVNYFMMVLFVLFLSLLWHPVSIIVYLVALVAWFFLYFFRDEPVVVFGNVVDDRVVAAVLAAATVLGLVLSGVWVNVVGSGIVGVGVVVLHAAFRSTEDLYVDEHDGGLLSFVGGTPTKRTGGYTLI

SEQ ID NO: 169789 - protein, 34 aa, Glycine max
  Clone ID: PAT_MRT3847_124332C.1.pep
LLQVVLGPCTCHWCKRFIPDSHKSMTTYTERRGS

SEQ ID NO: 169790 - protein, 66 aa, Glycine max
  Clone ID: PAT_MRT3847_124333C.1.pep
FEQHPDQLSPHQCQFLHHTTLIEKTQKIFFNFNTMVIVPFLFPTIYEDSVVVVRFCAYTVEVRHST

SEQ ID NO: 169791 - protein, 135 aa, Glycine max
  unsure (1)..(135): unsure at all Xaa locations
  Clone ID: PAT_MRT3847_124334C.1.pep
FRHAVVEELAEFGATVYTCSRNESELNACLKEWSXKGFSVSGLVCDASSPPQREKLIQQVATAFNGKLNILLLANKQLVNEITSQTPIKRMAETHEVSSLVTFLCLPAASYITGQIVSVDGGFTANGFQPSMRIS

SEQ ID NO: 169792 - protein, 93 aa, Glycine max
  Clone ID: PAT_MRT3847_124336C.1.pep
GCIKIYPMKLRFLARRQKFAFMLDPRGFSLEGRDPPHTPFCVFGNLLITFVCKKIGLKSEKGRSSRELFLLEGGKFLLKRIQTTGYCVFGTPF

SEQ ID NO: 169793 - protein, 123 aa, Glycine max
  unsure (1)..(123): unsure at all Xaa locations
  Clone ID: PAT_MRT3847_124337C.1.pep
ININLSLTYESELNACLKEWSXKGFSVSGLVCDASSPPQREKLIQQVATAFNGKLNILVNNVGTNVRKPTIEYTAEEYSKLMATNLDSAYHLSQLAYPLLKASGNGSIVFISSVEGQTSLCCN

SEQ ID NO: 169794 - protein, 101 aa, Glycine max
  Clone ID: PAT_MRT3847_124338C.1.pep
HAFRAKLSLLLTHTTLLCASLLIQPIPKGVKWRSTTFLHRDLYACMLILTAIAETNELQTTGGPICKEMMTLLTENKKRQSSIMQIALPEIDTRHSIATII

SEQ ID NO: 169795 - protein, 115 aa, Glycine max
  unsure (1)..(115): unsure at all Xaa locations
  Clone ID: PAT_MRT3847_124339C.1.pep
MEPVERSLSDTKIDISTAHEGVLVGGATTMPYVQQLLQDVFHGKDLCQLLTLITLMVKELAGMHVIVSCKGNEKHQHIHLLHVSPLXTGRKTAGGVMTVMIPRGGCIRSTNEHVF

SEQ ID NO: 169796 - protein, 132 aa, Glycine max
  Clone ID: PAT_MRT3847_12433C.1.pep
PRVRVDVHIVANPSAEGGRYDEGAADAGAKVDDIVDTFRLHEQPAFNKKQADTFMNRFMRNLTRKLDAYQQELFNKHIEGATKYLLFKIKDVQFLADESMGDDASLIFAYYKDSAYDPTFLYFAYTLKDDKC

SEQ ID NO: 169797 - protein, 40 aa, Glycine max
  unsure (1)..(40): unsure at all Xaa locations
  Clone ID: PAT_MRT3847_124340C.1.pep
WKESSPKNKGSHIKLVKCGNWEEVXLCCYVVRRGXKXGHN

SEQ ID NO: 169798 - protein, 80 aa, Glycine max
  Clone ID: PAT_MRT3847_124341C.1.pep
MVLSHYQQFMEEKSNVANDDVYLLFSPPWLSAYERALLWIGDYKPSLIHRLVDGAVKGLTADHRGRVERTRDKTKRAERE

SEQ ID NO: 169799 - protein, 104 aa, Glycine max
  Clone ID: PAT_MRT3847_124342C.1.pep
CTSVDPFHVRLLKQSSKEGDNAQLRLPKKRAKSPTKKPSTKGDKNKTVREKSPSSSRYGSTGVSPPTNCKFSVKLGKVSAMKSPEAKRRRRSQYVEPVNLHSAG

SEQ ID NO: 169800 - protein, 93 aa, Glycine max
  Clone ID: PAT_MRT3847_124343C.1.pep
ITFRNAFNTALEVTPFRFVYGGGLISVQLAQQTQANQNPSCFIGVIDACATSVQIDGLVSITTTKLSIIYKKLMNIYIYQIQIKWICDIGIIS

SEQ ID NO: 169801 - protein, 79 aa, Glycine max
  Clone ID: PAT_MRT3847_124344C.1.pep
ARKLEYPPRFGPSLSRASNNITSREQCDDKLMNGEINPDQKQQCPRSQLVISDVHNECRKHSPEWFLRVCTVSVRPSNR

SEQ ID NO: 169802 - protein, 64 aa, Glycine max
  Clone ID: PAT_MRT3847_124345C.1.pep
CVGCALWPTNEAPHTRASERGVLADRFRCFYRLRLTCRDLGDQDRSVLWVIFVFLVSHAGHRRR

SEQ ID NO: 169803 - protein, 72 aa, Glycine max
  Clone ID: PAT_MRT3847_124346C.1.pep
TSGNNLPCNLLDRGELIIIGNVGDSRAVVAYTSDDGKLGPVQLTVDFQAHLPQEAERILESNGRVFCLDDEA

SEQ ID NO: 169804 - protein, 97 aa, Glycine max
  unsure (1)..(97): unsure at all Xaa locations
  Clone ID: PAT_MRT3847_124347C.1.pep
LSIYIISISPXPXXKKCSSYFKARAXLPSFYFNYPPQQINDLHQLFLFPSFLPLFSKNHLYLLFLIPYFILSIFPFSFFPTSFNFLFYIFSLNFLDN

SEQ ID NO: 169805 - protein, 30 aa, Glycine max
  Clone ID: PAT_MRT3847_124348C.1.pep
KKISFLTISYFRLYYIRSLYLDSFFFMCRS

SEQ ID NO: 169806 - protein, 59 aa, Glycine max
  Clone ID: PAT_MRT3847_124349C.1.pep
ILLLNILTHPSYLPIMITPHRTSKLLPHKLLQTTTPPSTTKFPILNTTISKSTSSYTTL

SEQ ID NO: 169807 - protein, 81 aa, Glycine max
  Clone ID: PAT_MRT3847_12434C.1.pep
LNLPLQRPLHMLSPSRNKFNTRRLQLFTRDDILVCFMRELPHWRRCCNFRRLLPTCECSECIFTHAKSTRGRMNVLLQRSN

SEQ ID NO: 169808 - protein, 67 aa, Glycine max
  Clone ID: PAT_MRT3847_124350C.1.pep
HSWVTTTTGVYLSTAIDNSFVVTTRKTSSSSFKRLSLEEMANRREKGLCFNCDEKFTRGHRCSSKFF

SEQ ID NO: 169809 - protein, 62 aa, Glycine max
  unsure (1)..(62): unsure at all Xaa locations
  Clone ID: PAT_MRT3847_124351C.1.pep
MSQLDDQITTAFDPFADANADDSAAASNENXHIHLHQPNXMKILTTTHALKKEFSYNMILKD

SEQ ID NO: 169810 - protein, 78 aa, Glycine max
  Clone ID: PAT_MRT3847_124352C.1.pep
PIRRPHFFFFFSFFFHFDKVDSALHDSFGSASAGRFRTSLENDVDFQKLLSCRSLLSSSRSRTLLSSSRSRLEPIRLE

SEQ ID NO: 169811 - protein, 90 aa, Glycine max
  Clone ID: PAT_MRT3847_124353C.1.pep
RDKQKKEGRKKKIGSSSFSFHIELRPISAPTYLPHFATAARQIKLTKSSTATTTNGSKKKNILNERSQTTHRRLRFEPIACTNVNPCAWR

SEQ ID NO: 169812 - protein, 113 aa, Glycine max
  Clone ID: PAT_MRT3847_124354C.1.pep
QHPQKKKNQQKIHRRRLPPPRTLKERHRISLPPPDLNAGGIQSHRNFYTNTETMPPAGWETTIPPKTEGKKSAPPRNTKGEELTEEVLGNSKKTLTLGDNDAREEDTPSEREE

SEQ ID NO: 169813 - protein, 55 aa, Glycine max
  Clone ID: PAT_MRT3847_124355C.1.pep
FLIIATGELPNSLSVLFAKVRILTWFLVLELIHDYPTMNRIFRHFRSCLFIYSIK

SEQ ID NO: 169814 - protein, 77 aa, Glycine max
  Clone ID: PAT_MRT3847_124356C.1.pep
LHEFLNLLLLLGVRSFKGKKFTLCAGHRLLDSFFFPLLVYMLNTLLLDIRFRVRLKLLLSLYQYSVLFQVQAGEILD

SEQ ID NO: 169815 - protein, 62 aa, Glycine max
  Clone ID: PAT_MRT3847_124357C.1.pep
LENRNYYYHVNSVNENYNLNGYESGRGRTTENEGYYEKSQYPNEFDTMEEYEKQQEEQGYTP

SEQ ID NO: 169816 - protein, 206 aa, Glycine max
  unsure (1)..(206): unsure at all Xaa locations
  Clone ID: PAT_MRT3847_124358C.1.pep
MHLDQHDPKTTTRATKVLPLFLYLFFFFSLASSAPPMLPSDAVSLVSFKREADQDNKLLYSLNESYDYCQWQGVKCAQGRVVRFVAQSMGLRGPFPPHSLTSLDQLRVLSLRNNSLFGPIPDLSPLVNLKSLFLDHNNFSGSFPPSLIFLHXLLTLSLSHNRLSGPLPVNLTLLDRLIALRLNSNHFXGTLXFLNQTTLKVLDLSY

SEQ ID NO: 169817 - protein, 59 aa, Glycine max
  Clone ID: PAT_MRT3847_124359C.1.pep
AVCATRLDSDAPAVSLYAFIASKITHSVLTGITLDGCEIVSSVSLMSDDGMSQYLTMTV

SEQ ID NO: 169818 - protein, 368 aa, Glycine max
  Clone ID: PAT_MRT3847_12435C.1.pep
VLVRVEVADNRFRDSILKEFVDIQNRLKSVKNKCEEAGCSLLNSSKHDEEDFWEEGNVVSMEISSSATNNKNKHLDVASTSHKMSNDNLGLHNKESNDSGTDTLLHRGREVEPNSPRSKLQAEAPVVRWSSYLDNWGSNTVFMANQRGLELESHWGRVDNDAVIPADKIAELNVHAMPYEEKEIEIQPCLAPLRKGGLCQRRDLKVFCPFHGPIIPRDDEGRPLNQNSSEDMNMDLKTDRVAHFQKQAEKNVRESAKEVAIKREIDKQLLKRAKQAKVREHNDAVLRDAALASTSRSATLGEDGEATNEDKLSARDKKQSLASMLRKKVTSKDRIAQKLLSSRARVTADRQHVSCEDAKYREAFPNQW

SEQ ID NO: 169819 - protein, 77 aa, Glycine max
  Clone ID: PAT_MRT3847_124360C.1.pep
VVTCQIVSVHFCFFSSFLSHSPLCCLNSTATAASTITLPLRCLFALVPKRPEASPSDKSNTTNSKHCHTREVHTQDV

SEQ ID NO: 169820 - protein, 57 aa, Glycine max
  Clone ID: PAT_MRT3847_124361C.1.pep
ICYVLICLQECCICLAKYKDKEEVRQLPCSHMFHLKCVDQWLKITSCCPLCKQGLER

SEQ ID NO: 169821 - protein, 28 aa, Glycine max
  Clone ID: PAT_MRT3847_124362C.1.pep
KLNLFVYLINQDHRAARLELSINWRPCK

SEQ ID NO: 169822 - protein, 78 aa, Glycine max
  Clone ID: PAT_MRT3847_124363C.1.pep
REQDDLHNAAESARPYVVKNPSWNDANYHASHTANQGTQPVKPQPIAVSNISSDELKAVTDNSSQDSLIVQGSYGRVY

SEQ ID NO: 169823 - protein, 75 aa, Glycine max
  Clone ID: PAT_MRT3847_124364C.1.pep
MYTLWSYNARPPIHIVRQLCIVPPLVLSYHSSCPRIRDTMTTPTAFGESSISNVRTCTCITSVTLKLGMSIWCVL

SEQ ID NO: 169824 - protein, 145 aa, Glycine max
  unsure (1)..(145): unsure at all Xaa locations
  Clone ID: PAT_MRT3847_124365C.1.pep
ARARADSDRSRSLERSQILVHGKPPSYSFNQSYEGTRDRGEADQRNGNSDDQPNDFPTVDTXDRAPXVLYDTLRTEALALRKVVDDKEQSLTDKDDAIDRLIYKVDTLTKAMEVEAYIIRKEVACMENEVAAMRVVKEQDRRAQR

SEQ ID NO: 169825 - protein, 83 aa, Glycine max
  Clone ID: PAT_MRT3847_124366C.1.pep
VHFYFYLFFFADEQSQMITKSISRRTGHGFNLILSHVIADSSSSTRDARVCYTLPIPGAPQLFLTQRVDNRADLSDFEICNRY

SEQ ID NO: 169826 - protein, 63 aa, Glycine max
  Clone ID: PAT_MRT3847_124367C.1.pep
DMDTNLKRQEYEGNKVSNDNHPLSQAPNYRMWPHKNPINNNKKIPGNNLERKFTKTSAELKLN

SEQ ID NO: 169827 - protein, 79 aa, Glycine max
  unsure (1)..(79): unsure at all Xaa locations
  Clone ID: PAT_MRT3847_124368C.1.pep
WFVGESSGATKGTPFMFPYPYMVSQHKNXKNLGEIRLLFVEAPLENSRHRDVSSALHVCFKDWLYASGNIRQLYCSQGI

SEQ ID NO: 169828 - protein, 70 aa, Glycine max
  unsure (1)..(70): unsure at all Xaa locations
  Clone ID: PAT_MRT3847_124369C.1.pep
NFLDSPPLPFGGPLKVPWGPPGGPQPFLPGFKPPPXGPFLALPRKKPPPRPRPPLICPGKAPPFSYGLVS

SEQ ID NO: 169829 - protein, 93 aa, Glycine max
  Clone ID: PAT_MRT3847_12436C.1.pep
LTIAFIQVLYFMICLKLVDRSFKVDPADHDIRSDTCQTPLTRMHKKKKKKETCYPRNLVLILSSISFLEFLFILTQDTEDREGSSSGIQGDFV

SEQ ID NO: 169830 - protein, 125 aa, Glycine max
  unsure (1)..(125): unsure at all Xaa locations
  Clone ID: PAT_MRT3847_124370C.1.pep
PPXPPPAPPPPPPPPPPPPPPXPPPXPPXPPPPXPPXPPPPPXPPPPPPPPXPPPPPPPPPPPPXXPPPXPXPPPPPPPRAPXAARPPGPAPPPSATPSPPHPPPQXPKVKVITPKSRTCNHNSK

SEQ ID NO: 169831 - protein, 52 aa, Glycine max
  Clone ID: PAT_MRT3847_124371C.1.pep
MEEALELARAKDAKERMAGVARLHEVLEASRRSLSSGEATPLCPCCLDLLKD

SEQ ID NO: 169832 - protein, 75 aa, Glycine max
  Clone ID: PAT_MRT3847_124372C.1.pep
ATCNHVSQENYFFFFHFILEFRISISISSLIPMPLHLHQSYSTSCQHHSVKLASSSISVSYKKYQLFNIAPIFHT

SEQ ID NO: 169833 - protein, 162 aa, Glycine max
  unsure (1)..(162): unsure at all Xaa locations
  Clone ID: PAT_MRT3847_124373C.1.pep
ASGTLIDFYNNYVRTDRSYGFRALMVMEDHSLLLVQQGEIVWSREDGLASVVDVTTSELPVEKEGVSVAKVEQNLFEWLKGHVLKLKGTLMIASAEDVVAIQALRLRSSEKSKXTRDHNGFRKLLIVLTRAGKVFALHTGDGRVVWSILLHTLRKTECVNIR

SEQ ID NO: 169834 - protein, 102 aa, Glycine max
  Clone ID: PAT_MRT3847_124374C.1.pep
FFFFFFFFFFFFFFFFFVFFFFFFFFFFFFFFFFFFFSEKKKKGLFFLKKNFISRGVTWEKKHRGNPPLKKTPGGPFKKKNPQTLKLKDHLRPQYGGKDGPF

SEQ ID NO: 169835 - protein, 228 aa, Glycine max
  unsure (1)..(228): unsure at all Xaa locations
  Clone ID: PAT_MRT3847_124375C.1.pep
VKEKLESVSIFQWWFRVAVQLSLILLGACYRSVSTSPPPVKLNTENPHQVVIDNGIISLNLSNPEGDIIGIYNGIKNVLEAKNKEDDRGYLDVVWNEPGKHGMFQRIRGTDFSVIAANENIVEISFLRTWTASMKGSSVPMNIDKRYILRRGDYGFYSYAIFNRPSGLPAVEIDQIRIVFKLDETRFHYMAISDTRQRNMPSVRDRASGQPLAYXXAXLLTNSSEQQF

SEQ ID NO: 169836 - protein, 61 aa, Glycine max
  Clone ID: PAT_MRT3847_124376C.1.pep
LFHCCVVLRYFIALFIYSPTRTINRKILTRTSQNTRITPGSTNTRSNYYNCNFNLSSAQYQ

SEQ ID NO: 169837 - protein, 40 aa, Glycine max
  Clone ID: PAT_MRT3847_124377C.1.pep
LNFFRNFKFNEFHFLFNYSLDLEVEPTNICDFQSISFNNR

SEQ ID NO: 169838 - protein, 63 aa, Glycine max
  Clone ID: PAT_MRT3847_124378C.1.pep
SAGVEKLFPLGKSSDSCSSISNPSVLLYLIYACEIVSNQPHVFIITIIPYPITFINKRMLSQP

SEQ ID NO: 169839 - protein, 52 aa, Glycine max
  Clone ID: PAT_MRT3847_124379C.1.pep
FYNIMIRGRTRKEIVIGYRLANQDRAIINPSEKSVPRKWSLGDVFVVIAKGD

SEQ ID NO: 169840 - protein, 83 aa, Glycine max
  Clone ID: PAT_MRT3847_12437C.1.pep
QEIILYRLRVQSIYSFSSNWVQGIIHSSTWSAFWLSSHHNQTWPSSSSISCIQSILQRFMQNSVLNDSCFSQNLRITLSSGYS

SEQ ID NO: 169841 - protein, 209 aa, Glycine max
  Clone ID: PAT_MRT3847_124380C.1.pep
MIDLRKVCLVIVLYMHTDSMRSALVWIFTLNVCLHILFIPGGDSKPHPRFREKITEDYNRGFISIDCGASNDYLDEETSTFYKTDTDFIETGENLLASSQFIDINIPGFGRQLRTLRSFPEGNRNCYTLKPEYKQGEQQSYLIRAMFGYGNYDGKNHPPTFDLYLGVYYWINGNPAKYSYLWTEIIHAPTTYTIQVCQVNIDTGTPLIS

SEQ ID NO: 169842 - protein, 79 aa, Glycine max
  Clone ID: PAT_MRT3847_124381C.1.pep
GFSRTFPCSQTCSTPTPVPSKAQPCGHHQPLARRHRHHQILRLHGVNDDAHQSTPFPESCLIREERQGEGERTKTKRGK

SEQ ID NO: 169843 - protein, 48 aa, Glycine max
  Clone ID: PAT_MRT3847_124382C.1.pep
STLNSKKFSSNLYFPYNNLTFNQPLFYPSFPFINNYQTSLQFFFAINH

SEQ ID NO: 169844 - protein, 76 aa, Glycine max
  unsure (1)..(76): unsure at all Xaa locations
  Clone ID: PAT_MRT3847_124383C.1.pep
RPLFLSGGFPALLFLCLPLVLLGACFRVASRGGFVALFVWVLCVSLGSACFSRCGVSFLLLLGPLVXRLLCWWXSV

SEQ ID NO: 169845 - protein, 50 aa, Glycine max
  Clone ID: PAT_MRT3847_124384C.1.pep
PTRTTAATKTHQGTSQFRCHTTRDRVFIHISSLVLSHGDFGVSNCLCVAS

SEQ ID NO: 169846 - protein, 59 aa, Glycine max
  Clone ID: PAT_MRT3847_124385C.1.pep
IIFKRGLHILGGFERKPSPYGCLIVLMGVLSSESFFRVKPHILVSDVERLRNMIGVSGL

SEQ ID NO: 169847 - protein, 173 aa, Glycine max
  unsure (1)..(173): unsure at all Xaa locations
  Clone ID: PAT_MRT3847_124386C.1.pep
KSWPLDADXGWGIRAXEYXEQHPIKNVVEKDGYEIDWEGGIDDNWVQEINCLEWESFAFHPSPLIVLVFERYNRAFDNWKILKELEKAIKVYWRAKDRLPPRAVKIDINIERDLAYALKVRECPQILFLRGHRVVYREKELRTADELVQMIAFFYYNAKKPAWIDDKALYTRY

SEQ ID NO: 169848 - protein, 55 aa, Glycine max
  unsure (1)..(55): unsure at all Xaa locations
  Clone ID: PAT_MRT3847_124387C.1.pep
CVXFFXFVKKQKVQXMGXKIVLEEIVFKVPETIGGGVNNWGVTGNPATKKMGQKC

SEQ ID NO: 169849 - protein, 70 aa, Glycine max
  Clone ID: PAT_MRT3847_124388C.1.pep
LSSFWVIVKGYPVRFDANKVDPSLDDNVGPPVACPSIANATSLFLPTAPLFAPMVRGPHIAPMPNFCVSG

SEQ ID NO: 169850 - protein, 213 aa, Glycine max
  unsure (1)..(213): unsure at all Xaa locations
  Clone ID: PAT_MRT3847_124389C.1.pep
MVVEDEINAGYISIAMLLGLLKQPLYLRSIAHLEQLLNLLDVIIDSAGSMPSSSDKSQISTEAVVGPQISAMEVDANIDSATSSALDASPQVNESSKPTPHSNKECQAQQVLCDLPQAELQLLCSLLAQEGLSDNAYXVLSAEVMKKLVAIAPIHXSLFVTHLAEAVRXLTSSAMDELRTFSEAMXALLSTTSSDGAAFXKXLQALSSLVISL

SEQ ID NO: 169851 - protein, 193 aa, Glycine max
  Clone ID: PAT_MRT3847_12438C.1.pep
MAASNSTLHSPTTPNTTFVQANPSNFRAVVQKLTGASDDPSAHKLPLTLPTRLAAAQSHRPASAGEVIGPKKPNFKLHERRNAAAKRLELPIDTAMSMMMMSVSPTSSLVRSRTTTTTLVASPVSPLELFLARASPRTPHEEEEERAIAEKGFYLHPSPRASQPPELLPLFPLHSPTHNHNHNHTTNSPSIPN

SEQ ID NO: 169852 - protein, 79 aa, Glycine max
  unsure (1)..(79): unsure at all Xaa locations
  Clone ID: PAT_MRT3847_124390C.1.pep
MVFLHCLCFFLIXDTHGWRFMDGIFHNSILLXQAPCVYHXNPVLTKYCLPXAESKAVFEYQRSRLTTYKHLKTSKKNWI

SEQ ID NO: 169853 - protein, 68 aa, Glycine max
  unsure (1)..(68): unsure at all Xaa locations
  Clone ID: PAT_MRT3847_124391C.1.pep
HIQKSSIVDLVNRIRGGVIEPSLMAWLAKASQDKMMCLKXYVRGHPRNVKCRNKKCGLSHQLRLKEKI

SEQ ID NO: 169854 - protein, 92 aa, Glycine max
  unsure (1)..(92): unsure at all Xaa locations
  Clone ID: PAT_MRT3847_124392C.1.pep
SFAVILIYLQIGCALIGSLGASYNGVFPTRPPTXRFALVAIESSSQSLGRTYAFLLFCAILLDISWFILFANEICKFTFHVPLWTMLLRPSD

SEQ ID NO: 169855 - protein, 80 aa, Glycine max
  Clone ID: PAT_MRT3847_124393C.1.pep
MALSCLTLTANPSSVICKCKVSLPTVPHALDATYIRRAAHLADKYAGFTSPHPNFGCVIVSPSGKVSGEGYLYAQGTTAA

SEQ ID NO: 169856 - protein, 104 aa, Glycine max
  Clone ID: PAT_MRT3847_124394C.1.pep
PALWTELSSQSPRKLPQSPVWPTSHVVACVRNQPQLHTLSSLVLLRLRTRLYLHNCFLTVLTNYHFAPHVERRVRIRKEKTRRKKEENLENRTIGLKTMFSDKI

SEQ ID NO: 169857 - protein, 68 aa, Glycine max
  Clone ID: PAT_MRT3847_124395C.1.pep
IHVWFLPTTGIRSRLQPYRPSPCNSRGIGPPLCSLALGTISTIRSPSFHCAPFTAASRSQRISRKFIT

SEQ ID NO: 169858 - protein, 458 aa, Glycine max
  Clone ID: PAT_MRT3847_124396C.1.pep
MAITPSNSSILLSLFLLAIALSLAESQSFIGVNYGQVADNLPAPEDTASLLKSTTIGKVRLYGADPAIIKALANSGIGIVIGASNGDIASLAGDPNAATQWVNANVLPYYPASNITLITVGNEILTLADQGLLSQLVPAMRNVQNALGAASLGGKIRVSTVHSMAVLTQSDPPSSGLFNPALQDTLKQLLALLKDNKSPFTINPYPFFAYQSDPRSETLAFCLFQPNSGRVDSGNGKLYTNMFDAQVDAVHSALSAMGFQDVEIVVAETGWPSRGDSNEVGPSVENAKAYNGNLIAHLRSLVGTPLMPGKSVDTYIFALYDEDLKPGPGSERAFGMFKTDRTVLYDVGLTKSSQQTSTTPVTPAPNTAGWCVAKAGVSDAQLQANIDYACSQGIDCGPIQPGGSCFEPNTIASHAAFAMNLYYQTSGKNQWNCDFSQSATLTSQNPSYNACIYTGGST

SEQ ID NO: 169859 - protein, 61 aa, Glycine max
  Clone ID: PAT_MRT3847_124397C.1.pep
GSLTSFALENCTSRGIELYLCIVQYFQNLGYPHFWVRFVSYLLIILFLFKFTLFQMKKLIY

SEQ ID NO: 169860 - protein, 65 aa, Glycine max
  unsure (1)..(65): unsure at all Xaa locations
  Clone ID: PAT_MRT3847_124398C.1.pep
PSPINSKSDYLFXSEVLIHLPSQATTDLYFPPNNAXNQPSFSHATALLKLQKVYRTHLARWPTPP

SEQ ID NO: 169861 - protein, 212 aa, Glycine max
  Clone ID: PAT_MRT3847_124399C.1.pep
LTEKVGWQDEAIYAINRTVSRCRSGAGKLSSGSHVRADIWLAFLGPDRLGKRKIASALAEILFGNKQSLITVDLSSQDRCYPSYSIFEFQNSYCHDVLMRKTVLDYIAGELSKKPHSVVFLENVDQADFLVQNSLFHAIKTGKFPYSHGREISINNAMFIVTSSVFKSSGSFNLEEDPKMFPEERILEAKRCQMQLSLGHASEVPKGAVAQM

SEQ ID NO: 169862 - protein, 80 aa, Glycine max
  Clone ID: PAT_MRT3847_12439C.1.pep
IRNKFLLFKKKKQVFSYFLKGPLVFFPHRRAVHHLLEYQKFDVTMPLTEIKLLIFCRKGYRRGNTKTNKKQFNENKWINQ

SEQ ID NO: 169863 - protein, 85 aa, Glycine max
  Clone ID: PAT_MRT3847_1243C.1.pep
PRVRTAARRQKGIGRKVIILGVCFCCILLRFPKTMQSCPFPDTNPLSLSLSLRTFSFLFLILISLLRSPSISIIFVNCLFCYSFV

SEQ ID NO: 169864 - protein, 130 aa, Glycine max
  unsure (1)..(130): unsure at all Xaa locations
  Clone ID: PAT_MRT3847_124400C.1.pep
LQNLYNGYSXQNQPNLXXXXPPHQQQVLPTGNQHMDGGSIDSSCMKPEKGDEQLDVPYSSSTPFNSLPNLVSASPECSTHVLMQMENKVMPNECSDPSSSTSTNFEMWGDFMYEEVSDAYWKDLIDKETN

SEQ ID NO: 169865 - protein, 67 aa, Glycine max
  Clone ID: PAT_MRT3847_124401C.1.pep
FGKGKKKSTGRRWQQGTIIRYEVPYSEHSSFTELKEFVRVVSPDNIIPSVNNDGPESSDAMISLLLS

SEQ ID NO: 169866 - protein, 131 aa, Glycine max
  unsure (1)..(131): unsure at all Xaa locations
  Clone ID: PAT_MRT3847_124402C.1.pep
MGCVRSFTFAKGRGRDLLHDRKQKMLRTIQNSXELPEGAIEQLEKXQARLMKVETESVRFQVNGYSEIQLHKFNLINSIYTTLDQCENYLNEAIHFXNNNXINQDRQQVLQHALQGALGTLWSCWNNELHL

SEQ ID NO: 169867 - protein, 47 aa, Glycine max
  Clone ID: PAT_MRT3847_124403C.1.pep
HLLVSNQNTMLIFCTKMFLLSFSDIRVCQTRMLCAKYGLPLSRIGSR

SEQ ID NO: 169868 - protein, 57 aa, Glycine max
  Clone ID: PAT_MRT3847_124404C.1.pep
RTKQSESSADIADLKEMYRDQVTLVVINTQGIGFLHWLPPSLAEKSAPLGNGMFTVH

SEQ ID NO: 169869 - protein, 304 aa, Glycine max
  Clone ID: PAT_MRT3847_124405C.1.pep
RRPPRANFGKDRGGMSRFDSGGGGGGRWDTGRRGGFGGRGGGMRDGSFGGRGSGFGGRGGGIRDGGFGGRGGGFGGRGGMRDGGSGQGGRGDFFPGRGNRGRGSGGPRGGHVGWGRGERGMDDRYNMEGRGQGRGRGRFDNRRDVSSKGRGRSHSRSPERVRTWDYSKSSSRSRSRSRSRSWSRGRSRSRSWSRGRSRSYSRSISPRRSRSRSRGRSYSRSRSRSPSYDRRDRSDQQLPDQKDIRAHEVGTSDPRMLPVSSGLGTQGNSFLGTEQVEQQPIVSSTDPGNPEAVADLSHQSVSDI

SEQ ID NO: 169870 - protein, 390 aa, Glycine max
  Clone ID: PAT_MRT3847_124406C.1.pep
SLYDLNFPTDFSNMSLGSLDTNYNSDSSHTKANHSLNLMLNKSSDNSHRHQSRARIHDADWMHLSKLHERQWESQCQVIENIKMDFKCNCQAFCCVSSENFIDPLTRFLSTACERHDVKALRAGTKLLLEFMKCCRNGMTNLSEDTCIMLESLLDTEVIGEALTIMEELTGNWYEKTNIAAFSVLSSVSKILDSGNEEFQRKAIKIMYNFSSNGQICPYMVSLGCIPKLLPFFEDRTLLRDSIHILKNLCDTEEGRVTVVETKGCISSVVEILGTGSDEEKEPALVILLSLCSQRVEYCQLVMYEGIIPSLVNISNKGSDMAKAYALELLRLLKGDSEFEYEDCCEPNLNGSQEPNNNHYQEKKSSKKPSILKKLSLFSKSISVAPKTKR

SEQ ID NO: 169871 - protein, 95 aa, Glycine max
  Clone ID: PAT_MRT3847_124407C.1.pep
VLPCPPRALSLLPPSEVIRPTRPFFGSPGGLSRGDCSFIHAPHWPRFQSVPRPLVSRQRYSMSLSCWARPAPGPIVPVVRDCTLPVVGYPQPDIL

SEQ ID NO: 169872 - protein, 45 aa, Glycine max
  Clone ID: PAT_MRT3847_124408C.1.pep
SSCVRRSVPQITHMYLNRTRIAFKYSGSMPYHCCWTKVKQWALVR

SEQ ID NO: 169873 - protein, 92 aa, Glycine max
  Clone ID: PAT_MRT3847_124409C.1.pep
VPQLFTDQRAWEYSERVHGSTKNPAFQNNVEKRSDWVSKQDSTRKLARICFAKGYQNSPLNRLVGMNLQYGSPRWRWAGKLARTTCFIWAGP

SEQ ID NO: 169874 - protein, 87 aa, Glycine max
  Clone ID: PAT_MRT3847_12440C.1.pep
PVGVQAPMGATGSSLIFHASEWPTGMAPIQLLLLSNRLPITVTVGNRSDNAGAQTTATAELFDETLYSVHIAQADLYPRTAATGSIA

SEQ ID NO: 169875 - protein, 52 aa, Glycine max
  Clone ID: PAT_MRT3847_124410C.1.pep
INSTIINKNTREPPTRALKYATNSQINIDHNWYHRDKKIKFPEYKCETLIFL

SEQ ID NO: 169876 - protein, 57 aa, Glycine max
  Clone ID: PAT_MRT3847_124411C.1.pep
CSKGSKICCYEQYTTHKAIIKYKDQALISRYTNLMYLKLPRTRASHSVPLYFNTTLD

SEQ ID NO: 169877 - protein, 93 aa, Glycine max
  Clone ID: PAT_MRT3847_124412C.1.pep
RACDPQYNHHKGEFVNDNGPRQDCLSMHTPENSVRHNPLYTTCYYISWMHEQSPLYIRRMGLKRQTNTGGCLSGQAGPPHHPHRLSNPKTEGV

SEQ ID NO: 169878 - protein, 52 aa, Glycine max
  Clone ID: PAT_MRT3847_124413C.1.pep
SKPKQTPMSQKQLHTYNYLHTNSDHSDFQILLLPTSPKSKNEHCQLLRHCPL

SEQ ID NO: 169879 - protein, 55 aa, Glycine max
  Clone ID: PAT_MRT3847_124414C.1.pep
RRDRCGLKCTLSFTEMEVRSDREEKKSSNQVFQRRVFIKTLLSVLSLFVVLRREQ

SEQ ID NO: 169880 - protein, 108 aa, Glycine max
  Clone ID: PAT_MRT3847_124415C.1.pep
MRRRRHAMEPKHTKADKNIAYYAKLSDLMEECRLILVVNSDNGGSHHFKNIRKGLRGDYVVLMGKNTMMKRSIRMHAEKTRDNACFNLMQLIVGNVGLILTKGDLKEV

SEQ ID NO: 169881 - protein, 55 aa, Glycine max
  Clone ID: PAT_MRT3847_124416C.1.pep
ESGPRCLIVSKLSSSVLLNESRLPHNGWWPRRVTAQLMPHIVQKRNEQSDWVEQN

SEQ ID NO: 169882 - protein, 126 aa, Glycine max
  Clone ID: PAT_MRT3847_124417C.1.pep
PPFFFVPGPPRGAKGAPRFPGWAPPPNGFRVFMVPLPPLPFPGRGFPPVKTLGPAFFFPPKKVWDAPWFFWVGPFLGGALGAFSPPSVLGAPPPKVLGFFRGPPTLFFWPTFFGSESPASFNWVFN

SEQ ID NO: 169883 - protein, 44 aa, Glycine max
  Clone ID: PAT_MRT3847_124418C.1.pep
PRIYNVTSSKLSIMFTHKIYYVFNVSANMYSSILNTQILLRFPN

SEQ ID NO: 169884 - protein, 106 aa, Glycine max
  unsure (1)..(106): unsure at all Xaa locations
  Clone ID: PAT_MRT3847_124419C.1.pep
MSGAEKKVTDVAFKAATDLGGDGMADLLVSHEARREFYNIRRAYNEDSFQLETKFSAXPDPIDWDYSRRGIVTSXEDMYIEYYDSIEVLFFDDAGSSKYKSAFEAL

SEQ ID NO: 169885 - protein, 90 aa, Glycine max
  Clone ID: PAT_MRT3847_12441C.1.pep
MGLKEDFEQYAEKAKTLPPTQSNEDLLILYGLYKQATVGPVNTSRPGMFNMRDRAKWDAWKAVEGKSKDEAMSDYITKVKQLLEAAGMPA

SEQ ID NO: 169886 - protein, 143 aa, Glycine max
  Clone ID: PAT_MRT3847_124420C.1.pep
MKDADVSRQIQQMIRFIRQEAEEKANEISVAAEEEFNIEKLQLLEAEKRKIRQEYERKAKQIDVRRKIEYSTQLNAARIKVLQAQDDAVGAMKDAAKKGLLRISNDKKVYRKLAKDMIVQGLLRLREPSVLLRCRESDRKLVE

SEQ ID NO: 169887 - protein, 124 aa, Glycine max
  Clone ID: PAT_MRT3847_124421C.1.pep
KNDEFLATSITIKICKVTEDKKYRGVGPYTCSAVLFFSTSLTSLVWDFGFSFSVNCLSILFSSPRLLLFRSSEVTFSFIILVLSTSTFNCSWIEFSVIESIERRGSSLFEMALSSADEQEGFED

SEQ ID NO: 169888 - protein, 180 aa, Glycine max
  Clone ID: PAT_MRT3847_124422C.1.pep
DCTESSLPDVEAEENTSENLEAEESEEPVAGEDVMLEAGDAFSSPRIPLVHQQVSVESIGNYIVSCPLDVELSCKSNTMVDGDVVSEDNAITNKEEPRLSMDSITENSIQEQLKVDVHNTKMMKENVTSDDLNNKSLGELKRMLRQLTLNEKPKSKTNDVKDVEKKRTALQVLPQNQIDG

SEQ ID NO: 169889 - protein, 54 aa, Glycine max
  Clone ID: PAT_MRT3847_124423C.1.pep
DTKPTYSHSVRGSYHVLETQPIHISVNMKHFIYSSICKKYTLKNKGYMPNHNYS

SEQ ID NO: 169890 - protein, 54 aa, Glycine max
  Clone ID: PAT_MRT3847_124424C.1.pep
LNNYSLHTNYYYHRIRTISTFLLKIQIFLNIYYFQLYSNQYLFFKLIHYSLLYS

SEQ ID NO: 169891 - protein, 108 aa, Glycine max
  unsure (1)..(108): unsure at all Xaa locations
  Clone ID: PAT_MRT3847_124425C.1.pep
MGVDVETISPGDGHTYPKTGQTVIVHYTGTLINGKKFDSSRDRGQPFKFKIGKGEVIKGWDQGVAKLSVGERAKLTCTPDFAYGSRGHPGIIPPDSTLXFDVELLKVE

SEQ ID NO: 169892 - protein, 203 aa, Glycine max
  unsure (1)..(203): unsure at all Xaa locations
  Clone ID: PAT_MRT3847_124427C.1.pep
MDAIKKKMQAMKIEKDNALDRADAAEEKVRQITEKLERTEEELRDTQKKMMQTENDLDKAQEDLTAATTQLEEKEKKVQEAEAEVAALNRRMTLLEEELERAEERLKIATEKLEEATQNVDESERVRKVMENRSFQDEERANTVEAHLKEAHILAEEADRKYDEVARKLAMVEADLERADERAEAGETRIXELEEELRSCRTI

SEQ ID NO: 169893 - protein, 176 aa, Glycine max
  Clone ID: PAT_MRT3847_124428C.1.pep
MFKLSCLLSQWKKSLFKKRLVRGEKKKRSLAHGILVGNQREKTILGRGFLSFRLCSFGDNSVLFRYCPVQRPLCILLFFFDRELSSLSSSLFFFKRRRMGKAKEAAVVAGALAFAWLAIELALKPFLTKARASIDKSDPARDPDDDALPKTTADDVPEASADDVPVAADTKTTDDA

SEQ ID NO: 169894 - protein, 50 aa, Glycine max
  Clone ID: PAT_MRT3847_124429C.1.pep
QLTLCRCLHTLKCIEVRRIKGIQRWDTLQQPDWPYCPAVDLHRYWIGATG

SEQ ID NO: 169895 - protein, 90 aa, Glycine max
  Clone ID: PAT_MRT3847_12442C.1.pep
MGLKEDFEQYAEKAKTLPPTQSNEDLLILYGLYKQATVGPVNTSRPGMFNMRDRAKWDAWKAVEGKSKDEAMGDYIIKVKQLLEAAGLPA

SEQ ID NO: 169896 - protein, 163 aa, Glycine max
  Clone ID: PAT_MRT3847_124430C.1.pep
DVYELSYLKSVIKETMRLHPPVPLLLPRECREPCKIGGYEIPIKTKVIVNAWALGRDPKHWYDAEKFIPERFDGTSNDFKGSNFEYIPFGAGRRMCPGILLGIANVELPLVALLYHFDWELPNGMKPEDLDMTEGFGAAVGRKNNLYLMPSPYDHSLNHFIVN

SEQ ID NO: 169897 - protein, 126 aa, Glycine max
  Clone ID: PAT_MRT3847_124431C.1.pep
GTACPRGLYGIFCEECPVGTYKDVSGSDRALCHDCPPDELPHRAIYISVRGGVAETPCPYKCISDRYHMPNCYTAFEELVYTFGGPWLFGLLLLGLLILLALVLSCARMKYVAGDDLPAVTPCSND

SEQ ID NO: 169898 - protein, 80 aa, Glycine max
  unsure (1)..(80): unsure at all Xaa locations
  Clone ID: PAT_MRT3847_124432C.1.pep
WARGAVCMISNSPSVVQVFARIDPKLDLMYAKGAFVPWYVGXGMEKGEFFEARKALAALQKDFXKVGAKFGKGPKKDEDY

SEQ ID NO: 169899 - protein, 81 aa, Glycine max
  Clone ID: PAT_MRT3847_124433C.1.pep
RGPGGFPFWGIPVGPRGQGPEKKGFGKSPPWGVGNIFNSKGFWEKWGLPGFSEIFKLGFFLGRPNFLGGYPLAFAPRYFGQ

SEQ ID NO: 169900 - protein, 55 aa, Glycine max
  Clone ID: PAT_MRT3847_124434C.1.pep
FYKYKKFIITFFCLSLGCYSAFDILLLIVVSIFIENPYQYGSNMVFKHLRTQLLY

SEQ ID NO: 169901 - protein, 113 aa, Glycine max
  unsure (1)..(113): unsure at all Xaa locations
  Clone ID: PAT_MRT3847_124435C.1.pep
MKFMKLGSKPDSFESEGDNNIRYVAAELATDIVINVGNVKFHLHKFPLLSKSARLQKLITNSNEENNDEVHIHDIPGGSAAFEICTKFCYGMTVTLNAYNVVAARCAAXYLEM

SEQ ID NO: 169902 - protein, 89 aa, Glycine max
  Clone ID: PAT_MRT3847_124436C.1.pep
IGRKSIQKTFYISEQSLNAKATEELNDLTFLLYHDHQVHLQLVQPNPVGHPILLHKVEVLDQDDYARSWWNQILNASLSEREESDSHAC

SEQ ID NO: 169903 - protein, 71 aa, Glycine max
  unsure (1)..(71): unsure at all Xaa locations
  Clone ID: PAT_MRT3847_124437C.1.pep
VETGKQLVLEECLMVGISSVAAAVRAXKVGNRPENGGKLIAVGIPGFGVIYLATILLQSIRAGCELMQPES

SEQ ID NO: 169904 - protein, 40 aa, Glycine max
  Clone ID: PAT_MRT3847_124438C.1.pep
LVSFFFVEGYRLLGENRCLIGSDINCHWEIVVKKMWRFGC

SEQ ID NO: 169905 - protein, 54 aa, Glycine max
  Clone ID: PAT_MRT3847_124439C.1.pep
TNTRSTGLEHCLKQMEPMSHGENMSIRDISYPRGTPKKNKRRIFTFYHHLSLRH

SEQ ID NO: 169906 - protein, 363 aa, Glycine max
  Clone ID: PAT_MRT3847_12443C.1.pep
MNPKSLQILVQSPDLGISLQPTTKHETLSDLKHSLFPQSHRSFYFTFNGKPLPDKTPLSQFPPLSTLSLRSRLPGGGGDGGATGAESRDCYLNMYADKKPDKVDPNEQRLSKWHNCALSNEPLREPCVIDKLGNIFNKESLVEALLGKKLPKEFGHIKGLKDMINVQLSAIPGAEDGAKFQCPIAGLEFNGKYRFFALRNCGHVLSAKALREVKSSSCLVCHKEYADLDKIVLNGSDEEVVILRERMEEEKPKIREKKSKKVKHNNGDGVSLEGTRLSGTKHGVDVKGVEKASAKVERNGKVGNVALNGNGGGGGAAAAKRFKAVDLAPANATKDVYASIFTSSRKSDFKETYSCRSLPLGKN

SEQ ID NO: 169907 - protein, 44 aa, Glycine max
  Clone ID: PAT_MRT3847_124440C.1.pep
TRDMTKRSHSGSVLSTKSRAKPNKGWLILFTSLGAMATSSLIYK

SEQ ID NO: 169908 - protein, 41 aa, Glycine max
  Clone ID: PAT_MRT3847_124441C.1.pep
GGVVPPPPINSYSSSLSSGITKQRCAFRTELFSCSRPARES

SEQ ID NO: 169909 - protein, 79 aa, Glycine max
  Clone ID: PAT_MRT3847_124442C.1.pep
CSACCLRVAGPGVSRRLCPALCVFFFPFWVSVPCVWASLVWFLPSGGACLCFRFYGPPSCVLGSSLLARAWVAPGVPGR

SEQ ID NO: 169910 - protein, 68 aa, Glycine max
  Clone ID: PAT_MRT3847_124443C.1.pep
EGRIATCLVGAITSSILFWHYSSFIEFQLMTFLVFLGRANQYWLCNLFCNDAQFIFSFGYISDNWLYL

SEQ ID NO: 169911 - protein, 203 aa, Glycine max
  Clone ID: PAT_MRT3847_124444C.1.pep
EMNSSCSETRKKVDQLQESDFDIGRKHYHIKPSNIVLLCPVEIPQSSSSEDFQLSESRTSSDENFSESTKSSLSYVSLPDEVYTPQSGPLRSAVEFSSLEMMQHSISTDLGVDRSSVVSEIPSSTINKIASLQSASACFEKDMFDAWLRDQCAFSKLKESLDQETAELTAQKEMNTSHNRRFGFSVSRIGRSFSFKEGPTLPH

SEQ ID NO: 169912 - protein, 79 aa, Glycine max
  Clone ID: PAT_MRT3847_124445C.1.pep
YQLFYFILALLFIGNLKGGTLRSQKKKAFICLPMLFHSVSVDDFFSLFGPNQKYWLCNLFCNDAQFIFSFGYISDKWLY

SEQ ID NO: 169913 - protein, 207 aa, Glycine max
  unsure (1)..(207): unsure at all Xaa locations
  Clone ID: PAT_MRT3847_124446C.1.pep
MENLISLVNKIQRACTALGDHGEASALPTLWDSLPAIAVVGGQSSGKSSVLESVVGKDFLPRGSGIVTRRPLVLQLHKIDEGGREYAEFLHLPRKRFTDFAAVRKEIQDETDRETGRTRQISSVPIHLSIYSPNVVNLTLIDLPGLTKVAVEGQPDSIVQDIENMVRSYIEKPNCIIXAITPANRDLATSDAIKISREVDPTGEKTF

SEQ ID NO: 169914 - protein, 56 aa, Glycine max
  Clone ID: PAT_MRT3847_124447C.1.pep
CECKICNEMIAERAFVFFHRATFVATSQVRLYIALHLSVKDPYYVIEFSFNCICQK

SEQ ID NO: 169915 - protein, 86 aa, Glycine max
  Clone ID: PAT_MRT3847_124448C.1.pep
CSGAPRYVQQVLHEHIHQRIPHLGLVIYMVKCFFRVMAPQNLVEKPDLNFRYRKLLLRIALNRTLPALEYQISFSFVRTDVPAMES

SEQ ID NO: 169916 - protein, 45 aa, Glycine max
  unsure (1)..(45): unsure at all Xaa locations
  Clone ID: PAT_MRT3847_124449C.1.pep
NVLFLLLNYLKKXMGPFSCLGFLSSYSLLAKMLDFKVVLIFFTWL

SEQ ID NO: 169917 - protein, 208 aa, Glycine max
  Clone ID: PAT_MRT3847_12444C.1.pep
RRFPGRPRVRVTELKMKLGTRSQFSTQRKKVDESTKQLQFDIQNLKAQKVQLQCKIKLESVQFRLCKALLEKDFFQLKKEGRRNEVKTQSLLASNDRLKMVLQRKTEEASAATKRLQDMITARKAVSHRSTGARSRNGQLILDAEQELEATTQLHKLCSQYESKMEKMAGEISQLKEENEILRQEKLGSQLQEVDCDSQEKDSDIPDL

SEQ ID NO: 169918 - protein, 51 aa, Glycine max
  Clone ID: PAT_MRT3847_124450C.1.pep
SIIQLPESPFMYSPESNLQVKSYDHLNFARASHEQLLVSQNIMLLNTTSPL

SEQ ID NO: 169919 - protein, 107 aa, Glycine max
  Clone ID: PAT_MRT3847_124451C.1.pep
SLPSLLKKFSNHGLNLFHIFTILSKTQSFYLNSPVDIAQLSESRDMQEECIGSNQAMQSTPPSLWGLQQNSPGPIFVDPPLDPKIKNILYFNIINYDMENGGRGAVA

SEQ ID NO: 169920 - protein, 73 aa, Glycine max
  Clone ID: PAT_MRT3847_124452C.1.pep
IRLEKKEWLYVKESNLWSLSGDANSIMPMLRLSYLNLPIKHLRYLNLSEGSFETLPESLCALWNLQILNFQLF

SEQ ID NO: 169921 - protein, 127 aa, Glycine max
  Clone ID: PAT_MRT3847_124453C.1.pep
MELVPYSDPSSTTPAWQDMFRSASARHPSSTPAPHAPPSQSHAPSPSPHAPPNPPSDADPDGKNTFSGDPQVRLALYIAMAHAGLAFAIFILYTFSKLLEQYLRPLQWAVLCSIPLRGIQQTLVKFW

SEQ ID NO: 169922 - protein, 70 aa, Glycine max
  Clone ID: PAT_MRT3847_124454C.1.pep
MEEKCPFTLGNHLSNFIYLNKAHYYKQRVCLNLLKTMLTPLLENCKSLKYLVDESAFAFVNQNVVFYSLK

SEQ ID NO: 169923 - protein, 101 aa, Glycine max
  Clone ID: PAT_MRT3847_124455C.1.pep
SLFLELAPRVYIYLIMLFIESFFSVKRNREREFIRKRARRLREVLPREIKLVTACIELVMFHDQCDDDELSFLMYVGTLLNHINSWCRSLLVALLCFLFLY

SEQ ID NO: 169924 - protein, 161 aa, Glycine max
  Clone ID: PAT_MRT3847_124456C.1.pep
MASSASTTLSSPFLRLEFPSSTKLPIRKIPGDCGFPVIGPFKDRQDYFYKQGRDEFFKSRIQKYQSTVFRTNMPPGPFLAPDPNVVVLLDAKSFPVLFDNSKVEKKDVFTGTFMPSTELTGGYRVLSYLDPCEPKHALLKQLMFFLLKSRRAHVISEFHAS

SEQ ID NO: 169925 - protein, 519 aa, Glycine max
  Clone ID: PAT_MRT3847_124457C.1.pep
MASSASTTLSSPFLRLEFPSSTKQRSSISIRASVSEKPPLPAVSVTSPEPSKLPIRKIPGDCGFPVIGPLKDRQDYFYKQGRDEFFKSRIQKYQSTVFRTNMPPGPFLAPDPNVVVLLDAKSFPILFDNSKVEKKDVFTGTFMPSTELTGGYRVLSYLDPSEPKHALLKQLMFFLLKSRRAHVISEFHASYKELFHALEANLAEAGKASFGDANDQAAFNFLSRSLFNSNPADTKLGLDGPKIVQKWVLFQIGPILRLGLPQFLEESTIRSFRLPFSLIQKDYQRLYDFFYESSGLVLDEAERLGITRDEACHNLLFATCFNSFGGMKLFFPNVLKWIGRAGVKLHARLAEEIRSAVRSGGGEISMAAMEKMPLMKSVVYEAFRIDPPVALQFGRAKRDLIIESHDHAFQVKEGEMLFGYQPFATKDPRIFERAEEFVGDRFVGEEGEKLLKHVLWSNGPETESPTLGNKQCAGKDFVTLVSRLFVVEFFLRYDSFEIQVGTSPLGSSVTITSLKRASF

SEQ ID NO: 169926 - protein, 68 aa, Glycine max
  Clone ID: PAT_MRT3847_124458C.1.pep
IEALQMRTLLCYSDLFLYLCFLSFIIDFLSSKMSSKFDQTLNPHRPYYLHPNGNPATALVSPGLDPTN

SEQ ID NO: 169927 - protein, 97 aa, Glycine max
  Clone ID: PAT_MRT3847_124459C.1.pep
PRKKPPGVFPMVVSPIFGPGVGVKIGASQLALLSFNPVFVPKKRGVKKLFLWVILPPLKPFLVVLGIIKGMPPWKNFLKRILGVKRFFTLGGFLGSF

SEQ ID NO: 169928 - protein, 383 aa, Glycine max
  unsure (1)..(383): unsure at all Xaa locations
  Clone ID: PAT_MRT3847_12445C.1.pep
MNTKSLQILVHSPDLGISLQSTTNHETLSDLKNSLFPQSHQSFYFTFNGKPLPDKTPLSQFPPLSTLSLRSRLLGGGGDGGATGAESRDCYLNMYADKKPDKVDPNEQRLSKWHNCALSNEPLREPCVIDKLGNIFNKEALVEALLGKKLPKEFGHIKGLKDMINVQLSAIPGADDGAKFQCPVXGLEFNGKYRFFALRNCGHVLSAKALREVKSSSCLVCHKEYADVDKVVLNGSDEEVAVLRERMEEEKAKIREKKSKKVKNNGNDDGVSLEGTRLSGTKHGVDGKGVEKASAKVERNGKVGNGNVGVNGGAAAAAKRFKAVDLAPANATKDVYASIFTSSRKSEFKETYSCRSLPLGRNRFRCLVYSCLYCFIVIQCTEF

SEQ ID NO: 169929 - protein, 125 aa, Glycine max
  unsure (1)..(125): unsure at all Xaa locations
  Clone ID: PAT_MRT3847_124460C.1.pep
VFSWAVLGLFAVGLVGWAVGAFLVRPGRVLPLLLVLGSVAAGGVGLRRSFLRAGVALRPAALWFVXRLCVCAVLGSVAAAVAFAVCLPSARLCAGPSVSVAWAVAWAWVLSIAWVGPGFSGLGFL

SEQ ID NO: 169930 - protein, 32 aa, Glycine max
  Clone ID: PAT_MRT3847_124461C.1.pep
LVKDGKLMSVLDSKFPVIKAEDAWAKIIDGHA

SEQ ID NO: 169931 - protein, 52 aa, Glycine max
  unsure (1)..(52): unsure at all Xaa locations
  Clone ID: PAT_MRT3847_124462C.1.pep
LYVKMQHXDSCVLYSHVVRVRSRSGRRKCEPPQXSLRRRVYAPTPGTSGQAP

SEQ ID NO: 169932 - protein, 56 aa, Glycine max
  Clone ID: PAT_MRT3847_124463C.1.pep
LTIIFLIFFFCSINSYLDIKENIIFRKYKGATGTLNSCHSYHPNNSHLRKAERSFI

SEQ ID NO: 169933 - protein, 64 aa, Glycine max
  Clone ID: PAT_MRT3847_124464C.1.pep
GYVAYTDLRGMHDSKNNTMCSLSLAKANFREYSVNAFYFLLFCLFLKFKRYQFKIKRDKMNFII

SEQ ID NO: 169934 - protein, 82 aa, Glycine max
  Clone ID: PAT_MRT3847_124465C.1.pep
FMCLHGREKMIEGHGREKMIEGHGREKMIEGGCGREKFQGPEEVDWRRRRSALFIVSVIVTLLNLISIELLRSLAVSPPTRL

SEQ ID NO: 169935 - protein, 42 aa, Glycine max
  unsure (1)..(42): unsure at all Xaa locations
  Clone ID: PAT_MRT3847_124466C.1.pep
LLHXRSRVISRKMIFGNSLRVASXXXNKFSRFRAKWTSINEL

SEQ ID NO: 169936 - protein, 83 aa, Glycine max
  Clone ID: PAT_MRT3847_124467C.1.pep
QEVKLKPQWLLLLSNPEPSVGQMSSTENKSQATMQKKHAALRLPPWEPTQSRQRCQQNIYLQSPLVLLLPPPSFTWSSGQEFT

SEQ ID NO: 169937 - protein, 109 aa, Glycine max
  unsure (1)..(109): unsure at all Xaa locations
  Clone ID: PAT_MRT3847_124468C.1.pep
GGGFYETFYYEWVXKGGPPAFPKTFXNFPKLLFFGFQIVFFSGKIFSKMAGTKPTLKKGGFPPWGRFIFKGPHFFPPKALFFKSAIKKIFFGGGNKIVGILGAPWGVFF

SEQ ID NO: 169938 - protein, 51 aa, Glycine max
  Clone ID: PAT_MRT3847_124469C.1.pep
KKVKIQVSKYVPLKEEITYKKNLITRCNYFIQFPSVLRELSLFHFRFHLGS

SEQ ID NO: 169939 - protein, 89 aa, Glycine max
  Clone ID: PAT_MRT3847_12446C.1.pep
PWSWSVGQLRVSARWLKWVFRVTSLVRYVELTAPATPALASEVLESYSFKQRWPLEIMIRSIYSFKTSKLCSMYYVALWCPVSQQTPLV

SEQ ID NO: 169940 - protein, 78 aa, Glycine max
  unsure (1)..(78): unsure at all Xaa locations
  Clone ID: PAT_MRT3847_124470C.1.pep
TPRGSMLDLTNCRSKIARTENTSVGTTLTRGLMANSTTKGNAXTVLFEYRTHRLKGTINVAVTVVCFRESRNLMKSVH

SEQ ID NO: 169941 - protein, 89 aa, Glycine max
  unsure (1)..(89): unsure at all Xaa locations
  Clone ID: PAT_MRT3847_124471C.1.pep
HPMSGPESGKYSWKGLRMMYEKVRIISGGHNHVMEDFLHICETEMCRMLEMTCESHDEYGLSSQVLTHLTGRILSVQGXQNTLIDTRGF

SEQ ID NO: 169942 - protein, 169 aa, Glycine max
  Clone ID: PAT_MRT3847_124472C.1.pep
MKTAKGKGAARPSKESLKPVDDRKVGKRKASGKPEKSRAPKKEKKAKKDPNKPKRPPSAFFVFLEEFRKTFKAENPLVKAVSVVGKAGGEKWKSLSSAEKAPYEAKAAKRKAEYEKLIKAYEKKQASSADDDESDKSKSEVNDEDDASGEEDHQEDEDDEEEEDDEDDD

SEQ ID NO: 169943 - protein, 166 aa, Glycine max
  Clone ID: PAT_MRT3847_124473C.1.pep
MKNAKGKGAARASKESLKPVDDRKVGKRKASGKPGRSSAPKKEKKAKKDPNKPKRPPSAFFVFLEEFRKTFKAENPNVKAVSVVGKAGGEKWKSLSSAEKAPYEAKAAKRKAEYEKLIKAYDKKQASSADDEESDKSKSEVNDEDDASGEEEEEDDEEEEDDEDDD

SEQ ID NO: 169944 - protein, 103 aa, Glycine max
  Clone ID: PAT_MRT3847_124474C.1.pep
MPKAKSDAKAADSRLKRKGAGAGRKQSRKAAKDPNKPKRPPSAFFVFMSEFREQFKKEHPNNKSVAVVGKAGGEKWKSLSDAVRIMILRNILMIIFCVWLYMI

SEQ ID NO: 169945 - protein, 159 aa, Glycine max
  unsure (1)..(159): unsure at all Xaa locations
  Clone ID: PAT_MRT3847_124475C.1.pep
MKNAKGKGAARASKESLKPVDDRKVGKRKASGKPGRSSAPKKEKKAKKDPNKPKRPPSAFFVFLFVSSLLFPSYLSLRKMIXLIFLLCDSEEFRKTFKAENPNVKAVSVVGKAGGEKWKSLSSAVSFAIVINNGSFCYLLNYLTLHCFFSCFQYKFILK

SEQ ID NO: 169946 - protein, 77 aa, Glycine max
  unsure (1)..(77): unsure at all Xaa locations
  Clone ID: PAT_MRT3847_124476C.1.pep
MASRNPFLFTCESVNDGYPYKLCDQISDTLPDACLKQDPYRMVACETCTNTHMVRACGEITTKANRXYDKIARDTCR

SEQ ID NO: 169947 - protein, 169 aa, Glycine max; identical to SEQ ID NO: 169942
  Clone ID: PAT_MRT3847_124477C.1.pep

SEQ ID NO: 169948 - protein, 299 aa, Glycine max
  Clone ID: PAT_MRT3847_124478C.1.pep
MEETIPVIDVEKINSDEGECKKLREACERWGCFRIINHSIPATLMADMKKVIEALLDLPMEIKKRNTEVIAGSGYMAPSKVNPFYEALGLYDLGSSQAMHNFCSQLDASHHQRQILEAYGQAIHGLAVKIGQKMAESLGVLVADFEDWPCQFRINKYNFAPEAVGSTGVQIHTDSGFLTILQDDENVGGLEVLHSSTSFVPIPLFPGSLLVNLGDIARVWSNGRFCNLTHRVQCKEATKRFSIATFMIAPRNRNVEAPAELVDHDHPRLYQPFIYEDYRKLRISNKMHTGEALELLRLA

SEQ ID NO: 169949 - protein, 132 aa, Glycine max
  Clone ID: PAT_MRT3847_124479C.1.pep
KVSPKSGSLECISCQQPMSSLLLVKPLISPGLFLHLVSFRIQNSPPAWFEILLLAHGKVSLSQPVILHDGWGLFLSAWGLVFHASSCLLPVDNLVLAMSCFFPVLSSSSLCLLHSGLCVGCYVSDLILVIIA

SEQ ID NO: 169950 - protein, 68 aa, Glycine max
  Clone ID: PAT_MRT3847_12447C.1.pep
FPQRAKCVYTLSLAPTTAVFSYRVGRRNPSNYSQFQFMSFVFHNHLFHKVLINIECLSKPPPRMFSLI

SEQ ID NO: 169951 - protein, 143 aa, Glycine max
  unsure (1)..(143): unsure at all Xaa locations
  Clone ID: PAT_MRT3847_124480C.1.pep
VFFVAAVVMVAWPCHGARXQRFPLRMRTGFGERSSDVSFPCFMLAVETHNIRAFKTIPEQCDLPTKDFIDGKQFTSNSISVNQQAFFYASEREVHHIDVFIFCIDYTVLSDIPYYEKLGYGVEEFNETLYYECVSXGDAPALV

SEQ ID NO: 169952 - protein, 72 aa, Glycine max
  Clone ID: PAT_MRT3847_124481C.1.pep
DDFDLGIRFRIPTKIVLIPSPCIFFFLFLKNSQGLSCDCETINKFMGAERSYKSTIFLSWQHYGGFGFGCGW

SEQ ID NO: 169953 - protein, 42 aa, Glycine max
  Clone ID: PAT_MRT3847_124482C.1.pep
KLISCYLYSSANRLNIKFRKMNTKRKLQNSVNQFSRTRRANP

SEQ ID NO: 169954 - protein, 87 aa, Glycine max
  Clone ID: PAT_MRT3847_124483C.1.pep
TKADMFHLDRMISEPPLRSPTPKLTPRMRDGMTTIAGGRPMLLVRDPAVTTDYERGPDIEEAIGHDHTAARVNDAGHDRYGDADVSL

SEQ ID NO: 169955 - protein, 57 aa, Glycine max
  Clone ID: PAT_MRT3847_124484C.1.pep
ICEYHKLEQHPHELSPPFMSEAEKAHLSTVNKHQMQHHSDPLTPCLSMSLCMCCLYH

SEQ ID NO: 169956 - protein, 175 aa, Glycine max
  unsure (1)..(175): unsure at all Xaa locations
  Clone ID: PAT_MRT3847_124485C.1.pep
MEAAVVDPGSSLLKAGFAIPDQAPAMIIPTQMKRMLDDGSMTDNPAVDDVAVDPVCRGYVSDWDAMEDLLHYVLYTGFGWEMGNEGQILFTDPLCTPKANKEQLVQLMFETFNISGFYASEQAVLSLYAVGRISGCTVDIGHGKIDIAPVIEGAXNHIASRRFEXGGIDLTKFLA

SEQ ID NO: 169957 - protein, 111 aa, Glycine max
  Clone ID: PAT_MRT3847_124486C.1.pep
GLVHDKRVHGGISLGSVVQDPHSSKADELKQVLIDKNMDVNMMKIGSSLGAAATCSDFEQLEAATAHVSVKEGGHLPMSVVVPEGRVHGGSLMAMLTGSSSPWLKQRERSS

SEQ ID NO: 169958 - protein, 609 aa, Glycine max
  Clone ID: PAT_MRT3847_124487C.1.pep
RVDSSLSLGLGRSTSSSDSKGSSATACTALSSAKEIDEESSMPMDIELDFTLHLGCEKVKSPKKPVNPNLKIFELQPKFDLELSLSTGPSESDITSVHLNPSPLQLNMEIPLTFSGTQNTDEGSTSCSWQPGIVLPSSKMSSNTGTNFLLSQSSKQFDHSPIVVDLSSTGPKSSVTCTSGLTQQQQPLHRPGNSKTCQVEGCGKGARGASGRCISHGGGRRCQKPGCHKGAEGRTVYCKAHGGGRRCEFLGCTKSAEGRTDFCIAHGGGRRCSHEGCTRAARGKSGLCIRHGGGKRCQRENCTKSAEGLSGLCISHGGGRRCQVPGCTKGAQGSTMFCKAHGGGKRCTAPGCTKGADGSTPYCKGHGGGKRCTYQGGGVCTKSVHGGTNFCVAHGGGKRCAVPGCTKSARGRTDHCVRHGGGKRCKFEGCGKSAQGSTDFCKAHGGGKRCSWGHPGSEYGIQQDGPCNSFARGKTGLCALHSGLVHDKRVHGGISLGSVVQDPHSSKTDELKQVLVDKNMGIDMMKIGSSLGTATCSDFEQFEAATAHVSAKEGSHLPVSVAVPEGRVHGGSLMAMLTGSSSRGSSSGRGLVGDPSEPIKGYAMPQSWI

SEQ ID NO: 169959 - protein, 250 aa, Glycine max
  unsure (1)..(250): unsure at all Xaa locations
  Clone ID: PAT_MRT3847_124488C.1.pep
MEVTSAVHLHSVGFLHLQTHVERLNGRAFFLSTRPRKVKVHLPCHHHHHLNHLSNTNGIGACSDRTSVILNSTSVTSTTSSAAGSLSEVEKIKQKCLTWQWKGQYSINYFVSSDSPQQLHGSHPPLLLVHGFGASIPHWRRNISTLAQNYTVYAIDLLGFGASDKPPGFQYTMETWAQLILDFLNEVVQKPTVLIGNSVGSLACVIAASDSSQTLVRGIVLLNCAGGXMNNKALXDDWRIKLLLPLLWLI

SEQ ID NO: 169960 - protein, 43 aa, Glycine max
  unsure (1)..(43): unsure at all Xaa locations
  Clone ID: PAT_MRT3847_124489C.1.pep
HVVVARFFIHEHIIKSRXFSPPPSQGQPLRLAHLTPCECSDEV

SEQ ID NO: 169961 - protein, 52 aa, Glycine max
  Clone ID: PAT_MRT3847_12448C.1.pep
MNVDLESLAEATSGAIGSLISTTILYPLDTCKTKYQAEARSSGRIKYRNLTD

SEQ ID NO: 169962 - protein, 74 aa, Glycine max
  unsure (1)..(74): unsure at all Xaa locations
  Clone ID: PAT_MRT3847_124490C.1.pep
LLLTNTHGWRDDGHAIDCKIAHARLITVAEKAAIKLSPNSANNDLXSKCSWADRHARAYPSVSAMHFGDSPDYA

SEQ ID NO: 169963 - protein, 168 aa, Glycine max
  unsure (1)..(168): unsure at all Xaa locations
  Clone ID: PAT_MRT3847_124491C.1.pep
AAEKMGGPKGFKXVRGAPMAPKSELGESLGYASPIGNPIQEKPHCFKGGASFFSEKIEKGPGSISVVFSPPNIGSGKWASTKAIQLGVGKVNPQLKFAPLYGKQQALSFGLNNPGFLVEKYIPFGPGNRGSPSLFRRGEKKTGLLVASGFYRQFLRKELGRKLKTAMF

SEQ ID NO: 169964 - protein, 49 aa, Glycine max
  Clone ID: PAT_MRT3847_124492C.1.pep
KVGDAARLVIRSQAIKQLRSSLPLVRKLWILEGVTPREPKEECKVTHQT

SEQ ID NO: 169965 - protein, 104 aa, Glycine max
  unsure (1)..(104): unsure at all Xaa locations
  Clone ID: PAT_MRT3847_124493C.1.pep
ANNQHTLLNILKPIHTKKIYQYITLLYNLXGXPNILXHLHIITYHHSKTPILIYXSDNITHLTLIYITLTNYNIHYYIYQLLKSLYYYHSHSIIHIYLNLYNFI

SEQ ID NO: 169966 - protein, 40 aa, Glycine max
  Clone ID: PAT_MRT3847_124494C.1.pep
LARDMYIYRYDDVNDTINVVGGFRQRQPLLGLEKQHELLA

SEQ ID NO: 169967 - protein, 55 aa, Glycine max
  Clone ID: PAT_MRT3847_124495C.1.pep
MKNLFNGEPKKKPPGGGLKNGGGGKPGGTTKKRRRETPPLTQGGKKKKGPPPPPL

SEQ ID NO: 169968 - protein, 50 aa, Glycine max
  Clone ID: PAT_MRT3847_124496C.1.pep
GVWDRPPKGWELEATGRLFWGWNVYHFGWEIEDLNPLWSDLVLKFKIPFY

SEQ ID NO: 169969 - protein, 73 aa, Glycine max
  unsure (1)..(73): unsure at all Xaa locations
  Clone ID: PAT_MRT3847_124497C.1.pep
GAHTGRACQRVDSVNPSETQLNGLANYPPFSSXRHSDKARTXPPSKPVRTMYCHWDAPWRRPSCAGGVGEHTQ

SEQ ID NO: 169970 - protein, 120 aa, Glycine max
  Clone ID: PAT_MRT3847_124498C.1.pep
DSYVLLNLLPYHLKDITDLILNDLNYLLNLLLYDLNRFLNLLLYDLDLLSGVTRHLIHLFLDSTLDLADFVTLPVKYRLFFGKGLGSSFFLFLLMSLLSTVTDVTGAYPLLSSSHDHARK

SEQ ID NO: 169971 - protein, 64 aa, Glycine max
  Clone ID: PAT_MRT3847_124499C.1.pep
SLKKLGEKGPNKTLNQGEEWKLKTLFLAPKNEKKPRPGQQSSPQWDLQANRGGGGVFYSKREGP

SEQ ID NO: 169972 - protein, 77 aa, Glycine max
  unsure (1)..(77): unsure at all Xaa locations
  Clone ID: PAT_MRT3847_12449C.1.pep
MAYSQLQKVETSLQIKASAEQFYDCGWHXPNTIANISSEDIQSVEVHERAWGXDGSIVSWNYRHEGTSXVAKQVLEG

SEQ ID NO: 169973 - protein, 116 aa, Glycine max
  Clone ID: PAT_MRT3847_1244C.1.pep
TELSSTNPNLKFSNDQIEAISTRIPVDKAELKNYFPKSWCDRYGDVVLDVVKKEFKDHVAEMENMRNIAREKHSNSRRWTTTTFDGDENIHPNLFGHRDNNSVRSSNINPFSHGYA

SEQ ID NO: 169974 - protein, 57 aa, Glycine max
  Clone ID: PAT_MRT3847_124500C.1.pep
FGFFFFFFFGAKAVQLLYAAVRNSHQPNFIQKRPFSKHLKKNEPILSLTHPLHVRRC

SEQ ID NO: 169975 - protein, 47 aa, Glycine max
  Clone ID: PAT_MRT3847_124501C.1.pep
IQMGNYYIVSVTIVQPVLIFQQCYYIIIGCNYGYVVVRDHKIIFAKR

SEQ ID NO: 169976 - protein, 127 aa, Glycine max
  Clone ID: PAT_MRT3847_124502C.1.pep
PVPYVEETMRNIYCQMGARIYYCRIDPPTERTLHQINYPETYKLIFNHLSSEFEKNNALNHLIQLLGVPIAYPRLQLLQNIFCSPLIAPIKFLNKRFSFSGSVFNIIDCNVHLLDDLDDHYTAHQHK

SEQ ID NO: 169977 - protein, 87 aa, Glycine max
  Clone ID: PAT_MRT3847_124503C.1.pep
CSSSTSQLCFLFVQLLKETSESPQGFALVVQSKNIAISFSKERCPRPKSLTVQCTYPLITALHLPLYLFFVITPIFSFLFFFISDAW

SEQ ID NO: 169978 - protein, 47 aa, Glycine max
  Clone ID: PAT_MRT3847_124504C.1.pep
NLGFIDSKMVQRSFEFVVTFGSRLEFCLRGMLTSLGIMGLVDSPSLI

SEQ ID NO: 169979 - protein, 321 aa, Glycine max
  unsure (1)..(321): unsure at all Xaa locations
  Clone ID: PAT_MRT3847_124505C.1.pep
PRVRLLVSGSEDGSVRVWSLFMIFDDLRNQQASSLYEYSFSEHTLTVTDVVIGNGGCNAIIVSASKDRTCKVWSLSRGMLLRNIVFPSIINCIALDPAEHVFYAGSEDGKIFIAALNTESIATNNXGMHIIGSFSNPSNQVTCLAYGSSENLLAIGSLDGIMXVWNARTRNIVGHXKHSRKPVNRNILRKTRKXTPVITYLLNVQASSRKQGSXLPPPLEKYANSIDDDSDMKTMISLGGGRKSVDPSYISSHVISNYIKELQHQGSAAASEMEMEKLKHDYQKSVQMANQLKKMNEKLHQFCVKELLDGSQARTLGENDN

SEQ ID NO: 169980 - protein, 64 aa, Glycine max
  Clone ID: PAT_MRT3847_124506C.1.pep
LVQGFYQTFGVPLNSERMLISGYNAINITAIVSTLTHLESMSYEILWMTGQYLREIGCCKFHMI

SEQ ID NO: 169981 - protein, 83 aa, Glycine max
  Clone ID: PAT_MRT3847_124507C.1.pep
KLGVKVLLRQKYFCKSIRTLALGFILLLSIVLLWNAHHSNFNFSPAIALATFLSYLNSCSARSTPWRSWPYKTKENKKKQQLA

SEQ ID NO: 169982 - protein, 70 aa, Glycine max
  Clone ID: PAT_MRT3847_124508C.1.pep
APTRPFHPLMAAHKKRPYYRSCGRDGLYRGSCTRAGISYRGSHASKHGPIRLKQLHIIHTPYGMPDEFKH

SEQ ID NO: 169983 - protein, 265 aa, Glycine max
  Clone ID: PAT_MRT3847_124509C.1.pep
MKTLEMSLLAGAYVQPRFPCNYNPTLSASCRTQKTATSLTVTTPKKTEKALFTESFDQTRDAQPLPEKKKRVFFLDVNPLCYEGSKPSLHSLGRWLSLFLEQVSHTDPVIAVIDGERGSEHRRKLLPSYKAHRRKFTRHISSLQRFSSGHVGRSLQVINDVLGKCNVPVIKVDGHEADDVVATLAGQVLNKGFRVVIASPDKDFKQLISDDVQIVMPLPELQRWSFYTLRHYRDQYNCDPESDLSLRCIVGDEVDGVPGIQHLVP

SEQ ID NO: 169984 - protein, 47 aa, Glycine max
  unsure (1)..(47): unsure at all Xaa locations
  Clone ID: PAT_MRT3847_12450C.1.pep
GGLFFSXXFFFFLCFFFFKQTLTSFFHPCLKPWGNNGPLKLLVDKKK

SEQ ID NO: 169985 - protein, 49 aa, Glycine max
  unsure (1)..(49): unsure at all Xaa locations
  Clone ID: PAT_MRT3847_124510C.1.pep
HNIRSDQNLTEEHSXYCLYQILRGLKHIQFRNVIHRDLKPSNLLLNSNL

SEQ ID NO: 169986 - protein, 275 aa, Glycine max
  Clone ID: PAT_MRT3847_124511C.1.pep
MPIPRFMLFSSQHRSTAAALALLRRCVPSTTTQSVRYSKSTSHGKTKHYLHPVFQPESSSASQVSRSWGAYVVPAAVLGFAGLAAFFHYNDERRAVPKGHQGGGLRNVANGPIIGGPFTLINTEKQAITERNFLGNWVLLYFGYTSSPDLGPEQVQIMANAIDILESKQNLKILPVFVSIDPQRDTPSQLRAYLKEFDSRIIGLTGPVAAIRQMAQEYRVYFKKVEEDGNDYLVDCSHNMYLLNPKLEVTRCFGVEYSAEELSEAIVKELNRNPS

SEQ ID NO: 169987 - protein, 84 aa, Glycine max
  Clone ID: PAT_MRT3847_124512C.1.pep
GSHSPIWYRTSRVDFSISVLSFTLFFSLIRIAVKVVLFEKHLGVGANVCFVSICGDNRVTEKTVFYLKRIRTCLVAYYSKCDSI

SEQ ID NO: 169988 - protein, 41 aa, Glycine max
  Clone ID: PAT_MRT3847_124513C.1.pep
GLAITIHAIIQLQSDRPPYSIYPSEHSLKAHCLPPHSTPAN

SEQ ID NO: 169989 - protein, 75 aa, Glycine max
  Clone ID: PAT_MRT3847_124514C.1.pep
WMKIKYNNRLSYVSYSLTPNDPKTTSHLIDFSSNLEVTPKFMVYNKFQHVRVLLTLLFKDTTKLFILNPLISPKL

SEQ ID NO: 169990 - protein, 257 aa, Glycine max
  Clone ID: PAT_MRT3847_124515C.1.pep
GSNIKYCSLTKKKNRMAELPSSEASSSSASSRKHSSSEAHLPAPDQKRPKQARDSSSKHPVYRGVRMRAWGKWVSEIREPRKKNRIWLGTFATAEMAARAHDVAALAIKGNSAILNFPELAASLPRPDSNSPRDVQAAAAKAAAMEVNDVPTTPSSSSSSASLSLSQSSSWSSLAVSSSSGDGPSTPEELGEIVELPSLGTSFEIPDPSGELVYLDPWPYSQAWSHGIYDESEGYFIGDSETESMILCGFEGSLWQH

SEQ ID NO: 169991 - protein, 232 aa, Glycine max
  Clone ID: PAT_MRT3847_124516C.1.pep
GSSSSRIGSRAELPSSEASSSASTRKHSHSVYRGVRMRAWGKWVSEIREPRKKNRIWLGTFATAEMAARAHDVAALAIKGNSAILNFPELASSLPRPDSNSPRDVQAAAAKAAAMEVNDAPTTPTSSSSASLSQSSSWSSLAVSSSSGEDPSTPEELGEIVELPSLGTSFEIPDPSGELVFFDPWPYSQAWSHGIYDESESYFFGDQISMQDSETESMVLCGFAFEASLWQH

SEQ ID NO: 169992 - protein, 313 aa, Glycine max
  Clone ID: PAT_MRT3847_124517C.1.pep
MANLPQSISTSGATSFGASSATAKDRSRIASVEHLVLQLNNPDLRENALHELSKKRELFQDLAPLLWNSFGTMSALLQEIVSIFPVISPPNLTPAQSTRVCNALALFQCVASHLDTRMQFLHAHIPLYLYPFLNTTSKSRPFEYLRLTSLGVIGALVKVDDTKVISFLLSTEIIPLCLRSMEMGSELSKTVATFIVQKILLDEIGLKYICTTAERFYAVAQVLGNMVETLVEQPSSRLLKHIIRCYLRLSDNQSACKALRTCLPDMLRDATFSNCLREDPTARMWLQQLLHNIGDNRVPALQGGGGFDRMMGS

SEQ ID NO: 169993 - protein, 212 aa, Glycine max
  Clone ID: PAT_MRT3847_124518C.1.pep
MVATAATLFNPQHLHTHGRVNIWAPRRISYLSGNVKSKFPFHRSEIHHQVHYFSHIAPLGATFKEPKGFGPTPRKMKKSKKMKKDYGEDEDEEEEEEDEEEEPDRGVIPEVVTNRMMNRMAVSVGIPLGVGLLFFPLFYYLKVGLKIDVPTWVPFIVSFFFFGSALLGVSYGIVSSSWDPLREGSFWGWTEAQKNWPVFWQSFRGGGGSRKN

SEQ ID NO: 169994 - protein, 57 aa, Glycine max
  Clone ID: PAT_MRT3847_124519C.1.pep
APGSAGKQSLRIGSYQHYTFSDLMDPLLLNHTNPHKVLVPLTHRRHPTSPIAKQKKK

SEQ ID NO: 169995 - protein, 101 aa, Glycine max
  Clone ID: PAT_MRT3847_12451C.1.pep
MDKVTRLASEKGVVIFTKSSCCLCYAVNILFQELGVNPVVHEIDHDPEGREMEKALLRQGCTAPVPAVFIGGKLMGSTNEIMSLHLSGSLTQMLKPYQALS

SEQ ID NO: 169996 - protein, 133 aa, Glycine max
  Clone ID: PAT_MRT3847_124520C.1.pep
KLLVRSSVQRLFKRLRRREEQSKRQKVSLTHQNHQNDTFLYLLFLHSTTKRKLPCPKIHFQTTLRIDVSHLAPLPDPFLFRLRSRYLVLVTSSFFSFFGFCVIQIELVSFFFFLVNFVHSHSNFAEFTGFDFD

SEQ ID NO: 169997 - protein, 101 aa, Glycine max
  Clone ID: PAT_MRT3847_124521C.1.pep
MEPPSQIVSLRTTTTDPDHVKVIQWDDFQHDLARLASLSSALHEANEKKRNLQHKLESLIQNVSSSGEWNRVLCLITKFLGGRKWNWGGEMNVTAFIMKMN

SEQ ID NO: 169998 - protein, 150 aa, Glycine max
  Clone ID: PAT_MRT3847_124522C.1.pep
MASSSPSPSPSPMFTVRRLQPELVAPAIPTPHELKPLSDIDDQEGLRFHIPMIQVYRNQPSMAEKDPVQVIRKALAKTLVFYYPFAGRLRERPDHKLMVDCTGEGVLFIEADADVTLDQLGDALQPPFPCFEQLLYNVPDSEENTDTPLL

SEQ ID NO: 169999 - protein, 196 aa, Glycine max
  Clone ID: PAT_MRT3847_124523C.1.pep
MAQAAGRNRVVGDYVVGKQIGAGSFSVVWHGRHKVHGTEVAIKEIATLRLNKKLQESLMSEIFILKRINHPNIISLHDIINQVPGKIHLVLEYCKGGDLSLYIQRHGRVPEATAKHFMLQLAAGLQVLRDNNLIHRDLKPQNLLFSRNDEKSVLKIADFGFARSLQPRGLAETLCGSPLYMAPGFMRLLTYDAHAD

SEQ ID NO: 170000 - protein, 113 aa, Glycine max
  Clone ID: PAT_MRT3847_124524C.1.pep
ANPEYVDKTYLSVKGGLARGEFRPDASEENLRASVTTINDTLGGKKKMDLFEMARVDKSRSIEETMKTLLKLRDEGHFKDIGLSEVSAKTIRAAAAVAPIAAVEVEYSPWSLD

SEQ ID NO: 170001 - protein, 82 aa, Glycine max
  unsure (1)..(82): unsure at all Xaa locations
  Clone ID: PAT_MRT3847_124525C.1.pep
MNSLKAVKMDLVPVMPKFVVNDLESLYGKSDTVYCLDGLFHFPQHISFGIFAHLSLLSNILLILGFAPXTFYYDLLMWVVEL

SEQ ID NO: 170002 - protein, 67 aa, Glycine max
  Clone ID: PAT_MRT3847_124526C.1.pep
MASSAIQQSTFTGQTALKQLNQFVRITGSTGKRRTNMHHIVMIAPQNIWHLNITLPTRLYQHTSYCI

SEQ ID NO: 170003 - protein, 131 aa, Glycine max
  Clone ID: PAT_MRT3847_124527C.1.pep
FSTFVLVRSLSIRTYANIPWHLINRTVTAVLLQLYPLRTPLYIVHWYYSSLHAHLPLLSSHAVFIYLNIRLYLSMVALLFMSVKRSIHLLYKDKSCTRIPLYASTHPYYRQSVGLPATVLGLCLYHSYPSI

SEQ ID NO: 170004 - protein, 64 aa, Glycine max
  Clone ID: PAT_MRT3847_124528C.1.pep
LFPFTRSILFIFILKNQKRELFHIILNKLIKRNTCLINELSSISERGGSILFFFWPTKELLNYF

SEQ ID NO: 170005 - protein, 32 aa, Glycine max
  Clone ID: PAT_MRT3847_124529C.1.pep
HKNEGFDEVLTAQQSPENPNWFQGTSHAVRQS

SEQ ID NO: 170006 - protein, 101 aa, Glycine max; identical to SEQ ID NO: 169995
  Clone ID: PAT_MRT3847_12452C.1.pep

SEQ ID NO: 170007 - protein, 344 aa, Glycine max
  Clone ID: PAT_MRT3847_124530C.1.pep
MDPQSMHFVLSTDSKPRLKWTPELHRRFIEATNQLGGADKATPKSLMRVMGIPGLTLYHLKSHLQKYRLGKSQELETCSDNKQEDYIETKSSSDGHCSREISIGAQNQLTENMQIAQALQMQMEVQRKLHEQIEVQKHLQLRIEAQGKYLQSVLKKAQEALAGYNSSPVGIELTKAELSQLVTIINNACPSSPISELTETRGLSLSCGERKRDRGTMCSLESSLTSSESSGRKEEKQPMEEIVEFKSSINVSLQLPLMEILTEDKASNGGSSNEASGRKRSATAAESDDGSCVVEQPCGKRCGNKLRKAKLSEMLDLNSQCQSDMDSTSSKTLDLNCSLNFWEP

SEQ ID NO: 170008 - protein, 66 aa, Glycine max
  Clone ID: PAT_MRT3847_124531C.1.pep
AQLSLRDRTQEFHSLSERLKNSRSGPNGPTSRGSSYTSEEQRSSDRESIGVHLKGLQNRLQDSPYD

SEQ ID NO: 170009 - protein, 36 aa, Glycine max
  Clone ID: PAT_MRT3847_124532C.1.pep
NYLCSCYPNTFKTVTQINCLCFTFTIFPGLDMGLDA

SEQ ID NO: 170010 - protein, 79 aa, Glycine max
  Clone ID: PAT_MRT3847_124533C.1.pep
EFGSRVFSSGFSCIERWLFSLNVKKWGLPPAGDAESIWTKKLGFRKMSEDQFSQHLRGGQLPLFNKTSMLEKPGQRAIE

SEQ ID NO: 170011 - protein, 71 aa, Glycine max
  Clone ID: PAT_MRT3847_124534C.1.pep
KTAPPNLWFTFCPKHVIFCKGGGVIFVFWTMLSLPFYRGFVGPPGPPQKTLLGVLGVFFLLKPPPPPRVVF

SEQ ID NO: 170012 - protein, 35 aa, Glycine max
  Clone ID: PAT_MRT3847_124535C.1.pep
SDAPELISHDSNGPLRSSRVFAHESASRAGRKSQG

SEQ ID NO: 170013 - protein, 122 aa, Glycine max
  unsure (1)..(122): unsure at all Xaa locations
  Clone ID: PAT_MRT3847_124536C.1.pep
MLSTSSYCVFTRSFLPNPIKGFPRPATLRPFPRILESHAKSPKNRLSILCFRHDHHYPETPQPEVIEHYLHEELVQSEFNDSSVTKRELESAIQKAANEVFKVIGYGWXLCPWNAMTILQVM

SEQ ID NO: 170014 - protein, 341 aa, Glycine max
  unsure (1)..(341): unsure at all Xaa locations
  Clone ID: PAT_MRT3847_124537C.1.pep
MLSTSSYSVFTRSFLPNPIKGIPRPATLRPFPGILESHAKSPKNRLSILCFRHDHHSPETPQPEVIEHYLHEELVQSEFNDSSVTKRDWKSTIQKAANEVFKVIGYRWVVPWNAMTILQVMLLWTTAFWFIGSWMIPFAAHITGKGKAQTTFXGPKDFSLVTDVTEGLAGVAILLRCLSRFRPLPPDWFEFSLKGNWQLDVIMGCLMFPLVNRLSQFNLDLLPLLPSTPVTLSSVEQSIRARDPVAMLLYATVVSVCAPVWEEIVFRGFLLPSLTKYMPVWCAILVSSIAFALAHFNIQSMLPLIFLGMVMGVIYTRSRNLLPSMLLHSLWNGFVFLDLMK

SEQ ID NO: 170015 - protein, 67 aa, Glycine max
  Clone ID: PAT_MRT3847_124538C.1.pep
GIIKTRSPCPMSVPYVPYIAAQRIACCVRYHSQSPMSRKKYVHFDDNQSSLYLHLKMHAGYRRLSVL

SEQ ID NO: 170016 - protein, 42 aa, Glycine max
  Clone ID: PAT_MRT3847_124539C.1.pep
SEMVNWSILGRKYMVVVTDHPMLLRVVYVGENPRKRIVIVGY

SEQ ID NO: 170017 - protein, 101 aa, Glycine max
  Clone ID: PAT_MRT3847_12453C.1.pep
MDKVMRLASEKGVVIFTKSSCCLCYAVNILFQELGVNPVVHEIDHDPEGREMEKALLRLGCTAPVPAVFIGGKLRGSTNEIMSLHLSGSLTQMLKPYQALS

SEQ ID NO: 170018 - protein, 315 aa, Glycine max
  unsure (1)..(315): unsure at all Xaa locations
  Clone ID: PAT_MRT3847_124540C.1.pep
MSCSNYARSCTFFYLFLAVLLAKTSSCFSAKVYVVYMGSKTGEDPDDILKHNHQMLASVHSGSIEQAQASHVYSYKHAFRGFAAKLTNEQAYQISKMPGVVSVFPNAKRKLHTTHSWDFIGLLGNESMEIHGHSTKNQENIIIGFIDTGIWPESSSFSDTDMPPVPRGWKGHCQLGEAFNASSCNRFXKVIGARYYISGHEAEEGSDREVSFISARDSSGHGSHTASTAVGRYVANMNYKGLGAGGARGGAPKARIAVYKVCWDSGCYDVDLLAAFDDAIRDGVHIISLSLGPESPQGDYFDDAVSVASFHAAKH

SEQ ID NO: 170019 - protein, 167 aa, Glycine max
  Clone ID: PAT_MRT3847_124541C.1.pep
IVQVVVNFKMPGKVHRAAMSNLSTSHMLIAAATEDVQVRLCDIASGAFAHTLSGHRDGVMTVEWSNSSEWVLVTGGCDGAIRFWDIRRAGCFQVLDQSRTQLGRRPTILNRSMITKDSSTKLSAAQKKHANGSGSRQQLIGRVPSKGPMKQKLHPGMLSTQDRATAH

SEQ ID NO: 170020 - protein, 37 aa, Glycine max
  Clone ID: PAT_MRT3847_124542C.1.pep
LSITIESNLFFLEPYHFLDLILSKIQNLTLNFSKSHR

SEQ ID NO: 170021 - protein, 207 aa, Glycine max
  Clone ID: PAT_MRT3847_124543C.1.pep
TSCRMHSLLWEAIITKIVAKRMKRRNKKRNLRKKYYEDWSSIPSLPLKAVRRRFSVKCRKKIHRRKKELKKKNFADWSSLPRGILEMVAERLTFIDCLSISKVCTSWNRVLGEELPRWQRHGFPWLLVSDQQNKEIRTCISILENRVWELELSEAYGRQISLPLIWNFYHKMVHSGLPSENNFICMLLHSQYCELAFWVQEQIHGVT

SEQ ID NO: 170022 - protein, 39 aa, Glycine max
  Clone ID: PAT_MRT3847_124544C.1.pep
ASHHLNALLLNSYMTNIHLQFANHDQYLLTYLPSFTHPP

SEQ ID NO: 170023 - protein, 60 aa, Glycine max
  unsure (1)..(60): unsure at all Xaa locations
  Clone ID: PAT_MRT3847_124545C.1.pep
MRLVDGVWRILALNEAGGWKDRTTLEDMNLVVRASFKGXKFLFLSDLKVGFLQTLLLYFI

SEQ ID NO: 170024 - protein, 76 aa, Glycine max
  Clone ID: PAT_MRT3847_124546C.1.pep
MGAGGKTNKRTGEQTHKKDSEDNPDGPTQDNLKAVLGRRVTLQLTKATKADAQGKRKAEKETASEGTNTAENNKGE

SEQ ID NO: 170025 - protein, 166 aa, Glycine max
  unsure (1)..(166): unsure at all Xaa locations
  Clone ID: PAT_MRT3847_124547C.1.pep
HWELKPFKILXLDRDWEVHVSDFGXXRILGLHLQDGSTLSSSAALQGTLGYMAPEFAYMRKVTTKADVFSFGVIVMEFLTKRRPTGLXKEDGLPITLREVVTKALKNGIKQLANIVDPLFTWDVDHDEVLPELIKLSLCCTLPDPEHRPNMNEVLSSLVKLQTTLS

SEQ ID NO: 170026 - protein, 79 aa, Glycine max
  Clone ID: PAT_MRT3847_124548C.1.pep
VYSIEDLYLCPLEQDSWYLGARNDWLGFEGRGKKLYCYIVLSIVFVCRSGVIEVLTCVSFFIRVKKAVKKCISTPIVAR

SEQ ID NO: 170027 - protein, 41 aa, Glycine max
  Clone ID: PAT_MRT3847_124549C.1.pep
THIHQIKILILTNLTSIRAYASLSTAHTQKAIYIYNTMLLI

SEQ ID NO: 170028 - protein, 115 aa, Glycine max
  unsure (1)..(115): unsure at all Xaa locations
  Clone ID: PAT_MRT3847_12454C.1.pep
LRWCGACLSRLSVCASVGLGGWCGPFRFFSGCRLWCCVAWRLCWVSPWFFPSCCCSSSARFLVFGGLLAGVCRRLLAWFXVVPVAPPLFFSPPPSCFACSVAWKLINAVAWVAPG

SEQ ID NO: 170029 - protein, 66 aa, Glycine max
  unsure (1)..(66): unsure at all Xaa locations
  Clone ID: PAT_MRT3847_124550C.1.pep
XREVEFVWFXLLRLVSLXYNTNTXXIXXXXQHXXXEVQMMXSEXQNGCFMVMXRHXRTWRYQXWGG

SEQ ID NO: 170030 - protein, 94 aa, Glycine max
  Clone ID: PAT_MRT3847_124551C.1.pep
IDCCRTPAQEVLSHNPWLRNIYFRLPIRMSLLARAMGMKMYPVISLLDDKGEVLEVQEDQKGEVMKLVSEVREEQGKLWIGTVAHNHIATLSYP

SEQ ID NO: 170031 - protein, 76 aa, Glycine max
  Clone ID: PAT_MRT3847_124552C.1.pep
SILLALYLYYFIICCVRCFIFYFQIKLTAQGEVALELRASQGVPVDVNHGFSVDFVWKSTSFDSMQAAPFCRLSQP

SEQ ID NO: 170032 - protein, 54 aa, Glycine max
  Clone ID: PAT_MRT3847_124553C.1.pep
SLECKLHQCGSIGADAELPQILLTKVEANILLSSAVGSKLTIINKEQSTAKMWH

SEQ ID NO: 170033 - protein, 314 aa, Glycine max
  Clone ID: PAT_MRT3847_124554C.1.pep
TNQTLPHDQAHTQLLNPQRVVQTNNIQQQQQSSIQKQQLLRSLSQNRAQKHQQTTLGLNERQIVFQSPMPDHFNQQLQMSDNQVRFQLLQKLQQQQQTLLAQQSALQQPALIQIQDQQRQLLDVANNSSSPIPGQVLENLPTLQNSLPEANSITHQITMPSSQKNFHYSHLSQQPALLSEMSGHVGLPPTVTTNLLSASGGSILTGVGQSVITDDVPSCSTSPSTNNRASVLPPVVSSQIHRSTTIGDDMAQSAVTISGASTLETMSSNANIVQPKYEVKASLNISKNQNQGNVAPQTYLNGVVQTDYLDSSSS

SEQ ID NO: 170034 - protein, 76 aa, Glycine max
  Clone ID: PAT_MRT3847_124555C.1.pep
HNRTDPTYYSAIASACTSHFSGSIPATTMAPPDGVDDVHAFDASLLFVELVLVAYVDYPLLSSSPIKHINQPKGSK

SEQ ID NO: 170035 - protein, 168 aa, Glycine max
  Clone ID: PAT_MRT3847_124556C.1.pep
TRPRSFSYKLSKASSSFVKIHNLDVNPPYSQNKTPKTRTLFTITTHIHYYLVAPFTYLFLPLLLLFALTHSRSTPHYCKTTLLDVVYYLQNAHNAVRLEPLITLANTNDNEKPCFIYESLGMYSHYGSLIDKPLHRNYKLLTLSRLTRYSVRVKSLQTRLDLGLKRGS

SEQ ID NO: 170036 - protein, 82 aa, Glycine max
  Clone ID: PAT_MRT3847_124557C.1.pep
SSAFFSSISSGCSGFSEQSAPTKHRDQRGVECYADGAIGRRICSYGEHEGSGFGFVVVVLFVLWSFIVVVVVEIFFGEIGVV

SEQ ID NO: 170037 - protein, 154 aa, Glycine max
  unsure (1)..(154): unsure at all Xaa locations
  Clone ID: PAT_MRT3847_124558C.1.pep
DYASSGHLTRKXDVYSXXVLLLEIVSGQRVVDSSQNGERFXLRRAWAAYEANDLLRMVDPVLNKNYPVEEVKRFLMVGLRCVQEMARLRPRMSEVLDMLTNNVDMGEFSVSKPGLVTDLRSARIRSQMNPSEESSVTAATFADSSGWSTANLAR

SEQ ID NO: 170038 - protein, 91 aa, Glycine max
  unsure (1)..(91): unsure at all Xaa locations
  Clone ID: PAT_MRT3847_124559C.1.pep
RIFRIHTSRMTXADHVILEEFEIPKYEFSVGYMNRICCGMDILCLCEARIHVTHPKFKKPKDKAMFPKTPGSPKELLLFGIFILDPGVQFI

SEQ ID NO: 170039 - protein, 182 aa, Glycine max
  Clone ID: PAT_MRT3847_12455C.1.pep
DADWGAGSPSAQASGWGMDCHVAAGSAGSGCSAFFGPRLGVSAPSIEVYVAGCCSGVPVILSKTIQLSPRKRVPRHATLDAIPEDEEMMVLEKNRVNGFVPIRKLQITDSEVDDYDSDGKMGNGFYCQEMYPGEDGQLSWFNAGVRVGVGIGLGMCVGLGIGVGLLMRSYQTTTRNFRRRFF

SEQ ID NO: 170040 - protein, 303 aa, Glycine max
  Clone ID: PAT_MRT3847_124560C.1.pep
WPILLLAFAQLYKGWLIDGSMVMVNRNKLKQKSLHKNSIQSLKVLPYLRHRHLVSVLGHCVITHHDHPQMISTIFIVFEHVSNVSLRDYLADRRKREMLKWPQRMAISIGIARGIQFLHTRVHPGIFGNNIKIENILLDDCLNATVSGYSIPWPSKKSHRKKFYDQRALNQIGSINDAEKEDIYQFGVILLEVITGKLITSSSEVEELKNDLERGLAEASSPSLKGATPSLKGTSPILKGMSDSSLRDTCVHESLKTTVQITISCLSKVSSNRPSIEDILWNLQYSMQVQEPRTSGVHFFTDM

SEQ ID NO: 170041 - protein, 80 aa, Glycine max
  Clone ID: PAT_MRT3847_124561C.1.pep
PGISLPRYLKLKGVFPPWLGPKKFCFFNPQLPFGFWEKGFFGQNPPHPTNKSIIFFFPPNFLYRAILTQKFHGGNPHFFF

SEQ ID NO: 170042 - protein, 53 aa, Glycine max
  Clone ID: PAT_MRT3847_124562C.1.pep
FGNANQNASKRGPFFAKAALQEKIPVPKGCNDPNASNFDPSARSEEGPCLSPP

SEQ ID NO: 170043 - protein, 73 aa, Glycine max
  Clone ID: PAT_MRT3847_124563C.1.pep
STDPAPSWERRWQPQQQPPPLLAWRRLPQTGPQRRHPPDQEGSWVPSLGVICFPNSKVTPCVSQHQASTDPCY

SEQ ID NO: 170044 - protein, 74 aa, Glycine max
  Clone ID: PAT_MRT3847_124564C.1.pep
SSSLFCVLTTHIVVRAIGVARVSSVSNPSCVLCNDTVGVCLRLCMPGRPIPFSLKREDQSSCACCAPWICNEVY

SEQ ID NO: 170045 - protein, 94 aa, Glycine max
  unsure (1)..(94): unsure at all Xaa locations
  Clone ID: PAT_MRT3847_124565C.1.pep
THAFALLLSRSHKLKNDSLTTLYKRASVRRAKDKAVSAXALKPLLELFAEDGSGMADKSMVVLNNLTGIENRKDAIVEXSGIDALLEAIDDCSV

SEQ ID NO: 170046 - protein, 73 aa, Glycine max
  Clone ID: PAT_MRT3847_124566C.1.pep
TRAIRWFGHKGPTSTRKKRNRSSMVQELQRCMCINKILFGNFNVEITISRIPKFQLYLSHTLRSSSHCDYKNG

SEQ ID NO: 170047 - protein, 44 aa, Glycine max
  Clone ID: PAT_MRT3847_124567C.1.pep
VNYLNKMNCKFQHKFHLQISSDSLFLKNSKHNSLITKNQIYFVF

SEQ ID NO: 170048 - protein, 80 aa, Glycine max
  unsure (1)..(80): unsure at all Xaa locations
  Clone ID: PAT_MRT3847_124568C.1.pep
VFIRAGAYDLNRLMGVTMLDDVXVNTCVAEDLGVEPRDVDVPLVVRHAXITVSPLFFYSNPSRSFTLKESACLTGLIQNS

SEQ ID NO: 170049 - protein, 66 aa, Glycine max
  Clone ID: PAT_MRT3847_124569C.1.pep
SNLAKHFDSLQSLFQHLISPNKKKTGLLPCSSVSPTANATTTYTTNYQIQHIDRSLQEIRNLKGFL

SEQ ID NO: 170050 - protein, 53 aa, Glycine max
  Clone ID: PAT_MRT3847_12456C.1.pep
MAMAFKMAITGMWVTDKFKNSFMEMKWKKGHNYIVFKIVENSRLVTVEKVGGP

SEQ ID NO: 170051 - protein, 64 aa, Glycine max
  Clone ID: PAT_MRT3847_124571C.1.pep
IHSPRIPPTNKIADRINGMLAVLKKNILWVNPDCGLKTRKCSEVKPALTDMVAAARLLSDELAK

SEQ ID NO: 170052 - protein, 55 aa, Glycine max
  Clone ID: PAT_MRT3847_124572C.1.pep
RSPQVAGNSCLSKSGASKKQNGDLISNHIPIITKFLSPKCDMHVTYIARPNDIIQ

SEQ ID NO: 170053 - protein, 43 aa, Glycine max
  Clone ID: PAT_MRT3847_124573C.1.pep
IKKKKKKKKKRKEKKKKKKKKKKKKKKKKNKKKKKKKKKKKKK

SEQ ID NO: 170054 - protein, 466 aa, Glycine max
  unsure (1)..(466): unsure at all Xaa locations
  Clone ID: PAT_MRT3847_124574C.1.pep
MVHQRQNNIHVLVLPYPAQGHINPLVQFAKRLASKGVKATVATTHYTANSINAPNITVEAISDGFDQAGFAQTNNNVQLFLASFRTNGSRTLSELIKKHQQTPSPVTCIVYDSFFPWVLDVAKQHGIYGAXFFTNSAAVCNIFCRIHHGFLQLPVKMEDLPLRVPGLAPLDSRAPPAFRHVHRKXLDYMAMKLSQFSNLNNADWMFVNTFXALESEVLKGLTELLPAKMIGPLVPFGYLDGRIKGDKGYVSKSMEAANXKTXTDFLKTKPHRSLEYITDARMVPLTAEXIEVVARGMKESGVSFLWVLRESEHGKLPCGYRESVKDKGLIVTWCNQLELLAHQATGCFVTHCGWNSTLESLSLGVPVVCLPQWADQLPDAKFLDEIWEVGVWPKEDEKGIVRKQEFVQSLKDVMEGQRSQEIRRNANKWKKLAREAVGEGGSSDKHINQFVDHLMNADKNGSLNVY

SEQ ID NO: 170055 - protein, 119 aa, Glycine max
  unsure (1)..(119): unsure at all Xaa locations
  Clone ID: PAT_MRT3847_124575C.1.pep
TTYGINIAETFLFTSEAVNXRHRAKLFNQIFDTVLDACLXQNPYSKVSFETCTKTNLLIDFXKITTNANVDYYNIVRDTFKNIYFVSNDVGLDAYNCKVLLNIKHHNPYIAHGVHSHLT

SEQ ID NO: 170056 - protein, 179 aa, Glycine max
  Clone ID: PAT_MRT3847_124576C.1.pep
IPVSTGLYMNPPTPGSPSGSDVSESSVLVASSSHVFRPVPRTGAVLPPVETTTTLSSNDPPTSLSLSLPGVDSSEVSNRTTEPIHAAPPPPPQPQPQPQPLNTIPLLPMMTVPSVSPTGMAPFNFSAEFLAVMQEMIRKEVRSYMELHNQKNGMCFQAAVNDGFRDASVKRIGNSRGDS

SEQ ID NO: 170057 - protein, 224 aa, Glycine max
  unsure (1)..(224): unsure at all Xaa locations
  Clone ID: PAT_MRT3847_124577C.1.pep
RCAIKLLRKIEDRSIRPDVVMYSTIIDSLCKDKLVNEAYDFYSEMDARGIFPDVITYTTLICGXCLASQLMGAFSLLNEMILKNINPDVHTFSILIDALCKEGKVKEAKNLLAVMMKEGVKPNVVTYNTLMDGYCLVGEVQNTKQILHAMVQTGVNPNVRSYTXMINGLXXSXRMDEAMNLLREMLYKDMIPDTVTYSSLIDGFCRSGRITSALNPFEEMHHRG

SEQ ID NO: 170058 - protein, 52 aa, Glycine max
  Clone ID: PAT_MRT3847_124578C.1.pep
TKKKIQTTIIIKTLCSTYTTNPYSHHDYFYRIIISLQIFNSIPRFFPTAISK

SEQ ID NO: 170059 - protein, 99 aa, Glycine max
  unsure (1)..(99): unsure at all Xaa locations
  Clone ID: PAT_MRT3847_124579C.1.pep
QALVVKPVHRQMMGKSKGMRIACQATNIPADRSPDMGXRPLNDLLFLGANXIPSAGMLIAYTYFFVPSRSGSXSGGTDAKDAVGNDVIAENWLKAHGPG

SEQ ID NO: 170060 - protein, 160 aa, Glycine max
  unsure (1)..(160): unsure at all Xaa locations
  Clone ID: PAT_MRT3847_12457C.1.pep
MAELQTKGEPVTVPAPVDPEPPLAEAPPLEKKAVAVPPPVPAAAEETKALVIVEKEKENEKIPEPVKKNASGGSLDRDIALAEIEKEKRLSNVKAWEESEKXKQNMVKKMKNKIALVHKQAEEKRAMVEAKRGEEILKAEEIAAKHRATGTSPKKAFGCF

SEQ ID NO: 170061 - protein, 857 aa, Glycine max
  Clone ID: PAT_MRT3847_124580C.1.pep
MDKHSGNSSSAHAAAGPSGISPHNVPKKAGSSAWGIPRASDVFHDSSDVSLFSSSLPVLPHEKLDLTDSENYGQPVDDNLLTLDKVHKEDEGHDPFDDFETNAIGNMLPDDEEDLLAGIMDDFDLSKLPSQLEDLDENDLFVNGGGFEMDFEPQESLNISMSKIGISDGIASNGIGQYAIPNGVGTVAGEHPYGEHPSRTLFVRNINSNVEDSELRTLFEQYGDIRTLYTACKHRGFVMISYYDIRAARTAMRALQNKPLRRRKLDIHFSIPKDNPSEKDINQGTLVVFNLDPSVCHDDLRQIFGAYGEVKEIRETPHKRHHKFIEFYDVRAAEAALKALNRSDIAGKRIKLEPSRPGGARRNLMQQLSQELEQDEARTFRHQVVSPVANSPPGSWAQFGSPVEQNPLASFSKSPGLGPASPINTNHLSGLAAILSPHATTSTKIAPIGKDPGRAANQMFSNSGSTQGATFQHSISFPEQNVKASPRSISTFGESSSSASSIGTLSGPQFLWGSPTPYSEHSNTSAWSSSSVGLPFTSSVQRQGFPYTSNHSPFLGSHSHHHVGSAPSGLPLDRHFSYFPESPEASLMSPVAFGNLNHGDGNFMMNNISARASVGAGVGLSGNTPEISSPNFRMMSLPRHGSLFHGNSLYSGPGATNIEGLAERGRSRRPENGGNQIDSKKLYQLDLDKIVCGEDTRTTLMIKNIPNKYTSKMLLAAIDENHQGTYDFLYLPIDFKNKCNVGYAFINMVSPSHIIAFYKAFNGKKWEKFNSEKVASLAYARIQGKAALVMHFQNSSLMNEDKRCRPILFHSEGQDTGDQEHFLSSNLNICIRQPDGSYSSDLLESPKGNLDQKLEKD

SEQ ID NO: 170062 - protein, 174 aa, Glycine max
  Clone ID: PAT_MRT3847_124581C.1.pep
SSRSSRSSRQYAIPNGVGTVAGEHPYGEHPSRTLFVRNINSNVEDSELRTLFELYGDIRTLYTACKHRGFVMISYYDIRAARTAMRALQNKPLRRRKLDIHFSIPKDNPSEKDINQGTLVVFNLDPSVSNDDLRQIFGAYGEVKEIRETPHKRHHKFIEFYDVRAAEAALKALN

SEQ ID NO: 170063 - protein, 53 aa, Glycine max
  Clone ID: PAT_MRT3847_124582C.1.pep
FTAVTCVLTRSISQADQVDSALSGASISTCYGRRSVLAHSPYNPNVYFVREIL

SEQ ID NO: 170064 - protein, 355 aa, Glycine max
  Clone ID: PAT_MRT3847_124583C.1.pep
GVLVCAAGQEFRGDVALCTVPLGVLKKGDIEFVPELPQRKKDAIHRLGFGLLNKVAILFPYNFWGGDIDTFGHLTEDLSMRGEFFLFYSYSSVSGGPLLVALVAGEAAIRFEMMLPVESVKRVLDILKDIFNPKGIVVPDPVQAVCTRWGKDHFAYGSYSYVAVGSSGDDYDILAESVGDGRVFFAGEATSKQYPATMHGAFLSGMREAANILRVAKRRSSMTIDTTKSVNQENDDLNKLFVKPDLTFGSFSALFDLNLNDHDSSSLLRVKIGGVVLDSGSLYLYAWLSKKRVIELSQVEGDENRMRMLNRNFGVSLVGRKGLSSAAESLIANIKLSRPNFNETENGLMAEKENS

SEQ ID NO: 170065 - protein, 84 aa, Glycine max
  Clone ID: PAT_MRT3847_124584C.1.pep
MEVLWVTRHGRMFEGRVLVLLALFLWIPAQVVVGRTRTTITNSTASSAPRVLRSGALFTLNSIIGRSAKPALMAAFEDVNADSS

SEQ ID NO: 170066 - protein, 73 aa, Glycine max
  Clone ID: PAT_MRT3847_124585C.1.pep
VAMFGGVFRCLPFFTRFFFFLGFNLASPCVYRLFGGLYIPDQIIPNVPPVFVLPSKNILTRVCFNSNEPRAAA

SEQ ID NO: 170067 - protein, 177 aa, Glycine max
  unsure (1)..(177): unsure at all Xaa locations
  Clone ID: PAT_MRT3847_124586C.1.pep
PSKHVSINGGKPSHALMCLARVTLFLCSLTLFGAHGSTKVYDIXRKPKLGDNYLMHSETKFLGFMHNYWTSYYTKDEYLLRWVIFTQNMVLAAEHEALDPSAVHXVTLFSNLTAAEFEXKLYTGVXNGGSPPYNNASSGVAPPSEEDGLPENLDRRETRPVTDFNLHGRWGSSCALS

SEQ ID NO: 170068 - protein, 98 aa, Glycine max
  Clone ID: PAT_MRT3847_124587C.1.pep
MEVEGSSKKMIATQEEMVEARVPLAYRDQCAHLLIPLNKCRQAEFYLPWKCQDQRHSYEKCQYELVMERMLQMQKIREHQQNPNAKQPLIALPKPANA

SEQ ID NO: 170069 - protein, 88 aa, Glycine max
  unsure (1)..(88): unsure at all Xaa locations
  Clone ID: PAT_MRT3847_124588C.1.pep
GTLREHIYXTDNPSLSWKHRLQICIGASRGLXYXHTGAXTWIIHXDVKSTXILLDEKWVAKXVSDFGLSXIGXIXSAXIXVVXRXXXX

SEQ ID NO: 170070 - protein, 18 aa, Glycine max
  Clone ID: PAT_MRT3847_124589C.1.pep
YQLSLISYNKYIYYRAFN

SEQ ID NO: 170071 - protein, 52 aa, Glycine max
  Clone ID: PAT_MRT3847_12458C.1.pep
KTKLYNFRVFEFSKTKPYTSPILWNFLKVLFSFQKVSTSYYNLNLFIESPYF

SEQ ID NO: 170072 - protein, 259 aa, Glycine max
  Clone ID: PAT_MRT3847_124590C.1.pep
MTRAYSFLVSLVFITMTPSTPQVEAFSYHINCGASTDSTDSFNTTWLSDRFFSAGSSALVSEPLHFPLPSEKTLRFFPPSSSGKRNCYTFPSLPSPSRYLLRTFTVYDNYDAKSRPPSFDVSLSSTVLFSWRSPWPESTARNGAYSDLFASLPNTSSLDLCFYGFATDSPLVSSIELVQVHPAAYTNSNNLILVNYGRISCGAAAKPWGAGFTNHTDRFSRSWQPDYDFRTIPEDRDEVRSLSTDNSISGADEAPNYFP

SEQ ID NO: 170073 - protein, 34 aa, Glycine max
  Clone ID: PAT_MRT3847_124591C.1.pep
MSLIEEEKIFLTYKIKTDKIVKYFFNRRTVNDSK

SEQ ID NO: 170074 - protein, 58 aa, Glycine max
  Clone ID: PAT_MRT3847_124592C.1.pep
VSEPASIRVLNSQRSSLKKLMGIKEAPVSKSRKNGRYGTIVASCEAARNLSRVWQDSV

SEQ ID NO: 170075 - protein, 109 aa, Glycine max
  Clone ID: PAT_MRT3847_124593C.1.pep
YLCLIYCSFSYITVTSYSDSHAHSFPHHCSITAVAKLAGSHREIVVLLWDIIHAVHILDGHCTFRVYQHFSRGIHPRIVRDRLSWERLHHTGTMLTCMISDYGGPMFEL

SEQ ID NO: 170076 - protein, 33 aa, Glycine max
  Clone ID: PAT_MRT3847_124594C.1.pep
ALGPCPPLANLPVTSLPGPEQPAVPKAPIPEEI

SEQ ID NO: 170077 - protein, 65 aa, Glycine max
  Clone ID: PAT_MRT3847_124595C.1.pep
GERPRPPLSELFENQRANAEVKRVATVVSPSRRQPRLVILFFSYFLSLSPFSISDRKHSQTTPNT

SEQ ID NO: 170078 - protein, 308 aa, Glycine max
  unsure (1)..(308): unsure at all Xaa locations
  Clone ID: PAT_MRT3847_124596C.1.pep
MSEKEKGNNSEGQSTLLHGKYELGRVLGHGTFAKVYHARNLNTGQHVAMKVVGKEKVIKVGMMEQVKREISVMKMVKHQNIVELHEVMASKSKIYIAMELVRGGELFNKVSKGRLKEDVARLXFQQLISAVDFCHSRGVYHRDLKPENLLLDEHGNLKVSDFGLTAFSEHLKEDGLLHTPCGTPAYVSPEVIAKKGYDGAKADIWSCGVILYVLLAGFLPFQDDNLVAMYKKIYRGDFKCPPWFSLDARKLVTKLLDPNPNTRISISKVMESSWFKKPVPRKLAAEKVDLEEEKIETQLETINAFHII

SEQ ID NO: 170079 - protein, 91 aa, Glycine max
  unsure (1)..(91): unsure at all Xaa locations
  Clone ID: PAT_MRT3847_124597C.1.pep
ERRTQLNMMQXYLLXKLSDLHGLMHXKXGKCLDGGKEVLHNLNNLQEENKRAHKKRKTYRRXKVDMIPLVNRDEQXGTEXAGTEVYDDANV

SEQ ID NO: 170080 - protein, 76 aa, Glycine max
  unsure (1)..(76): unsure at all Xaa locations
  Clone ID: PAT_MRT3847_124598C.1.pep
MFYLSLVARKRQLLKNKVLAMASTRILKELKDVQKDALNSCSAGPVAEDMFHWLAIVVGLPXIPYAGGVFLVTMHL

SEQ ID NO: 170081 - protein, 275 aa, Glycine max
  Clone ID: PAT_MRT3847_124599C.1.pep
MEVLSSHSPSSNDPFDFNRARISPYLSAPSSPKRFGQFYYLSAPSSPSKDFDLAAHDDDAFAFFVTGESKSPRSAAELFDGGKIKPLSEDDSSESAKSPLLPAKRSSIAQGKKAIREAFSTRKKKEEGDLSEEEQETRGRDRTASSSRVTRSLSPCNRISHYTWDEERNQSQSNKADSLSKTSRRWRLTDFLLFRSASEGRGSSKDPLRKFPTFYKKPEDPKASNPGPKTRRKEPLSAHELHYARKKAETEDLKKRTFLPYKQGILGRLAGFGSK

SEQ ID NO: 170082 - protein, 198 aa, Glycine max
  Clone ID: PAT_MRT3847_12459C.1.pep
MAELQTKVEPVTVPAPAPVDPEPPLAEAPPLEKKAVAVPPPVPAAAEETKALVVVEKENEKIPEPVKKNASGGSLDRDIALAEIEKEKRLSNVKAWEESEKSKAENKAQKQLSAVAAWENSKKAALEAQLRKIEEQLEKKKAEYGEKMKNKIALVHKQAEEKRAMVEAKRGEEILKAEEIAAKHRATGTSPKKAFGCF

SEQ ID NO: 170083 - protein, 396 aa, Glycine max
  unsure (1)..(396): unsure at all Xaa locations
  Clone ID: PAT_MRT3847_1245C.1.pep
MNAIRSRWLTRMAEDIGKSNLESSSASTTSRGFWPSVLRWIPSSTDHIINAEKRLLSLVKTPYAQEQVNIGSGPPDSKVRWFRSSSNEPRFINTVTFDSKDDSPTLVMVHGYAASQGFFFRNFDALASRFRVIAIDQLGWGGSSRPDFTCRSTEETEAWFIDSFEEWRKAKNLSNFILLGHSFGGYVASKYALXHPEHVNHLILVGPAGFSSESERITKFLSTWKGSILNQIWESNFTPQKIIRGLGPWGPDMVLKYTSARFVTYTTGETLTESESRLLTDYVYHTLAAKASGELCLKYIFSFGGLPRSPLLHSASEWKVPTTFIYGFQDWMNYEGAQEARKQMKVPCEILRVPQAGHFVFIDNPSGFHSAVFYACRRFLRPDPDSESLPEGLTSA

SEQ ID NO: 170084 - protein, 254 aa, Glycine max
  Clone ID: PAT_MRT3847_124600C.1.pep
MTDRVYPSAKPAAVNGAAANPSFPATKAQLYGATRPTYRPQPHHRRRSKRRCCCTFFFWLILTVLILLLLIGVGGTVFYLLYRPHHPTFTVTSLKLSYLNLTSSSNTLNSRFDITVSATNPNKKILFAYDPTSITILSADIDLGDGTVPGFQHPKKNTTLIKGSILSSGQALQSDEASRLKSSMKTQNGLPLKVNLETKVKAKMGNLKTPKVGIRVSCDGIRVTLPSGKKPATASTSNAKCDVDVRFKIWKWTI

SEQ ID NO: 170085 - protein, 544 aa, Glycine max
  Clone ID: PAT_MRT3847_124601C.1.pep
MMGIESTGSKWLGLVAAVWIQAISGNNYTFSNYSDALKSLMSLTQIELNNLSVAKDVGKAFGLLAGLASDKFPTWAILLIGSLQGLIGYGVQWLVVSQRIQPLPYWQMCVFLCIGGNSTTWMNTAVLVTCIRNFRRNRGPVSGILKGFVGLSTAIFTDLCSALFADDPASFLLMLALIPFAVCLSGMFFLREIPPAATNDQEESTYFAVFNAVAVVVAVYLLAFGFVPNPSALVSRAFAVVLLLLLVAPMGIPVHSYLKARRQDERFKPNLEERVDEPLIRGKEKGSESEVERGNVLAEEAAAEGMSGPAVGEEHTIWEALKTVDFWILFVSFLCGVGTGLAVMNNMGQIGLALGYSDVSLFVSLTSIWGFFGRIVSGSVSEHFIKKAATPRPLWNAASQILMAVGYILLAMAMPGSLYIGSVVVGICYGVRLAITVPTASELFGLKYYGLIYNILILNLPLGSFLFSGLLAGILYDMEATTTVGGGNTCIGAHCYRLVFIIMAVACVVGFFLDILLSFRTKKVYNKISSSKNSNKNSLNSSRR

SEQ ID NO: 170086 - protein, 53 aa, Glycine max
  Clone ID: PAT_MRT3847_124602C.1.pep
FLSLHWVLHKLTSHHAKWCRVESSALTALTIMTYLHSKVSVRCDGVKTVCFGM

SEQ ID NO: 170087 - protein, 97 aa, Glycine max
  Clone ID: PAT_MRT3847_124603C.1.pep
CLLIAKFQPPFVQYDNAFNPFSQISQNQASLGYGPPPSPMMNPFGVTGSNQVSRDGAYVQWPSAAMMYAHSYDQFRHAVFQAPIAQRPLSFDYSQNY

SEQ ID NO: 170088 - protein, 43 aa, Glycine max
  Clone ID: PAT_MRT3847_124604C.1.pep
ENRLSLTLCIFGVEWTQYHPARASLLSCSITLKYPFCCVLTAV

SEQ ID NO: 170089 - protein, 69 aa, Glycine max
  unsure (1)..(69): unsure at all Xaa locations
  Clone ID: PAT_MRT3847_124605C.1.pep
MEMTAAERLFFFEMACNNSEVAYQXNPNDADNLTRWGGXLLELSPLRNGPDSLKLLQDAEAKLEEALQI

SEQ ID NO: 170090 - protein, 54 aa, Glycine max
  Clone ID: PAT_MRT3847_124606C.1.pep
STPRGCSKAGLSYVRHNMPNRRIMLFKKLFAGWKIKPKRVCCRKLPFKKPPLIF

SEQ ID NO: 170091 - protein, 122 aa, Glycine max
  Clone ID: PAT_MRT3847_124607C.1.pep
DRVLIRFKVLVPLPEVVRPLFKNQPVLFRPRCLPLRGCFSFAPLYRWVHRSAAFIHRVYLSGGHEGSPSRVSSWFCGVLSPPPSGIPGSDDLFVGCLQFVRRRAFALVLLACSSPVFCSSYK

SEQ ID NO: 170092 - protein, 165 aa, Glycine max
  Clone ID: PAT_MRT3847_124608C.1.pep
SVAAAAAAAAAVVASSMVVAVTKSNADSNLEIPVAAAATATAAAVVATTAAVSKQYEQGSRSDGDAEGAGCESKGSGDGEHNALGENSEGERKSDRSVSNDSTKSDSALDDVAEYDIPWEEIAVGERIGLGINCILFYVYCYSYIFLFDSATVYRSTFFFLSGVP

SEQ ID NO: 170093 - protein, 64 aa, Glycine max
  Clone ID: PAT_MRT3847_124609C.1.pep
LISLPLEQGRMLLRHLQSCLPWILLPSHTHLSSITNNSRRHMPCHFSWIISSALRTRCLRVHGE

SEQ ID NO: 170094 - protein, 41 aa, Glycine max
  Clone ID: PAT_MRT3847_12460C.1.pep
KRFFNKITSFMLFQCIYLNCFSFYFKKTVLCFFKKQILSVY

SEQ ID NO: 170095 - protein, 55 aa, Glycine max
  Clone ID: PAT_MRT3847_124610C.1.pep
AQEESLTQKISSLGGRASWLNYQIKSFILLNLGRTLNIVTTFKNQHPQGLSLHRH

SEQ ID NO: 170096 - protein, 101 aa, Glycine max
  unsure (1)..(101): unsure at all Xaa locations
  Clone ID: PAT_MRT3847_124611C.1.pep
MSSDSAKENASVVDSSVTEWRNDIGNSDDPVCPDDHDFSNDKNINPTRADKGGHSHGQIGHPAGIGVEKCHNTKYFVIKSLNHQNIHLSIEKGXWATXIMN

SEQ ID NO: 170097 - protein, 63 aa, Glycine max
  Clone ID: PAT_MRT3847_124612C.1.pep
FHFLPPQFKLLNSHDMHVTREILSKPGSSEFPMSFLPSVTDESTTDAFSFALSEDISELTPEF

SEQ ID NO: 170098 - protein, 107 aa, Glycine max
  Clone ID: PAT_MRT3847_124613C.1.pep
MSSDRATENASVVDSSVTEWRNDIGNSDDPESSGYKLKENIHPTRADKGGHSHGQIGHPARIGVDKCDNTKYFVIKSLNHQNIHLSIEKGIWASQIMNEPLLQEALY

SEQ ID NO: 170099 - protein, 399 aa, Glycine max
  unsure (1)..(399): unsure at all Xaa locations
  Clone ID: PAT_MRT3847_124614C.1.pep
MSSDSAKENASVVDSSVTEGRNDIGNSDDPESSGYKFNENINTTRADKGGHSHGQIGHPTGIGVEKWHNIKYFIIKSLNHQNIHLSIEKGIWATQIMNEPILEEAFHNSGSVILIFSVNMSGSFQGYAQMMSSIGRGRDNVWSEGTGKSNPWGRNFXKSKWMCLNDLPFHKTLHLKNRLNDXAPVKFSRDCQELSPDMGLALCELLDGKNYTDCLPTRQALSRDEFSLKGLYANTPSSMGDEDCNFPPLHTSWSMPLPYSALFYQNQPEVNNYHSTNQRISGTMFTEILPTTSESSQVSGIKRSKDVASQSDFWGLSSESPLASTLTEDDFLDMSYEEYLEVHSRCKKQLRTSATKPSWKQLELLRSNSHDDDRNTEDGVDRDRSNSHGRIHQSSLPWI

SEQ ID NO: 170100 - protein, 117 aa, Glycine max
  Clone ID: PAT_MRT3847_124615C.1.pep
SLCMPCVLVIVAPSFRGGGPSMLCAGAFMTATFRSALVFLPGLAPAHLSDTRPRTSFSTGPPYDPSSSVLPLSSHSSGSPTRHSAPPDFCPPHAWVTSSQALASSRDGASSLSGCVS

SEQ ID NO: 170101 - protein, 91 aa, Glycine max
  Clone ID: PAT_MRT3847_124616C.1.pep
FFIIFQWFCRFLNPHHHGRPALYFTPDKNPPQITKAGGLLKVKKRGLMGTQKGGPTKRGGGGDYTRPNDPPNRTGGGAHEKNFSSKKKKIP

SEQ ID NO: 170102 - protein, 73 aa, Glycine max
  Clone ID: PAT_MRT3847_124617C.1.pep
ELTCHINLLLLILEVYYHYHISYSTLVEQRGPLLWVVIVVLFMFFLLRIRPYLGFPLVCDELRDIEFNLFFGT

SEQ ID NO: 170103 - protein, 59 aa, Glycine max
  Clone ID: PAT_MRT3847_124618C.1.pep
EEHLTPLVVTHLLPHTLQSLCIHDNSSWVSAVFWRILPTNYPTPEWKRPRASDRSSGNR

SEQ ID NO: 170104 - protein, 114 aa, Glycine max
  unsure (1)..(114): unsure at all Xaa locations
  Clone ID: PAT_MRT3847_124619C.1.pep
MIVMSGNAAIKVSDCATLVQVILTCSNSTEHFDACKWTQSVPDSWELIVPXIEGRGPNNGFETWSSEWADQTSWHLSFLSDNPRQSTVFDMLMGISQDFEIAGNTLMRAFSVPQ

SEQ ID NO: 170105 - protein, 72 aa, Glycine max
  Clone ID: PAT_MRT3847_12461C.1.pep
MFNPVSFLYQHNSLPTQPKLDQLEKMNVFKMLERIIAFLQVSKSNISPNFMEKLGSYENHIIIFINRETRFI

SEQ ID NO: 170106 - protein, 64 aa, Glycine max
  Clone ID: PAT_MRT3847_124620C.1.pep
MNLRWMEAVLPLGIIAGMLCVMGNAQYYIHRAAHGRPKHIGNDMWDVAMERRDKKLIEQASPSN

SEQ ID NO: 170107 - protein, 65 aa, Glycine max
  Clone ID: PAT_MRT3847_124621C.1.pep
IEYRPERLYWYLDQLMFRHNKSSDGRKYHLGDGSCYKSGAMHLEFGFHPFLDYGPHEARADGNPR

SEQ ID NO: 170108 - protein, 105 aa, Glycine max
  Clone ID: PAT_MRT3847_124622C.1.pep
IFKSTEHSSTGGTCLNSYIELNIRTNERQHTCYIKHGIHLLSKDLGDDLRNMKSWHRNLSSMFKSLSIYPENIKNCLLTGNATNETHVPRSKICPLIDSQCQHLH

SEQ ID NO: 170109 - protein, 114 aa, Glycine max
  unsure (1)..(114): unsure at all Xaa locations
  Clone ID: PAT_MRT3847_124623C.1.pep
PPKAARGAHHLGASPAANSIIKGELKRLKKPFVPWKKASKAAFAMLSAGANGELSERSMFLGPPYYFIMDKDSPFCXKLYDNNFPPQKKGHMLQKIGVLWGKPKKKAMLAVFEL

SEQ ID NO: 170110 - protein, 67 aa, Glycine max
  Clone ID: PAT_MRT3847_124624C.1.pep
WPDLRAQDKNLGEGWGLFHGPSASGVLFNFRGAVRPLPTMSFNWVKRLSPNPLNLMPLMKEPNFAFH

SEQ ID NO: 170111 - protein, 104 aa, Glycine max
  Clone ID: PAT_MRT3847_124625C.1.pep
QVANDQQEEECMMHKSDHLQTLRRKLEVEKEKHHSSMQETQRITLHGLQSGFSLVFESLTEFSKASQKMYNGLVTYSENSDKVGNITYIEGGCNVENCNSQNGQ

SEQ ID NO: 170112 - protein, 56 aa, Glycine max
  Clone ID: PAT_MRT3847_124626C.1.pep
IIQVKAMPISGCKCQETNKGISPLNHLAIKYSNLAWSIFNRIQIPLIDLEWSIIKK

SEQ ID NO: 170113 - protein, 152 aa, Glycine max
  unsure (1)..(152): unsure at all Xaa locations
  Clone ID: PAT_MRT3847_124627C.1.pep
MLSKTGLIADPISVLSSPQNGRRAPLVNAYSRTADILAPXYGGYNTYWSFSVTGHICLPLDLTKPPIATRILFGAIDARLLRRTSXDGKMCTVDQLPENRIAFVRHLKDCLPTLVSVLITPPELSRAXALAYSRAEHVDNATILPERSNEPT

SEQ ID NO: 170114 - protein, 53 aa, Glycine max
  unsure (1)..(53): unsure at all Xaa locations
  Clone ID: PAT_MRT3847_124628C.1.pep
LFQPLVICPLKHDTVISASKQELFLVESRASHRARXLFRGMYSSLNTLSGCVI

SEQ ID NO: 170115 - protein, 58 aa, Glycine max
  Clone ID: PAT_MRT3847_124629C.1.pep
FPTYFQQYHPSITSIQKLIQFTIQSYNLSSFFFQSLFNLQHSSKPIISSLSNSNTLLF

SEQ ID NO: 170116 - protein, 137 aa, Glycine max
  unsure (1)..(137): unsure at all Xaa locations
  Clone ID: PAT_MRT3847_12462C.1.pep
MATTAALCGTMLNTSFLRRQASVNITSLKANANTVFGVKGGRGGXVTAMASYKVKLITPEGEQEFECPDDVCILDQAEEKGLELPYSCRAGSCSVCAGKVEQSDGNFLDDDQIVAGFVLTRVAYPTSDVVVETHWEE

SEQ ID NO: 170117 - protein, 46 aa, Glycine max
  Clone ID: PAT_MRT3847_124630C.1.pep
YLNGDDQGNDSSFLSLSDKPDRNMALLDDYEGEELDFEFGNDHRKS

SEQ ID NO: 170118 - protein, 109 aa, Glycine max
  Clone ID: PAT_MRT3847_124631C.1.pep
DFLNAPNGLPKQSLTGNERVESDPSQSPLVGKMDVFDLPFHMARDQIEESLRNKMASIKERMVQLQDAQKEAEVTSEATERELELEAQLVEARSIIQEQAKGIYHPSTG

SEQ ID NO: 170119 - protein, 378 aa, Glycine max
  Clone ID: PAT_MRT3847_124632C.1.pep
MPPTDGDLDLRPPSQSSFTAGDYTFADADNLEHCAKYLNQSLVTFGFPASLDLFANDPVSIARTCNCIYVLLQQRQRDVEFRESANDQRQRLLSDISRLEAKVERLEGQLQVKDREIATITRTEAKNTAALKAQIEKLQQERDEFQRMVIGNQQVKTQQMHEMKKKEKEYIKLQERLNQVLMEKKKESRSGMEIMNLLQKEGRQRGTWNGKKADNDFYKKIVDAYESKNQELMAENADLRALLRSMQVDMRDFLNAPNGLPKQSFTGNERVESDPSQSPLVGKMDVFDLPFHMARDQIEESLRNKMASIKERMVQLQDAQKEAEVTSEATERELELEAQLVEARSIIQEQASIMSKHLAKSDRPRESIIPAPAEAVCN

SEQ ID NO: 170120 - protein, 58 aa, Glycine max
  unsure (1)..(58): unsure at all Xaa locations
  Clone ID: PAT_MRT3847_124633C.1.pep
XSXXLRGHTKXSGGPLLTVXRNXGATXAAVXRTSXXXSLXLLXXSXTCECXLLNXXAG

SEQ ID NO: 170121 - protein, 63 aa, Glycine max
  Clone ID: PAT_MRT3847_124634C.1.pep
PSKATWTEATISSDAMPSNSTLASTPVYAPTRISARLLHLLELKLLKMMRFWFWSSQKNYLLD

SEQ ID NO: 170122 - protein, 112 aa, Glycine max
  Clone ID: PAT_MRT3847_124635C.1.pep
EINCINYEPDELSMLPERGAESASMSYDPALDYEMQAQAGGTLQNKNKEVLTDTKPGSKGLDKEAKSKLTPNNSDKRKTGGPIRRGKTSKPNALDEARARAESLRNYKADLQ

SEQ ID NO: 170123 - protein, 41 aa, Glycine max
  Clone ID: PAT_MRT3847_124636C.1.pep
IFYVLHIIKSQIINDANRARTKMSANFRRPIYCKVGDTYSS

SEQ ID NO: 170124 - protein, 162 aa, Glycine max
  Clone ID: PAT_MRT3847_124637C.1.pep
NLPQTPKKTNKKTPPQTHGGERQDRPQKKRGNKKWGGGPQGETKGKTNFGFKKKKKKTSPPKGGGGQKIPKKRKGPFNKTTLGKGVPPEQNKGPRFGEGWNWPPGGRQTPEEHPPPPTKKKKGGPPGGGNPKFPPPPGGGGGKRGIGQRPWQKAQKKKQRGG

SEQ ID NO: 170125 - protein, 85 aa, Glycine max
  unsure (1)..(85): unsure at all Xaa locations
  Clone ID: PAT_MRT3847_124638C.1.pep
MRGENIIQRLHQXFPPQKLSNNSTMVEILSNESQNQPSSGYEFLKQFMCVCERMGPSKWAPCKIKKKCNFPQKKKILREYEKFKF

SEQ ID NO: 170126 - protein, 170 aa, Glycine max
  Clone ID: PAT_MRT3847_124639C.1.pep
PTRPLKSHFFSTITYAGNKKSVSRVVLIVVPVVVSIILLLCVCYFILKRSRKKYNTLLRENFGEESATLESLQFGLVTIEAATNKFSYEKRIGEGGFGVVYKGVLPDGREIAVKKLSKSSGQGANEFKNEILLIAKLQHRNLVTLLGFCLEEHEKMLIYEFVSNKSLDYF

SEQ ID NO: 170127 - protein, 96 aa, Glycine max
  Clone ID: PAT_MRT3847_12463C.1.pep
GKKLKGFPFFKKAKFPPIPIISLTPTALPLRLANGPIFCNPYNHNLARPKKEAPGFPIITRGVRGPKTHLGWAFFLHCLFSLLMLYPPRFVRSQWL

SEQ ID NO: 170128 - protein, 54 aa, Glycine max
  Clone ID: PAT_MRT3847_124640C.1.pep
GRHWLQLKDNKAHGSEHFSSLDPLTIDKTLSHLPVPGTTAPPPSANAEPCQQCS

SEQ ID NO: 170129 - protein, 357 aa, Glycine max
  Clone ID: PAT_MRT3847_124641C.1.pep
MNMLSNRVLLCYFSACEHYLLSVSFFLFSLSSFHIYMYNSFCLSSILFFFFHSFLHSSLKFPILKPSPRERVSTHNPQQREQQQPYTLSTSYSPPCLPPHFFSFPFTKSMDFLVGPTFTIDVASSPPPYDADLPGVATAADRPYGLFSGHSSDSESSIGTPDDSDDDENDVVSSKRNQSDEDEDKEEEEEEEVHSKLKGLASLDSLEDSLPIKRGLSNHFMGKSKSFTDLSQVNTLNTVKELQKQENPFNKRRRVQIATKLTRKSSFYAWSNPKSMPLLPVHEDEDNFLEEEEKPKKVSPSSSSSYSSEENKQDHVLVPKSYVDHMRARFGSFKSRSLSDLKEHDEEQEQEDDDDDA

SEQ ID NO: 170130 - protein, 154 aa, Glycine max
  Clone ID: PAT_MRT3847_124642C.1.pep
TVFLYMFVIGMWKWRFRPRYPPHMDASLSCAYVTSPEDFDEEMDTFPTTKSFDIVRWRYDRLRSLAGKVQSVVGQIATQGERIHALINWRDPRATSIFMVFCLVTAIVLYVTPPKMLFILSGFYLMRHPMLRGKTPGAPVNFFRRLPSLTDSML

SEQ ID NO: 170131 - protein, 231 aa, Glycine max
  Clone ID: PAT_MRT3847_124643C.1.pep
MDPNAVKSTLSNLAFGNVMAAAARDYQKELHAQEKTHASSSVHQEVDLDELMDDPELEKLHADRIAALKKEAEKREEWKKKGHGEFREVTEGDFLGEVTGSEKVICHFYHREFYRCKIMDKHLKSLAPMHIDTKFIKLDAENAPFFVTKLAIKTLPCVLLFRQGVAVDRLVGFQDVGGKDDFTTRTLEALLIKKGIIEEKKAEDDEDDEYIDSTRRVVRSSTIAGSDSDSE

SEQ ID NO: 170132 - protein, 88 aa, Glycine max
  unsure (1)..(88): unsure at all Xaa locations
  Clone ID: PAT_MRT3847_124644C.1.pep
ALHVVGSTRQLISTAEGIRSEDHTYHVIHPCNGYSFIXALDALDTVIPVIAWLXCDLAKYTTVVSPLLIGIDVGLTHGFLMMGPFLRA

SEQ ID NO: 170133 - protein, 184 aa, Glycine max
  Clone ID: PAT_MRT3847_124645C.1.pep
AGSATVGRATSIPHPHRSLPACAHASRPACPPLRALLQVLFCVQLPVCPALAGWLTACGGVWAPAAPVPITARGDTAGEIVQRDGWVTVVRENQVLKVDMDRMSSRVGELEEEFSKIKQEMKSVTKSHSSRSSPRLVARKIGCKLVPRPSDAQPESLNRTGSTPRASIEWARRSHKSKHSESFT

SEQ ID NO: 170134 - protein, 39 aa, Glycine max
  Clone ID: PAT_MRT3847_124646C.1.pep
SFCFKHILDISLIWSGKNVYISLTHLCFDHLNYPLSHRP

SEQ ID NO: 170135 - protein, 95 aa, Glycine max
  Clone ID: PAT_MRT3847_124647C.1.pep
VGVGPVDSAYKAINLIVKETVKVLEYSLSTVTEGTDAIATTRVVIRRENKQSPTPALNGNVIYPTFSGTGEGVDVVTSSVEAYLTALNKMLDLKE

SEQ ID NO: 170136 - protein, 332 aa, Glycine max
  Clone ID: PAT_MRT3847_124648C.1.pep
MTSAHVGAMSSSTCFPSLPRLLRPSFTKTKSSPKFSMSMSKDPVREWILSDGKAMEITKISPVGGGCINLASRYDTDAGSFFVKTNRSIGPSMFEAEALGLGAMYETGTIRVPKPYKVGPLPTGGSFIIMEFIQFGASRGYQSDLGRKLAEMHKAGKSSKGFGFDVDNTIGSTPQVNTWSSDWVQFYGEHRLGYQLKLALDQYGDRTIYDKGQRLVKSMTPLFANVVIEPCLLHGDLWSGNISSDKNGEPVILDPACYYGHSEAEFGMSWCAGFGGSFYNSYFEVMPKQPGFEERRDLYMLYHYLNHYNLFGSGYRSSAMSIIDDYLAILKA

SEQ ID NO: 170137 - protein, 370 aa, Glycine max
  unsure (1)..(370): unsure at all Xaa locations
  Clone ID: PAT_MRT3847_124649C.1.pep
MAAKTSTNGTHHSLPEYIPNRIPDPHYVRILDTTLRDGEQAPGAAMTSDQKLQIARQLAKLGVDVIEGGFPSASQEDFNAVKMIAQEVGNNCDADGYVPVIAALCRCNERDITRAWEALKYAKRPRLMPFIAVSPIHMEYRLRXKTTEGQAGLLKHRGTYEILSPEDIGHEKSNGVNMVLGKLSGRQALKSRLKELGYELRDEEVESVFRNFKAIAEKKKRVTDVDLKALVSDQASHAEPIWKLGGLQVTCGTMGSSTATIKLVTSDGSTHVACSVGVGPVDSAYKAINLIVKETVKVLEYSPSTVTGGTDAIATTRVVIRRENKQSPTPALNGNVIYPTFSGTGEGVDIVTSSVEAYITALNKMLDSKE

SEQ ID NO: 170138 - protein, 72 aa, Glycine max
  Clone ID: PAT_MRT3847_12464C.1.pep
NGTKKAVGEISGKVAPPTSVVFGKKVFSLWDKPGFNSAFAMGFVIVPDQISGEDSVENIENPEPTVPPPTED

SEQ ID NO: 170139 - protein, 94 aa, Glycine max
  Clone ID: PAT_MRT3847_124650C.1.pep
SIQFCSFTHQHSCCDTDHSAGCHTDILGSLQELLHTGIQLDWYETREPYFTNCSSCRSPNNGLCGYNFCYPNYPFQCLHLHTESTHISSLGAHL

SEQ ID NO: 170140 - protein, 63 aa, Glycine max
  Clone ID: PAT_MRT3847_124651C.1.pep
KAFRIARKAIRYPHEACPLFTSQKRARTIMNLIHTISQCCKVRLGFLQVSPYTLINLHDFFRY

SEQ ID NO: 170141 - protein, 77 aa, Glycine max
  Clone ID: PAT_MRT3847_124652C.1.pep
FVDFTLQGDYHVDSEFCGTDSVQLKGSEITAELKYLLNLLTLCWHFSKKPFPLFLEETGYSEENVLLREAKAGVSLV

SEQ ID NO: 170142 - protein, 49 aa, Glycine max
  unsure (1)..(49): unsure at all Xaa locations
  Clone ID: PAT_MRT3847_124653C.1.pep
ERVPMFRGTFGSXXCERVVNHIIQKYAMVNYLEVLKWIWETXFFKKKRK

SEQ ID NO: 170143 - protein, 150 aa, Glycine max
  Clone ID: PAT_MRT3847_124654C.1.pep
REDDRRAWILDEYSEFHGHSPAVVTGKPVELGGSLGRDAATGRGVLFATEALLKEHGMSVSGQRFIIQGFGNVGSWAAQLISEKGGKVVAVSDITGAIKNTNGLDIPSLLKHSREHRGVKGFHGGDAIDPNSILVEDCDVLVPAALWGVI

SEQ ID NO: 170144 - protein, 85 aa, Glycine max
  unsure (1)..(85): unsure at all Xaa locations
  Clone ID: PAT_MRT3847_124655C.1.pep
PYLFLRQEFAKFGELVHARAVTDRLXGYSNGSGYAQYATVNDAAEGIESMDSNFXNGWVIFAEYARPRPPPCHPLYTNTSYYGRH

SEQ ID NO: 170145 - protein, 196 aa, Glycine max
  unsure (1)..(196): unsure at all Xaa locations
  Clone ID: PAT_MRT3847_124656C.1.pep
MDVTAIATAESIMPLTIRVGNLHTMKLLEAFDCKIDGLFLHEATTMVRIDAMEFLLARYDDELEVDVVDSEGRKTIHVAAREGHARVIQFCVAXGGNPNRVDSKGWTPLHYAAWKGHVKAAECLLECSNVKCARDREGRTAFSVAAESEHEQSHARTRLVDLLGWGDALLRAVRVDDVHGVKKCLGEGVSVNGRDQ

SEQ ID NO: 170146 - protein, 52 aa, Glycine max
  Clone ID: PAT_MRT3847_124657C.1.pep
MAREQHTPTRPWIQDAVPLLVVLLIAAHVLAMIYWIYRLAIQKQVQHRTKAH

SEQ ID NO: 170147 - protein, 45 aa, Glycine max
  Clone ID: PAT_MRT3847_124658C.1.pep
CVGWGSNIPITFFVYYENHLITLLFLSHVVHLMLLFFQSLLISFT

SEQ ID NO: 170148 - protein, 87 aa, Glycine max
  unsure (1)..(87): unsure at all Xaa locations
  Clone ID: PAT_MRT3847_124659C.1.pep
MPFRNIGDGRPEXATHPDTLKAALPELISTFIXEFAGSRSGIVYNKLADHSAATPAKLIFVCIDHAFALFVVKYVGANISCGHFNPL

SEQ ID NO: 170149 - protein, 148 aa, Glycine max
  Clone ID: PAT_MRT3847_12465C.1.pep
FEDCTLRRVESQREGKPKGTGGGTSTAVSRAGEQHHHHCMKERVRCGGLFSGFMMTSSSSSSSSSSYWVSSSADDAAAAAAVNGKSATVALSHNKGRSWGWAFASPMRAFSGKPSSKESNRRDIIRGASDKNATPNLSAIPSLLAVRG

SEQ ID NO: 170150 - protein, 126 aa, Glycine max
  unsure (1)..(126): unsure at all Xaa locations
  Clone ID: PAT_MRT3847_124660C.1.pep
LEVGCKLLVLSNQNLSSNIPRSSKSYLERFHLFVQEGADQNTPLFTLVPLKDGFYSVEFSSEINHXRAFFMSVAVLSSHNLPSSLEINNMQEAINKEFSPKSNNELQGKAPLYYNPIPPYSPADRV

SEQ ID NO: 170151 - protein, 99 aa, Glycine max
  Clone ID: PAT_MRT3847_124661C.1.pep
IGPPGETIALMILPLPCSHSLMSHTQCHINLDHNHYRQHNDNMFLECDVCGFFKSTNPLHEPTTTTPTQNSYLKVGDAFGMLNFTSVESSSMSTELASK

SEQ ID NO: 170152 - protein, 114 aa, Glycine max
  Clone ID: PAT_MRT3847_124662C.1.pep
LSGLWYDGGYKVWTNHVTNLALTAQEKMEVIRNRGFPADVLAKRAHESETHAAHESLKAQISAVDKAYSPKVNKFAEIMNLKQRVEGDLKLLPDGKPHDGEHIAESNTNAGEKH

SEQ ID NO: 170153 - protein, 41 aa, Glycine max
  Clone ID: PAT_MRT3847_124663C.1.pep
SSSLVSYLSWSFVQKCMYILVTFFGSYIRVYFSLFRDVYIR

SEQ ID NO: 170154 - protein, 84 aa, Glycine max
  Clone ID: PAT_MRT3847_124664C.1.pep
PCELQFRALEQVNLSPRSGSRSKSSFAPRSTTLLSSSLSNVASLCGNLTIEPLHMPQRGESNSSGSKCSPLIRGSSVIPVIHSS

SEQ ID NO: 170155 - protein, 48 aa, Glycine max
  Clone ID: PAT_MRT3847_124665C.1.pep
SLHDPVLPLNIEAPSNDDAVKLGLAVLAAVKDFAGLDTSALNKLVGAS

SEQ ID NO: 170156 - protein, 372 aa, Glycine max
  Clone ID: PAT_MRT3847_124666C.1.pep
TQHKHKHMASSFFFLTLLLLSIISAATPCPPSERAALLAFKAALTEPYLGIFNTWSGNDCCRSWYGVACDPTTGHVTDVNLRGESQDPMFQKLGRSGYMTGKISPEICNLSNLTTLIVADWKAVSGEIPACVASLYTLQILDLSGNRISGKIPTDIGNLWSLTLLSLGDNEISGEIPMSVVNLARLKHLDLSNNRLTGEIPYDFGKLAMLSRALLSENQLTGSIPKSVSRINRLADLDVSSNRLSGSIPVELGKMKVLSTLKLDGNSMTGPVPSTLLSNTGMGILNLSRNGFSGTIPDVFGSGSYFMVLDLSFNNFSGRIPGSLSASKFMGHLDLSYNHLCGTIPIGSPFEHLDAASFSNNDCLCGNPLKAC

SEQ ID NO: 170157 - protein, 173 aa, Glycine max
  Clone ID: PAT_MRT3847_124667C.1.pep
MSVASSFPCIKIPACSSSPSCTSSSTSSFRFSSSKPYAAVSIRNSQTEGPLRRPVAPPVREPSSSVPQPLKPSPPSQVPPQKASPVAGDDNNVITLEFQRQKAKELQEYFKQKKLEDANQGPFFGFIGKNEISNGRWAMFGFAVGLLTEYATGSDFVDQVKILLSNFGIVDLE

SEQ ID NO: 170158 - protein, 84 aa, Glycine max
  Clone ID: PAT_MRT3847_124668C.1.pep
PTPPPLIPSYTFPSFLINLTKSNPSKLSHLFLLILIILITTFPTLTFQISTIKLYTLQSTLVILSYLSPILSHPHTFFTPKYHH

SEQ ID NO: 170159 - protein, 105 aa, Glycine max
  unsure (1)..(105): unsure at all Xaa locations
  Clone ID: PAT_MRT3847_124669C.1.pep
RLYFESTMHSFCEIFXGLVGGGILVGKTGDRVTLTQNGSIXSALFKVGAWKKGCSMVKIVMSGNASLNRSDRALLEQVXFLTNSISTEHFXDACLLTKSFSTPPG

SEQ ID NO: 170160 - protein, 66 aa, Glycine max
  Clone ID: PAT_MRT3847_12466C.1.pep
VNDSLDTFLLLGGRLLRGQKITLCAGHRLSESFSLALLVYWLNTLLFDIGLRARSQLCQLLGQMAA

SEQ ID NO: 170161 - protein, 83 aa, Glycine max
  Clone ID: PAT_MRT3847_124670C.1.pep
LFLVYCVLCCETGSKQALISLSDKKGLAFVGNGLQELGYSIVSTGGTASALESAGVAVTKVEQLTKFPEMVCVCSLSSPSKIS

SEQ ID NO: 170162 - protein, 99 aa, Glycine max
  unsure (1)..(99): unsure at all Xaa locations
  Clone ID: PAT_MRT3847_124671C.1.pep
SLFSPVLPTGNLAMAGLAVCSTGLKSMVGFPTGKTKNAFTXMVGNEGNSNCGLGGLPMGRMKSPIVSFLADLVDAHWEKEVQYLLWKGWILGLNSRGKL

SEQ ID NO: 170163 - protein, 81 aa, Glycine max
  Clone ID: PAT_MRT3847_124672C.1.pep
ACICNIKASYIRKWDHILYTRLHWKPSYQRRTSLNPTAGNYTHAVRTSFGEPTQHYTGPFRYDRFSKTTWSITLFETGRSE

SEQ ID NO: 170164 - protein, 129 aa, Glycine max
  unsure (1)..(129): unsure at all Xaa locations
  Clone ID: PAT_MRT3847_124673C.1.pep
LFTLLMFLGGEVFTSMLDLLFAGYKLQNKVSINPFPPTNHANQIELGLVLSIPHSDSENNNPCDSNIINVASCDRLKYNCLSYLTYAVXGYLVMVQFVGFSFVSLYMTLVPSARQVLKNKGIKIVTFSL

SEQ ID NO: 170165 - protein, 387 aa, Glycine max
  Clone ID: PAT_MRT3847_124674C.1.pep
MHNLATGFSFYYGCEKTTEGDMFHSSCSGWVKMEGASRVLCLFLAAFLWFNAQHAFVSCALTFELQSKIAKANQEGPYLGLIIPNSFELDPLLQNPGYTASDTIIDFAGRRFRFGAIGDKPVILVMTGLSVINAAITTQLLLSLFTVEGVVHYGIAGNANPSLHIGDVAIPQYWAHLALWSWQRYGLGPDDTLPLEDNGDYTRELGHLNFANFTSNVTADSPFDNQLNNIWYQPEEIFPIDGVPEVRQHVFWVPVDSKYYHIAKKLKDLELESCINSTTCLTTTPKVELVNRGISQSIYLDNAAYRSFIYNKFEVSPVDMESASVALICHQQRVPFIAIRALSDLAGGGSAESNEADTFLSIAATNSVTVVIEFVKLLSLHSKWWSM

SEQ ID NO: 170166 - protein, 57 aa, Glycine max
  Clone ID: PAT_MRT3847_124675C.1.pep
PTGHQILYTFIIKRRQHHPMYTKIIALSLARKLCPKKEKLVALFFLCMNDRQIYNQF

SEQ ID NO: 170167 - protein, 59 aa, Glycine max
  Clone ID: PAT_MRT3847_124676C.1.pep
VGVDVCGGAHQEIHLMCVCMFACSSDEGSITVRERVIVFAVARSADFNLDLIVPHSSSR

SEQ ID NO: 170168 - protein, 40 aa, Glycine max
  Clone ID: PAT_MRT3847_124677C.1.pep
IIIYIRKKIEPKIFILTQLLKTVFCGISAYEVPFLIVSSL

SEQ ID NO: 170169 - protein, 66 aa, Glycine max
  unsure (1)..(66): unsure at all Xaa locations
  Clone ID: PAT_MRT3847_124678C.1.pep
LTRIHTLSFILKQPSSTSSERHLSLARGSXSNHLMEPPPIPILDFQQWLMQKKLVSPLMKSLQAIQ

SEQ ID NO: 170170 - protein, 49 aa, Glycine max
  Clone ID: PAT_MRT3847_124679C.1.pep
IPVCAGVFPLFSRNLKLELYQLPCFNCHTVNFSLYEEPWTKFPVLYQPA

SEQ ID NO: 170171 - protein, 49 aa, Glycine max
  Clone ID: PAT_MRT3847_12467C.1.pep
LPLKKKKWGVEFDNWGKQLGKPKDLTIHCASENFWEHTRCAIFKYVQRL

SEQ ID NO: 170172 - protein, 65 aa, Glycine max
  Clone ID: PAT_MRT3847_124680C.1.pep
FLTKPKPKRGPWEILKPKTPHHKHRLFHHHTDKDNKSKKTDTDYYNTSYSKPTDYYNSHINKHII

SEQ ID NO: 170173 - protein, 41 aa, Glycine max
  Clone ID: PAT_MRT3847_124681C.1.pep
PKKHRAVKCRIMCSLLVKTNQLFTWMRLRERVSSSYLPSNE

SEQ ID NO: 170174 - protein, 64 aa, Glycine max
  unsure (1)..(64): unsure at all Xaa locations
  Clone ID: PAT_MRT3847_124682C.1.pep
TNAEILSPSQLFTPMEIISDKPCCLLFDXISLLFCXISPYYSPNPFTYVFRVSCAKVTIVSLRQ

SEQ ID NO: 170175 - protein, 32 aa, Glycine max
  Clone ID: PAT_MRT3847_124683C.1.pep
TGFELFRIKERDIPIEVLELENKNDKIIALAW

SEQ ID NO: 170176 - protein, 74 aa, Glycine max
  unsure (1)..(74): unsure at all Xaa locations
  Clone ID: PAT_MRT3847_124684C.1.pep
HDFIGVQFSPLWRGYCXKLGPESDKADYILTLLDPTIALALIDANEDNNTDLALLYDVKGFPTISILIHAGNTV

SEQ ID NO: 170177 - protein, 75 aa, Glycine max
  Clone ID: PAT_MRT3847_124685C.1.pep
RKDGGPLVMHIRDGEGQGELSALLQDRHAHSRLPVLSLKSMPTTFPTSAPIHSLKYNNPAYLTYSLNLCLSCFSI

SEQ ID NO: 170178 - protein, 63 aa, Glycine max
  Clone ID: PAT_MRT3847_124686C.1.pep
GNKNESIIFLNDWYTRSNPNPKCMGNMYNRCWESLTITRMTDISINQHYLIKKQPLTRKLERK

SEQ ID NO: 170179 - protein, 98 aa, Glycine max
  unsure (1)..(98): unsure at all Xaa locations
  Clone ID: PAT_MRT3847_124687C.1.pep
FKLDKAKATCKSSIALYVCLTCFLVLLTIAHSXHTVTSTLNKYSPIQPHIMLQKDASISCSGELQLXTKVVAHGGPTFGSVRRALYSAPIQICDRETG

SEQ ID NO: 170180 - protein, 51 aa, Glycine max
  Clone ID: PAT_MRT3847_124688C.1.pep
SSPSLGFSTGDKTAPFASTEPVKREETPTANPRESFSQLALYIAVVQSLVY

SEQ ID NO: 170181 - protein, 46 aa, Glycine max
  Clone ID: PAT_MRT3847_124689C.1.pep
TPSSLAVSRKKKERSSSPVSRSRRWSMYTEYHSGRSKRRDIRNKET

SEQ ID NO: 170182 - protein, 84 aa, Glycine max
  Clone ID: PAT_MRT3847_12468C.1.pep
RFTHDSLFQEYFKNNVPGPSLISFKGVTTLYWRFREGFFTALAGNVFGWQFLPQIIVPLGQDFSNQRSIPPFKTLHRFPFGLFA

SEQ ID NO: 170183 - protein, 64 aa, Glycine max
  unsure (1)..(64): unsure at all Xaa locations
  Clone ID: PAT_MRT3847_124690C.1.pep
FFFYVYLFFFITYAGGSKKVVEGAESARREAPARGNRLGENLNNSTQYKIXRGGWKEQARIWLP

SEQ ID NO: 170184 - protein, 63 aa, Glycine max
  Clone ID: PAT_MRT3847_124691C.1.pep
RLKYVGIYEQASNSVMALPLSFTIRGRFIAASVLPRPQIVYYMPFLYAWLTPPGQLVRQPKSP

SEQ ID NO: 170185 - protein, 35 aa, Glycine max
  Clone ID: PAT_MRT3847_124692C.1.pep
YGKKNRHSPANEMTVFIFFAAGPSSALICECAIRV

SEQ ID NO: 170186 - protein, 143 aa, Glycine max
  Clone ID: PAT_MRT3847_124693C.1.pep
ARFRLEQAVAFELEATKLVNDAEIALQRADKSNSNSNADTIESTQAQDVVVAVPEEEKVVQGFSGDVERDRDLAIDDESVLANLSPETLSDKTSQVLEDKTQSDYLSDNENAVQTKKQEIQKDLTRDSSLAPKALLKKSSRFF

SEQ ID NO: 170187 - protein, 49 aa, Glycine max
  Clone ID: PAT_MRT3847_124694C.1.pep
FARVSLAWLGFAGVVWARHGPHFSPCVKWITAPFMWDARRNEWGFVCLD

SEQ ID NO: 170188 - protein, 22 aa, Glycine max
  Clone ID: PAT_MRT3847_124695C.1.pep
DIDLKTGKPDDLFSFGLMSGYT

SEQ ID NO: 170189 - protein, 103 aa, Glycine max
  unsure (1)..(103): unsure at all Xaa locations
  Clone ID: PAT_MRT3847_124696C.1.pep
MNYLCEITDALWFITDGLPANGTLYLGAKPFDLHGTVVIGAFHCIPECYIICLPVVIKFXHNHGYMLLVFPDGAYSVRLGNXAFIKHMIKVIKVMYYFITFMV

SEQ ID NO: 170190 - protein, 40 aa, Glycine max
  Clone ID: PAT_MRT3847_124697C.1.pep
GGPAIAFGIREQLYEIAIQSGGSARESRMSQNGPRGAEYT

SEQ ID NO: 170191 - protein, 41 aa, Glycine max
  unsure (1)..(41): unsure at all Xaa locations
  Clone ID: PAT_MRT3847_124698C.1.pep
QTLTVLLVADXIXNFQRQFLPTTPXAVARSSXALRXSLTXR

SEQ ID NO: 170192 - protein, 102 aa, Glycine max
  Clone ID: PAT_MRT3847_124699C.1.pep
KPELPCQPKRPCCNSNMPLGPFTHSCEDPALGRLRIALCDTLARVAMYGENASIKEIQYMNEIASMYDYKAQAKKQLCNMPLQRDASIPMLHRDMHYEHRHS

SEQ ID NO: 170193 - protein, 290 aa, Glycine max
  Clone ID: PAT_MRT3847_12469C.1.pep
MDWFSWLSRTSLEPSLIYEYGLAFARNELQLEDAIYFNHEFLQSMGVSIAKHRLEIIKLAKKEVGGGGAVMMMRSSSSIKFSIKKCLRKCFSKLVSREDHHEAMMATTAMMATEPNWYQGKWRRARHNGNNEDLKGDNNNNNNKGVQRSRTIALSGPLDGNGRIIHEKMMNNNKVMKLSGPLDGKMNGGNNERVNMYASANRSPLMSANTPTRPLDGRFMGSVKSPRLSGPLDARPTMVNSRSPRLTRPLDDRTESPMGYSPYNKVRADAADYDDDYAMWPTLFEDLKPT

SEQ ID NO: 170194 - protein, 80 aa, Glycine max
  Clone ID: PAT_MRT3847_1246C.1.pep
MNKQNKGWIKLNIQASIEYLKGINDFLEFSFSYSKNKNTIRCPCCRCNAIYYKTRDEVIGDLLKSRFQQNYEHWESHGES

SEQ ID NO: 170195 - protein, 79 aa, Glycine max
  Clone ID: PAT_MRT3847_124700C.1.pep
ASNNNNNHPHREEEKVFGGYERNHGVLGKRMCNQCGVRESIVLLLPCRHLCLCTMCGSTVHNCPLCQSGINASVHVNYS

SEQ ID NO: 170196 - protein, 83 aa, Glycine max
  Clone ID: PAT_MRT3847_124701C.1.pep
NPIQYCQPVCIMIRPLPVSVGADRRHVMRLVIYFGPNMLPPSESALMVQNRLCNVRFRERESQVPTLERATCRERTKRHGHDH

SEQ ID NO: 170197 - protein, 81 aa, Glycine max
  Clone ID: PAT_MRT3847_124702C.1.pep
ACITKSCPTQKRTPVDIPCLYFRLPRRHWLLKTWVNKNLFIREPLRIYKFIQKKFTNTPAFGSQGHIALVESIAPEVECFI

SEQ ID NO: 170198 - protein, 483 aa, Glycine max
  Clone ID: PAT_MRT3847_124703C.1.pep
PRVRREGSCGNTNNAVGRWLVALQDGDGKGRGIELVMEEEMEVSGRERSNSQRRHVFEDIDVDLVVGEEEQKKHEEVVGGEEEEKARVSICIPPKNALLLMRCRSDPVKMAALANRFWESPVHKDRCQEEQDEEEQNIKTKEDEQLEEVQEEQVEREAIEDSICERETETAVVATEDEEQEGKESYEIESRENLESKEFGEVVKEEEKVDEEEAANGGNAIEEGETLTHPEAYSDLENLKTEEKEANLEEGKEERENNDSSELSSTPETFAASEKENDGAEPETDTNSDPEEEEEKESEPKEQPQQPDTNSDPESKERENGSKCQEREREGLPECLLLMMCEPKLSMEVSKETWVCSTDFIRWLPERPAAGGGSKRVAGETFTKSKPKPKPPQPMMQLPRSSCSLPAAGGSAGVSMAAMIEQKLVGSKSGNGYEPFVLTRCKSEPMRSSAKLAPEACFWNNRKLEPHPPAAQLGVGAPAGVGF

SEQ ID NO: 170199 - protein, 242 aa, Glycine max
  unsure (1)..(242): unsure at all Xaa locations
  Clone ID: PAT_MRT3847_124704C.1.pep
EEGKEERENNDSSELSSTPETFAASEKENDGAEAETEPVTVETSEGSTEEEEEKVIEPKEQPQQPGPTREPNSDPESMERENGSKREERDREALPECXLLMMCEPKLSMEVSKETWVCSTDFIRWLPERTAAGXRQHRVAAETLAKSKPKPKPMMQPPRSSCSFPAARGGAGVSMAAMIEQKLMGSKSGNGYEPFVLTRCKSEPMRSSAKLAPEACFWNNRKLEPHPPAAQLGVGAPAGIGF

SEQ ID NO: 170200 - protein, 195 aa, Glycine max
  unsure (1)..(195): unsure at all Xaa locations
  Clone ID: PAT_MRT3847_124705C.1.pep
RCCPQGYSWNKTRSKPGEGFPNEIPHKPARKTLYYKRYRSHIXAGFYIRGECTRGAECPYRHEMPFTGELSQQNIKDRYYGVNDPVALKLLGKAGXMSTLEAPEDESIKTLYAGGLDARVTEQDLRDHFYAHGEIESIKMDLQQAXAFGTYTTREGAQKASEELCNKLGIKGLKLKLMWGRPQTSKPESDGSDQT

SEQ ID NO: 170201 - protein, 164 aa, Glycine max
  Clone ID: PAT_MRT3847_124706C.1.pep
MERENGSKREERDREALPECLLLMMCEPKLSMEVSKETWVCSTDFIRWLPERTAAGGGNRVAAETLAKSKPKPKPMMQPPRSSCSFPAARGGAGVSMAAMIEQKLMGSKSGNGYEPFVLTRCKSEPMRSSAKLAPEACFWNNRKLEPHPPAAQLGVGAPAGIGF

SEQ ID NO: 170202 - protein, 478 aa, Glycine max
  unsure (1)..(478): unsure at all Xaa locations
  Clone ID: PAT_MRT3847_124707C.1.pep
MAHRLLRDHEADGWERSDFPIICESCLGDSPYVRMTKAEYDKECKICTRPFTVFRWRPGRDARYKKTEICQTCSKLKNVCQVCLLDLEYGLPVQVRDTALSIDSHDAIPKSDVNREYFAEEHDRRARAGIDYESSYGKVRPNDTILKLQRTTPYYKRNRAHICSFYIRVSVLEAECPYRHEMPXELSQQNIKDRYYGVNDPVALKLLGKAGEMSTLEAPEDESIKTLYVGGLDARVTEQDLRDHFYAHGEIESIKMVLQRACAFVTYTTREGAEKAVEELSNKLVIKGLRLKLMWGRPQTTKPESDGSDQARPQASVAHSGLLPRAVISQQQNQDQAQGMLYYNNPPPPQQERSYYPSMDPQRMGALVSSQDGPPGGPSGLGENKPGLEKQQMQHYAHPMMPPQPGQYHQYYPPYGYMPPPPPYHQYPPPPYNAAVAPSQPPAANHPYQHSMQPGSSQPGSFQAASAPAETGTSTSGS

SEQ ID NO: 170203 - protein, 51 aa, Glycine max
  unsure (1)..(51): unsure at all Xaa locations
  Clone ID: PAT_MRT3847_124708C.1.pep
RKRAQIEXGYEKXISTETSEWCMTXSRXHHSPRNSECHTKTPKNQECKNTK

SEQ ID NO: 170204 - protein, 136 aa, Glycine max
  unsure (1)..(136): unsure at all Xaa locations
  Clone ID: PAT_MRT3847_124709C.1.pep
TKHLXPTEXPREPQATATGTTARSAAEPSQTQPPKPTPPIPLPPPATGSTPPHPPPRPNPNPNPSPGPGPGPGPNQAPSPKPPTPTPTPPQPQPYPSLKPRNTTADAATVAAQRLPRTDDRRNQRRPASKGWQGKR

SEQ ID NO: 170205 - protein, 57 aa, Glycine max
  Clone ID: PAT_MRT3847_12470C.1.pep
DKMKKPLFFSFDSFESMSRFFMFSIWIRRKEEFVISSYAEERAKEGFPPSVVFSQQE

SEQ ID NO: 170206 - protein, 57 aa, Glycine max
  Clone ID: PAT_MRT3847_124710C.1.pep
LEPNRLERLELCNSLRTILRSFSAVISTFEHQWRTLKPSLSRLRSTIFEGAIATQSI

SEQ ID NO: 170207 - protein, 117 aa, Glycine max
  unsure (1)..(117): unsure at all Xaa locations
  Clone ID: PAT_MRT3847_124711C.1.pep
LYEALSKILEHGIPWNLQSNSRPGELRRYQSTKSGDHIINLKVYASRMMVGQYVISYITGESLIPVEDSPFLESLKKMGFKVPYMGDAIHEXSVGQLKVFEGNXRYSASKEGLILHD

SEQ ID NO: 170208 - protein, 43 aa, Glycine max
  Clone ID: PAT_MRT3847_124712C.1.pep
IAEFSPGSSAERYYILAVFLSRFTCDRCRWGPKSPIKVGTSTL

SEQ ID NO: 170209 - protein, 80 aa, Glycine max
  unsure (1)..(80): unsure at all Xaa locations
  Clone ID: PAT_MRT3847_124713C.1.pep
EGRDGAYAQLAIFDRGDSLVDHGNSNFXPTTIRAYVPPYGVQYPHXRHTGRVCKGYNIPDLIRQXLGAEYTFSYLEPHLY

SEQ ID NO: 170210 - protein, 82 aa, Glycine max
  Clone ID: PAT_MRT3847_124714C.1.pep
GTSGTKTEPLHRKLTKSDRMHMPCMTSLSQHKCLHSHLYICYEDPIPQLVPPAKALTSCLSRWTHPQVVYPSVVFSQPSRAE

SEQ ID NO: 170211 - protein, 93 aa, Glycine max
  unsure (1)..(93): unsure at all Xaa locations
  Clone ID: PAT_MRT3847_124715C.1.pep
HLXPXRXXLAARRIXXXRLXRVXXLSSTFSDMRSXAXRTXXILITRPNLILPVXXSWLCXXENFTACAFCXEXDALKKTLXHEXLTPVIVAIL

SEQ ID NO: 170212 - protein, 40 aa, Glycine max
  Clone ID: PAT_MRT3847_124716C.1.pep
LLCLFETLTYQTSFNLTMPETPYNIISSQAIGKVYGLKKP

SEQ ID NO: 170213 - protein, 91 aa, Glycine max
  Clone ID: PAT_MRT3847_124717C.1.pep
MRNLHAAAPDLSPDSVTHVIQGNDYVTPSFVTAWARLGGIRHARRVFVKTAQPNGATWNATFRGYAQAECHLDVVVSFARMHRAGAFPNCF

SEQ ID NO: 170214 - protein, 168 aa, Glycine max
  Clone ID: PAT_MRT3847_124718C.1.pep
CQKKKQKRQKNEAKPKQKKGQQPKGRRATPASGRTQPGGTAPRGGAREAPGPPAPPRPPPGPGPPPRPPSRARHPRRTPPPNQKKPPPAAEGYGAARPAPGDQNPPPRGTGPTPRGRCPQPQKTPSGPRNTRNPPRRPGHPRKQSPGDGKKQQSRERKRGAPQPSPGR

SEQ ID NO: 170215 - protein, 42 aa, Glycine max
  Clone ID: PAT_MRT3847_124719C.1.pep
FWVRITVLLSPAVEALISMSHDVVCWELNFEVRQLCFSSLEP

SEQ ID NO: 170216 - protein, 87 aa, Glycine max
  unsure (1)..(87): unsure at all Xaa locations
  Clone ID: PAT_MRT3847_12471C.1.pep
XMHVGAIEIMXDSFXSXPDXNIXGAMLXVDTYHXNXXNAVRSIFVAPFRGGRXIRVVTFPNXIVQXIEPXMNXRFQLLSSSXKVDFV

SEQ ID NO: 170217 - protein, 62 aa, Glycine max
  unsure (1)..(62): unsure at all Xaa locations
  Clone ID: PAT_MRT3847_124720C.1.pep
TKHINRMLTLNMDTNALWVGHLQTSMMTCRYTWLXPIYIVEYLGSYGLLKVGAGLMNYPNGS

SEQ ID NO: 170218 - protein, 192 aa, Glycine max
  Clone ID: PAT_MRT3847_124721C.1.pep
IFFAAEDNDGSLHSFYVKSVKEMPYYISVLQISAADSEAPTAAPSAIDPISIMSKQGCKAFTDLLRGSKALPSFKENVDGGLTVFCPTHSTVSGFAAKYKNLTEAQKVSLLLYHTTPVYESLHMLKSSNEIMNILAIEGANKYDFTVQSEGEDVNLKTKVNTTVYMTLKLSIIIQCANTYVNIGTTFYISKR

SEQ ID NO: 170219 - protein, 85 aa, Glycine max
  unsure (1)..(85): unsure at all Xaa locations
  Clone ID: PAT_MRT3847_124722C.1.pep
TYXKSFSKEFEGERFIHVHFXLFPFVPIKFLILXXHFLSLLHSSFSFQLFSLHFXXFXSRFXRVXFLYSVLRILLXVLLVNXAIX

SEQ ID NO: 170220 - protein, 79 aa, Glycine max
  Clone ID: PAT_MRT3847_124723C.1.pep
TCIQSSSCLFLQQISRAFISYIVQCGGVVCAHLHNTHCVGLARFVYSVAFRPRAIRGSFIIFGTSVCSLAPSGPCTNTK

SEQ ID NO: 170221 - protein, 39 aa, Glycine max
  Clone ID: PAT_MRT3847_124724C.1.pep
LPWLIGHSWKNNSIFQIHSGVSARTQHAQVMQIFFVLRK

SEQ ID NO: 170222 - protein, 52 aa, Glycine max
  unsure (1)..(52): unsure at all Xaa locations
  Clone ID: PAT_MRT3847_124725C.1.pep
MLLYGTFCFLLVSLDGKSNIVVYVSKKKNFISLSFKSIQKNFIKDXFLKGCV

SEQ ID NO: 170223 - protein, 94 aa, Glycine max
  Clone ID: PAT_MRT3847_124726C.1.pep
LNKRLCILFNSGWWNQHSNCKPPTRHYTTIMQMALFNFTCLYSTLITPYQKNWRSPPCSFINTTNSLNTGVFPIKPAPHYLSIYGTPNQPYPLA

SEQ ID NO: 170224 - protein, 69 aa, Glycine max
  Clone ID: PAT_MRT3847_124727C.1.pep
VPPPQGFTQGHFCKITGKKKKLGVPKKGLCSLHARVKKPAFLKFVRPIFFFFFFFFFFFFFFFFLNFYF

SEQ ID NO: 170225 - protein, 56 aa, Glycine max
  Clone ID: PAT_MRT3847_124728C.1.pep
RTTFGVCLSGTNGWEWAGLVLFGVPDFKAPNLTIQMIPIQILPSWITECSFTESML

SEQ ID NO: 170226 - protein, 122 aa, Glycine max
  Clone ID: PAT_MRT3847_124729C.1.pep
MGLCKCPKRKVTNLFCFEHRVNVCEHCLVANHAKCIVQSYLQWLQDSDYNPNCRLCNTPLASRETTRLVCYDLFHWACINERAAQLPRNTAPAGYQCPSCNGPIFPPANLAGPVASALREKL

SEQ ID NO: 170227 - protein, 160 aa, Glycine max
  Clone ID: PAT_MRT3847_12472C.1.pep
GSSANSLEKVLKEEMGSEETNFPSKPSRRVSHHVQSDATRETTTHAWPQHRSPSPPPPCVKGNNNNNSNNEIDVSMSSGAQYCYYMLEAMPQPGPTWSTTGPCVLAEPTPTPSPSALIEDSSCTWWLGYLEGLDGNLTTLKLDPPFVENVVMENGKAPWL

SEQ ID NO: 170228 - protein, 83 aa, Glycine max
  Clone ID: PAT_MRT3847_124730C.1.pep
RPHVRALSEFAFPFASSSGNVIFKWNQVFRMYVVFGTTLGHFFPAAYILGSFAKSDQHALPAAIPHLFLLSFHLLTDRIIGGL

SEQ ID NO: 170229 - protein, 112 aa, Glycine max
  Clone ID: PAT_MRT3847_124731C.1.pep
MSTLFIALQCCQCSTMQVKQKKKSSNKWNCAVCNQKQSVCRVFAQGFMAKELRKFVQDFNMSRKSFDDGEYPLAGTLNPPLPATEHGDAELNLKKKPERLVRVPPPGTTTRS

SEQ ID NO: 170230 - protein, 58 aa, Glycine max
  Clone ID: PAT_MRT3847_124732C.1.pep
IHKGCWRSNKTWVSSTPTVRLSTTTTLPPGDSNFPCFATLRIFHSGKHLHPEAEKLYR

SEQ ID NO: 170231 - protein, 179 aa, Glycine max
  unsure (1)..(179): unsure at all Xaa locations
  Clone ID: PAT_MRT3847_124733C.1.pep
SGMXLPFQPXIFFSNINYYVDVPLELKQQGIVEDKLQLLVNVTGAFRPGVLTALVGVSGAGKTTLMDVLAGRKTGGVIEGSVYISGYPKRQDSFARISGYCEQTDVHSPCLTVWEYLLFSAWLRLSSDVDLETHKAFVEEVMELVELTPLSGALVGLPGIDGLSTEHRKRLTIAVELVA

SEQ ID NO: 170232 - protein, 45 aa, Glycine max
  Clone ID: PAT_MRT3847_124734C.1.pep
YLICSNATLGKYFRTGFHYAYRPTTEVVLSLELRSWNSDRVGAGE

SEQ ID NO: 170233 - protein, 65 aa, Glycine max
  Clone ID: PAT_MRT3847_124735C.1.pep
YPPLDGNCASRRLVGLIRLTRVTNGTCPLVGPSAPYCLVRANGTAGGTRPLASPGILNLGGRSSP

SEQ ID NO: 170234 - protein, 304 aa, Glycine max
  Clone ID: PAT_MRT3847_124736C.1.pep
LRVGSTKTINGGGRNPVFNENLSLSVRTVDSVAKCEIWMLSRVKNYLEDQLLGFALVPLSEVLVKKDGKLEKEFSLSSTDLFHSPAGYVQLSLAYTGASPDVMAISSMPTTEKDSESCESLVRDLDKIEFPDPKIVNEDHLMVSEYFGIPCEESQCSDSLTTTDTENLSSEAGVQLVESFSACSVSSVSTNGVSSPSVAASSDSSPNEETKEKNVDVKDGETDSSFPKPLVTVNIEPEPNVVQQDFVDMYMKSMQQFTESLAKMKLPVDFESGPTSSGNSSSEHKLQTPKSTNSRVFYGSRAFF

SEQ ID NO: 170235 - protein, 428 aa, Glycine max
  unsure (1)..(428): unsure at all Xaa locations
  Clone ID: PAT_MRT3847_124737C.1.pep
MESPQSVVSPFKSSVLGEAEKYRSDVFTQSSGPLSKDIEVNGKEGAVVNVEESIGVVDVYIHQARDIHNICIYHKQDVYAKICLTSNPENSVSTKTINGGGRNPVFNENLRLSVRTVDSAVKCEIWMLSRVKNYLEDQLLGFALVPLSEVLVKDGKLEKEFSLSSTDLFHSPAXGFVQLSLAYTGASPDVMAISAMPTELATNGTEKDSESCESLARDLDKIEFPDPKIVNEDHWMVSEYFGIPCEESQCSDSLTTTDTENLSSEAGVQIVESFSACSVESVQPPKADSPPSSVSTNGVSSPSVAASSDSSDVAASKSPSQEQVSATKEKNGDVKDGGSDSSNGVLNESFPKPVVTVNIEPEPNVVQQDFVDMYMKSMQQFTESLAKMKLPMDFESGPTSSGNSSSEQKIQTPKSTNSRVFYGSRAFF

SEQ ID NO: 170236 - protein, 35 aa, Glycine max
  Clone ID: PAT_MRT3847_124738C.1.pep
LPHPRIYESITMYYGCNEFQLAGLIPILWQEGLEK

SEQ ID NO: 170237 - protein, 78 aa, Glycine max
  Clone ID: PAT_MRT3847_124739C.1.pep
CVPCKSLICRTMGSMLDHYSVIGIGIRSYRSRRTLFYVHKGRALTRTIAVLIERWHQYPLQPTRYNKRYVRLCLQTTA

SEQ ID NO: 170238 - protein, 46 aa, Glycine max
  Clone ID: PAT_MRT3847_12473C.1.pep
FSHTRLGPSSSILYTQGHPFKVGQLLAASIIRCFQLQCVQTLSWFA

SEQ ID NO: 170239 - protein, 54 aa, Glycine max
  Clone ID: PAT_MRT3847_124740C.1.pep
TLGAKNPFLLIKLGPLLPLGNEKTWPKELGIGRGCFHKCSGTKRSGHSASGIFD

SEQ ID NO: 170240 - protein, 106 aa, Glycine max
  Clone ID: PAT_MRT3847_124741C.1.pep
DDDGVPGSPLHENHETDTIMTNDDVLGDEIPNDQQDAFRQFCFQTLKLGVGARGHMQFPGSHPVSLNRENLQLLRQRYYYATWKADGTRYMMLITMDGCYLIDRSF

SEQ ID NO: 170241 - protein, 71 aa, Glycine max
  unsure (1)..(71): unsure at all Xaa locations
  Clone ID: PAT_MRT3847_124742C.1.pep
TTXTMLGVLRSKAGFLRRLTFLSGRLRHRSSKAAAVGGHLVEVDMAVVDLALKHLDDLIQRTPLQEEHTGL

SEQ ID NO: 170242 - protein, 89 aa, Glycine max
  unsure (1)..(89): unsure at all Xaa locations
  Clone ID: PAT_MRT3847_124743C.1.pep
MDHDTLKRNIDCIXFLSAPLTCKSVAKCXYRHNXRCARLKPKDCWYWLAGQCMNPNCAFRHHRLDGHNAASVQSEFKQTSLRAHNTLVP

SEQ ID NO: 170243 - protein, 55 aa, Glycine max
  Clone ID: PAT_MRT3847_124744C.1.pep
PFFFFPMESQQERIRNSKKKKKKNHRTMKQTFRASLTGTKPPFASAMQQLGKTRA

SEQ ID NO: 170244 - protein, 180 aa, Glycine max
  Clone ID: PAT_MRT3847_124745C.1.pep
METKRCNFWLPNKNRFCANCPLNGSLFCGNHNSRSQGQWIPCPIDPSHSVLKQNLKGHVKRCPLLKQVQSLSDQPFYDKGINAGSDGEEETSGVDDSRLPTMTVSSEMKRNTLHEMSVAEFCNLIEKIEFLHESLCKDIEDSVQMPEVCRLWIKRVGDRKLPFSEKHICQQASIVGNLEN

SEQ ID NO: 170245 - protein, 149 aa, Glycine max
  unsure (1)..(149): unsure at all Xaa locations
  Clone ID: PAT_MRT3847_124746C.1.pep
PKPYPEPKLFPTIAQTEYPSSVSHSQFAPEHSTAMNYPSAQSYDHCMPELSSEVKTQYPKSHNQFTTELSTPTKPQYTSTKIHDQPLPLPQQPSATKTPIPLPGSHDQFAPVLSTEPKIQYPSTKIHGQHLPHQFTATKTQXPSSGSHD

SEQ ID NO: 170246 - protein, 31 aa, Glycine max
  Clone ID: PAT_MRT3847_124747C.1.pep
ECQWALIPYLKGCTIIHHTTVGNFVSPNNIK

SEQ ID NO: 170247 - protein, 52 aa, Glycine max
  Clone ID: PAT_MRT3847_124748C.1.pep
HFSQLSPACARSSRKNSERVRSCLNLPHSPISYRTVFRRLTKSVIHNDSRSL

SEQ ID NO: 170248 - protein, 79 aa, Glycine max
  unsure (1)..(79): unsure at all Xaa locations
  Clone ID: PAT_MRT3847_124749C.1.pep
ISESHEAPRSKCSTATAWDHIVCRVLDLFVDMQGIHRNYSSVKLVMAITSQEVCSSKWRTSGKEYXEKWLHSSAADTXX

SEQ ID NO: 170249 - protein, 54 aa, Glycine max
  Clone ID: PAT_MRT3847_12474C.1.pep
VAREWPMFAGVIVGDGTGIGNFWLVLLHLGSQKYGTFNDLGCRNSRGPQAKHLA

SEQ ID NO: 170250 - protein, 132 aa, Glycine max
  Clone ID: PAT_MRT3847_124750C.1.pep
CRSVTAHYTGEVLLSAATTAIEIMRTLRFRVPIEHIVLTEGDIKCLFNVQRERLDPRLKTKGLTPNLGGTLMENNPFQGYETNPVYMPRAVSKDSATKTCYCQEAKAARDGEPERGPPACGEGTGRRDHTRR

SEQ ID NO: 170251 - protein, 72 aa, Glycine max
  unsure (1)..(72): unsure at all Xaa locations
  Clone ID: PAT_MRT3847_124751C.1.pep
SAFTKAMTMSFNANPCSDACSPXFLKRTGFHCDIIRATGWPATPMQDAQDTIDCLIHPYXFASRTYCVLNPH

SEQ ID NO: 170252 - protein, 72 aa, Glycine max
  Clone ID: PAT_MRT3847_124752C.1.pep
IPGRRRVRHAFELLRKYSKLLRKEKWNSKFQKFQFPFQFSVFSKPIFNFFQLILFSTPIKPKENLGISQFSI

SEQ ID NO: 170253 - protein, 65 aa, Glycine max
  Clone ID: PAT_MRT3847_124753C.1.pep
ARPSSIHAMTAVERLTLGREHGTFLVADWRECRAWCQSRPSMCSSKRLCERVWIHVASRISLHSH

SEQ ID NO: 170254 - protein, 66 aa, Glycine max
  Clone ID: PAT_MRT3847_124755C.1.pep
LNVHLPCAAKVANTSIQTLLLLLWGTSPYLSWVVVYCRPTLAPAGHVTFTAYTRKCLKLQRPRHSH

SEQ ID NO: 170255 - protein, 71 aa, Glycine max
  Clone ID: PAT_MRT3847_124756C.1.pep
KLKKRDTIFFLRFTSAYASSSCPPNSFSASSTMSCIHHHHHRVCSAPPSVAITYCLRSIHLHLLYYFKNMD

SEQ ID NO: 170256 - protein, 104 aa, Glycine max
  Clone ID: PAT_MRT3847_124757C.1.pep
GSRHTHHKRFSSVTFIIRLCRQSTTFSERQQHALTRSLSLSLTLLFIYLMGIHEMTHRHDHGILHIDNLHHGIHPSSYAPQYAQQPLLMHHVGFHDGCLAELCC

SEQ ID NO: 170257 - protein, 105 aa, Glycine max
  unsure (1)..(105): unsure at all Xaa locations
  Clone ID: PAT_MRT3847_124758C.1.pep
KPKINPTLMLRFFIKXIDSSFINSIKSLKYFLILFFFLISPKISNNQFQTPIYNHINTCSLYIYSQLNKNKLSQNNQQYIYPFPIINIKFFTFLYNHHNSLFINY

SEQ ID NO: 170258 - protein, 162 aa, Glycine max
  Clone ID: PAT_MRT3847_124759C.1.pep
LPTGGKRRQKGTTSNSSLNFSFLVTIMPTGTNVRIAFSNDAARRAASRKRRMGILKKMEELNFLGQRIEKHQEKIKKLQKEIRKKEMTMFIYRCVHAGRLLPGSDNMTLDDMNNLVSIVEQKMKDISGRFEAMDVKEKTPHQPQIQSPALDECKPHLKAEEV

SEQ ID NO: 170259 - protein, 51 aa, Glycine max
  Clone ID: PAT_MRT3847_12475C.1.pep
YIRVQDDYVGIIFWFTCETVGAGHHMASRGACICGTGLFSSLILIAGSWYP

SEQ ID NO: 170260 - protein, 338 aa, Glycine max
  Clone ID: PAT_MRT3847_124760C.1.pep
MDIKVLSSGVQYSNLPESYIRPESERPRLSEVSECEDVPIIDLGSQNRAQIVHQIGEACRNYGFFQVINHGVALEAAKEMAEVAHGFFKLPVEEKLKLYSEDPSKTMRLSTSFNVKKETVHNWRDYLRLHCYPLDKYAPEWPSNPPSFKETVTEYCTIIRELGLRIQEYISESLGLEKDYIKNVLGEQGQHMAVNYYPPCPEPELTYGLPGHTDPNALTILLQDLQVAGLQVLKDGKWLAVSPQPNAFVINIGDQLQALSNGLYKSVWHRAVVNVEKPRLSVASFLCPNDEALISPAKPLTEHGSEAVYRGFTYAEYYKKFWSRNLDQEHCLELFKNK

SEQ ID NO: 170261 - protein, 81 aa, Glycine max
  Clone ID: PAT_MRT3847_124761C.1.pep
NGAPKFNLSTAPPKAYATITHNLHKTSYPLSIKDKRHSSAGDTCQHTTRYINTPHLLKWFEKTHYLMTTGGEPVKAKTALQ

SEQ ID NO: 170262 - protein, 151 aa, Glycine max
  Clone ID: PAT_MRT3847_124762C.1.pep
MGSDSEAEKEKKKMLALAPIAKPLAGKKLCKRTLKLVRRAAEHKCLKRGVKEVVKSIRRGHKGLCVIAGNISPIDVITHLPILCEDSDIPYIYVPSKEDLAGAGATKRPTCCVLVQTKPVKGEIERGEQEKLKSDYDQVVSEVTELTTSLF

SEQ ID NO: 170263 - protein, 158 aa, Glycine max
  Clone ID: PAT_MRT3847_124763C.1.pep
MGSDSEAEKSVQKEKEKKKMLALAPIAKPLAGKKLCKRTLKLVRRAAEHKCLKRGVKEVVKSIRRGHKGLCVIAGNISPIDVITHVPILCEESDIPYIYVPSKEFDLAGAGATKRPTCCVLVQTKPAKGEIEQGEQEKLKSDYDQVVAEVTELTTSLF

SEQ ID NO: 170264 - protein, 43 aa, Glycine max
  Clone ID: PAT_MRT3847_124764C.1.pep
ERGQRALETAGQHLPCIRQPSLSAVGQSRRRSAGSRDDSSSVS

SEQ ID NO: 170265 - protein, 90 aa, Glycine max
  Clone ID: PAT_MRT3847_124765C.1.pep
FKYSETADDTCLNETCKSLDASCVPESTFVPETEIENGTESISGAVSSGPLVGPQDQEVSVNNELKPFCVRRRLTKLSQNPDLLDTEISD

SEQ ID NO: 170266 - protein, 73 aa, Glycine max
  Clone ID: PAT_MRT3847_124766C.1.pep
SSCRYLGFHQKSKTLIRMIKKLDCTNYLLLTILTTSYKSGSFTEARENIMGFTGKQKTLIIVIKKKKNSDYKK

SEQ ID NO: 170267 - protein, 106 aa, Glycine max
  Clone ID: PAT_MRT3847_124767C.1.pep
NTIPALQHLFLFFFFLPLVLYSNRKHYSKLSNNTLSSINPQPGGFLSAKADAFVRRSSFASGPAVRLLFLTPSAALMQGIPIGTFSQAKRSQCLFCSAYAFGPTRV

SEQ ID NO: 170268 - protein, 481 aa, Glycine max
  Clone ID: PAT_MRT3847_124768C.1.pep
MLPCWCAPVAGAEKLADSKSAPASPAPSDQIAKPAPSNSGISVQSAGKLYSYKEVALAPPGTIVKVVAEQSPKGNPIQLNSEVSAMIVATKETQNIMATTNDVEDYFQKSIDVKQQSPVHQEQEEKETTVVKDNTETVNSKAKDEAFEVKLQEANNVPSEIQVQESCQATSHDLNPLTILVEGKKQLLIDNDVSVSKDMVTEGDEKHESSSDNAVSNPLPSEGEKQETETGKEPTKRLSAAAPPFDPSTIPVFGSVPVPGFKDHGGILPPPLNISPLLPVSPPRRSPHQSATARVPYGPRISGGYNRYGNRVPRNKTVFLSGEPYPDGNPNSPPRIMNPHATEFVPGQHWVPNGYVVPPNGYMASPNGIPASPNSFPPVSYSVMPVSPSGYPASLNGVQVNQNGLATSPTNVSSEKKHVVQNANELSASSENPEVEEKQEDLSPPSGCSKEDKVTNKDAVDEKKPSKCWGDYSDNEAEVTS

SEQ ID NO: 170269 - protein, 73 aa, Glycine max
  Clone ID: PAT_MRT3847_124769C.1.pep
LIDVKGDLKKKKKKKKKKPGPPPLLLFPPLKMNNSPLHINIITLSYCKILSPPHTTQHPTTLKSKSLPPLPPN

SEQ ID NO: 170270 - protein, 100 aa, Glycine max
  Clone ID: PAT_MRT3847_12476C.1.pep
RTDMHGVRSSGRTTGVCVVVVALFLVYARLSSCHDDALLSSSHDHALVSSSHDHAHLSSSHDHALLLSSYVHVYRSSSGDHVDHSSTTMQAHQSAQRFEA

SEQ ID NO: 170271 - protein, 90 aa, Glycine max
  Clone ID: PAT_MRT3847_124770C.1.pep
NQRRRHLTSIGDENLQQARQRPKGGQRGGLPTKTHFTKTRSGKASTASMAAGNSGMIQATHVTTTMRFVVARQGLRRQGEAGHMRTGRTT

SEQ ID NO: 170272 - protein, 52 aa, Glycine max
  Clone ID: PAT_MRT3847_124771C.1.pep
DINYVFEQTASPRYYITKPYTKPWALPFLGSALLHYRPIVKNGKLYLVSTHK

SEQ ID NO: 170273 - protein, 204 aa, Glycine max
  Clone ID: PAT_MRT3847_124772C.1.pep
MQIFVKTLTGKTITLEVESSDTIDNVKAKIQDKEGIPPDQQRLIFAGKQLEDGRTLADYNIQKESTLHLVLRLRGGMQIFVKTLTGKTITLEVESSDTIDNVKAKIQDKEGIPPDQQRLIFAGKQLEDGRTLADYNIQKESTLHLVLRLRGGMQIFLKTLTGKTFTAEVESFDTIDNVKGKIPDKGRILPNSRGLILLANQLVD

SEQ ID NO: 170274 - protein, 139 aa, Glycine max
  Clone ID: PAT_MRT3847_124773C.1.pep
QIFVKTLTGETITLEVESCDTIDHVKAKIRDKEGIPPDQQKLIFAGKQLEDGRTLADYNIQNESTLHLVLRLRGGMQIFSKTLTGKTITLEVESSDTIDSEKAKMQDKEGMPPDQQRLIDAGRQLDDGRTLCDYNMQNE

SEQ ID NO: 170275 - protein, 185 aa, Glycine max
  unsure (1)..(185): unsure at all Xaa locations
  Clone ID: PAT_MRT3847_124774C.1.pep
MQIFVKTLTGKTITLEVESSDTIDNVKAKIQDKEGIPPDQQRLIFAGKQLEDGRTLADYNIQKESTLHLVLRLRGGMQIFVKTLTGKTITLEVESSDTINNVKAKIHDKEGIPPDQQHLIFTXNQLKDSLTLSNYNIQNESTLHLFLHLQYNIHILLKTLTNKTITLQLQICHTIHNVYTNIQYK

SEQ ID NO: 170276 - protein, 161 aa, Glycine max
  unsure (1)..(161): unsure at all Xaa locations
  Clone ID: PAT_MRT3847_124775C.1.pep
LIFXKTLTGKTITLEVESSDTIDNVKVKIQDKEGIPPDQLRLIFARKQXEDSRTLADYNIHKESTLHLVLRLRGGMQIFVXTLTGKTITLEVESSDTIDNFMAKIQDKDGILSDQQRLIFARXQLEDCRTLSDYDIQNEFTLHLVLLLRGGMQIFCKTLTG

SEQ ID NO: 170277 - protein, 126 aa, Glycine max
  Clone ID: PAT_MRT3847_124776C.1.pep
PTPTKGISPVHQKKPHRKSLPPQLTSEKTRSSNSASVRTSSKAVNGGKNSLSSVTTEVTTLSNPREEEKVEIAAATEENNVLLNEPSKALPLNIEPDETESPVNGDLVIQEKPQLNMAQEPIAAEH

SEQ ID NO: 170278 - protein, 98 aa, Glycine max
  unsure (1)..(98): unsure at all Xaa locations
  Clone ID: PAT_MRT3847_124777C.1.pep
PHLISSPTCPSRSRLVPWQRTVTILLAFQQMIGCRSLRYSSTPMTLRVACTRSTITSSSRTLPSILPCGYDRGILRTTVQPATSRGTRYHGLTLXDPV

SEQ ID NO: 170279 - protein, 193 aa, Glycine max
  unsure (1)..(193): unsure at all Xaa locations
  Clone ID: PAT_MRT3847_124778C.1.pep
NVKAKIQDKEGIPPDQQRLIFAGKQLEDGRTLADYNIQKESTLHLVLRLRGGMQICVKTLTGKTITLEVESSDTIDNVNAKIQDKEGIPPDQQRLIFRGXQLEDGRTLADYNIQKESTHHLVLRLRGGMQIFVXTLTCXTITLEVESSDTIGHVKAEIQDKEGVPADQQKLIFGRQQLRDGLSLADYNIQKGS

SEQ ID NO: 170280 - protein, 230 aa, Glycine max
  Clone ID: PAT_MRT3847_124779C.1.pep
LCDERAERRKEFYTKLEEKIHAKEVEESNLQAKTKENQEAEIKMLRKSLGFKATPMPSFYQEPPPPRAELRKMPTTRAKSPKLGRKKSSINSEPEGNTSNSARQGRLSLDEKMSQTNPTNGISPVHPKKPQRKSLPPRLASEKISSSNSASVRTSSKAVNGGKTSLSSVTAEVTLSNARGKEKVQIAAAATEENNALLNETSKVLPVNGDLVVEEKPQLNLAQEPIAAEH

SEQ ID NO: 170281 - protein, 494 aa, Glycine max
  Clone ID: PAT_MRT3847_12477C.1.pep
MMSGSTRRVELVLKNRFLSYLIWQSIHSSLIFISLLSFSSPHYPFLSLLLFLPSHLLFSTTLSFIVSPHPRPRFTLSLLFAFSAAFSASLSLSSVAPAAHGLPGVSRLGFRGFLVGSLFGSHYVFKRRWVLHFPIIQRPPFFSFKMGVPSSARRALKLSIVASVFSGILLELLPHPFKYSVATGRFGTGQITSFAATFAIFFSWELTHHLHWVLHTKRSIFAPPKGSAAAETNPSEHLLSALEESSPTSLLRYLAYLDLCMVCENNVDTWRRAGFFEETGETYKRVIAVCLKPLEHLATKLGEGLGNPVDKATQLSNQLLSPTDARPDLKHIEELHNFQLYAWCSRTAVSLTACSRKDDKFGVAQLSGSNAAVVSTLLSCLLAVESFMGKKTNLQSPNQLLGPAGIKWATVNSGRVDVAAGKRRSGPVNSKAYAIADVLKTSIYQIVSAFHDEMLAGAKASLLEKDWVTNGKPLFGTREMLIQKLRLFLDFRAT

SEQ ID NO: 170282 - protein, 91 aa, Glycine max
  Clone ID: PAT_MRT3847_124780C.1.pep
GSYIYIAEAVAFRWAIESVGYLILNPVVFESVCLHLVSAWASRNSNSNNYFVGIIKDYRVLLSIQILLFWFLNPIGLRMSLLRLVILFRMM

SEQ ID NO: 170283 - protein, 130 aa, Glycine max
  Clone ID: PAT_MRT3847_124781C.1.pep
MALEWVVLGYVAAAEAIMVILLTIPGLEALRKGLIAVTRNLLKPFLSVVPFCLFLFMDIYWKYETRPSCEGDSCTPSEHLRHQKSIMKSQRNALLIAAALLFYWLLYSVTNLVVRIDHLNQRLERLKNRD

SEQ ID NO: 170284 - protein, 206 aa, Glycine max
  unsure (1)..(206): unsure at all Xaa locations
  Clone ID: PAT_MRT3847_124782C.1.pep
QIFDKTLTGKTITLXVESSDTIDNVKAKIHDKEGIPPDQQRLIFSGKQLEDGRTLADYNIQNESTLHLVLRLRGGMHIFVKTLTGKTITLEVESSDTIDNVNAKIQDKEGMLPDQQRLIFAGKQLDDGRTLADYDIQKESTLHLVLRLRGGMQIFGXTLTGETITPEVESSDTIGNAKAVIQDREGIPPDPXRLILAGEPLEDGRT

SEQ ID NO: 170285 - protein, 174 aa, Glycine max
  unsure (1)..(174): unsure at all Xaa locations
  Clone ID: PAT_MRT3847_124783C.1.pep
MQIYFKTLTGKTITLEVESSDTIDNVKAKIQDKEGXPPDQQRLIFAGKQLEDGRTXADYNIXKEXTLHXVLXLRGGMQIFVKTLTGKTITLXVESSDTIDNVKAKIQDKEGIPPYQHRLIFAGKQLEDGRTLADYNIQKESTLHLVXRIRGGLQIYVKTLTGKTITLDVESSDT

SEQ ID NO: 170286 - protein, 189 aa, Glycine max
  unsure (1)..(189): unsure at all Xaa locations
  Clone ID: PAT_MRT3847_124784C.1.pep
DVEDSEGPSILELLASKNQPLLVRGDAFLVLNLGLHIVNGVRALHLEGNSLTRKSLHENLHTTTKTITLEVESSDTIANVKAKIQDKEGIPPDQQRLIFAGKQLEDGRTLADYNIQKESTLHLVLRLRGGMQMFVKTXLTGKTITLEVESSDTIDNVKAEIHDEGCIPTDQQKLIYAGKQVEDGKTLAD

SEQ ID NO: 170287 - protein, 56 aa, Glycine max
  Clone ID: PAT_MRT3847_124785C.1.pep
QYDTCRGKVNDLVEPEADTILNSQIFSSGWSNQVGEGVRALTCVLQLQDKAFTMSL

SEQ ID NO: 170288 - protein, 164 aa, Glycine max
  Clone ID: PAT_MRT3847_124786C.1.pep
MQIFVKTLTGKTITLEVESSDTIDNVKAKIQDKEGIPPDQQRLIFAGKQLEDGRTLADYNIQKESTLHLVLRLRGGMQIFVKTLTGKTITLEVESSDTIDNVQANIQDTEGIRPDHQRLIFPENNSKTADHRRQKIQKGSNLHSCLPPRGGMQLSLQTPTAKTI

SEQ ID NO: 170289 - protein, 48 aa, Glycine max
  Clone ID: PAT_MRT3847_124787C.1.pep
IVSPNPCFPTPPIQLHFFVCFTQSENFDTPLCRYVGKATQCLEFFPRW

SEQ ID NO: 170290 - protein, 53 aa, Glycine max
  unsure (1)..(53): unsure at all Xaa locations
  Clone ID: PAT_MRT3847_124788C.1.pep
MIGAHINSATGRFXDSWVASHPACKIEALSCQGNSVERRITEEELAGMSGYLL

SEQ ID NO: 170291 - protein, 68 aa, Glycine max
  Clone ID: PAT_MRT3847_124789C.1.pep
LDKGNYPKTFGPSKKMGGSKGPNHPFIKGGKGEFMAPPLCLKIRSIGGPNCLAPAGLLTMREAKAGVP

SEQ ID NO: 170292 - protein, 223 aa, Glycine max
  unsure (1)..(223): unsure at all Xaa locations
  Clone ID: PAT_MRT3847_12478C.1.pep
MKVLVFFLVTFLAAWQCLAYDMFPXLRMNTVYGARTPEAEMLKLGCLLSKHTALFGFETIPEQCXKTTKEYIHGEQYGXHSNRANQHTYFYARDLDFHPKDTXFVFNIHGTELCNIPYYRKHGFGVDKFILTLLDEWNTHGXAPALXETLNIYNRLVILGFKIIYLPXRTLDMQTATEAKLKKAGYHTWQRLILMDPQDTCTPNAVXYRTAAREXKLIMQGYN

SEQ ID NO: 170293 - protein, 131 aa, Glycine max
  unsure (1)..(131): unsure at all Xaa locations
  Clone ID: PAT_MRT3847_124790C.1.pep
FPSWKCNCCPLQFRDIVIPPVGEEFVSFQWLNVTLXIQIXMCTPLLRVLTSTFQPSGNQSGCSLAFSTLCCLELDFVLLSICLLVSSDFSTSGFSIFRTQSKIKQIRKSYQSTMCLPYSNNLLPLPKNPPI

SEQ ID NO: 170294 - protein, 110 aa, Glycine max
  Clone ID: PAT_MRT3847_124791C.1.pep
KKKKKKIWVTSGPLQGNPQTRVRGFCPIPLLFSQTKKKKNKLTLLQRFKKQIPPEENQEKKMGGPNLRGVGYPSTSFIWKKIHVWDKKKIFRRLKKCGGGSKGCKTLPAK

SEQ ID NO: 170295 - protein, 81 aa, Glycine max
  Clone ID: PAT_MRT3847_124792C.1.pep
KKTRIVRNFFLLKSKQERLGPPPLFYEFWQGEGPFVSLKGNVLNPKVIRTVVPKLSNGYFQKKLPFVNALQCLIKPLNLWV

SEQ ID NO: 170296 - protein, 69 aa, Glycine max
  Clone ID: PAT_MRT3847_124793C.1.pep
MGSRFPSHQLSNGLYVSGRPEQPKEKTPTMSSVAMPYTGGDIKKSGELRKMFDIPMDGSKSRKSGPINN

SEQ ID NO: 170297 - protein, 81 aa, Glycine max
  Clone ID: PAT_MRT3847_124794C.1.pep
SNLGILRRHKPPISKGPAFGTPLLGPLLVLRLPNQRVGLAKTKCPIQQSVSYTTISTSFTLLVAQNTIKAISPHKRPPPPP

SEQ ID NO: 170298 - protein, 229 aa, Glycine max
  Clone ID: PAT_MRT3847_124795C.1.pep
MPSCHYTTNNNLNSKTRKRGCSSSSSSSLVRRYRFKRAILVRKKGGSSTPVPMWKTKTSSSPSVPTQQQQHHTKPLLHSSGSMLPSKDKELSVSARKLAATLWEINDLPPSRVKKEFEVDPMRGCKEKVRSREKKGVGLSRSGLLRPQMSDPSHSPASERMKGLEGGSCKRRVSRFSHQLLSGDYYLDALDAHSSANFIEEVENQLRSKKNRGKPTRPIRNRPLSLRTL

SEQ ID NO: 170299 - protein, 135 aa, Glycine max
  unsure (1)..(135): unsure at all Xaa locations
  Clone ID: PAT_MRT3847_124796C.1.pep
HGRTLGVLSLTCDKESARALRPSLPVHIKVDCSDAHALERISKKXGDHIATFISKPMQGEAGAIXTPDGYINAVLDICSIYNVLLIADEIQTGFARTGKMLAXEWEELHPYIVILGTALGGGDIPVIAFVAAKMI

SEQ ID NO: 170300 - protein, 60 aa, Glycine max
  Clone ID: PAT_MRT3847_124797C.1.pep
KNTGRVWQVQRRPKILKIYIRKYQTSKKKTIELPSDLRNELQTIQVSYTRNQKNTENHMA

SEQ ID NO: 170301 - protein, 88 aa, Glycine max
  Clone ID: PAT_MRT3847_124798C.1.pep
TYGLFIKLRASVERLDILWYMEDTTHHQRTYRHDSYIMFLVMADVELNGPSGRMLEAHVHFHVLFLFYFIILENLVISESGPFFIHIQ

SEQ ID NO: 170302 - protein, 114 aa, Glycine max
  unsure (1)..(114): unsure at all Xaa locations
  Clone ID: PAT_MRT3847_124799C.1.pep
AAYACQTALNRCVAEDNRLVVNSYKETCPQAEDMIKEHVKLLYKGHKNTDFCWLTNMIHDXHVRDGDASLWLDSPXRSWFETDTYRSFGLRNCRYIGTIKXAMERECPRVVTCA

SEQ ID NO: 170303 - protein, 78 aa, Glycine max
  Clone ID: PAT_MRT3847_12479C.1.pep
LNLSTTIGLGHDETYLKGNKIFEGWVTVVMNNGMWLSFGVIGSNLWCFDGGGWVTGVCTSGYGGQGGAVGLDYGVVFE

SEQ ID NO: 170304 - protein, 36 aa, Glycine max
  Clone ID: PAT_MRT3847_1247C.1.pep
KIMGHWYGYVTPNAVSDLLDPHLAKGEVTKRLFRGQ

SEQ ID NO: 170305 - protein, 75 aa, Glycine max
  Clone ID: PAT_MRT3847_124800C.1.pep
ELDHVTLGTLCWLFHKNACGLLDRQYDVNLSTLVSWTFFSSSAMKNDPGLGLSLCMRGPPSPVMDEIQYYVNHII

SEQ ID NO: 170306 - protein, 81 aa, Glycine max
  unsure (1)..(81): unsure at all Xaa locations
  Clone ID: PAT_MRT3847_124801C.1.pep
IQIQRREQITNKNIKIKTPKWSLSKASPGWPQWDSSTCQQLLDPQLKREKNINLVRVXGFFHKSNHSVSTLFLFNQITYIS

SEQ ID NO: 170307 - protein, 63 aa, Glycine max
  Clone ID: PAT_MRT3847_124802C.1.pep
IKSLSVHNNIIMRLVKEKNNVWLILHSLQILGSCMLRILPPVHKSCIIRQYNAPPNPSCNIAA

SEQ ID NO: 170308 - protein, 174 aa, Glycine max
  Clone ID: PAT_MRT3847_124803C.1.pep
MSPLIASMAFSVCLLSSNPKFPRVRPRVRPRVRLKTLVVKALREREESIVKSNPVPDLNSFDDDGNHSNSEMLDKEDSENGNDCSDDDEDTVFVTAEPSQQSPSHLTEDGCETETATKSKSLPASTENYISSGNRLLVDSCPCNLVSQICSLAIGLQDCGLATGRQRGSSKICG

SEQ ID NO: 170309 - protein, 493 aa, Glycine max
  unsure (1)..(493): unsure at all Xaa locations
  Clone ID: PAT_MRT3847_124804C.1.pep
MTEVLQLPSSSSCSRRPCGGLTPNDGSHPIPLINAPTVEEQQSVEIEEEEEKERERERDQLSILTLLIATFGKSMIWQGPTTSSSSSMEIGVFPNVRHVAHVTFDRXDGFLGLPVEFEPEVPRRPPSASANVFGVSTESMQLSFDAKXYSVPTILLXMQRHLYAQXRCIISDVIMXAAENGQEEFVREQLNRGIVPDGIDVHCFAGLIKAWFRELPTGVLDPLSPEQVMQSQSEEECAQLVRLLPPTEAALLDWAINLMADVAQMENLNKMNARNIAMVFAPNMTQMADPLTALMYAVQVMNFLKTLVVKTLREREESIVKSNPVPDLNSFDDDGNHSNPEMLDKEDSENGNDCGDDDEDTVFVTAEPSQQSPSHLTEDGCETETESKSLPTSTENFISSGNRLVVDSCPCNLVSQICSLAIGLQDCGLATGQTKGDQAKICRSKSLQLSTYDTDKCSRKVIELPVTGAAEKNCGMAIIERINSRTELAEAWR

SEQ ID NO: 170310 - protein, 248 aa, Glycine max
  Clone ID: PAT_MRT3847_124805C.1.pep
MLGKRPQPRIGKICELLVSCDCTTKLFDALGRSPRSPFDMMNLKMQSPKGLKSYDLGGVGLGIVVALDKKSSSEEQGHDVVPKHAVICTSNSNRSVPIPVKNHQGFQKGVNEIPVGSSEDYTFVTYHVPNNKTITKVYYDGGERGILTHGCYNINNNNNNNVGVGGVRRIPPTQTLNIEEDEPSYPTSDFLSSCHLCRKNLHGKDIYMYRYLQIHIPKSFLLKIRSFYLLFIQFFLVMGKVLKKGRRP

SEQ ID NO: 170311 - protein, 253 aa, Glycine max
  Clone ID: PAT_MRT3847_124806C.1.pep
MLGKRPQPLIGKISELLVSGGRAAVLFDALGSPRSPFDMMNLKMQSPKGLKSYDLGGVGLGIVVALDKSSSEEQGHVCTSNSNRSVPIPVTNQRGFQKGVNEIPAGSSEDYTFVTYHVPNNKTITKVYYDGGEGGILTHGYYNINNNNNNNVGVGGVRRIPPTQTLIEEDEQSYPTSDFLSSCHLCRKNLDGKDIYMYRGEKAFCSNECRSRQISMDDERKERCRSEASRSVELSSSPYTARDQMFSTGIVAL

SEQ ID NO: 170312 - protein, 86 aa, Glycine max
  Clone ID: PAT_MRT3847_124807C.1.pep
PLHTLTHEHRRLPLFNPLIITAHYSSYTPASTVAAGIILRLPWPLMYNIPLTPTSLLRPAGQLAIWAAQEHHNAIPVTGPWTVRSR

SEQ ID NO: 170313 - protein, 89 aa, Glycine max
  unsure (1)..(89): unsure at all Xaa locations
  Clone ID: PAT_MRT3847_124808C.1.pep
DRVWFFSHLKNSSCSGNCGCGSFFKGFYGCIGFKTYSDLSYTELTTTXTLVMVAAPANAQYEVAEIGVPDKNDCCKCGPNCYCNSCTCK

SEQ ID NO: 170314 - protein, 134 aa, Glycine max
  unsure (1)..(134): unsure at all Xaa locations
  Clone ID: PAT_MRT3847_124809C.1.pep
RHRPGRKYRADEHFWPPPAXKKXGGANKKKNRPGTPXPKKKTNTPRGKKSKEHQGTPPTHTNTTSPKKSPPTKQKQNTETQKKGQKQKPTNSHRQKRKPTQEPTKKGPGTKRTPTGGGQTTKPREKGRQTKTPP

SEQ ID NO: 170315 - protein, 111 aa, Glycine max
  unsure (1)..(111): unsure at all Xaa locations
  Clone ID: PAT_MRT3847_12480C.1.pep
TPTDDTATPADDASLTFFTDTDAGKHVPRTAFVDLDPTAIDEVRTETYRHLFSLEKLIIRKQDAVNNFAHGHYTIDKEIDDLCLNRIRKLTDNXCTVLQGFMIFKCVGGGT

SEQ ID NO: 170316 - protein, 88 aa, Glycine max
  Clone ID: PAT_MRT3847_124810C.1.pep
VSETDYAFSARVMIEHVADLDVHGPIRPYEHVARGTFHHGIHHLLRSPVRFETLNEIGDSPTTINRTIGAIGEHDSDTARSFSLCLKK

SEQ ID NO: 170317 - protein, 66 aa, Glycine max
  Clone ID: PAT_MRT3847_124811C.1.pep
PKENNKRTRLPVPDKYPQVVKFISFFLCQIARVYLNIQDTTGSEHTKCMRHVSIRIIPYAAIGRVG

SEQ ID NO: 170318 - protein, 151 aa, Glycine max
  Clone ID: PAT_MRT3847_124812C.1.pep
LLIHHFGSPIHIVIPERPTECAVFNVIAGMEEEASHLFFYCSKIQPIWWETTSWLNITSVFPSNPIQHFLQHSFVQVEGIRRGRWQSWWMAVVWSIWKMRNRIIFSNESFNGSKLVDDAVFLVWTWLSNLDKDFKLPFNQWSTHIREGFLF

SEQ ID NO: 170319 - protein, 130 aa, Glycine max
  unsure (1)..(130): unsure at all Xaa locations
  Clone ID: PAT_MRT3847_124813C.1.pep
PPWGKFIFKGPQDPFPPKAVFFKTAGREKFIRRGFPLVGVLGGPWGGFLGGPQGESRXFRFLIPWVTFRGSFPFQQFRVXPFFFYGIKGVXIGGPASLFVVSTGGPQVLLKASLCCFFFWGFYKFWAPVS

SEQ ID NO: 170320 - protein, 40 aa, Glycine max
  Clone ID: PAT_MRT3847_124814C.1.pep
DNDNFCIYLEPPKSNTRLTHQLTTAPLYIMANVYPLAQFS

SEQ ID NO: 170321 - protein, 87 aa, Glycine max
  Clone ID: PAT_MRT3847_124815C.1.pep
TPLSSLCRMMVTFVPSSGTMNQGSPVVDHSLWAQVPKVQNFHTLQHSMRLFLRVATWPMWECGDYSANHHGACNHSPQKGKESPKKS

SEQ ID NO: 170322 - protein, 154 aa, Glycine max
  Clone ID: PAT_MRT3847_124816C.1.pep
DTHVFLVELLVGSLLLKSLPPSDIEVRFVTIINISFVIFCVPLMASVQDIATHELGFEEGIYWIHSHVMDEACDSKIHMRNRRQKLLQHYRYPRETQSQYCSKFSTRSSYDKRPKHATGGPGMQAVFLVSGQGSCGTGVFLPQKAGTKSIRKPG

SEQ ID NO: 170323 - protein, 77 aa, Glycine max
  Clone ID: PAT_MRT3847_124817C.1.pep
ESGISLCDLPLNRNPRAPSFEDMSFKQILRPSSLHDHEGEIFNGFSSSSSSDMYSDDDIIICGKLVPFKAELAAEKP

SEQ ID NO: 170324 - protein, 131 aa, Glycine max
  Clone ID: PAT_MRT3847_124818C.1.pep
TSEPSLKNTSRAEDHHGGGKRKNPHGKAEEEPTGPGKPTPEPDTDEPPPDEKEEARPEANGEKTKEPGPKKGARPRDPATHAANEENDKDASATHKDTTAASQHAIAKHSEENHKAACTELQERTPKPWEE

SEQ ID NO: 170325 - protein, 78 aa, Glycine max
  Clone ID: PAT_MRT3847_124819C.1.pep
KILPCGLKHGHISKSWAVITFHHVQTCSLQASLFNHDQVLVAFCILCLHSALTQALAMILTGETKGDTVFAYCRSVER

SEQ ID NO: 170326 - protein, 58 aa, Glycine max
  Clone ID: PAT_MRT3847_12481C.1.pep
CHNYIYLRSPLRYNSKLYVGCQQTNTTLLLNPSLILDIKHMSRIYILHSIELRCPFYN

SEQ ID NO: 170327 - protein, 109 aa, Glycine max
  Clone ID: PAT_MRT3847_124820C.1.pep
LIANICILRRTSCRHPREMGLTFTKLFNRLFWNNEMLIQMDGVDDAGKTTILYNVKVGEIETTNPTIEFNVETEKDKNISFAAWNVGDQYTQHPLRDDNYYKTLGHIFG

SEQ ID NO: 170328 - protein, 79 aa, Glycine max
  Clone ID: PAT_MRT3847_124821C.1.pep
GLTAYNSLCGQQLKISHHKGALINSNPSVGAVSHCFPLERRWFEKTRPRMQIDFPSLPPCAYHMEASLVSRGNPDRDYG

SEQ ID NO: 170329 - protein, 51 aa, Glycine max
  Clone ID: PAT_MRT3847_124822C.1.pep
FLRCECVFFFKDDLRDKMCTPKYYISFINSINIYIDVLVGVRLTQDKTGKT

SEQ ID NO: 170330 - protein, 43 aa, Glycine max
  Clone ID: PAT_MRT3847_124823C.1.pep
FNTLGYFYYFYPLFLLSFCARSPVPLCWRKNFLAQPIFRFNLI

SEQ ID NO: 170331 - protein, 74 aa, Glycine max
  Clone ID: PAT_MRT3847_124824C.1.pep
TVFITPRRLVNGNGSQHWSQFHVHAHAPLVAARTQRGRSVSVSAWDAFSTTFSCRRSDRFRLSRLRSVFLGSRN

SEQ ID NO: 170332 - protein, 57 aa, Glycine max
  Clone ID: PAT_MRT3847_124825C.1.pep
LHPIHLHETESYQVSQMFPSGHTGHNLYGTMEVMQKIIVHLINITSVVRDRQDRLTL

SEQ ID NO: 170333 - protein, 56 aa, Glycine max
  unsure (1)..(56): unsure at all Xaa locations
  Clone ID: PAT_MRT3847_124826C.1.pep
FQKITRVQIFXSKKFQKLLKGTKSLSTHLVVKKVFPHKEPLFAFFKSLNESLLASK

SEQ ID NO: 170334 - protein, 66 aa, Glycine max
  Clone ID: PAT_MRT3847_124827C.1.pep
SSKSIMLKSLKEPQVGDVELYHVINPLKSTGNFSEVVGSVGYIPPGQKLFNPIFLLFFHSSHINFI

SEQ ID NO: 170335 - protein, 100 aa, Glycine max
  Clone ID: PAT_MRT3847_124828C.1.pep
STAREKVCDGPAAEETTTNRLSGIEPNDRHPHTHHGKAHQRRQLHTTGLTGKHNADRLNHETSPAQPWTCWTIRGRRSRTEHITSDPEPHDASVRTGKQP

SEQ ID NO: 170336 - protein, 72 aa, Glycine max
  unsure (1)..(72): unsure at all Xaa locations
  Clone ID: PAT_MRT3847_124829C.1.pep
YVQVDNIAFNFFKSIGRTXVRIGFMGPNPAHVASYEPFSFSSSASPPVPSLGFSIFFCGAYALGIRGFSARS

SEQ ID NO: 170337 - protein, 169 aa, Glycine max
  Clone ID: PAT_MRT3847_12482C.1.pep
QATNVIPEKPSPLGQVQTSSDVGLTMKNLTTANASSVNFPGTHSTLALRGDGTNYVKPVPNLSVQHEGLSNSFRQPFMPPSPTPSHSASQQQRHQHLSLEVHYTEPPYRNPGRSYPPQIEISDHGSDNMWRVRQDHVSSSYLSQRNHNNNYNTMVGGSRQSGFYDRNNH

SEQ ID NO: 170338 - protein, 51 aa, Glycine max
  unsure (1)..(51): unsure at all Xaa locations
  Clone ID: PAT_MRT3847_124830C.1.pep
GXVHRKKVASCFGVMGMAYIDHTHTHIYMLYINILVKISLLXVFSIVSGNG

SEQ ID NO: 170339 - protein, 103 aa, Glycine max
  unsure (1)..(103): unsure at all Xaa locations
  Clone ID: PAT_MRT3847_124831C.1.pep
MGFGSGHSGGYSNPGSGRSSFGNSGERFGGXEYNRFGSSGGFGSGQSGSRSGGFSSRSRFSRSDDFGGFGGSDRSGGFGDFGSGQSSGFGGSRGSKQNNRRPF

SEQ ID NO: 170340 - protein, 315 aa, Glycine max
  unsure (1)..(315): unsure at all Xaa locations
  Clone ID: PAT_MRT3847_124832C.1.pep
GRVGGISLYSIATDLYVKAGILAPLITEHAKGGKXCIVFTQTKRDADRLSYAMARSVKCEALHGDISQAQREKTLAGFRNGHFNVLVATDVASRGLDIPNVDLVIHYDLPNNSEIFVHRSGRTGRAGKKGTAILVYTEDQSRAVKLIERDVGSRFSELPRIAVDSASVDMVDSMGGGRFGSFGGTRDRRYGDTGFGSGRSGGYSNPGSGRSSFGNSGERFGGQNYNRFGSGNSSGEMNRYGGPSSGRFGSSGGYGSGQSGSRSGGSSSGSRFSRSDDFGGFGGSDRSGGFGDFGSGEPSGFGGSRGSNQNNRRPF

SEQ ID NO: 170341 - protein, 81 aa, Glycine max
  Clone ID: PAT_MRT3847_124833C.1.pep
CHKNNLAIPHSFSKFHPQKKSPQEVQPKKISAVKAVLIGYCYDFSHFFSLRIMVLNFLHQCFGNVNMLCFLTYSFLLFFAK

SEQ ID NO: 170342 - protein, 487 aa, Glycine max
  unsure (1)..(487): unsure at all Xaa locations
  Clone ID: PAT_MRT3847_124834C.1.pep
MNTISSLTLDSHAICNPQRSISLRQVRPTTRNVVVCSAKPVAPPPTKLAAADTSGCRIGELSQVSGVLGCQWGDEGKGKLVDILAQHFEIVARCQGGANAGHTIYNAEGKKFALHLVPSGILNEDTLCVIGNGVVVHLPGLFKEIDGLESNGVSCKGRILISDRAHLLFDFHQVVDGLREAELAKSFIGTTKRGIGPCYSSKVNRNGIRVGDLRHMDTFPQKLDLILSDAALRFKDFNYGPYMLREEVEKYKRYAERLEPFIADTVLVMNDAIEQKKKILVEGGQATMLDIDFGTYPFVTSSSPSAGGICTGLGIAPRVLGDLIGVVKAYTTRVGSGPFPTEILGSGGDLLRFAGQEFGTTTXGRPRRCGWLDLVALKYSCQINGFSSLNLTKLDVLSDLEEIQLGVYYKLADGTPIKSFPSDLRLLEQLKVEYEVLPGWKSDISPIRNYSDLPKAARLYVERIEELVGVPIHYIGIGPGRDALIYK

SEQ ID NO: 170343 - protein, 91 aa, Glycine max
  Clone ID: PAT_MRT3847_124835C.1.pep
KEAGKGLIIFSINLGLREPDHLDSAMRLEVPNLAAKVHDANRNLKFKTFRRWLGGGASQPLTVPPEMVGDLVLVATGFFTRGDSQKVLDIF

SEQ ID NO: 170344 - protein, 46 aa, Glycine max
  Clone ID: PAT_MRT3847_124836C.1.pep
FEVQMNFFETATAQLWWYLPKNLGKRIVFPLSFTLQSMKANGHKEK

SEQ ID NO: 170345 - protein, 44 aa, Glycine max
  Clone ID: PAT_MRT3847_124837C.1.pep
ILVEWFDVCSPQDSEVIYIICLAMLVLNLTFLCDYWTFLMHLSC

SEQ ID NO: 170346 - protein, 60 aa, Glycine max
  Clone ID: PAT_MRT3847_124838C.1.pep
PDLILVAIIKYGRPPGILFLIYYRVPQLFICWHPFFIFFFFFFFFIIEFFPMVKWSHFRL

SEQ ID NO: 170347 - protein, 47 aa, Glycine max
  Clone ID: PAT_MRT3847_124839C.1.pep
KYRARLIREKEKRVYIFFYLFMVLVNLLFLTSKIIILRLIVAFLINV

SEQ ID NO: 170348 - protein, 86 aa, Glycine max
  Clone ID: PAT_MRT3847_12483C.1.pep
GIWDKAHVFSPERFLHSDIDVKGRHFKLTPFGSGRRICPGSPLAVRMLHNMLGSLINNFDWKLQNNMDPKDMDLDQSLMAIPLATA

SEQ ID NO: 170349 - protein, 61 aa, Glycine max
  Clone ID: PAT_MRT3847_124840C.1.pep
SDTRLEPHLFFFFFFFQTKIADMHPRTGTRTYAHCSRTPLTDAEDTLHTTDLISEISAARL

SEQ ID NO: 170350 - protein, 274 aa, Glycine max
  Clone ID: PAT_MRT3847_124841C.1.pep
MPLDPAAATTTASRPISPLPQPQQQHHHHYPSQQQTLPILAPNPHFVYPFAPKGVRAADHAGVSAAFPPPSMMYSGGVRGVPLDYFSHALHVGRPPTHVPFPHAAPAASPPVKKAAARSAVADVNGGKDTNTREKSSEDTFIVVRDRKVRVTDDASLYALCRSWLRNGINEESQPQQKDVIKALPKPLPASMVASYLSNKKEDEKDEDEKEENEQSVEHLSPQDLLKRHIKRAKNVRARLREERLQRITRYRSRLRLLLPPAIEQCRNDTAAGN

SEQ ID NO: 170351 - protein, 88 aa, Glycine max
  Clone ID: PAT_MRT3847_124842C.1.pep
GILSVSANLSISLLCLFHSLAILLASCTAASATPEKHIAKPACFNIQQNPFSFHFSLWHWIFCVTSSRSSKFKWDRSIHMRHLHYTAY

SEQ ID NO: 170352 - protein, 82 aa, Glycine max
  Clone ID: PAT_MRT3847_124843C.1.pep
VGFSFLLAKKKKGGPHPQGYSAPPGVLPKKPPIPLGGYNHFVYLPGGGSSPPLLIGNCPPNLGFKTFLPHNNPGTLQFPKTP

SEQ ID NO: 170353 - protein, 52 aa, Glycine max
  unsure (1)..(52): unsure at all Xaa locations
  Clone ID: PAT_MRT3847_124844C.1.pep
SKGPQPYLLLVYEPVSSHVGFPAXILRYTEFIHMGSLNFIKYGSLMEVINNF

SEQ ID NO: 170354 - protein, 71 aa, Glycine max
  Clone ID: PAT_MRT3847_124845C.1.pep
HMHVSCVVLSSQKLLGARKDGAQLPLVNKTMMYLSRLQSGGSSPSGLIQTQSIIAYVASVFLVPFFLFCPL

SEQ ID NO: 170355 - protein, 214 aa, Glycine max
  Clone ID: PAT_MRT3847_124846C.1.pep
MAAPPARARADYDYLIKLLLIGDSGVGKSCLLLRFSDGSFTTSFITTIGIDFKIRTIELDGKRIKLQIWDTAGQERFRTITTAYYRGAMGILLVYDVTDEASFNNIRNWIRNIEQHASDNVNKILVGNKADMDESKRAVPTSKGQALADEYGIKFFETSAKTNLNVEEVFFSIARDIKQRLADTDTKAEPSTIKINQDQSGGAGQAAQKSACCG

SEQ ID NO: 170356 - protein, 96 aa, Glycine max
  Clone ID: PAT_MRT3847_124847C.1.pep
VRLREDDRRALQELTKGVRSCHAFHEHTWASIMLRHYQVHIEVTIGTKVFLEASTNFFQIKVKRTNIYLANNTTIITNPLGHLSYTRTLTLEPFHA

SEQ ID NO: 170357 - protein, 147 aa, Glycine max
  Clone ID: PAT_MRT3847_124848C.1.pep
YHSACIDNHEILGSCKGFIVLYYKRNNDLILWNPSTGFHKRFLNFANELTYLLCGFGYDTSVDDYLLILIDLCESKNEESEDDDCKLEIAIFSFKTGNWVLFAEIHVSYKNFYYDDLRVGSLLNGALHWMGCYKDRKGPVIIAFDLI

SEQ ID NO: 170358 - protein, 83 aa, Glycine max
  Clone ID: PAT_MRT3847_124849C.1.pep
IFQGILGGRDTTLIHICIISEEMWFPSTYRFCLNTSALRAFSLERQFFPVTYQLVSKRPHGIVVVLCGQVVSSQFTDNGLSKF

SEQ ID NO: 170359 - protein, 417 aa, Glycine max
  Clone ID: PAT_MRT3847_12484C.1.pep
RWGPHLHVAPSSYSFSIVPFDQFGFTHKGRLELSVSKISLSNSNLDLSKVGFFLCTLDSWLHVFQQLEDGEIRCALQSDLSKSVYTFNSLNGKDSFSTLYKEETDADQYNLVFANCHWQQLKVTMDVKSAMYNLEGNSNVRDYLSAGRTILPRVYLLFSLVYFALAALWISVLYKKRQTAFRIHYFMLGVVIFKALNLLCEAEDKSYIKRTGSAHGWDIVFYIFSFLKGISLFTLIVLIGTGWSFLKPFLQDKEKKVLIIVIPLQVIANIAQVVIDESGPFGHDWVTWKQIFLLVDVVCCCAVLFPIVWSIKNLREAARTDGKAAVNLMKLTLFRHYYVVVICYIYFTRVVVYALETITSYRYSWTSVVAAELATLAFYVFTGYKFKPEAHNPYFVIDDEEEEAAAEALKLEDEFEL

SEQ ID NO: 170360 - protein, 71 aa, Glycine max
  unsure (1)..(71): unsure at all Xaa locations
  Clone ID: PAT_MRT3847_124850C.1.pep
IYDAPNTGGRPTREVTFPNTTAQIEPDMNSRQQLXSTNTNGELGQGKDLAMVKAKVAXAAEGSTSSYTPTP

SEQ ID NO: 170361 - protein, 50 aa, Glycine max
  unsure (1)..(50): unsure at all Xaa locations
  Clone ID: PAT_MRT3847_124851C.1.pep
XQESDRXGVXELDGXNYLRDLNRXYRNASYETTGGXSGVLLISLESVIVS

SEQ ID NO: 170362 - protein, 68 aa, Glycine max
  Clone ID: PAT_MRT3847_124852C.1.pep
FSSSFIGLILCTRGRSLQTAAGTICHSTHILSSFLYPSLSTFSLLLTHKISSQKVTILILIIFYSLLT

SEQ ID NO: 170363 - protein, 45 aa, Glycine max
  Clone ID: PAT_MRT3847_124853C.1.pep
FNPSYFLTRHRNALRRRHCRKLWTRVREDKRDRSSGSHRIAFVND

SEQ ID NO: 170364 - protein, 127 aa, Glycine max
  Clone ID: PAT_MRT3847_124854C.1.pep
KGTFTKGGGGDNKKKGKRRKAKTPPLGGSKPAKPALHGQEAQGGSLPRQPWQRGSRPGRPRRPGLSTHAVHCPGHHTNKGFRKPPKGGKREHKLLKDPCLHGRVLETPWFPRKFYPPNQWRGKCAPQ

SEQ ID NO: 170365 - protein, 76 aa, Glycine max
  Clone ID: PAT_MRT3847_124855C.1.pep
NCLRPYLLLACRYLLVVRSSVLTEHRRLCVLSRPSPLSLFRVSTFIDLLTPHCSRAPSYSEFQHAEGRIRACFDDA

SEQ ID NO: 170366 - protein, 50 aa, Glycine max
  unsure (1)..(50): unsure at all Xaa locations
  Clone ID: PAT_MRT3847_124856C.1.pep
DLLLLXNILQYRSIPSANQSSDTDKXKSIXSXGENIGVINXXVLIXNLWR

SEQ ID NO: 170367 - protein, 111 aa, Glycine max
  Clone ID: PAT_MRT3847_124857C.1.pep
MKVVAAYLLAELGGNPSPSADDIKNILGAVGAEAEHELIELLLTEVKGKDFNELLASGSEKISAVAGGGAAVAVAAAPAGGAAAPAAEAKEEKKVEEKEESDDDMGFSLFD

SEQ ID NO: 170368 - protein, 95 aa, Glycine max
  Clone ID: PAT_MRT3847_124858C.1.pep
VAPTIENVPLLQSPIICHHHHMNVYKDMRKLFHSVIIIKAHSECITWLTPSWGAYVTEGQSSGFIGPHDEPDRMIPKSSTCFTLKRSEWKNLTYM

SEQ ID NO: 170369 - protein, 100 aa, Glycine max
  Clone ID: PAT_MRT3847_124859C.1.pep
TSFASFLFFPSPFHFHPLFFWLVSTLILLFPPALCAFFNFHTTCCFFPPFFILQKFRPLSIFFFLKWSVHLFSSLPPLKFCLFSHTPFFCLGSKSTPNKF

SEQ ID NO: 170370 - protein, 539 aa, Glycine max
  Clone ID: PAT_MRT3847_12485C.1.pep
MEGEGSIHVQVDELQRMRLSETISIGTTMFEPRGLSSIDKLDSNNSTANSVSSTTSAPEKKLTLFALQLAVLEKAATGLGTLGFIWATVVLLGGFAITLEKTDFWFITIILVVEGTRIFSRSHELEWQHQATWSITENHHHQYVSTDTTPTRTRTRMWVSSDVPLLPYAKWFFLSRHVSRLLYWLQLLSATACVVLSLIKLVKHDYGEVAKGDTDKRNRKSALSIFYALALSEALLFLMEKAYWEWQVSYCKLLEEVNKECELGPSGMVSTRRLFYDAYSRCVNGSIFDGLKMDMVGFSMDLLASNSPDEQLIGARILRQFSISERFCDDTLQKIGIDISMVERLVEMLNWTDFKDEEIRLSAAEILSKLAGKKQNSLRIAGIPGAMESISSLLQTNRSVIPAADEIGEKKLVFDHQNYGFWTFNHLGLLILKKLARDLDNCGKIGNTRGLLPKIIDFTHAEEWLLKSENVTPSQVLTLKRSLQLVKMLASTVGTTGKHLRREIAEPFCRLLARRDILRHGEKHPLLQKLCLEIATSLG

SEQ ID NO: 170371 - protein, 63 aa, Glycine max
  Clone ID: PAT_MRT3847_124860C.1.pep
YFASSSVVYLLSTSLSLSLSTNTAQNLVGNYRGGKKIIICGGKKRRRRRRKRVVNSVMGFWHR

SEQ ID NO: 170372 - protein, 53 aa, Glycine max
  Clone ID: PAT_MRT3847_124861C.1.pep
IGLMTKAANGSYQLLSSHLIFTRSKKQKNSYNLLMRKMITHRYFCSWPWYNQT

SEQ ID NO: 170373 - protein, 47 aa, Glycine max
  Clone ID: PAT_MRT3847_124862C.1.pep
CFLVTYFQPFSISTPYKINHSPWMNNFLNPFSGQFFFFEAFKGTPSP

SEQ ID NO: 170374 - protein, 126 aa, Glycine max
  Clone ID: PAT_MRT3847_124863C.1.pep
MGNRENINSRSQNNLGQNVDANADALPDFMQDKENINIGSKNDAETGWNSRPMDFVRGIIDEDNFMKGSPFHQYQYEQDADFVHIKMLRNNTFVTVTDSQGNIKLSGSAGPLKDLKSGQKLSSYAA

SEQ ID NO: 170375 - protein, 100 aa, Glycine max
  Clone ID: PAT_MRT3847_124864C.1.pep
GPIHHLGCGPLGKGGRVVPFRFYPSWGKGFFFHGHLLGEPPGFSSPPPQKRGPLKKKKVTLRKGSDVSCRGWETRNSAHAQTNLVQKKKKKKKKKKKKPP

SEQ ID NO: 170376 - protein, 241 aa, Glycine max
  unsure (1)..(241): unsure at all Xaa locations
  Clone ID: PAT_MRT3847_124865C.1.pep
MERQGHDYATASAMAYAQQQRQAANMQQQQQFGFHPQHQQFPSSMHGSPFIPPGPGPAHPPMQQFPYHPALQQQQQPLPQLHPHAPPPPHLLLQQQQQQHQGPPAYPSHYPPPLVPSPFYDSAPAPPPVAPPSDPELHKRIDKLVEYAVKNGPDFEAMICEKQRDNPSYSFLFGGEGHGYYRYKLWLSTRPPGGPFNPSFPSSSMPMMLXPNPMMNLSPVNVSPMNPAGIGSSPSMLGPPP

SEQ ID NO: 170377 - protein, 47 aa, Glycine max
  Clone ID: PAT_MRT3847_124866C.1.pep
TSHIVHCSRICYGISLYRRTPFCDSKKDRWLGSALQFRSGTAGSSPY

SEQ ID NO: 170378 - protein, 457 aa, Glycine max
  unsure (1)..(457): unsure at all Xaa locations
  Clone ID: PAT_MRT3847_124867C.1.pep
TLSWGHNSIVAPIKGVVVKEPKWMVAAAATTEEKHNENLSSEGSLEDDDSXESQNLQWAQGKVGEDRVRVVVFEEHDWVFVGTYDGFSGPDVLDYLLSNLHTAVHKELKGLLWDDGSAPENSMIKEDRLXDFTVDVTVTDEDDACSYCQTSSSVVPSFQATAKDFVVAAFVNDKRAFRSRFFQVGVLDVFFPSXLILFNYCSLLYFPLSVLVXVIAMVVRGFDLWCVLNIAXGVDLIFRKKIPAXTLKLLAGCCDXESLSIKDLESWDVDTSNLVPSLSAIQLTKDHSTSVEEEIQRIKKEHPDDPFAVVNDRVKGSLKVTRAFGAGFLKQPKWNNALLEMFRIDYVGNSPYISCLPYLKHHRLGPKDKFLILCSDGLYQYLSNEEAVAEVELFITLQPEGDPAQHLVEEVLFRAAKKAGLDFHELLEIPQGDRRRYHDDVSIIVISLEGRIWRFCV

SEQ ID NO: 170379 - protein, 271 aa, Glycine max
  Clone ID: PAT_MRT3847_124868C.1.pep
KKTEESYLDVADKMVMENPELALMGSCVLVMLMKGEDVYVMNVGDSRAVLAQKAEPDYWLGKIRQDLERINEETMNDLESWDVDTSNLVPSLSAIQLTKDHSTSVEEEIQRIKKEHPDDPFAVVNDRVKGSLKVTRAFGAGFLKQPKWNNALLEMFRIDYVGNSPYISCLPYLKHHRLGPKDKFLILCSDGLYQYLSNEEAVAEVELFITLQPEGDPAQHLVEEVLFRAAKKAGLDFPELLEIPQGDRRRYHDDVSIIVISLEGRIWRFCV

SEQ ID NO: 170380 - protein, 59 aa, Glycine max
  unsure (1)..(59): unsure at all Xaa locations
  Clone ID: PAT_MRT3847_124869C.1.pep
CFRGTRLLEAHSGAGRVHARFGFGNKXKPSSRRKFSGGWCGSFDRPLWYPGAKAPRYLY

SEQ ID NO: 170381 - protein, 443 aa, Glycine max
  unsure (1)..(443): unsure at all Xaa locations
  Clone ID: PAT_MRT3847_12486C.1.pep
MMKMGSSPSRCSFFLFLLLLVALFPSSLSEIRFSEIRNDDRSIVPFDQFGFTHKGRLELSVSKISLSNSNLDLSKVGFFLCTLDSWLHVFQQLEDGEIRCALQSDLVKSVYTFNSLNGKDSFSTLYKEETDADQYNLVFANCHSPQLKVTMDVKSAMYNLDGKSDVRDYLSAGRTILPRVYFLFSLVYFTLAALWISVLYKKRLTAFRIHYFMLAVVILKALNLLCEAEGEXALSSNXSLIGTGWIFYIFSFLKGISQVLIIVIPLQVIAFIDQVVHDKEKKVLIVVIPLQVIANIVQGVLLLTGCYFHDWATHQQVFLLVDVVCCCAVLFPIVWSIKNLREAARTDGKAAVNLMKLTLFRHYYVVVICYIYFTRVVVYALETITSYRYSWTSVVAAELATLAFYFFTGYKFKPEAHNPYFVIDDEEEEAAAEALKLEDEFEL

SEQ ID NO: 170382 - protein, 94 aa, Glycine max
  Clone ID: PAT_MRT3847_124870C.1.pep
LHLVTRGSSRVDLQKLYATLETLKHNGDNFAAEIQNRLRIIVAGGDGTASWLLGVVSDLKLPQPPPIATVPLGTGNNLPFAFGWVFYLTLYSIC

SEQ ID NO: 170383 - protein, 99 aa, Glycine max
  unsure (1)..(99): unsure at all Xaa locations
  Clone ID: PAT_MRT3847_124871C.1.pep
HIISTFWCELQRVQLLFSCVEYQVRPXSSLCXEGSPSLHNDXGSEVFTVAASXXXNALVRMCGVTISIHFGQILCVXPCVAXESDNDGXHGYVCVDSXR

SEQ ID NO: 170384 - protein, 64 aa, Glycine max
  Clone ID: PAT_MRT3847_124872C.1.pep
PTRPPTRPKKKKKKKKKKKKKKKKKKKKKKKKKKKKKKKKKKKKKKRRGGRQKRTKVKDRGKEN

SEQ ID NO: 170385 - protein, 47 aa, Glycine max
  unsure (1)..(47): unsure at all Xaa locations
  Clone ID: PAT_MRT3847_124873C.1.pep
RAFELSHIWKHGSVFFTGFKAQSXSESDYDEDSDDFDEDIPVSADNG

SEQ ID NO: 170386 - protein, 126 aa, Glycine max
  Clone ID: PAT_MRT3847_124874C.1.pep
MAGIGFEDLLPVMANKLGGEGLMKELCNGFELLVDKEKGVITLESLRRNAALLGLQDLKEDELVSMMREGDLDGDGALTQMEFCVLMFRLSPDLMEESWFWLEEALQHELNNNKNYNNNNDYPSSI

SEQ ID NO: 170387 - protein, 62 aa, Glycine max
  Clone ID: PAT_MRT3847_124875C.1.pep
YIHIGLQQLVEPMPKTVFRQKSVSHAKTQKIKDQTNILNSFLHFQLMSIVQPQSNAKLLTIH

SEQ ID NO: 170388 - protein, 39 aa, Glycine max
  Clone ID: PAT_MRT3847_124876C.1.pep
LDRGATPHADLRLICGLFLRYLTFLKHVGEEETPTKWTV

SEQ ID NO: 170389 - protein, 70 aa, Glycine max
  Clone ID: PAT_MRT3847_124877C.1.pep
NLKTHINPYIKGQHKLPGFGWSLQFWLNSTMWRAKKNKIFLVTPNYRVKGPTLGISPEQATGKLCHPRMG

SEQ ID NO: 170390 - protein, 62 aa, Glycine max
  unsure (1)..(62): unsure at all Xaa locations
  Clone ID: PAT_MRT3847_124878C.1.pep
HNIAPALYGTPGVNITKNVMTMPSIKVTLILGIWGGKGQGNIMQRDLRLCXIGNETVMMSAG

SEQ ID NO: 170391 - protein, 242 aa, Glycine max
  Clone ID: PAT_MRT3847_124879C.1.pep
PVRIPGSTHASAQIQFALERGIPATLSVIGTQKLTFPDNGFDLIHCARCRVHWDADGGKPLYELNRILRPGGFFAWSATPVYRDDERDQKVWNAMVDITKAMCWKVVAKGHDSSGIGLVIYQKPTSSSCYEKREENNPPLCENKDGKNISWYARLDSCLTPLPVDGKGNLQSWPKPWPQRLTSKPPSLPTDSDAKDKFFKDSKRWSELVSDVYMNGLSIKWSSVRNGMDMNAGYAGFAAALI

SEQ ID NO: 170392 - protein, 113 aa, Glycine max
  Clone ID: PAT_MRT3847_12487C.1.pep
SSYHCLVIPRYMGSASKLIKYFFVLRGKKLFLFEKAFILTEDFPLLEFRSFIFPILSKYKFILIVPNEKPGEDKFVNSLCLIKLPNYSIIHHKLRMMLVPPLVISHHKCNDFL

SEQ ID NO: 170393 - protein, 52 aa, Glycine max
  unsure (1)..(52): unsure at all Xaa locations
  Clone ID: PAT_MRT3847_124880C.1.pep
NDSFHFLVDSILXNXSFWXHXXRVILHXLXSKKKYSTFTRAEFRAYVRVXAT

SEQ ID NO: 170394 - protein, 69 aa, Glycine max
  Clone ID: PAT_MRT3847_124881C.1.pep
LLVVGGSNNTSTNDNIEDIHGFVIIAEDDHRNESLLSDIDGDVIDELTAGSEEQLAAASSGGSGAVVVA

SEQ ID NO: 170395 - protein, 117 aa, Glycine max
  Clone ID: PAT_MRT3847_124882C.1.pep
NAKNGQRVFIPTIKVASKFVENMNPRNSYFGRVGGLTTDELNKLERESPFLRDFKWQVNGRVFESYCCPLKREVSLGGGAPLERALRGAEEIQAKHKEERGSPPLARGRGEALFYFL

SEQ ID NO: 170396 - protein, 363 aa, Glycine max
  Clone ID: PAT_MRT3847_124883C.1.pep
MDSLSLFCTGALLAGGLYWFVCVLGPAEQKGKRATDLSGGSISAEKVQDNYKQYWSFFRRPKEIETADKVPDFVDTFYNLVTDIYEWGWGQSFHFSPSIPGKSHREATRLHEEMAVDLIEAKPGNKILDVGCGVGGPMRAIAAHSRANVVGITINEYQVNRARMHNKKAGLDSLCEVVCGNFLKMPFVDNSFDGAYSIEATCHAPKLEEVYAEIFRVLKPGALYVSYEWVTTDKYSGDDPEHVEVIQGIERGDALPGLRSYAEIAETARKVGFAVVKERDLAKPPALPWWSRLKMGRIAYWRNHIVVTVLAALGIAPKGTVDVHEMLFKTADYLTRGGDSGIFSPMHMILCRKPHDKDEQNSG

SEQ ID NO: 170397 - protein, 361 aa, Glycine max
  Clone ID: PAT_MRT3847_124884C.1.pep
MDPLSLFCTGALLAGGLYWFVCVLGPAEQKGKRATDLSGGSISAEKVQDNYKQYWSFFRRPKEIETADKVPDFVDTFYNLVTDIYEWGWGQSFHFSPSIPGKSHRDATRLHEEMAVDLIEAKPGNRILDVGCGVGGPMRAIAAHSRANVVGITINEYQVNRARMHNKKAGLESLCEVVCGNFLKMPFPDNSFDGAYSIEATCHAPKLEEVYAEIFRVLKPGALYVSYEWVTTDKYRGDDPEHVEVIQGIERGDALPGLRNYTDIAETARKVGFAVVKERDLAKPPAQPWWSRLKMGRIAYWRNHIVVTVLAALGIAPKGTVDVHEMLFKTADYLTRGGDSGIFSPMHMILCRKPHDKDDHN

SEQ ID NO: 170398 - protein, 114 aa, Glycine max
  Clone ID: PAT_MRT3847_124885C.1.pep
MPEKKNKKVSFTEEDAVTLMQRYDATTVFTLLQEVAHYPHPKIDWCELVKKSATGISNAREYQMLWRHLAYRHSLPEIFEDGDEPLDDDKDDDSDLECELEALPPVGWGCAWGA

SEQ ID NO: 170399 - protein, 145 aa, Glycine max
  Clone ID: PAT_MRT3847_124886C.1.pep
AHINSLKTWETPKRVRERGVSKAGDPKFQGEKGKIRDQKAIKFSPRGNQNSKSASPGINPCIWGKRGAKKFSPPRGKKNPKSAYGGTSFGVCSLKGPLLCFLAPLLRFPALFWLGGNPQKGPNRSILPPRGAKQTRFKHPPKVFF

SEQ ID NO: 170400 - protein, 80 aa, Glycine max
  unsure (1)..(80): unsure at all Xaa locations
  Clone ID: PAT_MRT3847_124887C.1.pep
HAPLSLLFSCSTFIVTQTCVPNVNIIFHPLQNXLLKPQMLLLFTVHTSFXQLQPQXQPQTPLTSFPKFSFFFPFHEXMHL

SEQ ID NO: 170401 - protein, 44 aa, Glycine max
  Clone ID: PAT_MRT3847_124888C.1.pep
KVVFFSLQLRQVPQFPVNPRKAMFPGFQISYTSTYGFSPFPPAS

SEQ ID NO: 170402 - protein, 84 aa, Glycine max
  Clone ID: PAT_MRT3847_124889C.1.pep
RQMFDAELASSALRSRPWRDIHAIGLSFSDDETGRRLSSRKLVERRRREPESADTETTHGGDGAPLALAIASSSMGTETQRLDV

SEQ ID NO: 170403 - protein, 153 aa, Glycine max
  unsure (1)..(153): unsure at all Xaa locations
  Clone ID: PAT_MRT3847_12488C.1.pep
MMKMGCSRCSFFLFLILLVALFPSSLSEIRFSEIRNDDRRIIPFDQFGFTHKGRLELSVSKISLSNSNLDLSKVGFFLCTLDSWLHVLQQLEDGEIRCALQSDLVKSVYSFNSLNGKDSFSTLYXEETDADQYNLVFANCHWQQLKVTMDVKS

SEQ ID NO: 170404 - protein, 64 aa, Glycine max
  Clone ID: PAT_MRT3847_124890C.1.pep
LCQLVKRRLTMISRFEYSHSSQLGYELDVGVGFVPLFNPIYSHAFWTGPNVYVELGVGTCGACG

SEQ ID NO: 170405 - protein, 241 aa, Glycine max
  unsure (1)..(241): unsure at all Xaa locations
  Clone ID: PAT_MRT3847_124891C.1.pep
MSSGELLHIQPQELQFPFELRKQISCSLQLSNKTDNYVAFKVKTTNPKKYCVRPNTGVVMPRSTCDVIVTMQAQKEAPPDMQCKDKFLLQSVVASPGATTKDITPEMFNKESGHDVEECKLRVVYVAPPQPPSPVREGSDEDSSPRASVSENGHSSAAEFTGASKSFQLAXEHQNASCKARALISKVTEERNSIVEQNRRLQQELELLRRDASRSHGGVPFMYVVLVGIIGLILGFLLKRT

SEQ ID NO: 170406 - protein, 244 aa, Glycine max
  unsure (1)..(244): unsure at all Xaa locations
  Clone ID: PAT_MRT3847_124892C.1.pep
MGLTGEQAPHPYSYAQKLISLCGWEPRWLPNVLDCEEQSAESAKNGYSSGPAKGSAPDPAPSKKEYSISSRKDTGDNDVLGSEFNCESRSPLLDCSLCGATVRVWDFLTASRPVHMTPCGIDTPQTSKKIASTRGISAASGINEWAAADGVENERTGDRDEATTPDKRQLVSNKSLDLSLKIVSGPSCSPIILTSTSGHVQGAGEGKDXMIXRPSGSEATSYESQGPNVCKRKLDDGGTTSSHI

SEQ ID NO: 170407 - protein, 99 aa, Glycine max
  Clone ID: PAT_MRT3847_124893C.1.pep
MQYLEFGKQNPAFKLVKNCRFLKALVPPEDFRFFFQVFLFGRGECQKGKVFLYPLFGVFKMFNFAYAIFFPAILEQNFFFCMKKILPFHNLLGKGLKPA

SEQ ID NO: 170408 - protein, 67 aa, Glycine max
  Clone ID: PAT_MRT3847_124894C.1.pep
LIIDNILNCNVPKKVAKEIINAQQEKKSAKKKIKCCYISYTLFRCLTYASCYLHSPACPSHIVLSFS

SEQ ID NO: 170409 - protein, 254 aa, Glycine max
  Clone ID: PAT_MRT3847_124895C.1.pep
MTDRVHPSAKTTANAGPKPTFPATKSQLSGANRPTYRPQPQHHRRRRSRGCASTLCCWLLLILLFLLLLVGAAGTVLYFLYRPQRPTFSVTSLKLSSFNLTTPSTINAKFDLTLSTTNPNDKIIFSYDPTSVSLLYGDTAVASTTIPSFLHRQRNTTVLQAYVTSTEEVVDSDAAMELKRSMKRKSQLVALKVELETKVEAQMGVFQTPRVGIKVLCDGVAVSLPDDEKPATASAENTACQVDVRFKVWKWTVG

SEQ ID NO: 170410 - protein, 59 aa, Glycine max
  Clone ID: PAT_MRT3847_124896C.1.pep
ASSQASDFASLRASFTFTREFLRLVCYSTLFRPLTFNCLPFNTSQRAFLSPPSVVFSQP

SEQ ID NO: 170411 - protein, 314 aa, Glycine max
  unsure (1)..(314): unsure at all Xaa locations
  Clone ID: PAT_MRT3847_124897C.1.pep
MSQAPSKLVKLESNKKVDCPAKAVEPTILMIKFPPETSLPSIAELKARFARFGPMDQSGFRVFWNSSTCRVVFLHKVDAQAAYKYSVGSQSLFGSVGVRFFLREFGIXAPEVSEAAKARADDGANETPRVKDPAGIHRQTLVSSQQPLLQPIQLKSCLKKSTGDDSGQVTGNGSSSKGNSRVKFMLGGEESSRGDQLTSGSRNNFNNASFADAGAPPVATDFNSKNVQKVTLQPPLPPIFPLPTQFIKSPQHNLGNFELAMAPRNSPNFINPIASAATATPVDISQPMINLLTRCSDIVTNLTGLLGYVPYHPL

SEQ ID NO: 170412 - protein, 84 aa, Glycine max
  Clone ID: PAT_MRT3847_124898C.1.pep
QGLEVMFSFGTHIKSYIGFLTKALRENIILVYSQNVSLNSRTLYIANLDSRKRQPILPLGPLPYAKRLGSSQYFFIHVCDKPNV

SEQ ID NO: 170413 - protein, 79 aa, Glycine max
  unsure (1)..(79): unsure at all Xaa locations
  Clone ID: PAT_MRT3847_124899C.1.pep
XXXXXXXYXXPXXSXXXCIXXXFTXXPXLPXXXXDXQXXXTXXXSLPSXXXPKXNXXXLXXXXXXXXXXXXXTEXXXXX

SEQ ID NO: 170414 - protein, 49 aa, Glycine max
  Clone ID: PAT_MRT3847_12489C.1.pep
VGVGALVWAFSLFLALRKICYFCLGHLVVFCLGLHCLLHVDDGHASSYL

SEQ ID NO: 170415 - protein, 102 aa, Glycine max
  Clone ID: PAT_MRT3847_1248C.1.pep
HFGCWDRVGPQKKLRADAPGGPKYFLSSIQYDLSGIGQNSVVMAVWSLSSCPYSGPCLRRTISVKNKTLSSKRISSLVKGAKNSLCVKACEGSSLYNPSSST

SEQ ID NO: 170416 - protein, 231 aa, Glycine max
  Clone ID: PAT_MRT3847_124900C.1.pep
MFGPAQFTSEPPKSTLKFLCSYGGKILPRYPDGKLRYLGGHTRILAVDRSIPFSELLLKLEELCGASVRHLRCQLPSEDLDALVSITSDEDLANLIEEYDRVSSLKIRAFLSPPTPPTPPTPPRSPNKFSTAPSKSASISSSSASSSSSSSSYYSPTGSGESGRRYRAPALVSDCCVHQMSQPPAYPVGMEKSKSSGRNVPLPRYGYHHGNGGHVYLIHNGNHWQQRYGVV

SEQ ID NO: 170417 - protein, 173 aa, Glycine max
  Clone ID: PAT_MRT3847_124901C.1.pep
DRLYMLRSVVPNISKMDRASILGDAIEYLKELLQRISELHNELESTPAGGSSSFLHHPLTPTTLPARMQEELCLSSLPSPEGHPANARVEVGLREGRGVNIHMFCDRKPGLLLSTMTALDNLGLDIQQAVISYVNGFAMDIFRAEQRNEGQDVHPEQIKAVLLDSAAGFHSMS

SEQ ID NO: 170418 - protein, 40 aa, Glycine max
  Clone ID: PAT_MRT3847_124902C.1.pep
TNSSFNFVHTHLLNLHYLFLNTYLILSNYTLSTFPIIIFI

SEQ ID NO: 170419 - protein, 33 aa, Glycine max
  Clone ID: PAT_MRT3847_124903C.1.pep
CEHRSHASAGNPPGSYTKYELDDEAFGKLFKCI

SEQ ID NO: 170420 - protein, 256 aa, Glycine max
  unsure (1)..(256): unsure at all Xaa locations
  Clone ID: PAT_MRT3847_124904C.1.pep
IRPRNPWAQDKDLLDYEVDSDDEWEEEEPGESLSHSEGDEDDDVGEDEDEDDGFFVPHGYLSEDEGVTEECADPENHKVHQKLKAKEWDELLAKGKRFRVLQPVHVGCVWASEAANCTSSDLKLLQQFTACLLDVASPDEPEPGASRREKRDQHILAQLLPLLHGNVNGSKVIIHEFQEQCRRGLLTLPSPTPHLQMPNLEDAVAVPSKARLKRLISENSAYEKRPNFRMCWYVHPEVLKSFGQXCLPVPCQWTYI

SEQ ID NO: 170421 - protein, 93 aa, Glycine max
  Clone ID: PAT_MRT3847_124905C.1.pep
MQRPPRSAADRMNDRVSNSSAMTESSAVEIEIATRRLMAALDALESAVERRRDADRDENELAARIQALGADRSRLADELDGALVKARKLERTN

SEQ ID NO: 170422 - protein, 61 aa, Glycine max
  unsure (1)..(61): unsure at all Xaa locations
  Clone ID: PAT_MRT3847_124906C.1.pep
XXXNXXXXRXXPRXRRLVSXXNSGLXRKGXXRHXXXGQTTXXQDXPSXYXXNXDTXXXXXL

SEQ ID NO: 170423 - protein, 77 aa, Glycine max
  unsure (1)..(77): unsure at all Xaa locations
  Clone ID: PAT_MRT3847_124907C.1.pep
TLEHLLYSLNFSYTIIPMTQDTTTLVPAIITFSNSTVDVEIIDYLPTLFKTDXPTYEKDFSXHQPTEKFCNGKLTTD

SEQ ID NO: 170424 - protein, 319 aa, Glycine max
  Clone ID: PAT_MRT3847_124908C.1.pep
FSLARFAQMMWRLNFFVVFSCIVLNNSYMLYYICPMHTLFTLMVYGALGILHKYNEIGSVIAVKIIGCFLVVILVWEIPGVFEWLWSPFTFFLGYTDPNPAKSHLSRLHEWHFRSGLDRYIWIIGMIYAYYHPTVERWMEKLEEAEIKRRISIKATVVLICSLVGYLWFEHIYKLDKVTYNKYHPYTSWIPITVYICLRNVTQSFRSYTLTLFAWLGKITLETYISQIHIWLRSGIPDGQPKLLLSLIPDYPMLNFMLTTSIYVAISYRLFDLTNTLKMAFVPSKDDKRLVHNLITATTISVVLYSLSLGFLRVPQMLV

SEQ ID NO: 170425 - protein, 63 aa, Glycine max
  Clone ID: PAT_MRT3847_124909C.1.pep
NVLHKWAASGFIVVAWHITRYYTLRIVPYNTRSVTIVSKIVTTKLCSYRQKCCVWKASMSLTN

SEQ ID NO: 170426 - protein, 179 aa, Glycine max
  unsure (1)..(179): unsure at all Xaa locations
  Clone ID: PAT_MRT3847_12490C.1.pep
NVYMANVAEQAERYLXMVEFMEKVSAAADNXELTVEDRNLLSVDYYNVDRRRXGALCRIISSIDQKEESRGNNDHVYVILDYRSKIESXELSNMCNGILRLVDSHMMLSAFCGDSKVCYLKMKEDDHRYLAEFMSGAKRREASDSTLSACRVAQHDANARSDATASDKRGHALDYMYET

SEQ ID NO: 170427 - protein, 56 aa, Glycine max
  Clone ID: PAT_MRT3847_124910C.1.pep
GISVFYLIVSCWDSGYSTTCSFHYLRNHYLLFPFFLQRIHRKKISLSIPLLCQDVS

SEQ ID NO: 170428 - protein, 53 aa, Glycine max
  Clone ID: PAT_MRT3847_124911C.1.pep
PSKASGIHSYSLDGADSTLSGTSYPHPPYPTSNSYQGVPYAITIINHTSAHSE

SEQ ID NO: 170429 - protein, 73 aa, Glycine max
  unsure (1)..(73): unsure at all Xaa locations
  Clone ID: PAT_MRT3847_124912C.1.pep
VLSPEQFLILKQKGTRLPXNRESMTKFFNKRSLQLVXYKTPLYKSLTKFNSNYNXPTFYKEIPKAINHNPNPN

SEQ ID NO: 170430 - protein, 51 aa, Glycine max
  unsure (1)..(51): unsure at all Xaa locations
  Clone ID: PAT_MRT3847_124913C.1.pep
LTFFNHASXFXSFHPFQINGIFYALLFXMIXMHHFYCAXNQTCLMFQKIXN

SEQ ID NO: 170431 - protein, 129 aa, Glycine max
  Clone ID: PAT_MRT3847_124914C.1.pep
RDSPPQRSSIYRGVTRHRWTGRYEAHLWDKNCWNESQSKKGRQVYLGAYDDEEAAARAYDLAALKYWGQDTILNFPLSNYEEKLKEMEGQSKEEYIGSLRRKSSGFSRGVSKYRGVARYLNPALFTAKC

SEQ ID NO: 170432 - protein, 267 aa, Glycine max
  unsure (1)..(267): unsure at all Xaa locations
  Clone ID: PAT_MRT3847_124915C.1.pep
RRDSPPPKLNYRHVIXRHRWTGRYEAHLWDKNCWNESQSKKGRQGAYDDEEAAARAYDLAALKYWGQDTILNFPLSNYEEKLKEMEGQSKEEYIGSLRRKSSGFSRGVSKYRGVARHHHNGRWEARIGRVFGNKYLYLGTYATQEEAAAAYDMAAIEYRGLNAVTNFDLSRYINWPRPKTEENHQTIPSNENVNSNAELELGSASDEITEEGVAPSSESNPSRRTFPEDIQTIFENQDSGIYTENDDIIFGDLGSFGAPIFHYELDV

SEQ ID NO: 170433 - protein, 129 aa, Glycine max
  unsure (1)..(129): unsure at all Xaa locations
  Clone ID: PAT_MRT3847_124916C.1.pep
MDAFCFRVPFSITPNPTESCDAVYWNLTWALIDAFTPLAVGLQFSKMSNSHSENHDEVTVAGFEVPKSPDSSYNNVYPGNEDDARDPPMVPSHLQHTLLNYPANRDTXELFHXPQNVILNHLYIENRES

SEQ ID NO: 170434 - protein, 49 aa, Glycine max
  Clone ID: PAT_MRT3847_124917C.1.pep
KYLISYYFHPPSFSPSTTTSFLIIPYTHLTLIHNTISNNNSIQFPITLY

SEQ ID NO: 170435 - protein, 47 aa, Glycine max
  Clone ID: PAT_MRT3847_124918C.1.pep
KHTPIPKILVQGDQDTCIQFQPNAPKNNIYWSLVEKFGFLVITITLK

SEQ ID NO: 170436 - protein, 66 aa, Glycine max
  Clone ID: PAT_MRT3847_12491C.1.pep
CRFGRRSSLTKAETKQTGAGNTKLLELALRLLDEALKEKKCPTRTANRIAVHHFPNLIGHKAEHFP

SEQ ID NO: 170437 - protein, 38 aa, Glycine max
  Clone ID: PAT_MRT3847_124920C.1.pep
STLSGDLAGKKTFPELFHLYLLGFLPPDEDHIIVYGRT

SEQ ID NO: 170438 - protein, 361 aa, Glycine max
  Clone ID: PAT_MRT3847_124921C.1.pep
MDDYNLFPDECPLNLNLFDDQEFLSQDIASALQEQTQTLQQSLSSECPSKTVSNSSTDETTFDFERPAKLLKTTTSSSCCNSDSSTITKSLSPKLSPSSSFSSFQSQILSFDNPNPTSSSNTTTQFYGFDCTLNPTQNEMVSVSVPNMREPRFPTQTAEGSPKYQNFETKTSHAKRSPAHAQDHIMAERKRREKLSQSFIALAALVPGLKKMDKASVLGDAIEYVKELKERLTVLEEQSKKTRAESIVVLNKPDLSGDNDSSSCDESIDADSVSDSLFEVESRVSGKEMLLKIHCQKQRGLLVKLLAEIQSNHLFVANSSVLPFGNSILDITIVAQMGESYNLTTKELAKNLRVAALKILS

SEQ ID NO: 170439 - protein, 51 aa, Glycine max
  Clone ID: PAT_MRT3847_124922C.1.pep
LELAMFYCFWFHQFKSKMKLFGYNNGEEIIATLVGEESYEGTQNQQILSLI

SEQ ID NO: 170440 - protein, 86 aa, Glycine max
  unsure (1)..(86): unsure at all Xaa locations
  Clone ID: PAT_MRT3847_124923C.1.pep
MGGDIPSSSPPIAPSYTTPLGSSIIPSSNPLQDIFARFGSQSTIDLSQITVFFSQNNNKSIVLXTLIGRNFLPLCNKIFTLLPLFL

SEQ ID NO: 170441 - protein, 87 aa, Glycine max
  Clone ID: PAT_MRT3847_124924C.1.pep
FCFFFFFFFFFFFFFFFFFYKTNPLKLLVLQLQTKPPSEPIRKKNFKTKSVKNSSSPTFYLALGLTLQTHPFLSFPLPSPYGIFQGV

SEQ ID NO: 170442 - protein, 39 aa, Glycine max
  Clone ID: PAT_MRT3847_124925C.1.pep
CVSSHILLAPSEPVPTCLSILVHCPFRRPRRVQGFIPLI

SEQ ID NO: 170443 - protein, 52 aa, Glycine max
  Clone ID: PAT_MRT3847_124926C.1.pep
YNNTYGLFLKYLIMWNMVKMEVNSRFILVKMPWILHIRQTYYYYPYTRALSL

SEQ ID NO: 170444 - protein, 52 aa, Glycine max
  Clone ID: PAT_MRT3847_124927C.1.pep
GFSWVAHGFPSHFVLNHGQSLYFGSHRYLYVAWRVLSWVVKTAPHVARWSTV

SEQ ID NO: 170445 - protein, 66 aa, Glycine max
  Clone ID: PAT_MRT3847_124928C.1.pep
TESDGLVKQKLKLDESLIESEDKVTGLESTILQLPEESKESYRVIISLNEKAVDTVLHNLHMFLWC

SEQ ID NO: 170446 - protein, 41 aa, Glycine max
  Clone ID: PAT_MRT3847_124929C.1.pep
IWGKVTRPHGNSGIVRAKLRCNLPPRSMGARVRVFMYPSNI

SEQ ID NO: 170447 - protein, 86 aa, Glycine max
  Clone ID: PAT_MRT3847_12492C.1.pep
VVFKYSISIVDLTTWGSRLVETTCNHRSDLPGDRGNGIGSQITSGCYTLLHEVVKLTMDMYYFRRARMTWFPAKATRSLDGDSPRP

SEQ ID NO: 170448 - protein, 98 aa, Glycine max
  unsure (1)..(98): unsure at all Xaa locations
  Clone ID: PAT_MRT3847_124930C.1.pep
MEAQPPSPSTAPPPPSHYLNYPDSVGSSPRSRITDSWDDPFAPVSTKHRLMCRIXGQIVPRPHDKCLCYVGGNTRIIVSACATSVADLSTRVSKTFLN

SEQ ID NO: 170449 - protein, 179 aa, Glycine max
  unsure (1)..(179): unsure at all Xaa locations
  Clone ID: PAT_MRT3847_124931C.1.pep
MQSATIAFFTGLDVLSSLISVSALFVFMMIXXALLVRRYYVRGVTPKXNLIKLVIFLVLIIASSIGISAYWGLSPNGWIGYTVTVPIWFLATLGMQLFLTQQRVPRVWGVPLVPWVPSLSIATNVFLMGSLEYDAFIRFGVCTVVMLIYYFFFGLHATYDMAHPQEKLPSKVEYTEHKK

SEQ ID NO: 170450 - protein, 65 aa, Glycine max
  Clone ID: PAT_MRT3847_124932C.1.pep
AYAAIFFISQFPLSLGRSRRWGTGLPTVEVLFTDWRGEGAEETETLAGSEDMRSCNTTFGFERLI

SEQ ID NO: 170451 - protein, 169 aa, Glycine max
  Clone ID: PAT_MRT3847_124933C.1.pep
MGLQNQLNDVSSGSIPLLVLAQIATCVNYLRSMLFALLQTLGLSRFHSDQIVDERFLAAVGSGLAGLIMLSDQLTLSSQFFHHHHGTAAGHDHDHDHHPCVVCQATFEDGDQVRMLPCRHVFHRRCFDGWLHHYKFNCPLCRSPLFSDERVALTERRLGQQLISWFSLH

SEQ ID NO: 170452 - protein, 165 aa, Glycine max
  Clone ID: PAT_MRT3847_124934C.1.pep
MGLQNQLNDVSSGSIPLLVLAQIATCVNYLRSMLFALLQTLGLCRFHSDQIVDERFLAAVGSGLAGLIMLSDQLTLSSQFFHHHHAGAGGHDHHPCVVCQATFEDGDQVRMLPCRHVFHRRCFDGWLHHYKFNCPLCRSPLFSDERVAVTERRLGQQLISWFSLH

SEQ ID NO: 170453 - protein, 131 aa, Glycine max
  unsure (1)..(131): unsure at all Xaa locations
  Clone ID: PAT_MRT3847_124935C.1.pep
EGVSKWITSDEIHSMTYSEGNGTGTXANQFPTIEGCTHXSHYRPEKCIAHYLCLEPDXFTSNAEVVDTNGQPYIHNTMLMTXIIYTVAAIDGTFKVSSHRTCXLQEHDGINYTAGTYAAPGGERVPFLFTI

SEQ ID NO: 170454 - protein, 36 aa, Glycine max
  Clone ID: PAT_MRT3847_124936C.1.pep
AFEFIINNGDIDIKEDYPYQGVDVICDHKVNFNLII

SEQ ID NO: 170455 - protein, 92 aa, Glycine max
  unsure (1)..(92): unsure at all Xaa locations
  Clone ID: PAT_MRT3847_124937C.1.pep
PRXEKCSQFITLLIPLIRYLLPTLVCTPVLNLLPCASSQSITTSPPMHRNQPPQTPHLQFDSPNHVQGACLTQMSMSFALKKFEITSSLTLQ

SEQ ID NO: 170456 - protein, 97 aa, Glycine max
  Clone ID: PAT_MRT3847_124938C.1.pep
LRLTSRLSSYPSEHSAPTSHVIPLDQTPSFTCGWPPPARLPLGLPPTSHPLHFSPQSLTTHPSLSWRWCLLKWQRRWRHQQQQLVLVVTGPWTVRST

SEQ ID NO: 170457 - protein, 140 aa, Glycine max
  unsure (1)..(140): unsure at all Xaa locations
  Clone ID: PAT_MRT3847_124939C.1.pep
APAVSSLPSYISRGPRYGSRGKALLACEDNGPSKIXGVRLDKSIPYGNELGGLCXDDHVLFCSANHSLQVNGSGGDXLDYSSTYEVVEEGINASQRGALVPVINDMGQAMTGHYDGPKLMLYATRKMFRDRHLTAAQLFL

SEQ ID NO: 170458 - protein, 60 aa, Glycine max
  Clone ID: PAT_MRT3847_12493C.1.pep
QTRYQTAITDCLSDFLLLKTLFAEIAVPRTRRNLREDCCRILALLLLDSVNTFLTTTHPL

SEQ ID NO: 170459 - protein, 93 aa, Glycine max
  unsure (1)..(93): unsure at all Xaa locations
  Clone ID: PAT_MRT3847_124940C.1.pep
CSIRPXIQWTKCPTGQANATAFLEKIHWRAALTNPLCARPGHIPTSIFRSRSSEACDRIENPIHTVSLTIMVLELPTASSRLGKLLERRAHDA

SEQ ID NO: 170460 - protein, 94 aa, Glycine max
  Clone ID: PAT_MRT3847_124941C.1.pep
SLKGKLVPPRLFVKGRYIGGAEEVLSLHEQGKLRKIFEGVPMDYSNGPCDACGGIRFVLCFKCNGSHKVMAENGESNQCLQCNENGLILCPYCC

SEQ ID NO: 170461 - protein, 58 aa, Glycine max
  Clone ID: PAT_MRT3847_124942C.1.pep
QKESQRKDTNRNVYPRSPIPDSRVSALIQDFTSLSLTLNRDLVKNHKKSNSDTESYIK

SEQ ID NO: 170462 - protein, 39 aa, Glycine max
  Clone ID: PAT_MRT3847_124943C.1.pep
GGTRCIRPSDGDVPKLHPLQLPRPIMISQVNTDHSLKSP

SEQ ID NO: 170463 - protein, 52 aa, Glycine max
  Clone ID: PAT_MRT3847_124944C.1.pep
MDTLKQANKNCFAHSMEHESYTNQVRALTVKTDPWRSCGGLTPDGTLFVAGG

SEQ ID NO: 170464 - protein, 131 aa, Glycine max
  unsure (1)..(131): unsure at all Xaa locations
  Clone ID: PAT_MRT3847_124945C.1.pep
QGXTXAXXXVXRXXPTRXXXNQXQXXXTXXXXQXXCXXXXXAXRXDXCVXXXXHXLLXXXXXXSALTXXXXXXTDAXXXPXXXXXXXXXXCXRXXXXXLTTLXXXXXXAXXXXXXXSXDAXXXXHXXPXEX

SEQ ID NO: 170465 - protein, 182 aa, Glycine max
  Clone ID: PAT_MRT3847_124946C.1.pep
MSEATARFERRVLVAVDEGEESMYALSWSLRNVIFQNSRDTLILLYVKPPHAVYSPLDSTGRIDDPETPGWLISGYLFSPDISAAIEKYSQEVADCVLEKAKKLCKDLQNVMVETRVESGDPRDVICDMSQKLGADLLIMGSHGYGVVKRAFLGSVSNYCSQNVKCPVLIVKKPKPSAGAGK

SEQ ID NO: 170466 - protein, 177 aa, Glycine max
  Clone ID: PAT_MRT3847_124947C.1.pep
MSEATTRNERRVLVAVDEGEESMYALSWSLKNIIFQNSSDTLILLYVKPPHAVYSPLDSTARIDHPETPGYLFSSDVSAAIEKYGQEVADCVLEKAKKLCKDLQNVKVETRVEIGDPRDVICDMSQKLGADLLIMGSHGYGVVKRAFLGSVSNYCSQNVKCPILIVKKPKPSAGAGK

SEQ ID NO: 170467 - protein, 363 aa, Glycine max
  unsure (1)..(363): unsure at all Xaa locations
  Clone ID: PAT_MRT3847_124948C.1.pep
MKLTVKTLKGSHFEIRVQPSDTIMAVKKNIEDVQGKDNYPCGQQLLIHNGKVLKDETTLSDNKVSEDGFLVVMLSKGKTLGSAGISSTQFASNPPTTVSTPNSTPPSDPPVQTQAANNSTSSTDAPTTNVSADTYGLAASNLVAGSNLEQTIQQIMDMGGGNWDRDTVSRALRAAYNNPERAIDYLYSGIPEAAEVAVPVPQTAGISSGAVPVGPNSSPLNMFPQETXSGAGAGLGSLDFLRNNPQFQALRSMVQSNPQILQPVLQELGKQNPSLLTLIQEHHAEFLQLINEPVEGSEGDIFDQPEQDMPHAINVTPAEQEAIGRLEAMGFDRASVIEAFLACDHDEQLAANYLLENAGDFEG

SEQ ID NO: 170468 - protein, 101 aa, Glycine max
  unsure (1)..(101): unsure at all Xaa locations
  Clone ID: PAT_MRT3847_124949C.1.pep
YDVPPPAATLGLVDITGIALACALNSYFRGHRPFXHIKPICSKDCEFWFPACTKALTMRFNPNPRSDAWSLAILKRPGFHCIMMCVTGGTATRSQDCLGNN

SEQ ID NO: 170469 - protein, 154 aa, Glycine max
  unsure (1)..(154): unsure at all Xaa locations
  Clone ID: PAT_MRT3847_12494C.1.pep
ISKHVLIREIGRRYVTPVLTTNWVSRLQFCYAAAAIIPLPNAYGSACISTIYGDIRQAKACSIHASNSPVKRYATYRSLYLDAQLDLIKLRVPPFFXFTGFAHIFPVIYFLYVITHHDRQPLRLNRVPVPGFYIMRMRFLYRNILSHSSLLTSI

SEQ ID NO: 170470 - protein, 61 aa, Glycine max
  Clone ID: PAT_MRT3847_124950C.1.pep
PSSPSSVGTKPRPTGMITRLPLHKLHAKHQYQDHHSSAELSDEADPSHAHANTLLYQSSYN

SEQ ID NO: 170471 - protein, 133 aa, Glycine max
  Clone ID: PAT_MRT3847_124951C.1.pep
EREKVFSGERLHSVLNNSPTPFDEKIARIRAEPFFLNLGFIHVHQQEARSRENPKNSAHSLHKLFSPLNPKMVIFEPGVYLPKEICSEIKGIQILAKTQRTFFFGAWLNSRSHFPNGFFSSTRVLTGLSSPGV

SEQ ID NO: 170472 - protein, 108 aa, Glycine max
  Clone ID: PAT_MRT3847_124952C.1.pep
FQTKAVYHCFHFKIGIRTKSELEGKKRNKKKPNVYFKNENSKALFPFEMECTEKEGKAVLNLISSEEDNCLIFFIFFFSHKPTTLLFSFRSNINLCSFGRVGGRVAPP

SEQ ID NO: 170473 - protein, 74 aa, Glycine max
  Clone ID: PAT_MRT3847_124953C.1.pep
PFSCAKSKFCGTYDHSFGSFKITMPCNSFKPVSILLCFSVTLCMFSDYGTVCLFIVSLCCAKFLVLMCRHKFFI

SEQ ID NO: 170474 - protein, 74 aa, Glycine max
  unsure (1)..(74): unsure at all Xaa locations
  Clone ID: PAT_MRT3847_124954C.1.pep
FAEXKXRRXPGKXAAXRRFXRLPKXFKDIDNXELXLNSXLXGWVCSEFSVXYYXILNSXDRACRLXKXALXKXL

SEQ ID NO: 170475 - protein, 94 aa, Glycine max
  unsure (1)..(94): unsure at all Xaa locations
  Clone ID: PAT_MRT3847_124955C.1.pep
SVRKAVGYRRGDHWQFIKLRLTINMLVLKVCLLLLFSVGVTSARMELSFFTSAXSSNYDDDDFSKSCCDLCMCTRSMPPQCNCEYIRLNSCHSD

SEQ ID NO: 170476 - protein, 49 aa, Glycine max
  Clone ID: PAT_MRT3847_124956C.1.pep
MPATITFCIRLLLETKYRRLPVVDDDGKLVGLITRGNIVKAALLSKRAG

SEQ ID NO: 170477 - protein, 47 aa, Glycine max
  Clone ID: PAT_MRT3847_124957C.1.pep
NNLTSLSGTLSVYKVSYNSYFSFQHKIDYLLMNFVFEFGWFTIKQHK

SEQ ID NO: 170478 - protein, 84 aa, Glycine max
  unsure (1)..(84): unsure at all Xaa locations
  Clone ID: PAT_MRT3847_124958C.1.pep
SSEPFGRMSHGAHFVHQPHLKDLLEGNKNMDLKTGSRLKKVSSTRGQLVRGKTLQYDITGDXSHSSEDFPEKEDHEKPKKIDAR

SEQ ID NO: 170479 - protein, 61 aa, Glycine max
  Clone ID: PAT_MRT3847_124959C.1.pep
LTEIYCLKLTLMHNALVCLEHSSKSGTLQLDHEPAAMSGTLSAAVSRYLTHRYGTQLLMSA

SEQ ID NO: 170480 - protein, 35 aa, Glycine max
  Clone ID: PAT_MRT3847_12495C.1.pep
RVPSWGCMRSSHAVGVLAHNTFRNSLFLEFSSGVR

SEQ ID NO: 170481 - protein, 47 aa, Glycine max
  Clone ID: PAT_MRT3847_124960C.1.pep
IIVRFNGPLVLMVVSVIFFCGAYEDNIVNQLSDHCPRCLFFNMISPL

SEQ ID NO: 170482 - protein, 338 aa, Glycine max
  Clone ID: PAT_MRT3847_124961C.1.pep
SIFFLNSFGFSFQASNIHRSFSTPCLPLTTMLGGEDFTSSSHPRVEIVGGSEAPPVHALVVEVAIAMASGVHPIPLPSGLGGAYVFPNQNGNNIAVAKPVDEEPLALNNPKGLGGQMLGQPGLKKSIRIGETGIRELAAYLLDHGGLAGVPPTALVKFSHAAFFGAASSCSSNHMTKIAYPLRFVIHGFDAALLGPSFFPVSSVHQIGILDIRIMNLDRHAGNMLVMKHDHNNSGYVDGVADLVPIDHGFCLPEWLDDPYFEWLHWPQASIPFSEYEIDYISKLDPFRDAEALRNELPSSLRESSIRVLIVCTILLKQAAAAGLCLAEIGQMMTRKFC

SEQ ID NO: 170483 - protein, 109 aa, Glycine max
  unsure (1)..(109): unsure at all Xaa locations
  Clone ID: PAT_MRT3847_124962C.1.pep
LHDPQALIQGLVDTGNDALFKXLHFMGRHCVPKVALLTGNVDIIHKMDDSYFGEGXSLLTSRLLPVTCLRTNGLLYDPTLVIQIGTSSHDMNDGRGQETDGEDSFGRDG

SEQ ID NO: 170484 - protein, 66 aa, Glycine max
  unsure (1)..(66): unsure at all Xaa locations
  Clone ID: PAT_MRT3847_124963C.1.pep
SGTTCCTDQDLLIRRGELVPVNIKGAILVGTMNDYLETTLXYTLISRWRELMIIQNGMLEPLLESR

SEQ ID NO: 170485 - protein, 33 aa, Glycine max
  Clone ID: PAT_MRT3847_124964C.1.pep
TKLITIPSRYLSSNTVYFTSTLAAALSNGKGSF

SEQ ID NO: 170486 - protein, 92 aa, Glycine max
  Clone ID: PAT_MRT3847_124965C.1.pep
MESSKNNRVEKRGYELVEEGDDVQHHLTQTKKPKLPVFASVIVEALKVDSMQRLCSSLEPLLRKIVSYFCFPCIKSCIIVDCRPSGQFFTKE

SEQ ID NO: 170487 - protein, 115 aa, Glycine max
  Clone ID: PAT_MRT3847_124966C.1.pep
LRNAVLDAKFKWGSRLKFFIKSPKDKTDYDSLSKRKIKTILTTTQPAPFQDRIVHEVLLMILEPIYEPRFSPKSYAFRPGRTPHTVLRVIRRSFAGYLWYIKGDFSVLLDGMKVG

SEQ ID NO: 170488 - protein, 55 aa, Glycine max
  unsure (1)..(55): unsure at all Xaa locations
  Clone ID: PAT_MRT3847_124967C.1.pep
SECHKSXPLRIVKVNNIQGKIKAIILKHKCDEIVYEVVNDNDFMMEFTTRIMDSS

SEQ ID NO: 170489 - protein, 62 aa, Glycine max
  Clone ID: PAT_MRT3847_124968C.1.pep
RGVYTFLIATNLNCLICIQGCKWNTFRKKSYNYICVKCPTLSKLYLISKYSFKILVYSSYCL

SEQ ID NO: 170490 - protein, 70 aa, Glycine max
  Clone ID: PAT_MRT3847_124969C.1.pep
CNPLLLLSLFTFQISKCSLLSKLGSNNYGMVEVVVEPVWAASFRTFRNLKQAANFNSWNFPLFHFFSPKF

SEQ ID NO: 170491 - protein, 65 aa, Glycine max
  Clone ID: PAT_MRT3847_12496C.1.pep
RLNTDTIIHNNQLIVSKRHTNRHVESIRLYDIHIYPILQEEEHLNENCSKTTLPNIPNQSYTNLQ

SEQ ID NO: 170492 - protein, 231 aa, Glycine max
  Clone ID: PAT_MRT3847_124970C.1.pep
MPFALENNGGVTIGRSSFAYCVAICDRDFPEDDSDSSSDSSIGRNSISSEDSSDREDAVEVEVQSSFKGPLDTINDLEEDLPVKKGISKFYSGKSKSFTSLADAAAASSMEEIVKPEDPYAKKRKNLIARNSSIERSRSCANIGGISKRPSNIGGGASCLTLNCSEEGSSSTSISPPCPLPPLHPRAINRSSLPQPSSTGRNPPWRSYSWTDLHSVAEAHDISGLAICSGS

SEQ ID NO: 170493 - protein, 97 aa, Glycine max
  unsure (1)..(97): unsure at all Xaa locations
  Clone ID: PAT_MRT3847_124971C.1.pep
VHVGYDPFLGGIQKYATPMMPLDEEILSKVAQDMVEEWFDCVDEEDSFEEVSLSAVLSGVEGLAYMVGIXIALSEGFTYELLHEILCSWFLDTCFCV

SEQ ID NO: 170494 - protein, 182 aa, Glycine max
  Clone ID: PAT_MRT3847_124972C.1.pep
MPFAMENNGGGVTIGRSSFAHCVAICDRDFPADDSDSSSDSSIGRNSTSSEDSSDREDAGEVEVQSSFKGPLDTINDLEEDLPVKKGISKFYSGKSRSFTSLADAAAASSMEEIVKPEDPYAKKRKNLIARNSSIERSRSCANIGGISKRPTNIGRGGTSCLTLSCSEEGSSSTSISPPCPL

SEQ ID NO: 170495 - protein, 47 aa, Glycine max
  Clone ID: PAT_MRT3847_124973C.1.pep
DAIWYLYYKKGFIHCLIKDRKYHSIVFQPSAQPTNTLNLVPSGEKKL

SEQ ID NO: 170496 - protein, 71 aa, Glycine max
  Clone ID: PAT_MRT3847_124974C.1.pep
IGERDESKHMTEGKFTNWGGVYAINNGSEMELGQRMIVILDLGQRTIMNLGIIREKAKFVPILKKRKEARK

SEQ ID NO: 170497 - protein, 86 aa, Glycine max
  Clone ID: PAT_MRT3847_124975C.1.pep
MDSFSNQSSGSSRQLSAQDLKNQLKNQLAIEYAQQFLETVGRKCFEKCVTKPGSSLGGSESSCISRCVDRYIEATGIISKALFSSQ

SEQ ID NO: 170498 - protein, 62 aa, Glycine max
  Clone ID: PAT_MRT3847_124976C.1.pep
PLHFPTKTPGKGNVCEPPTKLLAGKKFPNPTNFVLKKENFYYKTLTTSGGKSIITGPISNRL

SEQ ID NO: 170499 - protein, 63 aa, Glycine max
  unsure (1)..(63): unsure at all Xaa locations
  Clone ID: PAT_MRT3847_124977C.1.pep
KYQQGHSLTAQFSAGDDLLFLXREMAHIILNDRNLLSGKKLALSAVPLLGMLTRSLGNLALVS

SEQ ID NO: 170500 - protein, 123 aa, Glycine max
  Clone ID: PAT_MRT3847_124978C.1.pep
TRPEESAGHLFFQCSRILPVWWESLNWTNIVGAFPLNSKQHFLYHIGGLEGGVRANRWKVWWLALTWTIWKHRNNVIFSNATFDANKVLDDALFLLWTWLRNLEKGFSTHYNHWSSNLSIGFS

SEQ ID NO: 170501 - protein, 72 aa, Glycine max
  Clone ID: PAT_MRT3847_124979C.1.pep
GSSETDIAVNFNCSKDKPCQKITLGNINLWRYGVCGKGRPLLRNNCFKVEGAFYGKQTPPSCIAHWATPLST

SEQ ID NO: 170502 - protein, 59 aa, Glycine max
  Clone ID: PAT_MRT3847_12497C.1.pep
YYEGDIGDQAAVDKDGTKGGQRSRARQLKLAAHSHLAFLTDYLWELLWQRTAWESKPSM

SEQ ID NO: 170503 - protein, 55 aa, Glycine max
  Clone ID: PAT_MRT3847_124980C.1.pep
GLHQKVSKDCGQCMFQCWDVIRKYDSDQGFPNDGWSGHSVVPHGAVLSSADRLCA

SEQ ID NO: 170504 - protein, 44 aa, Glycine max
  Clone ID: PAT_MRT3847_124981C.1.pep
IGNERLCNTKKARIHQREWCRPVFLPCIPLENLQTSSLKRRYQL

SEQ ID NO: 170505 - protein, 86 aa, Glycine max
  Clone ID: PAT_MRT3847_124982C.1.pep
TILWDPKRWHRPTLEPIRQLDSVKESSRVSTLIEQVVEDESQMEGLMHNCSRVMVWQIDLESSYSSYPQKWIAKNNLDAIVHLTLV

SEQ ID NO: 170506 - protein, 73 aa, Glycine max
  Clone ID: PAT_MRT3847_124983C.1.pep
SSTHSLSQTITLSPQKINTAKEAYSRNNPTHTPLSFKHLHTTGSKEPYYQLTPTQYPQIPTNPLQAYFIKLYH

SEQ ID NO: 170507 - protein, 123 aa, Glycine max
  Clone ID: PAT_MRT3847_124984C.1.pep
MAGTYHNHQRHVLQLVMSCRKITAQVTNTTTSSIIAMASSSEQEFVAHYRAQLNRFPRSHRFWDAKVASRVGEKLGFRLREIGVTTVQIDPREEQSRPVHYRVMLSPLFHSIKNAGIHVSGVD

SEQ ID NO: 170508 - protein, 91 aa, Glycine max
  unsure (1)..(91): unsure at all Xaa locations
  Clone ID: PAT_MRT3847_124985C.1.pep
IREHEYYKPYFSGSKLKSYLAGHNITITDGIDKTSTTLQFRKLADRDSHKRYSKQMSNVLNVDXEDKANVRSQWHYISCNNQAKPDAYHGN

SEQ ID NO: 170509 - protein, 59 aa, Glycine max
  unsure (1)..(59): unsure at all Xaa locations
  Clone ID: PAT_MRT3847_124986C.1.pep
PKTDEIGKAEKEPGQVFWMGLRNRQWIWRLKMFPFXRSSCLHQPLAHQILCLLSTLYCR

SEQ ID NO: 170510 - protein, 59 aa, Glycine max
  Clone ID: PAT_MRT3847_124987C.1.pep
QNTALLFVTNMQTIQRMEAENIMLQSSYMSHVSCSGILIALSQAINSALFIQLSSFHYI

SEQ ID NO: 170511 - protein, 77 aa, Glycine max
  Clone ID: PAT_MRT3847_124988C.1.pep
NKFILSVYNVNSINMSVWTIIMIIVARLNTNVGIPQYTNHFQLMHHCFNIFVSGYLQMLFLQTDPDRMPSVSPRDRD

SEQ ID NO: 170512 - protein, 92 aa, Glycine max
  unsure (1)..(92): unsure at all Xaa locations
  Clone ID: PAT_MRT3847_124989C.1.pep
MGSLKLQKRLSSCVLKCCRRKVWLDPNEFNVFFMANFWQNIXKLVKDGFIIRMPTKIHFLLRACWMKEAYRMGRHSCICKHKGTREARFPTK

SEQ ID NO: 170513 - protein, 77 aa, Glycine max
  Clone ID: PAT_MRT3847_12498C.1.pep
TRNVVGDSPSGDLVILENQSRLLDENSACANDLDVESTENHIDDRQNVKSSDEEGILKNTDRVEGIHVYRRSITKKK

SEQ ID NO: 170514 - protein, 132 aa, Glycine max
  Clone ID: PAT_MRT3847_124990C.1.pep
GSIFIYFPLGQKKSVTFRNNMIHMTVLKNKDSIFIYFIHFFCLIFCGDFWDRLIAVLKATTLCWICSLFMRIFVIFLFSQDTSLLWKTKSVIFIFHHESIPSTLFFLFFPKPNQFFCLIFCGRFLGQFVMLL

SEQ ID NO: 170515 - protein, 54 aa, Glycine max
  Clone ID: PAT_MRT3847_124991C.1.pep
NTTKLTKKTIRFSSPYSTYNYTYHLNSYSKPLLKKKTLSSYLISTIFNHSPFPS

SEQ ID NO: 170516 - protein, 43 aa, Glycine max
  Clone ID: PAT_MRT3847_124992C.1.pep
LTNDKNEKIKRNNLILDRMINFIENKNDNPKFKLCLKENLISQ

SEQ ID NO: 170517 - protein, 94 aa, Glycine max
  Clone ID: PAT_MRT3847_124993C.1.pep
KKKKIKKKKKKKKEGKKKKKKKKKKKKKKKKKKKKKKKKKKKKKKGRPPLFNLSPPEINSGPVPEGFPIFLLGGRFKPGRKNGKSFSLGKIFFP

SEQ ID NO: 170518 - protein, 73 aa, Glycine max
  Clone ID: PAT_MRT3847_124994C.1.pep
PGRDHQETGRLGHTCQCCRGPTKEPPLRIPGVKKVVAASDRETAPPNARNKKLAKEAPKPKLQFHLVALLSVK

SEQ ID NO: 170519 - protein, 96 aa, Glycine max
  unsure (1)..(96): unsure at all Xaa locations
  Clone ID: PAT_MRT3847_124995C.1.pep
TTQSASLLCLFLSLGILLASASAASAXPRSAVPSHHVSTFNRSLFPSTFLFGHGSAAYEAEGAASVDGRGPXIWDTYTRQHTEKIWDHSTGDMGAD

SEQ ID NO: 170520 - protein, 118 aa, Glycine max
  Clone ID: PAT_MRT3847_124996C.1.pep
MATSSTTLLLSSLIPASIPSFNSGNHSVFLLQNRSLNRPKKRVSFVVQAAKPPIGVEIPKVQPQFKPPFLGFTKTAEVWNSRACMIGIIGVFIVEFIINKGILQVIGVDVGKGLNIPL

SEQ ID NO: 170521 - protein, 108 aa, Glycine max
  Clone ID: PAT_MRT3847_124997C.1.pep
IDPRSEFPSLFKQPSPLLVEIPKVQPQFKPPFLGLTKTAEIWNSRACMIGIIGVFIVEFIINKGILQVIGLEVGKGLNLPLGTLFLVVLVNVVMHKVNLLFIDFKKFF

SEQ ID NO: 170522 - protein, 43 aa, Glycine max
  Clone ID: PAT_MRT3847_124998C.1.pep
MCKIIDHKDMQHSGNMAGLQSMMRQFQQGAVGSTKGIMGFNNM

SEQ ID NO: 170523 - protein, 83 aa, Glycine max
  Clone ID: PAT_MRT3847_124999C.1.pep
RPHTQPQNRSTHIFSGLICCHWRRICSVTDFCRLRSSTQIGTTSLPFFSLYNAPTLGSSCHNLRIPSQQLTLCCGFFLFAFLV

SEQ ID NO: 170524 - protein, 58 aa, Glycine max
  Clone ID: PAT_MRT3847_12499C.1.pep
RENLSTSQQPLLQVNKTTIRRVSRAVNNRDLIRSPSQTLVRTGATHERAFRKSGRTRG

SEQ ID NO: 170525 - protein, 97 aa, Glycine max
  Clone ID: PAT_MRT3847_1249C.1.pep
PLLKKKRCPPQLFKKAADTRGDKAKSLEPPFVPGPRGAKRGGAKGGPGLGFKIYPHFCPLKRILGAPLGPRGTLGRGDFGGGPPRFLKLVPALVFFG

SEQ ID NO: 170526 - protein, 94 aa, Glycine max
  unsure (1)..(94): unsure at all Xaa locations
  Clone ID: PAT_MRT3847_124C.1.pep
PLQVAKXXXLTMXXXXXGXSXMRXSIXXXRFXXXXPPXXMPSXXXRXXXXLXXRXXQFGTSIWVLCRICXXXXGTXXXSRXXXXAXFRXXXVXX

SEQ ID NO: 170527 - protein, 39 aa, Glycine max
  Clone ID: PAT_MRT3847_125000C.1.pep
KASRQALCVEYAQAYLKIPPPLFLVVMYVSSVSFSNANK

SEQ ID NO: 170528 - protein, 103 aa, Glycine max
  unsure (1)..(103): unsure at all Xaa locations
  Clone ID: PAT_MRT3847_125001C.1.pep
IITEYYPHGSRGPVVALRLAPRHAVLLPDLITHVDEYAPPVINPKAANKISNEGGSENNKKRTKKSVETYNIYIFXVLKHVHPDICVFSLAVVFINSFINDIF

SEQ ID NO: 170529 - protein, 102 aa, Glycine max
  Clone ID: PAT_MRT3847_125002C.1.pep
FLAKAPVLPVILRYPFPRFSPAWDSIFGVRHVIFFLCPFVNYMEVIRVPVFPPPPQEMNDPPLYANNVKRFMAPEGNLKLFDIGLAEKRIYPPAFNGLFSPS

SEQ ID NO: 170530 - protein, 112 aa, Glycine max
  unsure (1)..(112): unsure at all Xaa locations
  Clone ID: PAT_MRT3847_125003C.1.pep
WKKDLNIPTCHKCNEVHKPEVVFFGENVPKDRAYMAMKAFKRCDAFLVLGSSLMAMSAFGLVRAAHEAGAATAIVNIGVTRGDNFVPLKINARLGXILPRLLDMGSISIPAV

SEQ ID NO: 170531 - protein, 44 aa, Glycine max
  Clone ID: PAT_MRT3847_125004C.1.pep
GAALIFSIERIIIGYMKDSQNAGAIQVKAEKRNLGQIDYYYFSI

SEQ ID NO: 170532 - protein, 51 aa, Glycine max
  Clone ID: PAT_MRT3847_125005C.1.pep
MIVSCAFITSSLPSSIDHFVLDNEGSLIENGVTYYILSDITSCAGIRSSPT

SEQ ID NO: 170533 - protein, 79 aa, Glycine max
  Clone ID: PAT_MRT3847_125006C.1.pep
MVAGSLIVSRYSRLSFALNICTKLAPYLQFMKVQVADVSLSETDSLSEWHPLSEAYNSLNALGNPIRGLVREVLAQRSE

SEQ ID NO: 170534 - protein, 85 aa, Glycine max
  Clone ID: PAT_MRT3847_125007C.1.pep
GGLNPPAQKLIFFPPQGLERGLGSFFPPGKSHVNPSFKIFGRDPPVFLGGIPGDPPQNVGPFSPWGGPFLTPGGPWISPKKKECV

SEQ ID NO: 170535 - protein, 43 aa, Glycine max
  Clone ID: PAT_MRT3847_125008C.1.pep
RFLNYEEIPLSPVAACVGLEMGVFTNDREPKVSILTGTRAPLD

SEQ ID NO: 170536 - protein, 56 aa, Glycine max
  unsure (1)..(56): unsure at all Xaa locations
  Clone ID: PAT_MRT3847_125009C.1.pep
XLXXXPWLTPFPKKXTHAHQXSXSFXHTTFXXXHALQATKCXQRXXXPXTVNTFDD

SEQ ID NO: 170537 - protein, 86 aa, Glycine max
  Clone ID: PAT_MRT3847_12500C.1.pep
PVFKCHKVSAIGNGENEFAYLATVQISGHVFKGFLYDHGVDGKTANVVPCVSELQLGNNCSGKNRECSSAIAIGVANNNAYPASAS

SEQ ID NO: 170538 - protein, 65 aa, Glycine max
  unsure (1)..(65): unsure at all Xaa locations
  Clone ID: PAT_MRT3847_125010C.1.pep
NKGPRAAGFFPEERLLKALANQPLRGAIEXSGRDFQFYXGXXFXGXWGXDLXXGVAAGGYXTXKG

SEQ ID NO: 170539 - protein, 62 aa, Glycine max
  Clone ID: PAT_MRT3847_125011C.1.pep
KQRIFQSKVPMTDTHLKHIKPTYPTWAQLTLIPGLRHFIQFSTIEIDGIKVQLTPIFINFNF

SEQ ID NO: 170540 - protein, 72 aa, Glycine max
  Clone ID: PAT_MRT3847_125012C.1.pep
NEILGGKGIFHSFYQFVKQLACLTALYLLTEFCNPGPRPRRVKIGGGGQPSIWKDAPQNLGGPSSLPKKGGR

SEQ ID NO: 170541 - protein, 71 aa, Glycine max
  Clone ID: PAT_MRT3847_125013C.1.pep
RRSERFEWDKEMTAWNFLKQLTCTVGAHSPTLSRRLIHYSLLVPSLSAHHKIVRYQWLPHFRVNLYAAVPN

SEQ ID NO: 170542 - protein, 62 aa, Glycine max
  Clone ID: PAT_MRT3847_125014C.1.pep
MENLMINFILLSTIVVVTVGQEDIHQLSFREGKELGSKRISNLHLAIMQFPGHKHPGKSHMQ

SEQ ID NO: 170543 - protein, 93 aa, Glycine max
  Clone ID: PAT_MRT3847_125015C.1.pep
NKKACSLSLHSAEKNSEALLLISHVAFLFFFLSIEASIKAPNFAHHFYSKLQKEAIFGVVKRTSTLWDFEFQVWVDFFSHEFRGYWVFGRYDG

SEQ ID NO: 170544 - protein, 51 aa, Glycine max
  Clone ID: PAT_MRT3847_125016C.1.pep
VPWGLLHPTYYKVVGCIYYHLKLYSKQSPLMKKKIQILKPPQELRVLGLKV

SEQ ID NO: 170545 - protein, 59 aa, Glycine max
  Clone ID: PAT_MRT3847_125017C.1.pep
RSLLRQLCQHSVRVISYGFNSRAVGDGWSAKDASCHGESCHVCRTRMRTRGRTRVRTRG

SEQ ID NO: 170546 - protein, 65 aa, Glycine max
  Clone ID: PAT_MRT3847_125018C.1.pep
YDHHHHHLIKIVMIMIILRMTTFGITFKIHVIYEKHIMTFNTLYMFYKSIAHYMCIYEICKKEKL

SEQ ID NO: 170547 - protein, 445 aa, Glycine max
  Clone ID: PAT_MRT3847_125019C.1.pep
MALRYFCTTNISTQHHHHASVITLVSSSLSLTSTRMQNSIPAARNSKNKFITAENVKSLVSTVVLPSISSTPLESLHRGNWVKLICGASFEDVVDIRNLSLVYTLAGVDCIDCAADASVLSAVNEGIEAARDIVCLRRPWVMISVNDDKDLHFRKAEFDPEDCPADCSRPCENVCPANAITFQGKSTSVISHNTEAPRVLKDGVITERCYGCGRCLPVCPYDKIREVTYVRDAITTADLIKRNDVDAMEIHTSGRQSTLFKELWSALGESVGYLKLIAVSLPNGGDSTISSMNKMFSIMKPNLQSFNLWQLDGRPMSGDIGRGATKESIAFAVQLAKAKERPPGFLQLAGGTNAHTIDGLKKEGLFQTTISEYLHDDTSTTSSSDSSHALISGIAYGGYARKIVGRILRSMQSQHGAAASIEEHPQHLLMALKEALALVGPIKCL

SEQ ID NO: 170548 - protein, 86 aa, Glycine max
  unsure (1)..(86): unsure at all Xaa locations
  Clone ID: PAT_MRT3847_12501C.1.pep
MGKDNVHINIVDIAHVDSAKTTTTGHLIYKLVGIDTRQIERIENEAAQTNKRSFKYAXVLDTLLAERDTGITIDIALPKCETTKNY

SEQ ID NO: 170549 - protein, 102 aa, Glycine max
  Clone ID: PAT_MRT3847_125020C.1.pep
DLATNQPFVRVWEREANMFLFDLLGKWIQWTTWRFQNNWLIICTITHGWVIHDQDLRLLYLHCYELTLSATHACMHTICAKKAGDCILPVGPCSCTIGKGSR

SEQ ID NO: 170550 - protein, 90 aa, Glycine max
  Clone ID: PAT_MRT3847_125021C.1.pep
KHFNKPLPPGGWRVPNKVPKGPGRKNLGFRGPPLICFFKTNEGFHQGSLSHFLGGGVSFSKSFPWVLTAPGCLPPPPLCGKVGPPPSKRT

SEQ ID NO: 170551 - protein, 63 aa, Glycine max
  Clone ID: PAT_MRT3847_125022C.1.pep
YTIDYCIMCLLYCAAMNPLSYRRWQLLWHLLHPRLVPHIDSYCKWLLLALYICWRGLSLLPLT

SEQ ID NO: 170552 - protein, 48 aa, Glycine max
  Clone ID: PAT_MRT3847_125023C.1.pep
FGQHPKGWFGPFLPGSFLGILVPLSRSPVKFGTEGFSLRFCFVRKPCN

SEQ ID NO: 170553 - protein, 47 aa, Glycine max
  unsure (1)..(47): unsure at all Xaa locations
  Clone ID: PAT_MRT3847_125024C.1.pep
MATLDSDVTVFSAGEASNNAGSSLTTKKXKRFEIKNWNAGSLWAWDI

SEQ ID NO: 170554 - protein, 65 aa, Glycine max
  Clone ID: PAT_MRT3847_125025C.1.pep
IVLKQDLNEKYQNSWTCSYLSFINLIVVHRLLNNKLTDKHKTKQAQQVFSICHKGKTKLVEETWI

SEQ ID NO: 170555 - protein, 79 aa, Glycine max
  unsure (1)..(79): unsure at all Xaa locations
  Clone ID: PAT_MRT3847_125026C.1.pep
MSYCSGNCGCISSCKCSNXSDRCCTMYPHLIYTDSTTTDTLLMVVSPVNAQFDGTEMSVLYKNYRYKCGPNCSCNFCTF

SEQ ID NO: 170556 - protein, 55 aa, Glycine max
  unsure (1)..(55): unsure at all Xaa locations
  Clone ID: PAT_MRT3847_125027C.1.pep
EWVIYNEYVLTSRHFICTVIHICGEWLVDIALYHYDLFNFFXCEVQCVFERLYKK

SEQ ID NO: 170557 - protein, 76 aa, Glycine max
  Clone ID: PAT_MRT3847_125028C.1.pep
IQASRRPSMTFTKFTHTLLKHCQASQRPIMESVKREKGELSVHLCENFTPFRKDFSFGVDFIKSSKSETQHGVKRA

SEQ ID NO: 170558 - protein, 61 aa, Glycine max
  Clone ID: PAT_MRT3847_125029C.1.pep
NTCHKKSIIFYVPTYDFYEMWVMFKIVHDLHELVRQRSYLPWFFGNFNHGFLELGFMAASE

SEQ ID NO: 170559 - protein, 53 aa, Glycine max
  unsure (1)..(53): unsure at all Xaa locations
  Clone ID: PAT_MRT3847_12502C.1.pep
XAXXGXRXXXXXXLXXRXREXQHGXHXXXXXXHYXRSPRTASXXPXXXXXAXN

SEQ ID NO: 170560 - protein, 62 aa, Glycine max
  Clone ID: PAT_MRT3847_125030C.1.pep
HEKLLLLLKGDLVVIGIDFENAEFVACNCFVPSYQVSCPTRNPAQSYELNKDMSGHSIDNVE

SEQ ID NO: 170561 - protein, 93 aa, Glycine max
  unsure (1)..(93): unsure at all Xaa locations
  Clone ID: PAT_MRT3847_125031C.1.pep
MQIFVKTLTGKTITLEVESSDTIDNVKAKIQDKGRIPPDQQRLIFGRKELEDRRTLADFHLQKXGPFNLVFGFRVALQTFVKTLTGRTLTLEV

SEQ ID NO: 170562 - protein, 67 aa, Glycine max
  Clone ID: PAT_MRT3847_125032C.1.pep
IIVKEVISHVKGRTAKNGVTKYRRDLFIFVNCDEGWREKGNTCSTRYTHDYFFLFFFNKYYYLRYFE

SEQ ID NO: 170563 - protein, 319 aa, Glycine max
  unsure (1)..(319): unsure at all Xaa locations
  Clone ID: PAT_MRT3847_125033C.1.pep
MGSNSLKDYLKRYESNTEEEKKKNKKKKQKKKSQPQATGLLVVDEDPTWQKPIDLGEENNDNSSDEEKPLIDEDIEVKRMKRLEQVRARRPYHAISEDGSGWXVSLSSNSENPINSINDMSPPRKRKGADLSPHQRLKRNDTPSPDYGTSDLQDISPPRRRGRHDSPSQDALHGSVASDLSPPRKIQKNAPRPGLSNISHSRSPQHLSPPRRGRHDYETSDLQDISPPRRGRHDSPSEDVSHRSVASDLSPPRKNQKKVERLGLSDLSHRHSPQDLSPPRRGRHDSPSRDAXHGSSVSDLSPPRKIQKNVARLGSSDLS

SEQ ID NO: 170564 - protein, 194 aa, Glycine max
  Clone ID: PAT_MRT3847_125034C.1.pep
RGPDVFKFPHQSVFWHEDVPVPGHKYILISFRDVDKLKSKLLEEERSKEANGVVLETKTRSPSGHKDKVKVSNGVAGHEALETMITSGNGKMKEPNGVAGQEISVSLSPKDKVKSVEMVDTDMEGSLGEGGVEESFFSAKDFYAPKEKSTSTRLSRRKGLKGKKPFVAPLPKAKKLYRSLGWQPSLPTVKEPSP

SEQ ID NO: 170565 - protein, 73 aa, Glycine max
  Clone ID: PAT_MRT3847_125035C.1.pep
FATSTGFRWLTFRPHLTLTVLTVYGDILLCVYRVRWLPHSLTANVFIDLLHLVLLPLRGGAPDTTCCSGALPD

SEQ ID NO: 170566 - protein, 135 aa, Glycine max
  unsure (1)..(135): unsure at all Xaa locations
  Clone ID: PAT_MRT3847_125036C.1.pep
MNVESERKDEQEVKGWRKALKSVGNWLAHKDKDEWLKDMRGVLSLVSTVIATMTFQSALNPPGGVRPGNESGVVQCPENSADNNPCPGESILAVLYPDEYKIFLIWNTTCFISSLAXCLLLVSGIPLNHRFFTWL

SEQ ID NO: 170567 - protein, 59 aa, Glycine max
  unsure (1)..(59): unsure at all Xaa locations
  Clone ID: PAT_MRT3847_125037C.1.pep
RENKEHCYRLSDKDWPHTTERITAXTDWTELHENGPWLSSXKLAVEPDMLYGKRGKSGM

SEQ ID NO: 170568 - protein, 93 aa, Glycine max
  Clone ID: PAT_MRT3847_125038C.1.pep
NSRADPRVHTGVRTRLNGDFCTAVILLYDGVVILSYLSDSLHTACKFHTIFHMASAHLKFRCFGGEHAWITVSDDLHTHFSIYRHIVEFCVNT

SEQ ID NO: 170569 - protein, 33 aa, Glycine max
  Clone ID: PAT_MRT3847_125039C.1.pep
GIKNMLKPLKSSFIHEYVSQMLQKPTKHKNPPC

SEQ ID NO: 170570 - protein, 103 aa, Glycine max
  unsure (1)..(103): unsure at all Xaa locations
  Clone ID: PAT_MRT3847_12503C.1.pep
HSDIFRFGIDNTVLSNIPYYEXHRYGVDEFNETLYDXWVNKGDAPALPKTLKNYIMLLSLGFNIGFLSRRYLDRMAVTXSNLKKAGFHTWEHLTLNDPHLITL

SEQ ID NO: 170571 - protein, 95 aa, Glycine max
  unsure (1)..(95): unsure at all Xaa locations
  Clone ID: PAT_MRT3847_125040C.1.pep
PRVRDDYGLFLWPCSVVLAEYVWQHKHRFSGATVVEXGAGTSLPDLVAAKLGACVTLTDDSTRLEVLDNMRRVLGLTWGVWDYTITIQFLFYILL

SEQ ID NO: 170572 - protein, 64 aa, Glycine max
  Clone ID: PAT_MRT3847_125041C.1.pep
QESHPRLLVPGFALSLSVLSPPHGGHAERGSSIIRVLCSVIGSDLQPVDTYEHFQSCDSPPMSS

SEQ ID NO: 170573 - protein, 78 aa, Glycine max
  unsure (1)..(78): unsure at all Xaa locations
  Clone ID: PAT_MRT3847_125042C.1.pep
QLTDEHISVFKEAFSSFXKNGDCCITTXELVTVLPSLLHNPTEAERPDMIYYKDADGKGTIDFPEFLNLLARKNKDTD

SEQ ID NO: 170574 - protein, 57 aa, Glycine max
  Clone ID: PAT_MRT3847_125043C.1.pep
LTNGYLILAHRETHFILFFLFFLLEVLLKKLIQTCPKLNLLNHKIFTLFSWQQSNLL

SEQ ID NO: 170575 - protein, 107 aa, Glycine max
  Clone ID: PAT_MRT3847_125044C.1.pep
LSTRKPQFNKLLKGKLRKQESRQNSPKTWCYNIGTKICVGKTERKKKLQDSITFTRLKQRQNFGTQNQNLCSIKMKIKGPPYKNKAEQHKLAKGKHMKFDIQKGKNK

SEQ ID NO: 170576 - protein, 38 aa, Glycine max
  Clone ID: PAT_MRT3847_125045C.1.pep
KYLAQQTRWCCYTPMTIPLLMFRPPSIFILQQIEPSPE

SEQ ID NO: 170577 - protein, 76 aa, Glycine max
  Clone ID: PAT_MRT3847_125046C.1.pep
SIEDVLTSLIYQYHLSLHEPKQFQAEVEFVKSAWELTVVAGWNCTNPVFYRSIWCRFNVPITSDLTSKKIGPGRVV

SEQ ID NO: 170578 - protein, 91 aa, Glycine max
  Clone ID: PAT_MRT3847_125047C.1.pep
VGVSRWPLFVRDGLITAYIDRRTISKKRGLQDSITRVLPRRILNVLLSLDGILRGSYLPSLLTRPSFEISTSVAGRLRSASPGDDAGHDRR

SEQ ID NO: 170579 - protein, 63 aa, Glycine max
  Clone ID: PAT_MRT3847_125048C.1.pep
HILFHNLSQNFTPHHFFYSFLTITYFLCHLNSSIHTFTKKTFFPPSLTFNFFPLFKTPILNFF

SEQ ID NO: 170580 - protein, 97 aa, Glycine max
  unsure (1)..(97): unsure at all Xaa locations
  Clone ID: PAT_MRT3847_125049C.1.pep
PGRSGGDMTNSIPRDTVIPTEISXEFTTFQDLQTTFFIRVFDCXRMLTMHSRLLCKLAPPELFTLQGRTPHIVGTFEADLNCILDATADDMVSGKSH

SEQ ID NO: 170581 - protein, 58 aa, Glycine max
  unsure (1)..(58): unsure at all Xaa locations
  Clone ID: PAT_MRT3847_12504C.1.pep
SVGXMTGXXKGGVPSLGRXXPVEDIKHGVYXALKPKFAVGYVKFGLSRGYVSVAVRLG

SEQ ID NO: 170582 - protein, 102 aa, Glycine max
  Clone ID: PAT_MRT3847_125050C.1.pep
LSLSLHRSDSQLRHLATQQVQLDRLQSTRQTSKTHAIRANSYIKMPASTNSVSSAAGSIVKPQGGQVQLHQHRRLQLLLHSLHGHVNATVKIPHTAVYESHR

SEQ ID NO: 170583 - protein, 63 aa, Glycine max
  Clone ID: PAT_MRT3847_125051C.1.pep
KKKGMIILLNPHRKGIPIPIKILVGGKCNNNISLGMFEQEWEAQFSKPINIIKEGPKDVIKRR

SEQ ID NO: 170584 - protein, 106 aa, Glycine max
  unsure (1)..(106): unsure at all Xaa locations
  Clone ID: PAT_MRT3847_125052C.1.pep
PVRRRGRFXVLCARLLCXLLCWWLRPFAGFRCGVXGPFLCRGPGRGRVRRGXPLVPGXXXXXLLFFXLFXVLGFXVXGFPXWGRGVGWLFQTNPLXXXXXGVREXE

SEQ ID NO: 170585 - protein, 71 aa, Glycine max
  Clone ID: PAT_MRT3847_125053C.1.pep
SDNWIARKAEARSIVYCQLLKCIHISTIKPMGIYFPNKTKAHKVESTMMATDKRKLGIPNIYIFASKQNLT

SEQ ID NO: 170586 - protein, 49 aa, Glycine max
  Clone ID: PAT_MRT3847_125054C.1.pep
AQGYRILLLLLLRSTLSEPVHRHGLLASFKFKFKSLGYGSSRFQAMPIL

SEQ ID NO: 170587 - protein, 631 aa, Glycine max
  Clone ID: PAT_MRT3847_125055C.1.pep
MKSSLKKLRGLALHNHKHVSSKSIRPLGQLDELARATRDMQDMRDCYDTLLSAAAATASSAYEFSESLRDMGSCLLQKTALNDHGDETGKLLLMLGKIQFKLHKLIDHYRSHIFQTITIPSESLLNELRIVEEMKRQCDEKRDLYDYMVTRYREGGRSKGAKGETFSLQQLQTAHDEYDEEATLFVFRLKSLKQGQSRSLLTQAARHHAAQLCFFKKAVKSLETVEPHVKSVTEQQHIDYHFSGLEEEDGDEGDYGDDVGGGYDENDDGELSFDYGQIEQDQDVSTSRNSMELDQVELTLPRDSTAEAAKENLDNLVRNLFSFKVRAGSQSAPLFADNKPDASEKLRQMRPSLSRKFSSYVLPTPVDAKSSTSSGSNNPKPSKMQANLNEPTKNLWHSSPLEQKKQEKDIGDEFSGSIVRSAQSVLKESNSNTASMRLPPPLIDSLLSSNRDYISAYSKKIKRHAFSGPLTSNPGPTKPVSIESVQLFSGPLLPAPIPQPPSSSPKASPSASPTLMTSPKISELHELPRPPTSFPSNSRLLGLVGHSGPLVSRGQKVTANNLVASSAASPLPMPPQAMARSFSIPSSGARVAALHMPRTLESSHRSSISENIASPPLMPISLSSSRPSLDG

SEQ ID NO: 170588 - protein, 125 aa, Glycine max
  Clone ID: PAT_MRT3847_125056C.1.pep
PPSTLFAHAFFFNIQNSCSSRKKIIYLNGDFCPSLRLKDSDYLMPRKDFPLCDLVSKNSNKIKAEVHGWRDGKELEHVLLHVINKAIGEGSNINNSTQKVSVDCKMGPIPIDTLQPLPKALSVPQ

SEQ ID NO: 170589 - protein, 171 aa, Glycine max
  unsure (1)..(171): unsure at all Xaa locations
  Clone ID: PAT_MRT3847_125057C.1.pep
HHGVWNCFSDVIANPXHVNEGRLNICPYHDYLKSSHGCNLCPPXNMCKGLVIERIKNPLVQXGKKKLIYLGDGNGDFCPSLRLKDGDYVMPRKDFPLCDLVSKNSNKIKAEVHGWRDGKELEHVLLHVINKEIGEGNNINNSTQKVSVDCKMGPIAIDTRQPLPKALSVPQ

SEQ ID NO: 170590 - protein, 40 aa, Glycine max
  unsure (1)..(40): unsure at all Xaa locations
  Clone ID: PAT_MRT3847_125058C.1.pep
FTDKXTDTAIGEYMSHVCSQPTLYGTHSTTGADAFYSMHL

SEQ ID NO: 170591 - protein, 123 aa, Glycine max
  Clone ID: PAT_MRT3847_125059C.1.pep
PVPVFSRGPPLPFFFSRSNWAPYREIWFARGGRGGIPGGAPALFFSQARPPFFGFSAPPWGGKVWWGFSRLVFGVGLFGFPFFVMNFFAFFFLKPSPSPFGGGFCGPLPPAFLFPPCFSPLPV

SEQ ID NO: 170592 - protein, 92 aa, Glycine max
  unsure (1)..(92): unsure at all Xaa locations
  Clone ID: PAT_MRT3847_12505C.1.pep
RNSRRPTHPSTLPNLXIFSTKTPHXNSRLFITINSLTNINFLLFFIYTIFLPSYFHAYDIFPLLMNTTYLTHSPHIKYSILTLSIQSLNIFL

SEQ ID NO: 170593 - protein, 41 aa, Glycine max
  Clone ID: PAT_MRT3847_125060C.1.pep
EKKHPLFPAAFFKKKAALQMIPIFFKKQTCCSTFSQWDYKN

SEQ ID NO: 170594 - protein, 41 aa, Glycine max
  Clone ID: PAT_MRT3847_125061C.1.pep
LLMVDKIDKDNHEEKMNIVMKLCGQVNTLNCLTQKHHFDCK

SEQ ID NO: 170595 - protein, 82 aa, Glycine max
  Clone ID: PAT_MRT3847_125062C.1.pep
HKHHPPPPSSQSHHHAHHKTRHTHRIQQHYKHQIHCKIEHHHYHQQLRHHHLLWPFHKQRCDQNQLLQSHQRLQDKNKKKNQ

SEQ ID NO: 170596 - protein, 189 aa, Glycine max
  Clone ID: PAT_MRT3847_125063C.1.pep
MCNTRATRTQFEAWYNAVKDEYDFDDEQMGVVMNGFMVWCIDNGTSPDANGVWVMMDGEEQIEYPLKPIVENAKPTLRQIMHHFSDAAEAYIEMRNSESPYMPRYGLLRNLRDRELARYAFDFYEVTSKTPNRAREAIAQMKAAALSGVNNKLFGLDGNISTNSENTERHTARDVNQNMHSLLGMGPQQ

SEQ ID NO: 170597 - protein, 119 aa, Glycine max
  unsure (1)..(119): unsure at all Xaa locations
  Clone ID: PAT_MRT3847_125064C.1.pep
PSPLEKPISKPKGLVRKPQVYVMGPPTEQLIEQTVSLTWLTSGFLPNDIGVEWTSNGHIXKNFKNTEPVMDSDGSFFMYSKLNVERSRWDSRAPFVCSVVHEGLPNHHVEKSISRPPGK

SEQ ID NO: 170598 - protein, 124 aa, Glycine max
  Clone ID: PAT_MRT3847_125065C.1.pep
MDSQQCPMKETDEHRQMRRIAFVAVVVSTVAVIASVVTLPMLYNYVQSFQSHLMVETDYCKARARDMWLEMTALQIGKGHVNRIKRGWLFGQWVPESGADAYAAGGGPSGGAPSGGAPSSASAP

SEQ ID NO: 170599 - protein, 121 aa, Glycine max
  unsure (1)..(121): unsure at all Xaa locations
  Clone ID: PAT_MRT3847_125066C.1.pep
MGKKFFVGGNWKCNGTTEEVKNIVTTVYDANVPGEDVVEVVVSPPFVFLPVGERLLPPDFHVSAQNCWIPKGGAYTGEDSAELLXVNLXNSSSLTRHSKRKHLLHESDEPVRDNTNNALQG

SEQ ID NO: 170600 - protein, 100 aa, Glycine max
  Clone ID: PAT_MRT3847_125067C.1.pep
MEIILGRPFRSVTKMVIRRFCLISGGMTVMKNVADVCSNVANFIFLEVPSYKDVCGGFNYCVVIIISETDCRKASRHFSCVRFNRLSFKLIKVGSLNLAN

SEQ ID NO: 170601 - protein, 60 aa, Glycine max
  Clone ID: PAT_MRT3847_125068C.1.pep
PFLNLGYSVEGQKDTSWQKQWRTLQNGGFLPSFPFFALTLDGRFFIIGRRTRVDYFGFTG

SEQ ID NO: 170602 - protein, 107 aa, Glycine max
  Clone ID: PAT_MRT3847_125069C.1.pep
PLITMNVNVTEPAPPALAIEILVLQDPTSNSHSLGLGIIIYCECEAKSISLMTVIVLARSGVLSYTPIIKIKCSSFPLQQVQGFWTGDGRVKVTAASFLMFGKWGNW

SEQ ID NO: 170603 - protein, 68 aa, Glycine max
  Clone ID: PAT_MRT3847_12506C.1.pep
SAHQLQKHLDYESLSDHIYFVDNEYSTEGNTLSELITLLQSDVVDHSQLTGWTLYYGKYNSVSNINAG

SEQ ID NO: 170604 - protein, 40 aa, Glycine max
  Clone ID: PAT_MRT3847_125070C.1.pep
GIQIGSHRRVNWMTASDQVRHLLEARPGRSAPPMLASVLV

SEQ ID NO: 170605 - protein, 62 aa, Glycine max
  Clone ID: PAT_MRT3847_125071C.1.pep
HTHQHTNNNIPSILKLNPIHNNIPNLIHINKQHSEFTNIQNYINKLSNHKAATLPSNPNNIA

SEQ ID NO: 170606 - protein, 41 aa, Glycine max
  Clone ID: PAT_MRT3847_125072C.1.pep
LIFPVGKPLNMILDDGGDLTNLVHHQHAELLPGIIGLSEET

SEQ ID NO: 170607 - protein, 76 aa, Glycine max
  unsure (1)..(76): unsure at all Xaa locations
  Clone ID: PAT_MRT3847_125073C.1.pep
IELVFSAFYETGGPSSMLMLNKTLPYKREKNTASLTNSKPIXXFIYLWSIITILNMKYVELINILLKKACLMQDKY

SEQ ID NO: 170608 - protein, 117 aa, Glycine max
  unsure (1)..(117): unsure at all Xaa locations
  Clone ID: PAT_MRT3847_125074C.1.pep
GGKAXQKTNHNKEGGGANPRAAGDSTGTGXGAEXKGTXPXXDTDDTATVFFRKARESHEPELAPPPIGXAEFMVHLATIPGTGTGINPAKRHGAAAIYNQXQRHGEDHWSFWKGPFI

SEQ ID NO: 170609 - protein, 48 aa, Glycine max
  Clone ID: PAT_MRT3847_125075C.1.pep
ANYLGHNNNNNNNVHGTTFSLVFTYKSSHNITAISIFITEDLKGNQRW

SEQ ID NO: 170610 - protein, 68 aa, Glycine max
  Clone ID: PAT_MRT3847_125076C.1.pep
EERKERRRGGAHLRLDSSPSASLSSLRFVPTAPSSSLHLSYAPIPMLIVTLAAIKATLATLSSIDLNF

SEQ ID NO: 170611 - protein, 44 aa, Glycine max
  Clone ID: PAT_MRT3847_125077C.1.pep
SRSFPYLVNFTSSNSPNRIITKYKIYEATLLLSPFPQPLMISHQ

SEQ ID NO: 170612 - protein, 1067 aa, Glycine max
  unsure (1)..(1067): unsure at all Xaa locations
  Clone ID: PAT_MRT3847_125078C.1.pep
MGIFDELPLPSEKAYLREDLSRIDESWVAARFDSLPHVVHILTSKDRDAAAQFLKEQSDIIEEVVDEVVHSYHSGFNRAIQNYSQILKLFSESTESISVLKVDLGEAKRRLSARNKQLHQLWYRXSVTLRHIISLLDQIEXLAKGPARIEKLIAEKQFMPAVQLHVQSILMLERGLQTVGALQDVRSELTKLRGVLFYKILEDLHAHLYNKGEYSAAGSNLLENDDEIPTTTAVALAAHNSQPLSRRTRSLKGDNQNSLQIDGSYRPASMDGGSFDGHDEADSNEEATLDGNMATARINGNDIPKDSNNALRQMPTWLSNSTPDEFLETIRKSDAPLHVKYLQTMVECLCMLGKVAAAGAIICPRVRPTLHEIITSKIKAHAELLNSSRSSIGQDSQAGTGNLHFIKGQLESYQLPKQKRKNGISIAGTLLAVSPVSPLMAPGGKAQVAAKELLDSILDAVVRIFENHVIVGELLEAKASQHADINTPKSLPVDVNWNPDSEASQVTGGYSIGFSLTVLQSECQQLICEILRATPEAASADAAVQTARLASKVPSKDKRDGSEDGLTFAFRFTDASISIPNQGVDLVRQGWSRKGPNVLQEGYGSAAVLPEEGIYLAASIYRPVLQFTDKVASMLPTKYSQLGNDGLLAFVENFVKDHFLPTMFVDYRKGVQQAISSPAAFRPRAHVATTYTSSIEKGRPVLQGLLAIDHLTKEVLGWAQAMPKFSNDLVKYVQTFLERTYERCRTAYMEAVLEKQSYMLIGRHDIEKLMRIDPSSAYLPNLLGQLNVESNSSDAETIEAELELSELLLSLRPIKQENLIHDDNKLILLASLSDSLEYVADSIERLGQTTQRASNHVGGKYHHSHSDSAPTRSLVSFAQDYRKLAIDCLKVLRIEMQLETVFHMQEMANTEYLDDQDAEEPDDFIISLTAQITRRDEEMAPFISNAKRNYIFGGICGVAANASVKALADMKSINLFGVQQICRNAIALEQALAAIPSINSEAVQQRLDRVRTYYELLNMPFEALVAFITEHIHLFTPVEYAKLLNVQVPGREIPPDAQDRLSEILSV

SEQ ID NO: 170613 - protein, 50 aa, Glycine max
  Clone ID: PAT_MRT3847_125079C.1.pep
SGSHHLASELQLLIQVLSYPIIFLCNLARFVFCPWSVICIFGYILFPSCL

SEQ ID NO: 170614 - protein, 54 aa, Glycine max
  unsure (1)..(54): unsure at all Xaa locations
  Clone ID: PAT_MRT3847_12507C.1.pep
HDALKSNVNANKPGKRQDMIRPSSKVIMLXLLVMHNHRYIVEYAYVDDHPSENI

SEQ ID NO: 170615 - protein, 229 aa, Glycine max
  unsure (1)..(229): unsure at all Xaa locations
  Clone ID: PAT_MRT3847_125080C.1.pep
MSSIVQGFSKSLAMTILSEIGDKTFFAAAILAMRHPRRLVLSGCLSALIVMTILSALVGWAAPNLISRTWTHHITTFLFLGFGLWSLKDAIFEQGDAEELAEVEAXLDKDWKASNGATKNSNKDDDATKKHKRSFLSQFFSPIFLQAFSITFFGEWGDKSQLATIGLAADENPFGVVLGGILGQALCTSAAVVGGKSLASQISEKIVALSGGILFIVFGIQSFLSPVES

SEQ ID NO: 170616 - protein, 160 aa, Glycine max
  Clone ID: PAT_MRT3847_125081C.1.pep
QQLLHLLRCLTSIPERKKVENFVIWVWLVMADLFTGGAVGAVMGELLKGAIATINKGRDFGPTLESNIETLNSLAPQVEEMKRYNKMLDRPIEEIARLESQMQAGEELVRMCSKFGRWRMLSFPYYQSKLKSNDANLKRHFSVNVPAENKRDLMEVVASV

SEQ ID NO: 170617 - protein, 89 aa, Glycine max
  unsure (1)..(89): unsure at all Xaa locations
  Clone ID: PAT_MRT3847_125082C.1.pep
AVFVARNRFAVLDKGNNQVCVKNLKNELVKKSALPISADAIFYAGTXNLLCRSEDRVFIFDLQQRIVLGDLQTPFIKYVVWSNDMESVA

SEQ ID NO: 170618 - protein, 63 aa, Glycine max
  Clone ID: PAT_MRT3847_125083C.1.pep
LSDLTFQFLSKKWINLIWKARINTMPYYHQTTHKYFTEHTHTHTHINHYTLFTLQRVIDFIQL

SEQ ID NO: 170619 - protein, 64 aa, Glycine max
  Clone ID: PAT_MRT3847_125084C.1.pep
MWRDPGAPADSFYETRPECTDVPKSRFRIKAGKTLSARKWNAAFPPEGVLDLGKTLSRIHRGGI

SEQ ID NO: 170620 - protein, 123 aa, Glycine max
  Clone ID: PAT_MRT3847_125085C.1.pep
NCLHCNFSLEGVIGKIPKSHIGCLNPWSVAYIPVGQLYLMPIGFKMKSNMVSEQTLTLGPRIRLRCNKHPPFVVHAPSPISAGRERGVLGKYPSPTSAASILGVQLIYLQIPKSHSRGCMRSR

SEQ ID NO: 170621 - protein, 55 aa, Glycine max
  Clone ID: PAT_MRT3847_125086C.1.pep
PCVPSFTEPFSHKQRSEVRAITMVIMSLKVTRGLLTQWQSPLFLRVDTGRLERRT

SEQ ID NO: 170622 - protein, 56 aa, Glycine max
  Clone ID: PAT_MRT3847_125087C.1.pep
LLPPPLPPPPTPTPKPSPAPAPTPTPTPIPMPIPIPPPPPRPPPPPTPPPPTPPPA

SEQ ID NO: 170623 - protein, 93 aa, Glycine max
  unsure (1)..(93): unsure at all Xaa locations
  Clone ID: PAT_MRT3847_125088C.1.pep
MGVGMRDGWSGVSVAVGGQFFFIIQYCNSHNYLYDFARYNMYPNLSYTXSTTTXTLFMSVTPVKVQFYAAXNIMPSDNESCKSELNCTSYPCT

SEQ ID NO: 170624 - protein, 110 aa, Glycine max
  unsure (1)..(110): unsure at all Xaa locations
  Clone ID: PAT_MRT3847_125089C.1.pep
FTGLNASAGNVSAVDKVSAHQATRMGIKAXLKDAGVVDEATAASAQLASNAMAIEALLAXDDRSMAFMTNNXAMLSGDKIMFKNIACFPNNGAFDEDEIPISVDAPKIYM

SEQ ID NO: 170625 - protein, 112 aa, Glycine max
  Clone ID: PAT_MRT3847_12508C.1.pep
ILGFSQGAAMTALISAQQEKLKGEMDFKFVVLCSGFALRMKEMECGPIKCPSLHIFGNEHGKDRQIANQASKELASLYDSDCSAIVEHDCGHIIPTRSPYIDEIKDFLGRFL

SEQ ID NO: 170626 - protein, 304 aa, Glycine max
  unsure (1)..(304): unsure at all Xaa locations
  Clone ID: PAT_MRT3847_125090C.1.pep
MATFLSNQSLLGSCPCSTPFSSKPFQTLKPQILSFPSRGFPRPLISSVNRRTQLKSSQDFPPTTNDETEETQNDVRGTNDDEDKKQVPSLMILLEAYKEAFFNGDQNTVAQIEEGIYSIANRKNKLIQKLSSLSADKAASKKSYLRLQADFDNFRKRTDKERLNIQSDAQQQVIEKLLLMVDNFERTQQQIKAATEKEKKIGVSYQGIYKQFVEVLRNHNVSVVATVGKPFNPLQHEAVAREESTEFKKGIIIKESRRGFLLRDXRVLRPALVKVSLGPGIRHEPVSPDKSVEQPSTAAGIDER

SEQ ID NO: 170627 - protein, 75 aa, Glycine max
  Clone ID: PAT_MRT3847_125091C.1.pep
SQRWIRTVFLRLRKRLLLDPSPISEACTVPEVSSGTGNLPYGYAGGFQPPPFPVVRLRGLPFNCTDIDILKFFAG

SEQ ID NO: 170628 - protein, 264 aa, Glycine max
  unsure (1)..(264): unsure at all Xaa locations
  Clone ID: PAT_MRT3847_125092C.1.pep
MYGPRGAMLGSGGVSDGYEVGSKRQRMMESNPYFAVSSGTGNLPYGYAGGFPAPSLXVVRLRGLPFNCTDIDILKFFAGLTIVDVLLVNKSGRFSGEAFVVFAGAMQVEFALQRDRQNMGRRYVEVFRCKKQDYYNAVAAEIKYEGIYDNDYHGSSPPPSRLKRFNDKDQMEYTEILKMRGLPFQVTKSQIVEFFKDFKLIEDRVHIACRPDGKSTGEAYVEFVSAEEAKRAMSKDKMTIGSRYVELFPSTPDEARRAESRSRQ

SEQ ID NO: 170629 - protein, 53 aa, Glycine max
  Clone ID: PAT_MRT3847_125093C.1.pep
QPVFLTVGIKGDFPQGQPRVLNTKLDPKSANNSFKEAGGTVVRTACFVWGIFI

SEQ ID NO: 170630 - protein, 133 aa, Glycine max
  Clone ID: PAT_MRT3847_125094C.1.pep
IFCFNCITLIYHHYFSIFSISLHILLVNIHAQGFFHPVPNFQETLHLYLHISTSLSFSLSRAFLKSPSRALIVSNCGLPLQLFVERLSCSEHICRPFPTSSKYAIPVFRLRLDQELKHWQFFCLHPMYAIDWT

SEQ ID NO: 170631 - protein, 88 aa, Glycine max
  unsure (1)..(88): unsure at all Xaa locations
  Clone ID: PAT_MRT3847_125095C.1.pep
TKXIXIXVXXAXXVHNCGGAFWVVVLWVSSSPSXYSLCGSLEGEFVTVLCDCCHGNXNNXXXXEEEXXXCVVXXFWFGXGGVVNFWVT

SEQ ID NO: 170632 - protein, 102 aa, Glycine max
  Clone ID: PAT_MRT3847_125096C.1.pep
GEEYCSHAYRPSKFPCNVGLCKSFISQYAFLSIYFATAARCLGKKSKPVLLEDMSISRGPDRALQSRPISAAGNPAARLASPAKNGLRKELNDFHVFKLPVG

SEQ ID NO: 170633 - protein, 83 aa, Glycine max
  Clone ID: PAT_MRT3847_125097C.1.pep
TLFLHDLIKSIRHLPSIFIVQLFDEKKKKKKKKKKKKKKKKGGRSAGFKVPCSRMRAYNALIVLSRYKKLVDGPQLYNWETGK

SEQ ID NO: 170634 - protein, 136 aa, Glycine max
  unsure (1)..(136): unsure at all Xaa locations
  Clone ID: PAT_MRT3847_125098C.1.pep
NESTSYIDYDQTANESTLXCSQMIEDRAXAYATLYDDEPEDKVRDLHELILXADVEHISGSITAGVVLXTFDSSEVPPTTSDRSLEGPCGALIXYRNRDGEMDNQGKEVSYEYENLTDQAVGPGMQGVPQHHTITG

SEQ ID NO: 170635 - protein, 96 aa, Glycine max
  Clone ID: PAT_MRT3847_125099C.1.pep
PSFNGDLNNNQQGQGHEQQTQRAAAHPDEYDQQWMAMQYPDTVMAMMQHTMMMGPQHFMPYAHSHYPPAPTSASYSSQHYHHKLAGIVAVGSGYFN

SEQ ID NO: 170636 - protein, 278 aa, Glycine max
  Clone ID: PAT_MRT3847_12509C.1.pep
MEPRFVISASEAESQSISKLLPSLVSSSQSLARPSISNFPVAAVGLAASGRIFVGVNVEFPGLPFHHTIHAEQFLLTNMANNAETRLDSFAVSAAPCGHCRQFLQELRDAPDIQILITSHKNPHFSPLSHFLSHHFGPHDLLPKTVPLLLEPRHNALSLPQNDHFNALAIAALEAANNSHAPYSASPSGVALLDSKGNVFKGSYIESAAYNPSLGPLQAAIVAFIAGGGGDYEEIVAAVLVEKEGAVIKQDHTARLLLHSIAPRCHFNNFLASQSPST

SEQ ID NO: 170637 - protein, 54 aa, Glycine max
  Clone ID: PAT_MRT3847_1250C.1.pep
FFFFFFFFISMFYFFFFFIWAIKDHFILRLALIQYMIQFRTTFKSTKTIKHDIA

SEQ ID NO: 170638 - protein, 143 aa, Glycine max
  Clone ID: PAT_MRT3847_125100C.1.pep
VRKGRGGPRVRPRVRRLREDDRRGFLFRFSFSRVFSSLFDPQLLFSLFTQCFFSFTSNLDFLVVRTLNLAKPAVQFIVPFNLGFRFENATENGEARVCVELLEEGRQRRQGNPEGFTEPTATRTCGRDREGRRETTTRCCCCC

SEQ ID NO: 170639 - protein, 106 aa, Glycine max
  unsure (1)..(106): unsure at all Xaa locations
  Clone ID: PAT_MRT3847_125101C.1.pep
MSRGSGRGYDRHITIYCPERRFFXVEYAFKADKAAGITXWEYDERIQLCVVTNKKSSDKLLDNTSVTHLXQMTKYTGXLATDMTGDARTLVQHARNDTADGRCTYR

SEQ ID NO: 170640 - protein, 108 aa, Glycine max
  unsure (1)..(108): unsure at all Xaa locations
  Clone ID: PAT_MRT3847_125102C.1.pep
HASDHASVRKDLVLWPDDLGTFYEDTQLDKHRQALDRVPEVQPYLPASLNIRTVSFPTAIRVAIXTENGRMEHIEEIIKDHFCXPISEQVLEIWLEHCACAKPQFRDA

SEQ ID NO: 170641 - protein, 406 aa, Glycine max
  Clone ID: PAT_MRT3847_125103C.1.pep
MVARNGQLPRRMTSSSASSSASTSNNVAAAKVTCLEPLTINDLLVGGDPISLNDIISHIPGRSSQILEVVRHLGPLNSPILPLFVYGSSSTGKTSIILQLFRHLNRPIVYSSCRTCYNQNILFESILNQLLLHRKNAANGYSNAKRCERPSDFVNFLREALTNVINNLKKSEKLISNEMTQGKIGNMIYLVFDNFQLVREWDKSSTILPLLFNLYDLLNMPEVGLIFISSTSPDTFYSNMGYVEPIPIYFPDYTEEDIRQILLRNQVNQKLYSSFLDVSLKSFCGITKQIDHLSAALKPLYEKYCEPLSDKGKGVAPNQEMKRRLLAHINPHIASSLNEIFKVSSLSSTEVEIRKEEKRKGNNRRLEQSEELGSLDFHVSTSAKYLLISAFLASRNPATLDASLFD

SEQ ID NO: 170642 - protein, 60 aa, Glycine max
  Clone ID: PAT_MRT3847_125104C.1.pep
MAVVAQTPDIDCERQFCQDVRTQNVVACQGRANISKSFLCPSGLDKNLFCNIGDVTITND

SEQ ID NO: 170643 - protein, 161 aa, Glycine max
  unsure (1)..(161): unsure at all Xaa locations
  Clone ID: PAT_MRT3847_125105C.1.pep
SNNLTGEIPASLLNLTKLSRFAANQNNFIGPVPPGITNHLTSLDLSFNKLSGPIPEDLLSPSQLQAVDLSNNMLNGSVPTKFSPNLFRLRFGSNHLSGNIPPGAFAAVPNLTYLELDNNDLTGTIPAELDSRRKLALLNLAQNHLTXVLPPLLGNLTNLQV

SEQ ID NO: 170644 - protein, 88 aa, Glycine max
  unsure (1)..(88): unsure at all Xaa locations
  Clone ID: PAT_MRT3847_125106C.1.pep
MAAKERESNICWTLILGRYSGLAPVFDCHTFHICCTFAXPMTKIYWRSDKKLEKEPKLLNNGDAXGLLTMIPTIPMVDETFSEYPPLG

SEQ ID NO: 170645 - protein, 49 aa, Glycine max
  Clone ID: PAT_MRT3847_125107C.1.pep
GDTNKRNISVKLRHAISTRTKSNKRTMSLTRCTRHFKSLARNPHFLKPS

SEQ ID NO: 170646 - protein, 248 aa, Glycine max
  Clone ID: PAT_MRT3847_125108C.1.pep
MSSAFLMNPAKIPHAMMQRQFMLVNRAIHPIKTPSFHFLKKPRQYGISSSFCSSSSSSSSSSSAAISISKVGFVGWYLGMIKSWPILTKSVTSSLIYIAADLSSQTIVRESSEPFDFIRTSRMAGYGMVILGPSLHFWFNFVSKLFPRRDLFSTLKKMVMGQTLYGPAMTVTFFSLNARLQGETGSEIAARLKRDLLPTMLSGIMYWPICDFITFRFIPVHLQPLVSNSFSYLWTVYITYMASLEKAT

SEQ ID NO: 170647 - protein, 352 aa, Glycine max
  unsure (1)..(352): unsure at all Xaa locations
  Clone ID: PAT_MRT3847_125109C.1.pep
MQDDECALVIPNLLIGDEIFDLKVREVGLGKIAARFLEKCHALNGIKRIWCEWLGKESNGERDGVEVLEHDFAVVIFAYNYDLGRSGLLDDVKTLLPVXAGQKGKTSLSDFDDVSDFLCNQYDSSAEESSDSNNSSSRLTLDQFNNHLCTRFVSSKALRKELRRKQRLAAEKVCNICQQKMLPGKDVAALLNLKTRRVACSSXNRTGAFHVFHTSCLIHWIILCEFEIITNHLVCPNVRRVVKRKVASDGNKMGKEKDIGKHIRTVFCPECQGTGMIIDGDGVEQPEFSLSQMFKFKIKACDARRDWIKSPEVLQNCSTGFHFPSQSEEIFEEKVEPINLLHFYRADDQSGA

SEQ ID NO: 170648 - protein, 70 aa, Glycine max
  unsure (1)..(70): unsure at all Xaa locations
  Clone ID: PAT_MRT3847_12510C.1.pep
MCESCSNSHYNTYCDTRLSISKREQNILSRVTLXKKLSQLLNTGPRIPRVWISSYTRGREKLYGVSHIPS

SEQ ID NO: 170649 - protein, 130 aa, Glycine max
  Clone ID: PAT_MRT3847_125110C.1.pep
RGPHGSKKKTPPKSRGGKNKGKPTQKIGGPKNKTGSKKLEKGGALPNLYPKTLGFLKIPQPRGGGFGQSLFFLALAPGGQLGPPKKGGPPPGKGNNPKGPPLPLKGAQGIFPAGNLGGPRGTGRPPGGEK

SEQ ID NO: 170650 - protein, 272 aa, Glycine max
  Clone ID: PAT_MRT3847_125111C.1.pep
RTLREDDRRGRERLLVYEFVPNKSLDYFIFDPVKKTRLDWQMRYKIIRGIARGILYLHEDSRLRIIHRDLKASNILLDEEMHPKISDFGMARLVHLDQTQANTNRVVGTYGYMAPEYAIHGQFSAKSDVFSFGVLVLEIVSGKRNSGNRRGENVEDLLSFAWRNWRNGTTANIVDPTLTDGSQDEMMRCIHIGLLCVQKNVAARPTMASVGLMLNSYSLTLSVPSEPAFVVDSRTRSLPDTLSSEYNSRETRSNKSTEYSVDEASITEPYPR

SEQ ID NO: 170651 - protein, 64 aa, Glycine max
  Clone ID: PAT_MRT3847_125112C.1.pep
LVFSDHDPHWLTHPPDSIIDGLVDLEAAVCLCTALKANVLGINLNLTLSLTLVINVGSEESCRE

SEQ ID NO: 170652 - protein, 69 aa, Glycine max
  Clone ID: PAT_MRT3847_125113C.1.pep
KRRLLWNTYLYVRIHALFISLQKKYRISILKRKKRAGIILNVAKILVHNLGRDDGSKSAFWARYSKLES

SEQ ID NO: 170653 - protein, 74 aa, Glycine max
  Clone ID: PAT_MRT3847_125114C.1.pep
ALLEPFSLVTSLIGIHRTSFSGGGGEKPFLFTREEKEDLTGPQAKRSTTGKDGPGQGKSPPLTQPTVGKMPARG

SEQ ID NO: 170654 - protein, 65 aa, Glycine max
  Clone ID: PAT_MRT3847_125115C.1.pep
PESSKLFQRCSKLSHLHKHHVLTSHNCLDFQSPQAHEHIIDVGSDLNIQSHQGFLRLAQMELQPH

SEQ ID NO: 170655 - protein, 105 aa, Glycine max
  Clone ID: PAT_MRT3847_125116C.1.pep
KGSVPIGMGRTFLFKRAIFSKNAPIGENVKIFSSANVQKTPREPNGFFIKSGIVPVIKDAFILSGPVFLTPPPPPKIFCPPNPNGGWEAPFSPRRVFQALLPRLK

SEQ ID NO: 170656 - protein, 61 aa, Glycine max
  Clone ID: PAT_MRT3847_125117C.1.pep
HATGHVSGVTVMITGYMTYYLSYFDNLHERLHHGHIWVLVKNVAKRVSIRISWRKIWYTLN

SEQ ID NO: 170657 - protein, 93 aa, Glycine max
  Clone ID: PAT_MRT3847_125118C.1.pep
NSQDSPLSTQITRVRLTLPYPYTDDEPNPTTSITTIIKNVNCSNLSIGRYISQKHMKKNTSQAKIFSSRARELGDPLCRPLAARTDACIDAVG

SEQ ID NO: 170658 - protein, 340 aa, Glycine max
  Clone ID: PAT_MRT3847_125119C.1.pep
RKLKSKITTNNWTEYLCHFLEMINIPELRQHKTTIKRGHYGLVDASAKLKILGELVNRALETAIFREKLDEIIEQRQALGATRREEALENGRRRREEKERMKAESESNGFVDGHLNGANVLANNIHGIQNGDVGEKRIIEIEPSGQNDPLGRSGIKHLNPAPKKTLKKLNSELKEPTENGKELSRKESPKQLKADKDSSEKNSDEQRKEYFEREMEKRFIRRSPLGKDRDYNNYWWFCRYGRIFVESCDSKKWGYYSSKEELDALMSSLNCKGERERVLRKQLEKYYSTICSELQKTSKDLMHRFVDESVLRRSTRVRAQPGQNPSDACLRYKNKYHKEE

SEQ ID NO: 170659 - protein, 122 aa, Glycine max
  Clone ID: PAT_MRT3847_12511C.1.pep
CISSESVYIGRETVAVRAWGIAFAQAAIVTLGAGCDLLVCAVDALSDSVSVMVDPQVHPGDDMHIRRRTATRQTSSAKSLSVNVAASPPLSRAMLAIRADGLSLTLEKGLPLGRDLGSRAAR

SEQ ID NO: 170660 - protein, 196 aa, Glycine max
  unsure (1)..(196): unsure at all Xaa locations
  Clone ID: PAT_MRT3847_125120C.1.pep
MDCASEDCSDNSQRPDSHKDQRVYFVPHRWWKDAQDSMPAEIRIRRRELXFASFPGSSYAGPMKIINNIFNSDLVFSLRREEDSQHIRENGEVGVSGRDFALVSGDMWLQALKWHSDSKNVMKDDKGFSATDSDMADVYPLQLRLSVQRETNSFGVRISKKDNAVELFKRACKMFSVDSEMLCIWDYSDQITFLMN

SEQ ID NO: 170661 - protein, 71 aa, Glycine max
  Clone ID: PAT_MRT3847_125121C.1.pep
YPQVIRMLKKSLYINHISSVFQKKKKKKKKKKKGGPPENGFPPPGFFSGAVTWGGYLSPTGSCLGPRGKQG

SEQ ID NO: 170662 - protein, 185 aa, Glycine max
  unsure (1)..(185): unsure at all Xaa locations
  Clone ID: PAT_MRT3847_125122C.1.pep
MEEARAQKLVEKSEVSPATSTTTSLPLTFLDLSLAGPVYVRRQFFYHFPHHTEIFYETTLPSLKHTLSLTLQHFFPLAGNLLCPPPPHKPFIRCTDDDTVTLTIIESKADFNHLSSNHPKNLKDLGHLVPKLTCTTMHEEDTFIFPIVALQVTVFPNNGLCIAITYCHVMDDXCCGHFMKSWSSI

SEQ ID NO: 170663 - protein, 275 aa, Glycine max
  Clone ID: PAT_MRT3847_125123C.1.pep
MANAAEVSALNRIKLHLLGELSPLATPLNYFDESNPSPSESSNSQSSSVSLNHYFTDLFEFDSKPQIIDLQTPKTLTSAQKKPQLNRKPSLLIAVPKKTEWIQFGSPDPNPVMAAPENLPQKNHYRGVRQRPWGKFAAEIRDPNKRGSRVWLGTFDTAVEAAKAYDRAAFRLRGSKAILNFPLEVSAVAETVSVAAAEGNVERKRRREEEEVVVEEVKPVVKKEKITEQDVSCFRGMPLTPSMWTGFWDSDVKDIFNVPPLSPLSPFGFSPLVAV

SEQ ID NO: 170664 - protein, 53 aa, Glycine max
  Clone ID: PAT_MRT3847_125124C.1.pep
GLKLYCLLSIFEDGSLKHLDDTYYGDIVLTEASFPKIPKNFFKSKKFYYEKSD

SEQ ID NO: 170665 - protein, 65 aa, Glycine max
  unsure (1)..(65): unsure at all Xaa locations
  Clone ID: PAT_MRT3847_125125C.1.pep
SDCFHDHNRGFHVAGXSKGRPGYSSLIPYGEPGGQAQRGGAYFELFPWGGECQKGEGHIGEMEIG

SEQ ID NO: 170666 - protein, 48 aa, Glycine max
  Clone ID: PAT_MRT3847_125126C.1.pep
SRSCVQSAIAIVHDYTWCIIIVKARIVSSIFRHYLCFAHQGNGTFVDP

SEQ ID NO: 170667 - protein, 67 aa, Glycine max
  Clone ID: PAT_MRT3847_125127C.1.pep
ARPDAEGSSVIYTHESHSIQYSSKCILERHQWELSTAIRSNRSCAHIDLLGRTFHRKHLRTYLKGLR

SEQ ID NO: 170668 - protein, 55 aa, Glycine max
  Clone ID: PAT_MRT3847_125128C.1.pep
VRIPGSTHASEYFGLGLTSIVWTFYEECKDGILPSLRFGSKILTNTVNKVYICTV

SEQ ID NO: 170669 - protein, 100 aa, Glycine max
  unsure (1)..(100): unsure at all Xaa locations
  Clone ID: PAT_MRT3847_125129C.1.pep
CIQLSLDCSQKSSSRDTLKCLCXAFSTSQSPTSSETRNCKLDKDSLYNLAEHIKNKFWCXELFDSEKGLTDILQNLRALSNDLLSMSTDNGALGVHEEKI

SEQ ID NO: 170670 - protein, 63 aa, Glycine max
  unsure (1)..(63): unsure at all Xaa locations
  Clone ID: PAT_MRT3847_12512C.1.pep
XTXXXXXXXXAXXXSHREEXEDXGMLSKSKKKQRLKRCSFLLKPQHTTSSDVASHLRNTFRLH

SEQ ID NO: 170671 - protein, 60 aa, Glycine max
  Clone ID: PAT_MRT3847_125130C.1.pep
EYVGVLINTRGVFLQIKKPHPDMGESSQVPTTNRTEVTDSAFITSFGPQEQVLHHSSFRG

SEQ ID NO: 170672 - protein, 76 aa, Glycine max
  Clone ID: PAT_MRT3847_125131C.1.pep
YIYEKQNKNSPSQCDILRHQLFGEKKSSLLHHKIQRIQIVHPIGLANLEAHNCNEIVLLLIGGDFQIQLPLYTIQL

SEQ ID NO: 170673 - protein, 68 aa, Glycine max
  Clone ID: PAT_MRT3847_125132C.1.pep
MASLKLSEVVPSSTLDSERLIMAFQGYGTDEKAVILVLGHRNAQQRKGIRETYHELYNESLIDRLNSE

SEQ ID NO: 170674 - protein, 83 aa, Glycine max
  Clone ID: PAT_MRT3847_125133C.1.pep
CIISLQIFHFSITPLSVSFILIYMFLFIYSIFRSRLLLSIPLFFFLDRIEIETLVLLLLLQFQGYVTLDWIGCLFITLRGEID

SEQ ID NO: 170675 - protein, 85 aa, Glycine max
  Clone ID: PAT_MRT3847_125134C.1.pep
PARDLSSNKLQGPIPESIFHINGLRFLQLSANEFNGTIKLVMIQRLHNLHTLGVSHNIDSIDIIVNDDHDLSSFPSMKYILLASC

SEQ ID NO: 170676 - protein, 81 aa, Glycine max
  unsure (1)..(81): unsure at all Xaa locations
  Clone ID: PAT_MRT3847_125135C.1.pep
LAEGXAXXFXQXVGGAXNXXXLVVGPRSTNRVLKLHXPYLTFHFXPFFFXLXFLPGRGTTXTSNNXXITKGWXQSXYTXXX

SEQ ID NO: 170677 - protein, 65 aa, Glycine max
  Clone ID: PAT_MRT3847_125136C.1.pep
MSSSSEYLVFSGHHPANSPAEKSTFSQTCSLLSQYIKEKGTFGDLTLGMTCTAETNGMNCILFLN

SEQ ID NO: 170678 - protein, 71 aa, Glycine max
  Clone ID: PAT_MRT3847_125137C.1.pep
IGIQLNYVEAWRGKELLRSTCRVLMARHIVGGLPSGKNEWRLILEVWRRALQKKTQTLDRVFVSLHGWGGG

SEQ ID NO: 170679 - protein, 180 aa, Glycine max
  unsure (1)..(180): unsure at all Xaa locations
  Clone ID: PAT_MRT3847_125138C.1.pep
ACENMISGTGMRPXDIVTASNGKTIEVNNTDAEGRLTLADALVYACNQGVEKIIDLATLTGACVVALGPSIAGVFTPCDDLAKEVFEASDVSGEKLWRLPLEESYWETMKSGVADMLNTGGRQGGAIVAALFLKQFVDEKVQWMHIDMAGPVWNDKKRSATGFGIATLVEWVLKNASNAN

SEQ ID NO: 170680 - protein, 204 aa, Glycine max
  unsure (1)..(204): unsure at all Xaa locations
  Clone ID: PAT_MRT3847_125139C.1.pep
VLEPTKALGQIKPXGVEVHFIVATCENMISGTSMRPGDIVTTSNGKTIEVNNTDAEGRLTXLADALVYACNQGVEKIIDLATLTGACVVALGPSIAGVFTPSDDLAKEVFEASDVSGEKLWRLPLEESYWETMKSGVADMLNTGGRQGGAIVAALFLKQFVDEKVQWMHIDMAGPVWNDKKRSATGFGIATLVEWVLKNASKAN

SEQ ID NO: 170681 - protein, 75 aa, Glycine max
  Clone ID: PAT_MRT3847_12513C.1.pep
TMTSRAKTIHSSPGSPASVSPPQSTKVTTPRTVATSIIMSTPLLLRSISSVVRTRGSSLHRRLTNVYASVGLSVL

SEQ ID NO: 170682 - protein, 73 aa, Glycine max
  unsure (1)..(73): unsure at all Xaa locations
  Clone ID: PAT_MRT3847_125140C.1.pep
KKFTLSLYIYVCVCEYDRGGGRKQNGGGPALEEESLGVRDLVLHTPDARVVVTRCGXRLSASSSNRLEHEPNS

SEQ ID NO: 170683 - protein, 210 aa, Glycine max
  unsure (1)..(210): unsure at all Xaa locations
  Clone ID: PAT_MRT3847_125141C.1.pep
MATLDSDSGLLRYLYPLLAFPHPRLNLYPFHTLRIVPFQSSSARETENPNSSDSSGSSSPSSSSTGDDATKPRAKCEDQHTRVLXGSLSYVLKLGWTEAALVAGARDVGLSPSIVGSFPRKEAALVEYFMDGCLQRLADKNDSDESLQNLTPSDCISKLIRFRLEMQAAYIITWPQALSIQAQPVYGPTSFKHRARLGDENWHAGGDKGS

SEQ ID NO: 170684 - protein, 54 aa, Glycine max
  Clone ID: PAT_MRT3847_125142C.1.pep
WSSLHRFFSFSLRNPHRGSISTTSPFPHPPLPYIFISITIKVFKIHFYKILVFS

SEQ ID NO: 170685 - protein, 138 aa, Glycine max
  Clone ID: PAT_MRT3847_125143C.1.pep
TNKILLQSVVGVDGLYSFHNIRLQDHSPQLLSTSISTSIPAPTVNKNSSVASSSVISPPSTVSLWHARLGHPNSQVMKLVFNQCNISSSNKFFSDFYASCCMGKSHRLPSHSGFKYYVSFIDAFSRYPWIFPIKTKAE

SEQ ID NO: 170686 - protein, 70 aa, Glycine max
  Clone ID: PAT_MRT3847_125144C.1.pep
GPTLANQIGGIKIEIETKLSEEVVQEPNPLLNHLLIQHRPIIPGSPQLFWRGIIVRTIVGIRAQNNFPIQ

SEQ ID NO: 170687 - protein, 76 aa, Glycine max
  Clone ID: PAT_MRT3847_125145C.1.pep
LVLETFSPSYPHPHPVHYATQTPLYPPANAAQPHHNHHDHQSPVPTPVPSPSHHNYSSTPVPAKPHNHHHHHHPIS

SEQ ID NO: 170688 - protein, 87 aa, Glycine max
  Clone ID: PAT_MRT3847_125146C.1.pep
GRSSRRAGIQPADTFLGLSFCPLVGFCSFDSQLHHIMKLTGFLQAVTLTALVLSTFTASDPDSLQDLCVADLASAEKANGFTCKDAG

SEQ ID NO: 170689 - protein, 201 aa, Glycine max
  Clone ID: PAT_MRT3847_125147C.1.pep
FLSCSESKLKRASVNHDLDESPICRYITTVLITDLVIASLLKSDGNTLATAAAQLKIFNCSNHKKIQKFSGHPGSNRCMIFTEDGKYVLSSAVGERYVAVWRIDGAKKQSASCVLAMEHPAVFLDSRCIDSGEHDEAGICVLAISEIGICYLWFGNSIEELRNAKPTKISLSLEDMPCFQFLRVLILMRKRKHFKTLWTRM

SEQ ID NO: 170690 - protein, 437 aa, Glycine max
  Clone ID: PAT_MRT3847_125148C.1.pep
MAINSSKNPDGSVQNAMPSYFYSPPLDVSAAFPQATPASTFPPCASDYFQLDNLLTAEEQAIRKKVRECMEKEIAPIMTEYWEKAKFPFHVIPKLGALRIAGGTIKDYGCPGLSITGSAIAVAEVARVDASCSTFILVHSSLAMLTIALCGSEAQKQKYLPSLAQLQTVACWALTEPDYGSDASALKTTATKVEGGWILEGQKRWIGNSTFADVLVVFARNASTNQINGFIIKKDAPGLTVTKIENKIGLRIVQNGDIVMRKVFVPDEDRIAGVNSFQDTNKVLAVSRVMVAWQPIGISMGIYDMCHRYLKERKQFGAPLAAFQISQQKLVQMLGNIQAMILVGWRLCKLYESGKMTPGQASLGKSWITLRARETAALGRELLGGNGILADFLVAKAFCDLEPIYTYEGTYDINTLVTGREVTGFASFKPVAQRSRL

SEQ ID NO: 170691 - protein, 124 aa, Glycine max
  Clone ID: PAT_MRT3847_125149C.1.pep
KQFGAPLAAFQISQQKLVQMLGNIQAMILVGWRLCKLYESGKMTPGQASLGKSWITLRARETAALGRELLGGNGILADFLVAKAFCDLEPIYTYEGTYDINTLVTGREVTGFASFKPVAQRSRL

SEQ ID NO: 170692 - protein, 79 aa, Glycine max
  unsure (1)..(79): unsure at all Xaa locations
  Clone ID: PAT_MRT3847_12514C.1.pep
VVNAADSSMFGQDGRLIXTSKPLSGNGNETWNEKGYAVRMSTCNPXRGTMKINDGAYLTLKMIYSNNECRIGVMKIFYI

SEQ ID NO: 170693 - protein, 314 aa, Glycine max
  Clone ID: PAT_MRT3847_125150C.1.pep
EKGVVVSSSAGNEGPDLGTLHNGIPWLLTVAAGTIDRTFGTLILGNGQTIIGWTLFPANALVENLPLIYNKNISACNSVKLLSKVAKQGIILCDSESDPELKMNQRSFVDEASLLGAVFISDQPLLNEEGHVSSPTIVISSQDASSVIKYAKSHKKPTTTIKFQRTFVGIKPAPAVTIYFSRGPSASYHGVLKPDIMAPSSNVLAAYVPTELVATIGNKVMLSSGYNLLSGTSMACPHASGVAALLKAAHTKWSAAAIRSALVTTASPLDNTQNPIRDYGYPSQYASPLAIGAGQIDPNKAFFVILLCFQFSDT

SEQ ID NO: 170694 - protein, 79 aa, Glycine max
  Clone ID: PAT_MRT3847_125151C.1.pep
GFSFRSSFFLMVFPGVLFFFRVPALGFFFKALVRDIFSVSRCSVWALPPPSVYPGCLVSPPTLVWCLSAVRVRLCLFFK

SEQ ID NO: 170695 - protein, 51 aa, Glycine max
  Clone ID: PAT_MRT3847_125152C.1.pep
GFTCQDAGKRRSVNWIEMTLEKGYDVACMVKSAFIVKGARCQGVYSGKRLR

SEQ ID NO: 170696 - protein, 42 aa, Glycine max
  Clone ID: PAT_MRT3847_125153C.1.pep
KENDNSFVVVVIFVRGIVYKGVRNYSKSSTVGVESIENLGVL

SEQ ID NO: 170697 - protein, 84 aa, Glycine max
  unsure (1)..(84): unsure at all Xaa locations
  Clone ID: PAT_MRT3847_125154C.1.pep
MLSLCACRQTFVQILQGNAIFFHIESXAPLGIVKSKNQCKRGIPPFLQRVNFAGHPISEXCHLFPYNIHTESTLLHVLRIRGGF

SEQ ID NO: 170698 - protein, 46 aa, Glycine max
  Clone ID: PAT_MRT3847_125155C.1.pep
QRDAPQGRRQRPTPLFYISIIINEKRKKDKTFAYMDSESSRKEEKA

SEQ ID NO: 170699 - protein, 112 aa, Glycine max
  Clone ID: PAT_MRT3847_125156C.1.pep
NGEKNKAIGAIKRLNSTVPVWEGNSAHLVKNKHLIISQNLVHSPALDPLYMVRESLKSARLSLLGFKNRSDHCIVDICFEDFSTMSRTHISTPSHSIIHSLNYIYTRLDSLL

SEQ ID NO: 170700 - protein, 111 aa, Glycine max
  unsure (1)..(111): unsure at all Xaa locations
  Clone ID: PAT_MRT3847_125157C.1.pep
RAARPGVWEYLRVFVHALAVEELQPAEYLHLKEELGDXRSNGNFXIELDLVPYKEGFHSPTINKSTGNGVQSLNQYLYVQLFHNKESLHPLLEFLRLYSXKGKTSHLNDRS

SEQ ID NO: 170701 - protein, 84 aa, Glycine max
  Clone ID: PAT_MRT3847_125158C.1.pep
DVEESHCMDDQTALIPITPIEEEEAAAKALMDSLKPFDVSQSLQLAPGILKDSNSATINHILNNPEVIVKLVRDYRAANNSQYV

SEQ ID NO: 170702 - protein, 304 aa, Glycine max
  Clone ID: PAT_MRT3847_125159C.1.pep
MSAYAHQMEQQYSAPSLSDDSETGSHYELESGFFMKSFTATIFVASLVTLGVLLITLVISLVIMLQSCQSKSAGGVIELLNINEYYSYCRVYSLHAELNNLEGYNLPRICRDLAVHYIKVGQYARDLDLTMSLIDDYFKSVRPAEDGLDVVLMDIDDIFPRNSDSFNLFHRFYNDSTSNCIKEAKNVKLMFVSRLYMYLQTGGWSIILLSREPRTHRNVTINHLDSAGLRSWSALMMRAEDSDPTKGYEYFSRQRNVIRKKGFRIKSIISSHMDAVTVPETEVRNYLLPGHLCDKFEKQVEHRS

SEQ ID NO: 170703 - protein, 63 aa, Glycine max
  Clone ID: PAT_MRT3847_12515C.1.pep
SILIFSDIHFWEVLIKGVQNSNALPEKTCISIGLHMGRFGLNFQSIWNVLQNLFCNCLGSILI

SEQ ID NO: 170704 - protein, 95 aa, Glycine max
  Clone ID: PAT_MRT3847_125160C.1.pep
MSKISNWSSVSSSDLIDAKLEEHQLCGSKQCPGCGHKFEGKPDWLGLPAEVKFDPTDQELIEHLEAKVEAKNMKSHPLIDEFIPTIEGEDGICYT

SEQ ID NO: 170705 - protein, 106 aa, Glycine max
  unsure (1)..(106): unsure at all Xaa locations
  Clone ID: PAT_MRT3847_125161C.1.pep
RAQGYNSLVVVYGEGVGRVLGLQGATCLRSTYKSQAQNGPREVVGCLVKRAVVMGAEVPAYCTEITRTRGQKARCRRGYXYAGLCPQADYLCDGFGMYYEVLLMGA

SEQ ID NO: 170706 - protein, 86 aa, Glycine max
  unsure (1)..(86): unsure at all Xaa locations
  Clone ID: PAT_MRT3847_125162C.1.pep
SLVALMLVEDDRFNYDLWDLPGAATYRQKAWSLFPPRDRPYPSGSGLILSRGTGICKATGADNPIDHPIPDGXIKKAQVLYGGKAP

SEQ ID NO: 170707 - protein, 73 aa, Glycine max
  unsure (1)..(73): unsure at all Xaa locations
  Clone ID: PAT_MRT3847_125163C.1.pep
YCIHNHFACTVTYRRQTLSESARIMGIEDKAFSVXHEFDGKWDVNSIRLSNWDPHAIHTVVKSNSPQDVVDSR

SEQ ID NO: 170708 - protein, 57 aa, Glycine max
  Clone ID: PAT_MRT3847_125164C.1.pep
KIYFDEEPSICKPSSFFNRIHVFLKEYLFLNHYQFALKLSTKARIKIVSGPVNSSPL

SEQ ID NO: 170709 - protein, 64 aa, Glycine max
  Clone ID: PAT_MRT3847_125165C.1.pep
FSFFCLSFNTHIYSGGRSKLLQNLLDLSSSTTTMADNDQFQASGNWWETARSVRYESGASQSIF

SEQ ID NO: 170710 - protein, 53 aa, Glycine max
  Clone ID: PAT_MRT3847_125166C.1.pep
WTFFFLRLVLPSSLRRGWTYHHRIRHTSIHGHYGHLHVHEAPLTLTWATLDLL

SEQ ID NO: 170711 - protein, 396 aa, Glycine max
  Clone ID: PAT_MRT3847_125167C.1.pep
MNKKALSILMRARMKPNDRTSLSLSPIPLTNATSQMQQQNSRQNGSPGDGNSAPNDSGNSEREFKRVRASMHSAISMSKTEVLDDVLNNFSEGYLNLSHENRRKLLLVLAREYDLNRSQVRELIKQYLGLEHPADKAQVSGSEDEGLFSSFYRIERNLRHALQPVYEVLFERLNTHPGGLRTLSILREDILSILAEENIASLRALDSYLMEKFITWLSPAALELHQITWDDPASLLEKIVAYEAVHPISNLLDLKRRLGIGRRCFGYLHPAIPGEPLIFIEVALLKDVAQTIQEVLWDNPPIPEGEATCALFYSISSTQPGLAGINLGKFLIKRVVTQVKREMPHISTFATLSPIPGFISWLLSKLASQRLLAEGDNLSQPQAEGSISTFYDNILK

SEQ ID NO: 170712 - protein, 140 aa, Glycine max
  Clone ID: PAT_MRT3847_125168C.1.pep
LKDCDLFTEELGTPCRYLANLKEELPLELVAKSFPITPFEAVGSSSTPPSTLFELPLDSTVARARLKFAKEKESRETELLGRVLATSSTGVSVSQTLTPSSTSNWPSSSSALLFINSESGALFSKTSMWLFSKELESTKL

SEQ ID NO: 170713 - protein, 387 aa, Glycine max
  Clone ID: PAT_MRT3847_125169C.1.pep
VLQAPSSSPYFSIQTSKAPQRTWGLLPSSVIVNSSLFSTLHFSLHSQRDQHLLWTPHKRVTTRAASVEVGDSSVSTGTAEDDVLKALSQIIDPDFGTDIVTCGFVKDLLIDKALREVSFRLELTTPACPIKDVFEQKANEVVAMLPWVKNVKVTMSAQPARPIYAEQLPAGLQTISNIVAVSSCKGGVGKSTVAVNLAYTLADMGARVGIFDADVYGPSLPTMVSPENRLLVMNPEKKTIIPTEYLGVKLISFGFAGQGRAIMRGPMVSGVINQLLTTTEWGELDYLIIDMPPGTGDIQLTLCQVVPLTAAVIVTTPQKLSFIDVAKGVRMFSKLKVPCVAVVENMCHFDADGKRYYPFGRGSGSQVVQQFGIPHLFDLPIRPTWNA

SEQ ID NO: 170714 - protein, 258 aa, Glycine max
  Clone ID: PAT_MRT3847_12516C.1.pep
MLKQEVSTEKKYTAEPNIMDAGLSQVSSRNPPPTANVVGKEQLAQLTNLSASLAHILGTGQQLPQLYAALNSHDAKDISSLAKTEVPAMPSNTGRQNCGDSSKAAGSEELVKGDPLIQLQPGQNTGVNKDNNKEMLPEETLKSKDDPKSTKESGPFENMEQTDGPDEAKKIKGMKGNRAFKFALVEFVKELLKPTWKDGQITKEDYKTIVKKVVDKVTGSMQGVNIPQTQEKIDHYLSFSKPKLNKLVQAYVEKIHLA

SEQ ID NO: 170715 - protein, 426 aa, Glycine max
  Clone ID: PAT_MRT3847_125170C.1.pep
MGCRLLHVLKWRWFRVELTILACLFKDVLEQNESGGGEMLPCDKNKKVNMSAQPARPIYAEQLPAGLQTISNIVAVSSCKGGVGKSTVAVNLAYTLADMGARVGIFDADVYGPSLPTMVSPENRLLVMNPEKKTIIPTEYLGVKLISFGFAGQGRAIMRGPMVSGVIDQLLTTTEWGELDYLIIDMPPGTGDIQLTLCQVVPLTAAVIVTTPQKLSFIDVAKGVRMFSKLKVPCVAVVENMCHFDADGKRYYPFGRGSGSQVVQQFGIPHLFDLPIRPTLSASGDSGMPEVVADPQGEVSKIFQNLGVCVVQQCAKIRQQVSTAVTYDKSIKAIKVKVPDSKEEFFLHPATVRRNDRSAQSVDEWTGEQKLQYSDIPEDIEPEEIRPMGNYAVSITWPDGFSQIAPYDQLQMIERLVDVFEPSVQA

SEQ ID NO: 170716 - protein, 48 aa, Glycine max
  Clone ID: PAT_MRT3847_125171C.1.pep
GSCNLYAVMNSYGIRSLVSPIMVPALPQKKKKKKKKSARSIGDPRTRA

SEQ ID NO: 170717 - protein, 83 aa, Glycine max
  Clone ID: PAT_MRT3847_125172C.1.pep
SLGWRDKNKGKQNGTDESTNGKLSNSTDQWVETPKKDDSPKEGEQLVRTPDRDNELRLGTPRMDSEVPSVEMAANSTNGLEDQ

SEQ ID NO: 170718 - protein, 60 aa, Glycine max
  Clone ID: PAT_MRT3847_125173C.1.pep
FYHISSAESPRGSHALTKGTFCDPTLFGSPPIWGKARDPLSLTAPGLSCLSGSLIKDPSL

SEQ ID NO: 170719 - protein, 103 aa, Glycine max
  Clone ID: PAT_MRT3847_125174C.1.pep
GYHSTNFVKMQAIYKVSFKRIIVTIASVIHAISSSLSISAGFLAKKDRAAAPLLVGGSCCSPGLSFLETPRWRRFQYRCHYPFSYARYINNAFPVNCLFSQVL

SEQ ID NO: 170720 - protein, 88 aa, Glycine max
  Clone ID: PAT_MRT3847_125175C.1.pep
KLMLGLVQTQSMLGFSLCAPRILFVHPAYFEILKISLVISSSSFCLLQSFIMLLSFHSLIHSCKRRGPLLLCQLWSRVQVLRWFVDKW

SEQ ID NO: 170721 - protein, 42 aa, Glycine max
  unsure (1)..(42): unsure at all Xaa locations
  Clone ID: PAT_MRT3847_125176C.1.pep
RCAIXLAQPANHIILSMLXDXXYXMXXSXHXCXRXAXXIXXK

SEQ ID NO: 170722 - protein, 253 aa, Glycine max
  Clone ID: PAT_MRT3847_125177C.1.pep
LIELYAKCSSIDNANKVFKGMRHKDVVTWSSIIAAYGFHGQGEEALKLFYQMSNHSDVKPNDVTFVSILSACSHAGLIEEGIKMFHVMVNEYQLMPNIEHYGIMVDLLGRMGELDKALDMINNMPMQAGPHVWGALLGACRIHQNIKIGELAALNLFLLDPNHAGYYTLLSNIYCVDKNWHDAAKLRTLIKENRLKKIVGQSMVEIKNEVHSFIASDRFHGESDQIYEMLRKLDARMREEGYDPDLQTQEIQF

SEQ ID NO: 170723 - protein, 116 aa, Glycine max
  Clone ID: PAT_MRT3847_125178C.1.pep
LPFYLVLFLWFIHLSLMPLAVLNPTVSGMPYPSDQFQTIIANSRDMNPNLSHRSPRIRMMTNRPMSTKRCQRIPPLFIRLSLSPNHAAATALNGSGPKTNPRATLDARDAGSSAEH

SEQ ID NO: 170724 - protein, 106 aa, Glycine max
  Clone ID: PAT_MRT3847_125179C.1.pep
CTHQENAPMECDNEGTKLIIKSKSARTIELYETMTNNTEDTKYQALSSLPNLQPILYSSEEMIKQWLPSMAVVKNKGLNSKSNKVKGFMVLETYRITLQYKFKRTT

SEQ ID NO: 170725 - protein, 51 aa, Glycine max
  Clone ID: PAT_MRT3847_12517C.1.pep
MAGIGIQPYHQQWAPAAASPPPSYAASGGPRPHPVDDVPGILIPGLPEELK

SEQ ID NO: 170726 - protein, 68 aa, Glycine max
  Clone ID: PAT_MRT3847_125180C.1.pep
SRSISREVESSKTILVDQLRIHDIYGVPLFHQQFIFAGERLEDWATRSDYNIHKDLILQHVLSRRVGM

SEQ ID NO: 170727 - protein, 71 aa, Glycine max
  unsure (1)..(71): unsure at all Xaa locations
  Clone ID: PAT_MRT3847_125181C.1.pep
RGRAGHEGSLEYDACTIPNACGSXDDAKDEKHTQICGCHAAVSIGRLGYASVTPXRDPVAHAQSAAEAFDV

SEQ ID NO: 170728 - protein, 47 aa, Glycine max
  Clone ID: PAT_MRT3847_125182C.1.pep
FLYMPYKQTITSYTFTIHKDLTGFISKFALNPSENHWKILQILGHVY

SEQ ID NO: 170729 - protein, 37 aa, Glycine max
  Clone ID: PAT_MRT3847_125183C.1.pep
VNHSELTRVIADGQPPLSVNAQRQLMPSPWLSAPCRA

SEQ ID NO: 170730 - protein, 61 aa, Glycine max
  Clone ID: PAT_MRT3847_125184C.1.pep
MMVTLHRNNEPIPSSHCSVVTHYGWMHKRPRSADVQRQSYIPHLSPKQMTTLCVNEQACMH

SEQ ID NO: 170731 - protein, 80 aa, Glycine max
  Clone ID: PAT_MRT3847_125185C.1.pep
KQGVHQQNWSFMLFLSAFAGRQLHTACLFTVVTADPRVFLFSSHRSGEGVPPCSRYDRPGSLFTVTSMHVMACLIVGAST

SEQ ID NO: 170732 - protein, 114 aa, Glycine max
  Clone ID: PAT_MRT3847_125186C.1.pep
NLLPSLHIYEETHTHQCSRCPWHRPHGWHIRLSTVIVTCLDDHRQCLYHHETDHVTDHSTPVVTMSVLDHMVTQQPLKRQKSCGEGTTAKCNAHGAAYLLLIERTRLLILHRLM

SEQ ID NO: 170733 - protein, 44 aa, Glycine max
  Clone ID: PAT_MRT3847_125187C.1.pep
NLHSSDFLGTNFTIYDSQPPHSGAKPSSGRASRRFASKQISPQV

SEQ ID NO: 170734 - protein, 90 aa, Glycine max
  Clone ID: PAT_MRT3847_125188C.1.pep
GGRTSDLLVDFYEKCRFCPTHWYKISKHGLHRIEQKSAWRIYSLRLVPLAGVYGLWKHVFILDRREIRRYLQMSYALEFPKSFKYVPLTV

SEQ ID NO: 170735 - protein, 77 aa, Glycine max
  Clone ID: PAT_MRT3847_125189C.1.pep
IFGKPSRSTQKFSSRFIMFCESRSRTIHKHLQLYIIRLGRHQIIVIPSENTLKTLSKYSMISIQITNLIIKALSINN

SEQ ID NO: 170736 - protein, 59 aa, Glycine max
  Clone ID: PAT_MRT3847_12518C.1.pep
SAPLSLFFFYKIQCAPITTISQFPIYLNQNQNLIWGSPIRGQSFRLFGIRSYLFHSSDM

SEQ ID NO: 170737 - protein, 100 aa, Glycine max
  Clone ID: PAT_MRT3847_125190C.1.pep
LPRVITHQLLLKIVVTNNTSKLIQQILTITITPICSSIAFHSLTMSSIEMVSASAIKLPYQILRHEPCSDDERDQRVILRPKKWCRPRGVPLRRRFRVKV

SEQ ID NO: 170738 - protein, 55 aa, Glycine max
  Clone ID: PAT_MRT3847_125191C.1.pep
NEAPAQISHINARKSGTFWLEGEVLLNSITHSHIHQRISDQIYCTALLLLLQGLR

SEQ ID NO: 170739 - protein, 86 aa, Glycine max
  Clone ID: PAT_MRT3847_125192C.1.pep
GFKGVPIGKDGMPAGTGPGLNFGVAGSIGGGRRFFFCLRLKFFFFFFFFCFFGVFFFFFFEQKVYDCHIRQPNIYQRTGKLSKKRI

SEQ ID NO: 170740 - protein, 57 aa, Glycine max
  Clone ID: PAT_MRT3847_125193C.1.pep
SLYASESSPEPSAEHNLGVLLVHCFYFYGSKLNTSDVGMSCNGTGTFLCRVVKGTRE

SEQ ID NO: 170741 - protein, 116 aa, Glycine max
  unsure (1)..(116): unsure at all Xaa locations
  Clone ID: PAT_MRT3847_125194C.1.pep
PSRLTTPHKPGQXGEIQAKXPPKXPQEEXTTARPTQARPTTTQTAEGRPQXKAKAHDTPXPTRPGETATGDKPTPXNNKRAHGPKPGTPGTRHKGTNPQAKPQQTERKQKATPRTP

SEQ ID NO: 170742 - protein, 88 aa, Glycine max
  unsure (1)..(88): unsure at all Xaa locations
  Clone ID: PAT_MRT3847_125195C.1.pep
XKRMAKSLRXXREKRLRXXRREIVEPFYXKKXXXKLXAQEAALAAPXLXVXSKXNXXMEAXXSTDXTNMDVXVAXGSQSMASLXPVXG

SEQ ID NO: 170743 - protein, 97 aa, Glycine max
  Clone ID: PAT_MRT3847_125196C.1.pep
PSQKSLKNRKMPLRTNILKTAQKGPHPKALGDTNNFFKKISQKWVIKNTTKNNGGEIGPISRKYPRLGIIKNPKKKGAQFLSPKIRTFCWAKNFFPQ

SEQ ID NO: 170744 - protein, 90 aa, Glycine max
  Clone ID: PAT_MRT3847_125197C.1.pep
SLIPFFRIQVSFRGQKIGDRVWWKRRGSCIGIDLGTTTLLAVATRSVEYTTPGTDYPSTWLTDTTVSRCGDRSLEPITCFDASVDGDVFV

SEQ ID NO: 170745 - protein, 82 aa, Glycine max
  unsure (1)..(82): unsure at all Xaa locations
  Clone ID: PAT_MRT3847_125198C.1.pep
GVSSAPAAVAGTSGLPSSTSRGEPTGHMRXLKYAEFEGFEGGLFSSAEYAADEHAAYAVIGSHWSEDGFAEELYAGREVDSR

SEQ ID NO: 170746 - protein, 138 aa, Glycine max
  unsure (1)..(138): unsure at all Xaa locations
  Clone ID: PAT_MRT3847_125199C.1.pep
APLKLHKRLAASVIKRGRGKAWLDTNEDNDISMANSRENXRKLEKDGGIXHVFFKSHSNSRARRSNDAKTKGRRSGYGKRKGTREARFPTKIRRMRRMRVIMRLLRTHREAKKNDRHKSSDIVHEGGKVLFAKNKKSL

SEQ ID NO: 170747 - protein, 49 aa, Glycine max
  Clone ID: PAT_MRT3847_12519C.1.pep
LFKRTMVLQLHTYMVIHDIPKAKTTWIVNCLGLCSDVLGESLLTIPTCY

SEQ ID NO: 170748 - protein, 61 aa, Glycine max
  Clone ID: PAT_MRT3847_1251C.1.pep
LSSFGHIAFLVFAFGFDDDASSLCNCVTMFFCCFTFFLNFLFHLSHLVLLSRRNHTTKFVY

SEQ ID NO: 170749 - protein, 50 aa, Glycine max
  Clone ID: PAT_MRT3847_125200C.1.pep
HVPSQSTYLKCKLQSHKMCLTLVVQVKDFLIVACGVTLRPNISLNARSGY

SEQ ID NO: 170750 - protein, 55 aa, Glycine max
  Clone ID: PAT_MRT3847_125201C.1.pep
FSFPLSAYFETTEREIVSGVINNVFKSSFVWRELLSCAKQNKGSCSLCMRTCLIL

SEQ ID NO: 170751 - protein, 124 aa, Glycine max
  unsure (1)..(124): unsure at all Xaa locations
  Clone ID: PAT_MRT3847_125202C.1.pep
DIFYITLFVSIGLLVVIRKKSMEENLLVLAKGSGEEQKVAWEGLGEEMKRMIDIAGPMVVVTASQRLLQVVSVMMVGHLNDDLFLSSAAXAISLTAVTGFSFLMGMASGLETIWELAYELINIK

SEQ ID NO: 170752 - protein, 465 aa, Glycine max
  unsure (1)..(465): unsure at all Xaa locations
  Clone ID: PAT_MRT3847_125203C.1.pep
FRRELGLSHPNSFARRFSASEVLVKSLDLYGKLDGHEGCVNAVEFNSTGDILVSGSDDRQIMFWNWESKTKLFAYPSGHTDNIFXQTKIMPFTDDCRIVTSAGDGQVRLGLLWEDGRVDTTMLGKHHGCVYKLAVEPGSAHIFYSSGEDGFIQHFDLRSNSATKLFCCSSSIGNNKQTLSKVGLNSIVIDSRNPYYFAIGGSDEYARVYDIRKCQWGSARNSDRPVNTFCPCHLIGSNNVHITGLAYSSFSELLVSYNDELIYLFEKNVHSDSSPSSATSEDPKNIHEAQVYSGHRNAQTIKGVNFFGPNDEYIMSGSDCGHIFIWKKKEAKLVRLMVGDQHVVNQLEAHPHIPILATCGIEKNVKIWAPLGNDIPPLPANVKEIMETNRQGREDRSRVTLTPDVIMHVLRLQRRQTLAYIERRHNRADIVSDEEDAEGYLLGFSDGDASSEEDSPGNSRDCNIS

SEQ ID NO: 170753 - protein, 159 aa, Glycine max
  Clone ID: PAT_MRT3847_125204C.1.pep
SVCLSLLHWKLIFPLQIRLGLLWEDGRVDTTMLGKHHGCVYKLAVEPGSAHIFYSSGEDGFIQHFDLRSNSATKLFCCSSSIGNNKQTLSKVGLNSIVIDCRNPYYFAIGGSDEYARVYDMRKCQWDSARNSDRPVNTFCPRHLICSNNVHITGLAYSS

SEQ ID NO: 170754 - protein, 129 aa, Glycine max
  unsure (1)..(129): unsure at all Xaa locations
  Clone ID: PAT_MRT3847_125205C.1.pep
YWDRPRVLGVLAMSRAIXDNYLKPYVISEPEVTVTERSDKDECLILGSDGLWDTVQNDTACKVVRMCLNAQKPASPVKEMAVDCSDKSCSDASILLTKLALVRQSSDNVSVVVVDLWRDQSMATTKGIN

SEQ ID NO: 170755 - protein, 129 aa, Glycine max
  unsure (1)..(129): unsure at all Xaa locations
  Clone ID: PAT_MRT3847_125206C.1.pep
VGPKFSKEIIVPPFAWRRVVSPANNFGISPPGRFASLAYFGPYQRERLPANLGQGPRDYFGAHTYERVAIKGFSPTEWFKLAQQFKXLDSCFXTHQDFPNKSNVFCSTCLLSWVYKTPPWGSFFFIFSP

SEQ ID NO: 170756 - protein, 250 aa, Glycine max
  Clone ID: PAT_MRT3847_125207C.1.pep
MASTCTPSTLILLTLTTFLIAQAQAQAPAPSPSGAVNLTAILEKGGQYTTLMKLLKDTQQLTQIESQLKSNSQGFTLFAPTDNAFQSLKPGALNKLSDDQKVKLILFHVTPKYYTISDLLTVSNPVRTQATEKEGTWGLNFTGQGGNQVNISTGVVQTQLNNPLREKFPLAVYQVDKVLLPLELFGTTKTRASSAAPSPKGSKSTPEIPSVGKAGSAPSDSPKDTNAANGMNVGFGLVLGLGFICMGALS

SEQ ID NO: 170757 - protein, 47 aa, Glycine max
  Clone ID: PAT_MRT3847_125208C.1.pep
DVGGLLSTSPIGNYGLYTYAQKTLPPRKKKPASKNRMKKERLKQGVS

SEQ ID NO: 170758 - protein, 272 aa, Glycine max
  unsure (1)..(272): unsure at all Xaa locations
  Clone ID: PAT_MRT3847_125209C.1.pep
MRKRERENPCGVCGHYHKYEEGEVCSICGHRIPVGSEKTSIQVSAFPSVVLPEFLYLGSYDNASRSAAIRRQGISRILNTVPSCQNLYKNSFTYHCLPDDKTLPFDEAIQFLEQCEKDKERVLVHCMSGKSRSPAIVIAYLMKSKGWRLVHSYQWVKERRPSVELTQGVYQQLQEFEERIYGPIDSGSSLVPGFXACSTSSISFGFPKINDPAQLPSFSTAGTPSIFARAPLDIAPTEFTFGAGQTQKNVAGNPYNANPANPNGTDIQMDGS

SEQ ID NO: 170759 - protein, 94 aa, Glycine max
  unsure (1)..(94): unsure at all Xaa locations
  Clone ID: PAT_MRT3847_12520C.1.pep
TSXXXLQXXXXXXXTXFFXLXFFXXXFXXFXLXXHLXXXXPLSPLSXHPXXTSXXLLXXPXXXXIHXXXPXXXLSXXYXSXXXLXXXXLXXXTX

SEQ ID NO: 170760 - protein, 113 aa, Glycine max
  Clone ID: PAT_MRT3847_125210C.1.pep
IPIYLVLSCLPKQHSGTRFAELRRDKLCGTPTLATVKTTPTTHIFSSISDLKKKKKTQSSNGVNRLRRQPHRAPLCDGTEVGVRCEAAGRGRWESGLPSPKLQCREVGYDGRF

SEQ ID NO: 170761 - protein, 135 aa, Glycine max
  unsure (1)..(135): unsure at all Xaa locations
  Clone ID: PAT_MRT3847_125211C.1.pep
QTKLVCQWIKELXMSNGYSSNLTICANVDKGTVHGMKIHDCHVFMECLLPIVFGLFSPHVLNLLIEIIHLFKYLCSTTLMKDDLSRMEQNIPLILCKLEKIFPLGFFDLMEHLPIHFAYEARLGGPVRHRWMYPF

SEQ ID NO: 170762 - protein, 52 aa, Glycine max
  Clone ID: PAT_MRT3847_125212C.1.pep
ILRYQRGKNVFKKILQQTFGRSGGQTIEDGHYLSVDPRRRAKMNGACEQQKL

SEQ ID NO: 170763 - protein, 74 aa, Glycine max
  Clone ID: PAT_MRT3847_125213C.1.pep
VVLFLQAKDYHLLTQPHHKGETRKSNNRQKARNHRKNTPGDDHSRLTKPPMRSTGGPIDITTIPRSSSRRTGRA

SEQ ID NO: 170764 - protein, 65 aa, Glycine max
  Clone ID: PAT_MRT3847_125214C.1.pep
EEKHHRGSASLIKQHRGLRRCRRAHMEKRSEDVMKPPSPAWTMMEATNLGMRVVGAERKSAERVG

SEQ ID NO: 170765 - protein, 90 aa, Glycine max
  unsure (1)..(90): unsure at all Xaa locations
  Clone ID: PAT_MRT3847_125215C.1.pep
GSNFLLCHTVPYMLIIFSTIFIKVTFDFSVIMKKVHLSESCDISNYGTYDRLAQNNIILILQXKVLKKYSHAGLHYFFKKNWCICTSXIV

SEQ ID NO: 170766 - protein, 292 aa, Glycine max
  unsure (1)..(292): unsure at all Xaa locations
  Clone ID: PAT_MRT3847_125216C.1.pep
MASRPEVVAPPEIFYDDAEARKYTSSSRIVQIQATLSERALELLALPDDSVPKLLLDIGCGSGLSGETLSENGHHWIGLDISASMLNVAVEREVEGXDFYFGDMGQGSRNSLLELLDGAISISAVQWLCNADXSSHNPRLKLKAFFTSLYKCLSNGARAVFQVYPENIDRRELILNAAMHAGFAGGIVVDYPHSSKKRKEFLVFTCSQRSVNVSIYKGKNEDRESCSDEDSEDEEKQTVCISDRHRPRKKQKNNKSGKGKEWLLRKKEQMRRRGNVVPPNTKYTGRKRKDRF

SEQ ID NO: 170767 - protein, 74 aa, Glycine max
  unsure (1)..(74): unsure at all Xaa locations
  Clone ID: PAT_MRT3847_125217C.1.pep
XYSSXVPRXQHSRLERTRHRNPXFPXXXEIYQYVRXQCXRXADXXIXXNGXXXXXLXXXCXXXXXXVYHGXXXN

SEQ ID NO: 170768 - protein, 122 aa, Glycine max
  unsure (1)..(122): unsure at all Xaa locations
  Clone ID: PAT_MRT3847_125218C.1.pep
LASYESLDFFHRFGFVLGVTHITXGSIAVALAMIKIYSWRTWGNEAKTIAVQSIQAXILDKVHXLRRLNTFAFHHTCHPWSHHKILAWLELSMQSFLSGIFSLSIIYLEMHEILGLLMGYYY

SEQ ID NO: 170769 - protein, 128 aa, Glycine max
  unsure (1)..(128): unsure at all Xaa locations
  Clone ID: PAT_MRT3847_125219C.1.pep
KRGITYYDIFKNTWLYIRDMTANRKXPHSHTLXGMSTYTDITSREIXKELLQPPKDVSQNTKRGKYKLKRNNMISDHPTCXWDRKKKSVINQTKYQRGLXSCRARYAAAAITAAHATASRPLVTLSQQ

SEQ ID NO: 170770 - protein, 61 aa, Glycine max
  Clone ID: PAT_MRT3847_12521C.1.pep
ISQVSAIIRSNIGRHHLINLRYETLYYKYQCPSFSMHSFFLFTAYIFFYRFLLTLIILSHI

SEQ ID NO: 170771 - protein, 45 aa, Glycine max
  Clone ID: PAT_MRT3847_125220C.1.pep
GPISCSDTFQGPNPAFSKKFYLPRILVCPTQLAFGACDLLAKFSL

SEQ ID NO: 170772 - protein, 60 aa, Glycine max
  Clone ID: PAT_MRT3847_125221C.1.pep
EKVQELSVYEINERDRGSPVYLRLSYKSVNSLGDLVPFSNKLYTGDLQKRIGITSGICIL

SEQ ID NO: 170773 - protein, 76 aa, Glycine max
  unsure (1)..(76): unsure at all Xaa locations
  Clone ID: PAT_MRT3847_125222C.1.pep
SAQKTCFPLQITXEDLELHCEKISEEHAQSLVMVENEKNDKSSRTMDLKRSLEEREDSYQKLNEEYKQIDSLFKEC

SEQ ID NO: 170774 - protein, 100 aa, Glycine max
  unsure (1)..(100): unsure at all Xaa locations
  Clone ID: PAT_MRT3847_125223C.1.pep
MQNFRVRSLFFLVTLXKCLFFVNSNDDIFFLPGKLLDVDXGGGTVTDQNFNSKRGMGFLTNPGDGAFGGLRNATGVFYMAASYVKFGESGGARVIPLIYI

SEQ ID NO: 170775 - protein, 97 aa, Glycine max
  unsure (1)..(97): unsure at all Xaa locations
  Clone ID: PAT_MRT3847_125224C.1.pep
GRPFFFFFFFFFFFFFFFFFFFLFFFFFWXXXGXXLGSXPXVXXLXXXLLXXLVCLFVSLPLPVCFLGGLGFLGVCLPRFYWGCLLPRPRSGSLWSP

SEQ ID NO: 170776 - protein, 438 aa, Glycine max
  Clone ID: PAT_MRT3847_125225C.1.pep
MPKSQFRTPFLVSFSLLLFIFNLTPSYALYGASTPVLQLTPSNFKSKVLNSNGVVLVEFFAPWCGHCQALTPIWEKAATVLKGVVTVAAIDADAHPSLAQEYGIRGFPTIKVFAPGKPPVDYQGARDVKPIAEFALQQVKALLKDRLSGKATGGSSEKTETSSSVELNSGNFDELVIKSKELWIVEFFAPWCGHCKKLAPEWKKASNNLKGKVKLGHVDCDAEKSLMSRFKVQGFPTILVFGADKDSPIPYEGARTASAIESFALEQLETNIAPPEVTELYSPDVLEEKCGSAAICFVAFLPDILDSKAEGRNRYLQQLLSVAEKFKRSPYSYVWVAAGKQPDLEKNVGVGGYGYPALVALNLKKAVYAPLKSAFELDQIIEFVKEAGRGGKGNLPIEGTPTIVKTEPWDGKDGEIIEEDEFSLEELMGEDASSKDEL

SEQ ID NO: 170777 - protein, 77 aa, Glycine max
  Clone ID: PAT_MRT3847_125226C.1.pep
FVEKNGPQSGPFCWSPHARQDWLHCFCQKPSIFQDPHFGGGFPKKSFYFFLNLFLISLFCSPRFDFLDLFNFNCSFL

SEQ ID NO: 170778 - protein, 61 aa, Glycine max
  Clone ID: PAT_MRT3847_125227C.1.pep
SILKARPCSYSFCTLSRSGGSSLSSSTSGLSLSLCLSSTLLKVFGEFYTSIFCNFLFICFL

SEQ ID NO: 170779 - protein, 90 aa, Glycine max
  Clone ID: PAT_MRT3847_125228C.1.pep
RSLPRHPRLFFLCFRLVCCLFLSANIFLPQAAAMSFLAPSWISAPSREGWFACRLGPGFPGRPPRAVDVIKMVFYVSPYVNETPPPVCMT

SEQ ID NO: 170780 - protein, 80 aa, Glycine max
  Clone ID: PAT_MRT3847_125229C.1.pep
IIQKNIQRALRSLSAPQFAWFRNRIYSFQRSDSEESGENNTEQAWLVLITGRRQCPMRVHRTTDRHRKIWLDAHLSCTSI

SEQ ID NO: 170781 - protein, 83 aa, Glycine max
  unsure (1)..(83): unsure at all Xaa locations
  Clone ID: PAT_MRT3847_12522C.1.pep
LRFILKPRDKPSCHVCIVPYSMEWSGFANRLLSQGDDILCXDYASFDGLITKHAMSTLAVMINSLRRGDEQLLRDRTHLLFAC

SEQ ID NO: 170782 - protein, 34 aa, Glycine max
  Clone ID: PAT_MRT3847_125230C.1.pep
EPDSSAVCISLASSSAYAFSTSRTTMYAATASNT

SEQ ID NO: 170783 - protein, 150 aa, Glycine max
  Clone ID: PAT_MRT3847_125231C.1.pep
VQSNVRGFTTRQRFLHRKEHKAATSIQVYWRMCKARSAFLKHQNSIVAIQCLWRCKQAKRELRRLKQEANEAGALRLAKNKLEKQLEELTWRLHLEKKISAPGYFCVMTFLVSNEEAKHVEIFKLQKMVDALNLELDAAKLATINECNKN

SEQ ID NO: 170784 - protein, 58 aa, Glycine max
  Clone ID: PAT_MRT3847_125232C.1.pep
NTDEINEKFERDLAKLNLSPILKTEFYQVRTNCFEKNYIRIHVLALKNTNLNDKPKSP

SEQ ID NO: 170785 - protein, 47 aa, Glycine max
  Clone ID: PAT_MRT3847_125233C.1.pep
IQGESLKVCFLSVTHFLWCMYKKSVLNMCLSCIVFIFLVGNNCLDCL

SEQ ID NO: 170786 - protein, 91 aa, Glycine max
  unsure (1)..(91): unsure at all Xaa locations
  Clone ID: PAT_MRT3847_125234C.1.pep
SLQCLCVERFENGFAGGISLEFEPFPLGEELPVPLLGFVQNASSNWGVHAHXMXQFLPRRQQQHLLQVLRQVITLLLGKLVIIQCNWLLYI

SEQ ID NO: 170787 - protein, 360 aa, Glycine max
  Clone ID: PAT_MRT3847_125235C.1.pep
MNNITKRYTLIFCNSCAWKGSRMVSLEESRSNSSRFPLARSYQYHSSVSSKTQRHIGRSMRTIRSSFFQDDNSSSCCSLTEQSTCLSENLPDSVVDLESRLGAGALKPLVELVAEQGSGMAEKAMVVLNSLAGIQEGKNAIVEEGGIAALVEAIEDGSVKGKEFAVLTLLQLCNAACALLSLALVEENKGSIGASGAIPPLVSLLLNGSSRGKKDALTTLYKLCSVRQNKERAVSAGAVKPLVELVAEQGNGMAEKAMVVLNSLAGIQEGKDAIVEEGGIAALVEAIEDGSVKGKEFAVLTLLQLCVDSVINRGFLVREGGIPPLVALSQTGSARAKHKAETLLRYLREPRQEAASTSSS

SEQ ID NO: 170788 - protein, 532 aa, Glycine max
  Clone ID: PAT_MRT3847_125236C.1.pep
MEFAALSNATQLGGFNPLRTNLQSSLPFRHASFPSSSRRDCSCKALLSTRTPTSTHNMFGPHSTDFELSALTALSPLDGRYWSKVKELAPFLSEYGLIYFRVLVEIKWLLQLSVIPEIVEVPSFSDGAKSFLQGLIDDFSVEDASEVKNIERVTNHDVKAVEYFLKQKCQSNAEVAKVLEFFHFACTSEDINNLAHALMLKETMNSIMFPVMDKIIKALCDVAKDNAHVPMLSRTHGQPASPTTLGKEMAIFAARLSRERKDLSQVEIVGKFAGAVGNYNAHIVAYPDVNWPHIAEQFVHSLGLSFNPYVAQIETHDYMAKLFHLLIQFNNILIDFDRDVWGYISLGYFKQTTKAGEIGSSTMPHKVNPIDFENSEGNLGVANGGLSHLSMKLPMSRWQRDLTDSTVLRNMGIGIGHSLLAYKSTLQGIGKLQVNEARLSEDLNQCWEVLAEPIQTVMRRYGVPEPYEKLKELTRGRAVTKESIRDFIKGLDIPEEAKSNMLKLTPDTYVGAAVELARTVENVVNTVIGIKI

SEQ ID NO: 170789 - protein, 98 aa, Glycine max
  Clone ID: PAT_MRT3847_125237C.1.pep
MCFFGYHYLNFVIVAYGNGVTRPASQLGEEVFIVATLSPGKLRREPERNVQLSVIHGSLGNRHRPWVGPCALGNKRVMAIWMAELTLLEEAETEERDV

SEQ ID NO: 170790 - protein, 81 aa, Glycine max
  Clone ID: PAT_MRT3847_125238C.1.pep
PPLKKCWAKLLKKNETRFQGKANHENLYGYYMFKIKKKISVLTTMARLNKSNYPPKNKDLKHLIKLDPPNNILADQIMKNI

SEQ ID NO: 170791 - protein, 60 aa, Glycine max
  unsure (1)..(60): unsure at all Xaa locations
  Clone ID: PAT_MRT3847_125239C.1.pep
MGAPEKSQTNTNPMQRVKVYRMNDDGKWDDKGTGHVTXDYLERLEELGLFVFDEEDNENI

SEQ ID NO: 170792 - protein, 84 aa, Glycine max
  unsure (1)..(84): unsure at all Xaa locations
  Clone ID: PAT_MRT3847_12523C.1.pep
CHYSSILFDLDLLVIGVFTFKDNIYIPVAHATRXMSLLTSAYNVGLIALEALKSVAVIYRNGGLLTINQITFLDDGETSFVLPA

SEQ ID NO: 170793 - protein, 85 aa, Glycine max
  unsure (1)..(85): unsure at all Xaa locations
  Clone ID: PAT_MRT3847_125240C.1.pep
XXXXFFFFFWSHISFNTYCVMHHHQINIAYIGNTHSSLTSRFLLFFINFHQFSFSKIKTNLGLGLTPNSMNLGLNNHISLISSLP

SEQ ID NO: 170794 - protein, 47 aa, Glycine max
  unsure (1)..(47): unsure at all Xaa locations
  Clone ID: PAT_MRT3847_125241C.1.pep
RRIRVRLARQRNAHXDAKEELFSPVTVVEIPQEGVKGLGTQVFDDED

SEQ ID NO: 170795 - protein, 42 aa, Glycine max
  Clone ID: PAT_MRT3847_125242C.1.pep
LYLVVLLIVLQLVDMAALGALLYILADRGGTIDSKPELVESG

SEQ ID NO: 170796 - protein, 57 aa, Glycine max
  Clone ID: PAT_MRT3847_125243C.1.pep
SPLSIRQKVAISPAGRIQKFPRLADKANVFRESLVKVKIGADPRALCVATDATFCKE

SEQ ID NO: 170797 - protein, 73 aa, Glycine max
  Clone ID: PAT_MRT3847_125244C.1.pep
GLDPRANPECVKNPLTPANYPPPRSLPPELPRKLQKTEGLNFGQRVLSLVVFFPPKLFGSPGTIRTRSRAGGF

SEQ ID NO: 170798 - protein, 185 aa, Glycine max
  unsure (1)..(185): unsure at all Xaa locations
  Clone ID: PAT_MRT3847_125245C.1.pep
MQTSLLRELVVGTPVISATYDRPQKSVNRYLPGPATQCQYSTTTSKQMRLRTNISETVKRKLSLGARILXVEEGERLLKVSQCYLSTTSGPGPLAGFLFISTDKVAFCSERSMKVFTXKGHMLRIRYKVAIPLNKIKCVNQSQNVQKPTQKYIEIVTEDNFDFWFMGVLKYQKTFKYLEQAVSQA

SEQ ID NO: 170799 - protein, 194 aa, Glycine max
  Clone ID: PAT_MRT3847_125246C.1.pep
MQTSLLQIVGTPVISATYDQLQKSVNRYLPGPATQCQYSTTTSKQMRLRTNISETVKRKISLGARILRVGGVEKVFKQFFSMEEGERLLKVSQCYLSTTSGPLAGFLFISTDKVAFCSERSMKVFTRKGHMLRIRYKVAIPLKKIKCVNQSANAQKPTQKYIEIVTEDNFDFWFMGVLKYQKTFKYLEQAVSQA

SEQ ID NO: 170800 - protein, 243 aa, Glycine max
  unsure (1)..(243): unsure at all Xaa locations
  Clone ID: PAT_MRT3847_125247C.1.pep
LEGLVSQEPALFATTIAGNILFGKEDADMDKVIQAAMAANAHSFIQGLPDGYQTQVGEGGTQLSGGQKQRIAIARAVLRNPKVLLLDEATSALDAESELIVQQALEKIMSNRTTIVVAHRLSTIRDVDTIVVLKNGQVVESGTHLELMSNNGEYVNLVSLQASQSLTNSRSISRSESSRNSSFREPSDNLTLEEPLKLDTAAELXSRDQHLPSKTTSTPSILHLLKLNAPEWPYAILGSVVQY

SEQ ID NO: 170801 - protein, 49 aa, Glycine max
  Clone ID: PAT_MRT3847_125248C.1.pep
LGNESKRKREFTVDTIAHSGLGFFFIAVEKSFFLSCSSDHYVHSSFGLV

SEQ ID NO: 170802 - protein, 62 aa, Glycine max
  Clone ID: PAT_MRT3847_125249C.1.pep
FSNLGTPSIKMAQNLARTQKPLSKTLCKTIMPKPLKQNCFPLTCPSPHTASAQSRKQTSIAP

SEQ ID NO: 170803 - protein, 105 aa, Glycine max
  Clone ID: PAT_MRT3847_12524C.1.pep
CSACHWFLSQSPLHILRCIFSYALSLDLTLSPSVSIDRFQPRSTSSAVLRRSPRCYSASFGPTLLASENESIMQFVIFGAVYSSVAKHEQVCSTTVGEHSDVCCT

SEQ ID NO: 170804 - protein, 56 aa, Glycine max
  Clone ID: PAT_MRT3847_125250C.1.pep
PGYKYVQEQLDKALLTGARVISLGQECDVVFIALCRGKITDPLKKCLRDWNRALLP

SEQ ID NO: 170805 - protein, 57 aa, Glycine max
  Clone ID: PAT_MRT3847_125251C.1.pep
FIVFKNEANIYVNIQQSNLNIHAILISILNYKNANQNRQKFNYVNRMHTHTIHSYLV

SEQ ID NO: 170806 - protein, 64 aa, Glycine max
  Clone ID: PAT_MRT3847_125252C.1.pep
MNLRWMEAVLPLGIIAGMLCVMGNAQYYIHKSAHGRPKHIGNDMWDVAMERRDKKLVEQASPSN

SEQ ID NO: 170807 - protein, 53 aa, Glycine max
  Clone ID: PAT_MRT3847_125253C.1.pep
NLDVEPQNRGQPYSTKKFINLSAFKKSHVVYKKPIYFYKKLTPKINPNSLKNL

SEQ ID NO: 170808 - protein, 168 aa, Glycine max
  unsure (1)..(168): unsure at all Xaa locations
  Clone ID: PAT_MRT3847_125254C.1.pep
CPMMETFTENRTTAPKLQNIWAFEGEKEGRWQWEGDLNATIQKDFKNKLLESARSESYLRLRNSPVQKIWHGSLSIPDSCFSNLGTLIVDGCQFLSDAVLPFNLLPLLPKLKNLKVQNCEYVKTIFDVKYITQDRKMTTMGATSIXLPFPLKKLTLSELANLEKCWNE

SEQ ID NO: 170809 - protein, 85 aa, Glycine max
  Clone ID: PAT_MRT3847_125255C.1.pep
SFPWAVSPLVVVLWGCGLAFVVWFGLLVGFRCCCLPCGPSAFGGRCGVSAGCFSGLVCLVSPGGFAPSLFLSGLGGGLCFFLSLP

SEQ ID NO: 170810 - protein, 124 aa, Glycine max
  Clone ID: PAT_MRT3847_125256C.1.pep
HKYAKTQKEKKISIEIETEQTRESENAKIQENDGRPPDHEQLILFAKELEDTRTLADYKRENESTLHLALRLRGGAKKQEKKKYPKHQTQKQKRQNGKLALLQSQKVHQSPKVQRRVKECPKGQ

SEQ ID NO: 170811 - protein, 81 aa, Glycine max
  Clone ID: PAT_MRT3847_125257C.1.pep
VNHPAPLGWKFFLRGPYNMWNIHDFPRLLITAVLSSSSYWVTRMLFCNGLRDQLIPCTLCLYVSPANVSLNINIKKRMFNV

SEQ ID NO: 170812 - protein, 123 aa, Glycine max
  Clone ID: PAT_MRT3847_125258C.1.pep
CIHIQDKMREKKILALVMFVMAYGLAVTTLSASYQLYFPETCNGYRELLAFCGTYLADVKSSPSSYCCNAATIAFPKASRSSDFCNCLRVVGPLLQFQSKLLSLPGACEIIPSFSMQSCIYGA

SEQ ID NO: 170813 - protein, 52 aa, Glycine max
  unsure (1)..(52): unsure at all Xaa locations
  Clone ID: PAT_MRT3847_125259C.1.pep
FNVGVKDIXGGGDSLFPSKKFGNMEVITSEVIMNHEKDSGKNVGGKIWGFLY

SEQ ID NO: 170814 - protein, 343 aa, Glycine max
  Clone ID: PAT_MRT3847_12525C.1.pep
MVFTMWLRPLILASVFVWAVATPSPQGCDFSHGRWIIDEASLHPLYDASRDCPFIGFDCSRYARPDKDYLKYRWMPSGCDLPRFDGKKFLERSIGKKIMFVGDSISNNMWQSLTCLLHIAVPNSNYTLTSQTQELLVFSVPEYKASIMWLKNGFLVDLVHDKERGRILKLDSISSGDQWKDVDVLIFNTYHWWTHTGQSQGWDYFQVGNELIKNMDHMEAFKIGLSTWAKWVDSNIDPSKTKVLFQGIAASHVDKKGCLRQTQPDEGPMPPYPGADIVKSVISNMAKPAELLDITLLTQLRRDGHPSIYTGRGTSFDDCSHWCLAGVPDAWNLELFRLEFGNY

SEQ ID NO: 170815 - protein, 85 aa, Glycine max
  Clone ID: PAT_MRT3847_125260C.1.pep
TRSYFNLFASLRVDLIYQLFYILIFKVFSATSLVLLHVVCEYYHTVKAYALIFPKRNEKKTLYIFICFKNKFKPEGRSKAPMPGS

SEQ ID NO: 170816 - protein, 142 aa, Glycine max
  Clone ID: PAT_MRT3847_125261C.1.pep
MPAQQPTVFKRFVEVGRVVLVNDGPSAGKLAVIAEIIDHNRALIDGPTSGVPRQSLPYRNMILTPYTIASLPRGAGSGSIKKAVEKAGVTEKWEASGWAKKLAARQSRKDASDFDRFQIMLAKKSRRDLVRRAYVKEKKASA

SEQ ID NO: 170817 - protein, 110 aa, Glycine max
  Clone ID: PAT_MRT3847_125262C.1.pep
PVIYKRFTFSLSPSLGSNGPLNYSQSNSQQVSNNGLSPTASFPFPGKQVPPVPLQVEKQNGWQDYQTYDLLKSHHGQQLQPQQLTTGNQQFSPLPEQFQGQSMWTGRYFV

SEQ ID NO: 170818 - protein, 403 aa, Glycine max
  unsure (1)..(403): unsure at all Xaa locations
  Clone ID: PAT_MRT3847_125263C.1.pep
ARIKRILAAGKALANVVKVDKQMIYFDSKVKKFVIGVEPQTADDFGFSTYSGMSNAKELVQENPAQKSKMEIVQSNQHQHMEGDDDDEVIVFKPVVAETRADVIASSWAPHVGLEPFPKASGGDLIFHVNSTSNPLSNLSHQTLSVPGGGMVPQHLQPVQPHTSRWLEEEISLANNLKGLGLFENGHVMKPGLQEAVGFSNHVSLPFPIQQSIGADTNGMFYGFSKALESAVPSKVDTIASSGVVTDNLAVKTSALPVGSRKAPVSRPTRHLGPPPGFSHVPPKQGIESTVSDSISGNPIMDDYSWLDGYHLHSSTKGLGSNGPLNYSQSNSQQVSNNGLSPTASFPFPGKQVTPVPXQVEKQNGWQDYQTYDLLKSHHGQQLQPQQLTTGNQQSPLPEQFQD

SEQ ID NO: 170819 - protein, 49 aa, Glycine max
  Clone ID: PAT_MRT3847_125264C.1.pep
LHYQHKCVSVTGRGYWRLAHEFSTSMTLDNLPAIPTLVLVMMGLTNIPG

SEQ ID NO: 170820 - protein, 60 aa, Glycine max
  unsure (1)..(60): unsure at all Xaa locations
  Clone ID: PAT_MRT3847_125265C.1.pep
MGXEXVHINIVVIGHVDSGKSTTTGHLIYXLGGXXTRXXSXFEXGXPEXTKRXFQVSGPV

SEQ ID NO: 170821 - protein, 71 aa, Glycine max
  unsure (1)..(71): unsure at all Xaa locations
  Clone ID: PAT_MRT3847_125266C.1.pep
MAPKGLRSGFAVLCFSTLSLSRCLAEDNGLVMNFYKELCPHAVYIIKXQVKLFYXRHKNTCFXWLINIFHD

SEQ ID NO: 170822 - protein, 73 aa, Glycine max
  Clone ID: PAT_MRT3847_125267C.1.pep
LMPPTGNKEIPFCRFYGQKFQQNAMGPLKKYLFLWMYIWRFISKKQLPQKHVKGWFIAWGDKDHKGPLVFLMD

SEQ ID NO: 170823 - protein, 100 aa, Glycine max
  Clone ID: PAT_MRT3847_125268C.1.pep
GPTYPSLHGPFFNIVLPGKILVGRGAHFSWKRVAHSPGLAKFFMGPHRSSFPTWALTERARGRPLFWHISHLGGEGNPPCARYFCQGGGAGSFGCLLSLS

SEQ ID NO: 170824 - protein, 52 aa, Glycine max
  Clone ID: PAT_MRT3847_125269C.1.pep
YNWSLSIIILVPYIEGYSGSSAIEHLFNKSLSRESSFLSLERYYFDNFLRKT

SEQ ID NO: 170825 - protein, 54 aa, Glycine max
  Clone ID: PAT_MRT3847_12526C.1.pep
NSLFIEEFSKMFSYFLCNIHPLFHLKVSEISFSNSRLIFFYPQNFNFFYPNTKF

SEQ ID NO: 170826 - protein, 80 aa, Glycine max
  Clone ID: PAT_MRT3847_125270C.1.pep
NLNHYTTVLPSSKLPPTLLINTFCISLILSAAMLRNIHTLISNNKNVDNHPYKSVPQTNRNSSIFSIPPTGFYQISRTRR

SEQ ID NO: 170827 - protein, 79 aa, Glycine max
  Clone ID: PAT_MRT3847_125271C.1.pep
KAPTHLKVYICGNSQITKHMSLSNLALKTHYYDQTLSHFPEQGTSVPPPSAYAKPCQQCSETAPGVFDRKPQTRTTDSI

SEQ ID NO: 170828 - protein, 138 aa, Glycine max
  Clone ID: PAT_MRT3847_125272C.1.pep
PLKTVQVTTPTSFAEQDFLNMYFKDIYKPIPLNYNLVLAMLWRHPENVKLDQVKVVHYCAAGSKPWRYTGKEENMQREDIKMLVKKWWDIYNDASLDYKPLMSASEAPAPDGVDNIEPFVQALSEVGHVQYVTAPSAA

SEQ ID NO: 170829 - protein, 119 aa, Glycine max
  unsure (1)..(119): unsure at all Xaa locations
  Clone ID: PAT_MRT3847_125273C.1.pep
ALFFTVVSSTYAPCTPPPKTSKHPPAPNTPPPKQACFPKDTFKDAGRTDVIGQINVQLAKPPKTPCCTLIEGLSDLQAADCLCTDTRANVXGINLNVPMNLSSLLNYCGKGVPKGFVCY

SEQ ID NO: 170830 - protein, 382 aa, Glycine max
  Clone ID: PAT_MRT3847_125274C.1.pep
MGEDCRTWIPELHFDWQSPNLSSFNATPFGVGKQNGTSAAMNSGANVVTRNAAMPAYASSALPHSQLGHSGEPHGWFYCLPRFRQGFTTPAQTFNAEEKLPAGHANGLGVEVAPNRESGFPQKQLLVIDQTGDQTTLVYSSRFGGPVDCHVSWDSKLHGSINLNNGNELLNLRRDVNHVVGLGPTLDDKVHENPGTDDDIESEMHEDTEEINALLYSDSDGYSTEDDDDDEVTSTGHSPSTMTTHDDNQEEPHRRTAEEVASSVGETKKRKLLDGAYDDDNLQFMDTASSLNGKKRPFEVEDDAESRCSSGGNSSSRGSGGMGSLSGNKKMRKEKIQDVLSILQCIVPGGKDKDPIELLDEAIRCLKSLKLKAIELGLDATI

SEQ ID NO: 170831 - protein, 64 aa, Glycine max
  Clone ID: PAT_MRT3847_125275C.1.pep
QKDTSKGSLWLFQLIKRKDSNSWLFMEDTAQQIKRPFGVPEGPEFTVGLDVPLSGAKNILAFAE

SEQ ID NO: 170832 - protein, 337 aa, Glycine max
  Clone ID: PAT_MRT3847_125276C.1.pep
MNLGANVVTSNAAMPVYASSALPDSQSGHSVLPHGWLYCLPRFRQGFTMPARNFNAKEKLPAGHAKDLGEEIAPNGELGFPQKQFLVIDQTGDQTTLVLSSRFGGPLASWNSKLHGFNNLNNGNELLNLRRDVNHVVGLGPTLNDKVDENQRTDDDIESEMHEDTEEINALLYSESDGYSTEDDDDDEVTSTGHSPSTMTTHDDNQEEPDRGTAKEVASSVGETKKRKLWDGAYDDGDMQFMDTANSLNGKRLSEVGDDAESKCSSGGNGSRGLGEMGSLSGNKKMRKEKIQDVLSILQCIVPGGKDKDPIELIDEAIRCLKSLKLKAIELGLDATI

SEQ ID NO: 170833 - protein, 277 aa, Glycine max
  unsure (1)..(277): unsure at all Xaa locations
  Clone ID: PAT_MRT3847_125277C.1.pep
FGSRGSTNTTTCSSCSSGSSWIKSDFLTLEEAQNDNVEAAGKRFSFISHLLVGSKNSWAKETLTCQEEQHSPVSVLQVGEDEFSPFDQSLANIQRNSRGDHSVXKQKFIQTVQKLESHAKFDLANLDQCLSLDDNSGYDEEYEEEEDDDNDDIEEQDWIEEKAKQLLHCVKARVSAHGCIDYLDTLLLDFFREELSGSRNQYKNEEEFELETLRITEDWINGSFAFDAGHADKHAYIKDMERRDQWSRLEEDQEELAFEIETAILHSLIADLLDLDA

SEQ ID NO: 170834 - protein, 40 aa, Glycine max
  Clone ID: PAT_MRT3847_125278C.1.pep
RAESQGDLDTSCGFKQRLNKKLYSKSHKRNTSQLGQLKRP

SEQ ID NO: 170835 - protein, 67 aa, Glycine max
  Clone ID: PAT_MRT3847_125279C.1.pep
MDGHDPQDPKQSPADMTAFVQNLLQQMQNRFQTMSDSIVTKIDDMGSRINELEQSINDLRAEMGVES

SEQ ID NO: 170836 - protein, 53 aa, Glycine max
  Clone ID: PAT_MRT3847_12527C.1.pep
LELMATFFYVLIHTLHETRKESDVSGCNIIVHLLEKTESKFLDMLIQITAELT

SEQ ID NO: 170837 - protein, 250 aa, Glycine max
  Clone ID: PAT_MRT3847_125280C.1.pep
PIRALKDEDKGYPPVYPVGPIVQSGDDDAKGLDLECLTWLDKQQVGSVLYVSFGSGGTLSQEQITELAFGLELSNHKFLWVLRAPNNATSDAAYLGAQNDVDPLKFLPCGFLERTKEKGMVVPSWAPQIQVLSHSSVGGFLTHCGWNSILESVLHGVPLITWPLYAEQRMNAVVLCEDLKVGLRPRVGENGLVERKEIADVVKRLMEGREGGEMRKRMKKLEVAAVNALKEDGSSTKTLSELALMWKNVA

SEQ ID NO: 170838 - protein, 88 aa, Glycine max
  Clone ID: PAT_MRT3847_125281C.1.pep
MDGHDPQDPKQSPADMTAFVQNLLQQMQNRFQTMSDSIVTKIDDMGSRINELEQSINDLRAEMGVESSPSPAAPAKLTEEITKEEGSA

SEQ ID NO: 170839 - protein, 37 aa, Glycine max
  Clone ID: PAT_MRT3847_125282C.1.pep
MIDDQDLGFFANFLGVFIFVLVIAYHFVMADPKFEGN

SEQ ID NO: 170840 - protein, 53 aa, Glycine max
  Clone ID: PAT_MRT3847_125283C.1.pep
NQTPLYINIVNKRNIKTLQNNITNPQPNYSAYRKPIFEHTILKIKNKTHAHYN

SEQ ID NO: 170841 - protein, 88 aa, Glycine max
  Clone ID: PAT_MRT3847_125284C.1.pep
MDGHDSQDPKQSPADMTAFVQNLLQQMQNRFQTMSDSIVTKIDDMGSRINELEQSINDLRAEMGVESSPSPATPAKPTEEITKEEGSA

SEQ ID NO: 170842 - protein, 124 aa, Glycine max
  Clone ID: PAT_MRT3847_125285C.1.pep
MDAKPPQLASQPLNYQTWFLKVSIHCEGCRRKVKKVLRSIDGVFTATIDQQQQKVTVTGSVGVEILLRKLIRAGKHAEIWPENLNLDDERIAGKGKKKKKKKKNEAREPQSLGNKGAEKNAATT

SEQ ID NO: 170843 - protein, 532 aa, Glycine max
  Clone ID: PAT_MRT3847_125286C.1.pep
MSEETDMDDENEQEYGVNEHVFDARDDVLQWVRSVAHENGFVPVIMRSDTNTGIGCKRSGQYRSRRKILLEEILGVGNVGVPSSFVGNQWLEGKALERLRGLFLRRDAFPGIIMTGRNLALMNVVKIVFLECTSLLYRFHIDKNVKEKYKSLIGQKNAWEYVMDAWGSLPMFVNYVNETWIIPHKEKFVIAWTNKVMHLGNTTTNRVESAHWALKRVLQNSLGDLCSVWDAMNNMIMLQHTEIKASFETSTHVIGHLFKFTLYKRLLGMVSRCCLNQIAAEFERVHYVGKNPSCCGCVMKTTHGLPSECELSKYVLGSILLYSIHMFWRRLSFSDQGLSEPQVTIKEKMKTISKRFEELDVCGKVTLESKFREIACPDQNSMCPPPEKVNTKGAQKKPMKRNQRSTKRDLSYWEYVDVLHSVQNSNSSVKRNASSFDQPIPRRTMPMVDQFHPVIHDFIDNIVDVKADGNCGYRVIPALLGMSKECWSLVRNHLLKELGKWSDDYIKLFGGTDRFKELRRSLLVDGFSMVGS

SEQ ID NO: 170844 - protein, 89 aa, Glycine max
  Clone ID: PAT_MRT3847_125287C.1.pep
FPGFLGGPPAFFLFPSPQVFAPLLRSLNLFFWQTKGVLSPRVCTAIPLFLPQVCLVFYWGGGQKFRPPLFFFPPPLFFFLLKYMLFKTA

SEQ ID NO: 170845 - protein, 105 aa, Glycine max
  Clone ID: PAT_MRT3847_125288C.1.pep
TPRGVGSPPGVLPRGDTPPPPWGGPSYSGGPLYVGNEGPPPPQTLTLGLKIRAFFSLKKKPPGGGSPLNGVLSCLAPKKKENPPLGPFSPGKIYCFCPRPIFLFP

SEQ ID NO: 170846 - protein, 82 aa, Glycine max
  Clone ID: PAT_MRT3847_125289C.1.pep
KNVEFSLSSSTSGLPDAFILGSYFGFWMSDMITYLTYSFFYQIFWLFLGCFLLASFAVEYRSHNLLLLSILHWNVDFFFFLY

SEQ ID NO: 170847 - protein, 74 aa, Glycine max
  Clone ID: PAT_MRT3847_12528C.1.pep
NWMAYTFAGINDPLQTPWGLQIPFEMNNPKAGYFILDPWTMLPGRYVRIGFTNLRTGNNFNITQIQLFYCLQNL

SEQ ID NO: 170848 - protein, 65 aa, Glycine max
  Clone ID: PAT_MRT3847_125290C.1.pep
VLNTTYHIPLWGPFPPLVSNNPIIKGLPYFVWVILLLFLSSHLVYSKDPPPPPKEGGRHTVMTET

SEQ ID NO: 170849 - protein, 145 aa, Glycine max
  unsure (1)..(145): unsure at all Xaa locations
  Clone ID: PAT_MRT3847_125291C.1.pep
MPEVLDISSDEEEGLEESLTVTDFSWIREMLQTSDEESDDSVEVVVIHENRPQMKSKSSTLTVKDVGDDDDDDDDCVILEGDPENSVASVEEEANGSDXVLVIXEKGQIACRDYPHXRHLCGKIPFSSTPHKQHCSQCHXYVCDS

SEQ ID NO: 170850 - protein, 49 aa, Glycine max
  Clone ID: PAT_MRT3847_125292C.1.pep
MFKLVRAHILFFTLNSIKPNVISIPWAPFMIKALLLIQKILKKKKKKKK

SEQ ID NO: 170851 - protein, 52 aa, Glycine max
  Clone ID: PAT_MRT3847_125293C.1.pep
VSEHGGASAGVTGLAGDTVLPVPSSSSSCPVDGLLAAEPTRGQVAADTERVT

SEQ ID NO: 170852 - protein, 48 aa, Glycine max
  Clone ID: PAT_MRT3847_125294C.1.pep
KKIIFSSELLLIYRLIHLQLFSKISIKSFLPCYLFYLIPNFVSIILGY

SEQ ID NO: 170853 - protein, 152 aa, Glycine max
  Clone ID: PAT_MRT3847_125295C.1.pep
MAKARKSQEEIASEAIKHALKALRKRHLLEEAAHAPTVLALSRPIVSQGSEWKEKAENLQMELQQCYKAQSRLSEQLVVEVAESRASKTSLQEKENALADLQKELTELRDECSQLKVDLEEKIKSLELVVSENSELKAQLEQMTTKANIAEA

SEQ ID NO: 170854 - protein, 60 aa, Glycine max
  Clone ID: PAT_MRT3847_125296C.1.pep
CIAVLLATCPRKELMLEGSNLMDFVFRETDQVKITVTDSKHSLVMHSMLFQLKLQIFHYG

SEQ ID NO: 170855 - protein, 219 aa, Glycine max
  Clone ID: PAT_MRT3847_125297C.1.pep
MGDLHVNGVVFGEDRPCASSPPSPPLPPWNPDPSSVAADAWAAAERNTAEILRRIRPTLAADRRRREVVDYVQRLIRYGARCEVFPYGSVPLKTYLPDGDIDLTALSCENIEDGLVSDVRAVLHGEEINEAAEYEVKDVRFIDAEVKLVKCIVQDIVVDISFNQLGGLSTLCFLEKVDRLVAKDHLFKRSIILIKAWCYYESRVLGAHHGLISTYALET

SEQ ID NO: 170856 - protein, 62 aa, Glycine max
  Clone ID: PAT_MRT3847_125298C.1.pep
FRIMGWLLRRYQGVRYWIATTTSHSKHPLTLNRIRTHDLKPTHDWKPIRSHMIIIYMFLSFN

SEQ ID NO: 170857 - protein, 151 aa, Glycine max
  unsure (1)..(151): unsure at all Xaa locations
  Clone ID: PAT_MRT3847_125299C.1.pep
MGILAALLVYLLRLSPGSSISTHRSILDLDLAKFTTLKQVSTLFQLWPIEHGRVYHNHEEEANXDLEMYQRLPGNYIRDMNANRPSPYSHRLGLIKFXADITPXEFIIKYLQAPKDVCDRIKVACXIMMKEQYSCDHAPASCDWRKKRVIT

SEQ ID NO: 170858 - protein, 46 aa, Glycine max
  Clone ID: PAT_MRT3847_12529C.1.pep
FVHNPSLTISKYKIPLIIGATRKPLNHPPKPINICRNRSQTCCLQK

SEQ ID NO: 170859 - protein, 86 aa, Glycine max
  Clone ID: PAT_MRT3847_1252C.1.pep
SETFRLIKLRSLKFIKIWKYKVNKRVSTNSHKSFSIHRNTSKARGPKPPPETIEHNPIDFGQKHKVESAPKISHTRFRAILNTIGN

SEQ ID NO: 170860 - protein, 658 aa, Glycine max
  unsure (1)..(658): unsure at all Xaa locations
  Clone ID: PAT_MRT3847_125300C.1.pep
MNGAACVEAECCEFVEVDPTGRYGRYNEILGKGASKTVYRAFDEYEGIEVAWNQVKFYDFLQNPEDLERLYSEIHLLKTLKHKNIMKLYTSWVDTANRHINFVTEMFTSGTLRQYRLKHRRVNIRAVKHWCRQILEGLLYLHSHDPPVIHRDLKCDNIFINGNQGEVKIGDLGLAAILRKSNAGFTPGTPEFMAPEVYEEDYNELVDIYSFGMCILEMVTFEYPYSECNHPAQIYKKVVSGKKPEALYKVDNPEVRQFVEKCLATVSLRLSARELLEDPFLQIDDYGFDSKVLQYQRDCYEVTPLIRQPVNGICIINNNLMSGDTDNIGGYGPVSELDYHQDDFEATDFRLVLCEAVVISAAVVSPILATRADDAILSRLSSAVXVGRIRNIYXPFDIETDTALSVANEMVAELDINDQDVTNLANMIDNEIATLVPEWKTGPIIEEKSECSSASVCLNCAANGYLFDYVSSNNPCGKNLQFLHCSKTGCAAVHGRFEEITYQVEGSENSAREGALDESSQSNGIQYTDIWAQRDAPDLCHEELKEMHCDQAHEASNSSNIKEDRKTVNVDEQSDLNTKKSSSNPAPNCVFLDYENEIRQELRWLKAKYQMQLRELRDQQLGRKPKFTSISPDPEKIGAFERWNSEAIRYTQFEDTKQ

SEQ ID NO: 170861 - protein, 235 aa, Glycine max
  unsure (1)..(235): unsure at all Xaa locations
  Clone ID: PAT_MRT3847_125301C.1.pep
GMCILEMVTFEYPYSECNHPAQIYKKVVSGKKPEALYKVDNPEVRQFVEKCLATVSLRLSARELLEDPFLQIDDYGFDSKVLQYQRDCYEVTPLIRQPVNGICIINNNLMSGDTDNIGGYGPVSELDYHQDDFEATEIGLFDCEEDDNLAEVDTTIKGRREDDGIFLRLRIADKEGRIRNIYFPFDIETDTALSVANEMVAELDINDQDVTNLASMIDNEIAXLVPEWKTGPRIE

SEQ ID NO: 170862 - protein, 84 aa, Glycine max
  Clone ID: PAT_MRT3847_125302C.1.pep
FFLLLYVAFLVSDSGLKRKSPSEALSVGGEKTRTCFTRDTPAQTRWGGANGRGKPFSGEGGGGMQKSGWRPHQDKEPPHLLNGG

SEQ ID NO: 170863 - protein, 32 aa, Glycine max
  Clone ID: PAT_MRT3847_125303C.1.pep
INEYHYRYPIFRTCRLEAGFLAPLNFSYSRGR

SEQ ID NO: 170864 - protein, 38 aa, Glycine max
  Clone ID: PAT_MRT3847_125304C.1.pep
INLSTILDQRNTYRPLWSTRFTTKPHILSPRILIHGSP

SEQ ID NO: 170865 - protein, 51 aa, Glycine max
  Clone ID: PAT_MRT3847_125305C.1.pep
NSINPWCIKLYVDLPKVSVHSGRSCILESWKCRSLKLRRLSFSRFALFWNG

SEQ ID NO: 170866 - protein, 55 aa, Glycine max
  Clone ID: PAT_MRT3847_125306C.1.pep
ISRMRGPPSSRFFFFCSPIFYFFLKFMCFIFFFFFFFLLVFWPYSKRQKFLNSKL

SEQ ID NO: 170867 - protein, 126 aa, Glycine max
  unsure (1)..(126): unsure at all Xaa locations
  Clone ID: PAT_MRT3847_125307C.1.pep
QGFRKKERNPYPWAKALVGTCYRTLATNRNGLPNFNKKGSMLTLKGQKTQGASKIVAKLTYFLFKKGHNXISTVDGHPSGVNAGMLDLERENFNFAGKQKILKFNQRFNLIPTLKGTYKGWMDLFG

SEQ ID NO: 170868 - protein, 117 aa, Glycine max
  Clone ID: PAT_MRT3847_125308C.1.pep
MSVPYDMLSNSQNGHIPASERIPVIARPFVSERAKKTLDIVEKFVEEECIPADAVYTRQIGQTTKERFSSHPSIIEDLKKRAQELGLWNMFLPKAHFKEGAGFSNLEYGLMAEYLGK

SEQ ID NO: 170869 - protein, 140 aa, Glycine max
  Clone ID: PAT_MRT3847_125309C.1.pep
LRVRLKFSQEEFLTAWSTQVRPATTLLADGCPYLHAMAHDSSGCTIPDDCDIGAKLTTINNMCAYGLNPGISGSRVLGTIPQSISQQTVWNQMATVRTPLNFDSSKHSLCQNFIDLLGGGILVDTTGDWITLILNFPICN

SEQ ID NO: 170870 - protein, 89 aa, Glycine max
  Clone ID: PAT_MRT3847_12530C.1.pep
SLPCKLIFMNDKCFIQDMQNLKRIGTVDMVKGLYRLTMLPLKEYAPSSITTFIPGVSASVSIFSCNKIPIDLQHFRLGHPSSKKMLLLK

SEQ ID NO: 170871 - protein, 607 aa, Glycine max
  unsure (1)..(607): unsure at all Xaa locations
  Clone ID: PAT_MRT3847_125310C.1.pep
MSPANLEEECLKLLKGEHSVWLGSGRLLVTKFCKAEDQSSVRRVYDALGPHFLYRLLRTAMASGGGXPQRSPTATLSLSITLLAAFCRVPDIASSEDMLFYIPQLRSXIVLEVISTRSVLSVLEECYEFLYLVSAASESGFARFFDSGGIKMLASQMRSLQDVQYLIIHQKXALLNCPDFDYRTLSSLYLLIARCLASSEQDTKAYMDLSEIVSSGFSRWAHRPFVTSRKNHXSTYCEHTMRNLNTEXLVTLVKKKKNLFVLAQDRKINSRLYSKLFVPSFSVRRXVVDNILIHVXFLLNELAXLKYEAPLDTSATAEAIFSKRHNVADAYSLVERIIKLISNVEGNDGNLLDEGTLTKLIHQLNETIAVVLEYLEDAKEHGQKKGDDLLASVRIIGSYLAEAPVACKEKVQDLLGYMLSLEGEDEQRPFYAVCFLLPMLSQITMEIEGCKALASCKGLEAVLDCFSKLVGSHAFLVEDNGCIFMACDTIMNLLLKKDKVQIKLDVSAIVDLLKVLAHWSENTDEMSSMMMASSICTLIFDYTSEEALLNCPDFDYRTLSSLYLLIARCLASSEQDTKVDMDLSEIVSSGFSRWAHRYPHIRDAVKN

SEQ ID NO: 170872 - protein, 48 aa, Glycine max
  Clone ID: PAT_MRT3847_125311C.1.pep
EMRPRNPIFTFQYGTSNPPSMDKPIKLISTMTLWKKSEKSTFQIFNHY

SEQ ID NO: 170873 - protein, 114 aa, Glycine max
  Clone ID: PAT_MRT3847_125312C.1.pep
VWPIQTSESVVGGKPLTQEEPVPPVCSRLEKWLHSRRLNPFCGPSSTLSKILDTPSARFEAIHDIDFSASDLKTLERTDRSNLLLHTIKTEEKKTSIENGSHLQTNEKMLSAPS

SEQ ID NO: 170874 - protein, 113 aa, Glycine max
  unsure (1)..(113): unsure at all Xaa locations
  Clone ID: PAT_MRT3847_125313C.1.pep
THGLINILTTGCTSRLYSGLCFLPQNDQFXIISQILLLNASYDSWQNKNIKDPSAYVPFDQLRXCKHDIKNCXTLSTKCLTXFRTPLSKALRVAGNAVSKSHFIYGAYAHCTS

SEQ ID NO: 170875 - protein, 209 aa, Glycine max
  Clone ID: PAT_MRT3847_125314C.1.pep
MVTIVGSYNVTPNQPTPKDPSWLSDSDQIGVLGHVAIVYIYEANPNSNTIERLRNSLSKLLVYYYPFAGRFSLTKSGRIEVDCNAKGVTLIEAKTSHTLDDYGDFSPSKLTEELVPDIDYTPPIEEIPLLLLQFTRFHCGKGLAIGVVISHPMTDATGLTQFMNRWAKLARGEELNPNEIPFLDRTLLKPHQPSSQRVDQPELKPCTTL

SEQ ID NO: 170876 - protein, 293 aa, Glycine max
  unsure (1)..(293): unsure at all Xaa locations
  Clone ID: PAT_MRT3847_125315C.1.pep
AAIGKKGSEAGPTHVLVVRGLDENADEEMLRYEFSKHAPIKDLRLVRDKFTHVSRGFAFVHFYSVDDATKALEATNGTMLEKNGQILRVAYAKSILGPGSGTSGTSQSSSLAAAAIEAATFAQQYDSVGWAPKEYNPDAKQSTGPEVGAPQSGFVWDEASGYYYDAASGFYYDGNTGLYYDGNNGIWYSYDHQTQQYTPCTDQNQNKTSNNESEPSKVSDSSXSKKVICAPATTVASVEKPASLADAVQAAEAAALAAGEERDGRGIIKPVLAQTPQNRAGLWSPQKKLDPNL

SEQ ID NO: 170877 - protein, 35 aa, Glycine max
  Clone ID: PAT_MRT3847_125316C.1.pep
LDATLRHISDISFTSSSFRGPEAPSPRANLSEIKS

SEQ ID NO: 170878 - protein, 79 aa, Glycine max
  Clone ID: PAT_MRT3847_125317C.1.pep
SLIVVNGLFIIRSPQSVNTCHDLVVDLFISVFYWNNYVVRTVALVYQMQMSQLLQRDSKSLMVCRKYGIREPVGVRTRG

SEQ ID NO: 170879 - protein, 91 aa, Glycine max
  unsure (1)..(91): unsure at all Xaa locations
  Clone ID: PAT_MRT3847_125318C.1.pep
CGRCNRRRPLSGLLRPHRVRERQQLCRARRRCLLGGTNRRPGVWIRVLIVRRPDPGYKGSDGXPLSGLAGVVEWGRGWVVVVPGRQPTFNR

SEQ ID NO: 170880 - protein, 51 aa, Glycine max
  Clone ID: PAT_MRT3847_125319C.1.pep
KKLIFNNYRLRPIDLKRDIRDVFNSRECLVLVNDNSLWDIVNVNISSVFVT

SEQ ID NO: 170881 - protein, 34 aa, Glycine max
  unsure (1)..(34): unsure at all Xaa locations
  Clone ID: PAT_MRT3847_12531C.1.pep
GPDXEKXEFXWFKSXLIENWGQFSDVFRAKHPDR

SEQ ID NO: 170882 - protein, 104 aa, Glycine max
  unsure (1)..(104): unsure at all Xaa locations
  Clone ID: PAT_MRT3847_125320C.1.pep
WGAFHVRNHGVPPSLITSRRRAGLTIFSDTHIPDKLWDSCSASAHEGYXSKMLASTISDENDAVQVLDXKDYFDHHTLLLSRRNSNRWPEFHTDYRELVATYND

SEQ ID NO: 170883 - protein, 166 aa, Glycine max
  unsure (1)..(166): unsure at all Xaa locations
  Clone ID: PAT_MRT3847_125321C.1.pep
MDYSNDNKEPWDWHREDYCLQRSFNYEISQGIWNGVSQNEDLSFVFNDETTPVKACGDFAYNVNNSESNNVQKESDKCLKSSYQIKRRRMLQFNSQDGGHLLSNEQMSSAYLKGKEEPKEDVFPEFSQWVSGTPGSASASNYEDLESAEGWXADCFKDAEMQLCPG

SEQ ID NO: 170884 - protein, 105 aa, Glycine max
  unsure (1)..(105): unsure at all Xaa locations
  Clone ID: PAT_MRT3847_125322C.1.pep
XNXXXPSXVPYXMXXGXXTVLLSLXXXMXXPXXXXXKMXIEMXXXXAXFNXXVVXXXFRXSXCDVSDRXLLQXXLXIMXXLSXXXIXXXKXXXEFXSXXKXXMXL

SEQ ID NO: 170885 - protein, 82 aa, Glycine max
  unsure (1)..(82): unsure at all Xaa locations
  Clone ID: PAT_MRT3847_125323C.1.pep
RXPXXXXTWXXTXGPXXDGXXFXHHQXLTSYSXGSHANFXNHLSXFLHLYIDQXVFPXCLTATIRCSXFSMGXXFQFHGXEC

SEQ ID NO: 170886 - protein, 72 aa, Glycine max
  unsure (1)..(72): unsure at all Xaa locations
  Clone ID: PAT_MRT3847_125324C.1.pep
NLRMNRTYNPWGNTGTXNYALPCWQFNPCPLQHTTDQMTPRLLYQTREEEHSPPPRGPSHPTQGRTNPPLAH

SEQ ID NO: 170887 - protein, 58 aa, Glycine max
  Clone ID: PAT_MRT3847_125325C.1.pep
QSKIDGDGDWFCKRFIITVKIRIQNYKNVEPLNKFHQAKQKSILKKIVCCEKISSQSN

SEQ ID NO: 170888 - protein, 51 aa, Glycine max
  unsure (1)..(51): unsure at all Xaa locations
  Clone ID: PAT_MRT3847_125326C.1.pep
SATQXAAPEYRYKSNRSLVFKNLPISSYSMANDLLRERKSLSEPTTDYVNQ

SEQ ID NO: 170889 - protein, 42 aa, Glycine max
  unsure (1)..(42): unsure at all Xaa locations
  Clone ID: PAT_MRT3847_125327C.1.pep
FTXXFXPTRXRXGNXLPPLVGXGSGFXXXSWXNEHXRXVTNR

SEQ ID NO: 170890 - protein, 58 aa, Glycine max
  Clone ID: PAT_MRT3847_125328C.1.pep
AAGLYFFRFSCYEPYIQKEMEGYHPEAFALRSGADKSPGDPIVTFLHCLVTCLANSLP

SEQ ID NO: 170891 - protein, 71 aa, Glycine max
  unsure (1)..(71): unsure at all Xaa locations
  Clone ID: PAT_MRT3847_125329C.1.pep
HSFLSVATIITXRAKSPLVPPSTPVDNALSKHRGILQVIMRPCVALAPQSNMILEPAQVPSINRNGLATCS

SEQ ID NO: 170892 - protein, 66 aa, Glycine max
  Clone ID: PAT_MRT3847_12532C.1.pep
QPQIKAHHKGNLCKKGPFLLFSYNSFSLARKLKSFLNKGYLEEKKNTGLKDISTWIFSSPSWAEIA

SEQ ID NO: 170893 - protein, 84 aa, Glycine max
  unsure (1)..(84): unsure at all Xaa locations
  Clone ID: PAT_MRT3847_125330C.1.pep
WXMMRCQGSRARXNEPIRRADCSVVGRRPFFFFFFLGAIQVQTHSHQHKLYIEPWRHVPGKVPYHPLRNFKPCTKKIKAHALHR

SEQ ID NO: 170894 - protein, 38 aa, Glycine max
  Clone ID: PAT_MRT3847_125331C.1.pep
SVALTNINQPEAANIDTKESKHPITYRSLNVHQLITLY

SEQ ID NO: 170895 - protein, 95 aa, Glycine max
  unsure (1)..(95): unsure at all Xaa locations
  Clone ID: PAT_MRT3847_125332C.1.pep
QDAQPTGRLEQVPSVTTLQVDRRSYMNAKGQESPVTTIPGDMGIAVTIGAKNSTTPDGHKPAIXGPRLGGTMTKPIGQKTVHKQQGRMRTPLSKD

SEQ ID NO: 170896 - protein, 50 aa, Glycine max
  Clone ID: PAT_MRT3847_125333C.1.pep
SNHNPKKGFEKIRFKENHQKNLIKTKKEKILIKLWLHTATSHSGMCIRHG

SEQ ID NO: 170897 - protein, 105 aa, Glycine max
  unsure (1)..(105): unsure at all Xaa locations
  Clone ID: PAT_MRT3847_125334C.1.pep
PVYLASVVEYFAPRGLVLTGITPMGVRSTRIKPRVILLGVWNGLXVCRPFPNGTVAPGVVAPHIPNMVGPKKGGTLASTFFGPSVFFFFPLNFSPRMLDPSLPPV

SEQ ID NO: 170898 - protein, 44 aa, Glycine max
  Clone ID: PAT_MRT3847_125335C.1.pep
EHLYRVPNTACSYSWLLGIFIPLNLSLSHMSLEARLHHSCYILV

SEQ ID NO: 170899 - protein, 47 aa, Glycine max
  Clone ID: PAT_MRT3847_125336C.1.pep
LLKNYNNLDFEKIFSLSFFSSITSLAMTVSNLISRERHARLIKQQLA

SEQ ID NO: 170900 - protein, 125 aa, Glycine max
  Clone ID: PAT_MRT3847_125337C.1.pep
VKPHFAPVFKSVILPLLQYSKDDEQMWADDDEEVLRFKWDGNEDLHHASYAASTLLQKLCKRQGTMDYLMVYIIENLNSTCDVRQADGALHMVAIESCQMAKPKNIRLDAEKLSDAHVIPRTAHE

SEQ ID NO: 170901 - protein, 82 aa, Glycine max
  Clone ID: PAT_MRT3847_125338C.1.pep
IVTHSLHTIGRETSRSLSKSLPPLRTKPLFLKLKTLTSLKIFHFRSFFFRTVFMHFRQTPSHKHDKHHATNYGQGHDPCGFE

SEQ ID NO: 170902 - protein, 561 aa, Glycine max
  Clone ID: PAT_MRT3847_125339C.1.pep
MTSTMQLTMVKGTIPVALSRRVCCQCQASLWPPWRIGFFAPVPLVRRVSSERVATLRVSCIKATESDVVEGESGGFAETEMSYTCVMKFGGSSVANAERMREVANLILSFPEERPIIVLSAMGKTTNMLLLAGEKAVSCGVTNADSIDELNIIKDLHLRTVEQLGVDRNVIEKHLEELEQLLKGIAMMKELTPRTQDYLVSFGECMSTRIFAAYLNTLGVKARQYDAFEMGIITTDDFTNADILEATYPAVAKRLHSDWVSDPAIPIVTGFLGKARKSCAVTTLGRGGSDLTATTIGKALGLPEIQVWKDVDGVLTCDPNICPQAKPVPYLTFDEAAELAYFGAQFLHPQSMRPARESDIPVRVKNSYNPKAPGTLIAKTRDMSKALLTSIVLKRNVTMLDIVSTRMLGQFGFLAKVFSIFEELGISVDVVATSEVSISLTLDPSKLWSRELIQQELDYVVEELEKIAVVNLLKTRSIISLIGNVQKSSLILEKAFHVLRTLGITVQMISQGASKVNISLVINDSEADQCVRALHKAFFESELSELENECIPRNGSVPALS

SEQ ID NO: 170903 - protein, 65 aa, Glycine max
  unsure (1)..(65): unsure at all Xaa locations
  Clone ID: PAT_MRT3847_12533C.1.pep
KKFSFKTSPDPGQKSRQRDIICGGMGXDQLIKDMDYDDIVSHIDDMHYASGXTSQGDPLTAQVQE

SEQ ID NO: 170904 - protein, 533 aa, Glycine max
  unsure (1)..(533): unsure at all Xaa locations
  Clone ID: PAT_MRT3847_125340C.1.pep
SSEHEYEGGANGTVVKDSDDADVKALLEESGNGDEEEKKENEPFAVPTAGAFYMHDDRFRDNAGAXTRRIGSGWESKDDRKWGHDKFEEITLPVKGTIKKVRRPSKGNFRGFGGKTRGVDHXRGRYVRGSRKGYDNRGNQTQXPESVVCGRGPRGXEPTNKNIDSASLVKNKLPGKQPSKSSHVGLGKTLAPVKILQSDSLGSRANIXGLLLQARKIIFRKQRMYGCHHRKQLYIDGPGTPSVGKAFNNMHIPPPGSSGVNPSQSAHPRGHGRSGAVPVQMNYQPVTSHNQPSKIDPTQLPAIQRTAPGRTSPSLKAPAPQVGNRPGSGSQASSPPKTSSAISSLDSGEIDAASDFDKLKGALVGKVRGATQRSGRGSFVYGRAMGTAGDISGTHGDLNFPTFLPVMQFGGQHPGGIGVPAVGMAFPGYVGQPQLGLGNSEMTWLPVLTGAAGALGAAGALGATYCPPYLTVDGAYHARQSGQTSATPISSKENNVNKANNEWKSPQKSEPVNDEFGQRQNKPRRYSEMNFGQ

SEQ ID NO: 170905 - protein, 150 aa, Glycine max
  Clone ID: PAT_MRT3847_125341C.1.pep
YTNALPFLPTQHISSSKIHCPGTLITKARDMSKAVLTSIVLKRNVTMLDIASTRMLGQYGFLAKVFSIFEELGISVDVVATSEVSVSLTLDPSKLWSRELIQQELDHVVEELEKIAVVNLLQNRSIISLIGNVQRSSLILEKVLYYAPFI

SEQ ID NO: 170906 - protein, 80 aa, Glycine max
  Clone ID: PAT_MRT3847_125342C.1.pep
GKIRGLHYLTFLSQIYLKYIPDEQENHLHEKFLIARAISCCNTIVVLFCHILSCRKTCLSFSRGLRKQNARKIWERSQLE

SEQ ID NO: 170907 - protein, 564 aa, Glycine max
  unsure (1)..(564): unsure at all Xaa locations
  Clone ID: PAT_MRT3847_125343C.1.pep
MASALQQLQGVQGKLALSMSVRRSLHHCKSQIGFAALGAPVCARRVWGNRVAFSVTTCKAXTSDVIEKNATENGMVSSEGETSFTCVMKFGGSSVASADRMKEVATLILSFPEERPIVVLSAMGKTTNKLLLAGEKAVSCGVINVSSIEELCFIKDLHLRTVDQLGVDGSVISKHLEELEQLLKGIAMMKELTKRTQDYLVSFGECMSTRIFAAYLNKIGVKARQYDAFEIGFITTDDFTNADILEATYPAVAKRLHGDWLSDPAIAIVTGFLGKARKSCAVTTLGRGGSDLTATTIGKALGLPEIQVWKDVDGVLTCDPNIYPKAEPVPYLTFDEAAELAYFGAQVLHPQSMRPARESDIPVRVKNSYNPKAPGTLITKARDMSKAVLTSIVLKRNVTMLDIASTRMLGQYGFLAKVFSIFEELGISVDVVATSEVSVSLTLDPSKLWSRELIQQASELDHVVEELEKIAVVNLLQNRSIISLIGNVQRSSLILEKAFRVLRTLGVTVQMISQGASKVNISLVVNDSEAEQCVRALHSAFFESELSELEMDYKNGNGSVDELS

SEQ ID NO: 170908 - protein, 105 aa, Glycine max
  Clone ID: PAT_MRT3847_125344C.1.pep
DAWVELQPNATSGMGVADHSKNTFMELKQKKVHRYVIFKVDEKKREVVVEKTGGPAESYDDFAASLPENDCRYAVFDYDFVTSENCQKSKIFFIAWLVSFSLFYM

SEQ ID NO: 170909 - protein, 177 aa, Glycine max
  unsure (1)..(177): unsure at all Xaa locations
  Clone ID: PAT_MRT3847_125345C.1.pep
LVGTPTTTVSPDTYKLEGMDNRAIERFESETVDMNMRSFKIACVLYTLKAYRELGITRXISVLRGSNGNTPINYLHISVDAHWTHGAFIKNMITVTYQADCADVIIASTTAGYEALIATDAQTLEHALLSFTLGVKQMMRCCNMMDATTPKYFQALSDEIAKEDPSSMKKAGYNPDK

SEQ ID NO: 170910 - protein, 70 aa, Glycine max
  unsure (1)..(70): unsure at all Xaa locations
  Clone ID: PAT_MRT3847_125346C.1.pep
TLSCTFDHNVGAYGFTVRXQHLQRYREYANIYKEEEEERSDRWNSFLDRQAESSELVTDGLIVGEGGEKF

SEQ ID NO: 170911 - protein, 86 aa, Glycine max
  unsure (1)..(86): unsure at all Xaa locations
  Clone ID: PAT_MRT3847_125347C.1.pep
SGIFHLWCYCCLEACKKFYISYIFPCAQRVWIAWNYKGLXDKMKLVLIDLQNRYAWYNFLHKCYCPKSPMWTLFLLKIYRFHAMNL

SEQ ID NO: 170912 - protein, 62 aa, Glycine max
  unsure (1)..(62): unsure at all Xaa locations
  Clone ID: PAT_MRT3847_125348C.1.pep
XPRAKGNFYCSPLTINSTNYYPFFFYQKSIKKTPFLPHLKKKKCFTKKKPQPVFEIFIKKKY

SEQ ID NO: 170913 - protein, 122 aa, Glycine max
  Clone ID: PAT_MRT3847_125349C.1.pep
EASMPLEDFYRIFGATKLKSPFWTSWQPFESPCLLEHVTLPVELGFFVILLVQLLRKYINLISKQNKVTDSAKEIVHPTAIKFGFAYKLSFVCTTLMMDGHSSLLSLILSRETQCTLETSGL

SEQ ID NO: 170914 - protein, 76 aa, Glycine max
  Clone ID: PAT_MRT3847_12534C.1.pep
HRSSSRRQQLLASHAIQYFHRHDDLTLISSFPRSVDLLWSGAHECMSGTFEYDEFFDQPMNDAVDTVQVSTVSALT

SEQ ID NO: 170915 - protein, 53 aa, Glycine max
  Clone ID: PAT_MRT3847_125350C.1.pep
PCVDATAIEMTLGIPFWLLHSIKSESVRQSLCSSLCDRGIPCYGSCTLRCGHS

SEQ ID NO: 170916 - protein, 47 aa, Glycine max
  Clone ID: PAT_MRT3847_125351C.1.pep
SRSLLADSLAAAFFFFFILKSFEDSDIKHFLAAKHLSVFLQAIPYYF

SEQ ID NO: 170917 - protein, 33 aa, Glycine max
  Clone ID: PAT_MRT3847_125352C.1.pep
TRLTHSAMHEDPLSGEDEKDPKHNHTEGAPQTT

SEQ ID NO: 170918 - protein, 56 aa, Glycine max
  Clone ID: PAT_MRT3847_125353C.1.pep
RVTFLIPAKVVRGVRDSSFGRPGMYQIIRGFLFFKLRIHGPPLLKKMLLQGWQFSK

SEQ ID NO: 170919 - protein, 77 aa, Glycine max
  unsure (1)..(77): unsure at all Xaa locations
  Clone ID: PAT_MRT3847_125354C.1.pep
QQFCVXNNLLAAXPTHXMXTFKNLXSLSFEXNSXHWEXTSEIXALHDLERLXXQQPIVRGIPDIFGNFTNMVSCNGK

SEQ ID NO: 170920 - protein, 111 aa, Glycine max
  Clone ID: PAT_MRT3847_125355C.1.pep
MNLVGERKTITISGIGKGGRGLGKGGAKRHPKGLRDNIQRITKTAIRRLARRGTVKRINGLMYEETRSVLKILLQNVIRDAGTYTEHARRKTENAMDDGYSLQTQDKTLYR

SEQ ID NO: 170921 - protein, 78 aa, Glycine max
  Clone ID: PAT_MRT3847_125356C.1.pep
GGIKGIFGVGGSTTPKISGFPPLGCCKPLIFVKANRKCKPALYKLQVSAPLTPQFMRNMAIHCAHFLWMTILVMNSMC

SEQ ID NO: 170922 - protein, 133 aa, Glycine max
  Clone ID: PAT_MRT3847_125357C.1.pep
VLQEQSHSHCRTSLSGGKLSSGVIKLVLQVAHTERQVLFGLGQVSIKCQLSSATQPGSQFIIFMAPVQRHHGHFRAHSYASCTHRTSSESARVITAADCIIVPPCVVLSQRVPVRRSTRKVVNAFCMGSSFLV

SEQ ID NO: 170923 - protein, 73 aa, Glycine max
  Clone ID: PAT_MRT3847_125359C.1.pep
SCGLLVGGLMQITCRWKICENKLCNYYINVGMKQRRENLRDEDRYLGKKIKWNLRGKCIKSTSSSPSPSSPSR

SEQ ID NO: 170924 - protein, 73 aa, Glycine max
  Clone ID: PAT_MRT3847_12535C.1.pep
RCPGSFRICAYAATKGNRYINSCLRLNEEMKSVDGLASQLKILRKHVDALDAAVTSFFISPETGGMQSCTRQT

SEQ ID NO: 170925 - protein, 50 aa, Glycine max
  Clone ID: PAT_MRT3847_125360C.1.pep
VMFDQKISTGDVSFFDASINSLREFIQTNRTDGLSVSGGHAPCSISVNST

SEQ ID NO: 170926 - protein, 95 aa, Glycine max
  Clone ID: PAT_MRT3847_125361C.1.pep
DQTTPPFLRVKVGIDQMCSPPRDPQGGKVLKKTPPQLHQGGGKRLLPLFPKHIQKVLIIIGSLISFKKGVGPIILLQMVFVKRGRNFFSMFQDQI

SEQ ID NO: 170927 - protein, 71 aa, Glycine max
  Clone ID: PAT_MRT3847_125362C.1.pep
LEAWGLCGAPTPICELPPHVPIVAYKLASALTKKNFLSLLNKAVFFLPTPEGFFFQVPTQKKKKPTTAFPP

SEQ ID NO: 170928 - protein, 91 aa, Glycine max
  Clone ID: PAT_MRT3847_125363C.1.pep
PFIFPHFPKASERHSIISGTTQPSYPIFSTPDTKFSLYPSVPEPKYISLHIFLTTIFFCQHDFLYNSSNSYPHLRIHYTCVFFIHYYHSKL

SEQ ID NO: 170929 - protein, 470 aa, Glycine max
  Clone ID: PAT_MRT3847_125364C.1.pep
MEATDRLGGQYSPNLHPRCTHLVVQSFGGRKFEHALKHGAKNGLFVVTLGWFVDSVRKSVRLSESHYRVKSYGDNNTHLEDFRLLPEYTNAENSCLPARILQTKQAISVEELQRFTGRESIRNLDSTLSGCSIYVDPGISSELRNKVIETASREGASLVEQWFVGCNVSHVVTEGTSIQRYLGYSSYLITPLWVLKTAKEKYVRRLVRMSVDLAKQVGLMLEDIHNGISGKEVIKQKVLNNLLDTESEVGYEERQQIVNSVKNGVRSRRGRRMQTCQTPIRPITPNNLLDSICWSISESTSAASIYTDSFSVEDPSENHTSIFFYAKGDGKDSEASFSNSTRPLTESEKSELIFKNPFLTILFPIDRFAEMGPSSRTFFSHNGFRCLQVLDHIHAFYQENMSREEIEAAIHSDSRHADRLRSVYSSKETAEHGYVLFKRVEFLGSRTSFEMLKRVTGDNSSNVYELLLRA

SEQ ID NO: 170930 - protein, 117 aa, Glycine max
  unsure (1)..(117): unsure at all Xaa locations
  Clone ID: PAT_MRT3847_125365C.1.pep
GKEQXXXRGANKXPERQPXGTAAQSQDDGKDYQEPEPAPRXDPTEXTARTKDRVFFLEXXATXQXRYITALHRMGDAGAKSKCRTXGIQGIAWAFGGMIFDLVYCTAGISGGHIKPG

SEQ ID NO: 170931 - protein, 71 aa, Glycine max
  Clone ID: PAT_MRT3847_125366C.1.pep
RKAKSLSLPISLFQCQGTNLPPLLLNNLPSNLYHKETRKKKLTKEVKGSRSRQFLFALNLSESETFEIVTM

SEQ ID NO: 170932 - protein, 38 aa, Glycine max
  unsure (1)..(38): unsure at all Xaa locations
  Clone ID: PAT_MRT3847_125367C.1.pep
LGLLVPXPXFVAGXCPAXGRXFLQSGLLSGFXLXLLNL

SEQ ID NO: 170933 - protein, 62 aa, Glycine max
  Clone ID: PAT_MRT3847_125368C.1.pep
LLLDLLPQYLHVCAIAILFFFCGGGGELLNFPPNIISYTVFFIVNFEVSRQKKKKKGRPPII

SEQ ID NO: 170934 - protein, 252 aa, Glycine max
  unsure (1)..(252): unsure at all Xaa locations
  Clone ID: PAT_MRT3847_125369C.1.pep
MATRLQFENNCEVGVFSKLTNAYCLVAIGGSESFYSVFEAELADVIPVVKTSIGGTRIIGRLCAGNKNGLLLPHTTTDQELQQLRNSLPDQVVVQRIDERLSALGYLREGNHYIGEVAHTHTDLDGVTEEMIADVLGVEVFRKTIAGKNVVGCYCAFSNRGGLVHPHTSIXDWGGHSTLLXVPLVAGTINLGSELIAAGXTVTDWTAFVFLTPPHGLSVIESVFKLREXQPSAIVDEMRKSLIDTWLPKETG

SEQ ID NO: 170935 - protein, 127 aa, Glycine max
  Clone ID: PAT_MRT3847_12536C.1.pep
MGDREEQGEGAGSSLELEAPIPETQKEIPISDGIAFNNQSAIFQAIEVVERDSLAIAQSFTSLFASLRLALSESTSTSLHHMQCFTDATGRLQESVLDAATKGNRYINSCLRLNEEMKSVDGLASQF

SEQ ID NO: 170936 - protein, 245 aa, Glycine max
  Clone ID: PAT_MRT3847_125370C.1.pep
MATRLQFENNCEVGVFSKLTNAYCLVAIGGSESFYSVFEAELADVIPVVKTSIGGTRIIGRLCAGNKNGLLLPHTTTDQELQQLRNSLPDQVVVQRIDERLSALGNCIACNDHVALTHTDLDRETEEMIADVLGVEVFRQTIAGNILVGSYCAFSNRGGLVHPHTSIEDLDELSTLLQVPLVAGTVNRGSEVIAAGMTVNDWTAFCGSDTTATELSVIESVFKLREAQPSAIVDEMRKSLIDTYV

SEQ ID NO: 170937 - protein, 54 aa, Glycine max
  Clone ID: PAT_MRT3847_125371C.1.pep
KGVFFESSTRANPLHKFPTGQPPCQKKIIINPPYGGPPMGLRVNFQPWLLYQGA

SEQ ID NO: 170938 - protein, 134 aa, Glycine max
  unsure (1)..(134): unsure at all Xaa locations
  Clone ID: PAT_MRT3847_125372C.1.pep
YSAEKXXQTAGTGCRTGKPETKAXXDRRQEGPKGSLRRGGRXPKGKKSTPWAGHRHREXKXXPLKEERLNTLLCDIGLRVRFKLLLPLSQFSAEFQVQAGEISDQDSHCSIWHRIAWVDGDISVLSVTLLFSLI

SEQ ID NO: 170939 - protein, 64 aa, Glycine max
  Clone ID: PAT_MRT3847_125373C.1.pep
VFHTACKNVDADQRFTHDSENLTTDLPRLVTGLVKPSVDILWITRRMKLFTGRMGVAILYAYIA

SEQ ID NO: 170940 - protein, 41 aa, Glycine max
  Clone ID: PAT_MRT3847_125374C.1.pep
KYGNRLLYNTNKVSYILEVSMNVRAGEKLYLELDFGTSGAR

SEQ ID NO: 170941 - protein, 68 aa, Glycine max
  Clone ID: PAT_MRT3847_125375C.1.pep
RLEGWQYLITHFSDFQLACLGSFFLHEGVFFLSGLPFIWLERAGWMSKYKIQVCPCSNLFLSQFCFSI

SEQ ID NO: 170942 - protein, 33 aa, Glycine max
  Clone ID: PAT_MRT3847_125376C.1.pep
HEYISCTRNPYTPKHHQLMHVHETVALDLEIKK

SEQ ID NO: 170943 - protein, 97 aa, Glycine max
  Clone ID: PAT_MRT3847_125377C.1.pep
MTSLGPHSQDREPVTLPMKATTAVDKNDDKAANANRRSSTQIETLKNTNARTNKAPSSDTSSNTKRLDDDTESLAHEKVPTELKKAIMQTRKDKKLT

SEQ ID NO: 170944 - protein, 386 aa, Glycine max
  unsure (1)..(386): unsure at all Xaa locations
  Clone ID: PAT_MRT3847_125378C.1.pep
EAILGNTLFDPKKEALPENEEKKNEGEEKEEEEEKKVEVEENDVSIWGVTLLPSKAATSVDVVLLKFLRAREAKVKDALRRVRRRHKWRKESKIDSAVDEDFGSDLASAAYMNGVDHEGHPVCYNIFGAFESEELYQKTFGTEEKRSEFLRWRCQLMEKGIQKLNLKPGGVSSLLQINDLKNSPGPSKLRVATKQTLAMLQDNYPEMVAKNIFINVPFWYYALNALLSPFLTQRTKSKFXVVARPNKVTETLTKYIPIEEIPLHYGGFKRENDSEFSSQDVAVSELILKAGSTATIEVPALEVGNSLCWDLTVLGWELSYKEEFVPTDEGSYTVIVQKGKKMGSQEGPVRNTFRNNEPGKVVLTIENTSNKKKKVLYRYKSIKSSF

SEQ ID NO: 170945 - protein, 35 aa, Glycine max
  Clone ID: PAT_MRT3847_125379C.1.pep
LTEAKKIHDNDPQIWIELTMRSNMYKFRLFKKIKP

SEQ ID NO: 170946 - protein, 112 aa, Glycine max
  Clone ID: PAT_MRT3847_12537C.1.pep
PYRALKKSCDIHIVTWGTICKLFIPCVYEGKRGNITSSLPPILTAGREKYYVALLALHHYLSAIHEMIDISTYFKSLLWETETNLVQDCIPPVSGDMKKLVNSCVQSIDMLS

SEQ ID NO: 170947 - protein, 50 aa, Glycine max
  Clone ID: PAT_MRT3847_125380C.1.pep
TNILRIKWSCLPFQQVQVPWTGGGCVKLMVASFFFLMFGNWSLLYKVRLI

SEQ ID NO: 170948 - protein, 142 aa, Glycine max
  Clone ID: PAT_MRT3847_125381C.1.pep
PNKVTETLTKYIPIEEIPLHYGGFKRENDSEFSSQDGAVSELILKAGSTATIEVPALEVGNSLCWDLTVLGWEVSYKEEFVPTDEGSYTVIVQKGKKMGSQEWPLRNTFMNNEPGKVVLTIENTSNKKKRVLYRYKTIKSSF

SEQ ID NO: 170949 - protein, 153 aa, Glycine max
  Clone ID: PAT_MRT3847_125382C.1.pep
MKRFLSHSFLLQIAVSLLLVLLLFMNKSQGSPIRFAKYSFSVTTKVDALPPAIPPSSTQPQPFIPLLAPSPLIPFTNNSVPKLSGHCSLNFSAAQDIMTTTATDCWTSFAPYLANVVCCPQFDAMLVTLIGHSSKYSGVLALNTTHAHHCLSD

SEQ ID NO: 170950 - protein, 80 aa, Glycine max
  unsure (1)..(80): unsure at all Xaa locations
  Clone ID: PAT_MRT3847_125383C.1.pep
GGQTNIEHEXXXGEMAWIATHHLLLLAHPLYLLQTAHLCLCSHTSYLLKKVYEDRPLTEGMVREVPTTGLHDRARLCGGD

SEQ ID NO: 170951 - protein, 165 aa, Glycine max
  Clone ID: PAT_MRT3847_125384C.1.pep
FPNRLIPPLRRNSFGNALVATVTPECYVGEMTTRPLSYAAQKMREAVALLTDKYIRSHLEVVFGEEQLDCIKAFFLGQGEGRYAPFGGNPNLQITSWINMRAYETDFGWGKPVYFGLGYVCALDRGIIMRGPQDDGSVIVIMHFQIAHMQLLKKFFYEDIFTSRL

SEQ ID NO: 170952 - protein, 38 aa, Glycine max
  Clone ID: PAT_MRT3847_125385C.1.pep
RKATSTGFGSSVNSSSNHQSGASAKEDSFSAHTSHSQS

SEQ ID NO: 170953 - protein, 117 aa, Glycine max
  unsure (1)..(117): unsure at all Xaa locations
  Clone ID: PAT_MRT3847_125386C.1.pep
HASVRLREDDRRGFLKQPTEASSSSSPPKNSVKASHPFSSSSSQSLSLSPTLFIKVPRFLFPGTPPVFPFNNLQPRFTLFNKILFLLNPKSETLAPVTQFPPPQLASEVGGKXXKXK

SEQ ID NO: 170954 - protein, 240 aa, Glycine max
  unsure (1)..(240): unsure at all Xaa locations
  Clone ID: PAT_MRT3847_125387C.1.pep
RGLSKEMRHGRTAHNMSSSSLHKKSDLTLVSKVHSIPLRNVLVNLQEVVLGTKLSILFPAIPLAVVAQCYGFGRPWIFALSLLGLTPLAERVSFLTEQLAYYTGPTVGGLLNATCGNATELIIAIFALSNNKIHVVKYSLLGSIISNLLLVLGTSLFCGGIANIRKEQKYDRRQADINLLMLFVALLCHLXLPVLFHYVGASAADTAEXSLQLSRAASXVMVIAYCAYLVFQXWTHRQLF

SEQ ID NO: 170955 - protein, 55 aa, Glycine max
  Clone ID: PAT_MRT3847_125388C.1.pep
DRFYVSQDEKNNLSKTLLPHYIFPKLENVYSSPPPHGSCHFGIPEEDQPLWFWPY

SEQ ID NO: 170956 - protein, 112 aa, Glycine max
  unsure (1)..(112): unsure at all Xaa locations
  Clone ID: PAT_MRT3847_125389C.1.pep
LLCRSFLAGPRRLFACLRPRSFLFACRCLLFSFSFSLRLAFVCPCLXWLFSFPVFFVPPXSLPAVXXXLVGXPFXXPPSAXXVPLFSLSACLSLASLLLXCSXRXPRXRXRA

SEQ ID NO: 170957 - protein, 49 aa, Glycine max
  Clone ID: PAT_MRT3847_12538C.1.pep
THRSNVGLRLAGHRAYSDHWKLNPCICSGCRAESIFLSIHGGIPCRTIY

SEQ ID NO: 170958 - protein, 46 aa, Glycine max
  Clone ID: PAT_MRT3847_125390C.1.pep
EKRISHDITLYTMGNELTFNNHYTKLIKKYTIVNKETHNHIKIPLD

SEQ ID NO: 170959 - protein, 305 aa, Glycine max
  Clone ID: PAT_MRT3847_125391C.1.pep
MAYRRCLLIRGNLVDRRCHPSFSYVLHSDQGKHENTNEKSSSGGDGDFTQTRSFGSSLNGPMGFFAHSRDRFLSPCSRYGFCRYMSTVNQGSDKISSDVMTDVADVLTNTTMDAVVSQAPVVNEVAIAAADSFLPVQALQYVIDAVHSYTGLNWWAAIVLTTLLIRTATVPLLINQLKATSKLTLMRPHLEEIKQQMEGLTMDPVAVAKGQQQMKKLFKEYGVSPFTPLKGLFIQGPIFVSFFLAITNMAEKVPSFKHGGASWFIDLSTPDALYIFPALTALSFLITVECNMQEGMEGNPVACTM

SEQ ID NO: 170960 - protein, 59 aa, Glycine max
  unsure (1)..(59): unsure at all Xaa locations
  Clone ID: PAT_MRT3847_125392C.1.pep
SQSKGTSLYNSFKWEKPGKPQLNPLESHSTLSSLRNLEKDRKDRPXNTLPTLNGQWYPP

SEQ ID NO: 170961 - protein, 98 aa, Glycine max
  unsure (1)..(98): unsure at all Xaa locations
  Clone ID: PAT_MRT3847_125393C.1.pep
XLVPXXQLFXXYASTIAKCSIPXXLXNFXFMXXXXRILXXXXSFXNXXYSSFKAXXALXEXXTXXQXXQXXXEXXHXHXLFLQYGDXRAXFRAYVXXX

SEQ ID NO: 170962 - protein, 98 aa, Glycine max
  unsure (1)..(98): unsure at all Xaa locations
  Clone ID: PAT_MRT3847_125394C.1.pep
WGLIFPKKGGGPKKGFXKGGFEGANQTSWRLGFLFCNSQQVTGFXIFLGISQNFXKAGKTFKPTFFFSPGHAKFFEKSETLAVSGKWGFFRMVVWLTP

SEQ ID NO: 170963 - protein, 39 aa, Glycine max
  Clone ID: PAT_MRT3847_125395C.1.pep
YTHMLLIHISMTEFAVCSPLHRCTRICISPETSFLSSRS

SEQ ID NO: 170964 - protein, 263 aa, Glycine max
  Clone ID: PAT_MRT3847_125396C.1.pep
MTEEPETNPPPPEPSIPSAPAAVEETAAPVTATTSQPSAEIVVPLALAPKRQRRPSVRLGEIGDQRASAHGHELHMRRPSMPPWSWRTPKESSRTSKARSVTNLTNGGEEFGNSNSRRGKAKRGPATKRLRTNWAPTATIDENGDEEGFRDFEHEHEQSPVHSVEDNGVDYWHVDRNEDPRVRVSENDGVESESRERRKSDGVRSWLYELGLSRYAPMFEIHEVDDELLPMLTLEDLKDMGINAVGSRRKMYTAIQKLRKCLL

SEQ ID NO: 170965 - protein, 62 aa, Glycine max
  Clone ID: PAT_MRT3847_125397C.1.pep
RYYCVDTYVACEGSLSLGQTRNKTCPFYVMRDLLFRRTPVLFLAPGLGHVTTLTDQTIAFPV

SEQ ID NO: 170966 - protein, 130 aa, Glycine max
  Clone ID: PAT_MRT3847_125398C.1.pep
WAPRATIDENGDEKGFRDFEHEHEQSPVHSMKENGVDYWHVDRNEDPRVRVSENDGVESESQERRKSDGVRSWLYELGLSRYAPMFEIHEVDDELLPMLTLEDLKDMGINAVGSRRKMYTAIQKLRKCLP

SEQ ID NO: 170967 - protein, 196 aa, Glycine max
  Clone ID: PAT_MRT3847_125399C.1.pep
MIRGGQNYVSSAPAFSNDGKRLLVCSGSTVSIFSTGTGSLVSSLEGHTASVTAVVVVPSSTGLSYCWTASVDGTIRHWDFSVPECVNIIDLCLPIFSMVVPSILSPREENGKTPPNVIAYVSVQGIKAPPDNPTKPLYGQIRKCNLTHFRSVSNLIMKETERRKSLTISPSGNFLGIKDKRKLHIWAVPKKDSDSA

SEQ ID NO: 170968 - protein, 99 aa, Glycine max
  Clone ID: PAT_MRT3847_12539C.1.pep
GCGLLISPSSFSCKENKLVLGLLVTLFTIQPLPFHLLSHSNKREVQLGLLVTWFSFKTLALCVLSLANYGLSPHPLCHRSALEIEAHCKQKCNKNPKTK

SEQ ID NO: 170969 - protein, 242 aa, Glycine max
  Clone ID: PAT_MRT3847_1253C.1.pep
MPFQIMDQRGVSASSHYFDDISFRSERNVGLRKPKSINDHYPQGNNGMVASPGNILNATPPLDVNAKAGLLLPQASLPGDNIHSTESSNYRTKSLSDACLQSAPTSYGLIGNKIVTNAAPCESSLFSSSMSEIFSQKLRLFGNDVRSDHLINADSPPEEEPYKSLEEMEADTIGNLLPDEDDLFSGVVDELGCSSHARTNDDFEDFDLFSSGGGMEMEGDEHLSSGKRISALDGDFGFPWRL

SEQ ID NO: 170970 - protein, 154 aa, Glycine max
  unsure (1)..(154): unsure at all Xaa locations
  Clone ID: PAT_MRT3847_125400C.1.pep
MENCIFHYHHHTLLTLPSISHKPHFRFFTRPDLGGGGGGVRVASSSSCLLFHRRRPFIRASAGASPCEFSSLNSPLEPXFHGXEFLIGVLQNHPQMFHLAVGEELKLLAEDRDAAHARMVLGSASDEAXLHRRIALVKENQCQIAVEDVIYLLI

SEQ ID NO: 170971 - protein, 160 aa, Glycine max
  Clone ID: PAT_MRT3847_125401C.1.pep
VERGLRFHPPRQTHHRKRIQGKLSQPLLTRGWSQRSHSQGKKLRSTSTETRPRKKYPIHGHKATPEAESKKIHTSPKETEEYGRNKSTDNQPANQASPATQDPGPPNTLAQPGPGDAKDPQKGGPQNALGEGPTMPSTTPKETGFQSKEPAGVPPPGTCE

SEQ ID NO: 170972 - protein, 54 aa, Glycine max
  Clone ID: PAT_MRT3847_125402C.1.pep
KAKKLFDSMSRSGLNPDNYTYNALWCASESGRLEEAEKMFYSMQENGCSPDSYV

SEQ ID NO: 170973 - protein, 56 aa, Glycine max
  Clone ID: PAT_MRT3847_125403C.1.pep
CTLVAGWILSAAAFFFFFFFFYCARILNQKPHCKYNASNEIFNGNIKHESTQAELF

SEQ ID NO: 170974 - protein, 266 aa, Glycine max
  Clone ID: PAT_MRT3847_125404C.1.pep
YPILCPLEAFIVQHILTISVMGLLSCFRSTVLRKCSKGSSGMSRFLYTNNFQRNLISSGGNESYYGYFNRRSYTSLYMGTGTVGGITSARIRVPNVGCEGFMCSSHLSITQRNSRLIHSTSKIVPNSEIQNITTEMVKTPEVSRWMDQVIPTIAPCDAAEPWQLGFQDAATPIMQGIIDLHHDIFFFVIQIGVFVSWVLLRALWHFRSKMNPIPQRIVHGTTIEILWTIFPSVILMFIAIPSFALLYSMDDIVVDPAITIKAIGHQ

SEQ ID NO: 170975 - protein, 42 aa, Glycine max
  Clone ID: PAT_MRT3847_125405C.1.pep
CLGTCIGITVINSLLYLLFTICKVVAYRDPLIVVLPSFQNSK

SEQ ID NO: 170976 - protein, 43 aa, Glycine max
  Clone ID: PAT_MRT3847_125406C.1.pep
SPSLCHSITISSASRKCFPSSPIVFIHTYSSTERLFTLAPDVS

SEQ ID NO: 170977 - protein, 187 aa, Glycine max
  unsure (1)..(187): unsure at all Xaa locations
  Clone ID: PAT_MRT3847_125407C.1.pep
LITKAAERLISSEGELKTQLENFRRDPDISCWLEDAAYFAAIDDSLNTISWYSWPEPLRNRHLVALEDIYQQKRDFINVFIAQQFLFQRQWQKVHSYAQSKGISIMGDMPIYVGYHSADVWANKKQFLLNRKGFPLLVSGVPPDAFSETGQLWGSPLYDWKAMEKDGYLMGVRXIRXAQNLFDGFRI

SEQ ID NO: 170978 - protein, 567 aa, Glycine max
  unsure (1)..(567): unsure at all Xaa locations
  Clone ID: PAT_MRT3847_125408C.1.pep
MGLLALNISVCCFPQQRCPTLFKPTITKQTLSFPTASAFSSSSLTQLSVGQYLPANYGDWVPNPDPELRRRCGILLHPTSFRGPYGIGDLGDEAFRFIDWLHHSGCSVWQVLPLVPPGRKANEEGSPYSGQDANCGNTLLISLEGLVEDGLLEKHELPQPIDAERVNFSLVADVKDPLITKAAERLISSEGELKTQLENFRRDPDISSWLEDAAYFAAIDDSLNTISWYNWPEPLRNRHLVALEDIYQQKRDFINVFIAQQFLFQRQWQKVHSYAQSKGISIMGDMPIYVGYHSADVWANKKQFLLNRKGFPLLVSGVPPDAFSETGQLWGSPLYDWKAMEKDGYSWWVRRIRRAQNLFDEFRIDHFRGFAGYWAVPSEAKVAMLGKWXGPGISLFDTIFRAVGRINIIAEDLGVITEDVVQLRRSIGAPGMAVLQFGFGGDANNPHLPHNHECNQVVYTGTHDNDTIGGWWEALNQEEKSNVLSYLSLNEGDEISWALIQRVLASVAQTAIIPMQDVLGLGNSARMNIPATQFGNWGWRIGSSVSFDGLEREADRLREMLSMYGRL

SEQ ID NO: 170979 - protein, 434 aa, Glycine max
  unsure (1)..(434): unsure at all Xaa locations
  Clone ID: PAT_MRT3847_125409C.1.pep
RVNRYAHEYEFIGRMVEQVCCKINPTCLHVADYLVGLESQVSKVMKLLDVGSDDGVHHMTGIHGMGGIGKTTLALSXNLIANCFDSSCFLQNVRKXSNKHELQHFQSILLSYILGKKKIKLASEQQGVSMIQHRLQRKKVLLILDDVDKLEQLLPLALEVIGSNLFGKNTXEPKSVIKQYKQILTIQILEILKLSFDALEEEEKSAFLDIACCFKEYGLILLFLTLLVASKDMHXSALLDICALINVEDILGAHYGDNDMVTKIVTQESPREPGKLXIQVLEDNTLRXSEIEIICLDFSIFAKEIVXWNRKAFKKMKNLKTLIIRNGKFSKGPKXLSWMAYPRSLXNLTVLNFGRCESLITQIPDVSGLPNLEELLFEFCKNLTTVHGSIDYLDKLKILSAFNKCTELGSFSPIKLISLEKLELSYCSGLESFP

SEQ ID NO: 170980 - protein, 58 aa, Glycine max
  unsure (1)..(58): unsure at all Xaa locations
  Clone ID: PAT_MRT3847_12540C.1.pep
PTLISLPSLPLSQYKTPPPPPXLKNSPPPQKNLFHIPPKLFFFSHMITPNNFFPFSPP

SEQ ID NO: 170981 - protein, 51 aa, Glycine max
  Clone ID: PAT_MRT3847_125410C.1.pep
IRVSALAFTRIPCHMVIILILNILSLFSVDFLPQNLKFHNFNMVSEWYHPL

SEQ ID NO: 170982 - protein, 69 aa, Glycine max
  Clone ID: PAT_MRT3847_125411C.1.pep
IWGLYWGGGLFYYKRKYGGDPLVGYEWTFLKYSKPYFNGVKECKGGGFFGKEKKYKNGKEKNKIEPPPF

SEQ ID NO: 170983 - protein, 80 aa, Glycine max
  unsure (1)..(80): unsure at all Xaa locations
  Clone ID: PAT_MRT3847_125412C.1.pep
YHILSVSATLGQTLVRHRSKPRIYIGCMKSGPVLSQKGVRYHEPEYWKFGRGWKPEKKHKATGXLYAISNDLATYISINQ

SEQ ID NO: 170984 - protein, 89 aa, Glycine max
  Clone ID: PAT_MRT3847_125413C.1.pep
YLDRTVQGPVTRKWRGWLSRGPRFLSLVVVVMEFEFYMCIDDREKILRISSCTRSTSQPSHSRTLQKFLPYNTCPLKIQELNLRPKFAV

SEQ ID NO: 170985 - protein, 74 aa, Glycine max
  Clone ID: PAT_MRT3847_125414C.1.pep
NKVFGEVCEYQLQEESLYYHALSPWLYMIEQPNQTSNKVNIRKKKCVSKARINCFTRAEIQHTSITSSHAINNY

SEQ ID NO: 170986 - protein, 139 aa, Glycine max
  unsure (1)..(139): unsure at all Xaa locations
  Clone ID: PAT_MRT3847_125415C.1.pep
XXYXXXXSXXXXXQYCRXXSXXAXSXXHXXXXXXXXXXXXXHXXXXVXRXGXTXKXXXCPXTXXXEGTTFREXPPGKNFFPPREKGPFFFXNPRGFLKTPPGXPXGVFXXGXPPFKKIFXGGPPKGVLKXXXFXFFSPL

SEQ ID NO: 170987 - protein, 87 aa, Glycine max
  unsure (1)..(87): unsure at all Xaa locations
  Clone ID: PAT_MRT3847_125416C.1.pep
SRVGCGWGSLSGWFLPRPCLXFGSXVVLRSLRLCXWLAFFFLLLLPVXLLSALVGCPFLLXFCVGCWXXFGMVPXVFWTGGRQLMCS

SEQ ID NO: 170988 - protein, 110 aa, Glycine max
  Clone ID: PAT_MRT3847_125417C.1.pep
ISISFNSWRWPAQERQIFDLEEFGRAPADKNVLLVWRANRVACVPQPPKGKFHQLLYTSSATICRWYQCSPVRVGLFVIKDIVLRRCLWMFPFYIRIVHQLVRGGGRIPS

SEQ ID NO: 170989 - protein, 61 aa, Glycine max
  Clone ID: PAT_MRT3847_125418C.1.pep
RAVAGLGAYLLSLSDRRSEACIVLQGKQYIRMVLFIKTFFSKTRSHRKASLNSTLMMTLIH

SEQ ID NO: 170990 - protein, 89 aa, Glycine max
  unsure (1)..(89): unsure at all Xaa locations
  Clone ID: PAT_MRT3847_125419C.1.pep
FNIVGETATNSESFVSDSKRDLEDCRGIYILSFRRLLLLALFGQFLSSFFFIIPGSKRRNPDNESDXWRFPXXXXXXXXXXXGGGGDAP

SEQ ID NO: 170991 - protein, 57 aa, Glycine max
  Clone ID: PAT_MRT3847_12541C.1.pep
GVFFNCSISSFPVTFFFPFGDDHNGCNPFAFSKFYTLALYFKSGNQLEGLAGTVKKE

SEQ ID NO: 170992 - protein, 46 aa, Glycine max
  Clone ID: PAT_MRT3847_125420C.1.pep
RPGNPRRPPTRSEVFVGLGFPAFHKLPSCEQLHHRFTVTSPQSDPR

SEQ ID NO: 170993 - protein, 44 aa, Glycine max
  Clone ID: PAT_MRT3847_125421C.1.pep
YDVKLHGQIAVKAVLGEDNVKSLKHTGPVHIHSIQFTKRQLSLS

SEQ ID NO: 170994 - protein, 188 aa, Glycine max
  unsure (1)..(188): unsure at all Xaa locations
  Clone ID: PAT_MRT3847_125422C.1.pep
SDISNKAKDVLFTDYHVDQRLTITTYXPTALAMTASRTTKSELLAADVNTQLENKIITTDLNSDTDSNRLTTIADNEPAYGLKAIINCKEPDAMSGXVEMTYLHYYAGISTSVWLTXNALVKFSGVIGTNGHALGADLYIDIRSEEXTIYIAALSCTKYDLIALLTINEQGDAMNAVXYLCINPLNNS

SEQ ID NO: 170995 - protein, 161 aa, Glycine max
  Clone ID: PAT_MRT3847_125423C.1.pep
RSAKRMPLSIGGGAGAKNAILMNMPNAVLSMRRHLEGDLVMEVSKMTSPYMKCTVSFYLAFGNLVDDTNNFEAFPHKLVKLGEIQEKVVLKFSQEEFLTAWANQGRPATTQWDDGRPYLDAMEHDKTLSTIPRDWATGGKVTPLNHNACNNDLNPEMSGSR

SEQ ID NO: 170996 - protein, 82 aa, Glycine max
  Clone ID: PAT_MRT3847_125424C.1.pep
GLAPFFCAPGFGLFSPGASCSFHCKLLACFLRGLVRVCFCPAVSPLVLGSPVLLQLPVRNYKRKQEVEKNKKKKKKKKKKRI

SEQ ID NO: 170997 - protein, 80 aa, Glycine max
  Clone ID: PAT_MRT3847_125425C.1.pep
NNKSGGLRCDLYHHSFHLWWVVHVISIGATRYPPTDLHYLFTLPSFPNLSPKKPTNQKKFPFFGARDPYWPFPCSFEIHA

SEQ ID NO: 170998 - protein, 73 aa, Glycine max
  Clone ID: PAT_MRT3847_125426C.1.pep
FAFSIFVLFFFFFKPRRTGRLDHLAGTRTTLFMMRRVQYCRSSDDQQGRARKDQDPDFKPASCWWRGEAEIQV

SEQ ID NO: 170999 - protein, 51 aa, Glycine max
  Clone ID: PAT_MRT3847_125427C.1.pep
PRVSATTTINLCIIAVHLGNHKGTPFRHHFQQRRSQLIRVVLDARPFFLSS

SEQ ID NO: 171000 - protein, 122 aa, Glycine max
  unsure (1)..(122): unsure at all Xaa locations
  Clone ID: PAT_MRT3847_125428C.1.pep
NNNSYIPHHTFTKNSRAQFLQTYFFTNTQILHPYHXTYTPKTKKLKTNYTLQNFFPKNIQHTFILKTQITSLPKNPTTPKQNYTRHSPSSHPLLPKHQLLKHATPNPHKPIPLHQFNLTNTS

SEQ ID NO: 171001 - protein, 42 aa, Glycine max
  Clone ID: PAT_MRT3847_125429C.1.pep
SIKLQILLPLDSESESLLLYMALTRNSCVGDVADGVSCQCFV

SEQ ID NO: 171002 - protein, 84 aa, Glycine max
  Clone ID: PAT_MRT3847_12542C.1.pep
YDELYGKRARPQAPILYSGRAPRVRTILCMENIYIHNRVSIKAYAKVIDVEGPTGKVERESHHVNLYFHLITDKGCKPKLTKES

SEQ ID NO: 171003 - protein, 233 aa, Glycine max
  unsure (1)..(233): unsure at all Xaa locations
  Clone ID: PAT_MRT3847_125430C.1.pep
MANLSLLFFGLLLFSAAVATVERIDDEDNLLIRQVVPDAEDHHLLNAEHHFSAFKTKFAKTYATQEEHDHRFRIFKNNLLRAKSHQKLDPSAVHGVTRFSDLTPSEFRGQFLGLKPLRLPSDAQKAPILPTSDLPTDFDWRDHGAVTGVKNQGSCGSCWSFSAVGACDSGCNGGLMTTAFEYTLKAGGLMREEDYPYTGRDRGPCKFDKSXIAASVANFSVVFLDEEHIAANL

SEQ ID NO: 171004 - protein, 336 aa, Glycine max
  Clone ID: PAT_MRT3847_125431C.1.pep
ANPSLLFFSLLLLSATVATTFSAFKTKFGKTYATQEEHDHRFRIFKNNLLRAKSHQKLDPSAVHGVTRFSDLTPAEFRRQFLGLKPLRLPSDAQKAPILPTNDLPTDFDWREHGAVTGVKNQGSCGSCWSFSAVGALEGAHFLSTGELVSLSEQQLVDCDHECDPEERGACDSGCNGGLMTTAFEYTLQAGGLMREKDYPYTGRDRGPCKFDKSKVAASVANFSVVSLDEEQIAANLVQNGPLAVGINAVFMQTYIGGVSCPYICGKHLDHGVLLVGYGSGAYAPIRFKEKPYWIIKNSWGESWGEEGYYKICRGRNVCGVDSMVSTVAAIHVSNN

SEQ ID NO: 171005 - protein, 140 aa, Glycine max
  unsure (1)..(140): unsure at all Xaa locations
  Clone ID: PAT_MRT3847_125432C.1.pep
MANPSLLFFSLLLLSATVAAAERIDDEDDLLIRQVVPDAEDHHLLNAEHHFSAFKTKFGKTYATQEEHDHRFRIFKNNLLRAKSHQKLDXPPILPTNDLPTDFDWREHGSRTGVKNQGSCGSCWSFSAAGALEGAHFLST

SEQ ID NO: 171006 - protein, 162 aa, Glycine max
  Clone ID: PAT_MRT3847_125433C.1.pep
YARTSHLTEKSDVYSYGMFLLELLTGRKAVDNESNLHHLILSKAATNAVMETVDPDITATCKDLGAVKKVYQLALLCTKRQPADRPTMHEVTRVLGSLVPSSIPPKQLADLPPASNPSAKVPCYVDEYANLKTPHLVNCPSMSTSDAQLFLKFGEVISQNSE

SEQ ID NO: 171007 - protein, 366 aa, Glycine max
  Clone ID: PAT_MRT3847_125434C.1.pep
MANLSLLFFGLLLFSAAVATVERIDDEDNLLIRQVVPDAEDHHLLNAEHHFSAFKTKFAKTYATQEEHDHRFRIFKNNLLRAKSHQKLDPSAVHGVTRFSDLTPSEFRGQFLGLKPLRLPSDAQKAPILPTSDLPTDFDWRDHGAVTGVKNQGSCGSCWSFSAVGALEGAHFLSTGGLVSLSEQQLVDCDHECDPEERGACDSGCNGGLMTTAFEYTLKAGGLMREEDYPYTGRDRGPCKFDKSKIAASVANFSVVSLDEEQIAANLVKNGPLAVGINAVFMQTYIGGVSCPYICGKHLDHGVLLVGYGSGAYAPIRFKEKPYWIIKNSWGESWGEEGYYKICRGRNVCGVDSMVSTVAAIHVSNH

SEQ ID NO: 171008 - protein, 985 aa, Glycine max
  unsure (1)..(985): unsure at all Xaa locations
  Clone ID: PAT_MRT3847_125435C.1.pep
MAFRFGVLILALLICLSVNSVESDDGATLLEIKKSFRDVDNVLYDWTDSPSSDYCAWRGIACDNVTFNVVALNLSGLNLDGEISPAIGKLDSLAGRKAVDNESNLHHLIWSKAATNAVMETVDPDITATGKDLXLSKLIISLLYYAQKGILKIGQLIGQVTTVLSQIPDLKILDLAQNNLSGEIPSLISKDEVLQYLYVNLNTLHLVTSPXLCLQTGNSSSCLEKQSLKTXVSERILNXKSFSILDLSYNKLTEEIPFNIGFLQVATLSLQGNKLSGHIPPVIGLMQALAVLDLSCNMLSGSIPPILGNLTYTEKLYLHGNKLTGFIPPELGNMSKLHYLELNDNHLSGHIPPELGKLTDLFDLNVANNNLKGPIPSNLSSCKNLNSLNVHGNKLNGSIPPSLQSLESMTSLNLSSNNLQGAIPIELSRIGNLDTLDISNNNLVGSIPSSLGDLEHLLKLNLSRNNLTGIIPAEFGNLRSVMEIDLSNNQLSGLIPDELSQLQNMISLRLENNKLTGDVASLSNCISLSLLNVSYNKLFGVIPTSNNFTRFPPDSFIGNPGLCGNWLNLPCHGARPSERVTLSKAAILGITLGALVILLMVLLREDDRRGPSPFPDGSFDKPVNFSPPKLVILHMNMALHVYEDIMRMTENLSEKYIIGYGASSTVYKCVLKNCKPVAIKRIYSHYPQCIKEFETELETVGSIKHRNLVSLQGYSLSPYGHLLFYDYMENGSLWDLLHGPTKKKKLDWELRLKIALGAAQGLAYLHHDCCPRIIHRDVKSSNILLDADFEPHLTDFGIAKSLCPSKSHTSTYIMGTIGYIDPEYARTSRLTEKSDVYSYGIVLLELLTGRKAVDNESNLHHLILSKAATNAVMETVDPDITATCKDLGAVKKVYQLALLCTKRQPADRPTMHEVTRVLGSLVLSNTPPKQLAALPPASNPSAKVPCYVDEYANLKTPHLVNCPSMSTSDAQLFLKFGEVISQNSE

SEQ ID NO: 171009 - protein, 235 aa, Glycine max
  unsure (1)..(235): unsure at all Xaa locations
  Clone ID: PAT_MRT3847_125436C.1.pep
MANPSLLFFSLLLLSATVAAAERIDDEDDLLIRQVVPDAEDHHLLNAEHHFSAFKTKFGKTYATQEEHDHRFRIFKNNLLRAKSHQKLDPSAVHGVTRFSDLTPAEFRRQFLGLKPLRLPSDAQKAPILPTNDLPTDFDWREHGAVTGVKNQGSCGSCWSFSAVGALEGAHFLSTGELVSLSEQXQLVDCDHECDPEERGACDSGCNGGLMTTAFEYTLQAGGLDGLNCRCYTCF

SEQ ID NO: 171010 - protein, 57 aa, Glycine max
  Clone ID: PAT_MRT3847_125437C.1.pep
TDCLVLNTDLYARYTITLQGKTALSDSSEILATCDDRDGNTVASTTRCTKYSMTVNL

SEQ ID NO: 171011 - protein, 136 aa, Glycine max
  Clone ID: PAT_MRT3847_125438C.1.pep
MHYWVRASSSDFAGTHPQRRSGHSAVNIGKSKVVVFGGLVDKKFLSDIAVYDIEAKQWFQPECTGSGSDGHVGPSSRAFHVAVAIDCHMFIFGGRLGSQRLGDFWVLDTDIWQWSELTGFGDLPSPRDFAAASAVG

SEQ ID NO: 171012 - protein, 167 aa, Glycine max
  Clone ID: PAT_MRT3847_125439C.1.pep
MARKVGLNFIGCSIVAMVFIIGVAEATDYIVGEGFGWSVPSNESFYTDWASTKRFFVGDNLIFNISGEHSVGIRTEATYYENCNTSLLTGFTFIGVNGSNSMFRHNIIPPTGPRYFLCTVGNHCERGQKFSISVESHPDSAAPTTLSFRILSAFLSSLAVYFFTVTS

SEQ ID NO: 171013 - protein, 74 aa, Glycine max
  unsure (1)..(74): unsure at all Xaa locations
  Clone ID: PAT_MRT3847_12543C.1.pep
MSLFXIGRNGRTFLPKKNTPSGSKGAQLIKHTHATLGSGNMMEAEMLPPGENLYAWLADNTLDWLNQDYHIYGP

SEQ ID NO: 171014 - protein, 61 aa, Glycine max
  unsure (1)..(61): unsure at all Xaa locations
  Clone ID: PAT_MRT3847_125440C.1.pep
AWEWLIARVSACGLXHIAYPSAPETLKTEXTSIYSQLWQDDMPMERRTAESNLEKFAATVE

SEQ ID NO: 171015 - protein, 99 aa, Glycine max
  Clone ID: PAT_MRT3847_125441C.1.pep
FGRVLNCLCVKDKVHEAVGIIHLMLQKGIVPETVNTIFEADKKVVAAPKILVEDLLKKGHIAYYTYELLYDGIRDKKILKKRLPTVNSLHRGASSSAVD

SEQ ID NO: 171016 - protein, 75 aa, Glycine max
  Clone ID: PAT_MRT3847_125442C.1.pep
IPCSSYATFFIPQTAQEERGAFFASFFSSSTAKKNSKPQATAMHAGAIEIIIDRSDRPDCNIDGAQPLGDTINTQ

SEQ ID NO: 171017 - protein, 35 aa, Glycine max
  Clone ID: PAT_MRT3847_125443C.1.pep
SVCGLRNFIVQHYWSPFSEGYVYSWLRFYDLDTMV

SEQ ID NO: 171018 - protein, 107 aa, Glycine max
  Clone ID: PAT_MRT3847_125444C.1.pep
MGNSGRCCLACILPCGALDLIRIVHLNGYVEEITRPITAGEVLKANPNHVLSKPSSQGVVRRILILAPETELKRGGIYFLIPAASLPAEKKKRHMKHVKHVSGNHGG

SEQ ID NO: 171019 - protein, 255 aa, Glycine max
  unsure (1)..(255): unsure at all Xaa locations
  Clone ID: PAT_MRT3847_125445C.1.pep
MVFGDWVKRARVEAINWILKTRATLGFRFETAYLSVTYFDRFLSRRSIDSEKSWAIRLLSIACLSLAAKMEECNVPGLSEFKLDDYSFEGKVIQRVELLVLSTLEWEMGIITPFDFLSYFITKFCKESPPSPIFYKTMQLIFTTMKALFVXCAEVNLMDHKPSVIAVAATLVAMDQQLTRDAVELKMSSIPQHRLLESKDVFEYYNLIQRLYEENTKSDTHTPIEMTESSRVTSSAAMTKRRRLTFSDDEGSSHG

SEQ ID NO: 171020 - protein, 78 aa, Glycine max
  Clone ID: PAT_MRT3847_125446C.1.pep
FRHGLGSLLVVKSGASVLKVIICITALKSRTYVIESWDHLERKLCMRCLRHNIVGEQFDAYTTFSLPTASDCYMSDVI

SEQ ID NO: 171021 - protein, 72 aa, Glycine max
  Clone ID: PAT_MRT3847_125447C.1.pep
VDWQPVLLSLTGIAGPRSGWVKKLGHSFYCWLVCPVSLIIEDFCGDMSIKKSLHFDMPIFEKRVESFSPIRR

SEQ ID NO: 171022 - protein, 64 aa, Glycine max
  unsure (1)..(64): unsure at all Xaa locations
  Clone ID: PAT_MRT3847_125448C.1.pep
LXNTFSSFTXXQSSFIQXNXYSXIXXXXXIHIICCVEXLSVRIEEDSRETLEIVGNLLKRCMVL

SEQ ID NO: 171023 - protein, 188 aa, Glycine max
  unsure (1)..(188): unsure at all Xaa locations
  Clone ID: PAT_MRT3847_125449C.1.pep
IELGLHQGYFPRGRITLSKAVLSSIPMYAMQTVMLPGSICDKVDQLCRSFLXGDTTDERSDHWVCWEGICSPKEIGGLGLRQARHVNDVFTMKVAWELCTKNDALWVQVIRAKLIGGVGGVPXVNKARNDSNLWSVIKSVRDKFVTGCEGKVEDDELIWRASNKGVLDIPSAYKMIANLDGRQSIPIF

SEQ ID NO: 171024 - protein, 64 aa, Glycine max
  Clone ID: PAT_MRT3847_12544C.1.pep
LAIFFLMMQRIHNDPFSLEGNENNKHSDKHECTSVRGKGPSPTTHYFVDVNGPVTDWRVQVAIQ

SEQ ID NO: 171025 - protein, 69 aa, Glycine max
  Clone ID: PAT_MRT3847_125450C.1.pep
MAVHGGKPPFVTDASLPELVAAACAGASLPEVVAAACACGCGCRGWVRVWGARGTRLGAGGTPFFATPP

SEQ ID NO: 171026 - protein, 38 aa, Glycine max
  unsure (1)..(38): unsure at all Xaa locations
  Clone ID: PAT_MRT3847_125451C.1.pep
YGSSVPNIVIYITTVWCLARHSEFSXXSVVVCLDPRNS

SEQ ID NO: 171027 - protein, 53 aa, Glycine max
  Clone ID: PAT_MRT3847_125452C.1.pep
SSDTIDIVKAKIHYKERIPSYHERLIHVGKQFEDGMTLDDYNIEIVKTLHSVL

SEQ ID NO: 171028 - protein, 73 aa, Glycine max
  Clone ID: PAT_MRT3847_125453C.1.pep
TAARRRQKGMDIWILHNSSFFALKLVLATEIVILSEPLICGYCLVVYPTKELLLRYATRSEYINLTHVFLIYF

SEQ ID NO: 171029 - protein, 47 aa, Glycine max
  Clone ID: PAT_MRT3847_125454C.1.pep
PPVLLSNTYGPSLHILYITIITLTRKSTLVYISIVSIFSTSGTLHII

SEQ ID NO: 171030 - protein, 58 aa, Glycine max
  Clone ID: PAT_MRT3847_125455C.1.pep
IACTIYFILRQAMWDFLTSPFHRCAANIGEPPTWWRKLRQALDSDSMLDFILKPIDIK

SEQ ID NO: 171031 - protein, 49 aa, Glycine max
  Clone ID: PAT_MRT3847_125456C.1.pep
RLGGHVSLFWIAEFMYYSFTLMLISVLVFYSYNEACGGVVGRVGHSRPV

SEQ ID NO: 171032 - protein, 115 aa, Glycine max
  Clone ID: PAT_MRT3847_125457C.1.pep
GGFLSMDTLFSLPWVSGVKTPRFCGRPLKCANPSTKRTLVVAKIFGSPGELRTMGAFESYFKGWYFRVVLTQYKSNHFSVHNSYVRVSYNTGTFFPVFYFKMWKRNNVKYTKLKT

SEQ ID NO: 171033 - protein, 334 aa, Glycine max
  Clone ID: PAT_MRT3847_125458C.1.pep
MGGTQVEREEKVSLELSEEILQSMEVGMSFKDYNGRISSLDFHRASSYLVTASDDESIRLYDVTGGTCLKTINSKKYGVDLVCFTSHPTTVIYSSKNGWDESLRLLSLHDNKYLRYFKGHHDRVVSLSLCSRKDCFISGSLDRTVLLWDQRAEKCQGLLHVQGRPAISYDDPGLVFAIAFGGYIRMFDARKYEKGPFEIFSVGGDISDANVVKFSNDGRLMLLTTADGHIHVLDTFRGTLLSTYNVTPVSCNSTLEASFSPEGMFIISGSGEGSIYAWSVRSGKEVASWRSATSDTGPPVIKWAPGSLMFATGSSELSFWVPDLSKLGSYVGRK

SEQ ID NO: 171034 - protein, 77 aa, Glycine max
  Clone ID: PAT_MRT3847_125459C.1.pep
DVRNKPLRQKSMNSDFSHHTSFLVWLTKETVCYLSVRSTIVGNTGTLGRGSTLMGNFPGCAPVGRTDIANTPLKRKP

SEQ ID NO: 171035 - protein, 46 aa, Glycine max
  Clone ID: PAT_MRT3847_12545C.1.pep
IHYFISYHQWLTLLSLTALLCMPINPNTSLSHFQSNLSPSLHNLTL

SEQ ID NO: 171036 - protein, 99 aa, Glycine max
  unsure (1)..(99): unsure at all Xaa locations
  Clone ID: PAT_MRT3847_125460C.1.pep
RPFFQASPRSVKRMPVSLERGASAQNALLINMPNAGLSMWRYSVGNLXFEVSKMTSSYITRTVPNFIAFGNLANATITLXALTHQLVQFVETHIKTKSK

SEQ ID NO: 171037 - protein, 124 aa, Glycine max
  Clone ID: PAT_MRT3847_125461C.1.pep
HLLQNKEVKFEDFTDAEFGEKAANLLPGCCVVIMCIGKTVVAESLQVDESTIAIGCWKGRARLSVMVTAMDCQELLERLLIRFDTEKGSSGHLDNSSNDVEEVQPVQELNRKNDDDDVKATELK

SEQ ID NO: 171038 - protein, 826 aa, Glycine max
  unsure (1)..(826): unsure at all Xaa locations
  Clone ID: PAT_MRT3847_125462C.1.pep
MGGGGRGGRSRTQRKHFRQSRDNVWKRSKSDPNPSSNENNPPWTPFATENAAFDFYYKEQGIVDPQHWDQFVAVLRTPLPATFRINSSSQFSDDLRSQLENDFLHSLRDEVVEGGETEAIRPLLWYPGNFAWHSNFSRMQLRKNQTLERFHEFLKLENEIGNITRQEAVSMVPPLFLDVHSDHFVLDMCAAPGSKTFQLLEIIHQSSKTGSLPDGMVIANDLDVQRCNLLIHQTKRMCTANLIVTNHEAQHFPGCRLNRNYERMELDNDIGQLLFDRVLCDVPCSGDGTLRKAPDLWRKWNTGMGHGLHSLQVLIAMRGLSLLKIGGRMVYSTCSMNPIXNEAVVAEVLRRCGGSVKLVDVSSELSQLIRQPGLKRWKIYDKGTWLVSYKDVPKYRRSVILSSMFPSGRGHHDLVDSSCSVDPEGITNGINGNAGDGVQAVENPVMSESGAEVCDFPLERCMRIVPHDQNTGAFFIAVLQKVSPLPAITEQTKIKNDEQYVEPANQSLNDAQVPHITSSESAHEEVFKAVSEENVDDAEPNTEDLEVGPVTCEEQNSKETQEPDNVQNTAKRVPGKRKLQIQGKWRGVDPVVFFKDETIINSIRDFYGIDERFPFNGHLVTRNSDTNHVKRIYYISKSVKDVLELNFKVGQQLKITSIGLKMFERQTAREGSSASCAFRISSEGLPLILPYITKQILHASPADFKHILQNKEVKFEDFNDAEFGEKAANLLPGCCVVILHIGNTLAAESLQVDESTIAIGCWKGRARLSVMVTAMDCQELLERLLIRFDTEKGSSGHADKSSNDVQELNSINELKNINDDVKVTVS

SEQ ID NO: 171039 - protein, 331 aa, Glycine max
  unsure (1)..(331): unsure at all Xaa locations
  Clone ID: PAT_MRT3847_125463C.1.pep
METRTGTLSITVCSLVMFSFVSLVKGSLSFNFYAASCPSAESIIRNIVSSSSSTDPTIPGKLLRLVFHDCFVEGCDASLMLQGNNTEQSDPGNRSVGGFTVIDSAKRILEKFCPGTVSCADIIALAARDAVEIGTXEQAGGPRTMIPTGRRDGMVSVASNVRPNIVDTSFSMDEMVKLFASKGLSLLDLVILSGAHTIGTAHCSSFRDRFQEDSKGKLRLIDKTLNSDYANELIKQCPAGVQPSVPVTNDPETSMAFDNMYYQNLLAHKGLFQSDSVLISNDSPRKLVVDFANDQELFFENWDQSFLKLTSVGVKTGDKGEIRISCASTNA

SEQ ID NO: 171040 - protein, 305 aa, Glycine max
  Clone ID: PAT_MRT3847_125464C.1.pep
MTLRNHQELLVALAILYFLATSLPSVSAHGPYAWDGEATYKFTTYHPGQNYKGLSNVKNYFHHLGYIPNAPHFDDNFDDTLVSAIKTYQKNYNLNVTGKFDINTLKQIMTPRCGVPDIIINTNKTTSFGMISDYTFFKDMPRWQAGTTQLTYAFSPEPRLDDTFKSAIARAFSKWTPVVNIAFQETTSYETANIKILFASKNHGDPYPFDGPGGILGHAFAPTDGRCHFDADEYWVASGDVTKSPVTSAFDLESVAVHEIGHLLGLGHSSDLRAIMYPSIPPRTRKVNLAQDDIDGIRKLYGINP

SEQ ID NO: 171041 - protein, 73 aa, Glycine max
  Clone ID: PAT_MRT3847_125465C.1.pep
GFCLKSLYLLGFGRGYPSLCPFSFFFLLFYFIKSFPSCKIRFTLLQSSFSLFLSTGVKTRWEKLKKKVGFLVL

SEQ ID NO: 171042 - protein, 133 aa, Glycine max
  Clone ID: PAT_MRT3847_125466C.1.pep
PGGPYRYAMVHDRGVSTIPGDFVIGVKSATINNMCAYGLNPGVAGSGREGTIPHVIPQATVRNRMATARTLLNYDPSKQSYGAIAIDLFGGGMVVDKTGDWITLIQNSPVSNLLRAAAWKKGCLMDKIVMPGN

SEQ ID NO: 171043 - protein, 178 aa, Glycine max
  Clone ID: PAT_MRT3847_125467C.1.pep
ILFVFDPGGVDDILGLLQWRDSAFKVLFGQDPPLLKRKTILSKVEEEVNRLTQQWDELLDYLKQHLLKAGDRMRKQDNKYRRSEEYAVGDWGFLNLQPNKMCSLARKPNQKLSPLFLLPFQVLQRIGQVAYELDLQDNRGIPPVSVSSCVPPQEGSQHTTVCSNFSLALADDVGFQVQ

SEQ ID NO: 171044 - protein, 39 aa, Glycine max
  Clone ID: PAT_MRT3847_125468C.1.pep
TRIRLEDRRFIQIESECMTYLLLYVLARIYFACIIPGWT

SEQ ID NO: 171045 - protein, 49 aa, Glycine max
  Clone ID: PAT_MRT3847_125469C.1.pep
RAESARVRLREDDRRATMGTSDQTLPFFTQFFQFEASYDSFTTFQYVTF

SEQ ID NO: 171046 - protein, 142 aa, Glycine max
  unsure (1)..(142): unsure at all Xaa locations
  Clone ID: PAT_MRT3847_12546C.1.pep
HGLLPPITASFLTSPPSSLFNKSSSPSFHATPTLRPLAPRAFMCRSAPPYDFGSVRVDPNRKAIVAREKTRRDMXITWGTHADTDXGIGGAGLRGGSRAPYEALHKNPPINIRHLVRRAGQPPGGGGPGLGRRNLFLPPWGG

SEQ ID NO: 171047 - protein, 141 aa, Glycine max
  Clone ID: PAT_MRT3847_125470C.1.pep
VTHQVVHEEFIIVEGLMTTVHATTATQKTVDGPSMKDWRGGRGAAQNIIPSSTGAAKAVGKVLPELNGKLTGMAFRVPTHNVSVVDLTCRLKKNASYEDVKAAIKYASEGPLKGILGYTDEDVVSNDFVGDSRYVMFFYYL

SEQ ID NO: 171048 - protein, 66 aa, Glycine max
  Clone ID: PAT_MRT3847_125471C.1.pep
HRLRLHWRSITDVLHYGGPCRKLNCTKLYRLTLNPFYCDRWDTHKNKILIIFLRTKDKKNLLISQL

SEQ ID NO: 171049 - protein, 48 aa, Glycine max
  Clone ID: PAT_MRT3847_125472C.1.pep
IGRGVETSFGEIGLEQGEAYGNAIHASRPVGSPMQLCLQMQLLFTLGG

SEQ ID NO: 171050 - protein, 65 aa, Glycine max
  Clone ID: PAT_MRT3847_125473C.1.pep
HFFTTFSNLPNAENLPKGFPQRTPTCFSLTTRTISHASKGVSSFCEPLSSDRPLWVPRSLPPERL

SEQ ID NO: 171051 - protein, 94 aa, Glycine max
  Clone ID: PAT_MRT3847_125474C.1.pep
LYTKIRPLKACAPKRGSTTPNRGLRDSLNVIPHIPPAVVLSHPYQSVVLPHLVPVMSSSLHSAPFSRNIPSESISRVPASGPLAPVRTPGRTRG

SEQ ID NO: 171052 - protein, 63 aa, Glycine max
  unsure (1)..(63): unsure at all Xaa locations
  Clone ID: PAT_MRT3847_125475C.1.pep
GSEWANQTXWRLCLLIDNPKQCTGMDILLGIGXDLEIGVNSLMPAFSVPQATGRSFVNAEFFA

SEQ ID NO: 171053 - protein, 25 aa, Glycine max
  Clone ID: PAT_MRT3847_125476C.1.pep
MKRACYCQLATEWVDLGAKMHCQRA

SEQ ID NO: 171054 - protein, 54 aa, Glycine max
  Clone ID: PAT_MRT3847_125477C.1.pep
QQLTPLELSHDNYGGCIFVPTCSCRCTGLYSGLFVKKQPSSVSGLAGDRISGTP

SEQ ID NO: 171055 - protein, 200 aa, Glycine max
  Clone ID: PAT_MRT3847_125478C.1.pep
MAEELSIAIPQSQASTTKKRASKNEKLCLEDYLHLVHSRQTLHLTINQLNQVIRIHGFKKIHHAPKKVLVQAVESLELVDLPRSTVSESVSAFAAVVLEDVVADLGELSWQECCVISVEKISFSDGQSVFPAACSDQSLRVVNHSLSQAQKENRIDETRNLIPEAFRKDLKPTKMVPKRKRSNVRDYVASTLDSASLASC

SEQ ID NO: 171056 - protein, 46 aa, Glycine max
  Clone ID: PAT_MRT3847_125479C.1.pep
YTEQNYYVTHVSKNKIKEVSKCVYVLVLDGKLRAYNILAISIEKKI

SEQ ID NO: 171057 - protein, 54 aa, Glycine max
  Clone ID: PAT_MRT3847_12547C.1.pep
LRLCLVSRSNAFNLSLMVVKLNFSFDSDVWYYVEDVILWFISKFQRIYIDMVST

SEQ ID NO: 171058 - protein, 76 aa, Glycine max
  Clone ID: PAT_MRT3847_125480C.1.pep
NHIECNTVMQKIVTNSSISLAIRLGVEFTIAYDLDAHDHVGNIRAHELTLELLHNGSIKHGRFFFTALKHMTDSIF

SEQ ID NO: 171059 - protein, 82 aa, Glycine max
  Clone ID: PAT_MRT3847_125481C.1.pep
PCPSVFFLSPLLFISPPHPLVLRLVLIFGFGCALFIVRSPCYNFRAPRSGTSLYFLGDFLNTLFTLLYALFSPRFLFFSRAS

SEQ ID NO: 171060 - protein, 68 aa, Glycine max
  Clone ID: PAT_MRT3847_125482C.1.pep
YYDKSYSNLHIQCHMLTDLSRKTLTYIHLMLHRDQYSHVPIGIYDYHHTIFSRLISELITADINMTSE

SEQ ID NO: 171061 - protein, 69 aa, Glycine max
  Clone ID: PAT_MRT3847_125483C.1.pep
DILAVPVSIIPLDSDARTLNEYLSTMDPSTVQGLVCAQDWLREDTEVASSDGHADDKAARGDELIVLPK

SEQ ID NO: 171062 - protein, 154 aa, Glycine max
  unsure (1)..(154): unsure at all Xaa locations
  Clone ID: PAT_MRT3847_125484C.1.pep
NRPKXKDAVQAVREIXNTVADRCEILFEDLLLNEIPEKKNYELPQRVFVPLPGSTVMLCDYKFGDESAEEIRDHFSEMLDHEIQIEDLEIAEEVNTACMTSSVNSEASLTNTSEEQPEQPKKTIGVKIQQNIGVIAALAVAVLAAGISFHYFSD

SEQ ID NO: 171063 - protein, 51 aa, Glycine max
  Clone ID: PAT_MRT3847_125485C.1.pep
LGGRMDTAFIEDAYEVESTMITDILETAMGTSPPVVTWVSSANKFVASLRV

SEQ ID NO: 171064 - protein, 51 aa, Glycine max
  Clone ID: PAT_MRT3847_125486C.1.pep
NSSDSASFYLPMAADATRLMNALYYSSIKVYPHPSINIKLPLHWTINNILF

SEQ ID NO: 171065 - protein, 562 aa, Glycine max
  Clone ID: PAT_MRT3847_125487C.1.pep
RRPAKLKSLQRIVLADNNLTGSIPEELATLPALTQLNVANNQLYGKVPSFRKNVVVSTNGNTDIGKDKSSLSPQGPVSPMAPNAKGDSGGGSGNGGKKSSSRVGVIVFSVIGAVFVVSMIGFLVFCLFRMKQKKLSRVQSPNALVIHPRHSGSDNESVKITVAGSSVSVGAASETRTVPGSEASDIQMVEAGNMVISIQVLKNVTDNFSEKNVLGQGGFGTVYRGELHDGTRIAVKRMECGAIAGKGATEFKSEIAVLTKVRHRHLVSLLGYCLDGNEKLLVYEYMPQGTLSKHLFNWLEEGLEPLEWNRRLTIALDVARGVEYLHSLAHQSFIHRDLKPSNILLGDDMRAKVSDFGLVRLAPEGKASIETRIAGTFGYLAPDYAVTGRVTTKVDVFSFGVILMELITGRKALDETQPEDSMHLVTWFRRMSINKDSFRKAIDSTIELNEETLASIHTVAELAGHCGAGEPYQRPDMGHAVNVLSSLVELWKPSDQNSEDIYGIDLDMSLPQALKKWQAYEGRSQMESSASSSLLPSLDNTQTSIPTRPYGFADSFTSADGR

SEQ ID NO: 171066 - protein, 64 aa, Glycine max
  unsure (1)..(64): unsure at all Xaa locations
  Clone ID: PAT_MRT3847_125488C.1.pep
FAVVPAGNTMSEVSNSSYTPVAPVSVTAQFSAPDREARVLRYXEKSYNPQFEKAIRSASRKAYA

SEQ ID NO: 171067 - protein, 163 aa, Glycine max
  Clone ID: PAT_MRT3847_125489C.1.pep
MRTEHEVLDDAQKSTSMDVHEGVKTIAKMIKWLLTSFHVTITNIIVAFDPSLDNEENKTHCRHSLVLQISEIQCGTSLSEDANSNVDVLGISRLTNFVKFRGAVIELLKIDNEDVYFQHESGAGCGEPVLGSNIATCPIMTGNQGGFSGNIKLSIPLKNGSLD

SEQ ID NO: 171068 - protein, 583 aa, Glycine max
  Clone ID: PAT_MRT3847_12548C.1.pep
MVSVEEIRKAQRAEGPATVMAIGTATPPNCVDQSTYPDYYFRITNSEHMTELKEKFKRMCDKSMIKKRYMYLNEEILKENPSVCAYMAPSLDARQDMVVMEVPKLGKEAATKAIKEWGQPKSKITHLIFCTTSGVDMPGCFAGGTVLRLAKDLAENNKGARVLVVCSEITAVTFRGPTDTHLDSLVGQALFGDARMVSVEEIRKAQRAEGPATVMAIGTATPPNCVDQSTYPDYYFRITNSEHMTELKEKFKRMCDKSMIKKRYMYLNEEILKENPSVCAYMAPSLDARQDMVVVEVPKLGKEAATKAIKEWGQPKSKITHLIFCTTSGVDMPGADYQLTKLLGLRPSVKRYMMYQQGCFAGGTVLRLAKDLAENNKGARVLVVCSEITAVTFRGPTDTHLDSLVGQALFGDGAAAVIVGSDPLPVEKPLFQLVWTAQTILPDSEGAIDGHLREGGLTFHLLKDVPGLISKNIEKAVVEAFQPLGISDYNSIFWIAHPGGPAILDQVEAKLGLKPEKMEATRHVLSEYGNMSSACVLFILDQMRKKSIENGLGTTGEGLDWGVLFGFGPGLTVETVVLRSVTL

SEQ ID NO: 171069 - protein, 72 aa, Glycine max
  Clone ID: PAT_MRT3847_125490C.1.pep
SVWLLLCRLSACQRSGAPPLTMFCSAGLLVAMACRLALTSLVSPLRFLFLFFSVWGFGFLLLLLFFCICLMA

SEQ ID NO: 171070 - protein, 165 aa, Glycine max
  Clone ID: PAT_MRT3847_125491C.1.pep
KEVEINQRSLPADFDPATFDPNDHRGPPSERVFRLVDEVASLTVAEAAELGLTLMKKMGVKEMPNVGFMKAGAGNLAGMAAKAPTAAKEEQKPEKTVFELKLESYEAASKIKIIKEVRGFTDLGLKEAKDLVEKTPAVIKKGVSKEEGEQIIEKLKALGAKVVME

SEQ ID NO: 171071 - protein, 34 aa, Glycine max
  Clone ID: PAT_MRT3847_125492C.1.pep
QGPTCKVHSVIISLLVFLLSGGQNKEGYPPLSSY

SEQ ID NO: 171072 - protein, 119 aa, Glycine max
  unsure (1)..(119): unsure at all Xaa locations
  Clone ID: PAT_MRT3847_125493C.1.pep
RERRPNTKEGGAFLRAGTPENTPAXTRKKARAQDEHHDTGASQEARKRPGRAPQRKHQSKKKKPKRRHQGKKNRKEHKKARGGRRHKGKKTTGEEKTTESPKKGGPNNKRRATPPKXRE

SEQ ID NO: 171073 - protein, 234 aa, Glycine max
  unsure (1)..(234): unsure at all Xaa locations
  Clone ID: PAT_MRT3847_125494C.1.pep
MNSFNIMQFKYVVRHLRMRNSRCLCTNNYYRSKRRSTNSYSPSSVKFKDPDIVTWNKAISSHMRNGHCDSALRVFNSMPRRSSVSYNAMISGYLRNAKFSLARDLFDKMPERDLFSWNVMLTGYVRNRRLGEAHKLFDLMPKKDVVSWNAMLSGYAQNGFVDEAREVFNKMPHRNSISWNGLLAAYVHNGRLKEARRLFESQSNWELISWNCLMGGYVKRNMLXDARQLFDRMP

SEQ ID NO: 171074 - protein, 734 aa, Glycine max
  Clone ID: PAT_MRT3847_125495C.1.pep
MSINSDSDHEETPPPFIDPSQQPSSPFHIHPSESRTSIIVTPPLTGNNYQSWSRSIRMALISKNKMSFLTGTISMPTSTDPLFPRWERCNTLLMSWLIHSVSPFIAQSIIFFENAAAIWIDLRKRFSQGDLLCVAKLQEEIYSLKQGSASVIDYYTTLKSLWEELDNFRPLTPCTCSVKDFHYQDFIIRFLKGLDERFTMVRSKILLLDPLPSANKSGGGKSNFFNCKYDHCGRLGHTSDVCYQKQGNTIPKCEHCTRYGHTMDICYTKFGYPPGHSKYPGRPRLPNKTGASEGGAAGATDHIACCLHYFHTYSKIIPIKINLPNGQFVEAHITGTIYFSSSFAIHDVLYVPGFSFNLLSISKLLFNLNYSIIFSNMSCKIQEMNTLKMIGSAKLKKGLYHLEIGDRGSPSHSPSIINNANINHTNDSTLWHFRLGHLSGNRLNILHQEYPFISSNFNEICDVFHLAKQRKLPYSLSTKRSFKIFELIHMDIWGLFSKHFIHGHKYFLAILDDYSPYTWVVLLKTKVEVKTHIENFVALVENQFETTIKCIRSNNGPEFLLRNFFSSKGILHQTRCVYTPQQNGRVERKHQHILNVARTLMFQSKIPDNLWSYAVKHVIFLINRIPSPVILNKTPFELLYKQKLDFSMLKVFGCLCFASKHTPQHKFDARSRKGAFLGYENGTKGYVVLDTSNKEIFISRNVLFHEMQFPFLKDSPHNITISPQIDTLTAPFML

SEQ ID NO: 171075 - protein, 42 aa, Glycine max
  unsure (1)..(42): unsure at all Xaa locations
  Clone ID: PAT_MRT3847_125496C.1.pep
XLXYAQXSLYPXVAAEXXGXXAAXVPSXXIYGEIAMPXAQIY

SEQ ID NO: 171076 - protein, 797 aa, Glycine max
  unsure (1)..(797): unsure at all Xaa locations
  Clone ID: PAT_MRT3847_125497C.1.pep
MHQPSSPFHIHPSESRTSIIVTPPLTGNNYQSWSRSIRMALISKNKMSFLTGTISMPTSTDPLFPRWERCNTLLMSWLIHSVSPFIAQSIIFFENAAAIWIDLRKRFSQGDLLCVAKLQEEIYSLKQGSASVIDYYTTLKSLWEELDNFRPLTPCTCSVKDFHYQDFIIRFLKGLDERFTMVRSKILLLDPLPSANKVFSMIXSMNXQHFTNISPSLNVNPFANVIYSRSHTSDVCYQKQGNTIPKCEHCTRYGHTMDICYTKFGYPPGHSKYPGRPRLPNKTGASEGGAAGGAAVNNTTREGNRTLHGEENKDGRLKLVVRIQVTYPLEQTLFTTAQTLFLICVVPHLFFLSTPPTHLTQXHTLDIDSGATDHIACCLHYFHTYSKIIPIKINLPNGQFVEAHITGTIYFSSSFAIHDVLYVPGFSFNLLSISKLLFNLNYSIIFSNMSCKIQEMNTLKMIGSAKLKKGLYHLEIGDRNANINHTNDSTLWHFRLGHLSGNRLNILHQEYPFISSNFNEICDVFHLAKQRKLPYSLSTKRSFKIFELIHMDIWGLFSKHFIHGHKYFLAILDDYSPYTWVVLLKTKVEVKTHIENFVALVENQFETTIKCIRSNNGPEFLLRNFFSSKGILHQTRCVYTPQQNGRVERKHQHILNVARTLMFQSKIPDNLWSYAVKHVIFLINRIPSPVILNKTPFELLYKQKLDFSMLKVFGCLCFASKHTPQHKFDARSRKGAFLGYENGTKGYVVLDTSNKEIFISRNVLFHEMQFPFLKDSPHISKIKRFTKRRKLYFSFSY

SEQ ID NO: 171077 - protein, 99 aa, Glycine max
  unsure (1)..(99): unsure at all Xaa locations
  Clone ID: PAT_MRT3847_125498C.1.pep
VVPPAGGAPACLXSTADGRXXMMCPAXLIEPPMXXXFRDRRNNFVYXXRHRYAYXYDGGXXDSPCSTFCTYESIIFLVVTSRVRYMHESYNXXIAQRST

SEQ ID NO: 171078 - protein, 572 aa, Glycine max
  Clone ID: PAT_MRT3847_125499C.1.pep
MSFCSSKCHFILPYLLDSRVSTMALFLLYESASGYSLFEVHGVDEIGQNTEAVRNSVSDLNRFGKVVKLRSFNPFTSALDALKQCNAVSEGILTDELRTVLETNLPKVKEGKKSKFSLGVSDPKIGSQISEVTKIPCQSNEFVSELLRGVRFHFDTFVGDLKSGDLEKAQLGLGHSYSRAKVKFNVNRVDNMVIQAIFLLDTLDKDINSFSMRVREWYSWHFPELVKIVNDNYLYAKVAKFIEDKAKLAEDTIPGLTDIVGDEDKAKEIVEAAKASMGQDLSPVDLINVHQFAQRVMDLSEYRKNLYDYLVAKMNDIAPNLATLIGEVVGARLISHAGSLTNLAKCPSSTLQILGAEKALFRALKTRGNTPKYGLIFHSSFIGRASAKNKGRMARYLANKCSIASRIDCFAERGTTVFGEKLREQVEERLDFYDKGVAPRKNIDVMQAAIESAENKDTEMETEAPAEVSGKKTKKKKQKAAAAEGDDMAVDTNGDAVEDHKSEKKKKKEKRKLEQEMEVDDQAEDDGANGVTSEQEGTVKKKKNKKDSNGEALEAGGESKKKKKKSKKKDTE

SEQ ID NO: 171079 - protein, 81 aa, Glycine max
  Clone ID: PAT_MRT3847_12549C.1.pep
RRSYLSYSYLPIPCVQISRIGKSALLATMCSGLLAETVQYSRAIHCCDTMSSPVRNVSCKFCQGIPKPLLGIQVYDNRPVK

SEQ ID NO: 171080 - protein, 42 aa, Glycine max
  Clone ID: PAT_MRT3847_1254C.1.pep
SLGRSSSLAEPTLQTRVSKLITHISSDINSDSQPAILQRMYF

SEQ ID NO: 171081 - protein, 222 aa, Glycine max
  unsure (1)..(222): unsure at all Xaa locations
  Clone ID: PAT_MRT3847_125500C.1.pep
TRPAKLAEDTIPGLTDIVGDEDKAKEIVEAAKASMGRILIFLGLTFASFSVXIFFLLTFSGQDLSPVDLINVHQFAQRVMDLSEYRKNLYDYLVAKMNDIAPNLATLIGEVVGARLIFHAGSLTNLAKCPSSTLQILGAEKALFRALKTRGNTPKYGLIFHSFFIGRASAKKXGRMARYLANKCSIASRIDCFAEXGTTVFGEKLREQSEERLDFYGQGSCP

SEQ ID NO: 171082 - protein, 85 aa, Glycine max
  Clone ID: PAT_MRT3847_125501C.1.pep
MALFLLYESASGYTLFEVHGLDEIGQNTEAVRNSVSDLNRFGKVVKLRSFNPFTSALDALKQCNAVSEGILTDELRTVLETNLPK

SEQ ID NO: 171083 - protein, 55 aa, Glycine max
  Clone ID: PAT_MRT3847_125502C.1.pep
TGILPTEFGDLRCVTEIGLSHNQLAGVSPDRLRQLQTVRSLRLEDNKLTGDVASL

SEQ ID NO: 171084 - protein, 41 aa, Glycine max
  Clone ID: PAT_MRT3847_125503C.1.pep
FQRIKSKTEMILCYWKTILQTYRFRVNSMKHEFHPCSAGRL

SEQ ID NO: 171085 - protein, 116 aa, Glycine max
  unsure (1)..(116): unsure at all Xaa locations
  Clone ID: PAT_MRT3847_125504C.1.pep
MSLMETESSEGSAGLLEPPDPDVLEIDPTNRXLGYKAFDEINGLEVAWSQVQIDDVLPTPGGLERLYSXVRLLKSLKHDSIVTFYNSWIVDKHRTLNLITELFTSGSLRKCVHYPF

SEQ ID NO: 171086 - protein, 80 aa, Glycine max
  Clone ID: PAT_MRT3847_125505C.1.pep
AQRAVLDVVRVSRARVRLRSGTRSSVLGYHTVVIVWVIITPVVHMFISALVPHRIVYSYRRHWWYHVLLMSSCTPHSWWS

SEQ ID NO: 171087 - protein, 73 aa, Glycine max
  unsure (1)..(73): unsure at all Xaa locations
  Clone ID: PAT_MRT3847_125506C.1.pep
MASSMISSPAVTTVNRAGAGMVAPFTGLKSMAGFPTRQXNNDIXXMLSKGGRVXXXXVVATTGRRXXRIXSWQ

SEQ ID NO: 171088 - protein, 147 aa, Glycine max
  unsure (1)..(147): unsure at all Xaa locations
  Clone ID: PAT_MRT3847_125507C.1.pep
XFXXFLTYCXXTFFFLXXXTXXXXXLXXSHXLXXTPLXXFSLXXXQXLXXXSYMXXIIXXXYXXWXXXXXXXSXSXXFXXVXXXFXLFALTLXXQXXXXXXXXXXXWXXVYFXXXXXIXXXFXSXXPSXXFXLXXPFNXXXXXFIXX

SEQ ID NO: 171089 - protein, 139 aa, Glycine max
  unsure (1)..(139): unsure at all Xaa locations
  Clone ID: PAT_MRT3847_125508C.1.pep
PRVRRKLVGKYQPVINTAGGLLCLWNEQAFKVERRVNGRCFSLLEGMWIQENKRVFIVNIYAPCDIXSKRALWDSVRQLKNVSPARLWCLLGDFNSIKHPSERVGVSQRGGDVNTISEFNDWIADIEVEEIPSVGRKFS

SEQ ID NO: 171090 - protein, 125 aa, Glycine max
  Clone ID: PAT_MRT3847_125509C.1.pep
LYSLFEESLSGLATIRAFNWQKALNDRNYELLDRSQRPFYLLFAVQRWLTLVLDLVVAAIAVLLMVLVVTLRGTMAAGGVGLALLNVIQFSQNIKLLVTFWTTLETHIGSVSRIMSFTETAVPED

SEQ ID NO: 171091 - protein, 388 aa, Glycine max
  Clone ID: PAT_MRT3847_12550C.1.pep
MVSVEEIRKAQRAEGPATVMAIGTATPPNCVDQSTYPDYYFRITNSDHMTELKEKFKRMCDKSMIKKRYMYLNEEILKENPSVCAYMAPSLDARQDMVVVEVPKLGKEAATKAIKEWGQPKSKITHLIFCTTSGVDMPGADYQLTKLLGLRPSVKRYMMYQQGCFAGGTVLRLAKDLAENNTGARVLVVCSEITAVTFRGPSDTHLDSLVGQALFGDGAAAVIVGSDPLPAEKPLFELVWTAQTILPDSEGAIDGHLREVGLTFHLLKDVPGLISKNIQKALVEAFQPLGIDDYNSIFWIAHPGGPAILDQVEAKLGLKPEKMEATRHVLSEYGNMSSACVLFILDQMRKKSIENGLGTTGEGLEWGVLFGFGPGLTVETVVLRSVTV

SEQ ID NO: 171092 - protein, 47 aa, Glycine max
  Clone ID: PAT_MRT3847_125510C.1.pep
SCNSSSVKWLVHFYWLDSGDFSFLFTFFTADASKAIETLAWASVVFL

SEQ ID NO: 171093 - protein, 72 aa, Glycine max
  Clone ID: PAT_MRT3847_125511C.1.pep
PCFIEQVPPKNVSWRNRTFVLCSRAPEPFFLHIFLKKKKSTRWEFKKPLPDRGKPKLLRRSLVKETLLGFHR

SEQ ID NO: 171094 - protein, 369 aa, Glycine max
  Clone ID: PAT_MRT3847_125512C.1.pep
RVRLVGLQWMLSLYNNKLNGILADEMGLGKTVQVMALIAYLMEFKGNYGPHLIIVPNAVMVNWKSELHTWLPSVSCIFYAGGKDYRSKLYSQEIMAMKFNVLVTTYEFIMYDRARLSKIDWKYIIIDEAQRMKDRDSVLARDLDRYRCQRRLLLTGTPLQNDLKELWSLLNLLLPEVFDNKKAFNDWFSKPFQKEGPTQNTEDDWLETEKKVIIIHRLHQILEPFMLRRRVEDVEGSLPPKVSIVLRCKMSAVQSAIYDWVKSTGTLRLDPEGENSKIQKNPHYQAKEYKTLNNRCMELRKTCNHPSLNYPLLGELSTNSIVKSCGKLWILDRILIKLQRTGHRVLLFSTMTKLLDLLEDYLRLRQNVN

SEQ ID NO: 171095 - protein, 184 aa, Glycine max
  Clone ID: PAT_MRT3847_125513C.1.pep
MARQALLLFVFWLCFLARVRSDEDCVYTVYVRTGSIIKGGTDSVIGLKLYDKSGYGIYITNLEAWGGLMDPGHNYYERGNLDIFSGRGPCLEAPVCEANLTSDGSGPHHGWYVNYVEVTTTGVHAPCSQQQFTFEQWLATDTSPYQLWAVRNNCPNNLGPAQLTDVAIPRAGPAFSILESTVRV

SEQ ID NO: 171096 - protein, 543 aa, Glycine max
  unsure (1)..(543): unsure at all Xaa locations
  Clone ID: PAT_MRT3847_125514C.1.pep
MASISHFRTSANSFLSQYEPLSLLLAPLLSLLFAHALRSFFHLLSQNGLKATLLGFLINSLKLVPGVKGYIDAEKQKVVDKLQSDGKSKREGWKTELPSTGLGTSVLEKMREEKINDAVWQGKCSGTXYIGGSESDGHFSLINEACSMFAHTNPLHLDVFKSVARFEAEVVAMTAALLGSKEKSSGRQICGNMTSGGTESILLAVKSSRDYMKSKKGITRPEMIIPESGHSAYDKAAQYFNIKLWRVPVNKNFQADVKAIRRHINKNTILIVGSAPGFPHGVIDPIEIIWQFLPXELGHLASSFGICFHVDLCLGGFVLPFARELGYHIPPFDFSVKGVSSISVDVHKYGLAPKGTSVVLYRNHEIRKHQFVAVTEWSGGLYVSPTIAGSRPGSLIAGAWAAMISLGKEGYLKNTKEIMEGSRRIQQGIEEIAELFIVGKPDMTIVAFGSDVLDIFEVNDVMSSKGWHLNALQRPNSIHICVTLQHVPIVEDFLNDLKESVKTVKANPGPISGGLAPIYGAAGKMPDRGMVQELLVDYMDGTC

SEQ ID NO: 171097 - protein, 66 aa, Glycine max
  Clone ID: PAT_MRT3847_125515C.1.pep
LNIIHDNMYKHINLCQCHKIQLRWLICNVLCNERRKDRSLCHNNHYAMLNNHNVHIQVPQPCALDF

SEQ ID NO: 171098 - protein, 144 aa, Glycine max
  unsure (1)..(144): unsure at all Xaa locations
  Clone ID: PAT_MRT3847_125516C.1.pep
PAGTRRKRPTRPTFPDRKGEQGKTXEGXADRNRTERAGRXRPQGGAKTTEGRTNTRTRQEPXRETEKXKPRDQNXATKAKDQEKTRTGEXRHRAAXNTPNKAQQKTRELEARXRRTEAXXENAQQKERRRTEGDSGEKGRRAGD

SEQ ID NO: 171099 - protein, 112 aa, Glycine max
  Clone ID: PAT_MRT3847_125517C.1.pep
MAGLQRSAVSFRRQGSSGFVWDDRFLQEELNKVKEDHNNNNNHDHDNDDGGEIKELQVQTTPPLQRIRSNGGARGYRTGKVSPAIEPPSPRLSACGFCAAFGKAGDNKHRPR

SEQ ID NO: 171100 - protein, 115 aa, Glycine max
  Clone ID: PAT_MRT3847_125518C.1.pep
MAGLQRSAVSFRRQGSSGFVWDDRFLSEELNKVKEDQNNNNDGGPEIKELHQVQTTPPPERTRSNGGARGYRTGKVSPAIEPPSPRLSACGFCAAFGKAGDNKPQRTTPAKHRPR

SEQ ID NO: 171101 - protein, 271 aa, Glycine max
  unsure (1)..(271): unsure at all Xaa locations
  Clone ID: PAT_MRT3847_125519C.1.pep
ATILFLGLSDSKAEEIIKDEXQHGTSPFHSLEKWNQRTRPGYRVIWAQCWGIPLEVWDIGSIWKIVVAVGELVEVDDDVEDFRRLDRARVLNRTPWSPFFHHTVQVTIGGEIHMVSIIEEASADARTRANRFRMAMELSEDIHSDDLDTDAEFDSVPAGHPFFCQPNNPDDEGMQSLPGDGRDNTDNTHRALLPDIPRSNGSPMGNTLQTSGLENRERPEPGKAKVPPLAPQIPAYPHAQLGKVNKDEAGKRKEAKTRGVSPPAEGAAVFA

SEQ ID NO: 171102 - protein, 169 aa, Glycine max
  Clone ID: PAT_MRT3847_12551C.1.pep
EDKILKVGEELWRETLPLHGGSCFYQLQGLKPHTWYEVKISYPASIPASFSIQLKRNKSDVVLNNNRRLLNTEKLIFKTNSNQDEFLLVLVTVEPEGFPAKLHVAERQFIIFNIVCDELLLGIPHKAWWVVALALLCLGIAFIVPSFLPLHLLPKNQVLRTDDYVSKIS

SEQ ID NO: 171103 - protein, 71 aa, Glycine max
  Clone ID: PAT_MRT3847_125520C.1.pep
TITLSTSQNINSTFHNVNIFAEAIIYHEHTNLLCSILVLNGNDNLCSFRMLCTFLIYTNHRRLQRIINFQF

SEQ ID NO: 171104 - protein, 143 aa, Glycine max
  unsure (1)..(143): unsure at all Xaa locations
  Clone ID: PAT_MRT3847_125521C.1.pep
NGNGGSVISTMSPYTVLHHSIYKPFVRDFVEAAPAKNIKRVKSVHPFGECFDANTIKDGKAVPDIKLAMDGRFRKVSYGICAHNSLVEVRKGVLCLAFVDGGEFAVTGVVLDGHQLRDRVLEFDLSTSVLNFXXSLLLLKRAC

SEQ ID NO: 171105 - protein, 46 aa, Glycine max
  Clone ID: PAT_MRT3847_125522C.1.pep
VRDQITRGVQISILNVIIAIKGEFFTILRLISFTSEIVRSLKRRHL

SEQ ID NO: 171106 - protein, 64 aa, Glycine max
  unsure (1)..(64): unsure at all Xaa locations
  Clone ID: PAT_MRT3847_125523C.1.pep
NSLVVLRVRNNHRSRLGIXRXVLTDSSLLLTRRFANEKENPLLWASTYHAGECLDPVAVSLAKA

SEQ ID NO: 171107 - protein, 44 aa, Glycine max
  Clone ID: PAT_MRT3847_125524C.1.pep
KSNLLVPFVVIPTTLSYMHLNVFYICFNIICPSNFIRSHFFFVL

SEQ ID NO: 171108 - protein, 119 aa, Glycine max
  Clone ID: PAT_MRT3847_125525C.1.pep
GYMAPEVLDGKPYNRRCDVYSFGICLWEIYCCDMPYPDLSFADVSSAVVRQNLRPDIPRCCPSALANIMRKCWDANPNKRPEMEEVVRMLEALDTSKGGGMIPEDQSSGCFCFAPTRGP

SEQ ID NO: 171109 - protein, 387 aa, Glycine max
  Clone ID: PAT_MRT3847_125526C.1.pep
MDSEGEGVRTPKMGVEAEGALNSKMKGAGNVSSKDMIFRADKIDLKSLDAQLEKHLSRVWSRSIETKRPREEWEIDLAKLDLRYVVAHGAYGTVYRGTYDTQDVAVKVLDWGEDGVATAAETAALRASFRQEVAVWQKLDHPNVTKFVGASMGTSNLKIPPKNPMNADEESLPSRACCVIVEFVSGGTLKQYLFKSRRRKLAYKIVIQLALDLARGLNYLHSKKIVHRDVKTENMLLDTSRNLKIADFGVARVEAMNPSDMTGETGTLGYMAPEVLDGKPYNRRCDVYSFGICLWEIYCCDMPYPDLSFADVSSAVVRQNLRPDIPRCCPSALANIMRKCWDANPNKRPEMEEVVRMLEALDTSKGGGMIPEDQSSGCFCFAPTRGP

SEQ ID NO: 171110 - protein, 111 aa, Glycine max
  unsure (1)..(111): unsure at all Xaa locations
  Clone ID: PAT_MRT3847_125527C.1.pep
PFVVFPLDNEHWTQXTLISMYEHFINVLPTVYTDLSEHTIQSNHFSVTEHFMTXDLYHLHSLPSVFFFYNLSPINVTFTXKXVSFLHFFTNFXSIFLSILTVSLILNSFIY

SEQ ID NO: 171111 - protein, 34 aa, Glycine max
  Clone ID: PAT_MRT3847_125528C.1.pep
FALLLSPLPRPRTGLDRRTLRTFKRLTKWCSFSS

SEQ ID NO: 171112 - protein, 72 aa, Glycine max
  Clone ID: PAT_MRT3847_125529C.1.pep
HSWNARQRRIFETTTVKKHSRWQLVLYPLHWHRFQLKYQCQFHHKQVMHQRHSDQHQSPPFVSQGEPSVSEV

SEQ ID NO: 171113 - protein, 388 aa, Glycine max
  Clone ID: PAT_MRT3847_12552C.1.pep
MVSVEAIRKAQRAEGPATVMAIGTATPPNCVDQSTYPDYYFRITNSEHMTELKEKFKRMCDKSMIKKLYMYLNEEILKENPSVCAYMAPSLDARQDMVVVEVPKLGKEAATKAIKEWGQPKSKITHLIFCTTSGVDMPGADYQLTKLLGLRPSVKRYMMYQQGCFAGGTVLRLAKDLAENNKGARVLVVCSEITAVTFRGPTDTHLDSLVGQALFGDGAAAVIVGSDPLPVEKPLFQLIWTAQTILPDSEGAIDGHLREVGLTFHLLKDVPGLISKNIEKALVEAFQPLGISDYNSIFWIAHPGGPAILDQVEAKLGLKPEKMEATRHVLSEYGNMSSACVLFILDQMRKKSIENGLGTTGEGLDWGVLFGFGPGLTVETVVLRSVTV

SEQ ID NO: 171114 - protein, 363 aa, Glycine max
  Clone ID: PAT_MRT3847_125530C.1.pep
LKNYIYVEADKEAHVREACKGLRNIFGQKITLVPIREMTDVLSVESKAIDLARDTWVRMKIGTYKGDLAKVVDVDNVRQRVTVKLIPRIDLQALANKLEGREVVKKKAFVPPPRFMNVDEARELHIRVEHRRDAYGERFDAIGGMMFKDGFLYKTVSIKSISAQNIKPTFDELEKFRKPGESGDGDVASLSTLFANRKKGHFMNGSSVIVVKGDLKNLKGKVEKVDEDNVHIRPEMEDLPKTIAVNEKELCKYFEPGNHVKVVSGAQEGATGMVVKVEQHVLILISDTTKEHIRVFADDVVESSEVTTGVTRIGDYELRDLVLLDNNSFGVIIRVESEAFQVLKGIPDRPEVVLVKLREIKCK

SEQ ID NO: 171115 - protein, 1028 aa, Glycine max
  unsure (1)..(1028): unsure at all Xaa locations
  Clone ID: PAT_MRT3847_125531C.1.pep
MSRRGMDDDDEEEYEEEDEQVADFDDEEEEDNHRGRGGGGGRKRRRSGFIDDDAEEVDEDEDEEDDDDEDFDGRGGGGGRRRQYKKVSASNFFDEEAVVDSDEEEEEEEGEDDFIVEGGADLPEEDDGRKMRSSRMLPHHQEDHEDLEAMARSIQERYGRRLTDYDEETTDVEQQALLPSVRDPKLWMVKCAIGRERETAVCLMQKYIDKGSELQIRSAIALDHLKNYIYVEAGVXDKEAHVREACKGLRNIFAEKITLVPIREMTDVLSVEXKEIDVQDSLAGTTVKVRQGPYKGYRGRVIDVKGTTVRVELESQMKVVTVDRNHISDNVAVTPYRDTSRYGMGSETPMHPSRTPLHPYMTPMRDPGATPIHDGMRTPMRDPAWNPYTPMSPPGDNWEDGNPGSWAASTGGMDMMSPVLGGENEGPWFIPDILVNVHRAGEESVGVIREVLPDGSYRVALGSSGNGEAITALPNEMEAVVPRKSDKIKIMGGALRGATGKLIGVDGTDGIVKGNPSEVTTGVTRIGDYELRDLVLLDNNSFGVIIRVESEAFQVLKGIPDRPEVVLIKLREIKCKIDKKISVQDRFKNTVSSKDVVRIVDGPCKGKQGPVEHIYRGILFIFDRHHLEHAGFICAKAQSCVVVGGSRSSGERNGDAYSRFASLRSPSRIPPSPRRFSRGGPMDSGGRHRGGRGHDSLAGTTVKVRQGPYKGYRGRVIDVKGTTVRVELESQMKVVTVDRNHISDNVAVTPYRDTSRYGMGSETPMHPSRTPLHPYMTPMRDPGATPIHDGMRTPMHSRAWNPYTPMSPPRDNWEDGNPGSWGASPQYQPGSPPSRPYEAPTPGAGWASTPGGNYSEAGTPRDSSAYANAPSPYLPSTPGGQPMTPSSASYLPGTPGGQPMTPGTGGMDMMSPVLGGENEGPWFIPDILVNVHRAGEESIGVIREALPDGSYRVGLGSSGNGETITALPNEMEAVVPRKSDKIKIMGGALRGATGKLIGVDGTDGIVKVDDTLDVKILDLVILAKLAQP

SEQ ID NO: 171116 - protein, 541 aa, Glycine max
  Clone ID: PAT_MRT3847_125532C.1.pep
MAVSGLRSGGLPLFHHHHHHHHLRFLQSPPSFAKLSFLGSKSSKKGFTVFSRYAQARDLFSSRRFQDSMEKLPNLVEDIVQTSLNTGPRGVLRLAQGVQAFLGVGQEWLTDVSKSANSFAGLPTELQLGLLSPFYLRRLFERMGATYIKLGQFIASAPTLFPPEYVQEFQNCFDRAPPVPFEEIESILRKELGKPLESVYEYIDPTPIASASIAQVHGARLKGSREDVVIKVLKPGIEDILVADLNFVYVVARILEFLSPEISRTSLVGIVKDIRESMLEEVDFYKEAANIEAFRRYLETMGLTGNATAPKVYRYCSTMKVLTMQRLYGVPLTDLDSISSLVSNPETSLITALNVWFGSLLACESFHADVHAGNLWLLRDGRIGFLDFGIVGRISPKTWAAMEVFLGSIAIEDYDSMASSLIEMGATNQDVDAKAFARDLEKVFSSIKELDTEIVVATTTGTATNATAVAANIVVDERQMNALFLDVVRVSESYGLKFPREFALLLKQLLYFDRYTRLLAPNLNMLQDQRISIASNSRSRV

SEQ ID NO: 171117 - protein, 71 aa, Glycine max
  unsure (1)..(71): unsure at all Xaa locations
  Clone ID: PAT_MRT3847_125533C.1.pep
KFTPIXSVVKXKNRGPLXMSKXENXVLGGQSGXXLXXKPXXYRXXXFRLQPXGNSPXPLXFFRILHXPPGW

SEQ ID NO: 171118 - protein, 99 aa, Glycine max
  unsure (1)..(99): unsure at all Xaa locations
  Clone ID: PAT_MRT3847_125534C.1.pep
DKKTYAGMHSWFALNPVTPAIVEIKSIHQFDWLTRENVPVLEAVENQNGIRNYYHGNHIAGXNLSDTSPRKFASKLQARSPKYISLLNHLRIYLPELFP

SEQ ID NO: 171119 - protein, 80 aa, Glycine max
  Clone ID: PAT_MRT3847_125535C.1.pep
TVENIYTFPGESYIQYAQLLHCNVRQRMKQESYCDSLEIKLKYQERNFKITSVNAFRFVNFLSSKGMIILNFTCSSSECV

SEQ ID NO: 171120 - protein, 109 aa, Glycine max
  Clone ID: PAT_MRT3847_125536C.1.pep
VSFHGFVGCYIFSSFLFSHGRYLCLISHHPLITFFFDFTLGYLVNFSLLSNYLLTNMRGTINWYIYFASVYVRVSPIRISHNFLLTFYENSHFSNWIFKNNLVPSRQPI

SEQ ID NO: 171121 - protein, 106 aa, Glycine max
  Clone ID: PAT_MRT3847_125537C.1.pep
LSLILNPYFFLGERRSILFLLLTIIECYFSSLPGIIMWNLYLFIKLFCEPLFPLSFILTTLNNYLASNRCFFMCRVEGFIFIFTLKNLSLVSPHKKKRHDPVSSSV

SEQ ID NO: 171122 - protein, 44 aa, Glycine max
  Clone ID: PAT_MRT3847_125538C.1.pep
SDYPPLGRFVVRDMRQTVAVGVIMNVENKDPTVAKVTRADHRKK

SEQ ID NO: 171123 - protein, 107 aa, Glycine max
  Clone ID: PAT_MRT3847_125539C.1.pep
MWRVLAAVTRNLQSTRKSSKVADESMFESGNGVELFGHERGRRSQHGWGLVCSILQAPISILSCVSHPQVNNNGSDGIWVTTGEFSSQVSEMNHLMVSDSMRYAILM

SEQ ID NO: 171124 - protein, 388 aa, Glycine max
  Clone ID: PAT_MRT3847_12553C.1.pep
MVSVEEIRKAQRAEGPATVMAIGTATPPNCVDQSTYPDYYFRITNSEHMTELKEKFKRICDKSMIKKRYMYLNEEILKENPSVGAYMAPSLDARQDMVVVEVPKLGKEAATKAIKEWGQPKSKITHLIFCTTSGVDMPGADYQLTKLLGLRPSVKRYMMYQQGCFAGGTVLRLAKDLAENNKGARVLVVCSEITAVTFRGPTDTHLDSLVGQALFGDGAAAVIVGSDPLPVEKPLFQLVWTAQTILPDSEGAIDGHLREVGLTFHLLKDVPGLISKNIEKALVEAFQPLGISDYNSIFWIAHPGGPAILDQVEAKLGLKPEKMEATRHVLSEYGNMSSACVLFILDQMRKKSIENGLGTTGEGLDWGVLFGFGPGLTVETVVLRSVTL

SEQ ID NO: 171125 - protein, 88 aa, Glycine max
  Clone ID: PAT_MRT3847_125540C.1.pep
KTSSFQRLGFENPNLIVSSHKPQQRQDLPLLGFQFSVTSLAIFSHILRQIRCDEQATVVVSGGDVENLKRRKGSLLFTYFCCLLRVWR

SEQ ID NO: 171126 - protein, 64 aa, Glycine max
  unsure (1)..(64): unsure at all Xaa locations
  Clone ID: PAT_MRT3847_125541C.1.pep
PKKNCQKNKIFFIGWAPKNXRVGSKIIYARSKNKFQRGLDGIQIXLQTTVPPEKGFYVFKNRAQ

SEQ ID NO: 171127 - protein, 64 aa, Glycine max
  unsure (1)..(64): unsure at all Xaa locations
  Clone ID: PAT_MRT3847_125542C.1.pep
SXPICFXXXPAXSSSAGLVSIPIXXXXCXLRXVXQXVPXXFMLCCCLCFTXVNDSIQXXXXLXL

SEQ ID NO: 171128 - protein, 42 aa, Glycine max
  Clone ID: PAT_MRT3847_125543C.1.pep
PRLCHQGLAVGWHLWVVGICLSLRQKKSRPVGRKLKGRAKHF

SEQ ID NO: 171129 - protein, 68 aa, Glycine max
  unsure (1)..(68): unsure at all Xaa locations
  Clone ID: PAT_MRT3847_125544C.1.pep
TKYCSYKQSHKEGXCVICLKEYKNMKDVETLKTYGHDNHVNCIKKWXSLRKLCPICKVSTLPKDSKDK

SEQ ID NO: 171130 - protein, 65 aa, Glycine max
  Clone ID: PAT_MRT3847_125545C.1.pep
ILQIQRPGFLPMSSILSFQFLITYSPSSNSLHHHPQEFSTKTLISLLAQHSTIFFGVTLLRDNTQ

SEQ ID NO: 171131 - protein, 197 aa, Glycine max
  unsure (1)..(197): unsure at all Xaa locations
  Clone ID: PAT_MRT3847_125546C.1.pep
MLPQKQAEEAMMSSLTQTMEREEGEEVKGETSNFSFKNALWHGGSAYDAWFSCASNQVAQVLLTLPYSFSQLGMLSGIIFQVFYGLLGSYTAYLISILYIEYRSRKEKENVSFKNHVIQWFEVLEGLLGPYWKAIGLAFNCTFXLFGSVIQLIACARSQFPLIIKWDKRTWTYIFGACCATTVFIPSFHNYRIWSFL

SEQ ID NO: 171132 - protein, 483 aa, Glycine max
  unsure (1)..(483): unsure at all Xaa locations
  Clone ID: PAT_MRT3847_125547C.1.pep
MLPQKQGEETMMSNLNETTIERGEEREEENVGGGSHSSLKSILWHGGSAYDAWFSCASNQVAQVLLTLPYSFSQLGMLSGIIFQVFYGIMGSWTAYLISILYIEYRTRKEKESVSFKNHVIQWFEVLEGLLGPYWKAIGLAFNCTFLLFGSVIQLIACASNIYLINDHLDKRTWTYIFGACCATTVFVPSFHNYRIWSFLGLGMTTYTAWYMTISAIAHGQVENVTHTGPKKLVLYFTGATNILYTFGGHAVTVEIMHXAMWKPQKFKYIYLYATLYVFTLTLPSAVAVYWAFGDKLLDHSNAFSLLPRSGWRDAGVILMLIHQFITFGFACTPLYFVWEKVIGMHDTKSICLRALARLPVVIPIWFLAIIFPFFGPINSAVGALLVSFTVYVIPACAHMLTYKSASARQNAAEKLPFFIPNWTAMYVVNAFVVVWVLVVGFGFGGWASMTNFIKQVDTFGLFAKCYQCPPKVPASNNTMLHH

SEQ ID NO: 171133 - protein, 176 aa, Glycine max
  unsure (1)..(176): unsure at all Xaa locations
  Clone ID: PAT_MRT3847_125548C.1.pep
PGGTHAARINADWDLKIWEFGXAPANCGESXCMSECVGTRGGRGPELLLWGENYGASIEVWAVGCVFAEXLGENRVFPGSECVNQVRWSINILGXERGEEIEFIDNPKGXXXIKSLPYSPGTGGSNLSYGVIGIGLLAXMRGFXPTKRAGXTQGLQHPYMGPLDDPNCDPXGGIPI

SEQ ID NO: 171134 - protein, 74 aa, Glycine max
  Clone ID: PAT_MRT3847_125549C.1.pep
TTEEQFIIINAAVYRTTANGNENARALLKIQHQYVRNKPQHQNNTNANKSSTTARQQQPLKIATVSNTFGGCVW

SEQ ID NO: 171135 - protein, 160 aa, Glycine max
  unsure (1)..(160): unsure at all Xaa locations
  Clone ID: PAT_MRT3847_12554C.1.pep
GQGTRFGSSDPKGCFCIGLPSGKGLFHRRVYSTLCAHILAGRATNHNFVFSVRIPWSIMSSTFIYEASRNFFESHPFFGLXQSEVSFFQQGAIPCVSKXDGRLVMETPFXAAKAREGNGGGYSALGSTKLLEDXSKGIKYIDCYGVVTALVPVADPTFLG

SEQ ID NO: 171136 - protein, 78 aa, Glycine max
  Clone ID: PAT_MRT3847_125550C.1.pep
PNNCYLQFGLERRMDLQMNILQYSYQDVEPNSVLCLSHIKYQVCQIQSLIETMEVQCWLNHRTKYKYIETLKNFQTRL

SEQ ID NO: 171137 - protein, 60 aa, Glycine max
  Clone ID: PAT_MRT3847_125551C.1.pep
LNCSSAVRRFSIRHITVGGHIVLPQSASYYSSASDIWVLTIVVCTTYNPLIYVMSDPRKE

SEQ ID NO: 171138 - protein, 48 aa, Glycine max
  Clone ID: PAT_MRT3847_125552C.1.pep
SSLCHSHLLSTSSFFSLLLLFSMLYYSFSAPLAYIDSINYLDEKLYQL

SEQ ID NO: 171139 - protein, 72 aa, Glycine max
  Clone ID: PAT_MRT3847_125553C.1.pep
PAFKCLSDESVPHPQSKPFLPNIHFQNVKLLTILERKIICTHKTYCSCSLLFPHIHETHRHHTTDIFTSYSS

SEQ ID NO: 171140 - protein, 71 aa, Glycine max
  Clone ID: PAT_MRT3847_125554C.1.pep
AKKLKGFGKIGIFPWGGLGHGPPFKSGHHQTFPKGPNNPDCGAYNQSQWPIFKRRLMFFLFGKNIYPVRKK

SEQ ID NO: 171141 - protein, 50 aa, Glycine max
  Clone ID: PAT_MRT3847_125555C.1.pep
APFKEVNSGSLIPNRAWLFFLLFSPHLPRFFFRNLLNLEKNGKRETHCER

SEQ ID NO: 171142 - protein, 145 aa, Glycine max
  unsure (1)..(145): unsure at all Xaa locations
  Clone ID: PAT_MRT3847_125556C.1.pep
SDATQPPGPIEQFPPNHHRTIGCFVTELNPKPLLYPPTFLPSTKSDYLQGGFRRDTSASDEDNLYRRLKALQRQLEXIDIQQEYVMDERKNLKRELFRSHDEVEXIQAEPIVMGAVHGEGDHNNXIGXSHSGFNYYDTILTTFNR

SEQ ID NO: 171143 - protein, 136 aa, Glycine max
  Clone ID: PAT_MRT3847_125557C.1.pep
MGRDVSRSAFVFGFGSFIIVSSSYAKDINLSIISVMSYISLVYLAVIFLYRSLICRGIINVEDSNYVVGEEDAIWMLKLILPYLNEFLSKLKSQDTRGSWHLMECMEFIISCCSHLGSVRTICSLQILSTTLFGER

SEQ ID NO: 171144 - protein, 182 aa, Glycine max
  Clone ID: PAT_MRT3847_125558C.1.pep
VVGEEGAIWMLKLILPYLNEFLSKLKALFSGDPGTTIKLAVLLFVLARCGSYITVWKMAKFGFFGVFTVPKICSSYSAQLTEYGNFWIRRFRDAWDSCTHKKAVALGIFGLVWNLSSVVARIWAVFVLFAAFRYYQQHYLVRDEWGEDEAGCDETWQDPVGVRPKQGPATNFSDTNKIKKGF

SEQ ID NO: 171145 - protein, 76 aa, Glycine max
  Clone ID: PAT_MRT3847_125559C.1.pep
QQLQPHSSPPLPNKGCLHHHQPCPTTLSSKPLFSPAPAWTVPTSTAKPKPRPWLSMTHYRKTSGTKPYFYTIHPAP

SEQ ID NO: 171146 - protein, 78 aa, Glycine max
  Clone ID: PAT_MRT3847_12555C.1.pep
PTRPEMHKAHTGHVFSNSERAIYQSASATTTFSEIMDVMPKHDTNLSQHVSTIPVKPRAGAPFGETLTFQSYPYLLVN

SEQ ID NO: 171147 - protein, 110 aa, Glycine max
  Clone ID: PAT_MRT3847_125560C.1.pep
GPTSFFVTGRGNGSLTGSLLPNSSSSSQLAKESPLMEEVLVIARGQRQIMHQLDTLSNLLHEYFGERSRLGRPDHTGRMREAESVAVPLLLTLAIGAVGVLLFRGLTSQK

SEQ ID NO: 171148 - protein, 40 aa, Glycine max
  Clone ID: PAT_MRT3847_125561C.1.pep
LCVTGGNHLKSHHEIDSIEDSEKYCINIYLDVYKTMDNYM

SEQ ID NO: 171149 - protein, 660 aa, Glycine max
  unsure (1)..(660): unsure at all Xaa locations
  Clone ID: PAT_MRT3847_125562C.1.pep
MAQDTVSGVDSPRGRLLRDQVQVVKKKDSDRYEIVPIQDSLSFEKGFFIFIRACQLLAQKXEWNHLRSSSPTVCQGVITHLSDQISTLDERMDEFTSRIEELNSKFAIRKDSAGSQQNLALQAEAHDVSGPKPVFVPIXAIKSRPRICYRTASSPCSVSERLEGIYALSEKXRPLLDLRVSVTGGVHFDLVKRVLRDIHRAGQEPEEIIHQISETVYPMYKAFIEPDLQTAHLKIINKFNPFSGFQNPTYILKSARTVTVDQIKAVIAAEHTETKEETYDIFLLPPGEDPEACQSYLRMRNRDGKYNLMFEEWVTDSPFIISPRITFEVSVRLLGGLMALGYTIAAILKRSSHVFHDDKVTIKTDWLEQLNRTYVQVQGKDRNYCKFVAEKLGLDGSYVPRTYIEQIQLEKLVNDVMALPDDLKTKLSIDDDLVSSPKEALSRASADRRMKYLNRGISQSYSTQRDKILPKLTKLAINNRRFDARALESPAPIANQGVITQLSDQISTLNERMDEFTSRIEELNSKFAISKDSAASQQNLALQAEACNGSGPTSFFVTGLSNGSLTGSLLPNSSSSSQLAKESPLMEEVLVIARGQRQIMHQLDTLSNLLHEYFGERSRLGRPDHTGRMREAESVAIPLVLTLAFGAVGVLLFRGLTSQK

SEQ ID NO: 171150 - protein, 98 aa, Glycine max
  unsure (1)..(98): unsure at all Xaa locations
  Clone ID: PAT_MRT3847_125563C.1.pep
HSSAHASAHASAHASVSWHAKKRKKGNRSFVFGEGAAMALLPGTTVEXGGITLILRPVNSVPTLXGLNGPRIRHLLAAQFSDFPNSPYLTMPPIESNL

SEQ ID NO: 171151 - protein, 60 aa, Glycine max
  Clone ID: PAT_MRT3847_125564C.1.pep
SRRETNARFDCNVTFHSPMLCPSLGLDYNTPPIITTRPNGLDAKQRIALKTRVRYEVRLL

SEQ ID NO: 171152 - protein, 47 aa, Glycine max
  Clone ID: PAT_MRT3847_125565C.1.pep
SVIYNMILSAVRGNCALRRFVWLISLTRDTNGTCLWGAEAPYWWSAN

SEQ ID NO: 171153 - protein, 65 aa, Glycine max
  Clone ID: PAT_MRT3847_125566C.1.pep
HYCILSKIILHTSHIDLNSCLLVISIRMLYWFSSIFHILANQFITYSNWSSHISKSSSLCLIFQN

SEQ ID NO: 171154 - protein, 116 aa, Glycine max
  Clone ID: PAT_MRT3847_125567C.1.pep
WGFTIWCVSCGPLDWSQPSRPSNGQCSIVASQRCSSSNCIQRTQPNRIPQCYHVPQPKRFTPSNHQTFSGSLPRTSCHITVPSLMLEELIVLIYKSRDHSLYILVISRHPLLLTFN

SEQ ID NO: 171155 - protein, 41 aa, Glycine max
  unsure (1)..(41): unsure at all Xaa locations
  Clone ID: PAT_MRT3847_125568C.1.pep
SIDKPHEISQKLGYFMRFISRLTVFGYYYDLITIEFXLVLV

SEQ ID NO: 171156 - protein, 48 aa, Glycine max
  unsure (1)..(48): unsure at all Xaa locations
  Clone ID: PAT_MRT3847_125569C.1.pep
FLTQEXKTKYHSKLHYXYAXXRXAXXPSXIQSKYXNXKXXSXEIYDLK

SEQ ID NO: 171157 - protein, 388 aa, Glycine max
  Clone ID: PAT_MRT3847_12556C.1.pep
MVSVEEIRKAQRAEGPATVMAIGTATPPNCVDQSTYPDYYFRITNSEHMTELKEKFKRMCDKSMIKKRYMYLNEEILKENPSVCAYMAPSLDARQDMVVMEVPKLGKEAATKAIKEWGQPKSKITHLIFCTTSGVDMPGADYQLTKLLGLRPSVKRYMMYQQGCFAGGTVLRLAKDLAENNKGARVLVVCSEITAVTFRGPTDTHLDSLVGQALFGDGAAAVIVGSDPLPVEKPLFQLVWTAQTILPDSEGAIDGHLREVGLTFHLLKDVPGLISKNIEKALVEAFQPLGISDYNSIFWIAHPGGPAILDQVEAKLGLKPEKMEATRHVLSEYGNMSSACVLFILDQMRKKSIENGLGTTGEGLDWGVLFGFGPGLTVETVVLRSVTV

SEQ ID NO: 171158 - protein, 142 aa, Glycine max
  Clone ID: PAT_MRT3847_125570C.1.pep
AEASVRARKLALAWKERLVGDDDNMFGALGLLHLVCAFGFVSEFSLDELVGFSVAAPTNEEDFPELCRAVGLTERVPDIVQKLIDKDKHILAVKYILEFNLADRISPVPILKACVDEAKKLGKRLFQERKSLNESMSREINT

SEQ ID NO: 171159 - protein, 45 aa, Glycine max
  Clone ID: PAT_MRT3847_125571C.1.pep
MDFHTLSRKQLQTLCKKNKIPANIANVAMADALAALNKVEGLVIF

SEQ ID NO: 171160 - protein, 140 aa, Glycine max
  Clone ID: PAT_MRT3847_125572C.1.pep
MVSFEMNDRKKIGLGLTGFGIFFSFLGLIFFFDKGLLAMGNILFVSGVSLTIGLKSTMQFFMKRSNFKGTISFGIGFFILILGWPILGMIVESYGFIILFSGFWPTLAVFLQKIPVLGWLFQQPYVRSLLDRYRGRRVPV

SEQ ID NO: 171161 - protein, 56 aa, Glycine max
  Clone ID: PAT_MRT3847_125573C.1.pep
AITVFSFMNNSKFYFKLNRSESLGTMAKILTRPVTFNIPDALLSVIQSDRLYDSHA

SEQ ID NO: 171162 - protein, 60 aa, Glycine max
  Clone ID: PAT_MRT3847_125574C.1.pep
QLLQDVTPVQLQHDHTKVQLLLDALTVLHQRGSHPVNFTPFHNSEFGYSICRLKNCPNVQ

SEQ ID NO: 171163 - protein, 61 aa, Glycine max
  unsure (1)..(61): unsure at all Xaa locations
  Clone ID: PAT_MRT3847_125575C.1.pep
SQSDPCLRMRCMLQQTKVNLIQNRFRWENNQWGKWNGGAMVQNGYGLCLYFLYGDYPPISX

SEQ ID NO: 171164 - protein, 214 aa, Glycine max
  Clone ID: PAT_MRT3847_125576C.1.pep
ARGIFGNVAIAARYSQRVHGLKRVFIIDFDVHHGNGTNDAFYDDPDVFFLSFHQDGSYPGTGKFDEVGSGDGEGTTLNLPLPGGSGDTAIRTVFDEVIVPCAQRFKPDIILVSAGYDGHVLDPLANLQYTTGTYYMLASSIKQLAKDLCGGRCVFFLEGGYNLKSLSYSVADTFRALLGDRSLASEFDNPNILYEEPSTKVKQAIQKIKHIHSL

SEQ ID NO: 171165 - protein, 84 aa, Glycine max
  Clone ID: PAT_MRT3847_125577C.1.pep
QLKEPVPLTMAFLVMDPWISNLKSTLNRVAWVPVDLSYIPPVEKVLYQKRVEQRRKKRVWNDPYIKEWYSRFFCGVEVPCVLIP

SEQ ID NO: 171166 - protein, 57 aa, Glycine max
  Clone ID: PAT_MRT3847_125578C.1.pep
SECHMSRLIKNGIRSQILCNFKRNCRIGCVVIIRSNFNVYSFNTFNIYMIFKFIINI

SEQ ID NO: 171167 - protein, 197 aa, Glycine max
  Clone ID: PAT_MRT3847_125579C.1.pep
VRNSRSTTRPQKQTFHFLRNPKTLNRAMPLHSSSFDSLSKSQDLSSAIQSATTPSQIASACASIDSFLHSHSPDQSRHFFSLAFPTLISKLFGFDDPSNAWIHHRHSGDLAQTLFSLLSPAGNLAAAIAAVDRLSLIKYVFPAERLPHWTRSFLSDTDSRSLSDLCPSLFKPSPSPSQIQLNVFEYFFFWFAYYPVS

SEQ ID NO: 171168 - protein, 64 aa, Glycine max
  Clone ID: PAT_MRT3847_12557C.1.pep
RISILGSDKCSMVRTPVREKKDKKIPDIVEIVDIKYGNAEKAWATPLASRLKKLNFPKLSKSII

SEQ ID NO: 171169 - protein, 123 aa, Glycine max
  Clone ID: PAT_MRT3847_125580C.1.pep
RVRRMMLAAILRNEVGWFDEEEHNSSLVAARLATDAADVKSAIAERISVILQNMTSLLTSFIVAFIVEWRVSLLILATFPLLVLANFAQQLSLKGFAGDTAKAHAKTSMIAGEGVSNIRTVAA

SEQ ID NO: 171170 - protein, 74 aa, Glycine max
  unsure (1)..(74): unsure at all Xaa locations
  Clone ID: PAT_MRT3847_125581C.1.pep
LDKNITSHWNQSVHGLTVNVRKMFVKLDAELFQECHRQFEDMEAKPKELEVQMEXNWNRLAEATSHNGEDMVTA

SEQ ID NO: 171171 - protein, 40 aa, Glycine max
  unsure (1)..(40): unsure at all Xaa locations
  Clone ID: PAT_MRT3847_125582C.1.pep
EKEIXNGYCCLPCWRNRNPSTSFFKNQNIKPYPLRPKKSP

SEQ ID NO: 171172 - protein, 44 aa, Glycine max
  unsure (1)..(44): unsure at all Xaa locations
  Clone ID: PAT_MRT3847_125583C.1.pep
IDLSXNSXHGQXSPKWGKFHSXXSLMXXXXNLSGVXPPXLGGXX

SEQ ID NO: 171173 - protein, 223 aa, Glycine max
  unsure (1)..(223): unsure at all Xaa locations
  Clone ID: PAT_MRT3847_125584C.1.pep
MSAVGGFTLTLSPINLKLPLLPSNRLFNRTPFKSSISFSLRSNDEQQPLGLDIAALRSASVRLIDGNQIMVGVVSKTLARQMAQDSELDLVIVSPDADPPVVRMMDYNKYKYEQQKKKKGQQKRSAANRMDLKELKMGYNIDQHDYSXVRLKAAQKFLKDGDKVKVIVNLKGRETEFRNIAIELIKRFQSDVXELATEETXXXRDRNMXIXYGFQRKPLYRKL

SEQ ID NO: 171174 - protein, 108 aa, Glycine max
  Clone ID: PAT_MRT3847_125585C.1.pep
SERGAQLSSKAMSAVGGFTLTLSPINLKLPLLPSNRLFNRTPFKSSISFSLRSNDEQQPLGLDIAALRYRTTLSLYFTHLVRCKHSIYGFDCSRALWLREQVSFREAH

SEQ ID NO: 171175 - protein, 208 aa, Glycine max
  Clone ID: PAT_MRT3847_125586C.1.pep
SSVEWEPVKEGGRVKLKTRYGNFLRANGGLPPWRNSVTHDIPHRTATQDWILWDVDVVEIYVNSPASHDRPSAPPLPVEDSVPILTSAQVPPPPTVSASFSRQQSNDLSPKVEGRTIYYHIAEDNGEVLDEGVQGYSLIFKGNGVEELTRKFEEETGLEGIIVCNRSPLNGKLYPLRLQLPPNTVTMRVVLVLPLSNLARDFEEQGLL

SEQ ID NO: 171176 - protein, 86 aa, Glycine max
  Clone ID: PAT_MRT3847_125587C.1.pep
YVSFSSCRLSSSLVFSRHGALSLFLYDDHSGIDLLLRVLSSHALLFIPSGAVSLFLFSSLLRVHPPPPPKEGGRHTVMTGNLPGTN

SEQ ID NO: 171177 - protein, 98 aa, Glycine max
  Clone ID: PAT_MRT3847_125588C.1.pep
MQTISSNKFRTGMDFFHRAKAVRLRSHHDKYLLAEDDEDSVTQDRKGSSKSARWTVEYVAEYDNIIRLKSCYGKYLTAFNHRFLLGMTGHQVLQTLPS

SEQ ID NO: 171178 - protein, 55 aa, Glycine max
  Clone ID: PAT_MRT3847_125589C.1.pep
ICRNSFVDPVVTKSKLVFPEHCALKHHSQHKKCLVSNQPTLGSINIPPYIHRLMF

SEQ ID NO: 171179 - protein, 198 aa, Glycine max
  Clone ID: PAT_MRT3847_12558C.1.pep
SEITAVTFRGPSDTHLDSLVGQALFGDGAAAVIVGSDPLPAEKPLFELVWTAQTILPDSEGAIDGHLRQVGLTFHLLKDVPGLISKNIEKALVEAFKPLEIDDYNSIFWIAHPGGPAILDQVEAKLGLKHEKMEATRHVLSEYGNMSSACVLFILDQMRKKSIENGLGTTGEGLEWGVLFGFGPGLTVETVVLRSVTV

SEQ ID NO: 171180 - protein, 105 aa, Glycine max
  Clone ID: PAT_MRT3847_125590C.1.pep
ARATTFSRQEFTDSNVGSPPKKMEGRTIYYHVAEDNGDVDDENVQGYSLNFKGNGVEQLARKFEEETGLEGVIACTRSPLNGKLYPFRLQLSPNNVTMQVGLVLP

SEQ ID NO: 171181 - protein, 192 aa, Glycine max
  unsure (1)..(192): unsure at all Xaa locations
  Clone ID: PAT_MRT3847_125591C.1.pep
MQTTSSNTSGATSIRSGMELFHRAKAVRLRSHHDKYLLADEDEESVTQDRNGSSRNAKWTVELIPEFDNIIRLKSCYGKYLTASNQPLLLGVTGRKVVQSLPRRLDSSVEWEPVRDGAQVKLKTRYGNFLRANGGXPPWRNSVTHDIPHRTTTQDWILWDVDVLEIHVGVPGSPPIPHSDSLVCESILFCCT

SEQ ID NO: 171182 - protein, 529 aa, Glycine max
  unsure (1)..(529): unsure at all Xaa locations
  Clone ID: PAT_MRT3847_125592C.1.pep
MEFFTKTSVVKLRSHLDKYLVADADGARVRQSRRSSGRGTWWTVEEVAAEGGINNKVRLRSCHGRLLTATETPFLLGMTGKTVLQTEFEAGADFKHEWEVIRDGFQVRLRSWSGKFLRANGGTPPWRNTVTVDEPHSSATRDWILWDVEPVEAVEELVDEFLCENDDVVSSFASDDVLSVDSEPASPMSVFSLSSPPARRNSKLMLMRNRPCLSRKFHSNKFRSGMDFFHRAKAVRLRSHHDKYLLAEEDEESVTQDRNGSSKSARWTVEYVAEYDNIIRLKSCYDKYLTAXSNHLFLLGMTGHKVLQTLPSRLDSILEWETWEPVKEGGRVKLKTRYGNFLRANGGLPPWRNSVTHDIPHRTATQDWILWDVDVVEIYVNSARDPLNGKLYPLRLQLPPNTHLTICCKTPPISSESIAFIRQSSPRSNGGNLKFPWQDNFYQKSRGIFFQSKITLRNLKPFLIRYNFCLDDENVQGYSLNLKGMGVEQLAREFEEETGLEGVIVCTRSPLNGKLYPLRLQLPPNMSPC

SEQ ID NO: 171183 - protein, 54 aa, Glycine max
  unsure (1)..(54): unsure at all Xaa locations
  Clone ID: PAT_MRT3847_125593C.1.pep
LQSHPLCGNHDHTLHLFSLWMGRNTIFILIVGSGLSIIVPSEQSYXRCXSXXCN

SEQ ID NO: 171184 - protein, 49 aa, Glycine max
  Clone ID: PAT_MRT3847_125594C.1.pep
FRRIDTIIITFCPSPDISNKANKLMFTVKKNLFLFVTYCKLSKYYYKFL

SEQ ID NO: 171185 - protein, 48 aa, Glycine max
  Clone ID: PAT_MRT3847_125595C.1.pep
HYTNKLTRITSNPGTDFQNNRKAASNSEKCVMAPKGKHGMQTVYLPTM

SEQ ID NO: 171186 - protein, 141 aa, Glycine max
  Clone ID: PAT_MRT3847_125596C.1.pep
MARVSKLQRLPIQNTFLTRPIAITTNTSPPEGKLRLSSLFSHSEALLQNSCQNARHLLQIQALLVTSSLFRNPYLARTILSRASHLCDVAYTRVIFRSINSLDTFCVNIVIQAYSNSHAPREAIVFYFRSLMRGFFPNSYT

SEQ ID NO: 171187 - protein, 110 aa, Glycine max
  unsure (1)..(110): unsure at all Xaa locations
  Clone ID: PAT_MRT3847_125597C.1.pep
FGALPEPFMTPKKVLISLRILNTSFPDYLGSRENTLQHPFLTXHQNEIYVGFPLNIXAFPIKGGASISVNLIEXHIXVLTRYFXSDXLSAESKLCILSLKKKKKLETSSS

SEQ ID NO: 171188 - protein, 69 aa, Glycine max
  Clone ID: PAT_MRT3847_125598C.1.pep
SDMIEIVKQGQSLQANCQQGLWHMFVGQVCSPELRTGVCGLYIYATQVTSQGVSHRRYLSWAFTPTSAV

SEQ ID NO: 171189 - protein, 107 aa, Glycine max
  Clone ID: PAT_MRT3847_125599C.1.pep
GKDINKFFTKPSKKKIAPKVIKYQIYDMRTQYPMKHGPPTLLWGPMFNPRPGKGPTRTQHPYYVLFLGHYRGKRARARGPYRGQYFIANNKQNGRVVSMGYKWHKKI

SEQ ID NO: 171190 - protein, 390 aa, Glycine max
  unsure (1)..(390): unsure at all Xaa locations
  Clone ID: PAT_MRT3847_12559C.1.pep
MVSVEEIRQAQRAEGPATVMAIGTATPPNCVDQSTYPDYYFRITNSEHMTELKEKFKRMCDKSMIKKRYMYLNEEILKENPSVCAYMAPSLDARQDMVVMEVPKLGKEAATKAIKEWGQPKSKITHLIFCTTSGVDMPGADYQLTKLLGLRPSVKRYMMYQQGCFAGGTVLRLGKDLARNNKGAPRACGFGLKITEVDVXGQLDTHLDSLXGKPCLGDGATAFIGGSDPLXPVEKPLFQLVWTAQTILPDSEGAIDGHLREVGLTFHLLKDVPGLISKNIEKALVEAFQPLGISDYNSIFWIAHPGGPAILDQVEAKLGLKPEKMEATRHVLSEYGNMSSACVLFILDQMRKKSIENGLGTTGEGLDWGVLFGFGPGLTVETVVLRSVSV

SEQ ID NO: 171191 - protein, 58 aa, Glycine max
  Clone ID: PAT_MRT3847_1255C.1.pep
VFNKTDNVSVHPKSHILASVMTNATHQTTQTTKFFAQFESPFYFHNCFESKKRFGSTM

SEQ ID NO: 171192 - protein, 67 aa, Glycine max
  Clone ID: PAT_MRT3847_125600C.1.pep
QHHTDEELTAYSLPTIREKSYGAKTLRWLEETPYMKNIILMLALDVTCMVIGDGIITPPICGMASSD

SEQ ID NO: 171193 - protein, 38 aa, Glycine max
  Clone ID: PAT_MRT3847_125601C.1.pep
PWRLSTFIDALGRDPLTMEPADYLPPRRTLVDLFTLTL

SEQ ID NO: 171194 - protein, 85 aa, Glycine max
  Clone ID: PAT_MRT3847_125602C.1.pep
IFGPRGYCALGETIPYGGSNMRGFARYFGTQAPHKYLQVQSVVTPVYIPPGQGILIFFPVVGGYSPMVGYKRASLSVVFIKIISV

SEQ ID NO: 171195 - protein, 119 aa, Glycine max
  Clone ID: PAT_MRT3847_125603C.1.pep
AGAVEVGTHRSDGQRLKCDGIGENEVQEFLDSVCPMEGALSPGEYWNIYSSAHQMGSCRMGVNEKEGAVDENGETWEAEGLFVCDASVLPSAVGVNPMITVQSTAYCISNRIADYLRRD

SEQ ID NO: 171196 - protein, 35 aa, Glycine max
  Clone ID: PAT_MRT3847_125604C.1.pep
SSNAYNVPWVEKYRPIKVADIVVNEDAISRKLFSN

SEQ ID NO: 171197 - protein, 137 aa, Glycine max
  unsure (1)..(137): unsure at all Xaa locations
  Clone ID: PAT_MRT3847_125605C.1.pep
YAIPLALLHERKIVLGALDCDNLPLPSIGSNQQHSSPHEDNCLFFAKAGDGTYMPTPGDSTHTTVHVXEIDNPQEPPLFKPFQTPHSLPDSSSSITETPAAKAPPATTDMQANYGALSTEDDATYLRFPHTRYPATI

SEQ ID NO: 171198 - protein, 75 aa, Glycine max
  Clone ID: PAT_MRT3847_125606C.1.pep
PHVRPRVRVAVQLAARGAFREGITNAGPRMLEPIMYVDVATPDEHVGDVIMDLNSRRVQINSFGDKPVGLKVVEF

SEQ ID NO: 171199 - protein, 144 aa, Glycine max
  unsure (1)..(144): unsure at all Xaa locations
  Clone ID: PAT_MRT3847_125607C.1.pep
RSQLHRKLTTILTGLNGQTNIAQEELAXNAEQVAICSHSTKALALHTNHEFNDKCLHHITVRHSIRIKAPISQQRNCPNKMNRPPIDRHFDINNVXMIVLDTNRYQPYLIIAQNGLRYLIKSTLELAKVTSQLCIDDVHRVLAD

SEQ ID NO: 171200 - protein, 161 aa, Glycine max
  unsure (1)..(161): unsure at all Xaa locations
  Clone ID: PAT_MRT3847_125608C.1.pep
MKMVLSGFSVLLHIVLLSRLCFAGDPTVFTELRVSYTTVSPLGVPQQVIAINKKFPGPVINVTTNNHVIVNVYNELDEGLLLSWSGVQMRRNSWQDGVLGTNCPIPPNWNWTYQFLVKDQMGSFFYFPSLGFQRASGGFGPFVCINXETIHIPFALTDKEI

SEQ ID NO: 171201 - protein, 77 aa, Glycine max
  Clone ID: PAT_MRT3847_125609C.1.pep
VNGVEKRRGEGRGSSPLWARASSFFHRSLVHFWGVCWLLQGKREWEEEAIYYSENEKRGDDDDGGGEEKTMEFSLRG

SEQ ID NO: 171202 - protein, 388 aa, Glycine max
  Clone ID: PAT_MRT3847_12560C.1.pep
MVSVEEIRNAQRAEGPATVMAIGTATPPNCVDQSTYPDYYFRITNSEHMTELKEKFKRMCDKSMIKKRYMYLNEEILKENPSVCAYMAPSLDARQDMVVVEVPKLGKEAATKAIKEWGQPKSKITHLIFCTTSGVDMPGADYRLTKLLGLRPSVKRYMMYQQGCFAGGTVLRLAKDLAENNKGARVLVVCSEITAVTFRGPTDTHLDSLVGQALFGDGAAAVIVGSDPLPVEKPLFQLVWTAQTILPDSEGAIDGHLREVGLTFHLLKDVPGLISKNIEKALVEAFQPLGISDYNSIFWIAHPGGPAILDQVEAKLGLKPEKMEATRHVLSEYGNMSSACVLFILDQMRRKSLENGLGTTGEGLEWGVLFGFGPGLTVETVVLRSVTV

SEQ ID NO: 171203 - protein, 40 aa, Glycine max
  Clone ID: PAT_MRT3847_125610C.1.pep
KMNTYQILDFLKTKIFSLYQMVQKMARSSNLSFEGSFFLE

SEQ ID NO: 171204 - protein, 102 aa, Glycine max
  unsure (1)..(102): unsure at all Xaa locations
  Clone ID: PAT_MRT3847_125611C.1.pep
RTLNYVYICKDDGFLKDGVGCIRLKHKSEVPLFDFEAHITVHVSYRNTKCPTQHYTKIQMRKEREKINEXRXWLMSCPPVRPRPLILQSSVLAAGGVGERVG

SEQ ID NO: 171205 - protein, 119 aa, Glycine max
  unsure (1)..(119): unsure at all Xaa locations
  Clone ID: PAT_MRT3847_125612C.1.pep
KTKXXXXNNXRXXRXXTXXXKHXXXKXTXTXXAXXDITXXXXXXXXXXXMXXXLXSLXXXTXNXXXXRXTXXXXHXXXXXXNXXHXYXXXXXXXXXXXXXXHXXXNXLXXXVXXRXNSS

SEQ ID NO: 171206 - protein, 78 aa, Glycine max
  Clone ID: PAT_MRT3847_125613C.1.pep
RGGVVPVATCLTVKGAEDILNKPNAFELSTRSDTMYFIADSEKEKEDWINSIGRSIVQHSRSVTDSEIIDYDNNSSKR

SEQ ID NO: 171207 - protein, 146 aa, Glycine max
  Clone ID: PAT_MRT3847_125614C.1.pep
MSSASKAMLFQQRNNSLLRSNNATLFSDGHHQSQMLSFSSPKSDSLLIDKASSNATLPFSSHHYASVCVCKGYNSGSISMHGALASVRGPFTPSQWMELEHQALIYKYITANVPVPTHLLIPIRKALDSVGFCNFSSGLLRSNSCM

SEQ ID NO: 171208 - protein, 148 aa, Glycine max
  Clone ID: PAT_MRT3847_125615C.1.pep
MASLWRAATGMTENATDYDGVEFWSNPERTGWLTKQGEYIKTWRRRWFVLKQGKLFWFKESSVTRASRPRGVVPVATCLTVKGAEDILNKPNAFELSTRSDTMYFIADSEKEKEDWINSIGRSIVQHSRSVTDSEIVDYDSNNNSAKR

SEQ ID NO: 171209 - protein, 72 aa, Glycine max
  Clone ID: PAT_MRT3847_125616C.1.pep
RIYMLDLFINICHLSCFKKLISYFFFVERIFLIAFLIKIYRSLRLKYHIIITLHKRAKHWILFLASIYLVYS

SEQ ID NO: 171210 - protein, 146 aa, Glycine max
  Clone ID: PAT_MRT3847_125617C.1.pep
MASLWRAATGMTDNATDYDGVEFWSNPERTGWLTKQGEYIKTWRRRWFVLKQGKLFWFKDSAVTRASRPRGVVPVATCLTVKGAEDILNKPNAFELSTRSDTMYFIADSEKEKEDWINSIGRSIVQHSRSVTDSEIIDYDNNSSKR

SEQ ID NO: 171211 - protein, 307 aa, Glycine max
  Clone ID: PAT_MRT3847_125618C.1.pep
MVQKHDTPWAIGHMSMYRTKIADQCRLITITWCKNVILHGLSVSVEGPEGKAQYCCKVELKPWYFWRKQGSKRFIVHGNKPVDVFWDLKGAKFNGETEPTSEYYVAVVCDQEVVLLIGDLKKEAYRRTGCRPALIDPILVSKKEHIFGKRKFSTRARFHEKGRCHEISIECKNKSNNNIGGDGDKIQPEMEIKLDGHVVIHVKRLQWKFRGNESIHLNKMRVEVYWDVHDWLFSPGLKHALFIFKPVLSSSNISLSSSHSISSSSPPLSSSSTPLSTQTGSSGSLEGFSVSESSEFCLFLYAWKVEQ

SEQ ID NO: 171212 - protein, 96 aa, Glycine max
  Clone ID: PAT_MRT3847_125619C.1.pep
RTNLPLSMLNNFLRYLLSPFNESQPGLELGRKNLTHKLMALFIFSMKVIRVYGGIGIALGERRKHRWVEGENSNGMWQREEFSRMGVEERHKKFRP

SEQ ID NO: 171213 - protein, 65 aa, Glycine max
  Clone ID: PAT_MRT3847_12561C.1.pep
FPVDPRERYTTALLSLTLSLSLCNSAITVTLAGYTLSSLILSIMTVLSLPKTLASIGGARVLLIL

SEQ ID NO: 171214 - protein, 53 aa, Glycine max
  Clone ID: PAT_MRT3847_125620C.1.pep
SCTSAGVNPVSQKPRPAPSVYTALRGSVDGQQGPLHDPGKTKTRSLHIVMRFF

SEQ ID NO: 171215 - protein, 112 aa, Glycine max
  unsure (1)..(112): unsure at all Xaa locations
  Clone ID: PAT_MRT3847_125621C.1.pep
ARFSARDGGRGFGGSPRTLAKWLLACDEEHWLYNXTXDENRYSNKKISPPLXRRAXRARXLVIXMPXLVDLLLKMTRTRDEERNNVFLSDPVPLMALLDESNILRRDREEDP

SEQ ID NO: 171216 - protein, 83 aa, Glycine max
  Clone ID: PAT_MRT3847_125622C.1.pep
VRVRLFFFGPKSIFSGRQSYIEKNLDQENKRHRQIDFKENDSWTPNKIVSTWAGFGTAFGRNLYSSFYSLSCPKLIAPTPAIN

SEQ ID NO: 171217 - protein, 127 aa, Glycine max
  Clone ID: PAT_MRT3847_125623C.1.pep
NVAPRFSKLGMLYEAMALYEKMVSCGHVPDVVVFDSLLKGYGLKGETEKIISLLHQMADKDVVLDSKLTSTILACLCHMSRDLDVETILPKLSQQSEHTSKGATIKCHELLMKPNNVHPELKLYVAQ

SEQ ID NO: 171218 - protein, 76 aa, Glycine max
  Clone ID: PAT_MRT3847_125624C.1.pep
GGGGLTTIHICGTRANRTFFGKKNELYSKAINSIKLAKITKPFVNKNYFWGAKYNFSLLTVIFFTEETQLLNLLKS

SEQ ID NO: 171219 - protein, 25 aa, Glycine max
  Clone ID: PAT_MRT3847_125625C.1.pep
PKDSIIRLMANRIDIRSETENVNQN

SEQ ID NO: 171220 - protein, 95 aa, Glycine max
  unsure (1)..(95): unsure at all Xaa locations
  Clone ID: PAT_MRT3847_125626C.1.pep
TWNGHTKWVFAFRFFPEYGHLILSAXMDTKVKMWDCFNPCQCXRTLLGHSICRSDIXSSITGTMFFTCWVXHNFKFWDSQHGQGILTFCLGQISF

SEQ ID NO: 171221 - protein, 167 aa, Glycine max
  Clone ID: PAT_MRT3847_125627C.1.pep
MDTIRSTTTISVQQRTPTKKTKPKKKNTPHPVKVVYISNPMKIKTSASEFRALVQELTGQDAESPPDPTRFHGLIHPDSSSSVDHIKEEEDNVHSVNCVVPPAVADENMSLAGCYEEEQQQQPSSMESINNFEPLDDDDVFTPQMIENISALLPASVFYESPHLNHW

SEQ ID NO: 171222 - protein, 94 aa, Glycine max
  Clone ID: PAT_MRT3847_125628C.1.pep
ASLSILPLPSEFLGSSSPSKTMMDKFLRLKGTSPHHQLRPLNDRSVIYKVSIRILYYIVTLFLATLDIVRSCSLIECSCTFDRLVLSICLNCCM

SEQ ID NO: 171223 - protein, 40 aa, Glycine max
  Clone ID: PAT_MRT3847_125629C.1.pep
PSPPFFSTPSGSTQRVNLHFIISINFCQASARCHIHYKST

SEQ ID NO: 171224 - protein, 52 aa, Glycine max
  Clone ID: PAT_MRT3847_12562C.1.pep
IQFNIVWPKIKLPTTFCGDQLDSESISTNILQSLFYPLFGKIPEKFENFITC

SEQ ID NO: 171225 - protein, 126 aa, Glycine max
  unsure (1)..(126): unsure at all Xaa locations
  Clone ID: PAT_MRT3847_125630C.1.pep
QIPFWLVLKKMYFRGLLETRLSGVDKPKNSMYKKLQXHLFSQEKXPPFWTKSKEFLDNKKNFARPVLDVNQLKQPFPSLRWETHTLPKKGLCMKKSNFFFLLILGIFFLVRVFFFFFQKKRSIVVL

SEQ ID NO: 171226 - protein, 114 aa, Glycine max
  unsure (1)..(114): unsure at all Xaa locations
  Clone ID: PAT_MRT3847_125631C.1.pep
ARVRKLGIRLEITINITLSFILISIAFXLPQINLYSEKANPYECGFDPTSSARLPFSIKFFLVAITFLLFDLEIALLLPLPXAIQTTNTTTIIATAFILVTFXALGLSYEWNTK

SEQ ID NO: 171227 - protein, 118 aa, Glycine max
  unsure (1)..(118): unsure at all Xaa locations
  Clone ID: PAT_MRT3847_125632C.1.pep
EPGLRPLCVFPSLSLKIKCFGNQIPLTFGILCFSMAGAGESLRKFLAAKHAEVEAQGNALRALKGGKGGKPEIYAAKEALNPLXLEKSSIEHSLLGGFDSREGFRESVVNTLERRLFY

SEQ ID NO: 171228 - protein, 112 aa, Glycine max
  Clone ID: PAT_MRT3847_125633C.1.pep
NSARGFFLQLLCHRPPFAVTRDNFRQRYTLQRHHYHPSPLSFPTSLFVTLQNFTHRTSIHLFVYIHKYDRIRHNSKTGFKAHVTLKRHILWRWLLEHRDLSLSYDGCPPRHH

SEQ ID NO: 171229 - protein, 107 aa, Glycine max
  unsure (1)..(107): unsure at all Xaa locations
  Clone ID: PAT_MRT3847_125634C.1.pep
RAVLKQLNLGEGTLIDVKTEVNYFESTDPIPAGVYKFIKNENPTNQGNAPGSSQATTPVKKQNSSPSTSSVSSKTNKVPWGTIFEAXIKLYDKRADEFDKEELSDQV

SEQ ID NO: 171230 - protein, 46 aa, Glycine max
  Clone ID: PAT_MRT3847_125635C.1.pep
NISTKNQTIAIKILQCSIFNSMCNLRTFYYPFYQTRKHGLTLNHYI

SEQ ID NO: 171231 - protein, 61 aa, Glycine max
  Clone ID: PAT_MRT3847_125636C.1.pep
LIRSVAGADSPSYLDDMVDLNSEVAASVAALRKAMDEAQVRMKVAKELMRRKKEGFPDRVK

SEQ ID NO: 171232 - protein, 249 aa, Glycine max
  unsure (1)..(249): unsure at all Xaa locations
  Clone ID: PAT_MRT3847_125637C.1.pep
MGCGGSKVEDFPAVVLCRERKAFLKAASEQRYALAAAHVAYFRSLREIGDALHKFAEQDLTTTTTGSSSPVLTLPSETKSINNKLSSSSPSISHADSPNGSHLPLSSGSELSSPSHSSSPHIHDSPESDPPPYGYYQNYHYAHYMKRSVPRGKPMVYEEPERHVATNGQWPDPSYGHANTGFYGFPGGDYPYYPPPGPSYSPPRXPPAPASSPRVSTWDFLNFFDNFDNGYPSYPPRFRSSASSPNSRK

SEQ ID NO: 171233 - protein, 43 aa, Glycine max
  Clone ID: PAT_MRT3847_125638C.1.pep
TIGGTGKYLGTIHKWPKYNNITVTLTSSTAEKLKIWMTDLMQS

SEQ ID NO: 171234 - protein, 69 aa, Glycine max
  Clone ID: PAT_MRT3847_125639C.1.pep
TKNMVIMVMVGLGLLDLLVAGVSLIIGLAFITLIASILCCHSVIQQHQGCLVLSAESSNRCTGDIRVYH

SEQ ID NO: 171235 - protein, 56 aa, Glycine max
  Clone ID: PAT_MRT3847_12563C.1.pep
KTYILLDKLQFTRLITEREYPRLQAPYIGNITPWHRPITGQKSKLNYAYATMGTCR

SEQ ID NO: 171236 - protein, 54 aa, Glycine max
  Clone ID: PAT_MRT3847_125640C.1.pep
LVDAIMLVKRVHSGSGGPTVDTCHMPNGDDPYAIMSGLACSTPCVIVFTVIHVE

SEQ ID NO: 171237 - protein, 71 aa, Glycine max
  Clone ID: PAT_MRT3847_125641C.1.pep
MSAWAASRAELGLLVLYVGNADSRDQICKALPFGYQCFNNKKPGSAQIVYLTTNLFRKGLRLFKFANYLHA

SEQ ID NO: 171238 - protein, 151 aa, Glycine max
  Clone ID: PAT_MRT3847_125642C.1.pep
MEEQFILRVPPNVAERIERLLNENNASSSEDKSLDLSFREDGRSGTFMIGNEQFPASLLDLPCVVESYKTYDDNSLIKTADIGQMIMVRESGDAAPDVIEYRHGLTPPMRDARKRRFRREPDLNLSKKKGMRMPEVLIKNLHLSLHQNMIF

SEQ ID NO: 171239 - protein, 228 aa, Glycine max
  Clone ID: PAT_MRT3847_125643C.1.pep
MEEQFILRVPPNVAERIERLLNENNASSSEDKSLDLSFREDGRSGTFMIGNEQFPASLLDLPCVVESYKTYDDNSLIKTANIGQMIMVRESGDAAPDVIEYRHGLTPPMRDARKRTFRREPDLNPELVSRVEKDLLKIMAGGTADNLDILTSLLEGDENARGANKKPAPKPAPKHDAPENLTNAGELDRSDSKESDDSVRPNEYLYHNDEMKICIVYILQLNLNSIHS

SEQ ID NO: 171240 - protein, 101 aa, Glycine max
  Clone ID: PAT_MRT3847_125644C.1.pep
GIAKNRQMLDSGKFNLRDLLPRWTPPVSLSSTNFARVSHPPVLRGYCTGGFLALTRVLRSLRIWLAASSRDCAPQLWGTRSVTGSSSPSALAPRTCDRQST

SEQ ID NO: 171241 - protein, 31 aa, Glycine max
  Clone ID: PAT_MRT3847_125645C.1.pep
ICYGFFLMLGTVGFRPALIFVRHIYLSIKCE

SEQ ID NO: 171242 - protein, 52 aa, Glycine max
  Clone ID: PAT_MRT3847_125646C.1.pep
FCEIMCSGSKRKPSQTGLILGDEYGRQEGLRHEISALLEFSAADDGRAFRDA

SEQ ID NO: 171243 - protein, 130 aa, Glycine max
  unsure (1)..(130): unsure at all Xaa locations
  Clone ID: PAT_MRT3847_125647C.1.pep
VXTGIGSRRGYPRVFSDFVSAAWSLCDDQEGREXPYHIATMGTLKTLVVGNSGHPLMDVFWSLHAYNLTGPHALIIRWGDSEHAKDASRGSKEGSCLRKDRTKLETARAFGRLWLHNIVRRERRNGSSLE

SEQ ID NO: 171244 - protein, 65 aa, Glycine max
  Clone ID: PAT_MRT3847_125648C.1.pep
GASHYRNLTRVIWGVRHGKGAPAFDYMHSLCCFNSFHQVGGGPSSCNSGKSKSSQSSHQDRYTPS

SEQ ID NO: 171245 - protein, 45 aa, Glycine max
  Clone ID: PAT_MRT3847_125649C.1.pep
LHTTHHSVRELDSKLEREREREREERKDHVGVDKRGRLEDGGKRR

SEQ ID NO: 171246 - protein, 48 aa, Glycine max
  Clone ID: PAT_MRT3847_12564C.1.pep
YERQDMLRNCTRVFMKFKTTIIFLNSCAKTINVKQNVTKEYLAAGIAL

SEQ ID NO: 171247 - protein, 39 aa, Glycine max
  Clone ID: PAT_MRT3847_125650C.1.pep
YRSSPSPLSQVQKLEGIIHLCQHINSSPTRPRTRGRTRG

SEQ ID NO: 171248 - protein, 68 aa, Glycine max
  Clone ID: PAT_MRT3847_125651C.1.pep
IECFQVHSLLKDLVHKAISETLVCSGQYLFHVPIVYLYAVFDVHKAIVKLWYVPSSTYLVFLLYLLVL

SEQ ID NO: 171249 - protein, 70 aa, Glycine max
  Clone ID: PAT_MRT3847_125652C.1.pep
RQSLMRFAIDSQLSSRSITSYSRQRRHDRSECGAWVDCNLCLGLSHCGHMGNWLNFPSRISSVYCTTLRR

SEQ ID NO: 171250 - protein, 61 aa, Glycine max
  Clone ID: PAT_MRT3847_125653C.1.pep
LAHIHIQDAGINRGGVFGVDIIFKRDLGWDDQWILGVEPFIGGAFTALYPQVVIRAVPFKS

SEQ ID NO: 171251 - protein, 68 aa, Glycine max
  Clone ID: PAT_MRT3847_125654C.1.pep
GSGNKLNSHWGGGEGNVTFLGWGKNLINLLRGGQTPRSMGVVLPGPYVLGASSAGPMSSGWFLHRAPP

SEQ ID NO: 171252 - protein, 96 aa, Glycine max
  unsure (1)..(96): unsure at all Xaa locations
  Clone ID: PAT_MRT3847_125655C.1.pep
MDASKGLEASGETLRAEVKTFFDSAPPLQNSDEITHKLNXFIQRNSSARRIVXVTSGGTTAPLEQRCXVRYVDNYSSGHRGATSTEYCCTCLVNVE

SEQ ID NO: 171253 - protein, 181 aa, Glycine max
  Clone ID: PAT_MRT3847_125656C.1.pep
MPSINYLDVSSNKFTGMLFNNMSCNDDLHFVNLSSNLLKGELPTCLEPKTRVVLYARNCLSNKNQDQHPSDFCSNEALAVTIIPHQQKHKRTTSKAIIVSSMGGLVGGMLIVGVVILVVSRVHKKQVGKIPSKSTLEHVISQEHNEDEVKTTTRSIMEHIIKRVPDKGAVETLTRSIKEYV

SEQ ID NO: 171254 - protein, 81 aa, Glycine max
  Clone ID: PAT_MRT3847_125657C.1.pep
HSQIPVPSDHSVPRHTPKTVSSTVLSSSYPSVPFVEYLFMISLTYITSLGPCLSILLSFSFLLQMCAQCPPAINHVNQGKR

SEQ ID NO: 171255 - protein, 62 aa, Glycine max
  Clone ID: PAT_MRT3847_125658C.1.pep
ILEFMWQCITSPISCASSNSIYQRIGDIVFMHQGIHCMNISPVTPQDEPVQIAQSNDAPLHR

SEQ ID NO: 171256 - protein, 230 aa, Glycine max
  Clone ID: PAT_MRT3847_125659C.1.pep
MVKKKSTFSILSNSMAYTASLVFLASTFLIINFPLLANAIGCNGPCRTLNDCDGQLICINGRCNDDRDVGTHICGGGMPPNPPPSGGSCQSSGTLNCGGKSYPQYRCSPPVTSSTPAILTLNDFSEGGDGGDPSQCDEKFHNNTERVVALSTGWFNGSSLCLKMIRITAGNGRNVTAKVVDQCDSVNGCDRAHAGQPPCRNNIVDGSQAVWDALGLDSDVGEARVTWSMA

SEQ ID NO: 171257 - protein, 146 aa, Glycine max
  Clone ID: PAT_MRT3847_12565C.1.pep
PRVRFVLRQGRWKDAIRSELISDSATVQTGNTPLMQLVQDAEFDSSGFKIPGLKVNYWLDEKSTSTAEPDSSPFIKIEAGLDMQIKCQHSSFILDPFTDKEASLSLDLSCIDVEQLILRAVSCNRHTRLFNIQRQLCKNVPNFQAP

SEQ ID NO: 171258 - protein, 72 aa, Glycine max
  Clone ID: PAT_MRT3847_125660C.1.pep
RSITFTGGCWLVLVWFCFILISCHVLFLFTPPLVLHHSWTPFFFSVTHFTYVSDFLLSLLAHYFTGDKKEIN

SEQ ID NO: 171259 - protein, 75 aa, Glycine max
  unsure (1)..(75): unsure at all Xaa locations
  Clone ID: PAT_MRT3847_125662C.1.pep
VDFLGLLAYTSYGCSYLLNLHTAGGHADLVYMPSVQIAKDVXKISDQTSRSFTFMQLKKILTNAPSPIHYLCVSK

SEQ ID NO: 171260 - protein, 145 aa, Glycine max
  unsure (1)..(145): unsure at all Xaa locations
  Clone ID: PAT_MRT3847_125663C.1.pep
NNDRAGGHRRTTHSRSVSWTDRAPVTRKPPRPLQPLAIHKRSVLEWPSAGCDDLGDWSLPPTPRGSTKTPDSGSGQVFQFKKDYYAFYDKECSRIAEHVYLGSDTVAKSVELLRRHGITHVLNCVGFVCPEFFKTDFXYKTLWLR

SEQ ID NO: 171261 - protein, 69 aa, Glycine max
  Clone ID: PAT_MRT3847_125664C.1.pep
IGLRGTPSGCNDPLVPVDFGGPDGPPPVNSPLPMVLGNTMVKVIAGYANEWGTSQRVVVLAAIVATKWK

SEQ ID NO: 171262 - protein, 149 aa, Glycine max
  unsure (1)..(149): unsure at all Xaa locations
  Clone ID: PAT_MRT3847_125665C.1.pep
PFQIXPXSXXSFPNEXTXIPLXSXSNPXXTXLPVLGGHPPLXGAXXXPXLFKALVXPQXXQGLGXLWAXAXQSPXXAFXSXPNXXXFSHREXAXLXLEXAFPXTXFGQQPXRAEPRLACSXMICXXDXWAVLXRGTGLTGPXLNFQFVT

SEQ ID NO: 171263 - protein, 106 aa, Glycine max
  unsure (1)..(106): unsure at all Xaa locations
  Clone ID: PAT_MRT3847_125666C.1.pep
LXSLIXXXXXXNEXXXXXNXXXXXPXXXXXQSLXSXSXXXHXXXXSLSVXXXTLXXXXXXXXXYXXDXXLSXXSXRYXXLXXXXQLXIXEXPLXXXIXXXXXXXXH

SEQ ID NO: 171264 - protein, 81 aa, Glycine max
  Clone ID: PAT_MRT3847_125667C.1.pep
PTRSLKGPQLCKVKGGGFPGPLSNVETGVSFALTNESPSGDGFSGKALNGKIKAFFRGRMPNVARGTNNAFLFFNPYGAPP

SEQ ID NO: 171265 - protein, 86 aa, Glycine max
  Clone ID: PAT_MRT3847_125668C.1.pep
LCQVSGLKEYIAANPALHHENGTTIVHSKLSDASISSAEYEDEMQDEFYDAITADSSTSDEESDDDQKLVLQEPRVKLKNISWAIT

SEQ ID NO: 171266 - protein, 46 aa, Glycine max
  Clone ID: PAT_MRT3847_125669C.1.pep
YRARPLTILINMAPYPNYHTPQILAPYILYGPHLYYIHAFENADHT

SEQ ID NO: 171267 - protein, 88 aa, Glycine max
  unsure (1)..(88): unsure at all Xaa locations
  Clone ID: PAT_MRT3847_12566C.1.pep
PERQRKGGTXPPRGXAAXTASXRRRRTTXXAAXGGAXGTXXQXXTXXAXGXKNXPKXXRXRSXGXXAXGAXXXXXGKXXPRERQEGRA

SEQ ID NO: 171268 - protein, 61 aa, Glycine max
  Clone ID: PAT_MRT3847_125670C.1.pep
SFESGALIIFSMEWISSRMSYGRHMSFVWPFNRGESFLCKWARLRRSPPLKITQPRSRIGR

SEQ ID NO: 171269 - protein, 132 aa, Glycine max
  Clone ID: PAT_MRT3847_125671C.1.pep
SGPFLPNGGDFFFFFKAPQRGKFCFLLGEPGVPPPFFPLLGGFFLGFFENPNGGWRKPPLPGGGVGSQKSFSLLRGLNFFSTFAPGFFFLKSPFWVTSFGAGLFFFFINGGPLLLVGANPWALCCAPPRVCV

SEQ ID NO: 171270 - protein, 46 aa, Glycine max
  Clone ID: PAT_MRT3847_125672C.1.pep
VRTVNKKKKKKKKKKKKKKKKKKKKKKKKKKKKKKKKKKKKKIWGG

SEQ ID NO: 171271 - protein, 36 aa, Glycine max
  Clone ID: PAT_MRT3847_125673C.1.pep
PGHGDENQTFLSYLFLFTNSLISKHSLGQMYRNRGR

SEQ ID NO: 171272 - protein, 80 aa, Glycine max
  Clone ID: PAT_MRT3847_125674C.1.pep
ETQSANRIQPFTQQEIDSLISLGFGGNSNKYSVISRYGFFLIHYLLCYIQGNTNIIYVLYYMLAEFKLHFLSHVRNMIVN

SEQ ID NO: 171273 - protein, 61 aa, Glycine max
  Clone ID: PAT_MRT3847_125675C.1.pep
KKKLLKCLGKNPFFPIRPNWGPKFSLLILNFLFSEPPQAKPIRGDDEFYEGANANVQMNFS

SEQ ID NO: 171274 - protein, 54 aa, Glycine max
  Clone ID: PAT_MRT3847_125676C.1.pep
IDHTKVVRACLITVLSLHCHLLCHCMGTDKTLVEKPWLKKIQLARPIIFEDNTG

SEQ ID NO: 171275 - protein, 575 aa, Glycine max
  unsure (1)..(575): unsure at all Xaa locations
  Clone ID: PAT_MRT3847_125677C.1.pep
KLGIRLEPHSATRAAMLVRINTLLQGYSGIRFEIMEAITKFLNHNITPCLPLRGTITASGDLVPLSYVAGLLIGRPNSKSIGPNGQVLNAKEAFQLAGIDGGFFELQPKEGLALVNGTAVGSGLASVVLFEANLLVILSEVLSAIFAEVMQGKPEFTDHLTHKLKHHPGQIEAAAIMEHILDGSSYCKAARKLHEIDPLQKPKQDRYALRTSPQWLGPQIEVIRHATKMIEREINSVNDNPLIDVSRNKARQXLHAGNFQGTPIGVSMDNTRLAIASIGKLMFAQFSELVNDFYNNGLPSNLTASRNPSLDYGFKGAEIAMASYCSELQYLANPVTNHVQSAEQHNQDVNSLGLVSSRKTAEAIDILKLMSSTFLVALCQAIDLRHLEENLKNTVRNTVSQVAKRVLTVGINGELHPSRFCEKDLLKIVDREYVYAYIDDPCSATYPLMQKLRLVLVDHALQNGDKEVNSSTSIFQKIGAFEEELNALLPKEVESSRIEVENGNPAIPNRIKECRSYPLYKFVRENLGTTLLTGEKVKSPGEEFDKVFTALCEGKLIDPLLDCLKEWKGAPLPIC

SEQ ID NO: 171276 - protein, 48 aa, Glycine max
  unsure (1)..(48): unsure at all Xaa locations
  Clone ID: PAT_MRT3847_125678C.1.pep
QRAVCMIISISAVAEVFFRVGHHLDIMYPKTAFVXWYVVKGMINAVFL

SEQ ID NO: 171277 - protein, 164 aa, Glycine max
  Clone ID: PAT_MRT3847_125679C.1.pep
NVGSFALIFLVTYFAIHGSLRVQVVGWVCVSIAVGVFAAPLSIVAQVIRTKNVEFMPFNLSLFLTLSAVMWFFYGLLLKDICIAIPNILGFTLGLLQMLLYAIYRNGKTNNKEVATKEEKALEAIMKNVVVVNPLGTCEVYPVINKENNNGQGIEGAKEKECPV

SEQ ID NO: 171278 - protein, 73 aa, Glycine max
  unsure (1)..(73): unsure at all Xaa locations
  Clone ID: PAT_MRT3847_12567C.1.pep
NGRLPQPTNNLNELNSLFAANGFSQTGIIALICAHTLGFSPXSKFDSKIYSTPVDPIVYXNTLSQLQQMCPKN

SEQ ID NO: 171279 - protein, 228 aa, Glycine max
  Clone ID: PAT_MRT3847_125680C.1.pep
ERTKDMQVLNLGREFEMQSMKETETIKGYADRLLGIANRVRLLGKDFPDERIVQKILVTIPEKYESKISALEESKDLSTITLGELINALQAQEQRRMMRQEEVVQGAFHTKAQNSRGGKDKKNNKWRNEKLEGFNKQQGETFPPCPHCKKTNHPERKCWWRPDVKCRKCGNMGHVERICKSKSEEAKVVAEEREDEQLFVATCFATSNSSSDSWLIDSGCTNHMTNDL

SEQ ID NO: 171280 - protein, 74 aa, Glycine max
  unsure (1)..(74): unsure at all Xaa locations
  Clone ID: PAT_MRT3847_125681C.1.pep
TQKXNXKPXPTRTKKXKXXQKGXXQXXKXXXPAXAPXQESRLTXXTXHQXXPPPXPXXXXRXPRHXPXPPQSST

SEQ ID NO: 171281 - protein, 105 aa, Glycine max
  Clone ID: PAT_MRT3847_125682C.1.pep
RFQAFVLQGQWLRGSMYLPSHMRAGEHYVFKSPTDRENSAAVRDLRTTQVQTGASLKQHPHISKRYKISWVDSHVRTVTYTLQCSLMRLNRPSVLMQKTLWRLRQ

SEQ ID NO: 171282 - protein, 153 aa, Glycine max
  unsure (1)..(153): unsure at all Xaa locations
  Clone ID: PAT_MRT3847_125683C.1.pep
MGRDHRNAIAXLTSRIPLVRTNSESTARRPTKXPEGPRPNPCPDRDATTRSRRGSTLSXPPTDDGFGTGTTMPSPERQSFPRGYRSILPTCLAYIAPSTKSCIPWRPDAVISTTSRGRHSVLRILKGRRGHTGHHATCGAVPAARPYLRLSLF

SEQ ID NO: 171283 - protein, 98 aa, Glycine max
  Clone ID: PAT_MRT3847_125684C.1.pep
PRVRGRVGFPPSLHLCCVLISLSTQTKKQSHAHKNMSRHRRQASQVLPPEILAGEDLAKSLDLTQQVADQVGTTKSTTYFHHQPTTPRQANPFSGDRR

SEQ ID NO: 171284 - protein, 90 aa, Glycine max
  Clone ID: PAT_MRT3847_125685C.1.pep
NCRATIYCEIPSKEKALLSLKEMQGKLTVTFVSIYSVDQQEDVTLTKKKWLVNQYVTSSSTVKYCHVSWLIYCCIQDTITNYKLQDYEVS

SEQ ID NO: 171285 - protein, 135 aa, Glycine max
  Clone ID: PAT_MRT3847_125686C.1.pep
MRAMEDWNDEQCDDTLTMTTVSQHFFGDDSETPSFSISIIENMKEDYGLFVWPCSVVLAEYIWQHKHRFSGATVVELGAGTSMPGLVAAKLGARVTLTDDSTRLEVLDNMSRVCDLNKLECNVLGLTWGVWHAFI

SEQ ID NO: 171286 - protein, 93 aa, Glycine max
  Clone ID: PAT_MRT3847_125687C.1.pep
VGCDDFDGPWRWSGSCPMNIFLLAENISLIRPPVHARLSHAKIVLTKAVLLDSISASNCLVKGWSSLVEHLVSLRVFVLSSGQVCINMIRLSY

SEQ ID NO: 171287 - protein, 151 aa, Glycine max
  Clone ID: PAT_MRT3847_125688C.1.pep
LAARGTTVSSDAYGNLDICHQLEVSVNAAAEMIFDLQKKLEATYSEHEIMCTSYKEMNSKCDDLLGRNELAVSLLHKMYSDLRKLVFSNGGTMDEDKIDLQSEVLPDLLNYNSYQPILKHIGNILTEKLELESVTKEIKSELMHRETELKN

SEQ ID NO: 171288 - protein, 112 aa, Glycine max
  Clone ID: PAT_MRT3847_125689C.1.pep
PEKNCCVSESNAASLILRIPIPLVGIIGLSRLLSGGCACACNNTRPGAARTVHSLINAGVEGGQVITTSPPCILPTGFTVHPITHYFGFETLQDATLLALLESHKKSHSKKG

SEQ ID NO: 171289 - protein, 63 aa, Glycine max
  Clone ID: PAT_MRT3847_12568C.1.pep
IYNGLRLCNNLSSRHNDLQKYSTTSQLKKWRGERWGENRRRGESIPMKPGEARPLIFWCLSML

SEQ ID NO: 171290 - protein, 83 aa, Glycine max
  Clone ID: PAT_MRT3847_125690C.1.pep
SPKSFKKNTLSKIIPNEHMLSGFRMDFNTLPNKECGVSILLKSNRVSIQRRIMPQHSQIVNLLIPHFIIKMKSKLLENFKLIS

SEQ ID NO: 171291 - protein, 54 aa, Glycine max
  Clone ID: PAT_MRT3847_125691C.1.pep
YTFQFELQISLNIISQYINGQIRVNRPSAIIADNLTCTIQLDNILLQFTIIKRF

SEQ ID NO: 171292 - protein, 57 aa, Glycine max
  Clone ID: PAT_MRT3847_125692C.1.pep
LAETASALEDEPRRCRQIVLQLQRRFQFLKLAHKYPCAAEDECQFQLYLRSVYLVAR

SEQ ID NO: 171293 - protein, 77 aa, Glycine max
  Clone ID: PAT_MRT3847_125693C.1.pep
ITQPSEDNIIWCDHIHYLESNYSDILKEFTALTRRSIILRLHDVCGHQPSVELRMHTNILLDICDVADWQNIGIIRR

SEQ ID NO: 171294 - protein, 105 aa, Glycine max
  unsure (1)..(105): unsure at all Xaa locations
  Clone ID: PAT_MRT3847_125694C.1.pep
VHSCVERPIVLEDQRILSSGGDVVSGTSGRIFNMLRKQTLRTYYIKTCLLHDADQMLSRGFKKQIYEIFQLLPSKSQERLXYATMPPDALVITTKFMNKTVTILA

SEQ ID NO: 171295 - protein, 59 aa, Glycine max
  Clone ID: PAT_MRT3847_125695C.1.pep
GLYANLQIGPYVCAEWNFGGITVWLKYVPGVSFRTDNEPFEVGLTIPSTWLLYIVSSLG

SEQ ID NO: 171296 - protein, 84 aa, Glycine max
  Clone ID: PAT_MRT3847_125696C.1.pep
NSNTKIVNKNNNKLIRKSKTHRRCNLDGSTLFCRLSYLFLQLSMLCLVSQPVVALEVAATVTNYFLSYNHVVCTICTNTARLEQ

SEQ ID NO: 171297 - protein, 271 aa, Glycine max
  Clone ID: PAT_MRT3847_125697C.1.pep
YLEFGSRSDKTIDGRGVDVYIAKGAGITVQFVKNIIIHGIKVFDIVIREGGMIRDSETHYGFRTKSDGDGISIFGSSNVWIDHVSMRNCSDGLIDAIMGSTAITISNSHFTDHNEVMLFGASDSYSDDKIMQITLAFNHFGKRLVQRMPRVRYGFVHSVNNDYTHWEMYAIGGSKNPTIISEGNRFIAPDNQFAKQITKREYAPENVWANWQWRSINDVYMNGAFFVQSGPELASRPFSREDMITAKVGNYVGRLTRYSGNLLKCRVGRPC

SEQ ID NO: 171298 - protein, 112 aa, Glycine max
  Clone ID: PAT_MRT3847_125698C.1.pep
PTRPAISYAMVPKVLVMVEGTDRATSNCHGSYYQTFPVQSKTALWGTYMAPVTCRQLKGLTRTHNTLSVVFLVLALAHSAYLTTFLETTPDHIPKRVCCNAYSYATAIKTTN

SEQ ID NO: 171299 - protein, 51 aa, Glycine max
  Clone ID: PAT_MRT3847_125699C.1.pep
SRVRLSSSLSPFEILLLVFYILNSLLTVVHSVHISCPILVSHLLVFHIWSD

SEQ ID NO: 171300 - protein, 808 aa, Glycine max
  unsure (1)..(808): unsure at all Xaa locations
  Clone ID: PAT_MRT3847_12569C.1.pep
MAQILLHGTLHATIYEVDKLKIGGGNFLTKIVQNIEETVGIGKGVTKLYATIDLEKARVGRTRIIEKEIKNPRWYESFHIYCAHMASNIIFTVKDDNPIGATLIGRAYVPVQEILHGEEIDRWVEILDEHKNPIHGHSKIHVKLQYFDVSKDRNWALGIRSPKFPGVPYTFFSQRRGCKVSLYQDAHVPDNFVPKIQLSGGQTYQAHRCWEDVFDAITKAQHLIYITGXWSVYTEITLVRDSRRPKPGGDETLGELLKKKAREGVRVLMLVWDDRTSVPLLKKDGLMATHDEETEEYFGGTEVHCVLCPRNPDDGGSFVQDLEISTMFTHHQKIVVVDGELPSGDSNKRRIVSFVGGIDLCDGRYDTQFHSLFRTLDTAHHDDFHQPNFGGSSIKKGGPREPWHDIHSRLEGPIAWDVLFNFEQRWRKQGGKDLLVPLRELEDVIIPPSPVTYLDDHETWNVQLFRSIDGGAAFGFPETPEDAARVGLVSGKDNIIDRSIQDAYINAIRRAKNFIYIENQYFLGSTYAWSADDIKPEAIDALHLIPKELSLKIVSKIEAGERFTVYVVVPMWPEGVPESASVQAILDWQRRTMDMMYKDVVQALRAKGIVENPRNYLTFFCLGNREVKKQGEYEPPERPDPDTDYIRAQEARRFMIYVHAKMMIVDDEYIIVGSANINQRSMDGARDSEIAMGAYQPFHLAARQPARGQIHGFRMSLWYEHLGLLHDSFLHPENEECIKKVNQIADKYWDIYSSESLEHDLPGHLLRYPIGVSNEGVVTELPGFEFFPDTKARVLGDKVDYLPPILTT

SEQ ID NO: 171301 - protein, 39 aa, Glycine max
  Clone ID: PAT_MRT3847_1256C.1.pep
YIYVALYMKLLYSLLAQTKEYPKFDYKRISIHSYLNNNG

SEQ ID NO: 171302 - protein, 481 aa, Glycine max
  Clone ID: PAT_MRT3847_125700C.1.pep
MDPINLLPADGVEVVHQNGVHDEPSNSGDDDGVSYDLDPSVTETAATVALNGNFDNFHQSDSAASDNSFVAEIKESNDNIDGTNMTIPKEEEVKISDQTKQSRAPKGLVKNKNAKAPSSSGVHASLVNKSKIGKDKEASSSVSNGTSALDSRPRQSTKSSRSFNDRQTQLSKPKHPSKSDATSSEVSVEKTKPKSSRKEPIDKVQGEAESSLSSNTEDAKPQRVGTLPNYGFSFKCGERAERRKEFYNKLEERIQAKEVEKSNLQAKTKETQEAEIKMLRKSLNFKATPMPSFYQEPAPAKAELKKIPTTRAKSPKLGRKKSSANSESDGNNSSSSRLARLSLDEKVSESNLTKGPTPPVHQKKPQRRSLPARLAPERNSVSNSRTAPTSSKAIKDEKSSLSSAAKKHTNLSNATGEEKAKTIAANEEKSTLSSETSDAVLLNVVLPSDKPSEEVSHVNGDIAVEENPQLSLAKEPIMAAH

SEQ ID NO: 171303 - protein, 119 aa, Glycine max
  Clone ID: PAT_MRT3847_125701C.1.pep
VMDPINILPADGVEVVHQNGVHDEPSNSGEDGGVSYDLDPSVPETAATVAPNGNFDNFHQSDSAASDNSLVAEIKESNVNIDGTNMTIPKEEEVKISDQTKQSRAPKGSCQEQERKGFQ

SEQ ID NO: 171304 - protein, 69 aa, Glycine max
  Clone ID: PAT_MRT3847_125702C.1.pep
GFFGGFGFSPPPNFFPRFKGVKLKKPQKFGLFWAINGVSLFFGGMFKKVSPLGALRKFFFWAQKYGFFS

SEQ ID NO: 171305 - protein, 121 aa, Glycine max
  unsure (1)..(121): unsure at all Xaa locations
  Clone ID: PAT_MRT3847_125703C.1.pep
MGKXFTLSXLSSLCLQPLSIACLAITPTSPTNCKSTTSKPWEPNNGFNSKGGWXQTWDSQQPELKCAGVTGSKLTLTSEGVYMXYHTHYTRGIFTAHRERAHGVANPGCPETFVEPQEQSN

SEQ ID NO: 171306 - protein, 50 aa, Glycine max
  Clone ID: PAT_MRT3847_125704C.1.pep
LQRRNNNTEMEDWPVETAPVNGYEFNFELDLNGTCDLIDETLMFFKHLNF

SEQ ID NO: 171307 - protein, 54 aa, Glycine max
  unsure (1)..(54): unsure at all Xaa locations
  Clone ID: PAT_MRT3847_125705C.1.pep
LMINPRKGXLSYLLRSECLHASSTHKTGPRLSICTAETERKKKRQQRWLRKDHH

SEQ ID NO: 171308 - protein, 78 aa, Glycine max
  unsure (1)..(78): unsure at all Xaa locations
  Clone ID: PAT_MRT3847_125706C.1.pep
TWXXSXLQXVLFPHFTXXKAIACKVRXXVKVSAPQGHKVXASRXSXKYVXVSVVXTAASCSXXYXXXXHXSFGWVVMT

SEQ ID NO: 171309 - protein, 134 aa, Glycine max
  unsure (1)..(134): unsure at all Xaa locations
  Clone ID: PAT_MRT3847_125707C.1.pep
SRSKRTPTTRTFGEAPTNTVATKTDRKSXPATVGLNKPXRFKPGTVGLEDIRQCLKSTELLILELPFRMLFTKINHDFKTYLQFQSTDVSDLEETADDYLYGLLNDTKLCDIYAKRVTIMPKDMKLARRIISDR

SEQ ID NO: 171310 - protein, 99 aa, Glycine max
  Clone ID: PAT_MRT3847_125708C.1.pep
QSIDFFGALRARVFVSEVRKWFFGFGVSGLGKKLVNSKNGPPPFYQPKMILEKLFRFGNMFVQKQKNVKRVHLVAKFFNGAALGNANGDVFSRGPFFHF

SEQ ID NO: 171311 - protein, 39 aa, Glycine max
  Clone ID: PAT_MRT3847_125709C.1.pep
FTISKIFAVRGETSTHVISSNRSASSPIASLNERSSMRI

SEQ ID NO: 171312 - protein, 97 aa, Glycine max
  Clone ID: PAT_MRT3847_12570C.1.pep
HVCAWKAFSHHRVMVCLCWGIRKGYGSLTYSQQFVMLVDKQIVRGVNGFLSSATLFFQRQCCACESLWECDSCPSVFIKIRCIGLVSKRTRCCRWCI

SEQ ID NO: 171313 - protein, 79 aa, Glycine max
  Clone ID: PAT_MRT3847_125710C.1.pep
LCTHMPVTATLGVMPSGSEKGSSRKQGQPERARLAMVGFGVVPQRTSATVKGGFIYVVQRLELYAARYSSLKFLTSSSF

SEQ ID NO: 171314 - protein, 42 aa, Glycine max
  Clone ID: PAT_MRT3847_125711C.1.pep
LREFKMITSLSAISFIFMSNMMHLQFCRRNSINSFMITHHVP

SEQ ID NO: 171315 - protein, 49 aa, Glycine max
  Clone ID: PAT_MRT3847_125712C.1.pep
LASFVDGVFSFRAFMPLPLFVGTSATIVPPIPATRDRDPDQRNSISEIN

SEQ ID NO: 171316 - protein, 96 aa, Glycine max
  unsure (1)..(96): unsure at all Xaa locations
  Clone ID: PAT_MRT3847_125713C.1.pep
LKTYLRIKCSRTDGNGSPAEKTELHDLCEKQGRRPWNDNLRRPVSDLMXYLAEGVRGVTINPAXVHRTISSXNAYNDQFTELGQSRKDIESAYREL

SEQ ID NO: 171317 - protein, 76 aa, Glycine max
  unsure (1)..(76): unsure at all Xaa locations
  Clone ID: PAT_MRT3847_125714C.1.pep
AYCVVNTQKSFGVNGRMGKLTVPPGTFRSDKXLPLIIRXGAGARNAILMSMPNAVCSLWKYIVGDLGLERTKMTSP

SEQ ID NO: 171318 - protein, 45 aa, Glycine max
  Clone ID: PAT_MRT3847_125715C.1.pep
HSNSFNSLFHECPLTVIFPVAEFNSRKSSPMYMSKGVCLQSFFFN

SEQ ID NO: 171319 - protein, 190 aa, Glycine max
  Clone ID: PAT_MRT3847_125716C.1.pep
IQEDNLSLVTPTNFLARQCSFDRPQPSFTPIFKMTARPLSHILRARCLLRQPQNIQAFSTRSSLRAADHGGTTMILPPGWAVRVFKPRARKLPRREGWGEHLGTYRISLGRLFWVGWLSPYRLSSLILLYKRGLSKRPDGDSKLRESLRTLTRSRNKRQICTLYIEIKEGLFRFMPVLPATADMMFRSRS

SEQ ID NO: 171320 - protein, 75 aa, Glycine max
  Clone ID: PAT_MRT3847_125717C.1.pep
GSPTFGGDFSQGPQRKFWPPNFLENPTGEPSGGLFLGAFRVFKKFYPSLKKKKKKKKQKKKKKKKKKKKKKKKKK

SEQ ID NO: 171321 - protein, 103 aa, Glycine max
  unsure (1)..(103): unsure at all Xaa locations
  Clone ID: PAT_MRT3847_125718C.1.pep
MAFISSGELNSLVYPYLQASGFTPAPFTFGYEAGFNICSIDVNLCAGPXLLLHLLQKGLHHFVMEAHLCYFHAYLEYVFLFFQPLDLITKDVLSLTQIIILRT

SEQ ID NO: 171322 - protein, 235 aa, Glycine max
  unsure (1)..(235): unsure at all Xaa locations
  Clone ID: PAT_MRT3847_125719C.1.pep
ASNDPNSQVRKVIDNEFPAGDKPFVWAFNLQLPTKDNYSAIAYFTTKETVLEDLLMDKFLKGGNAFRNSRLKLIANIVKGPWIVRKAVGEQAICXIGRALSCKYCTGENFIEVDIDIGSSMVASAIVHLAFGYISTLTVDLAFLIESQAESELPEKIFGAFRFSELDPASARTIEPSDVVSCDNAQTSLPTRLWKSIGQGFSHILHSGPLEDGSTSGSEHTNDVDHKDNPTDITN

SEQ ID NO: 171323 - protein, 49 aa, Glycine max
  unsure (1)..(49): unsure at all Xaa locations
  Clone ID: PAT_MRT3847_12571C.1.pep
NXICQLASXRXXYXRXLIWXVXSGFXXQEKSNXSQIGLKKKLTKRGXSC

SEQ ID NO: 171324 - protein, 343 aa, Glycine max
  unsure (1)..(343): unsure at all Xaa locations
  Clone ID: PAT_MRT3847_125720C.1.pep
MILVDGIPFSTHSSHPQGKDILLDLLENPILVSASNSLKANSERKFSVSDESSPERSKWVYIFQREYATVDPALVDFVGTDEATTCVGLVIRNQKNGMTSVAHMDSPKIVEMGLSQMLSSLVDNSLETEFDVHLIGGFEDVSLQHANGSTVSESPADLDGYSFPLCLKIVHTLWSREEKFHIRTICVLGHNTRRDSDGNTXPFFNGFVAETTTGIIIPAIFDRTSRCPDEIVRRIRVSVSYEDANWNGKLLETYDSGIDCFKIAPCRWTLRQNHIASSLLNYSDSEILSICSTSPTAEASDFVENLKRQWNYLIEHPHWTETFPKKQPRTFARSSSDGRWIRC

SEQ ID NO: 171325 - protein, 87 aa, Glycine max
  Clone ID: PAT_MRT3847_125721C.1.pep
SMNTLKSVHVSSEANQTQVPTNSFSMQTLDASVQSLVKSWQRRQRWLHLFTKSSPQDLNINRALWRTHLANFLDSTSVRVFTISLLI

SEQ ID NO: 171326 - protein, 103 aa, Glycine max
  unsure (1)..(103): unsure at all Xaa locations
  Clone ID: PAT_MRT3847_125722C.1.pep
XXALXXXXXXXXXFXXGXIGXXKNXXXXXXXXXXPQXLKXXXXGXNXKXXGXXXXXKXGDXXXXRXXPXFXFFXXXXFARGAALPLLSSXPSRIPEXTYACXR

SEQ ID NO: 171327 - protein, 201 aa, Glycine max
  unsure (1)..(201): unsure at all Xaa locations
  Clone ID: PAT_MRT3847_125723C.1.pep
MCKSDSRRLLVGNIHVLYNPNRGEVKLGQIRFLLSRAQYLSEKWGNTPVVLAGDFNSTPQSGIYKFLSSSELNVLLYYRKHISGQKRCLQSFSWLKXETNNSMXTPGNFAIHSKLVGTVDYLWYSDGIVPSRVLDTVSISDLLRTGGLPCKKVGSDHLALVSEFSFSVTNNEPKNKVAAAAAAAAAASPIVDIEEPNNQQS

SEQ ID NO: 171328 - protein, 88 aa, Glycine max
  unsure (1)..(88): unsure at all Xaa locations
  Clone ID: PAT_MRT3847_125724C.1.pep
IGAVKRFIVSGDLXRREFSKNTGELALEEPLQPRLHNRLGELKLSPLGQNLRVDWLNFHRKRFRDYNTKMTQNRISHSHLFVFSITDS

SEQ ID NO: 171329 - protein, 230 aa, Glycine max
  unsure (1)..(230): unsure at all Xaa locations
  Clone ID: PAT_MRT3847_125725C.1.pep
MMLKDGKARSGQKPGPATRVFSGQEHTLAPRDVLKPLLSDSRRLLVGNIHVLYNPNRGEVKLGQIRFLFSGAHFLSVICGVAPVGPARHLSCTPRCGTDRFLPASDXCRPALVLGENKQTVGPIVXTIWGSNCTQGFNGELLATSYHSKFLGTVDYLWYSDGIVPSRVLDTVVIFARLSAALLHXKKVGSDHLALVSEFSFSVTNNEPTDIVAAAASPIVDIGEPNNQRS

SEQ ID NO: 171330 - protein, 426 aa, Glycine max
  unsure (1)..(426): unsure at all Xaa locations
  Clone ID: PAT_MRT3847_125726C.1.pep
MASGLGLPRMRVLDIGGGFTSGPPFEAAALKINAAIQASFGLEYLGSSLLTLIYQLKMPSLVAEAFEAKGAEPLSLKPIFSASGVKGKRVTALSAEANALTDFIQAIIADKPDIDSPFSVLDLGVVMGLMDKWACKLPTVQPFYAVKCNPNLSLIGALAALGSSFDCASKAEIESVLSLGVSPDRIIYANPCKSESHIRYAASVGVNVTTYDSLDEVEKIGNCHPTREWLLRIKPPQDSGRRARNGRKRRPLPLQVRELLRAPRVAGLRRAGVSFHGGGXVVIGEPGRYFAETAFTLATRVIGKRVRGDVREYWIDDGIYGTLNNIVFDYATVTCMPLACTSKPENPTCCRDLNLKTYPSTVFGPTCDSIDTVLRDYQLPELQVNDWLVFPNMGAYTTSSGTNFNGFSSSAKSIFLACSSPEHTMF

SEQ ID NO: 171331 - protein, 119 aa, Glycine max
  Clone ID: PAT_MRT3847_125728C.1.pep
SPGFVTPTKKRKHNLLCYANWISCWVNMHHGNCHTDPYPIDTIGQGYFPLLGCILPEESTLVWTLNKHTVVISLDFENLAEPCCKLATVDRMHSSRQALAHHIQLLLYFPDPSISTMHA

SEQ ID NO: 171332 - protein, 65 aa, Glycine max
  unsure (1)..(65): unsure at all Xaa locations
  Clone ID: PAT_MRT3847_125729C.1.pep
PDQQRLIXXAGKQXDDGRXXXDXNIQXESTLXLVLRXRGGIQXXVKXLTGKTIXLXVXSSXTIDX

SEQ ID NO: 171333 - protein, 70 aa, Glycine max
  Clone ID: PAT_MRT3847_12572C.1.pep
ALKSSCSSGAYESHITSHMRGSTSVCAEHCIKDAYHDPRWQTNKSNTPPTYVPFWHPHGRSAPPPNFPPL

SEQ ID NO: 171334 - protein, 479 aa, Glycine max
  Clone ID: PAT_MRT3847_125730C.1.pep
VVQDASRTEKDDRRGAFSSRHSPQFTPILEEREFDDLSGHDIISHSRSSHPPTPIVHKHTKSNHNNHKKKRSDSEEDGSVSCNKCRPHSRDKIFILPLDHSSTNNSHKPSSLLASPNGIFRSLVSKLTRKSPMSSSSSQDPLPPSREEQWKMAVAELSHKLLHATRKRDEALLEASRLMHSMSELEKKLNKLELYCHTLKSGLEQCTNNNITTSPTSLFKSQTLEQDTVIQHFLVSVSEARSSVRLLSRSLTMQLRHMGSKVYEKVSFLLQPYDIKISFSKSPTRSLLFYLEALLNRTFYEDFETIGFQKNACNMILNPKERCEASYESFNMVHGLTWEEVLSKGTRHFSEEFSRFCDRKMSEIVAMLGWNRAWPEALLQAFFGASKSVWKVHLLANSLHPSLPIFRVEKGVRFDSVYMEDMGGGGGDKATSNLVPALVRIMLAPGFYVYGSAVKCKVLCRYLSTSSNKEDKPLTPTPS

SEQ ID NO: 171335 - protein, 155 aa, Glycine max
  unsure (1)..(155): unsure at all Xaa locations
  Clone ID: PAT_MRT3847_125731C.1.pep
KLISKDLVIGLPKLKFEKDRLCDACQKGKQVRVSFKSKNIVSTTXPLQLLHMDLFGPSRTMSFGGNYYALVIVDDYSRYTWTLFLTHKSDAFHAFKKLAKVIHNKKNLKIASIRSDHGGEFENKDFESFCDEHGIEHNFSAPRTPQQNGVVERKN

SEQ ID NO: 171336 - protein, 35 aa, Glycine max
  Clone ID: PAT_MRT3847_125732C.1.pep
ARAAILFSSISGLTICADLPPSTEQLRTPDISVTN

SEQ ID NO: 171337 - protein, 82 aa, Glycine max
  unsure (1)..(82): unsure at all Xaa locations
  Clone ID: PAT_MRT3847_125733C.1.pep
GGAGXGAIFTGFSFSSLSCGGVGDCTPKQIVSSLXKGSCLFSDDTSIYXGQEYTSSNIKFALCIEPENKELPYYSAHVANPK

SEQ ID NO: 171338 - protein, 44 aa, Glycine max
  Clone ID: PAT_MRT3847_125734C.1.pep
KLTKVSTGLFALFKSITKIRIKPNVSLIPEIRLTASIYLNEPKS

SEQ ID NO: 171339 - protein, 57 aa, Glycine max
  Clone ID: PAT_MRT3847_125735C.1.pep
CYRSYASNAVACYNDGDEINIHFISLRNLLSDDNSRNNCPILIAINAHLMLTYVDSV

SEQ ID NO: 171340 - protein, 57 aa, Glycine max
  Clone ID: PAT_MRT3847_125736C.1.pep
AGLNTRACEQNNYYKKSTKFKFINRQLTNLKAVIPMALTHLNRLFRHRTFILWPHNI

SEQ ID NO: 171341 - protein, 147 aa, Glycine max
  Clone ID: PAT_MRT3847_125737C.1.pep
MHYNMGKQVGFEDVLRYFDEDGDGKVSPSELKHGLGMMGGELLMKEAEMAIAALDSDGDGLLSLEDFIALMEAGGAEQEQQKLNDLKVAFEMYVTEGCGFITPKSLKRMLKKMGESKSIDECKAMIKQFDLNGDGVLSIEEFRIMMQ

SEQ ID NO: 171342 - protein, 136 aa, Glycine max
  Clone ID: PAT_MRT3847_125738C.1.pep
VGFEDVLRYFYQDGDGKVLPSELKHGLRMMGGELPMKEAEMAITALDFDGDGLLSLEDFIALMEAGGEEQKLNDLKVAFEMYDTERCGFITPKSLKKMLKKMGESKSIDECKSMIKQFDLNGDGVLSFEEFRIMMQ

SEQ ID NO: 171343 - protein, 103 aa, Glycine max
  Clone ID: PAT_MRT3847_125739C.1.pep
PSKVSLKGDETEAENITETKSCLEKNVPESPNEPEQGEKTSSDMGNAEHVLHITNSVEGKFIYSLKKCDDHKNGELHYTGQQTMTIPEHEASDALYDEEASIP

SEQ ID NO: 171344 - protein, 51 aa, Glycine max
  Clone ID: PAT_MRT3847_12573C.1.pep
AIWLVTGHLKGTSLIYPHLGGGMAPKAFEIQGWRLTPFFPKLKSKILDQTF

SEQ ID NO: 171345 - protein, 60 aa, Glycine max
  Clone ID: PAT_MRT3847_125740C.1.pep
KRAKGRADSLEKQWSCLRALFPVAREVAKSAPRGFVDAQGLPLMGAKWENLEPFCGRALL

SEQ ID NO: 171346 - protein, 129 aa, Glycine max
  unsure (1)..(129): unsure at all Xaa locations
  Clone ID: PAT_MRT3847_125741C.1.pep
WLFCPLSGWGWPWSGDPAGFFRCQAFFMFYGWAVGPLFGGPVVVCFLPVCFPGPRSFSFCRVGLGVFCACPGGWFSPPLXVXSFGLSGPWAFFLGFGGVGVFGVFGPFRPPFFFCRXXKKVITGWLLKG

SEQ ID NO: 171347 - protein, 41 aa, Glycine max
  Clone ID: PAT_MRT3847_125742C.1.pep
SMLLQASVQPWMQADLHDNLSSSALCKSVLSAIHSCLRNRH

SEQ ID NO: 171348 - protein, 52 aa, Glycine max
  Clone ID: PAT_MRT3847_125743C.1.pep
LKTHFFLTKSNKKVPNLFFSCSPTKTHSLLICYPLRYEIRTNLLFITFLIIR

SEQ ID NO: 171349 - protein, 33 aa, Glycine max
  Clone ID: PAT_MRT3847_125744C.1.pep
MERAKLIKEVGDGTFGRVWRAINKQTGEVVAFP

SEQ ID NO: 171350 - protein, 43 aa, Glycine max
  Clone ID: PAT_MRT3847_125745C.1.pep
MQHKVSVKEIISQFHLKKKKKKKKKKKKKKKKKKKKKKKKEKK

SEQ ID NO: 171351 - protein, 38 aa, Glycine max
  Clone ID: PAT_MRT3847_125746C.1.pep
ISPRLISGNGPVEDGRTMLARRARCKVYTIVDEKFYSA

SEQ ID NO: 171352 - protein, 74 aa, Glycine max
  Clone ID: PAT_MRT3847_125747C.1.pep
ISIILLQSWPFSSLLTQSLTAPLQSSEVVLLLMRIARTAASRGRASLSLLAPHSPPGYPTRADTEHGCVTCSGP

SEQ ID NO: 171353 - protein, 119 aa, Glycine max
  Clone ID: PAT_MRT3847_125748C.1.pep
IRVTTTFFLWQTHITRSKPKVFLMRPPRKTFYEGTAQLERVWGLPLTNLASPWDATCWKTTLYPSCSSPKYLTTAAEHTTNPPCFYFENNLEQTFPFSKGLWNKIGWWANIEPCTKGLN

SEQ ID NO: 171354 - protein, 46 aa, Glycine max
  Clone ID: PAT_MRT3847_125749C.1.pep
EVPVRIPDICLLTLFSTALFIKRQLLFSCATKKTHCWTTSWIVYYP

SEQ ID NO: 171355 - protein, 52 aa, Glycine max
  Clone ID: PAT_MRT3847_12574C.1.pep
VMPAGLRTLAKPYELEHAIDPRMHDTQPHTDIGLGNAHLQDPKLDQSDPNTH

SEQ ID NO: 171356 - protein, 45 aa, Glycine max
  unsure (1)..(45): unsure at all Xaa locations
  Clone ID: PAT_MRT3847_125750C.1.pep
SGRXFFFFFFFFXASGYMEKIEKSLYDISNRVDERGLSSTSHKRL

SEQ ID NO: 171357 - protein, 44 aa, Glycine max
  Clone ID: PAT_MRT3847_125751C.1.pep
PRIRLLSFSLCIESVLYIYINSWYPQQDRVLYILIPAMQGSICL

SEQ ID NO: 171358 - protein, 103 aa, Glycine max
  Clone ID: PAT_MRT3847_125752C.1.pep
MKKGVHRLRRPLPDKVIVTPGEIKEKYFKNAGNAKRSWRRPFIRHFSGCHPCSGKNNPMYSPHDCWNAMPNAFNFPNNQLMGKFGSSLLDKPVPPLPFNYPRH

SEQ ID NO: 171359 - protein, 77 aa, Glycine max
  Clone ID: PAT_MRT3847_125753C.1.pep
GVLLTANVIISNAAQPEILECYCLQITLFSMLMLTLSSDGAVITTQGSLKSPQKRTLVSSLARSTVSPILIVTYICT

SEQ ID NO: 171360 - protein, 209 aa, Glycine max
  Clone ID: PAT_MRT3847_125754C.1.pep
WDIEGCLSKLNSSIKPSFCVTLLGGLSLKMLNGVLRFGFLILNQPVLVDTFYSYPGLSKPHTTVRYATKKLLELKEQKPSNLSDAIVEQTQILKTRSRCLKEVLEKSGWDVLESCAGVSVVAKPSAYLNKTIKLKISPEGERSHGNATKEIKLDDSNIRTVILKATGLCINSGSWTGIPGYCRFSIALEENDFKKALDCIIKFKEVALG

SEQ ID NO: 171361 - protein, 233 aa, Glycine max
  unsure (1)..(233): unsure at all Xaa locations
  Clone ID: PAT_MRT3847_125755C.1.pep
PARVIIDTASSGLEFDCXAGWGGGWDIEGCLSKLNSSIKPSFCVSLLGGLSLKMLNGVLRFGFLILNQPILVDTFYSYPGLSKPHTTARYATKKLLERREQKPSSLSDAIVEHTQILKTRSKCLKEVLQKSGWDVLESCAGVSVVAKPSAYLNKTIKLKISLEGEASHGSATKEIKLDDSNIRTVILKATGLCINSGSWTGIPGYCRFNIALEENDFKKALDCILKFKEVALG

SEQ ID NO: 171362 - protein, 145 aa, Glycine max
  Clone ID: PAT_MRT3847_125756C.1.pep
LTTHNLFFYHFKLHSLSVASHIIFCYSGEPLTVQVPGTQTRSFCYVSDMVDGLIRLMEGENTGPINIGNPGEFTMIELAENVKELINPKVQINMVENTPDDPRQRKPDITKAKELLRWEPKVKLYDGLPLMEEDFRQSLGVPKSN

SEQ ID NO: 171363 - protein, 344 aa, Glycine max
  unsure (1)..(344): unsure at all Xaa locations
  Clone ID: PAT_MRT3847_125757C.1.pep
MATNSSNGATKQPPMPSPLRFSKFFQSNMRILVTGGAGFIGSHLVDKLMENEKNEVIVADNYFTGSKDNLKRWIGHPRFELIRHDVTEQLLIEVDQIYHLACPASPIFYKYNPVKTIKTNVIGTLNMLGLAKRVGARILLTSTSEVYGDPLVHPQPESYWGNVNPIGVRSCYDEGKRVAKTLMFDYHRQHGIEIRIARIFNTYGPRMNIDDGXRVVSNFIAQAIRGEPLTVPVPGTQTRXSFCYVSDGSSGLIRLMEGENTGPINIGNPGEFTMIELAENVKELINPKVEINMVENTPDDPRQRKPDITKAKELLGWEPKVKLRDGLPLMEEDFRQRLGVPKSN

SEQ ID NO: 171364 - protein, 175 aa, Glycine max
  Clone ID: PAT_MRT3847_125758C.1.pep
TSCDILRFSKKVKAVAMRILEHIFKHYNVNCQEVSTVQAFEISVCWLAACSWEHEIDMKDSLALAKLYLNFDGKEEEATDVYSELWKHVKDFSNCVQNGLCVEKCNRSGASDSNMPELNDLAEEEKQKDFLGTCVSKLVKSVTNELNLQMKSPTTVVSQDLSCTHEICLSPNTTW

SEQ ID NO: 171365 - protein, 225 aa, Glycine max
  unsure (1)..(225): unsure at all Xaa locations
  Clone ID: PAT_MRT3847_125759C.1.pep
MKTKVLDFLVATVLVDXECPAHDMFPLRMNTASGARTPQEKCARRRLAXVEAHSIFGFETIPEECVQAAKEYIXHGEQYLYHSLTDNQRAYFYARDLEGHPRDTFETSIDGTVLSNIPYYTKHGYGVEKHNSSLYDEWIYKANAPALPETLMNYNTLESRDLNIIXLSGRTLDQQAVPEAHLKNAGYHTWDTINCSRIHKDPSTPDAGAYKTGSIERLIRQGYNI

SEQ ID NO: 171366 - protein, 312 aa, Glycine max
  Clone ID: PAT_MRT3847_12575C.1.pep
ESSKNGSEIVLARRPVIAHGFTSEYNPAKLLLNGVGWSIPQSQGRSAKNLIPQRQPFKVHQSPVAVHEGMSYQMNHEPWFWFPSPATIWDGPEFLGRVGVQKDELPWKIRASVIYSIRAHHGAVRSLAVNQDECTVFTAGIGQGYKGTVQKWELSRTNCLSGYHGHEEVVNDIYILSSSGRVASCDGTIHIWNSQTGKQILVFAESQTESGHPTSHPSSSSKINSDQANVLNLNTLSSGILSSAFDSSLYTCMHLLNSAETLVVGTGNGSLRFFDVARGQKLHIWRGESTDLVSFTISAFVTALQSSSEFTC

SEQ ID NO: 171367 - protein, 55 aa, Glycine max
  Clone ID: PAT_MRT3847_125760C.1.pep
GLFFWDLKMFLGLVKKKQVSRDQSGPSFKKRLDRFSEDLRVSDGNPMGREIFLGG

SEQ ID NO: 171368 - protein, 241 aa, Glycine max
  Clone ID: PAT_MRT3847_125761C.1.pep
MARATLLHLLRSQSLRHVSKNAPSAYRCFGSSTCQRPISPNPSFKTSSHLAIFQRRWASQIPTTEEDDKISIGPRSGGQPGEGDKETGVVYYGPISNTIKKVKLLSLSTCCLSVSLGPVITFMTSPDMNVILKGAVASSVIFLSATTTAALHWFVSPYVHKLRWQPGSDSFEVEMLSWLATYIPKTIKFSDIRPPQTNRPFVTFKANGNFYFVDAEHCHNKALLARLTPKEVSNESPFKNL

SEQ ID NO: 171369 - protein, 56 aa, Glycine max
  Clone ID: PAT_MRT3847_125762C.1.pep
PTRPPTRPPTRPPLSYLLGTWRGQGEGGFPTINSFSYGEELHFSHSPSKVFLSLSP

SEQ ID NO: 171370 - protein, 66 aa, Glycine max
  unsure (1)..(66): unsure at all Xaa locations
  Clone ID: PAT_MRT3847_125763C.1.pep
PAXMRSSTWWQQLFTETSLEENEAAVKKFEQAASXMSXYNPAXXIXPPKPSDETLQNCQAPQTGFP

SEQ ID NO: 171371 - protein, 184 aa, Glycine max
  Clone ID: PAT_MRT3847_125764C.1.pep
GGGAAKTRTTKQKRRPPNEKTGREKRGTPQKRQGKKRNEGGGSPPARKAGNRGEAPAPPAVKRATEGGGPLPKKDAQKGATPKRAPLPNHTPPGEKRVTRPAIKVGKARGNPGTTRKKNGQGNEIRPPKKKSQERGTPAKESPCSYRTGLPFFFFFFFFFFFFFFFFFFFFFFFFFFFFFGRVG

SEQ ID NO: 171372 - protein, 78 aa, Glycine max
  unsure (1)..(78): unsure at all Xaa locations
  Clone ID: PAT_MRT3847_125765C.1.pep
IVGNVVHCGPHRAGGFMGDACSYPTFGGYAAFPXASWLRVYKFGPFTESVVNFFGDRSLVSTLLPSSQAEKEQGVATA

SEQ ID NO: 171373 - protein, 50 aa, Glycine max
  Clone ID: PAT_MRT3847_125766C.1.pep
FLKSFLFTHHNILLERPSNMMWGGPKFTFYQNIFTEKEYHNHTPKRLIPS

SEQ ID NO: 171374 - protein, 112 aa, Glycine max
  Clone ID: PAT_MRT3847_125767C.1.pep
NLTKLSVFKSRCLPQFHSSMVMLEFSRGSHPQFHLEPREKPQKANVSLASHINVRAVGKENELSGKSKRLPCLFSIVLLYTVSLSSLKRCPFSLSHFASSPSPHRSSPSSST

SEQ ID NO: 171375 - protein, 303 aa, Glycine max
  Clone ID: PAT_MRT3847_125768C.1.pep
MENMQSFWQLGDELRGHSKASEDHKWLMVASKLAEQTRLKGERVNNLDLSKGPIETRSRDKFGFQEENKFDSLNLSMLNLDSKFTENVSKSSLRNGVYGMNAVYQKNNANLVSNVISNKYNGSIQHNKEINNNTGNNINTNESNNTNATDKRFKTLPAAETLPRNEVLGGYIFVCNNDTMQEDLKRQLFGLPPRYRDSVRAITPGLPLFLYNYTTHQLHGIFEAASFGGSNIDPTAWEDKKCKGESRFPAQVRIRVRKLCKALEEDSFRPVLHHYDGPKFRLELSVPETLDLLDLCEQAGSAA

SEQ ID NO: 171376 - protein, 298 aa, Glycine max
  Clone ID: PAT_MRT3847_125769C.1.pep
MENMQSFWQLGDELRGHSKASEDHKWLMVASKLAEQTRLKGERVNNLDLSKGPIETRSRDKFGFQEENKFDSLNLSMLNLDSKFTENVSKSSLRNGVYGMNAVYQKNNANLVSNVISNKYNGNILHNKEINNNTNNESNNTNATDKRFKTLPAAETLPRNEVLGGYIFVCNNDTMQEDLKRQLFGLPPRYRDSVRAITPGLPLFLYNYTTHQLHGIFEAASFGGSNIDPTAWEDKKCKGESRFPAQVRIRVRKLCKALEEDSFRPVLHHYDGPKFRLELSVPETLDLLDLCEQAGSAA

SEQ ID NO: 171377 - protein, 61 aa, Glycine max
  Clone ID: PAT_MRT3847_12576C.1.pep
SMLLFGRKAPTLTGFKCSTYYIPNRLVQFALKLIQVLQSRDISPLNTDANTLILSHCMRSE

SEQ ID NO: 171378 - protein, 50 aa, Glycine max
  unsure (1)..(50): unsure at all Xaa locations
  Clone ID: PAT_MRT3847_125770C.1.pep
VFRVYXEQRHXPPGSXHGXAKXKYXDSXXPRXXPXRXSHLXRXDXRFXCL

SEQ ID NO: 171379 - protein, 278 aa, Glycine max
  Clone ID: PAT_MRT3847_125771C.1.pep
MANAAEVSALKRIKLHLLGELSPLATPQNKFDQTNPSPSESSNSESSSISLNHYFTDLLEPEIEFPLFEFDSKPQVIDLETPKTLISAEKKPQFNRKPSLLIAVPKKTEWIQFGNPEVAAPENQPEKKHYRGVRQRPWGKFAAEIRDPNKRGSRVWLGTFDTAIEAAKAYDRAAFRLRGSKAILNFPLEVNTAAETVSVAAVDVERKRRREEEEVVVEDVKAVVKKEKITEHDVSCFRGMPLTPSMWTGFWDSDVKDIFNIPPLSPLSPFGFSPLVAV

SEQ ID NO: 171380 - protein, 91 aa, Glycine max
  Clone ID: PAT_MRT3847_125772C.1.pep
AWKNQFWENTPLFSVEIKKNTRAFCQFWGFAHDNKFPKRSLVFFFSEVLSTPKILMNQTVFTIFFFPANMNLGRPPAKITVQFALTHLLGG

SEQ ID NO: 171381 - protein, 83 aa, Glycine max
  Clone ID: PAT_MRT3847_125773C.1.pep
QHQKSSLWVETSDFPYQHSIVLSILCSMAQIGARALCVKAQRVILLALEHRALGRRYIQRHSWYHDAIRYASGITGCLHKLAG

SEQ ID NO: 171382 - protein, 65 aa, Glycine max
  Clone ID: PAT_MRT3847_125774C.1.pep
TIIPILCNPYPFRSYQSLTFIRLFYCTPTIPRYLCLTILFPPPPPPPPPPQRRRTSYSDDGKPSW

SEQ ID NO: 171383 - protein, 47 aa, Glycine max
  Clone ID: PAT_MRT3847_125775C.1.pep
ASCFLYRIVCSKLDLLITYKGIMTAKEVISSLAIYTLDDCFSSMSQT

SEQ ID NO: 171384 - protein, 73 aa, Glycine max
  Clone ID: PAT_MRT3847_125776C.1.pep
ACQRKCLITSVLDSTIMRKPVLPFLEGLGSFANSFSNMSSVGIFASECVCTQSNGASSQGESASRFYTDMPSL

SEQ ID NO: 171385 - protein, 873 aa, Glycine max
  unsure (1)..(873): unsure at all Xaa locations
  Clone ID: PAT_MRT3847_125777C.1.pep
MDQFKGQPRLPKFVVPKRYDIRLKPDLVAHRFAGSVAVNLDIVAATSFIVLNAAELDVSNDAVSFTNQDSSKVIKPSRVELFENDEILVLEFPEELPIGFGVLSIRFEGILNDRMKGFYRSTYEHNGEKKTMAVTQFEPADARRCFPCWDEPACKASFKITLDVPSELVALSNMPIVEEITDGDLKTVSYQESPIMSTYLVAVVVGLFDYVEDHTSDGVKVRVYCQVGKANQGKFALDVAVKTLELYKGYFATPYSLPXLDMIAIPDFAAGAMENYGLVTYRETALLYDDQHSAAANKQRVATVVAHELAHQWFGNLVTMEWWTHLWLNEGFATWVSYLATDSCFPEWKIWSQFLHESTEGLKLDGLAESHPIEVEINHACEIDEIFDAISYRKGASVIRMLQSYLGAECFQRSLASYIKRHACSNAKTEDLWAALEEGSGEPVNKLMTSWTKQKGYPVVSVKVNDQKLEFNQSQFLSSGAQGEGHWIVPITLCFGSYDVHKSFLLQSKSETHDVKDFLGSTHKGLNCWIKLNVDQAGFYRVKYDELLAARLRYAVEKQLLSASDRFGILDDSFALCMARQESLTSLINLMGSYREEVDYTVLSNLITISLKVQRIAADAVPDLLEYFKQFFINLFQYSAERLGWEPKPGESHVDAMLRGEILTALAMFGHDLTLDEASKRFQAFLENRNTPLLPPDIRKAAYVAVMQRASKSNRSGYESLLKVYKEADLSQEKTRILGSLASSRDPDLILEALNFMLSSEVRSQDAVFGLAVTREGRDVAWAWLKENWEHLIKTYGSGFLITRFVGAVVSPFASFEKAKEVEEFFATHAMPSIARTLRQSLERVNINANWVQSVQNENRLGDAMKELAYRVY

SEQ ID NO: 171386 - protein, 137 aa, Glycine max
  Clone ID: PAT_MRT3847_125778C.1.pep
MAFAGDQIEVLREHYPTLLQNGGSGLIFSTEVQGALKLLGIDLPGYQIRELLSRHGDPKHLNCSEFEAIYMDLDTQRNAETARWKKRIGSVTGAYQVQGIAEHGAEEIVHTIRVEEEVPFANLINSMLLEDQHLRGL

SEQ ID NO: 171387 - protein, 321 aa, Glycine max
  Clone ID: PAT_MRT3847_125779C.1.pep
HASERERESEREKFLFLFFLLFLLSFSLIFVSLLISSQATMDSPRYHQEHHHYHHHHRVNLLPSPRHSLSSSNSSTSSTSSNNNGLHHSQLLPPLTPTTVSVPPSPTSPYPPKSVTRSESGNPYPTTFVQADTNSFKQVVQMLTGSTQTAKQASASASPKPNSEPSKPHSHIPPIRKQTGFKLLERRNNSLKNLNINPLIGTSGFIRGSDNNIKNVVVSSFSPSSRKPEVLSPSILDFPALVLSPVTPLIPDPFNRSRFLNENGTVLMDAIEAAAEEKAIKEKGFFLHPSPASTPRDEKPRLLPLFPTDASPGSASSNSSS

SEQ ID NO: 171388 - protein, 159 aa, Glycine max
  Clone ID: PAT_MRT3847_12577C.1.pep
MVVTRNIVLLLLSITFVAPIVLFTDRLGTFKYPFAEQEFIEAVTAFVSAADSGHLNLLPQESSTVFKEPIGLVYTEDTSNTENLLHGLHFAKPGEHVSARVLSATNDEGQTKGENPIKLVTDGINQGNQNSYMVKADTTGDSVEELLMLMTMMGNSLIF

SEQ ID NO: 171389 - protein, 92 aa, Glycine max
  unsure (1)..(92): unsure at all Xaa locations
  Clone ID: PAT_MRT3847_125780C.1.pep
QQEETXPDNALWRLAVEAFNRVLVHYVTKLTNGGPDXNISKPVRTRIWKEIADVYEIFLIGYCGRALPSNSISAVVLEADEXLEMAILNMLG

SEQ ID NO: 171390 - protein, 68 aa, Glycine max
  Clone ID: PAT_MRT3847_125781C.1.pep
YPLESKKMAQKKSYFEFRKRRFRSSIFATPNYMCYAFIKPRNKNGSIFNEMLCFILNWKIKYFIFILY

SEQ ID NO: 171391 - protein, 92 aa, Glycine max
  unsure (1)..(92): unsure at all Xaa locations
  Clone ID: PAT_MRT3847_125782C.1.pep
MKAETVTLLLVNLAGIMERADESLLPGVYKEVGTALHTEPTGLGYLTLFRSIVQSSWEPVAAXLAVRHNRAHVNAVGAFLWAAATFLVAFSS

SEQ ID NO: 171392 - protein, 171 aa, Glycine max
  Clone ID: PAT_MRT3847_125783C.1.pep
NSARARGGLLLDCGEGTLGQLKRRYGVTGADDAVRTLRCIWISHIHADHHTGLARILALRRDLLRGVPHEPLLVVGPRQLKRYLDAYQRLEDLDMLFLDCKHTTAASLEAFEDDFPGNSVNSRNLNNNNGDLIASKVDSTLFARGSRMQTYFKRPGSPVDKDVVSPILKKF

SEQ ID NO: 171393 - protein, 86 aa, Glycine max
  unsure (1)..(86): unsure at all Xaa locations
  Clone ID: PAT_MRT3847_125784C.1.pep
ISRQNSRTFATITKTKDFERMTTIVRNGPYVNTESVNGPIPHKKGMLLVQCKHTMPLNIQESKTICIYKNEDTNVTGRRGSTAGIX

SEQ ID NO: 171394 - protein, 64 aa, Glycine max
  Clone ID: PAT_MRT3847_125785C.1.pep
MEGNGRRRRRHFSRIHAFFCGKASFKGEHSLIGGPGFSRIVYCNKSERGEGSLVSYCDNYVSTT

SEQ ID NO: 171395 - protein, 333 aa, Glycine max
  Clone ID: PAT_MRT3847_125786C.1.pep
MMEVMICENFRYSPLSILSSSPSPRCHLSVPSSSLRIKPSSSSSSSSSVSCSLMENQETHNNQGRSKFVDFPFVSSAQKNLMVDLVSTLENRFHTQLLPCTLPSDVQYYQSQTATAQASLHIRAAHNDSPIDFVLGSWVHSELPTGGSLDITSLSAYLNSSTDAPNFVFEMIRSSPTMLLLILDLPPRKDLVLWPDDLKTFYEDTQLDKHRQTLERVPEVQPYFSSSLYIRTVSSPTAIMVRVLTENGGVERMEEIIRDHLDPISKQVLGIWLDHCACAKREVGEAERAYLKKRDGLIRNKTIEIDLGSSFPRLFGPEVANRVLEAIKEYFTV

SEQ ID NO: 171396 - protein, 68 aa, Glycine max
  Clone ID: PAT_MRT3847_125787C.1.pep
ELHSLFATCQLCYFFFSSLPLILLVQYVSSSHTREPISFGPFSIPNTLFLFPTINLTNGPTRDSSHFI

SEQ ID NO: 171397 - protein, 173 aa, Glycine max
  Clone ID: PAT_MRT3847_125788C.1.pep
PVNLQALQTCNIGKSVNHLRTHKNTEIQRKARGLVDTWKKRVEAEMNIKDAKSGSGPTVHWSAKSRSSVVGQGGNRHSGALSDVAMKSSVTQLSASKTASVKIVQGENTTRSASTSAFPGPAKSVPSPASATTNLKDGQPRIAAANGGSDLPMVNARDEKSSSSSQSHNNSQS

SEQ ID NO: 171398 - protein, 44 aa, Glycine max
  unsure (1)..(44): unsure at all Xaa locations
  Clone ID: PAT_MRT3847_125789C.1.pep
MSSTETHFASDCKAMIGQVARGGRTXKPLLNAGNAYYKFRVKIN

SEQ ID NO: 171399 - protein, 161 aa, Glycine max
  Clone ID: PAT_MRT3847_12578C.1.pep
IDLKANVNGAVETCGERFHRFDRYLNFSNPLIAKNFDPRACGWAYGMNVFDLVQWKRQNITDVYHKWQKMNHDRQLWKLGTLPPGLITFWKRTFQLHRSWHVLGLGYNPNINQKEIERAAVIHYNGNMKPWLEISIPKFRGYWTKYVDYNLVYLRECNINP

SEQ ID NO: 171400 - protein, 66 aa, Glycine max
  Clone ID: PAT_MRT3847_125790C.1.pep
KFLFLLEKSRNYFHLNNGRWKKIIKIFLNPRNFFKNALPNTMFLSHQKLWGVFHWIFHLSPGNLQG

SEQ ID NO: 171401 - protein, 66 aa, Glycine max
  Clone ID: PAT_MRT3847_125791C.1.pep
DRIFSLLHPKRRGTQHNQKQLEWEDNSSNAREQNECKPEPRIPKLTNRVRTSCNLPNGPHEHTAGK

SEQ ID NO: 171402 - protein, 58 aa, Glycine max
  Clone ID: PAT_MRT3847_125792C.1.pep
KKKKPACPVYIITPFPPKGGFILFFPLLELFSFRNFNPKGWGHYFLHKFMILFSCLGF

SEQ ID NO: 171403 - protein, 121 aa, Glycine max
  Clone ID: PAT_MRT3847_125793C.1.pep
MLGGSPPGGLKVVLTFRRGVGSLGFFPPPFVFLPPGIGVSRVSCFSPSPFLCCPPPLVGSPGPPQTSGAWWFPALPVFFPPPPPVFFFFLGLFCSPVILFSRPPHILVSVPPLFFLGLHSI

SEQ ID NO: 171404 - protein, 217 aa, Glycine max
  Clone ID: PAT_MRT3847_125794C.1.pep
MDLVSQTLQVKTIARSCLEDVFKLDLAENFTEEVSLTLIDVATSSGFGLDFKVSASLFSTSSQTGLIGFHQRGVMTHTNPIKPVCEDVENNEADTLKSSPNPDEVATSISVNETSSVKFSAKSSLKTSSRHDLAMVFTCKVCETRSIKTACRESYEKGVVVARCGGCNNLHLIADHLGWFGEPGSVEDFLAARGEEVKRGSVDTLNLTLEDLAGRKP

SEQ ID NO: 171405 - protein, 92 aa, Glycine max
  Clone ID: PAT_MRT3847_125795C.1.pep
NYESAVVNQVQRPQLLLNNLNVGEIEKLSSEQRELEEIVANLEESVKRFHDEERSLLNQSANLRKQWEDISITVQNEQKKRQAIISRIDQKK

SEQ ID NO: 171406 - protein, 59 aa, Glycine max
  Clone ID: PAT_MRT3847_125796C.1.pep
TTIASQCWRESGSCTTSWRRFRSYDCDLSINYASLVFITLLESGYIYVSWSLIVQRKRL

SEQ ID NO: 171407 - protein, 122 aa, Glycine max
  Clone ID: PAT_MRT3847_125797C.1.pep
HLLKKIEPWRPSTSLWDHHFRYFHHPRNKPLGIHSLLLTSNFTIPSKDGALILRSCSFKKRESETTIKGTSTTNTSSKLKDCTLEHMFLKRNLSCINDILIMGSDISVQLQHMPVPVLSLTK

SEQ ID NO: 171408 - protein, 57 aa, Glycine max
  Clone ID: PAT_MRT3847_125798C.1.pep
VISHQNNMFWDFKVSLKSRGEAIKVRLLKKKKKSFYLGPHLFNPIPVLKRGGVTSLL

SEQ ID NO: 171409 - protein, 48 aa, Glycine max
  Clone ID: PAT_MRT3847_125799C.1.pep
QVRSKQSQASRVVPCKAHQGVQGTEMVVALKSLPSIQREPTRMWFMEN

SEQ ID NO: 171410 - protein, 459 aa, Glycine max
  Clone ID: PAT_MRT3847_12579C.1.pep
MLTTIICIWVNSTTLGNTFSLQPVTNDAHLTRELLLRVFQVSRTLGDASKDSDLPRNANERMKAMEQTLMKGRQIQNDCAAAVKKLRAMLHSTEEQLHVHKKQTLFLTQLTAKTLPKGLHCLPLRLTTEYYSLNTSQQQLPNQQKLENPRLYHYAIFSDNILATAVVVNSTVAHAKDTSNHVFHIVTDRLNYAAMRMWFLVNPPKKATIQVQNIEDFTWLNSSYSPVLKQLGSPSMVDYYFKTHRAASDSNLKFRNPKYLSILNHLRFYLPEIFPKLNKVLFLDDDIVVQKDLTGLWSIDLKGNVNGAVETCGERFHRFDRYLNFSNPHIAKNFDPRACGWAYGMNVFDLVQWKRQNITEVYHNWQKLNHDRQLWKLGTLPPGLITFWKRTFQLNRSWHVLGLGYNPNINQKEIERAAVIHYNGNMKPWLEISFPKFRGYWTKYVDYDLVYLRECNINP

SEQ ID NO: 171411 - protein, 371 aa, Glycine max
  Clone ID: PAT_MRT3847_1257C.1.pep
MASSICALSPSVQSQLTKTTLVAPIPLYQRSKCEMSRRSFAFKGIVASGVSVAASTLTAEAEPSSKGFERLPYKPEGYNYWTWRGHKIHYVVQGEGSPIVLIHGFGASAFHWRYNIPELAKKHKVYALDLLGFGWSDKALIDYDAMVWRDQVVDFVKEIVKEPTVLVGNSLGGFTALVAATGLPDLVNGVALLNSAGQFGDGKRESETSEETALQKFLLKPLKEVFQRVVLGFLFWQAKQPARVLSVLKSVYINSSNVDDYLVESITRPAQDPNAGEVYYRLMTRFMMNQSKYTLDAVLSELSCPLLLLWGDLDPWVGPAKANRIKEFYPKTTLVNLQAGHCPHDETPELVNKALLDWLTTLTPEVTLQTV

SEQ ID NO: 171412 - protein, 55 aa, Glycine max
  Clone ID: PAT_MRT3847_125800C.1.pep
NPTLLLALASKDRIVSCFRIDTRPQTLIGESLFWVKSVIWFFCLVTYYAAAARAV

SEQ ID NO: 171413 - protein, 50 aa, Glycine max
  Clone ID: PAT_MRT3847_125801C.1.pep
LMLDSSSHKGNNFLRSSSSSRKVRNMARRYFDYEALILVLYCVSSLVFIG

SEQ ID NO: 171414 - protein, 42 aa, Glycine max
  Clone ID: PAT_MRT3847_125802C.1.pep
EPTNERWPFGEHPWQCHQYQLCLRLYIIRVVSPCRLVPLEDQ

SEQ ID NO: 171415 - protein, 228 aa, Glycine max
  Clone ID: PAT_MRT3847_125803C.1.pep
MAMAFPSVTSVTVENVTFPPTVKPPCSPNTFFLAGAGVRGLQIHHAFVKFTAICIYLQYDALSFLSVKWKTKSAHQLTESDQFFSDIVTGPFEKFMQVTMIKPLTGQQYSEKVAENCVAIWRSLGIYTDSEAEAIDKFLSVFKDLTFPPGSSILFTVSPNGSLTISFSGDETIPEVTSAVIENKLLSEAVLESMIGKNGVSPAAKQSLASRLSHLFKEPGVCDPQSHK

SEQ ID NO: 171416 - protein, 184 aa, Glycine max
  Clone ID: PAT_MRT3847_125804C.1.pep
MAKYYDIDDIIVEEETVSVIFQKAASGVGIDPSSSIFIETGSKVELPFWLAHELQLRQAVSVNVPPCFNQKTRQELHADSAGVDLRSRCPFFYEFGCKIAPIVGDRTIGFLLLSAFKSRYKEILTKAHSVAFAAGSKFWTILPKEEIYLYETAQSAMASFKKWRMGGPRFQIASVLGRKRKSKE

SEQ ID NO: 171417 - protein, 91 aa, Glycine max
  Clone ID: PAT_MRT3847_125805C.1.pep
KTIEGVSELIHPDKVAQSLINGMSDGQFSITNDPMIFILRVLANGVAPRYNTIMEASLLMLFFPIQVGFGFFMDFVVWRTKCARDNKPKDQ

SEQ ID NO: 171418 - protein, 106 aa, Glycine max
  Clone ID: PAT_MRT3847_125806C.1.pep
EFPPRPTRTFMQLLTLHYTFSKHELSTLQAYYNNENIHLYILATTVTVSSDLIISKFSLLNLFLIYILRIKYIFIRSSTQLHVDGNIFCSYYTICQRLILFPKLYF

SEQ ID NO: 171419 - protein, 145 aa, Glycine max
  Clone ID: PAT_MRT3847_125807C.1.pep
DPETFAAEHLKFCKEHHLKGRILVSTEGINGTLSGTKEDTDKYIEHMHADNRFADLTFKIDEAESHAFKKMHVRPRREIVALDLEEDINPREITGKYYSPKEFKAALEDENTVILDARNDYEYDLGHFRGAIRPDITRFRDLPEW

SEQ ID NO: 171420 - protein, 162 aa, Glycine max
  unsure (1)..(162): unsure at all Xaa locations
  Clone ID: PAT_MRT3847_125808C.1.pep
MGGDTAFLEHPISEDTLQLLFEASNSSNMEKSLEILIQNAKSDSGRLELASKRILPAVLNIVHSLTHASHHHHHQHNHILCLSFKLLRNLCAGEAANQDSFLELDGVAVVCSVLRSEAACSGPDHGLVRWGLQVLAXGSLAGKQHQCAIWEELYLDGVVSLA

SEQ ID NO: 171421 - protein, 33 aa, Glycine max
  Clone ID: PAT_MRT3847_125809C.1.pep
GLTTQSPLTVVMGSDRDKCFEVKKVNHLHLGSC

SEQ ID NO: 171422 - protein, 241 aa, Glycine max
  Clone ID: PAT_MRT3847_12580C.1.pep
MSLKTLTTSPLSGITLLVLLLALLLRFYIKFDTAERLFSAEELSLFNGTDEGLPILLGILGSVFDVTKGKSHYGSGGGYNHFAGRDASRAFVSGNFSGDGLTDSLRGLSSTEVKSIVEWRDFYHKSYKYVGKLVGRYYDSQGNPTKYLKGVEAKAARGAQLLEKQKIEEAKLPSCNSRWSQDEGGEVWCDVGYPRLVQRPLEIALTGKMSKRCACFEDSQLDQPGLEVYEGCDYHATRCKV

SEQ ID NO: 171423 - protein, 116 aa, Glycine max
  unsure (1)..(116): unsure at all Xaa locations
  Clone ID: PAT_MRT3847_125810C.1.pep
VYHPTALKRRRPARERPDRTLLSTAQTTIEIDSLCEGKDLYSMVTCARIEELNKSHVRRXTLPVEKRTRXANKATLCVVEVVRVVGSTRMRKCXYCCKTFYNGKELCGNTNLYVAV

SEQ ID NO: 171424 - protein, 106 aa, Glycine max
  unsure (1)..(106): unsure at all Xaa locations
  Clone ID: PAT_MRT3847_125811C.1.pep
EEYANTKLTPAAGRIGYQRLGENITKGVPDMHGAVDSYRXVTTDMSGDLGXRMDGGHQWPQNPPXFNVVMEESVTIMRDLARQTMRGIVPALRGPPNELGRLISRD

SEQ ID NO: 171425 - protein, 87 aa, Glycine max
  Clone ID: PAT_MRT3847_125812C.1.pep
TSWSIVFKLSFYRTLPLTSSLQAAFFHFLQFPSRFSFLTYAAHHFYLAHLSFWSITCAMSKSMWGPGDENENHGPALGGIWAWITEY

SEQ ID NO: 171426 - protein, 62 aa, Glycine max
  Clone ID: PAT_MRT3847_125813C.1.pep
PHPILVDQLWQEQIQSVFHLQPEHPVPSSWLVLAVSSTKNTYCTSRMEDLETNLSTKTHLRF

SEQ ID NO: 171427 - protein, 150 aa, Glycine max
  Clone ID: PAT_MRT3847_125814C.1.pep
NLLLEVWALYEELTRKVVTLVAENENLKREKELALKEYESLETTNKNLKTQIAKSINTEVEKTPVEPVSSVAEITPSSGNGPWFLYNLFPVPQIFWPSILQSSNPIHLQNTSFNSIAIPPNANVSCSSESESHHKQNNLINDNRTRVITF

SEQ ID NO: 171428 - protein, 77 aa, Glycine max
  Clone ID: PAT_MRT3847_125815C.1.pep
KLVCMGTSRIFPNCASFEGRAGSSATPIFGCGYCVIPIQKFRPGKTLKKPFFWVTKIKINSPLFKNSRLGKPRCFPI

SEQ ID NO: 171429 - protein, 69 aa, Glycine max
  Clone ID: PAT_MRT3847_125816C.1.pep
KHSQIRGMSIRDVMGRLEISIIPKQVTQVGVFPDARLRRSSVCSRGFSPSIRESLPLDRTQHFCAPKNL

SEQ ID NO: 171430 - protein, 289 aa, Glycine max
  unsure (1)..(289): unsure at all Xaa locations
  Clone ID: PAT_MRT3847_125817C.1.pep
MDEGLTDAAATGTSAAPKFDSHHFRSAEHQQHFEAIKGLSFHRERRVQLRDGEYIDFQEEIARRRWTSLVTPMAMFDPDIVLEFYANAWPTEEGVRDLRSWVKGQWIPFDADALSQFLGYPLVLKEGQECEYGQRRNRADGFDEEAIAQLLCIPGQDFARTAAGRRVRIMRTNMTTLTQTWMTLLLSNICPAAIIPTSFCRSVSWCMPPTRHPLKPDKSNRALGFPALITGLCQSFGVPVTPSKVIRLPITRAFIEKYCTHRQAQGGDPXAPDAPXAPHQADPTGSFDT

SEQ ID NO: 171431 - protein, 74 aa, Glycine max
  Clone ID: PAT_MRT3847_125818C.1.pep
GSWNIPGSLTGVPGLGLYSYFCTAENKLKQLASDLPLASQGTDKDSLPLLAGKNVGHQNEETHETKKLNKDPVI

SEQ ID NO: 171432 - protein, 52 aa, Glycine max
  Clone ID: PAT_MRT3847_125819C.1.pep
SYIGLPRIIPITHFPGRLSPDCSHANTHYLSTNYAYTLAHRSSIRDPIGITI

SEQ ID NO: 171433 - protein, 320 aa, Glycine max
  Clone ID: PAT_MRT3847_12581C.1.pep
MDSSSINSNSKEITMEIPSLVRLYKDGTIERLQNSPIVPPTLQDPTSSKDVVISGDPLISARLFLPNRIRSQQEGHKVPILVYFHGGGFFFESAFNQLHHNYFNKFVSVADVLVVSVEYRLAPETLLPAAYDDCWDALKWVATNTEPWLVKHGDFNRVFIGGDSAGANIVHNIAMRAGAEALPGGVKLLGAFLSHSYFYGSKPIGSEPVAGHQQSVPYLVWDFVYPSAPGGIDNPMINPMVTGAPSLAGLGCSKILVCVAEKDLIKDRGVAYYEAVKKSGWQGEAELFEVEGEDHAFHIHNPQTQNAMKMIKRLSDFLLH

SEQ ID NO: 171434 - protein, 44 aa, Glycine max
  Clone ID: PAT_MRT3847_125820C.1.pep
NTNLQLNLSLYLTLLNQPFYLTLLSSLFFSLLKCKYCYKKVVWK

SEQ ID NO: 171435 - protein, 74 aa, Glycine max
  Clone ID: PAT_MRT3847_125821C.1.pep
EREGKPLLLPIREVQYRLAFSMDLSEIKSYIYIYIYIERERERERECAVQNFLRSCFVCLNKNKNKIKICTTCF

SEQ ID NO: 171436 - protein, 521 aa, Glycine max
  Clone ID: PAT_MRT3847_125822C.1.pep
SDGQRLLKFPVPQVIAVDKSAWQTDEEFGRELLAGINPVVIRGLQEFPPASKLDPKIYGNQTSTITKEHIESNLEGFTVDEAIKERRLFILDLHDALIPYVKRINSTSTKMYASRTILFLQDSGTLKPLAIELSLPHPEGDQYGAISKVYTPVEQGIENSFWQLAKAYVVVADSGYHQLISHWLHTHAVIEPIILATNRHLSVLHPIHKLLHPHFRDTMNINALGRQILINAGGALELTVCPSKYSMEFSSVLYKDWVFPEQALPEDLVKRGVAVKDSTSPYGLRLLIEDYPFAVDGLEIWFAIKTWVKDYCSFYYKEDDTIKKDTELQSWWKEIREVGHGDKKDEPWWPKMQTCEELIQTCTIIIWIASALHAAINFGQYPYGGFPPSRPAISRRFMPEKGTPEYDELVANPDKAYLKTVTSQFLAVLGISLVEILSKHSSDEVYLGQRDTPDWTSDAEPLQAFEKFGKKLADIEERILRMNSDEKFRNRYGPVKMPYTLLYPSSKGGLTGMGVPNSISI

SEQ ID NO: 171437 - protein, 51 aa, Glycine max
  Clone ID: PAT_MRT3847_125823C.1.pep
HLGFFVIKKHPFISHPFAFSTFPFPKFLFYYSHLSFLSHSFSLLNYFSLFV

SEQ ID NO: 171438 - protein, 79 aa, Glycine max
  Clone ID: PAT_MRT3847_125824C.1.pep
RQRLRSQMISAQVDAPRQVKPPLGETTVELKLHKVQREQREKWSSLERVLQERNRHIVRARDFETAYGYGINLCAQNGD

SEQ ID NO: 171439 - protein, 149 aa, Glycine max
  unsure (1)..(149): unsure at all Xaa locations
  Clone ID: PAT_MRT3847_125825C.1.pep
MGICRNMGTQPRVQRRLGGNRATLFVYAMEGLENMAFVANAVSLVTYFFGYMNFSLTKSATTLTNFMGTAFLLALVGGLISDTYLSRFKTCVLFACMELLGYGILTVQARFHQLRPIPCKDLATTQMSQCEAATGXHAAILYTGLYLVA

SEQ ID NO: 171440 - protein, 176 aa, Glycine max
  Clone ID: PAT_MRT3847_125826C.1.pep
DSQDLHVTVVLPTGVHSFPSNGGPSSLIERWRTGGSCDCGGWDMASKLKILANESQACRKSRISKACFPHPFELFLQVNDQDLENQPAFSFSPFKPGVYSVAFDSSFSLLQAFSICIALVDGLISYELSGSRNYIEGKNSRETLLVQTDELKAFGKLEDIPASYVAYPPLSPVGRV

SEQ ID NO: 171441 - protein, 88 aa, Glycine max
  Clone ID: PAT_MRT3847_125827C.1.pep
LVPHLSICFSFLLWLLVAFINVPWLAGHVYVYLASFVTVYSGSDLTVLAFAPVAVFCNECLPFIENPELLTLHLGWPFHSVKHVLLEL

SEQ ID NO: 171442 - protein, 120 aa, Glycine max
  unsure (1)..(120): unsure at all Xaa locations
  Clone ID: PAT_MRT3847_125828C.1.pep
WVGGPPTLGIGVLGAARGDGPLLVXGWVPILLFGVCGRGVWFGAFRFWVCVRVRLPDVVRVALPPAVAVAMVRRCCDASGVCSAVCRSRLTPVRSVCVGVLVAPVALVASLSFLGCFVSL

SEQ ID NO: 171443 - protein, 48 aa, Glycine max
  Clone ID: PAT_MRT3847_125829C.1.pep
QCALWSIGAWLLLSCVSRVCVWFFPGCSWVSFLALLVTNLSFLGFLAL

SEQ ID NO: 171444 - protein, 68 aa, Glycine max
  unsure (1)..(68): unsure at all Xaa locations
  Clone ID: PAT_MRT3847_12582C.1.pep
PAVHPPLXYNHXHHFXXYTPLKXALLITGSXSFQSSFXXEKXRXFKXHIRSKCXSKNLTXPMNAIEXH

SEQ ID NO: 171445 - protein, 128 aa, Glycine max
  Clone ID: PAT_MRT3847_125830C.1.pep
MSQESFIYSFVARGTMVLAEYTEFTGNFPAIAAQCLQKLPSSNNKFTYNCDHHTFNFLVEDGYGIADLFCCIFPSLSAGSTLSHLIGTHISLFFSFLWAFELVFLSGFSLLFGVPSKVLLFFFFISML

SEQ ID NO: 171446 - protein, 113 aa, Glycine max
  unsure (1)..(113): unsure at all Xaa locations
  Clone ID: PAT_MRT3847_125831C.1.pep
MGLFYSLHXDDVPAESEMHKSVVHSVAIHKQLPNRKQHSGFIEQKVYDTRQRKLWKLTDKDHEDNKQHESDELVQKTVKRLDELLDIEPEEPVADQDDLMKNKKNLKEKERFT

SEQ ID NO: 171447 - protein, 97 aa, Glycine max
  Clone ID: PAT_MRT3847_125832C.1.pep
QYRLCDSILLDWCGVSKIDILIGRYFQADAIGIWKRCSRRGECVFSERPTPIPLCKCRNRKVVRISIRIIFSDPVLQNRKSVGSIFSSLAQGSQTNV

SEQ ID NO: 171448 - protein, 86 aa, Glycine max
  Clone ID: PAT_MRT3847_125833C.1.pep
GDTHCHSYSYKPSSELQLFDLLHFAHPLQEMPIAINTDEPKSQHRKLPIAFFKLVLGNNLKYRDNAACIRDCCEARAGCTRTQRAP

SEQ ID NO: 171449 - protein, 83 aa, Glycine max
  Clone ID: PAT_MRT3847_125834C.1.pep
RKKVSRKMSVCSQLMFLRVFVKGHERGGERREREKELMKGSRGVIVSGRGFVRMRRNIVVNILSNVLLGNFILQIGIMMKEGK

SEQ ID NO: 171450 - protein, 82 aa, Glycine max
  unsure (1)..(82): unsure at all Xaa locations
  Clone ID: PAT_MRT3847_125835C.1.pep
NYSINFKTNIIYPSSWMLILVPRVXNLICSTNSQFTHTFLKYLYFIMLYKSISSTTKISSLKHYLCFNLTLKITLLYATNPL

SEQ ID NO: 171451 - protein, 132 aa, Glycine max
  Clone ID: PAT_MRT3847_125836C.1.pep
WCLTITTQCFITPPERCSPTPAAVPRLSPSRTTGTGGGSTSVPTPMPHLFFFEHAVVAGAGEKTRRRDLKVPRRTNTESLPARIVPERKTIAPKRSHKPIHLRRSKVKTLQVGRCCTPPSPKSLGGYAGKGC

SEQ ID NO: 171452 - protein, 58 aa, Glycine max
  Clone ID: PAT_MRT3847_125837C.1.pep
NVIVLVALVYSPILGFHRNSSCSSFKVSFCCYFSVVQAKLKMPFGLHIVSSYIGAFIL

SEQ ID NO: 171453 - protein, 93 aa, Glycine max
  unsure (1)..(93): unsure at all Xaa locations
  Clone ID: PAT_MRT3847_125838C.1.pep
QDWAIYRRPKDINTGYNVPDLVDTLYNLPSNINXGGXGQSFHYSPSIHXKSHREASXLHEEMADNLIEAKPQHKILNKVSFGSRPMRPITGHS

SEQ ID NO: 171454 - protein, 76 aa, Glycine max
  Clone ID: PAT_MRT3847_125839C.1.pep
YWFMPNLLSGATRAGGGVILILRGWRIPTACTLRTRENSSAIVLEFITTFFLMNGFPCAAMLAVGYQKRLEYHGRS

SEQ ID NO: 171455 - protein, 98 aa, Glycine max
  unsure (1)..(98): unsure at all Xaa locations
  Clone ID: PAT_MRT3847_12583C.1.pep
SRTLTLLFVLQRLFSAEELSLFNGTDEGLPILLGILGSVFDVTKGKSHYGSGGGYNHXAGRDASRAFVSGNFSGDGLTDSLRGLSSTEVKSICEWRDF

SEQ ID NO: 171456 - protein, 91 aa, Glycine max
  Clone ID: PAT_MRT3847_125840C.1.pep
NGKIVSPKKRNNLLSHRVRALLSSKHTRTHRNSSLVTGSCCFSKFSVLFCFKLHHLLPLLPVQGACSDATFSCSEHCWVLVRSLPLVFRGF

SEQ ID NO: 171457 - protein, 156 aa, Glycine max
  Clone ID: PAT_MRT3847_125841C.1.pep
TCHVHARVSIRHDFWRRLRVLLRFVRFTTAGQSKSLRGRRQFVVFQKSSSFCLSSPIRNRRQPSARQAVPCCQPAAHEKSPACHSPTVDGTSQYQYDFGSVCLMTVFAAFSAYDRPLSALPRLAAPLPKAHEGKYKQNERALDSGAAAHCTLTQGS

SEQ ID NO: 171458 - protein, 104 aa, Glycine max
  unsure (1)..(104): unsure at all Xaa locations
  Clone ID: PAT_MRT3847_125842C.1.pep
GNLRNGVRIADDKLIRHXKAAKWDNGVIITRKDNGETGTIKHAIHYHIRVIAEGINLEKXTCKLGLGHXEGGIFTGEAPXHASNVQVLDPRTGNPCEIGHRYLE

SEQ ID NO: 171459 - protein, 61 aa, Glycine max
  unsure (1)..(61): unsure at all Xaa locations
  Clone ID: PAT_MRT3847_125843C.1.pep
ALFPARVSLGFRSESIESRQFLXGENKVRRVSILRGISEVGSEKVSHVLVWGEPPIGIVYR

SEQ ID NO: 171460 - protein, 90 aa, Glycine max
  unsure (1)..(90): unsure at all Xaa locations
  Clone ID: PAT_MRT3847_125844C.1.pep
PKPPNTVLFVXLNKGHLVGLKKLAGRPLNPKGKTIQKVHFFKNLIKKVTRFSPYXNLLLNFLKFGKIKRHLKFPKKNFEHTNPPRRNLKK

SEQ ID NO: 171461 - protein, 115 aa, Glycine max
  Clone ID: PAT_MRT3847_125845C.1.pep
GICGINTLASYPVKTKPNPPIPPPPGPVRCNLFTHCSEGETCCCAKSFLGICFSWKCCGLTSAVCCKDKRHCCPQDYPICDTRRGQCLKRTANGTTTITSENQDFSHKSRGWKSQ

SEQ ID NO: 171462 - protein, 137 aa, Glycine max
  Clone ID: PAT_MRT3847_125846C.1.pep
YCITLVKLFLCGLVKSCFLLLQTFCPSRIPEIMRVEGEERDDEREAPDSDMEAAVRTERTGFQRGREHPTGTAGNYPIDGQAGSITTNPSTTAHSSAGRKRQRQLAEGNSVKRKKASHAGMFDIAKTANRPMIHIGG

SEQ ID NO: 171463 - protein, 57 aa, Glycine max
  Clone ID: PAT_MRT3847_125847C.1.pep
VDRTLSACGSMTSNWVCSQSQYCSMVIQLLLSIAAAKNYQKVSFGLYKSHLSPMKLK

SEQ ID NO: 171464 - protein, 150 aa, Glycine max
  unsure (1)..(150): unsure at all Xaa locations
  Clone ID: PAT_MRT3847_125848C.1.pep
XRAXAXAXTFYXXXAXXXXXNGXXXXKGRPXXXXEXXTPKTGKHGHXKXHXXGTXXXTAKKXEXXGPXXHNGXXXQXXXTDHQXXXXAEXGTRRPXTEXGXTKEDPKXPTXEXPPXQTKDGXAGGKDXXAPGTAXTGEEQXXAPKEXGPK

SEQ ID NO: 171465 - protein, 122 aa, Glycine max
  Clone ID: PAT_MRT3847_125849C.1.pep
FSFWRYKGCMVGWLKKNDGFNFSANINIKILDLFLTVGGTDLTNCFFFFLITGYHNGALFPCVFQSLSSPQDLAISHACQSRYVQSQYHTIKVAQASKTDGGGKQNVYFLLVIESQLINLLT

SEQ ID NO: 171466 - protein, 66 aa, Glycine max
  Clone ID: PAT_MRT3847_12584C.1.pep
YHVVSSQLIASKNLLFFFIRHPNNTVPPTSVAIYCFFVVSMGRTGVWYFPAGMSMWADNHLSTHQN

SEQ ID NO: 171467 - protein, 35 aa, Glycine max
  Clone ID: PAT_MRT3847_125850C.1.pep
WLGQLLRLSCASNILQVKISMLVYIFYSFHLKMIK

SEQ ID NO: 171468 - protein, 54 aa, Glycine max
  Clone ID: PAT_MRT3847_125851C.1.pep
IIEVLTNKFLNLQVLYIYIYIYIYIYIYYFFLFNITYYLSNMYTRILNNLYYME

SEQ ID NO: 171469 - protein, 65 aa, Glycine max
  Clone ID: PAT_MRT3847_125852C.1.pep
TFSNLTSLGIPGIFFFFFGAFKGILFSALIWGIFFFKKVNKLSNAWDTCVIQNAIQSNSTVESLI

SEQ ID NO: 171470 - protein, 78 aa, Glycine max
  Clone ID: PAT_MRT3847_125853C.1.pep
SDRTTQYGSQNTTERVVQMVKPAFFGIHTSIPDHALCESFIMPALSIDHYRMFQAESKIPSGDSHHNRLITLQLFGHF

SEQ ID NO: 171471 - protein, 42 aa, Glycine max
  Clone ID: PAT_MRT3847_125854C.1.pep
LFLTILRSYLHWEFFTLHLPLTFLGFNSSTTTIFRLSFFDSA

SEQ ID NO: 171472 - protein, 237 aa, Glycine max
  unsure (1)..(237): unsure at all Xaa locations
  Clone ID: PAT_MRT3847_125855C.1.pep
MLGSKXKRLXXVXXNXXXXRKQYXKKXETLGLNVSEEEXXASSFPAAAYLKSIDXXKDKKVYVIGEDGILKELELAGYQYLGGPVGAVVVGFDRYFNYYKIQYGTLCIRENPGCLFIATNRDAVTHLTDAQEWAGGGSMVGALSGSTQREPLVVGKPSTFMMDYLANKFGISKSQICMVGDRLDTDILFGQNGGCKTLLVLSGVTTLAMLQSPNNSIQPDFYTNKISDFLSLKAAAV

SEQ ID NO: 171473 - protein, 79 aa, Glycine max
  unsure (1)..(79): unsure at all Xaa locations
  Clone ID: PAT_MRT3847_125856C.1.pep
MVLLVEQTMIGREYNVKDLSNADVRWVEIELDDVEMYGVMACADRFRTXQTLKGARITGSMDMTIHGAVLVETLTALGA

SEQ ID NO: 171474 - protein, 393 aa, Glycine max
  unsure (1)..(393): unsure at all Xaa locations
  Clone ID: PAT_MRT3847_125857C.1.pep
MLRSSTLTQSVTVTCVHHSHRQWFQSIPVNYRFCDAARNSLSSNSAIFKWKRTANYNRNRSGMGTFTTRALAQPLQNADELIDSVETFIFDCDGVIWKGDKLIEGVPETLDMLRSKGKRLVFVTNNSTKSRKQYGKKFETLGLNVSEEEIFASSFAAAAYLKSIDFPKDKKVYVIGEDGILKELELAGYQYLGGPEDGGKKIELKPGFLMEHDEDVGAVVVGFDRHFNYYKIQYGTLCIRENPGCLFIATNRDAVTHLTDAQEWAGCISTKLAVPSRLTNLKTVQHYQYTXGGSMVGALSGSTQREPLVVGKPSTFMMDYLANKFGISKSQICMVGDRLDTDILFGQNGGCKTLLVLSGVTTLAMLQSPNNSIQPDFYTNKISDFLSLKAAAV

SEQ ID NO: 171475 - protein, 43 aa, Glycine max
  Clone ID: PAT_MRT3847_125858C.1.pep
SLSDNRATIPDIMPENDHLQPKDGNLLLREALQAINHALITGS

SEQ ID NO: 171476 - protein, 32 aa, Glycine max
  Clone ID: PAT_MRT3847_125859C.1.pep
TDRCVLKPNALDERTKAYTLLVLEVSTFNVHR

SEQ ID NO: 171477 - protein, 263 aa, Glycine max
  Clone ID: PAT_MRT3847_12585C.1.pep
SEYFIFNHEDCISPENVDDNPNNARDVSDTETSAKAPELSSHDKQDVQNSNVNELDALVTTNCSTITESKIEGENNCENNIGMANDDLSKSTLDDFREPSNDCHAVSVSEVNVSESHRIEGSTVTVECQGAGNTRSLTLEEATDTILFCSSIVHDLAYKAATIATEKECSNPFEGSEPTVTLLGKANSDRKDSRNRPTSKRTLKSQKTKTKQRRVETDVKIPSGKTENDENIDESFTHNVGLPNKVDSMKPPKLESKCNCIIM

SEQ ID NO: 171478 - protein, 249 aa, Glycine max
  Clone ID: PAT_MRT3847_125860C.1.pep
MAKCMTSSSSSSYALLLFFFCFLQLEAILDPADFLALQNIRKALQDMPASDFFSSWDFTADPCNFAGVYCDSDKVIALNLGDPRAGSPGLTGRLHPSVGKLSALAEFTVVPGRIYGPLPETLSDLKNLRFLGVNRNFISGEIPTKLGELRNLRTVDLSYNQLTGRIPPTVGTLPELTNLILCHNRLSGSVPRFESHTLTRLDLKHNGLSGPLDRLLARLDQLNYLDLSLNQFTGPIPGRIFSFPLTNLQ

SEQ ID NO: 171479 - protein, 101 aa, Glycine max
  Clone ID: PAT_MRT3847_125861C.1.pep
KKKTPGANISFTSRWVFHLRAPVFYYAARHLRGKKPTLCNLTGGDMFSKGIPLQSPLNKKKPPGEIQLKPQIGSEPLNGDMPESPKPTFFFRKINPPLTLG

SEQ ID NO: 171480 - protein, 173 aa, Glycine max
  Clone ID: PAT_MRT3847_125862C.1.pep
VYINRLLSQLLLFRDTIEFIVQMGGQENAMGGFQHGNESILTCPPTSGLSGPNVNVSEMAISSVSMAKPSNVVANPFLASSTWDPLVSLSQAQTFGGSSMVSHNEFVNANSSYPLVLDNQGGISNTSHLVQYMSDSNLGGIVPKVHSYASGGFSEMVGSGSFCQHGSGDMADT

SEQ ID NO: 171481 - protein, 213 aa, Glycine max
  Clone ID: PAT_MRT3847_125863C.1.pep
AKFAAQNAVLEAQIKNYKEDFDRALETKLSLIERAVGRELDHISVDKASKHELESVNARLLMVTEKTVEREEYAKAINEISAAMADTIEERRRHIREIANQLQVIVQAVASKASKSDLIDIASVLNTFPRVQLELEQLKEFVQTTIADKTDRLVENAVDRKMLRQKMHELMRRLKTEVAALVVPPVHHCETCAVRLGTHSGPVCLSCTSKLKL

SEQ ID NO: 171482 - protein, 88 aa, Glycine max
  unsure (1)..(88): unsure at all Xaa locations
  Clone ID: PAT_MRT3847_125864C.1.pep
LXVRIPTXXXVXXXYSEXPXXKISEXKDAMDEXXRLERVSDDEFNNYXLVFCXQQGXEDDKCGDIGISIDHXDXXRRLVVSKNKPLVV

SEQ ID NO: 171483 - protein, 99 aa, Glycine max
  Clone ID: PAT_MRT3847_125865C.1.pep
MQCDRTKERTKLKTAYKMIEKRMASRSWMSGEHFSLADCAAAPALFYAATLLPFPEEYTNLQSYFERLVVRPSVRRVLEEAKPYFPLYPFVAGIPERFL

SEQ ID NO: 171484 - protein, 44 aa, Glycine max
  Clone ID: PAT_MRT3847_125866C.1.pep
TAHIGEHIIPFPKIITIFGIPIELKIRSSSFEICKKLQVFLDRR

SEQ ID NO: 171485 - protein, 60 aa, Glycine max
  Clone ID: PAT_MRT3847_125867C.1.pep
MLIFISTVFTTPFLTFMTLTFFNIPHIPAGSQVQDSASSSLWPMLQGHRLKQPESPSESA

SEQ ID NO: 171486 - protein, 442 aa, Glycine max
  Clone ID: PAT_MRT3847_125868C.1.pep
ELYPVLESIQKYLWPRLCKLDQRTLYELHYQLITFGKVFCTKSKPNCNACPMRGECRHFASAFASARLALPGSEQKSIVITTGNNATEQNPSLVINQLPLLLPENINQAELQQTEVIRQLEAKSEINISQPIIEEPATPEPECSQVSENDIEDTFNEESCEIPTIKLDIEEFTLNLQNYMQENMELQEGEMSKALVALHPGAACIPTPKLKNVSRLRTEHYVYELPDSHPLLNGWNKREPDDPGKYLLAIWTPGETADSIQPPESKCSSQECGRLCNENECFSCNSFREASSQIVRGTLLIPCRTAMRGSFPLNGTYFQVNEVFADNDSSLNPISVPRSWIWNLDRRTVYFGTSIPSIFKGLSTREIQQCFWRGYVCVRGFDREKRAPRPLLARLHFPVSRLPKNRDKTQQESASANSQGLNFKQNPEQPELLSNIRQTGGS

SEQ ID NO: 171487 - protein, 45 aa, Glycine max
  Clone ID: PAT_MRT3847_125869C.1.pep
SSRFGSRFGSGCLWLSGITGSIAYNWSRPNMKTSVKIIHARFVLL

SEQ ID NO: 171488 - protein, 61 aa, Glycine max
  Clone ID: PAT_MRT3847_12586C.1.pep
WHGKKGGKCGLSIFSRARARREERAGKGNSPAPFYQHQWWCTCCCCNYSTVCQGCHIQKIM

SEQ ID NO: 171489 - protein, 56 aa, Glycine max
  Clone ID: PAT_MRT3847_125870C.1.pep
SGCCAIHRPGQNDTCPCLLRMGSNGCLRMTHICTDRVESKLLLNAIDRPSKDHVFI

SEQ ID NO: 171490 - protein, 67 aa, Glycine max
  unsure (1)..(67): unsure at all Xaa locations
  Clone ID: PAT_MRT3847_125871C.1.pep
CGLDFQDLSHPFLAKAIQALRPLKIRIGXGSLKDPGSDGCGKLKXPGPPLQKVKGGLSGFSKGCLHM

SEQ ID NO: 171491 - protein, 114 aa, Glycine max
  Clone ID: PAT_MRT3847_125872C.1.pep
MNGYIKMVVVKKSFLLLFLVGVTTSRIELSFFKNDHSSTYYDDQYSKPCCDLFICTHSMPSQCTSENIMLNSCHSHCKNSMFTRSQSGQCLCLDTNHFCYKPCKFTYDYKNSYL

SEQ ID NO: 171492 - protein, 406 aa, Glycine max
  unsure (1)..(406): unsure at all Xaa locations
  Clone ID: PAT_MRT3847_125873C.1.pep
MENARISQWLILLVCALLLLISEASYVPITIVQNAVAKGAVCLDGSPPAYHFDRGFGSGINNWLVAFEGGGWCNNVTTCLARKTNRLGSSKQMAKLIAFSGILNNREMFNPDFYNWNRIKVRYCDGSSFTGDVEAVNPVTKLHFRGGRIFNAVMEDLLAKGMKNARNAIISGCSAGGLTSVLHLIGFYSKRFKSLLPPAWAKVKCLADAGFFINAMXVSRDIHIEEFYSQVVQTHGSAKNLPTSCTSRLRPGLCFFPQNVVSQISTPIFFVNAAXSECKLDNTPLATGISSTWCQWRECKLDIKNCSPNQLSVMQGFRTDFLRAFSVVGNAASKGHFIDGCYAHCQTGIQETWLRNDSPVVAKTSIAKAVGDWFYDRRPFREIDCAYPCNPTCHNRIFDQNERPDV

SEQ ID NO: 171493 - protein, 223 aa, Glycine max
  Clone ID: PAT_MRT3847_125874C.1.pep
MACALQATLAANTYAFSSRRFSLKHQKNSKRRFSLFTVRADSDDSDCNEEECAPDKEVGKVSVEWLAGEKTKVVGTFPPRRKPGWTGYVEKDTAGQTNIYSVEPAVYVAESAISSGTAGSSSDGAENTAAIVAGLALISIAAASSILLQVGKNAPPQIQTAQYSGPSLSYYINKFTPPEITQVSVPSEAELSSSVQPESPPPEVSQVQVEAQASETSSVNIES

SEQ ID NO: 171494 - protein, 223 aa, Glycine max
  Clone ID: PAT_MRT3847_125875C.1.pep
MACALQATLAANAYVFSSRRFSLKLQKNSKRRFSLFTVRVDSDESDCNEGSSRRTLFLIAVRVEWLAGEKTKVVGTFPPRRKPGWTGYVEKDTAGQTNIYSVEPAVYVAESAISSGTAGSSSDGAENTAAIVAGLALISIAAASSILLQVGKNAPPQIQTAQYSGPSLSYYINKFTPPEITQVSVPSEAELSSSVQPESPPSEVSQVQVEAQASETSSVNIES

SEQ ID NO: 171495 - protein, 43 aa, Glycine max
  Clone ID: PAT_MRT3847_125876C.1.pep
VLTIKYCAASPCYSIKCQGIATSLHTCGVASSFYDISTVIASS

SEQ ID NO: 171496 - protein, 70 aa, Glycine max
  Clone ID: PAT_MRT3847_125877C.1.pep
LAIKFESRRIPRSLTHLYKNFMDSRQSKMTSLYIPDEVYTEDVHSEISHSRVLPSVTELASSLEKLPHII

SEQ ID NO: 171497 - protein, 89 aa, Glycine max
  Clone ID: PAT_MRT3847_125878C.1.pep
RPMGRLVLNPQRGNPGLLASQSPGFHWGGPSPPPTIKVGVAPIYMGKGIFICPIQIGALALFVNVPFWYGGKEPKPPPGPFFFFLPGFN

SEQ ID NO: 171498 - protein, 107 aa, Glycine max
  Clone ID: PAT_MRT3847_125879C.1.pep
PSSPEGQIIGGGVTRLVAPSPVQVVATSFVYGGSQPKTKKVAPPPSFPKNNSSKPQSSDKLGFPPSAPPPNQKYPFFFPSPGIWPALSRPVKVKSAPPPPGFSFTRG

SEQ ID NO: 171499 - protein, 90 aa, Glycine max
  Clone ID: PAT_MRT3847_12587C.1.pep
KYMFIFLIKSSYNNYCQLLTQTNEIAIIDGKFSLFTMYFIYQNPFLSHFTHFTFFFFLELSLPNSFITISNSHYSSKLFHIYLFYTNFIK

SEQ ID NO: 171500 - protein, 56 aa, Glycine max
  Clone ID: PAT_MRT3847_125880C.1.pep
RHPDLPAVRPHVLYLVYVDSLDHCREWRHFLFFSLALFLLFVLDSRPYYCGVSRRG

SEQ ID NO: 171501 - protein, 62 aa, Glycine max
  unsure (1)..(62): unsure at all Xaa locations
  Clone ID: PAT_MRT3847_125881C.1.pep
XXHAYVSSEFGSRCXXKIXXXTXLSXYXXIVWELXXRXDXTPXXAXXXHSLXSNXSXXXXIR

SEQ ID NO: 171502 - protein, 41 aa, Glycine max
  Clone ID: PAT_MRT3847_125882C.1.pep
LDDSIFYLINSKLILFCRKYVQPTLCLFTSTIFFKVDFMIN

SEQ ID NO: 171503 - protein, 195 aa, Glycine max
  Clone ID: PAT_MRT3847_125883C.1.pep
MQTSVLHNLVVGTPVISATYDQLQKSARYLPGPATQCQYSTTTSKQMRLGTNISETVKRKLSLGAHILRVGGVEKVFKQFFSVEDGEKLLKVSQCYLSTTSGPLAGFLFISTDKVAFCSERSMKIFSQKGHMLRIRYKVVIPLNKIKCVNQSENVQKPTQKYIEIVTEDNFDFWFMGVLKYQKTFKYLEQAVSQA

SEQ ID NO: 171504 - protein, 93 aa, Glycine max
  Clone ID: PAT_MRT3847_125884C.1.pep
FVKQNLVNSICKGKAAYNIPPPYLYIVKSLRTMGYEVFYLGGTIFLLGLSVVSLLVLHSLSWKLEEYTADVTFSSASHSDTQVSKPSIVIIHL

SEQ ID NO: 171505 - protein, 48 aa, Glycine max
  Clone ID: PAT_MRT3847_125885C.1.pep
VKIRLCIQSLKKLDKRIFLKKAEMHKLILTYERSLIYFTFLSSTIRTC

SEQ ID NO: 171506 - protein, 67 aa, Glycine max
  Clone ID: PAT_MRT3847_125886C.1.pep
FCFSILTEMVRVHIVAKVLRHGHAHDPDLQHMINISDICLYANATLEDVHQSAWHSLSLVQSENLAN

SEQ ID NO: 171507 - protein, 160 aa, Glycine max
  Clone ID: PAT_MRT3847_125887C.1.pep
QAMIHKSFRTPMVRFLRERLEKAGCAVGDNFFKAVTCDEEMAGAYVRREGVKVCSNYVRIQDDVNMVVIRELIHVFDDCRSANLNWSDCAHQACTEIRTNHLSGSCHYKRELLKGFLKIRGHGQECVKRKVLQALSQNPNCSGLGAKDAMEAVWDGLYND

SEQ ID NO: 171508 - protein, 122 aa, Glycine max
  unsure (1)..(122): unsure at all Xaa locations
  Clone ID: PAT_MRT3847_125888C.1.pep
KNRIALSNLGQKQSRYKSYRIQTSMSTITDLYSELKELVPDYQERGKKLKKDHGRVXLEKITDDIELAXMRGMTDLVWLGSTVDPDEGNRFKGTXITECQXKLSGVFPGGEPLPEELTFVFF

SEQ ID NO: 171509 - protein, 69 aa, Glycine max
  unsure (1)..(69): unsure at all Xaa locations
  Clone ID: PAT_MRT3847_125889C.1.pep
LQLKVKRSNICHNATXRDSTSLGQGCANTLLSXHXSYCLXLEXXXXWXXMXXNXXGLDXXFWXXXXXPP

SEQ ID NO: 171510 - protein, 69 aa, Glycine max
  Clone ID: PAT_MRT3847_12588C.1.pep
LGILYSRRPPCVRTFCWANLSYQALLLRPWRVTQITTRFDIGANGILYVYGENNTTAPQQKYHFFQCHW

SEQ ID NO: 171511 - protein, 60 aa, Glycine max
  Clone ID: PAT_MRT3847_125890C.1.pep
MACTEGLEPIARAFLACYYDKHPYTPLYDDDSTLSCHISSMANDILTQHSPIQGERASYI

SEQ ID NO: 171512 - protein, 157 aa, Glycine max
  unsure (1)..(157): unsure at all Xaa locations
  Clone ID: PAT_MRT3847_125891C.1.pep
MGAYFSHPRFWLVCIVSSWPLFGPLFIRFVLGTAYSTNVPLLTWNTFVVLSPICILAVPARLSQLAFILNIQTHAYCRPPVFSRSVMFATAFISSLSGAIALVTDIPDIEXYKGFGIQSFSLQIGHKPEFWTXVIHLEIAYGDSLLVIAASPCHWSK

SEQ ID NO: 171513 - protein, 134 aa, Glycine max
  unsure (1)..(134): unsure at all Xaa locations
  Clone ID: PAT_MRT3847_125892C.1.pep
MGKVKIGINGFGKIGRLVAKIPLQKDQGELVADNHPFLTPDYLTYLFXSHRGHRHWKHYHGTGXDQKTLFFRDNPKTVFGHQNPEENPWGATXAFFIVASTRVFTGYDQGPAXFRGGPKKVLFPPPPREAPFFL

SEQ ID NO: 171514 - protein, 35 aa, Glycine max
  Clone ID: PAT_MRT3847_125893C.1.pep
CIHKRCIQTSIEGMKSGAEAANAGADNKQIVVERF

SEQ ID NO: 171515 - protein, 106 aa, Glycine max
  Clone ID: PAT_MRT3847_125894C.1.pep
SQFFFFFFLKKKKKKKKKKKKKKKKKKKRKKNQKGNKKKRLAGRLTLYPIEKGIDGEKPTGNKKKFFFKKINRLAKRPKSKKTPNTNPPKNYKAMKQAKCHTRKSH

SEQ ID NO: 171516 - protein, 82 aa, Glycine max
  Clone ID: PAT_MRT3847_125895C.1.pep
GPALLVRPTRPPARGIETNRDGGVADLNTGGQTRGHAMLRITQGVTTTMCSMTKGRRNSPPCAGQTLRESLCLALSSYLLNT

SEQ ID NO: 171517 - protein, 40 aa, Glycine max
  Clone ID: PAT_MRT3847_125896C.1.pep
MAGVVFIKPFSHGVRVNTTLRVWGKCQGIDFTLLVSGDRT

SEQ ID NO: 171518 - protein, 71 aa, Glycine max
  unsure (1)..(71): unsure at all Xaa locations
  Clone ID: PAT_MRT3847_125897C.1.pep
RGYSYKKERVHTVKSIDFTGRGILAVDEARDTCGKRLASSGXDNTEGNRQAYKQRLITTRGLGECMCGAWV

SEQ ID NO: 171519 - protein, 69 aa, Glycine max
  Clone ID: PAT_MRT3847_125898C.1.pep
ALFTLAQCTFVCPSWSDLYRALISDWLFLVRFIYLFSGVNCVIRREASLRNPPRFSLCLFACHFPSMEL

SEQ ID NO: 171520 - protein, 40 aa, Glycine max
  Clone ID: PAT_MRT3847_125899C.1.pep
GIKCFSSKLHKQFTHMSDKVPSRFIALSGLKENIRQIHGA

SEQ ID NO: 171521 - protein, 53 aa, Glycine max
  Clone ID: PAT_MRT3847_12589C.1.pep
PVAEATAFGWWRTWIDTPQARGLCYCSVFSNVQNCVFSSTIRLELAPEFLRLT

SEQ ID NO: 171522 - protein, 93 aa, Glycine max
  Clone ID: PAT_MRT3847_1258C.1.pep
MSSRRSRSRQSGASAEITDAQITDLVSKLQQLIPELRARRSDKVSAAKVLQETCNYIKNLHREVDDLSDRLSELLANTDSNSAQAAIIRSLLM

SEQ ID NO: 171523 - protein, 124 aa, Glycine max
  Clone ID: PAT_MRT3847_125900C.1.pep
QLDGFTSDDRIKVIAATNRADILDPALMRSGRLDRKIEFPHPSEEARARILQIHSRKMNVHPDVNFEELARSTDDFNGAQLKAVCVEAGMLALRRDATEVNHEDFNEGIIQVQAKKKASLNYYA

SEQ ID NO: 171524 - protein, 425 aa, Glycine max
  unsure (1)..(425): unsure at all Xaa locations
  Clone ID: PAT_MRT3847_125901C.1.pep
MASAMVEDANFEDDQLANMTTDDIVRASRLLDNEIRILKEELQRTNLELESYKDKIKENQEKIKLNKQLPYLVGNIVEILEMNPEDEAEEDGANIDLDSQRKGKCVVLKTSTRQTIFLPVVGLVDPDKLKPGDLVGVNKDSYLILDTLPSEYDSRVKAMEVDEKPTEDYNDIGGLEKQIQELVEAXIVLPMTHKERFQXLGVRPPKGVLLYGPPGTGKTLXARACAAQTNATFLKLAGPQLVQMFIGDGAKLXVRDAFQLAKEKSPCIIFIDEIDAIGTKRFDSEVSGDREVQRTMLELLNQLDGFSSDDRIKVIAATNRADILDPALMRSGRLDRKIEFPHPSEEARARILQIHSRKMNVHPDVNFEELARSTDDFNGAQLKAVCVEAGMLALRRDATEVNHEDFNEGIIQVQAKKKASLNYYA

SEQ ID NO: 171525 - protein, 74 aa, Glycine max
  Clone ID: PAT_MRT3847_125902C.1.pep
TINSYSTSLIQLNKITHICYLIILISAIPTKERTRYGMIICEKILVWYLSRKRWEKNNEVLPHQEATQGTSYNF

SEQ ID NO: 171526 - protein, 154 aa, Glycine max
  unsure (1)..(154): unsure at all Xaa locations
  Clone ID: PAT_MRT3847_125903C.1.pep
AYGAGVPIVLNGSESVTQYYNVSLGAIQLYXRPAKPSTRLRKPSQESDSESARETSSDSSSGYCHERGAKSVHGSRNHLNVMDASNHTLERVSQGKPFMGSSSDETESCSPPGQLIFEYFEHETPYNREPLANKISDLARQFPELKTYWSCDLS

SEQ ID NO: 171527 - protein, 88 aa, Glycine max
  Clone ID: PAT_MRT3847_125904C.1.pep
MVSGTLGLARETHSINLTHSGAGRASSSSPRLVRELTWAVPASVGIGDDPTHIAKSRFPKTLLYKEDLGAGQTMHVPFILPTFQQPWG

SEQ ID NO: 171528 - protein, 31 aa, Glycine max
  Clone ID: PAT_MRT3847_125905C.1.pep
RRTKFQKRKESLEGSMGEAEIKLEDSKEEHN

SEQ ID NO: 171529 - protein, 69 aa, Glycine max
  unsure (1)..(69): unsure at all Xaa locations
  Clone ID: PAT_MRT3847_125906C.1.pep
NFFKGILRFFXXXXLEPPSTXRIPSFKENIFXVXXXKFXXXPARDFLRHGXHXXVXXXXNRLXSRALXP

SEQ ID NO: 171530 - protein, 81 aa, Glycine max
  unsure (1)..(81): unsure at all Xaa locations
  Clone ID: PAT_MRT3847_125907C.1.pep
MFQLFILSRVVVPLIQGYEDVGDFIVSERLETGVHVNLIFYLIIGSIGLFXLVLIILTHNKWLVLILINLFYLFIFLVVRC

SEQ ID NO: 171531 - protein, 137 aa, Glycine max
  Clone ID: PAT_MRT3847_125908C.1.pep
KTTTPSAMEATSKCRGYKKGVLFPTSTSMHGCYASKNISISQPNGEAKAICMGCKEECHCLMPSRTTLHRCSVCLKVSNSTLGPHGLKKECAICRPVKKIGAKLLKLGDLRSSKKNGNLLSGSLLPPSMPSSSLALP

SEQ ID NO: 171532 - protein, 103 aa, Glycine max
  Clone ID: PAT_MRT3847_125909C.1.pep
MEILVHDLEIESSLHRRVDLFFLVDSIAQCSRGLKGDIGGVYPSAMKAVLPRLLSAAAPLGNAAKENRRQCLKASIKTVLERKILPEPIIRHHMQELDSYSSS

SEQ ID NO: 171533 - protein, 188 aa, Glycine max
  unsure (1)..(188): unsure at all Xaa locations
  Clone ID: PAT_MRT3847_12590C.1.pep
MAHILELAAEVNATGGLPKKLFHLAYARRLHAVNGSWFGAWGLEKALWDFLVFRKVPAILGGRIRFILSGGAPLSGDTEMFINICLGSAITQGYGLTKTCAGGTFSEVDDTCVSRAGPPLTCSFIKLIDXPEGGYLINDSPMARGEIAIGGPNVALGYFINGESTXESFMGDERGMRWLYTGDIGRGH

SEQ ID NO: 171534 - protein, 68 aa, Glycine max
  unsure (1)..(68): unsure at all Xaa locations
  Clone ID: PAT_MRT3847_125910C.1.pep
QTHTFFXHXXRKISSFYTAHTXXNQKRQEINEETTTCLANLPSKECKSAPSLLFLSFLSLYPSTISPS

SEQ ID NO: 171535 - protein, 232 aa, Glycine max
  unsure (1)..(232): unsure at all Xaa locations
  Clone ID: PAT_MRT3847_125911C.1.pep
MWPLWSSGINNRISKQPLNLFAVMVKKKEIVNKVSTWGIPLCRFNMLASAIGAKKKQVVNKFVAKDGAAKAMSNDIPRIKYDVFVSFRGSDIRLGFLSHLSKAFHXKQIHAFCDDKLQRGDEISQSLLEAIEGSSISLIIFSEDYASSRWCLEELVKIVECREEYGQIVIPVFYNVDPTNVRHQKGSFETALAEHDKKYDLPIVRMWRPALKNSGNLARINSTNFRNDAELL

SEQ ID NO: 171536 - protein, 40 aa, Glycine max
  Clone ID: PAT_MRT3847_125912C.1.pep
PNPKVLLDMTIGGQPDDRIVMELYANMTTNTYLNFRALCT

SEQ ID NO: 171537 - protein, 93 aa, Glycine max
  Clone ID: PAT_MRT3847_125913C.1.pep
GPLVVTLSSELEFIPIEPRGDFFPRGFEGKTPISGVFFGFFHPPKTLSNGSKTFPKKFCKFFVPVRKRYCQRTAKISPLFMKKRLPKKKLWGF

SEQ ID NO: 171538 - protein, 60 aa, Glycine max
  Clone ID: PAT_MRT3847_125914C.1.pep
CAVIPREGSNIDDAEVLRYCKKNLASFKVPKKVFITDSLPKTATGKILRRLAAQHFVSQI

SEQ ID NO: 171539 - protein, 85 aa, Glycine max
  Clone ID: PAT_MRT3847_125915C.1.pep
RAYWQGRSLIKRFVYMCCTAPCSLLLRKTMTLTWARLESFNQPYYTTCGVLVGYALCFMLLAIINKISTAIFNYQDLLTALLILT

SEQ ID NO: 171540 - protein, 536 aa, Glycine max
  Clone ID: PAT_MRT3847_125916C.1.pep
MGSAHNSQPSNIFIRITPMDTPMTLTGLLRDVAAKFPSRRAISVAGKFDLTHSRLHQLVESAAARLVAAGIKPGDVIALTFPNTVEFVVLFLAVIRVRATAAPLNAAYTAEEFEFYLSDSESKLLLTSAEGNNSAQAAASKLNILHSTASITQAEDKEAELSLSLSHSESESINSVESLGNDPDDVALFLHTSGTTSRPKGVPLTQHNLFSSVNNIKSVYRLTESDSTVIVLPLFHVHGLIAGLLSSLGTGAAVALPAAGRFSASSFWKDMIKYSATWYTAVPTIHQIILDRHSNSPEPVYPRLRFIRSCSASLAPAILGKLEEAFGAPVLEAYAMTEASHLMASNPLPQDGAHKAGSVGKPVGQEMVILDETGRVQDAEVSGEVCIRGPNVTKGYKNNVDANTAAFLFGWFHTGDVGYLDSDGYLHLVGRIKELINRGGEKISPIEVDAVLLSHPDIAQAVAFGVPDPKYGEEIYCAVIPREGSDIDDAELLRYCKKNLASFKVPKKVFITDSLPKTATGKILRRLVAEHFVSQI

SEQ ID NO: 171541 - protein, 57 aa, Glycine max
  Clone ID: PAT_MRT3847_125917C.1.pep
KLESPEYDELEHDQLCKCSQNLFRCPCYRSLKSVMYTAVLDEVIKSRPVLECPKLCK

SEQ ID NO: 171542 - protein, 131 aa, Glycine max
  Clone ID: PAT_MRT3847_125918C.1.pep
AMPARSIAWSEDSQWLYSGSDDTRIVLHDIRSGSGSRPGEGAVAIMQGHQSWVLDLSADGRLLGSTGADKNVKLWDIAQRSAVYTTTLAAPAWAFDWQPADVQIGSLGPSKQFAVGGDEKAVLLYRQAGSI

SEQ ID NO: 171543 - protein, 147 aa, Glycine max
  Clone ID: PAT_MRT3847_125919C.1.pep
MEALLSQFTFLSDQALQDKNFDPSTIEDLMKLFEIESYKAWAAAELEQEKEVEEAEAGMEEAEEYLDSVMESAMDEFRRFEEELERMSKNEMEGLVQTAERARKMGNLMEKGASIASKKYIEAALNSATASMKSAWKGLSSGKVHPS

SEQ ID NO: 171544 - protein, 50 aa, Glycine max
  Clone ID: PAT_MRT3847_12591C.1.pep
RIIRIPPLHTWALITHTDTLSLKQNIYNIFLHIQTFLNKYAKGHLLSNLL

SEQ ID NO: 171545 - protein, 65 aa, Glycine max
  unsure (1)..(65): unsure at all Xaa locations
  Clone ID: PAT_MRT3847_125920C.1.pep
LIIIVSLYVCARLVSEQHTSKCAGNVVGVLLDNLPPLLEPAPEGVYSHLAFSTGDKXAILRTSHY

SEQ ID NO: 171546 - protein, 60 aa, Glycine max
  Clone ID: PAT_MRT3847_125921C.1.pep
ELISWEGLLLQGSVQDILHADNEPCCFRTSLEPLTSKAYELVERHFNNCNGCSYTSLGAN

SEQ ID NO: 171547 - protein, 128 aa, Glycine max
  Clone ID: PAT_MRT3847_125922C.1.pep
MSAALGKCSRIRHIVRLRQMLRRWRSKARTSAHRIPSDVPAGHVAVCVGNNSKRFVVRTTYLNHPVFKRLLVEAEEEYGFSNHGPLAIPCDEAIFEQLLRFVSHSDDCHVPLRNNLDFYLESRPLLLH

SEQ ID NO: 171548 - protein, 81 aa, Glycine max
  Clone ID: PAT_MRT3847_125923C.1.pep
FPCSIPHFLFFRIAILPRPGAFTIVGHKNWGVGGSFVLALLGGGGGGSPAFSLFIIFCPFKDEERFGLFFPFYFYPPPFFL

SEQ ID NO: 171549 - protein, 124 aa, Glycine max
  unsure (1)..(124): unsure at all Xaa locations
  Clone ID: PAT_MRT3847_125924C.1.pep
MAANQNSTSATPTFHLISQKLDDSNFLLWRQQVEPVIKSHKLQRFVMNPQIPMRFLTEADCEAGNENPAYSDWEQQDQILLLWLQSTLSXSILSRIIECVHSYQVWEQIHEYFQEQTRVKARIL

SEQ ID NO: 171550 - protein, 81 aa, Glycine max
  Clone ID: PAT_MRT3847_125925C.1.pep
FITSVILLKRTSVLYILVGFFFLERKFDGYSCKREVVPHYIILCFFWLIKINDKRIKASNFSKKKKKKKKKKAARSNSDAW

SEQ ID NO: 171551 - protein, 126 aa, Glycine max
  unsure (1)..(126): unsure at all Xaa locations
  Clone ID: PAT_MRT3847_125926C.1.pep
ILRGSPKWDRLYRKRSQKGGARRKEKGAACPTRRKPRFQRCPSKPGLLNSPVWKEYGPXYLKKREGTASXXCRYPVASRIPLACSSSRYPXAAEGGFEXWLGNAQHVDQPKKNQGLXLKEHVALLA

SEQ ID NO: 171552 - protein, 99 aa, Glycine max
  Clone ID: PAT_MRT3847_125927C.1.pep
GYQPIFTPVNGQRGQVPRNMLYPYAHVPSIRLLPKFGMYFYLPRFSFVNRSTILSPLYLWGTLLERGKLLLLVNYLRMDIMQMFKCYIVCVTIPFGAAI

SEQ ID NO: 171553 - protein, 76 aa, Glycine max
  unsure (1)..(76): unsure at all Xaa locations
  Clone ID: PAT_MRT3847_125928C.1.pep
CWPDYGWNDCGSHGLNVKGPSDPTRIPTRDLVHVXCMPSTPNGVPQYIPRPLEPINLLAAKNERXSVPIAIRPKVY

SEQ ID NO: 171554 - protein, 136 aa, Glycine max
  Clone ID: PAT_MRT3847_125929C.1.pep
PPPTPTPPPPFPPTPPLVPPRLQLPLRRVGVQARPHLVPNVPKGDIGGTHTKENNQDASAKFHKDDRGGSENPPAKYEINPTCPKSSGSGNLDKQPLDSSKRCHLDHELPLYAFPGGFPREKRIVPPGTPLHFVWE

SEQ ID NO: 171555 - protein, 51 aa, Glycine max
  Clone ID: PAT_MRT3847_12592C.1.pep
ITLLALEASLQVSTSYMQVTLFNTEITLHHNSSHSIYIAFASGPDRPLRVT

SEQ ID NO: 171556 - protein, 308 aa, Glycine max
  Clone ID: PAT_MRT3847_125930C.1.pep
VLDIGTDRLVRKIPFNLGNFIHLRYLRMDTWGVKFIPASILTLENLQIIDLGSNEVMLNLQTISAIVLDRQTISLIKKGRFPNLKKLGLQVSSRCKDQVPELLQSLHQLCHLKNLRIYLEGKGASGTPNHESMEWNIGCKPQELLQSLGQLSCLTILRIMNVFDLLTCGVVTFPPNVTKLTLAGIKCITDEGMKALGNLTKLGILKLLGSSDDSFDLNCVEGGFPQLQVLEMSFLGVGNWKLGNGTMLRLQSLEINYCEGLNDLPNELWSLTDLREVRVRRPSEPMAHMLRNLKIKNAVELVIGDIRT

SEQ ID NO: 171557 - protein, 99 aa, Glycine max
  Clone ID: PAT_MRT3847_125931C.1.pep
SIVVQDRDRYRLQQSWASVCDSHSVQTPDHRTHLAYGTKYKIIRLQPTLYGKARLKVGVTVRATGYSVKHASHWVLLLGCIKREPLSSSKDAMLGQKFV

SEQ ID NO: 171558 - protein, 101 aa, Glycine max
  Clone ID: PAT_MRT3847_125932C.1.pep
SQGVPILGWPMAANQFYNCKLLKKKVGVCVEVAKGKSSEVKYEDIVAKIELVMDETEKGVAMGKKAGDVRDMIRDAVKDEDGFKGSSVRAMDEFLSAAFES

SEQ ID NO: 171559 - protein, 60 aa, Glycine max
  Clone ID: PAT_MRT3847_125933C.1.pep
FFSRCFLPFSGRCFAFSSMHHPQRNAREIRGLNDLMSDIRTFSGRRLTPTGNASITPIEC

SEQ ID NO: 171560 - protein, 211 aa, Glycine max
  Clone ID: PAT_MRT3847_125934C.1.pep
MMKNENKDALVGSIIDVVRSPITRMRLFIAVALNFLGSVVYYGLSLNVMNLETNLYLNVMLNSVAEMPAFTITAVLLDRFGRKPLTVATMWFSGFFCLMGSLVGNVGVWKMVRMVCGVLGIFGMAGTYNLLFIYTAELFPTVVRNAALGCTTQASQMGAILAPFVVVLGGWLPFAVFAACGIVGGMFAFNLPETLNQPLYDTFGGLEAGLA

SEQ ID NO: 171561 - protein, 119 aa, Glycine max
  unsure (1)..(119): unsure at all Xaa locations
  Clone ID: PAT_MRT3847_125935C.1.pep
SGFFCLMGSLVSNVGXWKLVRMVCGVLGIFGMPGTYNLLFIYTAKLFPTVVRNAALGCTTQAAQMGAILAPFVVVLGGYLPFAVFAACGIVGGMFAFNLPETLNQPLYDTFGGLEAGLA

SEQ ID NO: 171562 - protein, 58 aa, Glycine max
  Clone ID: PAT_MRT3847_125936C.1.pep
YMRMLKERVGKSIKNVMIILLQILHIYMLFILLPRSRCVKPGKGLILWWGWEKGRKQS

SEQ ID NO: 171563 - protein, 69 aa, Glycine max
  Clone ID: PAT_MRT3847_125937C.1.pep
WHTSYVAIVAATIDHYDVDTACLGLGGDRGPGLLQGPRPEEYEKWVLVTNLRRLVNEGRIRRLEQIYLH

SEQ ID NO: 171564 - protein, 69 aa, Glycine max
  unsure (1)..(69): unsure at all Xaa locations
  Clone ID: PAT_MRT3847_125938C.1.pep
NSXSSPMFQLVYIKYKYHVSHFLSKLIEIYQPLLYSYILNIYCFNLLKVFFLLYMKKRNKTCFFNFYFH

SEQ ID NO: 171565 - protein, 200 aa, Glycine max
  Clone ID: PAT_MRT3847_125939C.1.pep
MAVTLRSTTNNFLPLSSSNCWLSNGSPYAGRKVSDFHCVLLSKWWSSRKGCLIRHDVLSSSNHGLLGFRKCYSVFSKPRRGLHLLPFASSDDGVTVNGSLQASSGTDLEKMRVKLNRSLEDEEFCDGLVQALYDATRVFELAIKEHKSFSRMSWLSTAWLFSRLSLLRSHQLVRPLRCCFRVMAVTLRRRNQQLCSLMLI

SEQ ID NO: 171566 - protein, 72 aa, Glycine max
  unsure (1)..(72): unsure at all Xaa locations
  Clone ID: PAT_MRT3847_12593C.1.pep
SRPGKQIQIEHALTXVESRQTYFGIKATNGLDIATEKKLPSISDDEASIQKIQLLTPNIRVVYRGMFPNFRL

SEQ ID NO: 171567 - protein, 50 aa, Glycine max
  Clone ID: PAT_MRT3847_125940C.1.pep
YQWVCCFVKSLNLPPLKKTVSVLGNLCIFNHEDQRILDQAAAAQRIYGQV

SEQ ID NO: 171568 - protein, 74 aa, Glycine max
  Clone ID: PAT_MRT3847_125941C.1.pep
GNTRADHTLPDLKLNRNIWCMGIRRGPRRVGVKIARTRTNKKNPKGELYFLVTVVEIQPGGLKGWETKVVEDED

SEQ ID NO: 171569 - protein, 78 aa, Glycine max
  Clone ID: PAT_MRT3847_125942C.1.pep
VKVAYPLWFPLNMMACGFCFPLLKPPPPLRRLFVVCFWARPAPACFNYVFGLFPWRFPPPPSSSVFPFIFFFFPKIVH

SEQ ID NO: 171570 - protein, 115 aa, Glycine max
  unsure (1)..(115): unsure at all Xaa locations
  Clone ID: PAT_MRT3847_125943C.1.pep
MVRSNDILTDESISCQGGHRYGNRCCHRIWIPDLIELLVLRNMPIQKVETGHQDTVHDDAMDDYGXRVGTGSSDHTIXIIGVSNTVCQNLPTLTGHQRPVWGVAXTHPKIGSLLA

SEQ ID NO: 171571 - protein, 159 aa, Glycine max
  Clone ID: PAT_MRT3847_125944C.1.pep
YAARRRQKGNETLKHNRLLRERGDDDSFPNSPRNSSSDANLQKNRDQGASQKAMSLPSSPHDYGGQASKRSGSSRYGVNDEMESTWNKVLESPMFNNKPLLPYEKWNIGFSELTVGTRVGIGFFGEVFRGIWNGTDVAIKVFLEQDLTAENMEDFCNEI

SEQ ID NO: 171572 - protein, 66 aa, Glycine max
  Clone ID: PAT_MRT3847_125945C.1.pep
MTRKQASSTRRGGLSGVLHSKSKSSPLLSISLVLFVAILLILYACIGSGILGGRKDVISMAEDDFS

SEQ ID NO: 171573 - protein, 808 aa, Glycine max
  unsure (1)..(808): unsure at all Xaa locations
  Clone ID: PAT_MRT3847_125946C.1.pep
ETREDAGPAEQEPSNVSLLPXAFVAKFGSVSLGSQDETFRNMXSPQQLHKKGSSSPKASQPRWRSADLXERLPHGFYAVIGGTKLKPLFHSIXDLXELHSVVQNGFNRNNSFQSLRKNMSKSSLVLFSMRFVHSFNSTQLSIIKKIAGLVSDFYKRPNVESPAKAALDESSHMFENRGVQMLGQIKHGSCRPRAILFKVLADTVGLESRLMVGLPNDGAIECQDSYKHMSVIVVLNSVEMLVDLMRFPGQLLPRSTKAVFMTHISAGESDSAENDSCDSPLEPNTXMNVVHRDLKSANCLVNKHWTVKICDFGLSRIMTESPMIDSSSAGTPEWMAPELIRNEPFTEKCDIFSLGVIMWEHCTLNRPWEGVPPERVVYSVAHEGSRLEIPEGPLGRLISECWAECHQRPSCEEILXSFGDHIVRPVRAMNDTLIEKRGLRERGDDNSFPNSPNNSSSDANLQKNVSNFHLDGHDERSALYSFQRDQGASQKAMSLPSSPHDYGGQASERSGSSRYGVNDEMESTWNKVLESPMFNNKPLLPYEKWNIDFSELTVGTRVGIGFFGEVFRGIWNGTDVAIKVFLEQDLTAENMEDFCNEISILSRLRHPNVILFLGACTKPPRLSMVTEYMELGSLYYLIHLNGQKKKLNWRRRLRMLRDICKGLMCIHRMKVVHRDLKSANCLVNKHWTVKICDFGLSRIMTESPMRDSSSAGTPEWMAPELIRNEPFTEKCDIFSLGVIMWELCTLNRPWEGVPPERVVYSVANEGSRLEIPEGPLGRLISECWAECHERPSCEEILSRLVDIEYSLC

SEQ ID NO: 171574 - protein, 43 aa, Glycine max
  Clone ID: PAT_MRT3847_125947C.1.pep
HHIISTLISLSYLTPYVLINIPLTIPTTTLLSSLILFQHLSAY

SEQ ID NO: 171575 - protein, 42 aa, Glycine max
  Clone ID: PAT_MRT3847_125948C.1.pep
KYIFTTLRLFNLIQYMCQLMKAKSYETIELIIYCLYHFSLLL

SEQ ID NO: 171576 - protein, 216 aa, Glycine max
  Clone ID: PAT_MRT3847_125949C.1.pep
KKKANDHPSKEGSKPYSRFEVVAAHIWRCATMARAESGENSNQPILVRFSVNFRNRLKPPLPQNYFGNALAKVATPECYEGDIISNPLGFAAQKIREASHAITEDFLRSQLNVGLGKWQLDNIRAFFMSQRHLINTPSAGDHNIFLTSLMTMPVYESDFGWGKPVHYGLASLFQVNRAGILPSPDGDGVIVNIFFQEALMQLFKKLFYEDLYVSSL

SEQ ID NO: 171577 - protein, 153 aa, Glycine max
  Clone ID: PAT_MRT3847_12594C.1.pep
MKNWRRDSDILPVTVSDGKRTMKKIFDPQEPLLQKWNKIFVIMCILSVALDPLFFYIPVINEDKKCLHLDGASKITVCVCVLRTFFDLFYILRIIFQFKTGFKTPFSRVFGRDELIHDPVPIMKRYLTSHFIIDILSIIPLPQFPWTKPQNKY

SEQ ID NO: 171578 - protein, 84 aa, Glycine max
  Clone ID: PAT_MRT3847_125950C.1.pep
QQTTELSERLSRLLTTAGESWLPQRTIDCNSGQSWRPVPCSAVMCRHNEGTTSSRAPVLLTIRHLGQATLGCAIMTRRLLGAGR

SEQ ID NO: 171579 - protein, 44 aa, Glycine max
  Clone ID: PAT_MRT3847_125951C.1.pep
SRDSLEGAAFLFFFFFYRRSIRYISGKGLIAYILARETSWQASR

SEQ ID NO: 171580 - protein, 77 aa, Glycine max
  Clone ID: PAT_MRT3847_125952C.1.pep
KAKKKPSPPPQKFKPKPKKVKLAPPQFNKVANPAKVQRPPKKTPPPKLGPGTFMPNPFNPPNFAKGGFPYFYQKLKA

SEQ ID NO: 171581 - protein, 93 aa, Glycine max
  Clone ID: PAT_MRT3847_125953C.1.pep
AQYRAINEGACELIWINRLLGEDLSIPIQGPLKLFSDSNSGKGLVHNPIEHDRMNHGRIERNFIKSEIENGAFAEDYIPTRIGERGWAHKGAC

SEQ ID NO: 171582 - protein, 68 aa, Glycine max
  Clone ID: PAT_MRT3847_125954C.1.pep
SKHLRKVDPLEPEVLDDMPRKPFQACMVDQFEVTAPCVNSPICYLFLKLIGNDDWRPGFAQIQVLEGS

SEQ ID NO: 171583 - protein, 77 aa, Glycine max
  unsure (1)..(77): unsure at all Xaa locations
  Clone ID: PAT_MRT3847_125955C.1.pep
PPPPPPAPAPPPPPPPPPPPHPXRTPQRASCPATEKGLSSSASSILQVEQAYRRPQQKVQRHESVTFPLTLLVMLNH

SEQ ID NO: 171584 - protein, 420 aa, Glycine max
  Clone ID: PAT_MRT3847_125956C.1.pep
INKRDSLAGRRRDSIVERGSKMFDPKRPKGLAISLEQTLQEEHKKLEVFAFPSATHIVRTEEKIEDRRGEKEEVISINEGLMSELEGLTEKLNTSTSELYNLMEEISALKQRLEESDINQEKLKSSVEVLMEEKEELAMQLTDSLLEIEEERAIWSAKEKDALLAIEEQAKSNNVQITSLSTKLLEVRNELESCREECKTLRERLTITYENAHIKENSREKVSELDHLENHPETTNAESKQSQEMSKANSEMQSLEHELHDSPKEEKENELRKEIHVLDKGDNLSSPNVFQNLKDKQSVVTKERDKLMIEMEDQHKRMEFLQKNCQDELSKAKVHIEELNWKLSDMEAKMPVGGLKNNKEMAKLRMRLRGTQAKLDSFRCRYKEAIDESVLTNKKYKDQLASKGLEVLNLMKQLAAAKGQ

SEQ ID NO: 171585 - protein, 54 aa, Glycine max
  Clone ID: PAT_MRT3847_125957C.1.pep
LQSPRVCLNCNLFGVCLNYSCKGGIYFPIMSFVNRSSIEKFYLSLPGCRSSIVC

SEQ ID NO: 171586 - protein, 82 aa, Glycine max
  Clone ID: PAT_MRT3847_125958C.1.pep
VSFSHFHKHLSLSVKEPKNFGLFYFGALSNFDRLKCALLIYQIMIRIRFNLTLFSVELSRISHSSLTVTHSHKVEHPLMSAT

SEQ ID NO: 171587 - protein, 85 aa, Glycine max
  unsure (1)..(85): unsure at all Xaa locations
  Clone ID: PAT_MRT3847_125959C.1.pep
ILTYQASEDVVYNGYRSACESTCAEDSLMGFAAWEPSHGRYKMLRYPWENYVXKVNEALRHCAYIVVDVHGCKLSQIQAPSEKTR

SEQ ID NO: 171588 - protein, 65 aa, Glycine max
  Clone ID: PAT_MRT3847_12595C.1.pep
AELNSAVVIILSTGLSVFLGRLVFFDCQMDNIANRVPDRSDLTHFEGGDTHAKEYVILVRFSEPV

SEQ ID NO: 171589 - protein, 45 aa, Glycine max
  Clone ID: PAT_MRT3847_125960C.1.pep
KELTGKLFQEISNLGHAAKIKSSPETKKKNAATVFSLNNVLAKLG

SEQ ID NO: 171590 - protein, 74 aa, Glycine max
  unsure (1)..(74): unsure at all Xaa locations
  Clone ID: PAT_MRT3847_125961C.1.pep
MGFMNIEXDMNPIDXXIAHLLFHRPLDPSMLPHNDPLPFKSSSMLHGSVINPAVEVTEKQVFQEESFTGLEKSS

SEQ ID NO: 171591 - protein, 45 aa, Glycine max
  Clone ID: PAT_MRT3847_125962C.1.pep
KDGKQLARKGKLRKSSHWVSNKCCHDLKEASRGIIYSSRYNLNRK

SEQ ID NO: 171592 - protein, 86 aa, Glycine max
  Clone ID: PAT_MRT3847_125963C.1.pep
YSSLRYPCLFASLRSHLVSSLPPWCSISVPTYCIRRLLSSRAYLVSPRCGTIPHVLLSAILCPLFLYPPPPPKEGGRHTVMTGNLP

SEQ ID NO: 171593 - protein, 92 aa, Glycine max
  unsure (1)..(92): unsure at all Xaa locations
  Clone ID: PAT_MRT3847_125964C.1.pep
LQHFFPFSSNLVFPPKPNPXSHXHTQADXISFTVAESSADFTTLVSDSPKHVTLLHPFVPVLPPPRTLHDGTFLIPLMGIQVMLYPIWFTIC

SEQ ID NO: 171594 - protein, 45 aa, Glycine max
  Clone ID: PAT_MRT3847_125965C.1.pep
KCRVCSLDYLHVGICCHSIPCMYAREQMNRQGSSRTSATLVVRVG

SEQ ID NO: 171595 - protein, 198 aa, Glycine max
  unsure (1)..(198): unsure at all Xaa locations
  Clone ID: PAT_MRT3847_125966C.1.pep
EDEETRKQRGKGNVDQWLQMXLENGXQQEGTDPQETSENASCGTEEKIIQQLNQKFPQKELKISKVSDSDYKEKQLQLLQDRNGWTEKEDRIENEARNIIPTGYKNYSGEACIGEGNCTPNVEGMERKEQHKKEKRLPRSESARSLRRIPSSPSLLLGIKKGVDYIWKKPTASDDADLAASNSFLRSSIKTIKKGVKL

SEQ ID NO: 171596 - protein, 298 aa, Glycine max
  Clone ID: PAT_MRT3847_125967C.1.pep
MKPPTKPISSPGRTEKFPPPLMRFLRNNASSRSRGRSRTTTAMFLRKKNTNNIETQEPSSPKVTCMGQVRVKRSASKRVPSAGAGTPTKFRCCSWVPHALFFHRLIKPEVCFPFQCKQVWPNWRFLQRKKRDSKVTETSSPKTELNFRGRFNPNYDDSEHKDRVIVNPPAFVSNTSSTPPRNALLLTRCRSAPGRRFLNEETEVVEKNRVNREHSENNRDRKLEAKLRFFKELEESLRERIIMESEKAREESDSVHPLVLTRCKSEPARTAQKLDPEMNGLSKKTTLGFAHAWFSHGL

SEQ ID NO: 171597 - protein, 103 aa, Glycine max
  unsure (1)..(103): unsure at all Xaa locations
  Clone ID: PAT_MRT3847_125968C.1.pep
HILQELMDSPNDPPPSCITPPVPDDMFHXQATIMGPADNPYAGGVFLITTTYPTDYPYKPPTVASYTKVYYPNIHISRNIHLDLIKETVSDALTITNVQLLMW

SEQ ID NO: 171598 - protein, 36 aa, Glycine max
  Clone ID: PAT_MRT3847_125969C.1.pep
LFTIHPQPLTMNLFTNIMRLKYAPMEAPILTSLYNS

SEQ ID NO: 171599 - protein, 71 aa, Glycine max
  unsure (1)..(71): unsure at all Xaa locations
  Clone ID: PAT_MRT3847_12596C.1.pep
FLPAFFEAFGNPSAYVSQTLVFCLVDIXITPGEAFFPYLEGLSRPPLKLVPLFANRFSPARAGKSIFSPPD

SEQ ID NO: 171600 - protein, 54 aa, Glycine max
  Clone ID: PAT_MRT3847_125970C.1.pep
AISLWKISNLDININIYMKIKNLRIYMTYVWLVRSRTYYILLFTLVTEGIIFSQ

SEQ ID NO: 171601 - protein, 233 aa, Glycine max
  Clone ID: PAT_MRT3847_125971C.1.pep
TLATTTTAFSHGHKLLLHGFHQIIHARLEWRKKKRSEKPESILGRSAFLVSAQQQSDVKEAESVKVEEEKEQEQMQTQTPKPKGTTPRPVEPQLNVKSKNMLREYGGQWLSCATRHVRIYAAYIDPVTCEFDQTQMDKLTLILDPTDEFVWNTETCNMVYSYFQELVDHYEGAPLTEYTLRLIGSDIEHYIRKMLYDGAIKYNMNARVLNFSMGKPRIMFNNNDIQPEDAIEK

SEQ ID NO: 171602 - protein, 359 aa, Glycine max
  Clone ID: PAT_MRT3847_125972C.1.pep
MGREVTGIQVMEKKPNGAIAASNGSLSDRMRVSPKIAAMVQAMDHEIKESAEANSFEKHHERKDSLSAKNTKLNAGLPEEENEKSDQVPSPSAPQPSDQVTEKHVTHAQAVDTEADASGVNLSPKSNNIQSPNSSKNSEPSSPFSPRKSLHHDDKKHHDDEDNWSVASSRLLQQGVASARTAKSKVTVGSAPTFRCSDRAEKRREFYLKLEEKHRALEEEKNHYEARKKEEEDAAIKQLRKNLVVKAKPVPSFYYEGPPPKTELKKLPLTRPKSPKLSRRRSCGDAAGISPEISTRGRHSVGNNPKHGSLVPPKNKDLVTGRNSNGSSKTKERPKLDKETKTAPPKITEQTNADISVQS

SEQ ID NO: 171603 - protein, 191 aa, Glycine max
  Clone ID: PAT_MRT3847_125973C.1.pep
LVCSSSSVALTTLVISEESVVWFLTFRCYCHLDKPIQIYLKLEEKHRALEEEKNQYEARKKEEEDAAIKQLRKNLVVKAKPVPSFYYEGPPPKTELKKLPLTRPKSPKLSRRRSCGDAAGISPEISTRGRHSVGNNPKHGSLVPPKNKDLVTGRNSNGSSKTKERPKLDKETKTAPPKITEQTNADISVQS

SEQ ID NO: 171604 - protein, 54 aa, Glycine max
  Clone ID: PAT_MRT3847_125974C.1.pep
VRHLMVDHACPIWFSLCFSLLISLTVHARFVSFSFLAMLSSHDFSLHSIHPTVI

SEQ ID NO: 171605 - protein, 67 aa, Glycine max
  unsure (1)..(67): unsure at all Xaa locations
  Clone ID: PAT_MRT3847_125975C.1.pep
RCHHGHSDSLSWHRGKEWIYDHXGLTTPDSDYGWIDNSHHEIATQVIHPLYPXILHHHIFEATEASK

SEQ ID NO: 171606 - protein, 68 aa, Glycine max
  unsure (1)..(68): unsure at all Xaa locations
  Clone ID: PAT_MRT3847_125976C.1.pep
HGSWSAEGRKALTQRAGEFLLXVEQDLDALANECSSLLEGYISHLPAQHXCDLKCCILRLTLTSYIGL

SEQ ID NO: 171607 - protein, 72 aa, Glycine max
  Clone ID: PAT_MRT3847_125977C.1.pep
QPLFFSNKFFFHKKHQFYTSSSQKPKTPTHADFIVLDEIFFTFPLGFLVAFIYKRNNVKYFIQVHIINNLLP

SEQ ID NO: 171608 - protein, 47 aa, Glycine max
  Clone ID: PAT_MRT3847_125978C.1.pep
PVKKFFLLFIASPIIYFSCKLYANIAQNSACHCVYTAQSSVIEAILL

SEQ ID NO: 171609 - protein, 175 aa, Glycine max
  unsure (1)..(175): unsure at all Xaa locations
  Clone ID: PAT_MRT3847_125979C.1.pep
MSTLPSSTFPNSNLSLSTSLSSQKLPLFHTLFPKPLPFPHLRIQTPPPFLPPLLCKSPEGTEADEAAPPPEEDEWLQKLPEKSKPSYSHSLPCIEASLRSLGSGQSKEDRALSVGTGPXWVGAKPDWHAELFLDLTDLYIRYLKSGPGNLEKNMERRFSYALSREDIENAVLGGP

SEQ ID NO: 171610 - protein, 88 aa, Glycine max
  Clone ID: PAT_MRT3847_12597C.1.pep
MATSIFSIVLSVSLAFFLVLLRKAHSSDTVSCTFNKFNPVQPNSMLQKDASTSSSGVLQLTKVGSKGVSTSGSLGRALYAASIEIWDS

SEQ ID NO: 171611 - protein, 109 aa, Glycine max
  Clone ID: PAT_MRT3847_125980C.1.pep
VDLAYRPHTGVRLEFRTIASHQALKSPIESNNVQLTSTRQKTRQQGDKSFAIEVPRFRRRIHNQTCQSDTPPLVSTNCNARLLPPADTSTKLAALATPSMNTDTKPPNQ

SEQ ID NO: 171612 - protein, 113 aa, Glycine max
  Clone ID: PAT_MRT3847_125981C.1.pep
EWRYTKQFMRGEQRRCQTKFVQATFPKKNIFFVAMALSLFSSARLRDLDDLSVCKNKISHIFSWAGLQTTYFTTNMNSPNDVQDSNANSNQKTYSIRRALKKTIVQLYSSNKL

SEQ ID NO: 171613 - protein, 149 aa, Glycine max
  Clone ID: PAT_MRT3847_125982C.1.pep
LSSFFFFFFFFFFFLFFFGFCGSFLVVLPFLLIVKETPARLKKRNRPGKRDTPKRGRPGGPPQKTKSDCQNAQTAGENKQAGGKRLEKPLRKKKLPRAQKGGGGLQPKNFPGPGGKQNVLPKPGAKRASLPGTNPAKTGDPFLGHQGKP

SEQ ID NO: 171614 - protein, 45 aa, Glycine max
  Clone ID: PAT_MRT3847_125983C.1.pep
TAARRRQKGRQSLLARATLVLTIGLLRVCFNRCPVGIRDGHLLLL

SEQ ID NO: 171615 - protein, 104 aa, Glycine max
  unsure (1)..(104): unsure at all Xaa locations
  Clone ID: PAT_MRT3847_125984C.1.pep
LFSLCSMLRPRVSYAWMVYPMTRVNCFTLLAXPLASNVMPLGVWATHMRLYYVAVPPRLHPLSTNALPYWRGQCPRSLHGWYYCWALPIAACIXVLTPCVAMPR

SEQ ID NO: 171616 - protein, 62 aa, Glycine max
  unsure (1)..(62): unsure at all Xaa locations
  Clone ID: PAT_MRT3847_125985C.1.pep
MAKDVEVAARGSFSGNDYHDPLPAPLIDAAELTXWSFYRARIAEFIATLLFLYIHVLTVIGY

SEQ ID NO: 171617 - protein, 51 aa, Glycine max
  Clone ID: PAT_MRT3847_125986C.1.pep
RSRRELHTPYLLKYAGSIWASWTTWGTTPSPGQGRKTCWEANETPDLEYAT

SEQ ID NO: 171618 - protein, 38 aa, Glycine max
  Clone ID: PAT_MRT3847_125987C.1.pep
YRVSPFLKERGPPILFYCFPFKANSRVTFFYFPLFQTD

SEQ ID NO: 171619 - protein, 108 aa, Glycine max
  Clone ID: PAT_MRT3847_125988C.1.pep
RTRPITQHDPVEDAKEKKPFDFMLNRRQKGSSSSSPAPSNPDLLAIPGVGPRNFRKLVQKGIAGVAQLKQLYKDKFFGKSSDKMVEYLQNSVGIIHKNHAESITTFIK

SEQ ID NO: 171620 - protein, 296 aa, Glycine max
  Clone ID: PAT_MRT3847_125989C.1.pep
MNSSLSGNGGSTTGAAENEDSCGIRVTGMQFSYDVQQPPLFLDFNLNVSPGSRCLLVGANGSGKTTLLKILAGKHMVGGRDVVRVLSGSAFHDTQLVCSGDLAYLGGSWSKNVGSAGEIPLQGDFSAEHMIFGVEGADPERRDKLIELLDIDLQWRMHKVSDGQRRRVQICLGLLHPYKVLLLDEVTVDLDVVTRMDLLDFFKEECEQREAIIVYATHIFDGLETWATHLAYIQDGELRRAEKISNVKELKSSTNLLSVVEAWLRAETKLEKKNPVQKTSVASSPFFSSRHMAYYR

SEQ ID NO: 171621 - protein, 333 aa, Glycine max
  Clone ID: PAT_MRT3847_12598C.1.pep
MGLIDLNTTEDDEAAPLSASSSHSGISTSASTLVVSPPPSVCLELWHACAGPLISLPKRGSVVVYLPQGHFEHVQDFPVNAFDIPPHVFCRVLDVKLHAEEGSDEVYCQVLLVPESEQVEHSLREGEIVADGEEEDTGATVKSTTPHMFCKTLTASDTSTHGGFSVPRRAAEDCFPPLDYSQQRPSQELVAKDLHGLEWRFRHIYRGQPRRHLLTTGWSAFVNKKKLVSGDAVLFLRGNDGELRLGIRRAAQLKWAGSFAVPSGQQLNPATLMDVVNALSTRCAFSVCYNPRYFSLYSLVPSPGVIEGNLLMSVPVHSYYGVFSVCIRWGWGF

SEQ ID NO: 171622 - protein, 121 aa, Glycine max
  unsure (1)..(121): unsure at all Xaa locations
  Clone ID: PAT_MRT3847_125990C.1.pep
VIAHSAYGGIXGPLPLPYDGTPPSDLKKEWFKIGLPANPKVGLQHLHAPSPEVCSLFKKNXVDVSHGNLLTGPFVRNGFLNNTRSLPGGFYDSVYGSFELLGPSCKRLHPAFYRININHFQ

SEQ ID NO: 171623 - protein, 49 aa, Glycine max
  Clone ID: PAT_MRT3847_125991C.1.pep
RNSPVKISLCIVWKMKINNPIDCLKVYSYSQKDQCKKNLEKNDCGSPLM

SEQ ID NO: 171624 - protein, 94 aa, Glycine max
  Clone ID: PAT_MRT3847_125992C.1.pep
MPPMVNAAGAGSSRISDMLYQVKAEYEAAIQQLNISKMEQLEMERKIQSQVVEMDQIQQTLKTLEANHRRIRQHYEEDMMRMRRQLEGQAAPGV

SEQ ID NO: 171625 - protein, 79 aa, Glycine max
  unsure (1)..(79): unsure at all Xaa locations
  Clone ID: PAT_MRT3847_125993C.1.pep
KGDLFAVIMLCVIIPTEWSVGVDLRKGPAVKIGDNENAMDGWFRLERVADEEFKNDELVXYPQHASDDRCGDVGMCDDQ

SEQ ID NO: 171626 - protein, 84 aa, Glycine max
  Clone ID: PAT_MRT3847_125994C.1.pep
NSDCDSSSEQSTTFKKIPFFHCPPSLCKTKNQKHLKNSLSVSHSSTTPPLLEIPFFSSSQPFQLVENFNFGIVSSLHVIWVCSI

SEQ ID NO: 171627 - protein, 57 aa, Glycine max
  Clone ID: PAT_MRT3847_125995C.1.pep
IFHSLGTLLIQLSGDSFNCLLHAPTFPSIDRCLCWGPLQRLLTSHDGDERAPTILLP

SEQ ID NO: 171628 - protein, 61 aa, Glycine max
  Clone ID: PAT_MRT3847_125996C.1.pep
VIRERKKSLKICYLTMHSFHIYIKANHIFNNTRPHTRPFGFEGLVTLRSMRTLSCDLIYFC

SEQ ID NO: 171629 - protein, 121 aa, Glycine max
  Clone ID: PAT_MRT3847_125997C.1.pep
MGKRKERRRLAAISNAGRRVKLDLFAEPSGELGGSTLQGDAGGDTDSQHRDGLPNSPSSSGQQPQNPLLLLGQYSDDEGDDGSSKGLNDANVQSPMLNEEVFYYLHLYSVKTLILSCQICI

SEQ ID NO: 171630 - protein, 275 aa, Glycine max
  unsure (1)..(275): unsure at all Xaa locations
  Clone ID: PAT_MRT3847_125998C.1.pep
MADDLFEGLPPPSSSTLILPQQQQQQQHNHEPILVATNNNNPESSAVPAPKPILKSALKRPNPTQPDTQAAAPKKSLKFKTTTDASEAQVIEAMQKITSHIKNPAKFSKAAKLAIQLIQAGSVKSEISDYFFAILEAAMSSSINSTDPSVRADYHSLFSVAQNTKEHLNKKQKNQLATWTINAVVANDLYTDDSFXELRSAGQIKEAISNLPVATEEEDAEEAKSLKDSTVIVDEGGKTPATDNDNDGEEAQADPXGLDALIPNSTXKGGKIKAK

SEQ ID NO: 171631 - protein, 34 aa, Glycine max
  Clone ID: PAT_MRT3847_125999C.1.pep
PKLNYLGWTLYKALPIPLGADDSMKAYNIKISHH

SEQ ID NO: 171632 - protein, 113 aa, Glycine max
  Clone ID: PAT_MRT3847_12599C.1.pep
MGLIDLNTTEDDEAAPLSASSPASYSSSSSHSGISTSASTLVVPPTPPSVCLELWHACAGPLISLPKKGSVVVYLPQGHFEHVQDFPVTAYDIPPHVFCRVLDVKLHAEEGSD

SEQ ID NO: 171633 - protein, 185 aa, Glycine max
  Clone ID: PAT_MRT3847_1259C.1.pep
LVPNFGTRLWWMTGLKMKILLGSFDDEVKEIVELSTEDAYGMAMKSMLRWVRLNMDPKKTRVFFTSMSPSHGKSIDWGGEPGGNCYNETTLIDDPTYWGSDCRKSIMEVIGGVFSKSKVPITFLNITQLSNYRRDAHTSIYKKQWSPLTPEQLANPVRYADCVHWCLPGLQDTWNEPLYAKLFYP

SEQ ID NO: 171634 - protein, 42 aa, Glycine max
  Clone ID: PAT_MRT3847_125C.1.pep
LLPMQVRSPLVFQVAMSTMNLRLVNGAAIQAPALLSLAPADK

SEQ ID NO: 171635 - protein, 52 aa, Glycine max
  Clone ID: PAT_MRT3847_126000C.1.pep
NSEQLIMTYVTLIILLRKLHNGIQGHMIVTWIAVSCKGKRLYTHDRYRRLIV

SEQ ID NO: 171636 - protein, 65 aa, Glycine max
  unsure (1)..(65): unsure at all Xaa locations
  Clone ID: PAT_MRT3847_126001C.1.pep
LMSAESIHGRFQPLANKAMVESEGAPFQKFATXRDQWALKQKYNSPGPIQFSGPGFHAIDHTLPV

SEQ ID NO: 171637 - protein, 121 aa, Glycine max
  Clone ID: PAT_MRT3847_126002C.1.pep
KGKVKNGDGEQKKENKEKEKKKGKKAKDVEPVTLKVKGQNVVGEVDEENKRNKSKDKKEKEKDRKKAKKEDVKEEGEKEKSKVEVSVRDIDIEETSKEGDKVDKEKDDGKEDDGEVNEEKE

SEQ ID NO: 171638 - protein, 55 aa, Glycine max
  Clone ID: PAT_MRT3847_126003C.1.pep
MTQESFLVTSESANEVHPDKLRDQISDAVPDACLEQDPDSKFACETDHRPHGDGL

SEQ ID NO: 171639 - protein, 152 aa, Glycine max
  Clone ID: PAT_MRT3847_126004C.1.pep
SARVQNPIENGQHTNSTLIDVKIMNQRSHILYEQLKGFVQRMDMNVVKKDLPPKTVFVITVKLSPLQRKLYKRFLDVHGFTTQVHPEMLRKRCFFAGYQALARIWNHPGILQLTKEVKDYVKHEDAVENFLVDDSYSDENSDYNVLAGGKSS

SEQ ID NO: 171640 - protein, 82 aa, Glycine max
  unsure (1)..(82): unsure at all Xaa locations
  Clone ID: PAT_MRT3847_126005C.1.pep
KNYIINFILEDKKXKKKKXXXXXXXXPXXRXXXPAXXLXXXXFPXXXXXXXXXETRXXAVPXVXXXXAXXXXXXXXXKXXGX

SEQ ID NO: 171641 - protein, 200 aa, Glycine max
  unsure (1)..(200): unsure at all Xaa locations
  Clone ID: PAT_MRT3847_126006C.1.pep
XKIXXXKEKYXXRSXKMGKXXEWKGSPCRQGGNARGPRSIRSWQKSEAKVDVITGERDTPKDVMEEAAGIFVQEEINEGEMEAAALNASSSERSGYEDDVYQEIGDEYDYLVDNNDGYQGVFSGKSENLLHGSHYNVVGKEDMDIDDNVDDDDDDNGKIDLDVEGYIIGGNSDARDRKEENAEQNMDLDGVGSTSSDYSD

SEQ ID NO: 171642 - protein, 64 aa, Glycine max
  Clone ID: PAT_MRT3847_126007C.1.pep
NPTPYTLSHTTCPPNGDPVASYRHTQVKASFNNAGMSNTLYTVKQDPVEDPKNHKSQAIEATLG

SEQ ID NO: 171643 - protein, 287 aa, Glycine max
  unsure (1)..(287): unsure at all Xaa locations
  Clone ID: PAT_MRT3847_126008C.1.pep
MEPEVSIEGSAMIQVAVVPIGAVPANVLRDYYSMLLPLHTIPLSAISSFYTEHQKSPFAVQPWDSGSLRFKFVLGGAPPSPWEDFQSHRKTLAIVGVVHCPSSPDLEAVVDVFASACKSFPSSLVDRCFAFCPNDTQLEDGSKKGGNLXLFPPADRPTLEFHLNTMMQEIAASLLMEFEKWVLQAESSGTILKTPLDSQASLSSEEVIKAKKRRLGRAQKTIGDYCLLAGSPVDANAHYSTALELXRGVTGXYFWYAGALEGVVVCAXLLIDRMGQKDSVLEDEVRY

SEQ ID NO: 171644 - protein, 68 aa, Glycine max
  Clone ID: PAT_MRT3847_126009C.1.pep
HASDEFELTQRFASLDFKLKFVEHNIRFLQEILQNRKSDFLEWLIIALIGAEILLSLYDIVHRSAMKF

SEQ ID NO: 171645 - protein, 382 aa, Glycine max
  Clone ID: PAT_MRT3847_12600C.1.pep
MPISQLCPNIHSVPQIVACTRNDKTGSKSVSGRPKVSPQLNRWSRARAVRFGQKLDRSSMRTQLPEPNPPARPLPLPVDPDGAVNLDGADVTAVKSIYIVSDGTGWTAEHCVNAALGQFDYCLVDRGCPVSTHLFSGIDDTEKLLEITKQAAKEGAFLVYTLADPSLASTAKQACKLWGVPYTDVLGPITEAIASHLGVSPSGLPRGASGLPLSDDYFRRIEAVEFTIKQDDGACPQNLAKADIVLTGVSRTGKTPLSIYLSQKGYKVANVPIVLGVGVPRTLFEVDPKKVFGLTINPLILQNIRRTRAKTMGLSSDGSSNYSEMNYVREELEFAGRLFAQSPLWPVIDVTGKAIEETAAVVLRLYHDRKHKCIMPRISKRY

SEQ ID NO: 171646 - protein, 46 aa, Glycine max
  Clone ID: PAT_MRT3847_126010C.1.pep
ICRPTITIRGRLLAKPPIFLRWSLKLKCFDTFYYPLLSSSRSRRTP

SEQ ID NO: 171647 - protein, 48 aa, Glycine max
  Clone ID: PAT_MRT3847_126011C.1.pep
KKLFKKKKKKKKGANKKKIKKKKKKNKKKKKEKKKKKKKKKKKGAPPP

SEQ ID NO: 171648 - protein, 53 aa, Glycine max
  Clone ID: PAT_MRT3847_126012C.1.pep
YGCEKTTEGFPRKGWLYNIGLSNLGYHLEKIWDESGEDPDCNKSVTGNNIGEH

SEQ ID NO: 171649 - protein, 28 aa, Glycine max
  Clone ID: PAT_MRT3847_126013C.1.pep
MLAPLSDQIARDEVGYDGLLFSRAVSAR

SEQ ID NO: 171650 - protein, 305 aa, Glycine max
  Clone ID: PAT_MRT3847_126014C.1.pep
MGCFFACFRARDTSAAATTATVPSSRSSKRKPNDVAVSRNRLSTLFLSEEREDSVMRDDGKSIEVGSLKGDSEAKFLKAGGTLARTPLEKSHLVGQPFNPSTPVKCCEEGGERTDSLEQTPSSCISNALSTQCDTLDSTEGIRTGSLHSLDKNDKNTASVSPWPSTTYTRRNKSIGFECDSDLSSCDSSDYGGRHMKKTDSLNNESTYKPSPNPTPMKLSDEMQTPGTAYPSAKDLPNGKPRVKSQFVYPIYNPGHHFSQKKFEESESVEPSQVTTSTSEKELKKMSCENECKVEESLSLFEPAA

SEQ ID NO: 171651 - protein, 68 aa, Glycine max
  Clone ID: PAT_MRT3847_126015C.1.pep
RRKFSLMLAKKEIEEDFMRMVGHRPPRRPKKRPRNVQKQLDTLFPGQWLSEVCADSYKVPDDAGFCKR

SEQ ID NO: 171652 - protein, 55 aa, Glycine max
  Clone ID: PAT_MRT3847_126016C.1.pep
LVGILKKIFGGVDVGLNFAPNHCSPATYLRVNRKLGRECYMANFIKAVFFVSILF

SEQ ID NO: 171653 - protein, 62 aa, Glycine max
  Clone ID: PAT_MRT3847_126017C.1.pep
AVRTDVHYGVWSSRNALIYARLNPLRKLGSSPRSCNRVAANRAKHYPKVRDHTFQFSDSFLI

SEQ ID NO: 171654 - protein, 85 aa, Glycine max
  Clone ID: PAT_MRT3847_126018C.1.pep
RFVQAQFRTHPLGRPQDLPPPPVDDRGSFSSIGAVINSESQLDTAAEIGSMVSPSSPWSRRGNDASRVSHVDSVDCRAPRRIRGP

SEQ ID NO: 171655 - protein, 174 aa, Glycine max
  Clone ID: PAT_MRT3847_126019C.1.pep
VCVIPVGWLVVTPALALVKVSISLLPAFVYMLVYNNLYHLLLNQNPPEQAFFPHCLKERKKMAPSGRTTTASTRTTSKTTRRTRQQRRTTNFKKKQQQQHNTKSNNNKKQQEEVPVPTVLPSSYCSSSSISSQDSSNSKEVDNMHGSAEVIDVCNSPCSTPKGKKFRIPEISHA

SEQ ID NO: 171656 - protein, 79 aa, Glycine max
  Clone ID: PAT_MRT3847_12601C.1.pep
ATLRYDAVASLSSTTYGAANPSNLRCHTGPICLHARTLWIGDLRSGQDDQLLFTPCFADTGEAQADGETRSRHAKLDAR

SEQ ID NO: 171657 - protein, 78 aa, Glycine max
  unsure (1)..(78): unsure at all Xaa locations
  Clone ID: PAT_MRT3847_126020C.1.pep
RLESGSRHVVGXRSTVDKETLPARTIVVLAMTMFRIMRAALRAVAPVVHNMXHEAAGNISYSPVRRLSAQLTAMRESI

SEQ ID NO: 171658 - protein, 83 aa, Glycine max
  unsure (1)..(83): unsure at all Xaa locations
  Clone ID: PAT_MRT3847_126021C.1.pep
SKMTSPYIKCTVSFFIAFGNLADDTXLPGXASKLMVSSAKFEAFPXKLXQXGEXQXKVVLRFXQEEFLTAWSXQARPATXLLA

SEQ ID NO: 171659 - protein, 150 aa, Glycine max
  Clone ID: PAT_MRT3847_126022C.1.pep
QEEELTGGFNEIMTKEKKSNKNTKSISRGKRLNKEKNFHYTEESDEEKQDCSGRLSEDRESVPQGSSEEREVDESSGALRENINGQEFDSEGHHDNSKADRSPREMEKSHIEPSKSPDDDDDDTIAEISDDVPRSKWRHRKGKRSTSKEQ

SEQ ID NO: 171660 - protein, 154 aa, Glycine max
  Clone ID: PAT_MRT3847_126023C.1.pep
SIFGEAPATRSTLHNVHLLEVYPHRRSSTPHPVTIPPRSSSLSPPPAEKRAVSVPGEYPLDAGEEALRGSWVMISPNEGASSFKTPSARSHARKSHAPRRVVHRRSPSRRTLIPHPPFSAPAKPRESPVSVETQRYLAKQRRLEREEDPSLQRL

SEQ ID NO: 171661 - protein, 151 aa, Glycine max
  Clone ID: PAT_MRT3847_126024C.1.pep
MGSEEENGEFYLRYYVGHKGKFGHEFLEFEFRPDGKLRYANNSNYKNDTIIRKEVYLTPAVLRECRRIISESEIMKEDDNNWPEPDRVGRQELEIVMGNEHISFTTSKIGSLVDVQSSADPEGLRIFYYLVQDLKCFVFSLISLHFKIKPI

SEQ ID NO: 171662 - protein, 151 aa, Glycine max
  Clone ID: PAT_MRT3847_126025C.1.pep
MGSEEQNGEFYLRYYVGHKGKFGHEFLEFEFRPDGKLRYANNSNYKNDTIIRKEVYLTPAVLRECRRIIAESEIMKEDDNNWPEPDRVGRQELEIVMGNEHISFTTSKIGSLVDVQSSADPEGLRIFYYLVQDLKCFVFSLISLHFKIKPI

SEQ ID NO: 171663 - protein, 441 aa, Glycine max
  Clone ID: PAT_MRT3847_126026C.1.pep
GSRKMGWSRGRSIKDSHSEALYDARRQARRAFLAFSSDDPKLKITGSEPIEGDVEIFPEEPVNGDAQFSKSTPVYVLNPKQDLHGLGFDPYKHAPEFREKKRSRLASKGGGPGYSKNFSTRDSLFGLKSGKAAPGFGIGALEELDVEDEDVYATGYEFEDAYVQEVEEPSTLRLENQRTKEQKDQGDLRGFRVASNSDFKMERFEAPLIPKDFVPHHEFSGPLNINRKSCEVTPPDVPPPGDGNLKLLIEGVANLVAKCGKLYEDLSREKNQSNPLFNFLSGGTGHEYYARKLWEAQQKHKTSRQLDGKMPPSVQRLTAESRGQILGEKPLEKSSQDLSSSVSSTDIHLQFNLTDTFTESASLSELVNVEKPFKDDPTKQERFEQFLKEKYKGGLRSASSSLASDMSEAARAQERLSFEAAAEAIEKGRQGGSKPIPSSMD

SEQ ID NO: 171664 - protein, 72 aa, Glycine max
  Clone ID: PAT_MRT3847_126027C.1.pep
DDDVNRNCWCSRHHLLRHIIGPATVPGLDGPGIGDEPIAFFRGAVYLRYFGIKSPVDTASRIIVHPGRLLIS

SEQ ID NO: 171665 - protein, 128 aa, Glycine max
  Clone ID: PAT_MRT3847_126028C.1.pep
FTETCPFFFQGGTPPSLKNVWVLALEIGALHLSGLFLGLSPLPKRILFRILRFFSLTGEWCSFPIFTRSSFSISFVSIFFIFFAAKLACFFLPRGGFGCCFSHPFLFWIWERIPPFFLFVPGPPCFLN

SEQ ID NO: 171666 - protein, 70 aa, Glycine max
  Clone ID: PAT_MRT3847_126029C.1.pep
FSRGKQTSSLVNKKKRAQPSTHIYLGPTHCFWLLKNTFMFFLKAGNPPFLKGTKTLNPFFFFEGGVEKGK

SEQ ID NO: 171667 - protein, 238 aa, Glycine max
  Clone ID: PAT_MRT3847_12602C.1.pep
MGKEKVHINIVVIGHVDSGKSTTTGHLIYKLGGIDKRVIERFEKEAAEMNKRSFKYAWVLDKLKAERERGITIDIALWKFETTKYYCTVIDAPGHRDFIKNMITGTSQADCAVLIIDSTTGGFEAGISKDGQTREHALLAFTLGVKQMICCCNKMDATTPKYSKARYEEIVKEVSSYLKKVGYNPDKIPFVPISGFEGDNMIERSTNLDWYKGPTLLEALDQINEPKRPSDKPLRLPL

SEQ ID NO: 171668 - protein, 155 aa, Glycine max
  unsure (1)..(155): unsure at all Xaa locations
  Clone ID: PAT_MRT3847_126030C.1.pep
MGGGGPPPRGGAGCHTGAPGGGGPEPPPXEPAGPPPPQGPTLKQPPPPKGSHVVGPAAPPPPSLFDPPXLVGLTPFGPPHQKGFPANPPPTLRPPPPPPXVMKMTFQKQRRRGRFFFFCSPAENINPPPVTSAPPPTHPKEEIGGGPKPPPPRLF

SEQ ID NO: 171669 - protein, 92 aa, Glycine max
  Clone ID: PAT_MRT3847_126031C.1.pep
ECLFQGYPIKGKSFFNLLCPYKQFLFYSSFIIPCYDISCSSFIFSPISNCLFFNLTNWHQFGAGMVNPFLQEIDSPYMQDYRRAWLKSMPHN

SEQ ID NO: 171670 - protein, 40 aa, Glycine max
  Clone ID: PAT_MRT3847_126032C.1.pep
TLWPKHAIADRYFRTLLINRLIYLQQSEFLRVLHGLFQKH

SEQ ID NO: 171671 - protein, 184 aa, Glycine max
  Clone ID: PAT_MRT3847_126033C.1.pep
TEPDRARFRRIVPSRRRNSSPTPPPRKLGIRPEDLPFGEGDGGFHGGAPLTGGNGGERMKIGAYYEEMLRSNPTDALLLRNYGKFLHEVEKDTVRAEEFYGRAILANPGDGELLSLYGTLIWETQRDEDRAKSYFDQAIHAAPNDCTVLGSYAHFMWEAEEEEEEEEVNGGATEITATEMIVAF

SEQ ID NO: 171672 - protein, 68 aa, Glycine max
  Clone ID: PAT_MRT3847_126034C.1.pep
VLLYMIVITRSSSSVASSSPASEYVYSLSSKISYSVLSLSLRQSQQVLNILPAAHQLPRSDLYLFKHH

SEQ ID NO: 171673 - protein, 253 aa, Glycine max
  Clone ID: PAT_MRT3847_126035C.1.pep
MRASLIRTGSVPVQNTLLPASPRVSLTRQASFAAADKSLAHSPRLSMHSSHSNPRRFSSERDGENFGVRRDLNRTGSRSFPPIVPHEEEFLSDAAPRKLGIRPEDLRFGGGDGGDNGGTSLTGGNGREWMKIGAYYEEMLRSNPTDALLLRNYGKFLHEVEKDTARAEEYYGRAILANPGDGELLSLYGTLIWETQRDEDRAKSYFDQAIHAAPNDCTVLGSYAHFMWEAEEEEEVVNGGVTEITATEMIAAF

SEQ ID NO: 171674 - protein, 267 aa, Glycine max
  Clone ID: PAT_MRT3847_126036C.1.pep
MQHDEVIWQVIRHNHCSYMAKIATGNFCRNPYNVTGVCNRSSCPLANSRYATIRDDNGVFYLYMKTIERAHMPKDLWERVKLPRNYEKALEIIDKHLMYWPKLLIHKIKQRLTKMTQMRIRMRKLALKTREKIMTTPRKEKKREARREEKAEKAALLEKSIEKELLERLQKGVYQQSDIYNYPLEEYNKVLDMEKLQIADEEEDEEEPEVEYVEGYDELEEEEDMEDFGGFATLKSQGDFDDDENAESTDDEEEEAIDQSRAKRKMA

SEQ ID NO: 171675 - protein, 141 aa, Glycine max
  unsure (1)..(141): unsure at all Xaa locations
  Clone ID: PAT_MRT3847_126037C.1.pep
GSRRIEQRYCQMASPLLNRGVTAPMWPLKAIPDEAYKKDFLLYVIRHGLLSMSXPKPCCMTAXRNLKNYREPYKEXRNSLGTALIVKLKAYGRADAQKLVLDIDLGLGNHVTSPMFKRLIXRLTRTYWGLALHGRAPPVRV

SEQ ID NO: 171676 - protein, 79 aa, Glycine max
  unsure (1)..(79): unsure at all Xaa locations
  Clone ID: PAT_MRT3847_126038C.1.pep
MFRDVSSCNTYNYGEAGYWDARYIQEGGSFDWYQRYSALKPFVRKFIPSSSRILMVGCGNAVMSXDMVKDGYQDIGNID

SEQ ID NO: 171677 - protein, 133 aa, Glycine max
  Clone ID: PAT_MRT3847_126039C.1.pep
MEAARVGVAVEGGHGNKSNNVKMLQQPKNQQAQMGTVSQLLAGGLAGAFAKTCTAPLARLTILFQLHGMHFDVAALSKPSIWGEASRIVNEEGFRAFWKGNLVTIAHRLPYSSVSFYAYERYKNLLHMLLREK

SEQ ID NO: 171678 - protein, 72 aa, Glycine max
  unsure (1)..(72): unsure at all Xaa locations
  Clone ID: PAT_MRT3847_12603C.1.pep
PKRSAVVAINKWKEEGHEHARKYQLNRIVRELRKDKRYQHALEVCEWIXLQKDMKLVQGDYAVHLDLITKVR

SEQ ID NO: 171679 - protein, 76 aa, Glycine max
  Clone ID: PAT_MRT3847_126040C.1.pep
CYLGSSSYSNNFCFLAFPQQSITTTVSCTNVSHMFPSIFATNPSLRLHFLTIFLSLHVDQLIKVFAHYTQKKRERR

SEQ ID NO: 171680 - protein, 100 aa, Glycine max
  Clone ID: PAT_MRT3847_126041C.1.pep
LSFELFSIRYFQFSLLCCLFLIRSGLLGLNYRVTNKTHIICLTNVLRCILNRLIVLCFHFCHHFIFTLPSSLICCFSLLKYWLFVPTISAIYLCYLFTPY

SEQ ID NO: 171681 - protein, 61 aa, Glycine max
  Clone ID: PAT_MRT3847_126042C.1.pep
GPVRGTPQALPWRSGGSARGDDPCPLSLIADSHRFMCHFPGCTLSVCRLRRLPDKTTPQHH

SEQ ID NO: 171682 - protein, 57 aa, Glycine max
  Clone ID: PAT_MRT3847_126043C.1.pep
NNHDQVYIYAKSPLQVRNGCWTFLAWNIRKKMKSTRHESLGVDICKLVCRGNKKSFH

SEQ ID NO: 171683 - protein, 37 aa, Glycine max
  Clone ID: PAT_MRT3847_126044C.1.pep
RFGYKKLKWVVGEKADILGSGKSQVVLSAVLEKPVRV

SEQ ID NO: 171684 - protein, 75 aa, Glycine max
  Clone ID: PAT_MRT3847_126045C.1.pep
KVKQFQRLIRGCLCVSRSRMSLLVHIHSLGDSNNSRICKSKRHIKTIGIYEVLMILQGVPSIKCILLFLLSSESS

SEQ ID NO: 171685 - protein, 46 aa, Glycine max
  Clone ID: PAT_MRT3847_126046C.1.pep
RESQKKNGIIHLIKPCFSFFPNRGHVCTTTATDDAYATESIVRFSH

SEQ ID NO: 171686 - protein, 66 aa, Glycine max
  Clone ID: PAT_MRT3847_126047C.1.pep
CNTSNNHPAQSRFTHNSWRNQEESSPYWTPPAELNIMFSRYQHSSITQCTMLGLHQWRIIWYRHSY

SEQ ID NO: 171687 - protein, 57 aa, Glycine max
  Clone ID: PAT_MRT3847_126048C.1.pep
GRKKTPCQHYNKELSFLKMKTKKTLFQEIKVFGLIKITDKTTMKLCNFLKTIQLCSQ

SEQ ID NO: 171688 - protein, 306 aa, Glycine max
  Clone ID: PAT_MRT3847_126049C.1.pep
MLPSKDKELSVSARKLAATLWEINDLPPSRVKKEFEVDPMRGCGEKVRSREKKGVGLSRSGLLRPQMSDPSHGPASERMKGLEGGSCKRRVSRFSHQLLSGVYYLDALDAHSSANFIEEVENQLRSKKNRGKGTGDVRNRLKEARSGLSTSKKLLKVLSQMCLREQQASSMPLVLALGSELDRVCHQIDQLIHEQRSNQNDVEYVMKHFAEEKAAWKRRERERIHDAIKHVAEELAVENKLRRPTEGQNTLSFCQITRCYTVRNQGFAEIEREERLGVDLMRGFMNKVRGRHKKSVRLYRSGLLRA

SEQ ID NO: 171689 - protein, 120 aa, Glycine max
  unsure (1)..(120): unsure at all Xaa locations
  Clone ID: PAT_MRT3847_12604C.1.pep
GKSYPTVSAGYQIAGKKAKNRLRGFIADKRCAPVMLRLAXASAGTXDNGTNTGGPFGTIKHPAELAHSTDNGLDIADMLVEPLKAEFPMMSYADCYQMAGVRAGEVTDGPDVAIHAGRED

SEQ ID NO: 171690 - protein, 75 aa, Glycine max
  unsure (1)..(75): unsure at all Xaa locations
  Clone ID: PAT_MRT3847_126050C.1.pep
HVRCWGHIFRERMTVTSDKAFLLVIYATLPPAGPXLYNIILQIGDDGRDLFTMYYRYTIFGFHACPNCLCTLDTR

SEQ ID NO: 171691 - protein, 46 aa, Glycine max
  Clone ID: PAT_MRT3847_126051C.1.pep
NYSHKGFPPINGLHRLYRASGKNGIWTLSSMTIKARAAVEGDQLRG

SEQ ID NO: 171692 - protein, 63 aa, Glycine max
  Clone ID: PAT_MRT3847_126052C.1.pep
GLSLLHLAAVFNQTDIVFILMDSGASLEYRNAQGETPLDCAPATLQYKMRKKMEEGGAVDQSI

SEQ ID NO: 171693 - protein, 71 aa, Glycine max
  Clone ID: PAT_MRT3847_126053C.1.pep
SDLIGRPPEAPTTSAAYVMAITSGAPRCEKSQCFVSYPGPSSDSPIAEEVVLVLTTSICGVRHVSGIGDFI

SEQ ID NO: 171694 - protein, 113 aa, Glycine max
  unsure (1)..(113): unsure at all Xaa locations
  Clone ID: PAT_MRT3847_126054C.1.pep
VANELRVPLVSFAATDPTLSSLQFPFFVRTTQSDLYQMKAVAEIIDYYGWKEVIAIYVDDDYGRNGVAALDDELAARRCRISFKEGINSGTEVDRGEMTSXLVKVALMQTRVI

SEQ ID NO: 171695 - protein, 82 aa, Glycine max
  Clone ID: PAT_MRT3847_126055C.1.pep
TTRDLFLLSTTITSSFSILTHHTMTTSPTKSNHHFTFQNANLNHINLLDYKGNVLIIFNVTSQSPLTKINYTYLNHLFFKYK

SEQ ID NO: 171696 - protein, 157 aa, Glycine max
  unsure (1)..(157): unsure at all Xaa locations
  Clone ID: PAT_MRT3847_126056C.1.pep
HSVALDWTATPMLDVHVTISWCISSQVCVPITYSVLTPQNPYXQDRWXGQLSFPHGSGLSVKRMPLYIRGGAGANNAILMNIPNADLSXWRYSVGDHGLEASKTTAAYIKCTVLFLITFGNYADDTINFEAFPHKLVQFGESQETVALKFSPEESLT

SEQ ID NO: 171697 - protein, 47 aa, Glycine max
  Clone ID: PAT_MRT3847_126057C.1.pep
LYSASSTPRGCAITLFRLLNNADYTQLTWSYNISEFSALTSCLLAAH

SEQ ID NO: 171698 - protein, 37 aa, Glycine max
  Clone ID: PAT_MRT3847_126058C.1.pep
DAPCYQPLSSEGVAATHKESATLEQALAPAPLAHSPS

SEQ ID NO: 171699 - protein, 395 aa, Glycine max
  Clone ID: PAT_MRT3847_126059C.1.pep
MAKLVFSLCFLLFSGCCFAFSSREQPQQNECKIYNFREGDLIAVPTGVAWWMYNNEDTPVVAVSIIDTNSLENQLDQMPRRFYLAGNQEQEFLKYQQEQGGHQSQKGKHQQEEENEGGSILSGFTLEFLEHAFSVDKQIAKNLQGENEGEDKGAIVTVKGGLSVIKPPTDEQQQRPQEEEEEEEDEKPQCKGKDKHCQRPRGSQSKSRRNGIDETICTMRLRHNIGQTSSPDIYNPQAGSVTTATSLDFPALSWLRLSAEFGSLRKNAMFVPHYNLNANSIIYALNGRALIQVVNCNGERVFDGELQEGRVLIVPQNFVVAARSQSDNFEYVSFKTNDTPMIGTLAGANSLLNALPEEVIQHTFNLKSQQARQIKNNNPFKFLVPPQESQKRAVA

SEQ ID NO: 171700 - protein, 145 aa, Glycine max
  Clone ID: PAT_MRT3847_12605C.1.pep
DEWQRSGKDNVYEAQDQWPTELRRARLIPAVDYVQAQRARGRLIKEIRESFSVDAFIGNATDWEKVCLGNLVGLPVIVVPTGLKNISDPPPGGTRRRTTIPTGIYAPPNRDHIALALAMAYQEVTNHHKQRPPINDLGPNDKLPS

SEQ ID NO: 171701 - protein, 183 aa, Glycine max
  unsure (1)..(183): unsure at all Xaa locations
  Clone ID: PAT_MRT3847_126060C.1.pep
QHAFSVDKQIAKNLQGENEGEDKGAIVTVKGGLSVIKPPTDEQQQRPQEEEEEEEDEKPQCKGKDKHCQRPRGSQSKSRRNGIDETICTMRLRHNIGQTSSPDIYNPQAGSVTTATSLDFPALSWLRLSAEFGSLRKNAMFVPHYNLNANSIIYALNGRALIQVVNCNGEXRVFDGELQEDGC

SEQ ID NO: 171702 - protein, 481 aa, Glycine max
  Clone ID: PAT_MRT3847_126061C.1.pep
MAKLVLSLCFLLFSGCCFAFSFREQPQQNECQIQRLNALKPDNRIESEGGFIETWNPNNKPFQCAGVALSRCTLNRNALRRPSYTNAPQEIYIQQGSGIFGMIFPGCPSTFEEPQQKGQSSRPQDRHQKIYHFREGDLIAVPTGFAYWMYNNEDTPVVAVSLIDTNSFQNQLDQMPRRFYLAGNQEQEFLQYQPQKQQGGTQSQKGKRQQEEENEGGSILSGFAPEFLEHAFVVDRQIVRKLQGENEEEEKGAIVTVKGGLSVISPPTEEQQQRPEEEEKPDCDEKDKHCQSQSRNGIDETICTMRLRHNIGQTSSPDIFNPQAGSITTATSLDFPALSWLKLSAQFGSLRKNAMFVPHYNLNANSIIYALNGRALVQVVNCNGERVFDGELQEGQVLIVPQNFAVAARSQSDNFEYVSFKTNDRPSIGNLAGANSLLNALPEEVIQQTFNLRRQQARQVKNNNPFSFLVPPKESQRRVVA

SEQ ID NO: 171703 - protein, 486 aa, Glycine max
  unsure (1)..(486): unsure at all Xaa locations
  Clone ID: PAT_MRT3847_126062C.1.pep
MAKLVLSLCFLLFSGCFALREQAQQNECQIQKLNALKPDNRIESEGGFIETWNPNNKPFQCAGVALSRCTLNRNALRRPSYTNGPQXEIYIQQGNGIFGMIFPGCPSTYQEPQESQQRGRSQGPQDRHQKVHRFREGDLIAVPTGVAWWMYNNEDTPVVAVSIIDTNSLENQLDQMPRRFYLAGNQEQEFLKYQQQQQGGSQSQKGKQQEEENEGSNILSGFAPEFLKEAFGVNMQIVRNLQGENEEEDSGAIVTVKGGLRVTAPAMRKPQQEEDDDDEEEQPQCVETDKGCQRQSKRSRNGIDETICTMRLRQNIGQNSSPDIYNPQAGSITTATSLDFPALWLLKLSAQYGSLRKNAMFVPHYTLNANSIIYALNGRALVQVVNCNGERVFDGELQEGGVLIVPQNFAVAAKSQSDNFEYVSFKTNDRPSIGNLAGANSLLNALPEEVIQHTFNLKSQQARQVKNNNPFSFLVPPQESQRRAVA

SEQ ID NO: 171704 - protein, 219 aa, Glycine max
  Clone ID: PAT_MRT3847_126063C.1.pep
EEGELTGAARVGHSGRETARKWKNNVWVIVNGEKVPLCKTVLLKYYNQVSKAANGSHRSENGRASGRETARKWKNNVWVIVNGEKVPLCKTVLLKYYNQVSKAANGSHRSHNGRACHRDEFVRCTSCNKERRFRLRTKEECRIHHDALADANWKCSDLPYDKITCDDEEERASRRVYRGCTRSPTCKGCTSCVCFGCDICRFSDCSCQTCADFTNNAKA

SEQ ID NO: 171705 - protein, 495 aa, Glycine max
  Clone ID: PAT_MRT3847_126064C.1.pep
MAKLVFSLCFLLFSGCCFAFSSREQPQQNECQIQKLNALKPDNRIESEGGLIETWNPNNKPFQCAGVALSRCTLNRNALRRPSYTNGPQEIYIQQGKGIFGMIYPGCPSTFEEPQQPQQRGQSSRPQDRHQKIYNFREGDLIAVPTGVAWWMYNNEDTPVVAVSIIDTNSLENQLDQMPRRFYLAGNQEQEFLKYQQEQGGHQSQKGKHQQEEENEGGSILSGFTLEFLEHAFSVDKQIAKNLQGENEGEDKGAIVTVKGGLSVIKPPTDEQQQRPQEEEEEEEDEKPQCKGKDKHCQRPRGSQSKSRRNGIDETICTMRLRHNIGQTSSPDIYNPQAGSVTTATSLDFPALSWLRLSAEFGSLRKNAMFVPHYNLNANSIIYALNGRALIQVVNCNGERVFDGELQEGRVLIVPQNFVVAARSQSDNFEYVSFKTNDTPMIGTLAGANSLLNALPEEVIQHTFNLKSQQARQIKNNNPFKFLVPPQESQKRAVA

SEQ ID NO: 171706 - protein, 44 aa, Glycine max
  Clone ID: PAT_MRT3847_126065C.1.pep
LKLFGGDLHKRGLKQPMFPLGLPFLWSKQNYVHIFEYAFCRILA

SEQ ID NO: 171707 - protein, 43 aa, Glycine max
  Clone ID: PAT_MRT3847_126066C.1.pep
SVINIYSMTFTVPSPNLSLKLQITTDPPFTTFSSQAQVTDRQI

SEQ ID NO: 171708 - protein, 108 aa, Glycine max
  unsure (1)..(108): unsure at all Xaa locations
  Clone ID: PAT_MRT3847_126067C.1.pep
GLEKRRDCDMEEDEIXACKFPXVGNGRSSDQYXEEEEEGDLRXKGVGGGGGSDASTNHFHQSSWHYSSKIXRVSXASGGKXRHXKVDDLXRVKKXXGXALCDHSXSXL

SEQ ID NO: 171709 - protein, 60 aa, Glycine max
  Clone ID: PAT_MRT3847_126068C.1.pep
RLKYTIYFYKSSNSPKINKITTLTESYYIHKIYTNIHLSTIYFINLKYSQISNTFILLIL

SEQ ID NO: 171710 - protein, 156 aa, Glycine max
  unsure (1)..(156): unsure at all Xaa locations
  Clone ID: PAT_MRT3847_126069C.1.pep
DADWASDVDDRRSTSGTAIFLGPNLVSWWSRKQKVTARSSTEAEYRSIAQTSTXLTWIYTLLTELXVSFTTPVIFCDNQSAVSIAHNPVFHNRTKHMGIDVFFVREKILAKQLSIVHIPALNXWAEILTKPLSASRFEALRGKLNVKSVSNENSPP

SEQ ID NO: 171711 - protein, 69 aa, Glycine max
  Clone ID: PAT_MRT3847_12606C.1.pep
RPSVPQSRSISQRTLEEKPPPVFPPFPLIFPVLLLFLPHFLESYFEPIGIWCFPFEIRVLHALIISFSI

SEQ ID NO: 171712 - protein, 51 aa, Glycine max
  Clone ID: PAT_MRT3847_126070C.1.pep
DLICYAASAIVILIRNGLGQTIIITTSRSMSECKENKMNPDDLEYPSGRVG

SEQ ID NO: 171713 - protein, 67 aa, Glycine max
  Clone ID: PAT_MRT3847_126071C.1.pep
IVALCIFVGSRLSECLKVGCCCSHKPKTCAFYSKTLPKIFFHRNFGSCAMHGHLQTLSTKNKHLIPS

SEQ ID NO: 171714 - protein, 107 aa, Glycine max
  Clone ID: PAT_MRT3847_126072C.1.pep
VISKYVANVTTNDTSQDGGCHNSGEWISWGKRSPQGLRSLDKIRGWLNEEPKRVSSLQLEKSQNSISKFCFSFMKCEIHIFVLRYKRVVFYSLSVFYSVFVSLVIRG

SEQ ID NO: 171715 - protein, 55 aa, Glycine max
  Clone ID: PAT_MRT3847_126073C.1.pep
NILILQNVSNLLLLCRCELKDILLEMDRIPRPEGSVITRDDVDILVKVPSVVFSA

SEQ ID NO: 171716 - protein, 64 aa, Glycine max
  unsure (1)..(64): unsure at all Xaa locations
  Clone ID: PAT_MRT3847_126074C.1.pep
LSLSIVTMDKMICGCLQVSTFITEYKSNIYKQRFLTIHNHYQLLXNLHCQWLWSLFSTIDNLHL

SEQ ID NO: 171717 - protein, 127 aa, Glycine max
  unsure (1)..(127): unsure at all Xaa locations
  Clone ID: PAT_MRT3847_126075C.1.pep
KPIWYKKSREQWIRLGDKNTWLYHCQTKTRRKRNHFHPILIESKEWCNDPQALGVHAKEYFCGISCLPCASSHESPXVRNIPSLSQATPFSLISLVTLDEMKNAIISMKSYKSPNLDGFQPPFFKTY

SEQ ID NO: 171718 - protein, 267 aa, Glycine max
  Clone ID: PAT_MRT3847_126076C.1.pep
VEGSAWSPRVRPLFKDVLFAAPAHDNTGSAVAANLSLTRNSQQESAPSGYFPCREHDVLGNLDHPSDQDFARTGPILNRGKKKELLLDDVGASPSLRSASTPGSSLIGGAKGKRSERDRDKDSSGRNSVSKGGRSSAKGERKTKAKSKPKTAQLSSSGNGSLSKLMVNTNSENQLACGSNEFVSGDGNRKSKVGSVSHNYNANDLSIGTEEPIDITLDSIELGVGNELDGSQDLDSWLLNIEEDGLQDDAFGLDIPMDDLSGLNMLL

SEQ ID NO: 171719 - protein, 47 aa, Glycine max
  Clone ID: PAT_MRT3847_126077C.1.pep
FGGRKKSTTTLSPSFKFWIKSNKRNLFEYREPCFFSNISVHSYKRGV

SEQ ID NO: 171720 - protein, 49 aa, Glycine max
  Clone ID: PAT_MRT3847_126078C.1.pep
SPTTRFSSVWSDINLVAAEKRLTHSLTTTESVTLKRGYSHSWPAGLSGP

SEQ ID NO: 171721 - protein, 58 aa, Glycine max
  Clone ID: PAT_MRT3847_126079C.1.pep
RIYGAGVLKTRVYNHYGLTPKCINQYYLTAMYPSIIAYFLYMPPEPSSYLRKLSATNA

SEQ ID NO: 171722 - protein, 53 aa, Glycine max
  Clone ID: PAT_MRT3847_12607C.1.pep
GDMRVTVMGTVVVSVGGISVGQEVIVGNGGSIYSKTVAEGMGLDSISFLIGRL

SEQ ID NO: 171723 - protein, 45 aa, Glycine max
  Clone ID: PAT_MRT3847_126080C.1.pep
MTTPLPYKHSLTSGDTITYITFSSDSKTPNTRIISTPLNDSTILK

SEQ ID NO: 171724 - protein, 246 aa, Glycine max
  unsure (1)..(246): unsure at all Xaa locations
  Clone ID: PAT_MRT3847_126081C.1.pep
ELNDLKIRYRLDGPLILHGITCTFKAGHKIGIVGRTGSGKSTLISALFRLVEPAGGKIVVDGVDISSIGLHDLRSRFGVIPQDPTLFNGTIKYNLDPLAQHSDHEIWENPGIIHMRETVQEKQEGLFSFVDIVRSLSSMGQRQLFCLGRALLRRSRILXLDEATASIDNATDLILQKTIRTEFADCTVITVAHRIPTVMDCTMVLSISDGKLVEYDEPTSLMKKEGSLFKQLVKEYWSHFQSAESH

SEQ ID NO: 171725 - protein, 143 aa, Glycine max
  Clone ID: PAT_MRT3847_126082C.1.pep
GRVGGRVGPMEIAACLAYALSVWLAARNNVHTWWTGIIGCVLYGWVFYSVQLYADVTLQLFFIVSSIAGWINWLKGNHGQQLAVRKTPLQHIAFLLVGALIVAGGYAWLLHRFTNAWSPWLDSAIMVFSILAQFMLMGRRLES

SEQ ID NO: 171726 - protein, 118 aa, Glycine max
  Clone ID: PAT_MRT3847_126083C.1.pep
ANGMLTVLLEKGFLPNDVTYAHLMQGYARKEEVQEVLKLYYEMEYRCVSPGLSVFGTIVQCFCRCGKVEDAEKYLRIMKGRLVRPDVSVYQALIDGYMKKGESARALHLRDEMASLEV

SEQ ID NO: 171727 - protein, 58 aa, Glycine max
  Clone ID: PAT_MRT3847_126084C.1.pep
NIQLSLHINDSWLFLCQHFITFSSKFKTMAIGMLEFINKFGKLKFSHVLFYIIMKIII

SEQ ID NO: 171728 - protein, 90 aa, Glycine max
  unsure (1)..(90): unsure at all Xaa locations
  Clone ID: PAT_MRT3847_126085C.1.pep
ARNSARXXILDXIKEKLPGHHSKTEEEKXXEXXSGAHXYLXLRXGFFXXWXXMIVXCFVFXHHMTALWVSXXFLDAYLIYXXXXXLSRHX

SEQ ID NO: 171729 - protein, 129 aa, Glycine max
  Clone ID: PAT_MRT3847_126086C.1.pep
AQAYLQRLEQEIQLMACHLDPKQPVEQLHFGGGTPTFLSHDELRQVMTGLRQHFNLLDDYFGDYGIEIDPREADWATMGLLRELGFNRVSIGLQDLDPEVQRAVNRLQSLEETRAVIDAARTLQFRSIN

SEQ ID NO: 171730 - protein, 42 aa, Glycine max
  unsure (1)..(42): unsure at all Xaa locations
  Clone ID: PAT_MRT3847_126087C.1.pep
IYHTPYCYLFSLIDKXTLTAIFTISLEAPFLQSKHSHTHTPI

SEQ ID NO: 171731 - protein, 47 aa, Glycine max
  Clone ID: PAT_MRT3847_126088C.1.pep
KRIPRKNTFKESSDPLTPHPPGVCKKTRFPFPPRLCHPKQGQICSIF

SEQ ID NO: 171732 - protein, 420 aa, Glycine max
  unsure (1)..(420): unsure at all Xaa locations
  Clone ID: PAT_MRT3847_126089C.1.pep
MVQSLCLMASHGYPPGLVLHPQVLGLPCSTMKGYQTFFPSPVAKADLIRYQSPCLDPSPCEESTKSQNEWFDYKKFVNVDFSVERPMLINDQANCSNAVLFGFGIVEQCSKHDEILKVLMSETAEAGIDGGNLSLLSDLMKLQLSGIDETQQPSSSLIYPTGKFNILKHFLYFVQGSALSSKITVHPDGQMTFMGTAIELKDLLSVVAESYLSKWSRKDEKQSMLVPQLQLGEXNELERNHSSTLKNQSTLTAPLKSPEKVKLKPSPRKNKKVGRERDLYKNSSHACETLLSLMVDKKQRRKTAILSLKKSRPELPELLTQFSAGIAGTGLAVLLSVMCNLACGRATFCTSSLFNTGFGLGLVWLSGVVNKLRATIVNISKNAGKLGLKEEEMMQKLDKSIRDIYYTAAALLAVVVLRLA

SEQ ID NO: 171733 - protein, 66 aa, Glycine max
  Clone ID: PAT_MRT3847_12608C.1.pep
SLLVMGVFRTSILENYSLCPLMILQIVIDLLSNISVNKDLSTKENLFSFHIYIRSIVIQPPSSHFI

SEQ ID NO: 171734 - protein, 148 aa, Glycine max
  Clone ID: PAT_MRT3847_126090C.1.pep
EFPGYDPRVRAGALAILQGGAAGTEIVIPTDVLAWGGFGIVAGLMMWGYRVIATIGKKITELTPTRGFAAEFAAASVVLFASKLGLPISATHTLVGAVMGVGFARGLNSVRSETVKEIVASWVVTIPVGATLSVLYTWILTKILSYIL

SEQ ID NO: 171735 - protein, 69 aa, Glycine max
  Clone ID: PAT_MRT3847_126091C.1.pep
DTCNNNSNKRKERRKKSGVSLKLRPYSECLLVIIIVSSTASSVAIDCDSQVDWKPLNRKQPDLLFVLFV

SEQ ID NO: 171736 - protein, 70 aa, Glycine max
  Clone ID: PAT_MRT3847_126092C.1.pep
FFVSCSGALCHSQFLYNVSQAYARHDCQPWHARVIKCNYARLSYKMKYILIFIKTGIWNLGKNFNLISEN

SEQ ID NO: 171737 - protein, 142 aa, Glycine max
  unsure (1)..(142): unsure at all Xaa locations
  Clone ID: PAT_MRT3847_126093C.1.pep
RLREDDRRAPQEEEGGQLVEHQSLFTCSPTTLLNGLARGARGMLGRGRSAHSFPSQVFDNFSTHRRLTLCLSSSKGVDLLGNXGHLRVRGSQISHLHTTKNTCLIVFPPTIGPSQQNFTYISYKFTYQQQNGDSIGVSNQKG

SEQ ID NO: 171738 - protein, 79 aa, Glycine max
  Clone ID: PAT_MRT3847_126094C.1.pep
SRAPKGTRICFGSSSKFWNTDGATTTAGGGDQSFNFRQSGDPPPKLIGHFFKRQEASGRMQLAMDLEMEDLNPEGNTGK

SEQ ID NO: 171739 - protein, 99 aa, Glycine max
  unsure (1)..(99): unsure at all Xaa locations
  Clone ID: PAT_MRT3847_126095C.1.pep
XPXXHSPXXSXXSXLFXSXGFXFXXXPPFSPLAPSILSXXXXXXYXXXXXXLXXLXCXXXXXXXXXXXTSXXXXXXFFSXXXCVXRXXFRAXXRVXATS

SEQ ID NO: 171740 - protein, 105 aa, Glycine max
  unsure (1)..(105): unsure at all Xaa locations
  Clone ID: PAT_MRT3847_126096C.1.pep
MAKKINSRGKKRTASDGGAARRCSHCGVQKTPQWRXGPLGAKTLCNACGVRYKSGRLLPEYRPACSPTFSSELHSNHHRKVLEMRRKKEDVPEPDTASPPSLPGF

SEQ ID NO: 171741 - protein, 63 aa, Glycine max
  Clone ID: PAT_MRT3847_126097C.1.pep
ISRFKTRVRLIGLYKIPFFKFFKDFFYFNHVKFRIFGFSFYCQITVLIDYVIVLLTIYYFLTS

SEQ ID NO: 171742 - protein, 103 aa, Glycine max
  Clone ID: PAT_MRT3847_126098C.1.pep
IYPQWLLVHNGRVKLWLLLRLENKNFVLCEENLNEQCLSCIACPTEASLLLVELSLPSLAIATSLLLEIETFSTTKLVLVSKLSISKFNSNTSLPFCRLLAAV

SEQ ID NO: 171743 - protein, 68 aa, Glycine max
  Clone ID: PAT_MRT3847_126099C.1.pep
YTNITYHSLLPSSTTYYFNYLNYAISLYRSNILLHIHIFIHNKFFISARYIILLRLLYYHYYKSYIIL

SEQ ID NO: 171744 - protein, 108 aa, Glycine max
  Clone ID: PAT_MRT3847_12609C.1.pep
TQVFGEVLSASCPIQPYGLRHIIPVTDMLTMTSNVESEYRCLNSWMLFPPDQSTSFEEVLISPIHDWHSLKMVESVEGTALRWANADPPGADGAEPSRPIAPALVVLG

SEQ ID NO: 171745 - protein, 171 aa, Glycine max
  Clone ID: PAT_MRT3847_1260C.1.pep
PTRPGVHCLDANKYIGDLLAEFKAAKDRSKGEILHCKLIFKKKLFRESDEAVTEPMFVQLSYVQMQHDYILGNYPVGRDDAAQLSALQILAEIGFLSTPESCIDWNSLLERFLPRQISMTRAKREWEYDILSRYRSLENLTKDDARQQFLRILRALPYGNSVFFNVRKIDD

SEQ ID NO: 171746 - protein, 121 aa, Glycine max
  unsure (1)..(121): unsure at all Xaa locations
  Clone ID: PAT_MRT3847_126100C.1.pep
MAPPLRGVPQPPRVVPEAARFCSDGCGLRCAVRRPRSPELPPGPPPLAPSLSPCPPAARALATLMAFAALLSFTVPDMNSTVTKLMALGAELDGPIKYEVHGKVAAMRCIDGHILXLYEPV

SEQ ID NO: 171747 - protein, 60 aa, Glycine max
  Clone ID: PAT_MRT3847_126101C.1.pep
STRPLTHQSRLFSLTITSSCRRAQLVKSSNAKVTDSSTLLLSLILFSSLFSFDATHAIAY

SEQ ID NO: 171748 - protein, 49 aa, Glycine max
  Clone ID: PAT_MRT3847_126102C.1.pep
TISSFMTRATYYLISLHSLIYNFKRSKVLIPYVKISYVLFKRSFSLNSS

SEQ ID NO: 171749 - protein, 43 aa, Glycine max
  Clone ID: PAT_MRT3847_126103C.1.pep
INFIRFDMNFKIIIIKVNTIIINNYHMMVCDYMINIKLIYTYN

SEQ ID NO: 171750 - protein, 101 aa, Glycine max
  unsure (1)..(101): unsure at all Xaa locations
  Clone ID: PAT_MRT3847_126104C.1.pep
MRTKRKEMASSMISXPADTSGNRASSGLDARFAVLKSMAGFPTSETNKDITLIAXNCGRVLCMQVXSPIVMMKFXTLCYLPDLDDAQLAXEVRYLLKNGWI

SEQ ID NO: 171751 - protein, 126 aa, Glycine max
  Clone ID: PAT_MRT3847_126105C.1.pep
RSVNFLKRTLSISEREGGGTSNVVPKGYVAVCVGVDLNRFVIPTEYLGHQAFQMLLRETEEEFGFEQTGVLRIPCEVSMFESILKIVERKDKFFTQKCRLSIEKMMGYCSSNNLAYSHQPQSPMCR

SEQ ID NO: 171752 - protein, 106 aa, Glycine max
  Clone ID: PAT_MRT3847_126106C.1.pep
YQVPSTRRLPSNHATAPKTTARRCSKFQTVTNQEKMLTKHYEARTPQPTPAPCSVTDTDTDTRTGLSLICLTGVHVTVSWPVSMSVLHTKHLELTRTNQYITQTTS

SEQ ID NO: 171753 - protein, 73 aa, Glycine max
  Clone ID: PAT_MRT3847_126107C.1.pep
FANVFSPTLPQGKGLFPSGQILFPGPRFRNPVNSFVSRAKVFTPPFVGAKPKLGRVGVKTPKNGKICPHCFVL

SEQ ID NO: 171754 - protein, 105 aa, Glycine max
  unsure (1)..(105): unsure at all Xaa locations
  Clone ID: PAT_MRT3847_126108C.1.pep
PLSNNFPFFTIGVVPPXPPLPFFFFPPQPPPPPHRKPTPPTPPPPPATDPHPPPPPPPPPPPTPHPPPPPHPPHPPPHPPHPPTPPPPHNAPPPPPPAPAPRPPP

SEQ ID NO: 171755 - protein, 163 aa, Glycine max
  Clone ID: PAT_MRT3847_126109C.1.pep
VLLEPEVVSLDKTLNRNRTRGSRSNRPRRFRSSHSTGHSLVQPGENTDRFTLRLPLEVRKQLINRQLQRASSLIVLPREGSLRQGYRTGGEGSSRGKISRRLDRSLKSDRWIFSMAAPFFARALSIRSPRVRNNYVEGTASSSSSSTAPILPPTAVDSARPLV

SEQ ID NO: 171756 - protein, 82 aa, Glycine max
  Clone ID: PAT_MRT3847_12610C.1.pep
DAYCPHALARLAARGCFYSAAAPLHRLTGVLHGATGQASIMPRATLISHHDRIFIGLARDGGECITAGSCDPYPILGLQDVW

SEQ ID NO: 171757 - protein, 93 aa, Glycine max
  Clone ID: PAT_MRT3847_126110C.1.pep
MQKVALFSASAVLAAQENSDVMTLVNHMLGKKFCDKGWECKGWSINMRAVTITDYAPTYQLENHLSRRNSPAAHAAGFRDYHSLIAAVTLLQG

SEQ ID NO: 171758 - protein, 119 aa, Glycine max
  Clone ID: PAT_MRT3847_126111C.1.pep
REQLKRAKMAKDRKSRRKSSEAKKGKDPNAPKRPMSAYMLWLNASREKIKSDHPGISITDLSKKAGEIWKGMSKEKKEEWDRKAEDARREFPPRHSSSLSHSPWILCHLSNCSWWLPLP

SEQ ID NO: 171759 - protein, 41 aa, Glycine max
  Clone ID: PAT_MRT3847_126112C.1.pep
YFCRVSVFTYLVGDLYHESRKGEQCDIFYYYMYVTLNYLYP

SEQ ID NO: 171760 - protein, 77 aa, Glycine max
  Clone ID: PAT_MRT3847_126113C.1.pep
NLESSMFLSFPQLGLTLSDSVPLCFREVTVGNSCSTHYHCSYQCLFAYSLTLISSEISVSILYLLNLLLLSGEWRKE

SEQ ID NO: 171761 - protein, 145 aa, Glycine max
  unsure (1)..(145): unsure at all Xaa locations
  Clone ID: PAT_MRT3847_126114C.1.pep
KAFLEVVKTRSFPWENAEMDAIHSLQLILRDSFKDAEHSNSKAVLDPXMSELELQGVDELSSVAREMVRLIETATAPIFAVDVDGRINGWNAKVSELTGLPVEEAMGKSLVRDLVFKESEETVDKLLSRALKGILSNTLAFWSIH

SEQ ID NO: 171762 - protein, 304 aa, Glycine max
  unsure (1)..(304): unsure at all Xaa locations
  Clone ID: PAT_MRT3847_126115C.1.pep
QKREREEVIEPTFSLFSAVVVLIKFQWLQQAERRIPPSRRRRCRLRRRRKSTPXRTKLSHHHHNNNNNNNNNIDSTSKAIAQYTEDARLHAVFERSGESGRSFDYSQSIRITSESVPEQQITAYLLKIQHCGFIQPFGSMIAVDEPSICILGYSDNAHDMLGITLQSVPLLDDKNDAAFSLGTDVRALFTHSSAXLLEKAFSAREISLMNPIWIHSRTSGKPFYGILHRIDGIVIDLEPVLTEDPALSIAGAVQSQKLAVRAILQLQCLPSGDAKLLCDTVALKSHTSQGFHILFFLCSFGFNF

SEQ ID NO: 171763 - protein, 40 aa, Glycine max
  Clone ID: PAT_MRT3847_126116C.1.pep
LFLMKFGSRSLELGFLVSCYIYPWDRCAFITLLDSSSFSC

SEQ ID NO: 171764 - protein, 140 aa, Glycine max
  unsure (1)..(140): unsure at all Xaa locations
  Clone ID: PAT_MRT3847_126117C.1.pep
SWGGGGISNQFFQPFVKLVSPMKPPXPVTTGAILCENLMXQSISAIFVCGGQVILATFFLHASGFFFGYIFGRLLGLDVSSSRTISTQVGMKNSVLGIVLATKHFGDPLTAVPGAVSIVFQSIIGSILAGIWRDSMPVFN

SEQ ID NO: 171765 - protein, 230 aa, Glycine max
  Clone ID: PAT_MRT3847_126118C.1.pep
MEIHENQHESWSETESTGSRSRRVGFSGPLSGPLSGPLSGPLVSSNKRNSSKNKSARFKDDEEMVEITLDVRDDAVSVQNIRGGDSETAFLASRLEMRPSSFSDRLRQVSRELKRMTSNKKFDRVDRAKSGAARALKGLKFMTKNVGTEGWSQVDKRFDELAVDGKLPKTRFSQCIGMNESKEFAGELFDALSRRRGITSASISKDQLREFWEQITDQSFDSRLQTFFDM

SEQ ID NO: 171766 - protein, 716 aa, Glycine max
  unsure (1)..(716): unsure at all Xaa locations
  Clone ID: PAT_MRT3847_126119C.1.pep
FIFQWLQQAERRIPPFRRRKSTPHEQXLSHHSSNNNNNIDSMSKAIAQYTEDARLHAVFEQSGESGRSFNYSESIRIASESVPEQQITAYLVKIQRGGFIQPFGSMIAVDEPSFRILGYSDNARDMLGITPQSVPSLDDKNDAAFALGTDVRALFTHSSALLLEKAFSAREISLMNPIWIHSRTSGKPFYGILHRIDVGIVIDLEPARTEDPALSIAGAVQSQKLAVRAISQLQSLPGGDVKLLCDTVVESVRELTGYDRVMVYKFHEDEHGEVVSESKRPDLEPYIGLHYPATDIPQASRFLFKQNRVRMIVDCHASAVRVVQDEALVQPLCLVGSTLRAPHGCHAQYMANMGSIASLVMAVIINGNDEEGVGGRSSMRLWGLVVCHHTSARCIPFPLRYACEFLMQAFGLQLNMELQLAAQSLEKRVLRTQTLLCDMLLRDSPTGIVTQSPSIMDLVKCDGAALYFQGNYYPLGVTPTEAQIRDIIEWLLAFHGDSTGLSTDSLGDAGYPGXLPRLGMQFVGWXVAYITEKDFLFWFRSHTAKEIKWGGAKXILRTRMMGXRMHPRSSFKAFLEVVKSRSLPWENAEMDAIHSLQLILRDSFKDAEHRNSKAVVDPHVSEQELQGVDELSSVAREMVRLIETATAPIFAVDVDGHVNGWNAKVSELTGLPVEEAMGKSLVHDLVFKESEETMNKLLSRALKGILSNTLAFWSIH

SEQ ID NO: 171767 - protein, 96 aa, Glycine max
  Clone ID: PAT_MRT3847_12611C.1.pep
NTEQKAQMLANKNKSTLDDFEAHKGFMERHKLSELNTDLANNTVGGSMLISGTLSYLMSDGKSKASVDWLCINCLKRMKYKLATVWITANTLLAGV

SEQ ID NO: 171768 - protein, 267 aa, Glycine max
  Clone ID: PAT_MRT3847_126120C.1.pep
MVRGPKKALKRINAPKSWMLDKLGGIFATKSSQGPHKYRESLPLTVVLKHRLKYALTGREVTMIVNDKEGNIAVDGKIRRDPRFPAGLMDVISIKKTGELYRVLYDVKGRFILRNIGAEEAKYKLCKITKKAVGPNKIPYIVTHDGRTLRFPNPEINVYDTVKLDIATGQVVDTVQFETGNLCMITSGNNVGRVGVIVHRDRHIGGFDIVHVRDARGHSFATRIGNVFMIGKGKNPWISLPKEKGISLTPLEEKQTRLESRRKTRKH

SEQ ID NO: 171769 - protein, 29 aa, Glycine max
  Clone ID: PAT_MRT3847_126121C.1.pep
KRGKPKLISFRVLAKTITGGNDLGLDYLA

SEQ ID NO: 171770 - protein, 132 aa, Glycine max
  Clone ID: PAT_MRT3847_126122C.1.pep
LEDLELTFHLPDTTELNCPLEAYFVALYTSPSTVSISPTRGGVSQHDSKPYPPDQYHSPQNTYASPMRASCITDDTGRFNLKPTLRESESVMLAPDSDNLNSLNSALSNGNNSDPLQMDCWKQNMAAISTKN

SEQ ID NO: 171771 - protein, 103 aa, Glycine max
  Clone ID: PAT_MRT3847_126123C.1.pep
GCCTRCPSPALSQPPLLSTVSPNTLASVAPPSSCAHSVHSHRYCNHHLLVMSLPLSHHHGENDHHHLVIVHPPTSSYLCHSFERAFMAACICDAVKAVVFGIN

SEQ ID NO: 171772 - protein, 419 aa, Glycine max
  unsure (1)..(419): unsure at all Xaa locations
  Clone ID: PAT_MRT3847_126124C.1.pep
MLPTGAKETQLRENNRQKVHPLPIAEAMNLLKEAMETLISKVFLNIXSLKTSYIXLHPAHSPYDPDKIYTADKXVISELKNLSELKHFYRENNPKPVCVSPQDSRLAAEIQEQQSLLKTYEVMVKKFQSEIQNKDSEIHQLQQQIEEASQKRAKLEKNLKLRGLSTKESEDEIGFFPVDLTPDLFTSAVEAAAKAIHDFSKPLINMMKAAGWDLDAAANSIEPDVVYAKRAHKKYAFESYICQRMFSGFEQENFSVKSDNITVTKESFFHQFLALREMDPLDMLGQNPDSIFGKFCRSKYLVVVHPKMEASFFGNLDQRNYVMGGGHPRTPFYQAFLKLTKSIWLLHRLAYSFEPNVKVFQVKGGSEFSDVYMESVVKNLIMDDNDEKPKVGLMVMPGFWIGGSVIQSKVYLSGMKVAE

SEQ ID NO: 171773 - protein, 49 aa, Glycine max
  Clone ID: PAT_MRT3847_126125C.1.pep
MDITICSYHYVKMVRLIFVMYIRGLGMVMCNHDVVGVVPHMIRWLRWRS

SEQ ID NO: 171774 - protein, 419 aa, Glycine max
  Clone ID: PAT_MRT3847_126126C.1.pep
MLPTGAKETQLRESNSQKVHPQPIEEAMNQNPEAMETLISKVFMNISSLKSAYIELQAAHTPYDPDKIHTADKLVISELKNLSELKHFYRENNPKPVCVSPQDSRLAAEIQEQQSLLKTYEVMVKKFQSEIQNKDSEIHQLQQQIEEASQKRAKLEKNLKLRGLSTKESEDENGFFPVDLTPDLFTSAVEVAAKAIHDFSKPLINMMKAAGWDLDAAANSIEPDVVYAKRAHKKYAFESYICQRMFSGFEQENFSVKSDNITVTKESFFHQFLALREMDPLDMLGQNPDSIFGKFCRSKYLVVVHPKMEASFFGNLDQRNYVMGGGHPRTPFYQAFLKLTKSIWLLHRLAYSFEPNVKVFQVKGGSEFSDVYMESVVKNLIMDDNDEKPKVGLMVMPGFWIGGSVIQSKVYLSGMKVAE

SEQ ID NO: 171775 - protein, 96 aa, Glycine max
  Clone ID: PAT_MRT3847_126127C.1.pep
VLSSAIADIERSSSASANNQTTLYIQAGSDHRVCWCARESQSPLCSRDIRSFTTPAFIISTLFSSLRARSIHAVAACACVLPLGSSPRGPTPPRNP

SEQ ID NO: 171776 - protein, 360 aa, Glycine max
  Clone ID: PAT_MRT3847_126128C.1.pep
MAKFGLSPLLVLSILLLIMSGGAVRGQREMVPALFIFGDSLIDNGNNNNLPSFAKANYYPYGIDFNGGPTGRFSNGYTMVDEIAELLGLPLIPAYTEASGNQVLHGVNYASAAAGILDATGRNFVGRIPFDQQLSNFENTLNQITGNLGADYMGTALARCIFFVGMGSNDYLNNYLMPNYPTRNQYNGQQYADLLVQTYSQQLTRLYNLGARKFVIAGLGQMGCIPSILAQSTTGTCSKEVNLLVQPFNENVKTMLGNFNNNLPGARFIFADSSRMFQDILLNARSYGFAVVNRGCCGIGRNRGQITCLPFQTPCPNRRQYVFWDAFHPTEAVNILMGRMAFNGNPNFVYPINIRQLAEL

SEQ ID NO: 171777 - protein, 158 aa, Glycine max
  unsure (1)..(158): unsure at all Xaa locations
  Clone ID: PAT_MRT3847_126129C.1.pep
RSRPPSLSPGACACSLLHNSGARESSPKKTSEMMKRKLETLVWLTRKRSIQFLIGVXFLYLVLVTLELPFVFRTDFATVTTTRSPRLLSEEDSLRKDSPARPLKTVSNADSPSQLARRRSSVVSALVLNDAAFGSHVNNGSSELYKQVKHAREVGRSL

SEQ ID NO: 171778 - protein, 59 aa, Glycine max
  Clone ID: PAT_MRT3847_12612C.1.pep
QFKNIALVFGSYFFIFVLNYFVFLLTCAQSWFRADKFFLTMVPSIFFLIYFLLYVPQPA

SEQ ID NO: 171779 - protein, 74 aa, Glycine max
  Clone ID: PAT_MRT3847_126130C.1.pep
NKRSALYLNHCHRKTIHLHTTKHYFHADQSNKWLIIEDKNLKSSIQSYRVQPELSSSFFHLPLTILISENNKHH

SEQ ID NO: 171780 - protein, 87 aa, Glycine max
  unsure (1)..(87): unsure at all Xaa locations
  Clone ID: PAT_MRT3847_126131C.1.pep
GINKSYKASHALLHTTXCSFQKSLHNLLMEQNTPLAKCWVLLLINKSFTLPFIFLKHCFQFIILYLSLMFLATHACPHTXCTKSIEL

SEQ ID NO: 171781 - protein, 66 aa, Glycine max
  Clone ID: PAT_MRT3847_126132C.1.pep
LVYDMKKEECRRHSPFYAVHRQQIDLKPVYLILKVMSIYSPSPSCIKSQLSTVTLKSLKCYRLRHP

SEQ ID NO: 171782 - protein, 45 aa, Glycine max
  Clone ID: PAT_MRT3847_126133C.1.pep
IMSSFSLNRNSTTTKPIIVPTCYYYSVTEIILLQRPKQIQKKLMN

SEQ ID NO: 171783 - protein, 62 aa, Glycine max
  Clone ID: PAT_MRT3847_126134C.1.pep
INMVRLVFTSTQGSPSPPRKFPFKVQGPHPDPVFIKALESKRASLVCFQFCQFLCNCPGDFL

SEQ ID NO: 171784 - protein, 55 aa, Glycine max
  Clone ID: PAT_MRT3847_126135C.1.pep
GEDNNPWGCCYDTIDIVKALIQDGEGKTSGSAAIGKTPGSNMEDGKGRWRNYNHP

SEQ ID NO: 171785 - protein, 98 aa, Glycine max
  unsure (1)..(98): unsure at all Xaa locations
  Clone ID: PAT_MRT3847_126136C.1.pep
NKKDLRFPGAHKLTADRERGITVPIALRKGQTTKHYRTVIDAPGHRDFINNMINXTSPSMTAAXLIMDTTTGGSEAGISKDXQTAKHALLSCTLGVKQ

SEQ ID NO: 171786 - protein, 53 aa, Glycine max
  Clone ID: PAT_MRT3847_126137C.1.pep
KKFKALTSSSPGQSLEATGVAKNHWGQKKYMIFNYCPDIKGFPQGPPPKSSLA

SEQ ID NO: 171787 - protein, 59 aa, Glycine max
  Clone ID: PAT_MRT3847_126138C.1.pep
NYHIKEQKLPLKLIRYISHPSEQFVHLLQFISRRCGALDLSLCHSFFHNNLVQTFQKFT

SEQ ID NO: 171788 - protein, 84 aa, Glycine max
  Clone ID: PAT_MRT3847_126139C.1.pep
ESIEFKNLSSFLVFCFLPQNQTSNTCRQLTAPDKTSCTKGNSYCVIVETEKEYIETGGIGCSAPEPCGEVKCGTTALSPDCTCG

SEQ ID NO: 171789 - protein, 91 aa, Glycine max
  Clone ID: PAT_MRT3847_12613C.1.pep
GFIWGKTKRVTPNFWLVCVKMCNSRNVVKDRFFFFQNWGWEFKTLLRVPGDKRCLCLHLKFSLLVFRNHEKFYGFVFGCFFPNWNVLGGVI

SEQ ID NO: 171790 - protein, 84 aa, Glycine max
  unsure (1)..(84): unsure at all Xaa locations
  Clone ID: PAT_MRT3847_126140C.1.pep
AXTGGRILEPETKATGTRPQEAHXPSRQRRERTPKGKKTTLCAGHRLRESFSFPLLAYWLNTLLFDIRLRVRSKLLLFLYQLSA

SEQ ID NO: 171791 - protein, 68 aa, Glycine max
  unsure (1)..(68): unsure at all Xaa locations
  Clone ID: PAT_MRT3847_126141C.1.pep
MYLFGGNVLSLTGNNSDTEFSFSFCKLISVNVTVTEWSGGLYVSPTIAGSTPXSLIAGAWAAMISFRE

SEQ ID NO: 171792 - protein, 267 aa, Glycine max
  Clone ID: PAT_MRT3847_126142C.1.pep
MSVDVKKRKNDRFNIKERVSNFRYNLALRGRLFGRRVQSMVESHGNVFGPFVRDATSGPTVLMNCGVRHENSTEVPPSPASVCSSVHEDFWRQTEYLSPISTPDVSSRDDNVVPQVFRDISSGLSELRRQLNQLESDGPEDLTMKQEPAESELDQLEDPAESYVRDLLVSSGLYFGSWDKSLLRGDTFAKPIGNSVYEEVEESHKKLVKENDEICIKDQNESKLDHKVLLDLLNEALSVVLGPPLTLSRFRRKLRNSSILPPSGRDL

SEQ ID NO: 171793 - protein, 44 aa, Glycine max
  Clone ID: PAT_MRT3847_126143C.1.pep
FTGSRRSRTSSFIARFAADYVLMIEQIGQTLIRVQTLQESESFV

SEQ ID NO: 171794 - protein, 422 aa, Glycine max
  unsure (1)..(422): unsure at all Xaa locations
  Clone ID: PAT_MRT3847_126144C.1.pep
SAVYRGIVVRRRGLAEAIGERLAKAERMFSLMDGFLKNDPLTLQKDILNHVEYTVARSRFSFDDFEAYQALSHSVRDRLIERWHDTHVYVKRTKPKRLYFLSLEFLMGCSLSNSVIYYLRESLQWCFFYPLNIHVCDIHDKEGDAALGNGGLARLSACQMDSLATLDYPAWGYGLRYEYGLFRQIIVDGFQHEQPDYWLNYGNPWEIERIHVTYEVKFYGTVEEVEMNGEKHQVWVPGETVEAVAYDNPIPGYGTRNTINLRLWAAKPSNKFDLEAYNTGDYINSVVNRQRAETISNVLYPDDRNHQGKELRLKQQYFFVSASLQDIIRRFKEAHNNFDELPDKVALHLNDTHPSLSIAEIMRILVDEEHLVWNKAWDIACKVXSFTTHTVVAEGLEKIPXDLLGSLLPRHLQILYEINXKF

SEQ ID NO: 171795 - protein, 296 aa, Glycine max
  Clone ID: PAT_MRT3847_126145C.1.pep
PRPGNGTISVTRSAANRGIVVRRPGLAEAIGERRAKAERMFSLMDGFLKNDPLTLQKDILNHVEYTVARSRFSFDDFEAYQALSHSVRDRLIERWHDTHVYVKRTKPKRLYFLSLEFLMGRSLSNSVINLGIQDQYAEALSQLGFEFEVVAEQEGDAALGNGGLARLSACQMDSLATLDYPAWGYGLRYEYGLFRQIIVDGFQHEQPDYWLNYGNPWEIERIHVTYEVKFYGTVEEVEMNGEKHQVWVPGETVEAVAYDNPIPGYGTRNTINLRLWAAKPSNKFDLEAYNTGDYIN

SEQ ID NO: 171796 - protein, 70 aa, Glycine max
  unsure (1)..(70): unsure at all Xaa locations
  Clone ID: PAT_MRT3847_126146C.1.pep
KMNEQTGGLXSSTPSNVPMKRKQGRPHKVDSGVQGMNMPVMPSSSSKLNSNQTEGTAVVCDDGILGKENA

SEQ ID NO: 171797 - protein, 112 aa, Glycine max
  Clone ID: PAT_MRT3847_126147C.1.pep
RLYQVLPTPIMRYLNKLAALNIVQLMPQEVAVLFSLTTMPCMQIPLHQLIHAPHPPHRKKRPICHRSEAISHQHLQQRIHTTHAEVRITHNLQSVQAGRIKMNSITPEALSC

SEQ ID NO: 171798 - protein, 145 aa, Glycine max
  unsure (1)..(145): unsure at all Xaa locations
  Clone ID: PAT_MRT3847_126148C.1.pep
FFQTPSFLSHHQMAAFSSQYYHSFVVDSACFSITPPIINTSSNFLPSPHYLHNNNIQETSYSVTDNKETSCFEQSSKVTISDIELSVVKNHSPETSMVVDKLEKGEQVTQKVVTRMEKKRRARNGSSSSDPXSKESTEGGKKKQK

SEQ ID NO: 171799 - protein, 32 aa, Glycine max
  Clone ID: PAT_MRT3847_126149C.1.pep
LSLGLSSAAFYLHMQLATILPLDTNCLTTTMP

SEQ ID NO: 171800 - protein, 57 aa, Glycine max
  Clone ID: PAT_MRT3847_12614C.1.pep
IIRWLKLMKLYCLLVELDLMHQSQGEMFELFKTRSRQSIKDAYCLEQSGVGTRCKVA

SEQ ID NO: 171801 - protein, 120 aa, Glycine max
  Clone ID: PAT_MRT3847_126150C.1.pep
SGIRIDTSSLPFDSTTATPTRKCEKVLFSLDDLKEALRRRGPDSFGAKKVLLQLLGQNGVSSFTVEEDGDAADGAIETAKLHFFGATLQLRGINPLVQPLTDASGNVLVYNGEIFGGLHL

SEQ ID NO: 171802 - protein, 63 aa, Glycine max
  Clone ID: PAT_MRT3847_126151C.1.pep
GETCYFVNFRMMMKVRKVNNPHVYSWTLKERPQTDINSFFIFNLQFYIPFTNIMNSHCQMPNI

SEQ ID NO: 171803 - protein, 258 aa, Glycine max
  Clone ID: PAT_MRT3847_126152C.1.pep
MAPPNPPPTSEPSSSAVQKVKSNLVFRSTWPELNGAMGDLGTYIPIVLSLTLARDLNLGTTLIFTGMYNIITGAIYGVPMPVQPMKSIAAVALADPTFSIPEIMASGILTGATLLVLGVTGLMQLVYKLIPLCVVRGIQLAQGLSFALTAVKYVRKVQDLPRSKSLDQRYWFGFDGLVLAIVCVCFIVIVNGAGEDHDHDHGHGHGEESTHQTQARISKVRKIRRVIFALPSAFLVFVWEVVLTFIRRPKVMHENKFG

SEQ ID NO: 171804 - protein, 191 aa, Glycine max
  Clone ID: PAT_MRT3847_126153C.1.pep
MLCSAQTGKSGLNWLDRLRSNKGIPTGDEPNLDSFLLTAHPQSPQARPNDPPRNPPSEARDEPMPMSTILAELFCMGATLSKTNKKCPRKQTNPKIFLASSATTTTTNSKPSVPAALPAAPSGDPAVPEVEEEAAADRGEDEEEGNELKGFTKSEVTVIDTSSPGWKVDKFVFRKNNVWKVREPVKTQKVI

SEQ ID NO: 171805 - protein, 102 aa, Glycine max
  unsure (1)..(102): unsure at all Xaa locations
  Clone ID: PAT_MRT3847_126154C.1.pep
XRXXSESXRXKXXWMXXXDXVSXXXXLDXLLXXXXIXTFXCXXNHXXXIKXXXXXXICXXVGXXIGXXXXIXXXXXXXKXVXYYGGRXXXKDVGXTXQKXEX

SEQ ID NO: 171806 - protein, 52 aa, Glycine max
  Clone ID: PAT_MRT3847_126155C.1.pep
TKNFESENSKTQLNKTKYVMECTLVKRVNYTNYFLGFVKLKKNSSILILLII

SEQ ID NO: 171807 - protein, 60 aa, Glycine max
  Clone ID: PAT_MRT3847_126156C.1.pep
NQYYLNLELGLNKLTAALQLEQTRLTKQNSQHKHELKIELIDDDQKGGLGVGAQITSEGR

SEQ ID NO: 171808 - protein, 271 aa, Glycine max
  Clone ID: PAT_MRT3847_126157C.1.pep
MFSKLQPQHQQQHQPFQFSRECQTSEDDDSRSSGGPNTAVAQKSVLGGGGCSDGATIEVVRRPRGRPPGSKNRPKPPLIITREPEPAMSPFILEIPGGSDVVEALARFSRRKNTGLCVLTGSGTVANVTLRQPSFSPAGATVATVTFHGRFDILSMSATFLHHASPAAIPNAFAVSLSGPQGQIVGGFVAGRLLAAGTVFVIAASFNNPSYHRLSSEEEAQNNSGGGAGDAQSPPVSGGGVESGHVPAESFMYSCHLPSDVIWAPTPRPPF

SEQ ID NO: 171809 - protein, 61 aa, Glycine max
  Clone ID: PAT_MRT3847_126158C.1.pep
ISNKFMHTQIHIYIHNQLLINFLMTICAGSDRYTKTLHRSLHIYRMYGLCVSLHTSCDVKH

SEQ ID NO: 171810 - protein, 124 aa, Glycine max
  Clone ID: PAT_MRT3847_126159C.1.pep
CEKTTEGGLRTIRAQRRSPSDCPRRSPSYSPYRRSYSRSPYSSDRSRSRSYSPDYRRRKSNYPYHSRRRSYSPYYSRYRSYSRYDRHRSYSRSCSPYSRSPVSIRDRSYSPYDSRYDSPDDHSY

SEQ ID NO: 171811 - protein, 63 aa, Glycine max
  Clone ID: PAT_MRT3847_12615C.1.pep
PAALTTAIVDGHASTADALTSSQSKTQASTKYMLHKQTAMTMLMLINLETQPHLSMPSALYEV

SEQ ID NO: 171812 - protein, 55 aa, Glycine max
  Clone ID: PAT_MRT3847_126160C.1.pep
LLKSARPHRTYRDQEKRSEFCYSSAALAMAAYRCLPGGKKPAVYSLQDTSLAAGV

SEQ ID NO: 171813 - protein, 58 aa, Glycine max
  Clone ID: PAT_MRT3847_126161C.1.pep
ICCRFMNAICIPWFNLYANPERIEVVIHVPLLHTKRKEWLIYGSYSCNLCGHTMWNMR

SEQ ID NO: 171814 - protein, 43 aa, Glycine max
  Clone ID: PAT_MRT3847_126162C.1.pep
GSSSDLGDGGCNRLILKCTRRLRFTFSKPVKLHYYYSFILWRL

SEQ ID NO: 171815 - protein, 122 aa, Glycine max
  unsure (1)..(122): unsure at all Xaa locations
  Clone ID: PAT_MRT3847_126163C.1.pep
QAVSRLLDENMSASGAANMNPASSSSDLESGLWELSNSKLKPMLKARIHSGKRQLGSLLQQLDYIFVTGALFLKRNSTAKLWAXIYLVCLHFWVFYILLSHSSPSNEGRSGAQISLENINNT

SEQ ID NO: 171816 - protein, 155 aa, Glycine max
  Clone ID: PAT_MRT3847_126164C.1.pep
LNSRKADIRVQFKDVPGDIFKCQKQGRNEFVIRLQPSEAMYMKLTVKKPGLEMETVQSELDLSYRQRYQAVTIPEAYERLILDSIRGDQQHFVRRDELKASWEIFTPLLHRIDKGEFKSTPYQPGTRGPVEADKLLLEKAGYVQTHGYRWIPPTL

SEQ ID NO: 171817 - protein, 36 aa, Glycine max
  unsure (1)..(36): unsure at all Xaa locations
  Clone ID: PAT_MRT3847_126165C.1.pep
IHKAFVKFPFHTLIHPIDHVVNSRLYQKKKKKXXXX

SEQ ID NO: 171818 - protein, 80 aa, Glycine max
  Clone ID: PAT_MRT3847_126166C.1.pep
YLKKLVGLKKIKASIGRFVNTSTNILQKGKSGRSDSLKVVYSGTQEFKIASDMRDLFLEFFNHQERLHKRLALEERRVCN

SEQ ID NO: 171819 - protein, 105 aa, Glycine max
  unsure (1)..(105): unsure at all Xaa locations
  Clone ID: PAT_MRT3847_126167C.1.pep
ELVRDPQPPRSXICTTHXAYEPMNSQKXXXXADKXSIASSXXXSFXPSXRINNXTRDXLLRQEXXPQRKXLXSXXXXXRXSPFTXKXXXXXXSSRIPSLRTRACD

SEQ ID NO: 171820 - protein, 33 aa, Glycine max
  Clone ID: PAT_MRT3847_126168C.1.pep
IMCFTNTQNTNFTLSYMGKIHYLLRSHHKLFPT

SEQ ID NO: 171821 - protein, 42 aa, Glycine max
  Clone ID: PAT_MRT3847_126169C.1.pep
LFVDNAVVAMSTQGSMSLLCTSLYEGRTELVQLRIQESRKII

SEQ ID NO: 171822 - protein, 55 aa, Glycine max
  unsure (1)..(55): unsure at all Xaa locations
  Clone ID: PAT_MRT3847_12616C.1.pep
NHHLSAEIAKQYYTLRVYLGFLCATSVFKCYSYFMYKFHSWNAFLQYNXSLWIFL

SEQ ID NO: 171823 - protein, 58 aa, Glycine max
  Clone ID: PAT_MRT3847_126170C.1.pep
INKELSNHHWLKTAGKISICTRQMYRYSLMEFGDFIILLDLQLLHSKYPYLCSRQIQP

SEQ ID NO: 171824 - protein, 216 aa, Glycine max
  Clone ID: PAT_MRT3847_126171C.1.pep
MGTRDVHDDLHTDDDDQEDSELEDQESAKAEKWKNHYSSNHRILLVGDGDFSFSLCLARAFGSAHNLVATSLDSYDSIGKKYSNGLSNVMELQERGCLVFHGVDAKEMSQHFFLKTQRLNKRLLKGFLANAKALIKKEGGEIHVTHKEGDPYNKWDLVKKPEKRGLVLQQVVPFFKDDYPGYDNKRAHGKLSDAPFPVGEASTYKFKVQTSNTCNN

SEQ ID NO: 171825 - protein, 86 aa, Glycine max
  unsure (1)..(86): unsure at all Xaa locations
  Clone ID: PAT_MRT3847_126172C.1.pep
GLGIVGLSERAQTSFLGWFXWVRYRPVIFHRRWEICGLFRPPPIHTREKEGGKRAAGNSPYPFFFGAFGGLDGGLLRMGCWEEERV

SEQ ID NO: 171826 - protein, 78 aa, Glycine max
  unsure (1)..(78): unsure at all Xaa locations
  Clone ID: PAT_MRT3847_126173C.1.pep
DFVSDLNSFRXFLSSLFNFKFKLGKXWISTPTLLSGIGFRGVDFYNSFLSFTLFFSLIPIARQTRSYLKNNLALVQMV

SEQ ID NO: 171827 - protein, 142 aa, Glycine max
  unsure (1)..(142): unsure at all Xaa locations
  Clone ID: PAT_MRT3847_126174C.1.pep
VAPNSARGSRELTRCSQITLAYTQTVKDSVSAQGDSFTNEDERTXKASKDPKSKVKVNPSESNRGSKERSDRKTNKLQSKVSNSNQKKPMNSNKGPSKVTNKNTPSTNSKTVKVPVNVSSESSEGVDEKPVQEVKEPDVGDG

SEQ ID NO: 171828 - protein, 113 aa, Glycine max
  unsure (1)..(113): unsure at all Xaa locations
  Clone ID: PAT_MRT3847_126175C.1.pep
LALSLSLSASAKQLSSQEYKNLNFTKLTLYSNYNTLSNYIKNKHLISNYFNYYTKHSNNTTTKITYSKXLLKIYIEKLIFYPKLINFIKNKEDQCAISKIQCIFNSPPYLIIL

SEQ ID NO: 171829 - protein, 366 aa, Glycine max
  unsure (1)..(366): unsure at all Xaa locations
  Clone ID: PAT_MRT3847_126176C.1.pep
MAEGRRASYQVVMLSHSHPQTLPRPHSSLPSSFLLLLPPSFFRISNNKRLQSSTFALSQNETKFPTQPYKNSNNSPQSLAHISNCKFPLARPLVSSSHPASTNSSTKLLNSMLLFAFLTLQPSYPALAASSDFSTIFGDIGDLSTGFASAFLLIFFSELGDKTFFIAALLAARNSAGVVFIGTFGALAAMTLISVEXTLISVVLGRTFHYVDEILPFRFGETDLPIDDIAAVCLLVYFGVSTLLDASSSDGQKSDEEQKEAELAVSEFSGNGAGILSAASTVASTFLLVFVAEWGDKSFFSTIALAAASSPLGVIAGALAGHGVATLLAVLGGSLLGTYLSEKVIAYIGGVLFLVFAAITLFEIVQ

SEQ ID NO: 171830 - protein, 78 aa, Glycine max
  unsure (1)..(78): unsure at all Xaa locations
  Clone ID: PAT_MRT3847_126177C.1.pep
MARIKPQALLQQSXRKKGPSRISAVTAIFYLLILALVGFFLFASYIHLSSRSLLQSVDHLSVSEGDNTFVDSKRSELP

SEQ ID NO: 171831 - protein, 109 aa, Glycine max
  unsure (1)..(109): unsure at all Xaa locations
  Clone ID: PAT_MRT3847_126178C.1.pep
QHANILWYFGLYPAACSYSECRKSDEEQKEAELAASEFSVNGSXILSAASTVASTFLLLFVAXWGYKSFFSTIALAASSSPLGVIXGALAVHGVATLLAVLGGSLLGTN

SEQ ID NO: 171832 - protein, 86 aa, Glycine max
  unsure (1)..(86): unsure at all Xaa locations
  Clone ID: PAT_MRT3847_126179C.1.pep
SEVFGLQRFRQCELIHGRWAMLATLGALTDEWLTGVTWQYTGKVXLAEGSLYLXXPLPFSITTLIWIEVLVIGYIXFQRNAELDPK

SEQ ID NO: 171833 - protein, 247 aa, Glycine max
  Clone ID: PAT_MRT3847_12617C.1.pep
MASFQGINNNIETLIPPELLITQIMQLHASISKLETLRPCKQVNSLFTHLVKLCTLPSSIGIESLPQEVQDMRESLINLSGRAEGLLELEFSTFISLTPEPMKNVTLFPYYGNYVKLANMESKILTENGVVNPKKVAFVGSGPMPLTSIVMATHHMESTHFDNFDIDEEANEVARKIVASDVALEKRMKFETQDVMEVRERLGQYDCIFLAALVGMSREAKVKILGHIRKYMKEGGVLLVRMQKGKG

SEQ ID NO: 171834 - protein, 95 aa, Glycine max
  Clone ID: PAT_MRT3847_126180C.1.pep
PFIAEWGSGMAGIAVGGGIYASTNPPFAIASFFTMDLFNLSTISFLMWLNLGVLWFPIGFFFIAPQGLPQPNHQKKTKRPDGLSYAWTYAWADAW

SEQ ID NO: 171835 - protein, 116 aa, Glycine max
  Clone ID: PAT_MRT3847_126181C.1.pep
MSEKFSAALRIGDLNDFIAPSQACIVSLKGLKKNDKPEVSNAIKQVKFEPVKISLKDMLACRGKKYFTLKDCVSYGDAVDNVKEQLLFGIIIYLSGNAVDASQSAETVVLGEAKFG

SEQ ID NO: 171836 - protein, 474 aa, Glycine max
  Clone ID: PAT_MRT3847_126182C.1.pep
MSEKFSAALRIGDLNDFIAPSQACIVSLKGLKKNDNSGLSFFFNQVKFEPVKISLKDCLACSGCVTSAETVMLEKQSLDEFLNNINSGKAVIVSLSPQSRASIAFHFGISPIQAFKKLTRFFKSLGVKAIFDTSCSRDLTLVESCVEFITRYRQNQVVEDERSKSSLPMIASACPGWICYAEKQLGSFVLPYISSVKSPQQTIGVIIKNYVCQELGLRPEEVYHVTVMPCYDKKLEAARDDFVFQFESHAEGRESEINMISEVDSVLTTGEVLELIQSKEVDFKSLDETTLDKILTNINEDGYLYGVSGSSGGYAETIFRYAAKTLFGRQIDGPLTFKNIRNSDFQEVTLEVEGKTVLKFALCYGFRNLQNIVRKLKTGKCDYHFLEIMACPSGCLNGGGQIKPSSGQSPKELSQLLESVYMENVLVASPFDNPIVKGLYDKWLEQPGSVKAGRYMHTQYHPVEKSITSQLHNW

SEQ ID NO: 171837 - protein, 192 aa, Glycine max
  Clone ID: PAT_MRT3847_126183C.1.pep
TAARRRQKGKVKPSLKATSDSGKPSSAFVNSGFPSNLDNTNKKNSDNHFEDSTKSRSRVMQAHLQHLRADHAEVGSQNKLAEMSSKYRNSESGVSQDFDLEGRSESNRRVPANASKPQDSKRGNVSYPVKEIKRQTPNSVEEMADGGKDSVADRNHSDQKKRESSSDENSCSYSKYEKDEPELKGPIRTFSQ

SEQ ID NO: 171838 - protein, 66 aa, Glycine max
  Clone ID: PAT_MRT3847_126184C.1.pep
IAECAEVKSVTERICVKGHHGNFLYAWSASSGSCLSGLGEINTCMKVTWYVAIISSGGAPSQVYSR

SEQ ID NO: 171839 - protein, 240 aa, Glycine max
  Clone ID: PAT_MRT3847_126185C.1.pep
MEDSSAGEDTKTCPRGHWRPAEDEKLRQLVEQYGAQNWNSIAEKLQGRSGKSCRLRWFNQLDPRINRRPFTEEEEERLLAAHRIHGNKWALIARLFPGRTDNAVKNHWHVIMARKQREQSKLCGKRSFQDVYNDSNNTFLEKRTTPQSHHQDMLFSTRFGLENGIFFDFRSLDKNKDDSNNNNHRIVSDTPSSTSLASWNFGSVPTTTTKGARDNFNNTSRSSSVYLSECSRSSDRSFLY

SEQ ID NO: 171840 - protein, 110 aa, Glycine max
  Clone ID: PAT_MRT3847_126186C.1.pep
MQQQVSMMVPQYGGYGGNGYGMQQQQHQVPPYNNQVPVAGGGGYGHRYGNSQMAGPVSGDYGARVPPNSGGGYPDGSQYGFPPSSGHPPQPRVPMARPPGGMYQGAPPYY

SEQ ID NO: 171841 - protein, 123 aa, Glycine max
  Clone ID: PAT_MRT3847_126187C.1.pep
KRFPLKRIIDFGSGIDEFTLKHLYGSTGPSRAEQTYEYTPPEALLNATWYQGPTSSTLKYDMWSVGVVMLELVLGTPNVFQINALTRALLDRQLEGWNEGVKELAYKLRSFMELCILIPGISR

SEQ ID NO: 171842 - protein, 41 aa, Glycine max
  unsure (1)..(41): unsure at all Xaa locations
  Clone ID: PAT_MRT3847_126188C.1.pep
DHIAAQTFXSFRELATVTRNYRAECLLGEGGFARVYKGRME

SEQ ID NO: 171843 - protein, 41 aa, Glycine max
  Clone ID: PAT_MRT3847_126189C.1.pep
AALHSEFRFRGMQLDAAQTDDDEDCELLATVRCGKYHIAPI

SEQ ID NO: 171844 - protein, 63 aa, Glycine max
  Clone ID: PAT_MRT3847_12618C.1.pep
FSFLLYSVLYYLWEKDKVSHFELIYVCLIYIYLLSFFMFLLFRMRGRTRGRSKRPRKRGRTRG

SEQ ID NO: 171845 - protein, 272 aa, Glycine max
  Clone ID: PAT_MRT3847_126190C.1.pep
EVDRRDLVGESRSHRDCNIEMETPKRFEGKVAIVTASTQGIGLAIAERLGLEGASVVISSRKQQNVDAAAEQLRAKGIQVLGVVCHVSSAQQRKNLIDKTVQKYGKIDVVVSNAAANPSVDAILQTKDSVLDKLWEINVKATILLLKDAVPHLQKGSSVVIISSIAGFNPPPSLAMYGVTKTALLGLTKALAAEMAPNTRVNCVAPGFVPTNFASFITSNDAVKKELEEKTLLGRLGTTEDMGAAAAFLASDDAAYITGETIVVAGGTPSRL

SEQ ID NO: 171846 - protein, 71 aa, Glycine max
  Clone ID: PAT_MRT3847_126191C.1.pep
TSPFPQPPIGDKIVSSVWHEGSCLFIDFNNERQIKIHTFEKKGLVKIGKITVTFILNFNWCRDQQVTKNFK

SEQ ID NO: 171847 - protein, 62 aa, Glycine max
  Clone ID: PAT_MRT3847_126192C.1.pep
KKAPGFRTFTFRNSSQITWVNLSKNLLLAYQSFAVAYADLSTPPFYAFTSTSSGKLHNHHHA

SEQ ID NO: 171848 - protein, 91 aa, Glycine max
  unsure (1)..(91): unsure at all Xaa locations
  Clone ID: PAT_MRT3847_126193C.1.pep
LSXFIFCCYFFSFFLVIVWFSVAPKRKKNIFPLSNLRRAINPLSKVNGRGGPPGNHGPVSWGGPNFPYGRGLKAWGKKRAKLFPLGKNRFP

SEQ ID NO: 171849 - protein, 65 aa, Glycine max
  Clone ID: PAT_MRT3847_126194C.1.pep
PKDVPLLLYSRFLWHVEFDFGPPLMKNSAGINGCLMLCSHPTGSYIRYAHCCDKKDCLDNLHPFP

SEQ ID NO: 171850 - protein, 614 aa, Glycine max
  unsure (1)..(614): unsure at all Xaa locations
  Clone ID: PAT_MRT3847_126195C.1.pep
AFVKKKWAYHAASVSQLNTKPHRLFSLRTSFRHIIFFYNINPGSSPKMLPLRPQAQVGGLQTSLSLVSSDPLLSPDEPRSNSNNLHESPAESASSQETWPTADAAAAKKMENGKAEVNCLEQKVIHRVSSSDKVTLQDVARESVCMICEKMHHLPEEYLEELKNGLRSILEGGNGSQHREDFFILQKLVQSRTDLTAKTLVRAHRVQLEILVAINTGIQGFLHPSISLSQTSLIEIFGYKRCRNIACQNQLPADDCTCEICTNTNGFCNLCMCVICNKFDFEVNTCRWIGCDLCSHWTHTDCAIREQLICMGPSAKSGAGPSEMVFRCQACNRTSELLGWVKDVFQHCAPSWDGEALMRELDYVSRIFHGSKDPRGRKLFWKCDDLKEKLKSGKVESKAVAXAILMFFQELEVDSAKCLENGESGTLIAPQDACNRIAEVVQEAIRKMEMVADEKMRMFKKARLALEACEHELADKAREVTELKMERQKKKLQIEELEKIVRLKNAEADMFQLKANEAKREAERLQRIALAKQDKSEEEFTSNYLKQRLNEAEAEKQYLYEKIKLQESSRASQSSSGGDPSQMLMYSKIHDLLYSVPSKADSQGNERHPFRTNP

SEQ ID NO: 171851 - protein, 141 aa, Glycine max
  Clone ID: PAT_MRT3847_126196C.1.pep
PRVRPRVRREKQKALGQSSKLSLVKDCETRWNSILLMLQRYSQLREPLAAAHAHFSQHLDAPDLQQLDAVTKVLGPLKWMSNLFSTDKQPYFGSVLVVVWVALKRHLVSLPEDLDFIRRMKDAIRSRLQEWIASLQLETNK

SEQ ID NO: 171852 - protein, 199 aa, Glycine max
  Clone ID: PAT_MRT3847_126197C.1.pep
GRSEQDELPAAQIFYPCMQCADIFFLKADICHLGMDQRKVNVLAREYCDDIKRKNKPIILSHHMLPGLQQGQEKMSKSDPSSSIFMEDEEAEVNVKIKKAYCPPKTVEGNPCLEYIKYLVLPWFNEFTVERSADNGGNKTFTSFEELTAAYKSGELHPGDLKPALAKSLNKILEPVREHFRKDSNAKELLKRVKAYRVK

SEQ ID NO: 171853 - protein, 395 aa, Glycine max
  unsure (1)..(395): unsure at all Xaa locations
  Clone ID: PAT_MRT3847_126198C.1.pep
ESNAMEQPLTEAVESLSVSDPEIPQSSNPNPTHLLTPDEKFQIVRSVGEECIQEDELLNLLTKKPEPVCYDGFEPSGRMHIAQGVMKTINVNKLTSAGCRVKIWIADWFAKLNNKMGGDLKKIETVGRYLIEIWKAVGMDLDSGKVEFLWSSKEINARADEYWPLVLDIAQKNNLKRIIRCSQIMGRSEQDELTAAQIFYPCMQCADIFFLXADICQLGMDQRKVNVLAREYCDDIKRKNKPIILSHHMLPGLQQGQEKMSKSDPSSSIFMEDEEAEVNVKIKKAYCPPKTVEGNPCLEYIKYLVLPWFNEFTVERSADNGGNKTFTSFAELTAAYESGELHPGDLKPALAKSLNKILEPVREHFRKDSNAHAHASEKGQGLQSHQIICSLKTSG

SEQ ID NO: 171854 - protein, 91 aa, Glycine max
  Clone ID: PAT_MRT3847_126199C.1.pep
RLQMIALAKQDKSEEEFTSNYLKQRLNEAEAEKQYLYEKIKLQESSRASQGSSGGDPSQMLMYSKIHDLLYSVPSKADSQGNERHPFRTNP

SEQ ID NO: 171855 - protein, 83 aa, Glycine max
  Clone ID: PAT_MRT3847_12619C.1.pep
RKKKNRKGWSGYIVAKDGSMLWRSKGDRNLNRWISEFERRSAQIVIDSEENNACLSVIFAICLYYFYGRIVFLLYLLGLITLF

SEQ ID NO: 171856 - protein, 46 aa, Glycine max
  Clone ID: PAT_MRT3847_1261C.1.pep
GISMDSMHKMLATGGNNKAWRMNRTSDLPRQAINTMLSSNKTIRRI

SEQ ID NO: 171857 - protein, 31 aa, Glycine max
  Clone ID: PAT_MRT3847_126200C.1.pep
RMLCGLIRSGVRTNQKRRDPKIRIDLILSNV

SEQ ID NO: 171858 - protein, 297 aa, Glycine max
  Clone ID: PAT_MRT3847_126201C.1.pep
MQQQQQYPNGAVSDPDSRAIVPVPEEGRSSSVAVTTPRQRRFKELVRLTDVGGPEQRHFRDVVRRTRMVYDSLRVLATVEDEGRVDARRGRSDLRASAVMRNCGLWLNRDKRIVGAIPGVCIGDVFLYRMELCVVGLHGQPQAGIDYLPASMSSNGEPIATSVIVSGGYEDDVDEGDVIIYSGHGGQDKHSRQVFHQKLEGGNLAMERSMHYGIEVRVIRGVRYEGAASATGRLYVYDGLYRIHECWFDVGKSGFGVYKYKLCVDDGPTIMGTLLVFTALMLKKDPLEFQTHVLFGL

SEQ ID NO: 171859 - protein, 84 aa, Glycine max
  Clone ID: PAT_MRT3847_126202C.1.pep
RPSFFFFWFFFFFTIGIFEPRHYDLIRVRINITKRRNMLLITNLDYFLLVDEQNHRSRGIKKNLTLGASFILESEAHTGGTLTM

SEQ ID NO: 171860 - protein, 61 aa, Glycine max
  Clone ID: PAT_MRT3847_126203C.1.pep
AIMHITHFFKNTNTSLKIYTYFVHNDTSMLIYSKPNFQDKTEIPRFSLKVRDNEKRYWMLK

SEQ ID NO: 171861 - protein, 99 aa, Glycine max
  unsure (1)..(99): unsure at all Xaa locations
  Clone ID: PAT_MRT3847_126204C.1.pep
RFDVRRVECGIHFGFPLTVICNSIFNEMLIRYSYEKLLRQAKAPSMFXQSFKNSVSLCEYGDDNXTRDHEYVKPYFRGCKLKSFLAGHNITMTGGFDIT

SEQ ID NO: 171862 - protein, 107 aa, Glycine max
  Clone ID: PAT_MRT3847_126205C.1.pep
SLFMLPPDPDSLWGLLIEFLLNKAQYFASDMQFQPDYPFRGPLNLNPCLPLNSRSPRFNANTNMFFHDKYKCISFSICPKCPRKDQKLETMNLKVLNQTVASIRGVI

SEQ ID NO: 171863 - protein, 43 aa, Glycine max
  unsure (1)..(43): unsure at all Xaa locations
  Clone ID: PAT_MRT3847_126206C.1.pep
TIMLHKRLHGCTFKXKAPRAIKEIRIFARKATGTTDVRVDVKL

SEQ ID NO: 171864 - protein, 95 aa, Glycine max
  Clone ID: PAT_MRT3847_126207C.1.pep
PMVSEQSYPRIVTEFSTNSSKKHSRSCRAYNSSKINSNYCLLLEPSLPQKPYLNFTSAVSLRNVPLRSRKKKKKKENEVRKLGFLSSPSTGFKLS

SEQ ID NO: 171865 - protein, 124 aa, Glycine max
  Clone ID: PAT_MRT3847_126208C.1.pep
PTRPWLQFCNPELSGIITKWLKTDKWVTNLDLLTGLRQFADNEDLQAEWLSAKMASKQRLARYVLQVTGESIDPDSLFDIQVKRIHEYKRQLLNILGVIYRYKKLKEMSPEERKKTTPRTVMIF

SEQ ID NO: 171866 - protein, 76 aa, Glycine max
  Clone ID: PAT_MRT3847_126209C.1.pep
TILGSFKTCQSHNSSLDQSSIFIIILLDSFLVFSFLLSFNILFLNHIPESTLFKSQLSKQFFSKNRKKKNNKRVGL

SEQ ID NO: 171867 - protein, 54 aa, Glycine max
  Clone ID: PAT_MRT3847_12620C.1.pep
CSVFKSILLAFGLFIRCLKDNQRSYYCEVFIIRHYCMCFYMNSEIIVEYVLIWK

SEQ ID NO: 171868 - protein, 846 aa, Glycine max
  unsure (1)..(846): unsure at all Xaa locations
  Clone ID: PAT_MRT3847_126210C.1.pep
MAAKVDANGGGGKGGVSAVSAKVPAVAHPLAEKPDEVASNISYHAQFSPHFSPFKFELEQAYYATAESVRDRLIRQWNETYLHFHKVDPKQTYYLSMEFLQGRALTNAIGNLNIQDAYANALRKFGLELEEIAEQEKDAALGNGGLGRLASCFLDSMATLNLPSWGYGXRYRYGLFKQRITREGQEEVAEDWLEKFSPWEVVRHDILYPIKFFGHVEVNPDGSRKWVGGEVVQALAYDVPIPGYQTKNTISLRLWEAKASAEDFNLFLFNDGQHDAASVLHSRAQQICAVLYPGDTTEGGKLLRLKQQFFLCSASLQDIISRFKERRQGPWNWSEFPTKVAVQLNDTHPTLAIPELMRLLMDDEGLGWDEAWDVTSKTIAYTNHTVLPEALEKWSQPVMWKLLPRHMEIIQEIDKRFTAMINTTRLDLENELSAMRILDDNPQKPVVRMANLCVVSSHAVNGVAQLHSDILKSELFANYVSIWPTKFQNKTNGITPRRWLQFCNPELGGIITKWLKTDKWVTNLDLLTGLRQFADNEDLQAEWLSAKMASKQRLARYVLQVTGESIDPDTLFDIQVKRIHEYKRQLLNILGVIYRYKKLKEMSLEERKNTTPRTVMIGGKAFATYTNAIRIVRLVNDVGAVVNSDPEVNGYLKVVFVPNYNVSVAEVLIPGSELSQHISTAGMEASGTSNMKFALNGCLIIGTLDGANVEIREEIGEDNFFLFGATAEDVPRLRKERENGLFKPDPRFEEAKKFIRSGVFGSYDYNPLLESLEGNSGYGRGDYFLVGHDFPSYMDTQAKVDEAYRDRKRWLKMSILSTAGSGKFSSDRTIAQYAKEIWNIEECRVP

SEQ ID NO: 171869 - protein, 125 aa, Glycine max
  Clone ID: PAT_MRT3847_126211C.1.pep
LTSRLKPSGMMSCKDDHQDDEMVHSKPNLQCISGDKSPSESCGSTLGGKGLDLSCIVLPSNNFKDGDSCYIETARSSQLGRTDYSKSAKKSLRKNQVKPSEVAISIASNEGSPLLSSSRSRTRAG

SEQ ID NO: 171870 - protein, 46 aa, Glycine max
  Clone ID: PAT_MRT3847_126212C.1.pep
FFFFLNTFERKQDTSKNMVSGKPKTKCSKNNSFFCYMYGQKINVVP

SEQ ID NO: 171871 - protein, 122 aa, Glycine max
  unsure (1)..(122): unsure at all Xaa locations
  Clone ID: PAT_MRT3847_126213C.1.pep
TGRNPGTHAPNSDRSXQQTTGGHSQPKGTAGTPAQKAPEARPRREHDGKAADERTSGGTPHGKRXGAKPKEDPEDPRNXRKTLQRNXSDHXPKPDKARNTKERRHPXTRETRAHPEKRTTRP

SEQ ID NO: 171872 - protein, 36 aa, Glycine max
  Clone ID: PAT_MRT3847_126214C.1.pep
ISEFCRFISEMLGDVSFSRLIIRAIYVEYFQNIPFL

SEQ ID NO: 171873 - protein, 58 aa, Glycine max
  Clone ID: PAT_MRT3847_126215C.1.pep
TYGLVQPRTGNKGPPYLRWVPPLLTRDFCKQTGFVCIEQLRFSVKFIPSAQFGLTIPD

SEQ ID NO: 171874 - protein, 126 aa, Glycine max
  Clone ID: PAT_MRT3847_126216C.1.pep
RDFFIQNCRGKASRWDLESINKLLEEGAQSESPSHSLSTFYYIFIFFLTHDLSIFPSKNGGNSLHGGATATLVALVGAAAILSAGHSSDSGVSVEINVSYFGAVYAHVSTLSIFFNSFITFLVTCN

SEQ ID NO: 171875 - protein, 73 aa, Glycine max
  Clone ID: PAT_MRT3847_126217C.1.pep
ASAEAGKGKEKSALESAKGANINSQSSKRRASASAGISKSVKSADTSAVDLADDSPIIFSRKDSRTPKTKRRV

SEQ ID NO: 171876 - protein, 140 aa, Glycine max
  unsure (1)..(140): unsure at all Xaa locations
  Clone ID: PAT_MRT3847_126218C.1.pep
QMQPKXSGXXSXNVXXSLTAWXDSXNXXXXXXXWXXXXXPXXQVXXXXYGIAXXXXDKRXEXXXXXXPXSXXAXVRLXRQLXXSXAXPRXXHXXVXXYXXXXLSSSXXTXXHXFTKSXXHIAHXXXXKRIYXSXXXPTXF

SEQ ID NO: 171877 - protein, 79 aa, Glycine max
  Clone ID: PAT_MRT3847_126219C.1.pep
DAIVGSYATLTFAYPYTVTRTSSKQPPALIRGLSHNLGFGRFGLFLSRVPISGLSGGVPPPNLLTCPPPPPPKKEDVIQ

SEQ ID NO: 171878 - protein, 133 aa, Glycine max
  Clone ID: PAT_MRT3847_12621C.1.pep
VAELVTLSAMTNKEYGDNNKISVCETSMLLVANIIRLSSLRFSGHSFRKDLDPPQEEATYVGKGNESSVSKFYKSDRTQEPERIKRPRSYLMKPPKEDPTNYVSQALDDVDINAENYISHIRGKIRDSGNIEY

SEQ ID NO: 171879 - protein, 41 aa, Glycine max
  Clone ID: PAT_MRT3847_126220C.1.pep
CFSYELERVACEEKKALFSKFLQMHPNLSSDTCSLFLGLVR

SEQ ID NO: 171880 - protein, 56 aa, Glycine max
  Clone ID: PAT_MRT3847_126221C.1.pep
MRSILSLCLSSTWSNGLLSAIPSMVTCSRLDSPFTTKTNNPQQQIKFKFMIMLSFQ

SEQ ID NO: 171881 - protein, 60 aa, Glycine max
  Clone ID: PAT_MRT3847_126222C.1.pep
SGRPFFNFFLFFCLFFFFFFFFFFFLPKLRSTSIYRKAMHLNLHDTRLSPSNPNSKPFTI

SEQ ID NO: 171882 - protein, 78 aa, Glycine max
  unsure (1)..(78): unsure at all Xaa locations
  Clone ID: PAT_MRT3847_126223C.1.pep
GGXXISPGTPFAQSPPIVKSRPRGGIWSRSWSGPEIISRVDEIPSRWPPLFFLFDGDYTFNKSSLESQASNVSQGTSQ

SEQ ID NO: 171883 - protein, 272 aa, Glycine max
  Clone ID: PAT_MRT3847_126224C.1.pep
MKERGTFQPLFNALPNSLIILQSFNFIPSLLSTTPSSFPSFLLSQAEKEMECLEAALKSSFRKDMALKQTLFLEEFSSSSNVQNVVASSDDLFADDLLNFSLLENNTNNNNNNEEPDQQLNNHDSTTPQNNQENYNYNPSVNDNNFNTELTVPAEEEVADLEWLSRFVEDSNFSEYSLPFPATVTEKVKVKSPEPGNTAFTFKTPVPAKARSKRTRTGVRVWPLKSPSLAAASSTTTSSSSSSSPSSPQRADSRARSVPLRTAAPRDGAATV

SEQ ID NO: 171884 - protein, 54 aa, Glycine max
  Clone ID: PAT_MRT3847_126225C.1.pep
IMIIIFLYLDGGFSYEDCYIHKLYTFIYDSVGSPVSLGSFLLSPWGQLQFFAIF

SEQ ID NO: 171885 - protein, 65 aa, Glycine max
  Clone ID: PAT_MRT3847_126226C.1.pep
GPRSFFLKPPWFFLEGGKHSLKLGVNGGTMLFFPKETGHPPHAVQESLAPRAPWLPQIFTSFSNS

SEQ ID NO: 171886 - protein, 50 aa, Glycine max
  Clone ID: PAT_MRT3847_126227C.1.pep
HLVFIYFFGAIQGPKSCHRSFHYESNDTPMTGIGTQLVNISKFLPFYMKS

SEQ ID NO: 171887 - protein, 43 aa, Glycine max
  Clone ID: PAT_MRT3847_126228C.1.pep
YKQLSLQCLLFVSLIYQIIAGICIIDHDSVPYISFPCHSILIQ

SEQ ID NO: 171888 - protein, 51 aa, Glycine max
  Clone ID: PAT_MRT3847_126229C.1.pep
VRWRSCIMFSTQDHAAVAIVRVCAGVFAWRGETLQVYCGCTERGIDCSPVD

SEQ ID NO: 171889 - protein, 70 aa, Glycine max
  Clone ID: PAT_MRT3847_12622C.1.pep
VTTQHIIILTLIPPLFLLLTLISNSSIYLIYHFLCKNPNTPYSPNYSLSSKFITTPPFFLSNLPHHLHLF

SEQ ID NO: 171890 - protein, 92 aa, Glycine max
  Clone ID: PAT_MRT3847_126230C.1.pep
CSLWHRTSGLCPYASSTMDAWDICHCRPQCLLISYIGGGCVPTRHYPGWVSVITGGVTFKAVVLICIYVRSLVEHSVCYVTSQYVLSRPSSV

SEQ ID NO: 171891 - protein, 121 aa, Glycine max
  Clone ID: PAT_MRT3847_126231C.1.pep
PPLLNFSKMQPCHMWALWCLHASVEPLIEPDRDKKSCCPSEGKRVALDTSHLVLWYVIHPQVLFCLLLHCLVLFLGVFGWHVGYVVRPRWILTCFGLLVCLLGNQAYTFFFMYSFFKQFSC

SEQ ID NO: 171892 - protein, 60 aa, Glycine max
  unsure (1)..(60): unsure at all Xaa locations
  Clone ID: PAT_MRT3847_126232C.1.pep
GGAFRPAWARRCVSPCCCCRGFFCLPSVLCSSFGSVWACVAFLGAFSRSXVXXWCGGGSV

SEQ ID NO: 171893 - protein, 238 aa, Glycine max
  Clone ID: PAT_MRT3847_126233C.1.pep
TAKMVNDDEWVRAAMEDDTVVVELLLRLKQGTVLHKSHHQQLLPFSWGVKQPRSRSRLTSAAVSRCDAAVSTRCSPTTPLSWSAGADSYEDSSRHHHHHAAVSKATATSGYTGNSASTKRCRRKKTFAELKEEESSLLKESIYLKKEIASVNANFEAQRAKNESLKRMKLDVGSKYQNNPSSTSALIRPIQDDTHSHASESRPNKIESTTGKSFFLIPDLNMMPSEDVSCTDNLCGMS

SEQ ID NO: 171894 - protein, 192 aa, Glycine max
  Clone ID: PAT_MRT3847_126234C.1.pep
MAKKRKSISTSLDEVDRTIYSSFSSAANSLSHLYTLSMNHQKLSFQAGERHSLEKLYQWVWRQQESGSRVATVDILSYIQNELDYCGEEPCMSPRAPLHQQQSQPVMQVTTGAGFPVTTGFSGQTIVGQELRPEHCDNQSKNSMFSNALSNPVRQIGEGGNHPSGLSMGNGNQSTDSAAFSSNDSAMDMHAD

SEQ ID NO: 171895 - protein, 94 aa, Glycine max
  unsure (1)..(94): unsure at all Xaa locations
  Clone ID: PAT_MRT3847_126235C.1.pep
LCLGFVKTLTGTNITLDDDTSHTIFLATTLMXQKARILLDQQSLIFAGXQLEDGRTLAHYNILKESTLHLELTLTGGIIEPYLMDLARTFHLAL

SEQ ID NO: 171896 - protein, 60 aa, Glycine max
  Clone ID: PAT_MRT3847_126236C.1.pep
CSFASSQFFSVRLQSALSIALLHRLVSLSSNLFCSSPQSIRATIQSYSDIVRDICFDLKV

SEQ ID NO: 171897 - protein, 77 aa, Glycine max
  Clone ID: PAT_MRT3847_126237C.1.pep
KKLREFFLFHTDQPLETQVILSLPILVLYPLALFSNIVFGKWFKLDVHSRVTGLVTSWDQWHYSQHDTQGDKRVCLP

SEQ ID NO: 171898 - protein, 287 aa, Glycine max
  Clone ID: PAT_MRT3847_126238C.1.pep
EVDCILNMSALTKQIVLDLLPDDELDKDFTDAYSEQLEESDYSSSDDDDNDSQLVEDIQFRNGTSGSMYSFCKGESIGEFVPFEENVSSSPLTTSDKLNSGSEQHQANNCDTVDLDSKVHNTQCNIFTDQCQRESTEIFHTFMACRNNNSSVISPDRELDEYVVKRNEFSESDAKVDATDTTDLFCKEKEPMPTKCSECKNQYLAIQDACDKTSMLAYNLIGHLLEEFVMIEGLDLNLSKSLYLTGNNRIEDVEEEQSSSGKHARDFVQVIEELIPSFPDSSIERLK

SEQ ID NO: 171899 - protein, 133 aa, Glycine max
  Clone ID: PAT_MRT3847_126239C.1.pep
EKGSSQIVIVTSAILSVRDALMDTSRESTLPRTFVYKFGVAVALTLGGVENFPVGACDAGCESLGPVWVVFDVATCLPFGSGRNCHSSRSCCSLKRLRTLWLLICLSCICYEHNLLIVHRSSFLNKWLIHQLF

SEQ ID NO: 171900 - protein, 170 aa, Glycine max
  Clone ID: PAT_MRT3847_12623C.1.pep
GSRKNSRNVAVFQANPLMNGLSPSDYVLSAFSDVHSNDLEQTLLALPFSDALKLLSYLKDWTSYSDKVELVCRIGTLLLQTHYNQLLATPAARPILTVFSDIFYERVKGWKDIFGFNLAAMDHIQQMMASRSDALFHDARSKLLEIRARQSKRLEERSDTGEVKRKKKKT

SEQ ID NO: 171901 - protein, 38 aa, Glycine max
  Clone ID: PAT_MRT3847_126240C.1.pep
VQLFMIVFPSFFGVILLLLYFDMVIVILTNLLVMLKIY

SEQ ID NO: 171902 - protein, 85 aa, Glycine max
  unsure (1)..(85): unsure at all Xaa locations
  Clone ID: PAT_MRT3847_126241C.1.pep
FCFSLLGSWRVSPPPVVGSSVGCAAFPAPFFLPFLCSRWFRPVPSPFRGVFLLVAPWLVLXLPSLWLAPFGLERTVRSARSFRSG

SEQ ID NO: 171903 - protein, 181 aa, Glycine max
  Clone ID: PAT_MRT3847_126242C.1.pep
RLSSQTNELYQLAAVAFCLLSAWCSDKLGLSLELGSFMAGVMISTTDFAQHTLDQVEPIRNLFAALFLSSIGMLIHVHFLWNHVDILLASVILVVVVKTAVAVLVTKAFGYSLKTSFIVGISLAQIGEFAFVLLSRASNLHLVEGKMYLLLLGTTALSLVTTPLLFKLIPAVMNLGVLMHW

SEQ ID NO: 171904 - protein, 90 aa, Glycine max
  Clone ID: PAT_MRT3847_126243C.1.pep
SRVFFFFFSLSKNRYFINLRKYQWYYKYILAVGIYLVPLITEPRKIHLTILHIFIISQPLLVTKLFLSIRGPLIKMYCKILLHGFDPCPN

SEQ ID NO: 171905 - protein, 49 aa, Glycine max
  Clone ID: PAT_MRT3847_126244C.1.pep
LGFRFGSSSISSLYGGQMENQGEGRRLAGKKFPVVWLISGHKMPVLGLG

SEQ ID NO: 171906 - protein, 45 aa, Glycine max
  Clone ID: PAT_MRT3847_126245C.1.pep
LGFLPLWGALIPPRALALTFQRVWFSPKTGEGAHILELKINHPWL

SEQ ID NO: 171907 - protein, 131 aa, Glycine max
  Clone ID: PAT_MRT3847_126246C.1.pep
QQVYIFGCEGATILVEGKAKNIVFDSCKKTKLIFDNAVSSIEIVNCKGVQVQCKGVVPSVAIDKTDGCLVYISWEGRDVQFVTSKSSEMNVGFPQGAGSDDYVEKPIPEQFVHKITDDLTISSGVSDLYSH

SEQ ID NO: 171908 - protein, 45 aa, Glycine max
  Clone ID: PAT_MRT3847_126247C.1.pep
RDVHIYAAVSRCLNKSSVTTFRDNGRVYLSVGTHHTMHRVPFEVL

SEQ ID NO: 171909 - protein, 38 aa, Glycine max
  Clone ID: PAT_MRT3847_126248C.1.pep
MLLEGCVSKFRIYYSPSFFFFFFFFFFFFFFFFFFFFF

SEQ ID NO: 171910 - protein, 49 aa, Glycine max
  Clone ID: PAT_MRT3847_126249C.1.pep
AYASSHQISSSIPANVFSVNPSYMQHANLSQVQLTTLETSVATGFSVTA

SEQ ID NO: 171911 - protein, 77 aa, Glycine max
  Clone ID: PAT_MRT3847_12624C.1.pep
ISSSVFLLWAITSSARTHPRPRVILDPQGTRAHLHLITHPIRSHYHGRGHQERPTRLVTASPPQSTPPTRNLTFCTT

SEQ ID NO: 171912 - protein, 107 aa, Glycine max
  unsure (1)..(107): unsure at all Xaa locations
  Clone ID: PAT_MRT3847_126250C.1.pep
TCLVCMLENYSLSRQEKEQERCRQWELKKLQGQIIVEKEVXSFKGPECKKKTPRLSTKRAASRRVSLGCQTPKSDSKSTQLFSTGKTDKAHQNEQLNNLDDDVSCLS

SEQ ID NO: 171913 - protein, 51 aa, Glycine max
  Clone ID: PAT_MRT3847_126251C.1.pep
PITYYYSRTDHSCSARQPTEPPGCWDDCGSYHALCTFLHIHFIAGGVAYDK

SEQ ID NO: 171914 - protein, 129 aa, Glycine max
  unsure (1)..(129): unsure at all Xaa locations
  Clone ID: PAT_MRT3847_126252C.1.pep
TTRPLXXYSLFYYTAASRRRREWQKYRSRITGWHPPWTAASLARLPADIRSLLLRATLSLSPRHSPQIAYLLNSSPTSPARVLRRNPPSLKLRARRKPLVNWSNIRGPPSDKESVNWLSSIEEFWRLFP

SEQ ID NO: 171915 - protein, 64 aa, Glycine max
  Clone ID: PAT_MRT3847_126253C.1.pep
QFKKDLNRITVTAPQIVSSINHSFHSTTLNKFSYNIIPTTKKTHTILHRTYLNRENSPTSGHIH

SEQ ID NO: 171916 - protein, 86 aa, Glycine max
  Clone ID: PAT_MRT3847_126254C.1.pep
KYSLYVADLWGHHGKAFIRVSHAISWQVSPSHMRVLKRCSQLSHWTVRIDWLDPPQAGIGGVINSSPFKARSESASKSKGLERAPV

SEQ ID NO: 171917 - protein, 156 aa, Glycine max
  unsure (1)..(156): unsure at all Xaa locations
  Clone ID: PAT_MRT3847_126255C.1.pep
MASAATISLSEAEPEAPKVHASDISSIKALAESKGASHIPSTNHSIIDLHDDVADELAASIPVIDLSLLTSHDPQIHTKALYQLGKACAEWGFFMLTNHEIPEKLVEDVKKKSREFHDCPVEEKEFSDKGPFTPIRYGTSCDPXTGECHYWERYLK

SEQ ID NO: 171918 - protein, 63 aa, Glycine max
  unsure (1)..(63): unsure at all Xaa locations
  Clone ID: PAT_MRT3847_126256C.1.pep
VFWNNLLILVFIFPYLREKXNQNXQIVXKHXETXXXXHXXKXVXIVLXXKKKXNXXGXPXXGL

SEQ ID NO: 171919 - protein, 67 aa, Glycine max
  Clone ID: PAT_MRT3847_126257C.1.pep
IMRRRRHGATLAAVFGGISVEDAEYVDDKNQDDAEEKRVEDDLGAEDKIQDNVEARVEDDLGDHADA

SEQ ID NO: 171920 - protein, 102 aa, Glycine max
  unsure (1)..(102): unsure at all Xaa locations
  Clone ID: PAT_MRT3847_126258C.1.pep
HGSRHGRCGVCGPVFINKLHEDIVLRGLXIRSLVLLDHIYVGHKSAGXCIIYMPRSIGKIMCHWYGYDTSNDVSYLMHQHIAKXEVIQLLLMGQMMTSDTNC

SEQ ID NO: 171921 - protein, 234 aa, Glycine max
  Clone ID: PAT_MRT3847_126259C.1.pep
VQDLRIQVGFESESVEISAIYSCSGRPTLMSSGAVRMGDLYAEEERELLVELRVPASSGTGAHNHVMTVRCLYKDPATQEIVYGREQGLLVPPPQSSGTRIERLRNLFITARAIAESRRLLEHSPDFTSAHHLLASARVLLMQSNSASAQEYVRGLEAELAELHWRRQHEQMQVQVQQRRRGAEREVMALLDENGEPLTPTSAWRAAEKLAKMAMMKKSLNRVSDLHGFENARF

SEQ ID NO: 171922 - protein, 435 aa, Glycine max
  Clone ID: PAT_MRT3847_12625C.1.pep
STANCSMGAPPIQEFWEWEMGDWRKSRAFRILAIDRGHVSYVDTDFKSGTKRAIILPTFPLDSRFMLTSSCRHNYECQSVAPSSYETIRALVFSLSPIVSVVARVYDSRSGNLDLVLETQMIKHSGDNSRGNLYVAPWNYRAFEDASPDRFWLQIEANDIAGRSTLTELRPFSINGHSLKLSWGWKEFLVMGCQWASLYYPLFWSALYFLFIFLLLPKALLVFPKKIYTYKNFIANKGIVNGVLWFLQELCRIPTLWFGWIGYLFYLMLCPWFMGQVFTEGKNMVYMTYMGWAIETSNGKGKVEYVGSPDIMVVVLPHLLFVVLPAILVTGALTAERAIYREHMLAFLVKKKDDICMDSRKSVLNGSMVSNVHLSKRLIRKLLFVVCLAICWKHFMNCRTLLKAYEMNPVLHFLGYGISIPLLLAHAISKTRSAE

SEQ ID NO: 171923 - protein, 119 aa, Glycine max
  Clone ID: PAT_MRT3847_126260C.1.pep
LVEHSADFTSAHHLLASARVLLMQSNSASAEEYVRGLEAELAELHWRRQHEQMQIQQQQMMQQRRRGSEREVMALVDENGEPLTPTSAWRAAEKLAKMAMMKKSLNRVSDLHGFENARF

SEQ ID NO: 171924 - protein, 113 aa, Glycine max
  unsure (1)..(113): unsure at all Xaa locations
  Clone ID: PAT_MRT3847_126261C.1.pep
LFHEVAALKQXXXKTKAALNISNGKLRLKEEXAVTAIAAQEAAERSLRLADTRAVELRRQVEELTRQLEEAEKHEHNSHKVRRICWPWQVFKLSSDIASKSWKCQKDATRNAS

SEQ ID NO: 171925 - protein, 126 aa, Glycine max
  Clone ID: PAT_MRT3847_126262C.1.pep
FFPPFGTGSKGAPICFSLGQFKRGPPKIGGLLKKTPAPFLEGAFNLLKKEKFIGGSAPPVFLCNHKGGRGLNPKVFPPHFFFVQFFREGRTLVLVFFTLFYGPLRGILSVFFSKFFFVEKIATPEG

SEQ ID NO: 171926 - protein, 64 aa, Glycine max
  Clone ID: PAT_MRT3847_126263C.1.pep
PTRPPTRTVCSINLTSLSRGGYLSLSLERTAQDRWKHNDPTLTQAPLTYKAYHYHLNCCSICCQ

SEQ ID NO: 171927 - protein, 97 aa, Glycine max
  unsure (1)..(97): unsure at all Xaa locations
  Clone ID: PAT_MRT3847_126264C.1.pep
SCSVINIIVLDFFVATILVAWXCHAYYMCPLRMNTGYGARTLEVKCAALRLAVEAHNIVGFETIPEECVEASTEYIHGKHYTSDSQTVNQQAYFYAR

SEQ ID NO: 171928 - protein, 110 aa, Glycine max
  unsure (1)..(110): unsure at all Xaa locations
  Clone ID: PAT_MRT3847_126265C.1.pep
AGLHGRLLLISAPAGFGKSSLAVEFCQGLPGHWQSLWLGLSPRDNDPGRFLERLLDGLQHYFXGVGSQALGLLKMRQRHQPFAFEEWLDGLLDELALHLSSTAPLLLVLD

SEQ ID NO: 171929 - protein, 50 aa, Glycine max
  Clone ID: PAT_MRT3847_126266C.1.pep
SQEHIRSTHVLFIDRFSYGVLKYNWKSRARTLLSSTSSTMFQCVRLNFSK

SEQ ID NO: 171930 - protein, 35 aa, Glycine max
  Clone ID: PAT_MRT3847_126267C.1.pep
SSVAIILHTSFLVGALYKHSGSSCKALSSATGRVG

SEQ ID NO: 171931 - protein, 115 aa, Glycine max
  unsure (1)..(115): unsure at all Xaa locations
  Clone ID: PAT_MRT3847_126268C.1.pep
QLWSCNIHNHHVAYNQDANLLPALEYXEHNGFSVIEEPPLSYSPQECGLGHLTLYSMLLREKIFSTDTCYRKSNDLSRMTSKXLKKWGSRKGIKLKDLDIQEEEIDICVHLHAKT

SEQ ID NO: 171932 - protein, 83 aa, Glycine max
  Clone ID: PAT_MRT3847_126269C.1.pep
ESERVFFWILALSWMDSTLHFQLIREFVFLARQLITNFSYTLVFHLPRSFFPCFRSLNSFLWSFITIYLKHLHGSNKCEFIAR

SEQ ID NO: 171933 - protein, 107 aa, Glycine max
  unsure (1)..(107): unsure at all Xaa locations
  Clone ID: PAT_MRT3847_12626C.1.pep
TNPNKFIFSIKKGGFLANVVTGSLVDYQPVIXHLESGHLGWLGIDVAWIEPFXPDDXIFKFKXNVIMTPHVCRRSRSILXHPMAKAVVDDVLQLHDGLPFTGIELVN

SEQ ID NO: 171934 - protein, 147 aa, Glycine max
  Clone ID: PAT_MRT3847_126270C.1.pep
VYYVYNIFFLQDGEAYAYLLNALAPEVAGPSALNTSDPTERANMVLEQAERLDCKRYLTPKDIVEGSPNLNLAFVAQIFQHRNGLTTVDSQKMSFAEMMTDDAETSREERCFRLWINSLGIATYVNNVFEDVRNGWVLLEVLDKVSP

SEQ ID NO: 171935 - protein, 111 aa, Glycine max
  Clone ID: PAT_MRT3847_126271C.1.pep
RRKDKMFNADPSFPSVPTLTTEQIQKYLEENKELILAILEHQNMGKFTEIAQCQAKLQHNLTFLAKLADAGSHTPTPTPLPAPTPSQVSQQAIMQQGQRMHQSEVAYRAQR

SEQ ID NO: 171936 - protein, 68 aa, Glycine max
  Clone ID: PAT_MRT3847_126272C.1.pep
HSLINKHAFSVLQNRSQEAGYSVEQLVDAKIRSTRDTYFITRTGNKVACSVQGSGCAKKQVCSPPPRF

SEQ ID NO: 171937 - protein, 43 aa, Glycine max
  Clone ID: PAT_MRT3847_126273C.1.pep
YPPLGLFLGCKLELIQLTFSVHRNIDFCHGSSNILDSVNKHLE

SEQ ID NO: 171938 - protein, 55 aa, Glycine max
  Clone ID: PAT_MRT3847_126274C.1.pep
LYAIKILLAMRSPQFTTHLCTHQAASRPRDRNTTRDILPEAEPPPYKPPTDPAPC

SEQ ID NO: 171939 - protein, 114 aa, Glycine max
  Clone ID: PAT_MRT3847_126275C.1.pep
PVFMDFYGRGPARNVHNPVNQPEWRSPGTDTGLEESMWHLTLGGGGESYPERPGVPNCVYYMRTGVCGYGGRCRYNHPHDRAAVGAAVRGTGDYPKRVGEPSGQYYLKTGTWKF

SEQ ID NO: 171940 - protein, 119 aa, Glycine max
  unsure (1)..(119): unsure at all Xaa locations
  Clone ID: PAT_MRT3847_126276C.1.pep
NQGAVTQCTLVYTPGPPRSLKNXFIPSHXXLXXLXXGSLLPXTGWAYRVCLGPPSWLLTXEYXVLLXXCPHQGFIXLLLTXXLGYPPAXXLGFCPSALXNXFGFXXTGEPLLXTFIXGL

SEQ ID NO: 171941 - protein, 64 aa, Glycine max
  Clone ID: PAT_MRT3847_126277C.1.pep
PAGEDYNIGNYAKAFQLYISAWEDSKTRFTCQKNPKIKDAITPKFTAYLRHAYEIRAVLNYRHR

SEQ ID NO: 171942 - protein, 101 aa, Glycine max
  unsure (1)..(101): unsure at all Xaa locations
  Clone ID: PAT_MRT3847_126278C.1.pep
FRPAKWPDRPGRTKGGFFKNIAGGSKHSLQQNQLNELLTGLELTGMPFFAALKPPIANEPIEKALPKGFNERVQETRVVYRGXKQEQLIKAHPSVGCSITH

SEQ ID NO: 171943 - protein, 57 aa, Glycine max
  unsure (1)..(57): unsure at all Xaa locations
  Clone ID: PAT_MRT3847_126279C.1.pep
SFGPPPVVKPMEFWAQGQAQGNKGGPFFGYPGGDMGQLLPPVXVGPPRGHVFRPPVA

SEQ ID NO: 171944 - protein, 63 aa, Glycine max
  Clone ID: PAT_MRT3847_12627C.1.pep
YLTVVSSTYVPCGPPDITPKHPPEQDPPCPKQVSCPNDTVTSCVCADVEGLINALLGNPPPNP

SEQ ID NO: 171945 - protein, 62 aa, Glycine max
  unsure (1)..(62): unsure at all Xaa locations
  Clone ID: PAT_MRT3847_126280C.1.pep
GREPVEENATLGPDRRDGEHVXGLAGISAYFSDTFIHVTDLSERTTLSLITDGMNVNDDRYE

SEQ ID NO: 171946 - protein, 519 aa, Glycine max
  unsure (1)..(519): unsure at all Xaa locations
  Clone ID: PAT_MRT3847_126281C.1.pep
MAVICPPSQGQTWLPHGPNSNYHFFSRGGVGRRSRSYCTFSSPKTKTNAFTVRGCGQDSVEDHHFVKALRESQPYISVHRGRLFVLLISAQLVAGPYFNPILKDIAFLNHLGIRFVLVPGTHVQIDKLLNERGCQPMYVGRYRITDDESLEAAMEAAGGIRLMIEAKLSPGPSICNIRRHGDNSRWHEVGVSVASGNFLAAXLNCNTYEVATACALAIGADKLICLIDGPILDESGRLIRFLPLQEADMLIRKRAEQSEAAANYVKAVDEEGFNSLEYNNFNGAVKSPPIGRFTEWHNATFHNGVGFESGNGLGSGEQGFAIGGQERLSRMNGYLSELAAAAFVCRGGVQRVHLLDGTISGVLLLELFKRDGMGTMVASDLYEGTRTAGVXKTLDSFIVVEREGHIIACAAIFPHFEEKCGEVACIAVSPDCRGQGQGDKLXLDYMEKKASSLGFNMLFLLTTRTADWFVRRGFSECSIDYIPEKKRRMINLSRNSKYYMKKLLPNISGITVGVKSASS

SEQ ID NO: 171947 - protein, 53 aa, Glycine max
  Clone ID: PAT_MRT3847_126282C.1.pep
RPFFFGGFFYKELDPIHQQSCYTGNLPTEMRDKRKAVHPIRGPSHKTGGPSKT

SEQ ID NO: 171948 - protein, 137 aa, Glycine max
  unsure (1)..(137): unsure at all Xaa locations
  Clone ID: PAT_MRT3847_126283C.1.pep
LEGKGGANPETLRRCCGGNIEGAQQAAHAAITAGXLGLLIDSACTFDGDGRASDTVFIASGNSGIPGRMNGHDITIASGMAANATTAVCTAVDILCVGCAADVITAIDQDGSDGMDILHLIPGANCAPSVTKTTFLN

SEQ ID NO: 171949 - protein, 78 aa, Glycine max
  unsure (1)..(78): unsure at all Xaa locations
  Clone ID: PAT_MRT3847_126284C.1.pep
MHAFVXCFLLLXSHSIASXAEASKTLSGFSIXLIHRESPLSPFYNPSLSPSERXKNTVLRSFARSKRRLRLSQNDDRS

SEQ ID NO: 171950 - protein, 60 aa, Glycine max
  unsure (1)..(60): unsure at all Xaa locations
  Clone ID: PAT_MRT3847_126285C.1.pep
YACVDLCADAWAEMETKLFKLTLDDXESPKGYMLELXRSHTTMAIAKNTALGTNLHSDLL

SEQ ID NO: 171951 - protein, 69 aa, Glycine max
  Clone ID: PAT_MRT3847_126286C.1.pep
PSSRCCIALPESLPYLFSVLLTLNHLRSFLTLPELDPTVDLTLYIGSFCVLHTFSVNLAPFQAPYLDWI

SEQ ID NO: 171952 - protein, 50 aa, Glycine max
  unsure (1)..(50): unsure at all Xaa locations
  Clone ID: PAT_MRT3847_126287C.1.pep
IFSGDNRFTDTTIFNCKXLHNFGCNYTLPTQIRKVLRHYIRWYLYTWPIY

SEQ ID NO: 171953 - protein, 43 aa, Glycine max
  Clone ID: PAT_MRT3847_126288C.1.pep
KLDTRQNRATHQTYTTVTTFILLPLAKDQLEAAQMCFPTDNQS

SEQ ID NO: 171954 - protein, 133 aa, Glycine max
  unsure (1)..(133): unsure at all Xaa locations
  Clone ID: PAT_MRT3847_126289C.1.pep
AAITASRQEEQPRAAPSHPSPTFLPTSESVLINVLVXVKGIFFEDXKFVEIWEMIRMIATVRIIMLKVMVRLLAGRVRFFMLEXVLCFLAGVNFIFTGEKVFTTLNNDFDADXLMFKVFGLFPKAPRLNEGAT

SEQ ID NO: 171955 - protein, 106 aa, Glycine max
  Clone ID: PAT_MRT3847_12628C.1.pep
VFLSQFLFGGPGPPEKKDKVSQPSQVKNPSIWEKNPLILKSGFTEPLGAAKNKPLFLQRGTLNPGIMPKEGVQRKLLSPPGNGHILRAPLQPTISNQAVPSWEGTD

SEQ ID NO: 171956 - protein, 89 aa, Glycine max
  Clone ID: PAT_MRT3847_126290C.1.pep
FRLVTKNRLFMGIVGMTFALQIIIIELLGKFTTTVKLDWKLWLASLCIGLVSWPLAIVGKLIPVPKTPLSRYFRRLRKSKSRAPPPCNS

SEQ ID NO: 171957 - protein, 118 aa, Glycine max
  Clone ID: PAT_MRT3847_126291C.1.pep
PPSGVSCGMMSRPLRRWAARPIRHAEGQPRPKQAEATAQAKAPPEQQRTMLGEARHPRGDQREHDAAAKGTGTQQEKDQPERGQRREAPDARKAKGAETTDGERNGAQQQLTQQINQR

SEQ ID NO: 171958 - protein, 153 aa, Glycine max
  Clone ID: PAT_MRT3847_126292C.1.pep
MLGTVESNGAVCYYSELGIVKHCTDDEIRCAYRKMALKWHPDRWIKDPKLALEAKNRFLRVQEAYSVLSNKGKRRIYDAGLFGLIGEDDDEGFLDFMQEMALMMQKVRPKDEKGMLEDLQGLLIDKMADNEGMEKSGLSWNSSPCPTKRARIL

SEQ ID NO: 171959 - protein, 143 aa, Glycine max
  unsure (1)..(143): unsure at all Xaa locations
  Clone ID: PAT_MRT3847_126293C.1.pep
LPPCRRVLVFKIFSPLTLQGQHDELEAKFFEERAALEAKYQKLYQPLYTKRYEIVNGTTEVEEGAVKETAPDNEEDQEKGVPAFWLTAMKNNEVLAEEISXRDEGALKYLKDIKWSRIENPKGFRLDFFFDTNPYFTKXCLDK

SEQ ID NO: 171960 - protein, 73 aa, Glycine max
  Clone ID: PAT_MRT3847_126294C.1.pep
NSNNFVLILRKRWSTFHIFSTKKYEEKCTGEHTCSLFGILVIPSNRHVETCQVFHTFIKKQNAIKLLISNQKH

SEQ ID NO: 171961 - protein, 126 aa, Glycine max
  Clone ID: PAT_MRT3847_126295C.1.pep
TAYSIDLNACETRLRSVYQHWYAHKTDLWGSYDAIAVACPSPSKDLRILKSTALNIWVLGFEFPETIMGFTKNHIHILCSQKMASILESVKKFALEGGDAYLDFHDKLIKRYGTTLKDTFIPGVSE

SEQ ID NO: 171962 - protein, 191 aa, Glycine max
  Clone ID: PAT_MRT3847_126296C.1.pep
MSNDKDTFNVADLTSALNEDNRADLVNALKSKIQSLAGQHSDILESLSPNVRKRVEVLREIQGQHDELEAKFFEERAALEAKYQKLYQPLYTKRYEIVNGTTEVEEGAVKETAPDNEEDQEKGVPAFWLTAMKNNEVLAEEISERDEGALKYLKDIKWSRIENPKGFKLDFFFDTNPYFTNSVLTKTYHMI

SEQ ID NO: 171963 - protein, 58 aa, Glycine max
  Clone ID: PAT_MRT3847_126297C.1.pep
MHLTEGSVYRRKCDRHHRYGDMVILSEPNRHRGTSPRTREAKGLEDSRDQRAFTEVQH

SEQ ID NO: 171964 - protein, 370 aa, Glycine max
  Clone ID: PAT_MRT3847_126298C.1.pep
MSNDKDTFNVADLTSALNEDNRADLVNALKSKIQSLAGQHSDILESLSPNVRKRVEVLREIQGQHDELEAKFFEERAALEAKYQKLYQPLYTKRYEIVNGATEVEEGAVKETTPDGEEDQEKGVPAFWLTAMKNNEVLAEEISERDEGALKYLKDIKWSRIENPKGFKLEFFFDTNPYFINSVLTKTYHMIDEDEPILEKAIGTEIQWHPGKCLTQKILKKKPKKGSKNAKPITKTENCESFFNFFNPPQVPEDDEDIDEDAAEELQNQMEQDYDIGSTIRDKIIPHAVSWFTGEAIQGDEFGDLEDDEDDEDIEEDDDEEEEEDEDDDDDEDDEEESKTKKKSSAPKKSGRAQLGDGQQGERPPECKQQ

SEQ ID NO: 171965 - protein, 346 aa, Glycine max
  Clone ID: PAT_MRT3847_126299C.1.pep
MFNCEQSKIQSLAGQHSDILESLSPNVRKRVEVLREIQGQHDELEAKFFEERAALEAKYQKLYQPLYTKRYEIVNGTTEVEEGAVKETAPDNEEDQEKGVPAFWLTAMKNNEVLAEEISERDEGALKYLKDIKWSRIENPKGFKLDFFFDTNPYFTNSVLTKTYHMIDEDEPILEKAIGTEIQWHPGKCLTQKILKKKPKKGSKNAKPITKTENCESFFNFFNPPQVPEDDEDIDEDVAEELQNQMEQDYDIGSTIRDKIIPHAVSWFTGEAIQGDEFGDLEDDEDDEDIEEDDDEDEEDDDDDDDDDDDEEESKTKKKSSAPKKSGRAQLGDGQQGERPPECKQQ

SEQ ID NO: 171966 - protein, 67 aa, Glycine max
  Clone ID: PAT_MRT3847_12629C.1.pep
ANLTPKLLFLHALKHPSWPLLLKALPSKLNFVGHDLHPLVYCLRERIQCGHTEDQPPHEDPRFLRPI

SEQ ID NO: 171967 - protein, 164 aa, Glycine max
  Clone ID: PAT_MRT3847_1262C.1.pep
AVDEAYLSHCFAPAGEVVSIKIIRNELTGQPEGYGFVEFVSHATAERVLQTYNATDQTFRLNWASFGIGERRPDAALEHSIFVGDLAPDITDYLLQEMFRAHYPSVRGAKVVSDPNTGRSKGYGFVKFSDENERNRAMTEMNGVYCSTRPMRISAATPKKTTSA

SEQ ID NO: 171968 - protein, 84 aa, Glycine max
  unsure (1)..(84): unsure at all Xaa locations
  Clone ID: PAT_MRT3847_126300C.1.pep
FAYAYGREGTGTGQHWAVWAPFNCLGDLQPNHHQGRKGVAEQDDDVGYEACAKXNERGSLDGAKGGSNKTIAGSHVARYTRRTG

SEQ ID NO: 171969 - protein, 113 aa, Glycine max
  unsure (1)..(113): unsure at all Xaa locations
  Clone ID: PAT_MRT3847_126301C.1.pep
GQPRTEAEAGAGDPQPPXXXXTPXEKXQXGRSXGEEGXQEDEGGNXXTKKPEPXGXEGXEPXGRRHXAQXXXKTXNGNKXTXAXXXXXTRXXXGXAXXXTTKGGDXEKXETGG

SEQ ID NO: 171970 - protein, 75 aa, Glycine max
  Clone ID: PAT_MRT3847_126302C.1.pep
CNVSGQLNCDAPLECLMCFGAMLYLELLFLSSIVDKISFIKKLFKIMYRFFIIDCISWNVNLLSCLLDNFVRLQN

SEQ ID NO: 171971 - protein, 70 aa, Glycine max
  Clone ID: PAT_MRT3847_126303C.1.pep
SSLTQSSPKPQMYGLSLSSVSHRLKITVTELCRRRDAFSLQTPLHSIHVHSNACSPTVPIQLSKKPWMSS

SEQ ID NO: 171972 - protein, 152 aa, Glycine max
  unsure (1)..(152): unsure at all Xaa locations
  Clone ID: PAT_MRT3847_126304C.1.pep
MTHALPRGGGIRLEFGFLLYPFSNFIHPDAFAEKLLSILGPMFXGPLDIMRXWCFCLFYAMAASRGSEVISALFWAVANHITTMEKAERSHPLVGLAANVTLMFSGRTXDIFCNLRQTSCSGVHGWAISLKAMTNIPAGMGLAVRFLPWWGN

SEQ ID NO: 171973 - protein, 36 aa, Glycine max
  Clone ID: PAT_MRT3847_126305C.1.pep
PLSLQGLMPSVSIDLFGTSTLACRVNVLNARHMAGA

SEQ ID NO: 171974 - protein, 246 aa, Glycine max
  unsure (1)..(246): unsure at all Xaa locations
  Clone ID: PAT_MRT3847_126306C.1.pep
DVAPTAKPAVPSRVPIQIRETVNGGITLAGVTEAEVKTKEEMSSYLSRGSLSRATGSTNMNSQSSRSHAIFTITMEQKNGDDVLCAKLHLVDLAGSERAKRTGADGMRLKEGIHINKGLLALGNVISALGDEKKRKEGGHVPYRDSKLTRLLQDSLGGNSTTVMIACVSTADTNAEETLNTLKYANRARNIQNKAVINRDPVGAQMQRMRSQIEQLQSELLLYRGDAGEASEELQILXHIISLLEQ

SEQ ID NO: 171975 - protein, 48 aa, Glycine max
  Clone ID: PAT_MRT3847_126307C.1.pep
KQCLCNALKYSSALPDIFLSALRLQLLHEIWTTLYRPLWLLSSVIVSL

SEQ ID NO: 171976 - protein, 66 aa, Glycine max
  Clone ID: PAT_MRT3847_126308C.1.pep
GRRRINSNNHTNLCFCFALQSFFSSHYSYFSPFLLWVGFRNLGCYCRLKYKIHTRTIVVLFLIPIF

SEQ ID NO: 171977 - protein, 54 aa, Glycine max
  Clone ID: PAT_MRT3847_126309C.1.pep
SFPNTHGLQPIVAHNLIERDSQVSEESAAIIAGVLSSRLNCYESSPAPVPGVPP

SEQ ID NO: 171978 - protein, 85 aa, Glycine max
  Clone ID: PAT_MRT3847_12630C.1.pep
LQRNNTPLCGANRIIETHPESRYLEFDSDIQGSSYNLPELLYGSSKVVGFSGLTILKRFYRSLNIVSGGNNTFCILNFFNLATVP

SEQ ID NO: 171979 - protein, 92 aa, Glycine max
  Clone ID: PAT_MRT3847_126310C.1.pep
CCEDSFSRNICLSLVYNLLIRRFSEGGRGWFLDKFEVTDRVIFCVKIFQKVCPCKGNHNAHFQNDLGLDRLDLVEIVLVFVEEFGCEISDNE

SEQ ID NO: 171980 - protein, 59 aa, Glycine max
  Clone ID: PAT_MRT3847_126311C.1.pep
LTHISYNMNKLNISKWVQIMVLECPTALKEARSIVNVSNHKFCMKHHVRPDLSTTSPVL

SEQ ID NO: 171981 - protein, 71 aa, Glycine max
  Clone ID: PAT_MRT3847_126312C.1.pep
AKNPNEQNHIRHEASTLDPVREKQLEGIIILLKASDLHRKRPILKKRKNSAENSSISFDILKRQKRKHRRK

SEQ ID NO: 171982 - protein, 138 aa, Glycine max
  unsure (1)..(138): unsure at all Xaa locations
  Clone ID: PAT_MRT3847_126313C.1.pep
TARDLNSFFFFFFFFFFFFFSRFLAPGGGGQGGPPASGRPGLAGRKVFDKKGGIKGGGIKGGKCLGKKISPRKQGGTKXGQKNEGEKRGGQKGGGPENSWGAIKGGGPGGNFVGANPLKKGAMDWKNPRGLGPQGGFP

SEQ ID NO: 171983 - protein, 197 aa, Glycine max
  Clone ID: PAT_MRT3847_126314C.1.pep
MHLLFLFRLAHLQFFFNLRFIITTGSALGIRDEQQRITDVASSSNSSSMLSSKQYDVFLSFRGEDSRRSFTSHLYESLNEVKVQTYIDDRLEKGEEISPTLTKAIENSRVSIVIFSENYASSKWCLGELIKIMESKKEKGQIVIPVFYNIDPSHVRKQIGSYKQAFAKHEGELECNKWKDALTEAANLVGLDSKNYR

SEQ ID NO: 171984 - protein, 54 aa, Glycine max
  Clone ID: PAT_MRT3847_126315C.1.pep
INSYLKRPNRLPNQHILCIELYVDFRTTGQEISYAPTTFNSHTLYHYLTLCSML

SEQ ID NO: 171985 - protein, 44 aa, Glycine max
  Clone ID: PAT_MRT3847_126316C.1.pep
SFANIFFRRKWILSLWCFSSCGDKVKILILPLQFSSSFLNMIWS

SEQ ID NO: 171986 - protein, 68 aa, Glycine max
  Clone ID: PAT_MRT3847_126317C.1.pep
FLNCILVCALMQCAHFGLVATLNCKLSLTKIVSGCYKLIYASIFSTLQSCSKRWLTSSQRQPYSILRC

SEQ ID NO: 171987 - protein, 148 aa, Glycine max
  Clone ID: PAT_MRT3847_126318C.1.pep
MEDYVIKTIVVGVVSWTSAFVLVRRIFPKRSFDFCNRVVSTLHATLAVTLAWLSVEDWKCPICPVGSKSSPKQMQVLAVSLSYLIYDLACCQLDERVNLDNTVHHLVSIVGIGAGLSYQKCGSEMVATIWITEISSPFLHLRELLKEL

SEQ ID NO: 171988 - protein, 53 aa, Glycine max
  Clone ID: PAT_MRT3847_126319C.1.pep
FQVQAGENSDKCSHSSIWYRTLWEDFCIANLSFTLYFSLSHIAVQSGLIRKTL

SEQ ID NO: 171989 - protein, 89 aa, Glycine max
  Clone ID: PAT_MRT3847_12631C.1.pep
LQVAKRRKGLLNYMLFLRLTPTLPNTFINFASPIVDVPYHIFFLATVIGLIPAAYVTVKVRSYQNNNFYLEMLFIFYNKKRERKEKSEM

SEQ ID NO: 171990 - protein, 52 aa, Glycine max
  Clone ID: PAT_MRT3847_126320C.1.pep
NKLANYLEDHDHDHIFRTKQPRYSFTSLNFGIEWSTLFIKDKQGEDDYGKKH

SEQ ID NO: 171991 - protein, 402 aa, Glycine max
  Clone ID: PAT_MRT3847_126321C.1.pep
MLRIPNFIAVNVRHRLRNFPNPIPFLLSVSVAASLPPLRNRSPSQMAARESMMADYAKSGKSSCRACSQKIEAKALRLASVSKGNGPYDIVKWHHLRCFPLSSHSHSSPESIRGFSSLKSSDQEALKKLFAENNKSEEKVNEAVEDVRNELQETGERGSKRLRSSDQEALKKLFAENNKSEEKLCTPDVKAVVNIKFSVSDVKSNYKDATLLPKWKAFQTVIFLERDDGLHDSSKIAAFDFDGCLVKTDVKRVGADAWSLMHSSIPDKLQSLYNDGYKLVIFTNESNIERWKNKRQVAVDSKIGRLNNFIVKVKVPVQVFIACGVGSKSGKVNKKEDDPFRKPKPGMWHLMEQHFNSGIAIDMDKSFFVGDAAGRESDHSVADIKFAEAIGLKFYVPEEYFA

SEQ ID NO: 171992 - protein, 209 aa, Glycine max
  unsure (1)..(209): unsure at all Xaa locations
  Clone ID: PAT_MRT3847_126322C.1.pep
MAARESMMADYAKSGKSSCRACSQKIEAKALRLASVSKGNGPYDIVKWHHLRCFPLSSHSHSSPESIRGFSSLKSSDQEALKKLFAENNKSEEKVNEAVEDVRNELQETGERGSKRLRSSDQEALKKLFXKITSLKRSASGWPQCECLXCTPDVKAVVNIKFSVSDVKSKLQDATLLPKWKAFQTVIFLERXDGLHDSKXIAAFDFDGW

SEQ ID NO: 171993 - protein, 50 aa, Glycine max
  unsure (1)..(50): unsure at all Xaa locations
  Clone ID: PAT_MRT3847_126323C.1.pep
VVCCIITKCNEDLIICGETVTANIIHKNLCDIHNIFWHYFSXSCKPRSPI

SEQ ID NO: 171994 - protein, 51 aa, Glycine max
  Clone ID: PAT_MRT3847_126324C.1.pep
IPLEFDPFHFIKLASPTCLTIPKKNGRAHDDIEMTDCATLSMYHGIRPPSS

SEQ ID NO: 171995 - protein, 77 aa, Glycine max
  Clone ID: PAT_MRT3847_126325C.1.pep
GAGGVEIFQFCRVTTGAPVINFLRWIQKGLWGLQKGFQLTPNFCHPFKMAKILGRGKKNSLIKRALPPKKVIMVNPP

SEQ ID NO: 171996 - protein, 76 aa, Glycine max
  Clone ID: PAT_MRT3847_126326C.1.pep
SKSGKVTKKEDDLFRKPKPGMWHLMEQHFNSGIAIDMDKSFFVGDAAGRESDHSVADIKFAEAIGLKFYVPEEYFA

SEQ ID NO: 171997 - protein, 78 aa, Glycine max
  Clone ID: PAT_MRT3847_126327C.1.pep
THKLNLGSSRQLFVRSQIVPSVSDISMTLYNSSSQMVWSMSRLDRIHNISFLTTPLTLVLNLMSWTDFKQANSIKRVL

SEQ ID NO: 171998 - protein, 62 aa, Glycine max
  Clone ID: PAT_MRT3847_126328C.1.pep
DRSGADGGVRDSYVEQTLTEMRIDDVKATHGSKRDQKILHHEKAPTMNTQGGTNLGTERVAE

SEQ ID NO: 171999 - protein, 68 aa, Glycine max
  unsure (1)..(68): unsure at all Xaa locations
  Clone ID: PAT_MRT3847_126329C.1.pep
NNERILFPQVQRITRDLFLSLCQTYLLHRGSWQQXSQFTTTRHADTFIGTNHHGAFTRMEPASTIAET

SEQ ID NO: 172000 - protein, 92 aa, Glycine max
  Clone ID: PAT_MRT3847_12632C.1.pep
RKEETYRRRASNSASSISIAKRYFPNFFLFIFFALRSSTGDCSQYHHHHSSMATIGSLHDSQGSQNSFETETLARIAVDELIMMQDSLLEFA

SEQ ID NO: 172001 - protein, 76 aa, Glycine max
  unsure (1)..(76): unsure at all Xaa locations
  Clone ID: PAT_MRT3847_126330C.1.pep
AGVKKEDLKVQVEENKILHISGXHRLERQCGSFLRRFRLPEDANPEKIGYTPENGVLTVTVPKPEMKPSCWSIKMS

SEQ ID NO: 172002 - protein, 46 aa, Glycine max
  Clone ID: PAT_MRT3847_126331C.1.pep
ADYFKLAFSDDRRPSSFMTSHNSSAQSPLLKTAYVPMPAPMHIYYT

SEQ ID NO: 172003 - protein, 154 aa, Glycine max
  Clone ID: PAT_MRT3847_126332C.1.pep
NAWGPAWSPPSFCWGVIAFVGPPEPSRPLFFCSGNFFRSGPVFGGPSPAGKCPPPFRHFPKIRLCVFLFFLSSLFLLFPFFLFFMFAFFFLFFFVFFFFFLSPLFPCSQCWCGPPSLGSFGALGPPFFHYPFCLVFLKKKKKKKKKKKKKKKKK

SEQ ID NO: 172004 - protein, 66 aa, Glycine max
  Clone ID: PAT_MRT3847_126333C.1.pep
LLHESTSSTERRRPERGDGWRCPRSWPGRDPSVRAPTATEPRTLAITRSSSTAEVVTAVNVNILGK

SEQ ID NO: 172005 - protein, 41 aa, Glycine max
  Clone ID: PAT_MRT3847_126334C.1.pep
ITHGWIPGWSLDHRVWSGRCQVYIVWLETDRLCVFVTERVA

SEQ ID NO: 172006 - protein, 81 aa, Glycine max
  Clone ID: PAT_MRT3847_126335C.1.pep
YTMMRVQLPSVTELITARLTSLYSLLKVLHDQTGRGYSSNYILFYTLLENHAGRNLIHLETSQTLLSSSEPTNVPVLQLHS

SEQ ID NO: 172007 - protein, 47 aa, Glycine max
  Clone ID: PAT_MRT3847_126336C.1.pep
SMIFLLRQSHHVICCNELHSYHSRTPLALRTSTQEGIETPSMATRSQ

SEQ ID NO: 172008 - protein, 55 aa, Glycine max
  Clone ID: PAT_MRT3847_126337C.1.pep
KDVETAVLCHIILLISSHQFASLTYNNNNKKKILIPLGFLLQHRLALLQLSSKQM

SEQ ID NO: 172009 - protein, 112 aa, Glycine max
  unsure (1)..(112): unsure at all Xaa locations
  Clone ID: PAT_MRT3847_126338C.1.pep
XXLXLXXLAIXLXXXLXYXHTTXXXXTXXRXXXXXAXXTXXYXXAXXEXIXXXXXXHXYXXNXXXXXXANXQXXXXAXXXRXHXXXXXXPXXXHXXXXPTXLREYXXPXXXX

SEQ ID NO: 172010 - protein, 55 aa, Glycine max
  unsure (1)..(55): unsure at all Xaa locations
  Clone ID: PAT_MRT3847_126339C.1.pep
XXXEIKYHNPTFFNNSICPMYRHHIFNFPKNHDLLIPKKKKVFICPHSGESLKLK

SEQ ID NO: 172011 - protein, 100 aa, Glycine max
  Clone ID: PAT_MRT3847_12633C.1.pep
TKNKLHFKLWPRCGAFDFKTRTHDAGTKKKGADEPFPRAYSASREKENALSEVSEVVCTVRNKHTVKPVGKDVPYPRARAYLPYASRTNKTSLRVGVDRS

SEQ ID NO: 172012 - protein, 89 aa, Glycine max
  Clone ID: PAT_MRT3847_126340C.1.pep
KLQHLRSITNSRALNKTSIIVDASKYIEKLKQKVEILNQEIASAETSSVHNPLPMVTVETLEKGFLINVFSAKGCSGLLVSILEAFEEM

SEQ ID NO: 172013 - protein, 142 aa, Glycine max
  Clone ID: PAT_MRT3847_126341C.1.pep
QINNPENPHNERTMKSLFNWYYASVGISVTVSMTFIVYIQVKAGWVVGFGIPVALMTFSAIMFFLGSCLYKKVKPNKSLLTSLAQVIVAAWKNRHLPMSPKNSDIWYFHNGSNLVQPTGKARFLNKACMMKNREKDLDSGEM

SEQ ID NO: 172014 - protein, 48 aa, Glycine max
  Clone ID: PAT_MRT3847_126342C.1.pep
SSRCGSTDYQYSPKDSPLRSLGVRWTVNRQFPSMVMVPIVGMLAQSRP

SEQ ID NO: 172015 - protein, 70 aa, Glycine max
  Clone ID: PAT_MRT3847_126343C.1.pep
MDDAFSTPTSSAPSDPPYDVPLYLVPLPVPTYFTRRLPPTCWAPDETLALIDAYRDKWYFLRRGNLKATH

SEQ ID NO: 172016 - protein, 62 aa, Glycine max
  Clone ID: PAT_MRT3847_126344C.1.pep
GIKTVKSNGPADKFNNEKAWDDQWILWVEPKIGAALNALNQQSVLRAQTAKAIGSFRSSSNM

SEQ ID NO: 172017 - protein, 207 aa, Glycine max
  unsure (1)..(207): unsure at all Xaa locations
  Clone ID: PAT_MRT3847_126345C.1.pep
DAWAGAVRRGPLMXNTRPSSYAIAKSIRRARPFPWQHDLFEDSLRAAGIQGVEVGTKLYVSNLDHGVTNEDIRELFSELGELKRFAVHYDKNGHPSGSAEVVYTRRSDAFAALKRYNNVLLDGKPMKIEIVGSNSELPISARVNVTGVNGRRKRTVVMTPRGGQAGGGPTMPNRGAGRGRRGGPRSGSGRGGXGGRGRGRGSRGGGG

SEQ ID NO: 172018 - protein, 96 aa, Glycine max
  Clone ID: PAT_MRT3847_126346C.1.pep
SRHSRISLPLEHGWTALKETELIGHHVMTDLRGRYPVKCVGSVSKSIFGVFFISPANFVSIVIEEFSIYNSVRNLDAIFSGLSDSRVLIICITGTA

SEQ ID NO: 172019 - protein, 226 aa, Glycine max
  unsure (1)..(226): unsure at all Xaa locations
  Clone ID: PAT_MRT3847_126347C.1.pep
CFATLETVLFFGQSIRRARPFPWQHDLFEDSLRAAGIQGVEVGTKLYVSNLDHGVTNEDIRELFSELGELKRFAVHYDKNGHPSGSAEVVYTRRSDAFAALKRXPTGSAVVSSTRXEIVGFNSELPISARVNVTGVNGRRKRTVVMTSRGGQAGGGPAMPTRGAGWGRRGGPRSGSGRGGAGGRGRGRGRGGAGGRGRGRKDAVEKSAEELDKELETYHAEAMNIS

SEQ ID NO: 172020 - protein, 192 aa, Glycine max
  Clone ID: PAT_MRT3847_126348C.1.pep
MASTISAMAMINAKCVNPKFPNPTKLVPSKPSLQVNLPKGLIASPENTKLSTATAIAGAIFTTLGTCDAAFAVQQIADIAEGDNRGLALLLPIIPAIGWVLFNILQPALNQLNRMRSTKGVIIGLGLGGLAGLVAAPHASAAAASEVAAMAEAASNDNRGQLLLFVVTPAIAWVLYNILQPALNQLNRMRSQ

SEQ ID NO: 172021 - protein, 187 aa, Glycine max
  Clone ID: PAT_MRT3847_126349C.1.pep
MASTISAMAMINAKCVNPKFPNPTKLAPSKPSLQINLPKGLIASPESTKLSPATAIAGAIFTTLGTCDAAFAVQQIADIAEGDNRGLALLLPIIPAIGWVLFNILQPALNQLNRMRSTKGVIIGLGLGGLAGLAAAPHAWAAASEAAAAASDNRGQLLLFVVTPAIAWVLYNILQPALNQLNRMRSQ

SEQ ID NO: 172022 - protein, 75 aa, Glycine max
  Clone ID: PAT_MRT3847_12634C.1.pep
HRMCPLFMTILACKVLLGLAISPAGEGLIWFHECDHPSLVQLQIWSCLVKCYSSFLGAWTKNFLCGGVNFMLFLF

SEQ ID NO: 172023 - protein, 184 aa, Glycine max
  unsure (1)..(184): unsure at all Xaa locations
  Clone ID: PAT_MRT3847_126350C.1.pep
MANNEMQVERGLDLERYMGRWYEIASFPSRNQPKDGVNTRATYTLRNDGTVQVLNETWSNGKRGHIEGTAFKSNRTSDEAKFKVKFYVPPFLPIIPVTGDYWVLFIDGDYQYALIGQPSRNCLWILSRKPHLDDEIYNKLVQRAKDVGYDVSKLXGYDVSKLRTTEEGPQDTKGIWWLKSILGK

SEQ ID NO: 172024 - protein, 184 aa, Glycine max
  Clone ID: PAT_MRT3847_126351C.1.pep
MEKMELAETPLPLLSLNHVSFVCKSVSESVKFYEDVLGFLLIKRPSSFKFEGAWLFNYGIGIHLLESEKVPVKKREINPKENHISFQCSDMKVIMQKLDAMKIEYVTAVVEEGGIKVDQLFFHDPDGYMIEICNCQNLPVLPISSCPLKQLGGEATFKINCFAEESMSMLMMDNFVMDMLKISI

SEQ ID NO: 172025 - protein, 84 aa, Glycine max
  Clone ID: PAT_MRT3847_126352C.1.pep
EIHVNTELASPWSVHHTQAPWVQITIRSQLSRLGKSCSKQDRLFSEPPASPEYSILLVNVVPKGYSCKQEYFPRSMLKTKSTSR

SEQ ID NO: 172026 - protein, 64 aa, Glycine max
  Clone ID: PAT_MRT3847_126353C.1.pep
FLFFFLFFFFVFFVFFCFCFTPKKGETFTFIGKIRAANLFQKTPINFGTSILILNHPFFGENPG

SEQ ID NO: 172027 - protein, 55 aa, Glycine max
  Clone ID: PAT_MRT3847_126354C.1.pep
CGYLIHLCNFSASGELFFFLQSLFFSFYAFFSGSVPFFFVLCYFFFMFHVCTKSI

SEQ ID NO: 172028 - protein, 133 aa, Glycine max
  unsure (1)..(133): unsure at all Xaa locations
  Clone ID: PAT_MRT3847_126355C.1.pep
RPRDRWLEEGRSLADYNIQKESTLHLGLRISGGXQIFVKTLTGKTITLEVESSDTIDNDKAKIQDIEGIPPDQQRLICAGKQLEDGRTLGDXYNIQKEPTLHLVLRLRGGMHNCGETLTGKTITLEEESSDTI

SEQ ID NO: 172029 - protein, 56 aa, Glycine max
  Clone ID: PAT_MRT3847_126356C.1.pep
IIYQYTNITLTPTQADRFVLAFRNWLRRHGNGQPEWFGNSSDQPLPSTVLSKRQVQ

SEQ ID NO: 172030 - protein, 84 aa, Glycine max
  Clone ID: PAT_MRT3847_126357C.1.pep
GPLLWNTLIIHSIHENRLNESNQFSLSGFSVWVLASCAHLWTAYLNRFLTFLCHLSKSCEQILYMKKPHDATSPNLASFIATIP

SEQ ID NO: 172031 - protein, 91 aa, Glycine max
  Clone ID: PAT_MRT3847_126358C.1.pep
QLQLVYEMMKNKDKDPICCIYSTSKNKCWRHLLKDVNFEDLNDVKFEDIEVSEDSRTSTWYNWLKTEYTTLECQITNLRLCWNSHEHDMET

SEQ ID NO: 172032 - protein, 143 aa, Glycine max
  Clone ID: PAT_MRT3847_126359C.1.pep
LVPNSARGNSKAKPNFPPSSSSKVDHHESNNYANPSYLTRGNHYSSTLPDHREVDDVNYNYYHQLYFPSPACGAKSPSHVQYSSEVLCVENQRDPHLLVGQDWRQRGLSLYTNPLCVHENKDKIENNSEEDDLDLELRLGYHP

SEQ ID NO: 172033 - protein, 60 aa, Glycine max
  Clone ID: PAT_MRT3847_12635C.1.pep
IDFDSWKNVDREAREKRKERDADLEGDRSDQHSTCLDKESNDRCADGEGMMEKERDVLLN

SEQ ID NO: 172034 - protein, 201 aa, Glycine max
  unsure (1)..(201): unsure at all Xaa locations
  Clone ID: PAT_MRT3847_126360C.1.pep
MKPQSSSLNPYAASYVPLSKRGADGRIPLTEKDSKTCDGTMWFQMTHQGATNDPQLINTSLEWLSKPEAFPAKSQPASSSYTGYTSSSQNVAELTDNQLVDEELDMDLEYLRMNFPGISYQSLVDVYNVNSGDLDAAIDMLSQLESXEMELHETSGSLPETLDIGDVSESGLPADSVSLKQKNVAEETSTSSGQLASANVL

SEQ ID NO: 172035 - protein, 196 aa, Glycine max
  Clone ID: PAT_MRT3847_126361C.1.pep
MKPQSSSLNPYATSYVPLSKRGVDGRTPSTEKDSKTYNGTVWFQTHQGATNDPQLINTSLERLSKSESFLAKGQPASSSYTGYTSSQNVAELSDNQLLDEEVDMDLEYLRMNFPGISYQSLVDVYNVNSGDLDAAIDMLSQLELEGDETSGILPETLDIGDVSESGLPADSASLKQKNVAEETNTSSSHMASANVL

SEQ ID NO: 172036 - protein, 66 aa, Glycine max
  Clone ID: PAT_MRT3847_126362C.1.pep
TRVFPSLRKFYKQPPKEPKRSNNKKFFYKKRKAKLVERGATKNLSVEKKKNYEGKFIGECVLKLHK

SEQ ID NO: 172037 - protein, 101 aa, Glycine max
  Clone ID: PAT_MRT3847_126363C.1.pep
VGKHIHCVEPRSAPCIISRAGFKVTVRHLYLGAALAVCCTIDWFIRPPSPAIEGTVVCEESCLSFYHAKWQQVVPSPVEEWEFSVLIKEVVTVPCNNVYTQ

SEQ ID NO: 172038 - protein, 388 aa, Glycine max
  unsure (1)..(388): unsure at all Xaa locations
  Clone ID: PAT_MRT3847_126364C.1.pep
EKRSPNTVNKEIGRYSSYGGAYLFKPHGDAQSIIEAAGQLLVSEGPLMQEVYSYPRTAWEKSPISHSTRIYSGESTVQGFAIEKEYHVELLGHDFNDRELIVRYKTDIDNKKIFYSDLNGFXQMSRRETYDKIPLQGNYYTMPYLAFIQGSNGRRFSVHSRQSLGVTSLKNGWLEIMVDRRLVISXDCTCLGSFFSFATPKTSWHKSFIVAETLENSDSDVPQSSINLSLSTLSLCFLAHXIKSNRGEHWTSEISTCTAXKPAMMXKPMPFYLHVVNFKLPKPLKFLQRSPDGPRFWLIMHRRHWDSSYCQKGRSQCTNLANGTMNLFSMFKNLTVSKAKATSLNLLHEDPEVMGFSEQFGDLAQEGHVAISPMEMQAYKLELRPQPQ

SEQ ID NO: 172039 - protein, 85 aa, Glycine max
  Clone ID: PAT_MRT3847_126365C.1.pep
VIIISSFKLKVYHSFSIIIKAQNPYGTLQRTSGSYHWFQNNPFSFDSLTTYNTDPFPTTAFNSYSTLANFSLTRFTSRHHLSPPS

SEQ ID NO: 172040 - protein, 45 aa, Glycine max
  unsure (1)..(45): unsure at all Xaa locations
  Clone ID: PAT_MRT3847_126366C.1.pep
SIWTESVLSANITEIQTQXLAPSXXRSVSCLILLRXRXALIRWXQ

SEQ ID NO: 172041 - protein, 72 aa, Glycine max
  Clone ID: PAT_MRT3847_126367C.1.pep
FTIDHIVYRQASHTRGQSPKHMSTDRSKPELTKQPQSLTFYSLLHEMPINLYTNSTSAFAFTLFLAFFQKHR

SEQ ID NO: 172042 - protein, 132 aa, Glycine max
  Clone ID: PAT_MRT3847_126368C.1.pep
RTLGLLNIKAFPAHPCKSLPCNPLFLQFQKLMWVLGGPPDAKRRMLCRKASVSSPKGPASLGILVSFDQKRKQWLPVNVGNPARVIFMKETNVGFFGGWGPLLTKPPGRGVGPQREKKKKNKKRKKKKEKKK

SEQ ID NO: 172043 - protein, 69 aa, Glycine max
  unsure (1)..(69): unsure at all Xaa locations
  Clone ID: PAT_MRT3847_126369C.1.pep
MIATWIIELYLTMRRSSWQQNGSYAAHKTEFSQRRXRRKATSPSTEFFRSIVRFYCCAYTXGEKQHAIY

SEQ ID NO: 172044 - protein, 111 aa, Glycine max
  Clone ID: PAT_MRT3847_12636C.1.pep
KADVSIFSTYLAVFICLYESVQKTLPLDTIELLQRGVLFHEVGEFLIKLLLILNFFLPMPPLHCSITHAMSMQQFLLFSNKVPRAEFLDLNKFQILFHLESIFLSIHMTST

SEQ ID NO: 172045 - protein, 80 aa, Glycine max
  Clone ID: PAT_MRT3847_126370C.1.pep
NFVFFSVRFGPRTLGVGNLKKKKIKKPEHINKKPTLEFWRLPGAVLAQSPSHRQCRPTTGPRSTGWPPVHVQKPEKAGFE

SEQ ID NO: 172046 - protein, 61 aa, Glycine max
  Clone ID: PAT_MRT3847_126371C.1.pep
IAYVPDRILMILRVHASSYLYACASEMFAITVTVISRPVFLISHAWSTVANAVSDVRSVDH

SEQ ID NO: 172047 - protein, 68 aa, Glycine max
  Clone ID: PAT_MRT3847_126372C.1.pep
RPKFTEDGIIEKEEIAKVVKCLMEGEEGKGMRERLRNLKDSAANALKHGSSTQTLSQLANHWENLTKV

SEQ ID NO: 172048 - protein, 45 aa, Glycine max
  Clone ID: PAT_MRT3847_126373C.1.pep
TTNNFLLSHFSVAVIIWLQKFDSCLINFTNHSTYICRLKYPLYNY

SEQ ID NO: 172049 - protein, 144 aa, Glycine max
  unsure (1)..(144): unsure at all Xaa locations
  Clone ID: PAT_MRT3847_126374C.1.pep
SSRAGGRGRALWWAXLGXLPXCGRLWWGLLXASPGVGGGXXVSVLGSRVGRGLLGRLVVVAGEFGARFLLLVGVCFGGVXLGVPTPVVGRERLSIEAEAFVGSRALPSFTNSVASIIEGFFDHIHMAPSKKIYKKTDSRAAEIE

SEQ ID NO: 172050 - protein, 56 aa, Glycine max
  Clone ID: PAT_MRT3847_126375C.1.pep
MPAGIRIHCSCHCTHGIPLHPSKGVQICVLHFCSLVLEELSWPKRENSTEKVNILV

SEQ ID NO: 172051 - protein, 42 aa, Glycine max
  Clone ID: PAT_MRT3847_126376C.1.pep
YHDMAIVVTFRVSKQAYFYSFSFSYSILGLNMILYLELIKLH

SEQ ID NO: 172052 - protein, 483 aa, Glycine max
  unsure (1)..(483): unsure at all Xaa locations
  Clone ID: PAT_MRT3847_126377C.1.pep
MSLYDAAFVDTELSKRTSIFGLRLWVVIGILVGSLIVITLFLLSLCLTSRRRHHHHHHKNPRPRHPSTTLPTPPISKEILEIVHVPPPPDTVHLPPPPPTKPDHPRSAATAALYSSGESRATASACETASSLGSVGPEVSHLGWGRWYTLRELESATNGLCEENVIGEGGYGIVYCGLLPDGTKVAGKNLLNNKGQFXAEKEFKIEVEAIGRVRHKNLVRLLGYCVEGAYRMLVYEYVDNGNLEQWLHGDVGAVSPLTWNIRMNIILGTARGLAYLHEGLEPKVVHRDVKSSNILIDRQWNSKVSDFGLAKLLCSENSYVTTRVMGTFGYVAPEYACTGMLTEKSDIYSFGILIMEIITGRSPVDYSRPQGEVNLIEWLKTMVGNRKSEEVVDPKLPEMPFSKALKRALLIALRCVDPDATKRPKMGHVIHMLEADDLLFHTEQRTEGESSRSYQSEQRDSNLDKRRDGGAIDKSEDASTRWR

SEQ ID NO: 172053 - protein, 108 aa, Glycine max
  Clone ID: PAT_MRT3847_126378C.1.pep
MFSVYDAAFVDTELSKRTSIFGLRLWVLIGILVGSLIVITLFLLSLCLTSRRRHHHHHHHHHKHRRHPTPPISKEILEIVHVPPPPDTGHLPPLPPLAQNPTTLAPPP

SEQ ID NO: 172054 - protein, 566 aa, Glycine max
  Clone ID: PAT_MRT3847_126379C.1.pep
ETGPLETVEAEHVVPEVDESQTEPEKQSLEQKEEEEKQDTSAVPESSEESGDAIEVKTRELEFEAEVLKETNNSQTEKAEPVEAKVDENQSQTEKAEPVAAKVDENQSVIEKTELVAAKVDENQSEPEKQEEEEQPKTVVPEIEAESEEQLENIVEAYPPKDSVIEEVKDTDNGNSEPKAVPEKTEKPVLLSTEVEEKPREQLQVDEEVAEAGKEVETKQEIVLETAKSEETSAGTVTEEKTDKDEETSLTENAEQVLSNVEPQQNPGETSPEVVLETSKSEETSADTVTEEETSLTVNAAQFSSNEEPQASIVEPSPEAAEKVVEEVDDKKESSITDVIEAVLNEAADIKKTPEQASIDEEAKTELKEEREISVPAAVEEKVAVAAIDDVDKKEPEAPNVSPESSQEEEFESKRVEEQNEAKAATTETVESVKVDNDSSIVDDKKEEKTDSKVEEISRAINEPVRETLASKFEEETVEPGADKVEKEQTVEPEKTEEVQATKESDATKTSKDLPKETPAKPAQKQSNNIISKVKQSLVKAKKAITGKSPSSKNLSSDAKGDIKVK

SEQ ID NO: 172055 - protein, 111 aa, Glycine max
  Clone ID: PAT_MRT3847_12637C.1.pep
MGNLLCLAQVDQSTVAIKETFGKFDDVLEPGCHCVPWIFGSQIAGHLTLRVQQLDVKCETKTKDNVFVNVVASIQYRALSEKASDAYYKLSNTRAQIQAYVFDVIRASVPK

SEQ ID NO: 172056 - protein, 156 aa, Glycine max
  unsure (1)..(156): unsure at all Xaa locations
  Clone ID: PAT_MRT3847_126380C.1.pep
GYVAPEXYACTGMLTEKSDIYSFGILIMEIIPGRSPVNYSSPQGEVNLIEWLKTMVGNRKSEEVVDPKLPEMPFSKALKRALLIALRCVDPDATKRPKMGHVIHMLEADDLLFHTEQRTEGESSRSYQSEHKDSNLDKRTGGGVIDKSEDASTRWR

SEQ ID NO: 172057 - protein, 103 aa, Glycine max
  unsure (1)..(103): unsure at all Xaa locations
  Clone ID: PAT_MRT3847_126381C.1.pep
PKALCGLKTTKGILMHYFTDARADLRNXEDAEYLDITYYRIEDPSARRLCRDILAEIGHIGSFKCGGLPHWEXYSNVTLLGTMYKDHNAHQFLEAEDVYDPQG

SEQ ID NO: 172058 - protein, 39 aa, Glycine max
  Clone ID: PAT_MRT3847_126382C.1.pep
GQLFLSMVLFLIIIISKNVGIAKLVLSYTLMVCPDTSRV

SEQ ID NO: 172059 - protein, 116 aa, Glycine max
  Clone ID: PAT_MRT3847_126383C.1.pep
LKIYFLSLAYPGREKAIFHLWQKQTLRTNTLKQICRTKKTQNNSPQFPFSKMTNKKPPPPLDSKKKPQWEQHPPRVQIKPNEDKTPHTTRPRLIKKKPSQTLRRGTITGPGKKTPG

SEQ ID NO: 172060 - protein, 102 aa, Glycine max
  Clone ID: PAT_MRT3847_126384C.1.pep
GGLDYLGNPSIVHPRNISPFWTSQVLLKRAVEGYLIVGGPLYEATDPIYPGGIFDPLGLADDPQAYAELTDNELNNGRLIIFSMLGIYVYAIVTDRGPLETL

SEQ ID NO: 172061 - protein, 72 aa, Glycine max
  Clone ID: PAT_MRT3847_126385C.1.pep
CTGNVTTFCIRHVNDAPNDCSKMHYSLIGSRYQRSLNVIGLLEHSHRDAQLLTTALLSYFTLELPLSYIDSF

SEQ ID NO: 172062 - protein, 59 aa, Glycine max
  Clone ID: PAT_MRT3847_126386C.1.pep
VVRLLHYSLEGYSWEQRSYLLWVVNINKLIGLKCTYIHLLCLKKHKISFTILYNIRFPN

SEQ ID NO: 172063 - protein, 37 aa, Glycine max
  Clone ID: PAT_MRT3847_126387C.1.pep
EMIEKMLLLGANDIVLIMSSRYCSYVCRTKGFQRLNP

SEQ ID NO: 172064 - protein, 84 aa, Glycine max
  Clone ID: PAT_MRT3847_126388C.1.pep
RFFHPWRSEGSFIQGEPHSMPLYTVDLMVGPLLLIVIGLDWEVLSPFTFEIQVICMKGLRVCLHGSLSCRVTAWQASVLGISSL

SEQ ID NO: 172065 - protein, 44 aa, Glycine max
  Clone ID: PAT_MRT3847_126389C.1.pep
LGTVIVSLFLAEEIYKRPRYPITEREKQKHITSTKTHHPEKILT

SEQ ID NO: 172066 - protein, 47 aa, Glycine max
  unsure (1)..(47): unsure at all Xaa locations
  Clone ID: PAT_MRT3847_12638C.1.pep
MSCYGGNCGCXSSCNYCNGCGSCNMYPYLSYTDSTTNYTFIIVISPF

SEQ ID NO: 172067 - protein, 155 aa, Glycine max
  Clone ID: PAT_MRT3847_126390C.1.pep
MQIFVKTLTGKTITLEVESSDTIDNVKSKIQDKEGIPPDQQRLIFAGKQLEDGRTLSDYNIQKESTLHLVLRLRGGMAKKRKKKVYTTPKKIKHKRKKTKLAVLKYYKVDGDGKIERLRRECPQPECGAGVFMAAMHNRQYCGKCHLTYVFDEAK

SEQ ID NO: 172068 - protein, 58 aa, Glycine max
  unsure (1)..(58): unsure at all Xaa locations
  Clone ID: PAT_MRT3847_126391C.1.pep
EKRPSKIPDHISAAFRVKEGDXVIIGQWGSLFKTVRLDVFKVFQVGFSIGAKEVFFYM

SEQ ID NO: 172069 - protein, 57 aa, Glycine max
  Clone ID: PAT_MRT3847_126392C.1.pep
MSSILRIFIFKHLQVHSLNYLICIINFSIVAILLSIIPRRLANKHQCLGLINIHENE

SEQ ID NO: 172070 - protein, 65 aa, Glycine max
  Clone ID: PAT_MRT3847_126393C.1.pep
ISIFHLIFYTFLLKTFLGILLHFNKNYSINYYLTHSHTPIPTSLDLQIPTHSHYNLHTSFLTTLQ

SEQ ID NO: 172071 - protein, 80 aa, Glycine max
  unsure (1)..(80): unsure at all Xaa locations
  Clone ID: PAT_MRT3847_126394C.1.pep
VRVDIYILVLAYTEARSCYCYMLPSITQNQGFRGLARVSGVRXLYLSQAQKVKHMQLVSVSKVKTTLALETNTPSPCAWA

SEQ ID NO: 172072 - protein, 47 aa, Glycine max
  unsure (1)..(47): unsure at all Xaa locations
  Clone ID: PAT_MRT3847_126395C.1.pep
LINFSKELXSQQSRSIFKTKRLKNIIPKIINSKFNKLTNYNKFIIKR

SEQ ID NO: 172073 - protein, 79 aa, Glycine max
  Clone ID: PAT_MRT3847_126396C.1.pep
STQPKKSPQKEKSGNPKEPGQNKIPGGKPIIGARPKIFFLYFYFLLFLFIFFFFFFFPPYFFYFPFFFFFFFFYKKIFH

SEQ ID NO: 172074 - protein, 46 aa, Glycine max
  Clone ID: PAT_MRT3847_126397C.1.pep
TRHDVFCPKFIKVTLSLICHGVDLGSIICLVQSYPNEAHCLCGLYL

SEQ ID NO: 172075 - protein, 88 aa, Glycine max
  unsure (1)..(88): unsure at all Xaa locations
  Clone ID: PAT_MRT3847_126398C.1.pep
RKQITPQRHKHTHTHTHHYLLPYHHQSLYLYLXYITITLTHTLTPYPNTDSYTHIHNHSHYLINIHTNIYIYIYIYIHIYIHILYMSM

SEQ ID NO: 172076 - protein, 58 aa, Glycine max
  unsure (1)..(58): unsure at all Xaa locations
  Clone ID: PAT_MRT3847_126399C.1.pep
GSSSPGLPLPFSFPPLLWIQVIMKGDIXFKRIRNLSQNKXLYPGVRFFDPLGLASVPQ

SEQ ID NO: 172077 - protein, 89 aa, Glycine max
  Clone ID: PAT_MRT3847_12639C.1.pep
HRKPRRSNDANLHRILEVRVHSAHSTVRHLNMVVTVADRRELPPVASLLRRSAQPRRRLQIVPSLRRQLAVRTVALSGVHHTCYSLLSQ

SEQ ID NO: 172078 - protein, 100 aa, Glycine max
  unsure (1)..(100): unsure at all Xaa locations
  Clone ID: PAT_MRT3847_1263C.1.pep
GCHGSHNQTFPLYLNTGFGWQYINEVGCISXLLGLRANNVLRWQTVPASCLQYIANYVLXNQYISISIPVSQQAYFYPNILTLTNKHISVLHVDYTTLSN

SEQ ID NO: 172079 - protein, 102 aa, Glycine max
  Clone ID: PAT_MRT3847_126400C.1.pep
QFLYVTSTLSRATIPKYVMNFLLWGPSALPVAGSTWTRGLSAPTCLVANDLRRETFLVRFNGGDGECDATPVERGGGGGEFGCVAIWLQKQIFNFSFTDITG

SEQ ID NO: 172080 - protein, 117 aa, Glycine max
  Clone ID: PAT_MRT3847_126401C.1.pep
LHLAVQSLIRLRPCPSLQHRSSRRRGAFKPSIGCLTTAIRFEKDYNSSGMIQTNMLTFTSGPLSFIRWWKGKKWEKERSSTTFSSPKKINEGKIFKKTAKKIEFKWGAELNIRKSWG

SEQ ID NO: 172081 - protein, 99 aa, Glycine max
  Clone ID: PAT_MRT3847_126402C.1.pep
KHATGWSNTNSKKPHCMAINLSTTASLHSKPSFLTHKQNNLSKIYHPSSSLLTTCAQTQGTDTGVTQEDASAGNGIYANNSYPLFIIIIIIESNMGSWG

SEQ ID NO: 172082 - protein, 55 aa, Glycine max
  unsure (1)..(55): unsure at all Xaa locations
  Clone ID: PAT_MRT3847_126403C.1.pep
MXXVTEGQLRFCIDXXGTFTAVXAEIPGXTDGQVLKLLSVDPXNYDXAPVXGLGS

SEQ ID NO: 172083 - protein, 154 aa, Glycine max
  Clone ID: PAT_MRT3847_126404C.1.pep
FPSITSLHRSPDPTYSPIYSVPSQPPSNPPRTSTENFRPNNARYSHLANSPHGSQSPNGSDDNPYRSRTPNGVHALKGASSSTLDLPHRSTISAQELLDYLRRYSILLIDVRSREDFDSGHVYATSIICIEPVAYIEMVSAEEHEERLVVCPEH

SEQ ID NO: 172084 - protein, 191 aa, Glycine max
  Clone ID: PAT_MRT3847_126405C.1.pep
LAVYNQQILMLEKLRVRQSKLDKKVKQIHTWRKVSSVIFAATVAAVLICSVVAAAIATPHVAAALAAVTAIPIGSMGKWIDSLLKNYENAMKGHKEVAISMQVGAYVAIKDLDNIRVLIDRLEVEIESLFQNVEFALEEEAVKVAIEEIKKKLGVFMKNVEDLGLQADTCSRDIIRARTVVLQKIIKLPHT

SEQ ID NO: 172085 - protein, 568 aa, Glycine max
  Clone ID: PAT_MRT3847_126406C.1.pep
MEAFYTTLSSPASTSVLNFQGSELPRRNLCKKSSHTIFASPTLPKPFLQICGRPQTLIYTSTRLSSGAHRATISAEAGRQNWDFGRFVKTLFFFNGFPSPAKFFDFLAEKISDPSPSEVINTMGTSDIVLVAGATGGVGRRVVDILRKKGIPVRVLVCDEKKAETFVGGPFELPVSSIRAYIKEPHNNQICASEVSNAASVLVGPKEGDTPDRSKYSQGIKFFEPEIKGDSPEKVEYIGMRNLIKAVKDNLGLRRGKLLFGFEGNNYRQLPWGALDDVVMGGVSESTFQIDPSGGENGGPTGIFKGVVSTANNGGFTSIRTKNFSEPENLSAYDGLEFRLKGDGRRYKIIVRTSSDWDTLGYTVRLETKKGKCESKLNDKFESDGKLNETFVEGPFELPVSSIRAYIKDPITPRFVHVSSAGVTRPERPGIDLSKQPPAVRLNKELDYILTFKLKGEDLLRESGIPYAIVRPCALTEEPAGANLIFDQGDNITGKISREEIALMCVAALDSPYACDKTFEVKSVIPFSEPFTVDPTNPPPEKDYDVYFKNLKEGITGKEALQQNPVSV

SEQ ID NO: 172086 - protein, 102 aa, Glycine max
  Clone ID: PAT_MRT3847_126407C.1.pep
FLCFCVSDRVCWMANTMTSQSSRFTWLAVLKRSLLRLRKLLRNLQRLNYIQQPCSHFNPFFVIAKFNNLGTLGNAKRQNFQFFGYENVSGYSLPILMLPTVR

SEQ ID NO: 172087 - protein, 579 aa, Glycine max
  unsure (1)..(579): unsure at all Xaa locations
  Clone ID: PAT_MRT3847_126408C.1.pep
MEAFYTTLSSPASTSVLNFQGSELPRRNLCKKSSHTIFASPTLPKPFLQICGRPQTLIYTSTRLSSGAHRATISAEAGRQNWDFGRFXKTLFFFNGFPSPAKFFDFLVEKISDPSPSEVVNTMGTSDIVLVAGATGGVGRRVVDILRKKGIPVRVLVRNEEKARKMLGSDVDLVIGDITKDSTLIPEYFKGVKKVINAASVIVGPKEGDTPDRSKYSQIKGDSPEKVEYIGMRNLIKAVKDNLGLRRGKLLFGFEGINYRQLPWGALDDVVMGGVSESTFQIDPSGGENGGPTGVFKXRTKNFSEPENLSAYDGLEFRLKGDGRRYKIIVRTSSDWDTLGYTAGFDTEKGKWQSIQVPFSSLSPVFRARTVSNAPPFDPSIVVSLQLMFSKFESDGKLNETFVEGPFELPVSSIRAYIKDPITPRFVHVSSAGVTRPERPGIDLSKQPPAVRLNKELDYILTFKLKGEDLLRESGIPYAIVRPCALTEEPAGANLIFDQGDNITGKISREEIALMCVAALDSPYACDKTFEVKSVIPFSEPFTVDPTNPPPEKDYDVYFKNLKEGITGKEALQQNPVSV

SEQ ID NO: 172088 - protein, 238 aa, Glycine max
  unsure (1)..(238): unsure at all Xaa locations
  Clone ID: PAT_MRT3847_126409C.1.pep
TSYSYDQFPNGSVLHNSLLPCVHVCSQFSGSELPRRNLCKKSSHTIFASPTLPKPFLQICGRPQTLIYTSTRLSSGAHRATISAEAGRQNWDFGRFVKTLFFFNGFPSPAKLXKISDPSPSEVINTMGTSDIVLVAGATGGVGRRVVDILRKKGIPVRVLVRNEEKARKMLGSDVDLVIGDITKDSTXIPEYFXGVKKVINAASVIXGPKEGDTPDRSXYSQGIXKFFDPEVLYPHIN

SEQ ID NO: 172089 - protein, 76 aa, Glycine max
  Clone ID: PAT_MRT3847_12640C.1.pep
TPVPTLLEAPDQVNEPNMASGKPLRLTLHDVYKIGGMGTEPVGLLETGVVKPALVVTIGPTGLTTEVKSGDMHHED

SEQ ID NO: 172090 - protein, 153 aa, Glycine max
  unsure (1)..(153): unsure at all Xaa locations
  Clone ID: PAT_MRT3847_126410C.1.pep
SFFFLVIGCLKQIKGDSPEKVEYIGMRNLIKAVKDNLGLRRGKLLFGFEGINYRQLPWGALDDVVICGVSESTFQIDPSGGENGGPTGVFKVXGVVSTANNGGFTSIRTKNFSEPENLSAYDGLEFRLKGDGRRYKIIVRTSSDWDTLGYTAG

SEQ ID NO: 172091 - protein, 66 aa, Glycine max
  Clone ID: PAT_MRT3847_126411C.1.pep
FASLNLHTNTTTRTLTQYFGCGIGQAPLGTSSALQTEGRNVNSTREDAIHRDSGKQGQSLKVTEDP

SEQ ID NO: 172092 - protein, 66 aa, Glycine max
  Clone ID: PAT_MRT3847_126412C.1.pep
RGCDIYVFPILFPKKSAIGNVLNSIKVLRDPSLPKDFTLFYCRELEFPQVHDLTWEVPGHLDNCTQ

SEQ ID NO: 172093 - protein, 71 aa, Glycine max
  Clone ID: PAT_MRT3847_126413C.1.pep
KIFQYGNAEGMNICFYYITPLIRALFQRIGKPIKYVKLFSKNVNDKFYTPPYSWDSTNMVESIWDQTCRYN

SEQ ID NO: 172094 - protein, 71 aa, Glycine max
  unsure (1)..(71): unsure at all Xaa locations
  Clone ID: PAT_MRT3847_126414C.1.pep
MGKIKIGINGYXRIGRLVAXXALQRDDVELVXVNDPFIIXDXXTYMXXYXSVQGXWKXXDVMLKXXXTFSK

SEQ ID NO: 172095 - protein, 50 aa, Glycine max
  Clone ID: PAT_MRT3847_126415C.1.pep
NAPLKKNREDEQLYQMKGGKYISCNDPLPDLSNILTNNQFKINGNLGCHL

SEQ ID NO: 172096 - protein, 63 aa, Glycine max
  Clone ID: PAT_MRT3847_126416C.1.pep
AWSVSNAMYHLEASSVAVLQYKSGRVRERRAQRALPVTSQLEPPLCRDVCSTLEIRHNHRKAW

SEQ ID NO: 172097 - protein, 47 aa, Glycine max
  Clone ID: PAT_MRT3847_126417C.1.pep
PRVRSAYFLYKQIYLIHSSLLFLPPNTFLLTYHKQILLNLSLFGHDC

SEQ ID NO: 172098 - protein, 105 aa, Glycine max
  Clone ID: PAT_MRT3847_126418C.1.pep
ETNGLSTQRQKLCVILQTQGKNTLHQKIIPHTEHYGRASKAPSKLTKKMIDWSATYDTFNIQIPLEVITNQKPKCKTKPHYYHNDEGTKMNNIDLQEDFNGSHQV

SEQ ID NO: 172099 - protein, 91 aa, Glycine max
  Clone ID: PAT_MRT3847_126419C.1.pep
HRPSECNDQEEQRRILLEINAAITDPTIYTGLHLPFEIQSRGNGKSETKISLSAQNKAEKEVGHFIKHIGRDLNSRNQLPHTISNTIFTTN

SEQ ID NO: 172100 - protein, 210 aa, Glycine max
  Clone ID: PAT_MRT3847_12641C.1.pep
MSVKECHHHHKGKKHKLWRRIFWGIVIFAFIVLLTVLIIWAILKPSKPTFILQDVTVYGFNATIPNFLTSSFQVTLSSRNPNDKIGIYYDRLNTYVTYRNQQVTYRTSIPPSYQGHKEEDVWSPFVYGTNVPVAPYNFVGLSQDQTNGNVLVLVKIDGKVRWKVGSFVSAHYNLNVRCPAFITFGPQSNGIALGNNAVKYQLVQRCTVGV

SEQ ID NO: 172101 - protein, 56 aa, Glycine max
  Clone ID: PAT_MRT3847_126420C.1.pep
LNIIDYYDGLLTYFFIFFLWLKRRRHYMLLDATTPSHENPSQEGEDVEERHCRVTT

SEQ ID NO: 172102 - protein, 225 aa, Glycine max
  Clone ID: PAT_MRT3847_126421C.1.pep
CLNKIQETKIVINPVDYDVGLCQDLLIPVTNFHNEDKGYMVLPGDVFDLPIRKDIIHRVVRWQLAKRQQGTHSTKTISEVSGTGRKPWNQKGTGRARHGSLRGPQFRGGATMHGPKPRSHAFKVNKKVRRLGLKIALSARAAEGKLLVFEDLEVPTHKTKNIVNYYSQMEDTKKLLLVDGTIDEKLKLSTQNLHYVNVLPSIVSFNFIHVASIIVQMELYIVNFI

SEQ ID NO: 172103 - protein, 70 aa, Glycine max
  Clone ID: PAT_MRT3847_126422C.1.pep
SMVKRRVGDFTRISFLILMTLGSNAPITLVGISGVMSSVVIWMPKTKISKVPAIFEANTIAISRAKFPHP

SEQ ID NO: 172104 - protein, 182 aa, Glycine max
  Clone ID: PAT_MRT3847_126423C.1.pep
MDDRIDEDEKDKEEEESLAGLTSLPPHRKAHSYSQQLRGTSTHKRHHQVRKHSLDDSRISSNIVEASFYDCGEDDDIFSRSSSTNNPAAEEEYNEGADSTTQYQPLQEFIGSGGGTGVFKPPFRASVHPGRPPFLELRPHPLRETQVGKFLRNIACTKTQLWAGQESGVRVWEIQNAYEPGY

SEQ ID NO: 172105 - protein, 310 aa, Glycine max
  Clone ID: PAT_MRT3847_126424C.1.pep
MAALISKRILRCSSGSLHSLGRCYFDSPGFASIYKPRDVCGGLSGERMFSADRSLVGSMVRQFSTSILTPGADDSAFPSDLLSKKILATSERTIGLCQDLLIPVTNFHNEDKGYMVLPGYVFDLPIRNYIIHRVVTWQLTKRQQGTHSTKTISEVSGTGRKPWNQKGTGRARHGSLRGPQFRGGATMHGPKPRSHAFKVNKKVRRLGLKIALSARAAEGKLLVFEDLAVPTHKTKNIVNYYNQMEDTKKLLLVDGAIDEKLKLSTQNLHYVNVLPSIGLNVYSILLHDTLVMSRAAVSKIVERMHTPINR

SEQ ID NO: 172106 - protein, 127 aa, Glycine max
  unsure (1)..(127): unsure at all Xaa locations
  Clone ID: PAT_MRT3847_126425C.1.pep
MAALISKRILRCSSWSLHSLGRCYFDSPSAGFASIYKPRDVCSSLSGERMLPADRSLVRSMVRQFSTSILTPGADDSAFPSDLLSKKTLATSERTIGLCQDLLIPVTNFHNEDKGYXVXPGDVFDLP

SEQ ID NO: 172107 - protein, 41 aa, Glycine max
  Clone ID: PAT_MRT3847_126426C.1.pep
KKSKLLRLEGRPSCKGLMEFKNHQTLWRVASLLPLRPRLLL

SEQ ID NO: 172108 - protein, 62 aa, Glycine max
  Clone ID: PAT_MRT3847_126427C.1.pep
NVVSDNKAHYLHSLLKHFLTSLFHLKALPIPPPHQFVFTLSSHIVGHRLLRLSFSKRVAGRV

SEQ ID NO: 172109 - protein, 47 aa, Glycine max
  Clone ID: PAT_MRT3847_126428C.1.pep
LSPHLILALLGPFPQLHSLLPLTLSSNPRCFMCLETEDSSVASSLFA

SEQ ID NO: 172110 - protein, 76 aa, Glycine max
  unsure (1)..(76): unsure at all Xaa locations
  Clone ID: PAT_MRT3847_126429C.1.pep
MLQPIYNDAGHRTTAWLDKXRKSNGSLATSRIQVSMRRVMQTSAAEDRTQDTLDEGCRSIDXTWESLHDVQVRDRT

SEQ ID NO: 172111 - protein, 122 aa, Glycine max
  unsure (1)..(122): unsure at all Xaa locations
  Clone ID: PAT_MRT3847_12642C.1.pep
SAFLALCFAVCCLCLGGVALVAGFFVKRHXLRSGWRASLDLSVLXGILASVGSIYYEPKILKVVMTGGNQVLTAYMRGHRVCFLLSNYIIEWWVVVCVMASTRPLKSQNPHVGNAQDTLVWY

SEQ ID NO: 172112 - protein, 37 aa, Glycine max
  Clone ID: PAT_MRT3847_126430C.1.pep
SELNFFSGMPSTMIDPIHYDLLHAATQDAIDTNLYSF

SEQ ID NO: 172113 - protein, 86 aa, Glycine max
  Clone ID: PAT_MRT3847_126431C.1.pep
LLRVAFVTKADGFLQEVHSQKSEVHNQPGFDPESVANRLKQQEKQRLIRQVEALLDLAIGLKWYLFCPSRHFDSYDCSHLTVHGSV

SEQ ID NO: 172114 - protein, 68 aa, Glycine max
  Clone ID: PAT_MRT3847_126432C.1.pep
LKEKPVPGSPPAFVHAFMVVPEVAHAPGYPFSPPLKTFFLTLFAGGVVLPPIFGPVIGVSPFAPVKRP

SEQ ID NO: 172115 - protein, 58 aa, Glycine max
  Clone ID: PAT_MRT3847_126433C.1.pep
LGFGPLLGNLFSPPPKGRAFFVFFLICGGGSCETKYLSPFKKAGFFYLALNLSLKERG

SEQ ID NO: 172116 - protein, 60 aa, Glycine max
  Clone ID: PAT_MRT3847_126434C.1.pep
YYDIVREAPVRFTTMIERDLETAHVSTAVMTSRTNGQAHFTSSLRMPTYVFGTMSLRKCD

SEQ ID NO: 172117 - protein, 69 aa, Glycine max
  Clone ID: PAT_MRT3847_126435C.1.pep
DKDSFLFDSCPHVSSIENQDQFCTRDIKGSEGQMVRLVCVTTFNDTGVAGMLNLRDHDRYALSCATHIS

SEQ ID NO: 172118 - protein, 95 aa, Glycine max
  unsure (1)..(95): unsure at all Xaa locations
  Clone ID: PAT_MRT3847_126436C.1.pep
MDSSQEEETLLGATGSPFVCKDHIALKLTGVQYIYVQENLGNKRELLVKYNPFHKRAPVLIHNETPITXDCLDSXYIDETMDNNPILPYDAYQRA

SEQ ID NO: 172119 - protein, 60 aa, Glycine max
  Clone ID: PAT_MRT3847_126437C.1.pep
WSALHSVFLLQEMCSFFLIKTMNFKHCHCEVDIIYTHDSTLSSARIVGSRDNASAPCIEF

SEQ ID NO: 172120 - protein, 63 aa, Glycine max
  Clone ID: PAT_MRT3847_126438C.1.pep
ACLVSTVTHFLTRQKKESPGSEYVPKGGSYVMWLSICWPTGSGSECCIASDCHDDQPIKSLHP

SEQ ID NO: 172121 - protein, 51 aa, Glycine max
  Clone ID: PAT_MRT3847_126439C.1.pep
YFLVHKLIRCDAVRIPLHLPIAQLLAKFKSLQQCLEHQARTVMSVVVYIQS

SEQ ID NO: 172122 - protein, 252 aa, Glycine max
  Clone ID: PAT_MRT3847_12643C.1.pep
MILPYHFKTLKYQTSNSSLFSLHSSLLSSFPHKTSVRNISTLTMSVKECHHHKGKKHKLWRRIFWGIVIFAFIVLLTVLIIWAILKPSKPTFILQDVTVYGFNATIPNFLTSSFQVTLSSRNPNDKIGVYYDRLDTYVTYRNQQVTYRTSIPPSYQGHKEEDVWSPFVFGTNVPVAPFNFVGLSQDQTNGNVLVLVKIDGKVRWKVGTFVSGHYNLYVRCPAFITFGPQSTGIALGKNAVKYQLVQRCTVGV

SEQ ID NO: 172123 - protein, 117 aa, Glycine max
  unsure (1)..(117): unsure at all Xaa locations
  Clone ID: PAT_MRT3847_126440C.1.pep
MFKVYLVSSFLLGLLLLAQAHGNDKKIGFYQLKRGDLHLNLTNYGASLISVIVPDKHGNLDDITLGYDDIEQYKNDSWYFGATIXRVANRIGHAQFTLDGHTYKLPANDHGNTLQVV

SEQ ID NO: 172124 - protein, 210 aa, Glycine max
  unsure (1)..(210): unsure at all Xaa locations
  Clone ID: PAT_MRT3847_126441C.1.pep
MEREGNDCVVGDTSLTASPFDGEASILRSTLLLYHVGEVTLTFHSDRLSWKLVEPLDNDVSTCLGIKYFSKVATGIKLSDIYAVELNDHGSIHISSLSPATECLFLGQDIKMYSFTVHGFIRSKTQPSQCILVEYTFGHKNLPRCQMWVNQLNASLKHEIGRPKNLLVFVXPRSGKGNGCRTLEAVAPIFSRAKVKTKVIVTERAGEAFD

SEQ ID NO: 172125 - protein, 292 aa, Glycine max
  Clone ID: PAT_MRT3847_126442C.1.pep
MAIEAQLYPNNAPPFPFHVSRVDKSPAAYSHSHRQQQPGGWQMNQNIPLVPPNFSCFSNSNSNSNSNVLQNAFNKNVVQPSASYPQCLAIEFDQQREIDHHIRSHNEKLRILLQEQRKQHVAELLKKVESNALHLLRQKDEEIAQATKKSTDLKEFMTRLEVENQSWRKVAEENEAMVLSLHNTLEDMKERALYRVTKKDAESCCDENMRNRAMEEGTGENRLSGGGGAGGVEEVEQIRKRTMDCKCCNSQNSCFMFLPCRHLCSCKTCEPFLQVCPVCSMPKKSSIETLIV

SEQ ID NO: 172126 - protein, 46 aa, Glycine max
  Clone ID: PAT_MRT3847_126443C.1.pep
GKGKSHSCDVINVKRKLVWYKLITEQITQQCLHQEREQESVDSILY

SEQ ID NO: 172127 - protein, 59 aa, Glycine max
  Clone ID: PAT_MRT3847_126444C.1.pep
QSSMNHFYLISFIDMISAIFRRERCILLNRDFNQNNILSSVSSKRPQISTNFCHDPLEL

SEQ ID NO: 172128 - protein, 121 aa, Glycine max
  unsure (1)..(121): unsure at all Xaa locations
  Clone ID: PAT_MRT3847_126445C.1.pep
SSRETEELEPLFVYSRVQPLNPINLDVDLDDYEDVICVVGKKRKISKAVGIEKTIGKGVPVVDIEDVDWXPPPPKIAGIAQKTIDEDPTLKNWKLKNRDLASFADSAKDWLKDVEEVSKLE

SEQ ID NO: 172129 - protein, 43 aa, Glycine max
  Clone ID: PAT_MRT3847_126446C.1.pep
MSLAANEDLQLILRVLNTNVYVKQNILIAMTSIMGVERRLDNI

SEQ ID NO: 172130 - protein, 110 aa, Glycine max
  unsure (1)..(110): unsure at all Xaa locations
  Clone ID: PAT_MRT3847_126447C.1.pep
DITIFFSTHLIQYSTLSELNHGSSFEGIKHLNYTHLADIPNYALIKYNKRSMAKLTLVKVYKGYTQVFSCTNYHLILKAKYXSPTASYKSIVWDKPFVHFINLTSFKPLH

SEQ ID NO: 172131 - protein, 72 aa, Glycine max
  Clone ID: PAT_MRT3847_126448C.1.pep
GHQKDTPHSHSLKPGLYLVGTPIGNLEDITLRAIRVLNSADVILSEDTRHSGKVLHHYHIKTPLMSYHKFNE

SEQ ID NO: 172132 - protein, 76 aa, Glycine max
  Clone ID: PAT_MRT3847_126449C.1.pep
ANLSTPYKNTFHVHYRPVANHLWAVVCHTFRPFSNTSHIRQMLQDVTLTNSIYARVHSVLGRIHNTSKTVQTFAAE

SEQ ID NO: 172133 - protein, 67 aa, Glycine max
  unsure (1)..(67): unsure at all Xaa locations
  Clone ID: PAT_MRT3847_12644C.1.pep
RSPGSSDGRPWTMWILPMLGCMDASQLLKXLQESQTAYPGDFIRIIGFDNVRQVQCISFIAYKPPGF

SEQ ID NO: 172134 - protein, 176 aa, Glycine max
  Clone ID: PAT_MRT3847_126450C.1.pep
MGLKFTHGVVILIVISASMFSVSMANKDWSFGFNYTDWWSRFGNHPQNKTQQQPRQILVGGSEHWHYGFNYTDWAFKTAPFYLNDTLVFKYDAPNATSFPHSVYMFKSFGSFLKCDIKKAKMLANPTQGSGEGFKFVLKKWQPHYFACGERNGFHCNNGTMKFAVMPMFRPFWKWP

SEQ ID NO: 172135 - protein, 176 aa, Glycine max
  unsure (1)..(176): unsure at all Xaa locations
  Clone ID: PAT_MRT3847_126451C.1.pep
MALKLGHGVMILVIISASMFSVSMANKDWSFGFNYTDWWSRFGNHPQNKTQQQPKQIVVGGSEHWHYGFNYTDWAFKSAPFYLNDTLVFKYDAPNATSFPHSVYMFKSFGSFXKCDIEKAKMLANPMQGTGEGFKFVLKRWKPHYFACGERNGFHCNNDTMKFAVMPMIRPFWQWP

SEQ ID NO: 172136 - protein, 88 aa, Glycine max
  Clone ID: PAT_MRT3847_126452C.1.pep
FKGRDLQPLRQTPPCINTPFFLFPYRSTLHNTTYTSLLLMLTVRLPDIYICIYIPHLYTPHINIMDKGYTNKHINPWTRTTTKTKKNL

SEQ ID NO: 172137 - protein, 36 aa, Glycine max
  Clone ID: PAT_MRT3847_126453C.1.pep
MLRNYSTVCDHHVFMNLINLLGYSVFTGVIKLTINP

SEQ ID NO: 172138 - protein, 182 aa, Glycine max
  unsure (1)..(182): unsure at all Xaa locations
  Clone ID: PAT_MRT3847_126454C.1.pep
RPLFKEARALLGRLEYQRGNFDAALQVFQGIDIKGLAPRMIKAIAERTKQRKPRSKADIMVPNVMSLRSVSLLLEAILLKARSLEELGQCIEAAKECRIILDTVESALPNGMPEGIGEDCKLQEMFHKALELLPSLWIKAGLLDEAVTAYRRALVKPWNLEPQRLACVQKDLATTLLYXRCK

SEQ ID NO: 172139 - protein, 58 aa, Glycine max
  Clone ID: PAT_MRT3847_126455C.1.pep
MVGPVFEPPEKAVPVVKLPHSHVLEGIKYGKAPVVEDTKRGRRDLIFQRNGPAFGFGI

SEQ ID NO: 172140 - protein, 60 aa, Glycine max
  Clone ID: PAT_MRT3847_126456C.1.pep
KVIGCVHRPVSSCKRDIGFYGPLRRALRTALNSIIQRKMRNRNGVDVIVRTYSPSHFEGA

SEQ ID NO: 172141 - protein, 74 aa, Glycine max
  Clone ID: PAT_MRT3847_126457C.1.pep
TKLRTNWNQNWNKIKLLHSLEELGSTWPRLQPMVELIKLVQRGLSFYSCNQTRFANGLDTLLPNSRVQQNLFPI

SEQ ID NO: 172142 - protein, 93 aa, Glycine max
  unsure (1)..(93): unsure at all Xaa locations
  Clone ID: PAT_MRT3847_126458C.1.pep
EEMKVVAICALQNFVMNSRTNRRAVAEAGGILVIQELLLSPNTELXAQAALLIKFLFSTHTLQEYVSNELIRSLTAALERELWSTATINEEVL

SEQ ID NO: 172143 - protein, 516 aa, Glycine max
  Clone ID: PAT_MRT3847_126459C.1.pep
MAWTSEHPSLFLLLLSLSLPLFLFLLRRRNSKTSSSNHRLPPGPPGWPVFGNMFQLGDMPHRTLTNLRDKFGPVVWLKIGAMNTMAILSAEAATVFFKHHDHAFADRTITEIMRVHNYDKSSLALAPYGPYWRLMRRLVTVDMLVPKRINDTASIRRKCVNDMINWVAKEASKSEHGRGVHVSRFVFLMTFNLFGNLMLSRDLFDPESEDGSEFFSAMMGLMEWTGHANVTDLFPWLSWLDPQGLRRKMDRDMGKALGIASRFVKQRLEQQLHRGTNKSRDFLDVLIDFQSTNSQEALNVSDKDLNIFILEMFLAGSETTSSTIEWAMTELLCNRECLLKVKRELSWVVGCGRKVEESDIDKLPYLQGVVKETLRLHPPIPLLVPRKATEDTEFMGYYIPKDTQVFVNAWAIGRDPSAWDEPLVFKPERFSENNNIDYKGHHFEFIPFGAGRRMCAGVPLAHRVLHLVLGSLLHRFDWELDCHVTPSTMDMRDKLGITMRKFQPLLAVPKLIVSSS

SEQ ID NO: 172144 - protein, 68 aa, Glycine max
  Clone ID: PAT_MRT3847_12645C.1.pep
HGFTQVLLQLLIFLYLSLQLLLDQFGHGEGESLLGGGRWVSSSEKHLRTPSWPCRRTARATVDSLRPE

SEQ ID NO: 172145 - protein, 113 aa, Glycine max
  Clone ID: PAT_MRT3847_126460C.1.pep
LVLLTANVIISNARDTIEVTEFKLSSLVCLCLLTLSSVMLQYSNHNTGLRLLKITPQKRTLVASFITRSTASPILIVKYMYISLNSKTYAREAKSIVSKSTGSMAFLSAKIQQ

SEQ ID NO: 172146 - protein, 55 aa, Glycine max
  Clone ID: PAT_MRT3847_126461C.1.pep
EEYLSWARIVLWIMAELALIGSDIQEVIGSAIAIRILSHGVVPLWAGVVITALDW

SEQ ID NO: 172147 - protein, 159 aa, Glycine max
  unsure (1)..(159): unsure at all Xaa locations
  Clone ID: PAT_MRT3847_126462C.1.pep
MARRSLPLLKHLLLSRRIPARSVTYMHRPGDGSPRPVTLIPGDGIGPMVTGAVEQVMEAMHAPVYFEKFEVHGHMKAVPPEVLDSIRKNKVCLKGGLVTPMGGGVSSLNVQLRKELDLYASLVXFNLPGLPTRHDNVDICVIRGDTRSESFGLEHEVVP

SEQ ID NO: 172148 - protein, 76 aa, Glycine max
  unsure (1)..(76): unsure at all Xaa locations
  Clone ID: PAT_MRT3847_126463C.1.pep
THTPLGGVFKRARHQTTPYELLEILRGPCFLRQEGWXWSYEFCYQKKLRQLHLDDDKADQKFVLVVYDPEATTAFN

SEQ ID NO: 172149 - protein, 71 aa, Glycine max
  Clone ID: PAT_MRT3847_126464C.1.pep
PLPDSPRVKPSKLFATKAHSPFELQITLLGDTLLPPRPVLSIFRNISFCMEATGRFLDGGASVNALIVSSS

SEQ ID NO: 172150 - protein, 55 aa, Glycine max
  Clone ID: PAT_MRT3847_126465C.1.pep
TGKKIFPQAESSDTTGNAKDKRQDKEGIPPEKQRTKSAGKQREHGRTPDENNTQK

SEQ ID NO: 172151 - protein, 122 aa, Glycine max
  unsure (1)..(122): unsure at all Xaa locations
  Clone ID: PAT_MRT3847_126466C.1.pep
NQLNGFXFRGDVKVILATXQIESFDPALVRAGXIDRKIKFPFPDIKTRRRIFXIPPSRMALADDVNLEKFVMTKNEFFGGDIKAICSETGFLAFREPRKKVTHAGFKKAKDKMMFKKKKRGP

SEQ ID NO: 172152 - protein, 326 aa, Glycine max
  Clone ID: PAT_MRT3847_126467C.1.pep
MAAGTVFCAAATAASNLTTTTFLHNQTPPSTSSQPPLDSLFLSASSPFLGSRSIVSFGDVQGGKGCNDSFFRPYDENGDEDMDEYFHQPEKKRRLSVEQVKFLEKSFDEENKLEPERKIWLAKELGLQPRQVAIWFQNRRARWKTKQMEKDYDSLQASYNDLKANYDNLLREKDKLKAEVARLTEKVLGREKNESHLEQAETNGLQEPLHKSLVDSASEGEGSKVTFEACKQEDISSAKSDIFDSSESPQYTDGVHSALLETGDSSYVFEPDRSDVSQDEEDNLSKTLLPHYIFPKLEDVDYSDPPHGSCNFGIPEEDQAIWSWPY

SEQ ID NO: 172153 - protein, 141 aa, Glycine max
  Clone ID: PAT_MRT3847_126468C.1.pep
RANVGVKRMGELDIRPFLEAMKIKYNNEDAEDRASELCSLWEEYIRDPDWHPFKITIIEGKHQEIIDDEDEKLKGLKNEMGEGVYKAVVTALTEINTYNPSGRYITSELWNYEEGKRATLQEGVKLLLMQWKLTKQKRGTM

SEQ ID NO: 172154 - protein, 46 aa, Glycine max
  Clone ID: PAT_MRT3847_126469C.1.pep
TAARSDRRGCVKLVTLKKRLLEDNPAFLSLLYLHFYFLHVVRTSCL

SEQ ID NO: 172155 - protein, 127 aa, Glycine max
  unsure (1)..(127): unsure at all Xaa locations
  Clone ID: PAT_MRT3847_12646C.1.pep
PPPPGERPGGGGAPTPQGPTPTRGPAAKPPRNKRPPRRGGPPPRQXRRGDQGFPPPPQQKTPPRGGRRSRPKQREGPPPPGDPTAGPRRRPPPGLRLPGARRAPAGHNRAYLFSSLVWSAPALFFKF

SEQ ID NO: 172156 - protein, 53 aa, Glycine max
  unsure (1)..(53): unsure at all Xaa locations
  Clone ID: PAT_MRT3847_126470C.1.pep
IIYIFRIIVPSYRIHIIYWCIFALSGCVVCFENQCPQNGMLKSHFFMFCXGVY

SEQ ID NO: 172157 - protein, 85 aa, Glycine max
  Clone ID: PAT_MRT3847_126471C.1.pep
EKDNDLLALPAIAYRNNRNDATDGYSVPPPVIVETYTEDQTLGGNRCWGLFPNDDDFGMEPIWPLTDGSKAGPGFQLLGSEAEVT

SEQ ID NO: 172158 - protein, 110 aa, Glycine max
  Clone ID: PAT_MRT3847_126472C.1.pep
SPGGHVIPRVGPSFYCPPKRENWAPPGGRAGISGGTPGVAQGAAPGSAQGAPQGSAQKSLGKFFLHPSGGFWIKKRPGKKNLGGKFWVFSWSVAFFLGFALNKIRLSTGC

SEQ ID NO: 172159 - protein, 70 aa, Glycine max
  Clone ID: PAT_MRT3847_126473C.1.pep
MALVGEQKHSLMVKKGPCSHCGVTHTPLWHDGPTEKPVLCSDCGSQYKLKGNLDNYFPKNPVVQSFHNKF

SEQ ID NO: 172160 - protein, 116 aa, Glycine max
  Clone ID: PAT_MRT3847_126474C.1.pep
RLEENVSSKSSLVSYLTAALIGIVLGNMACVTTKSTSPPRKCLFPWLAGGFSMSVTWTYIIAEELVSLLVAIGSVIGVSPSILGLTVLAWGNSLGDLIANGAMAKNGGADGAQIAV

SEQ ID NO: 172161 - protein, 463 aa, Glycine max
  Clone ID: PAT_MRT3847_126475C.1.pep
MRGTIGIRIPNPNISNATRKTLVPFSTSSGFGGGGRGRGRGGSLPGSGLFNNNERAPVEPNSSESKSDTTEPPIPPGSGLGHGRGKPMPPSGLPSFSSFISSINQPPAGRGRGTAPHPQHDLQPPDSGPKKPIFFKREDSVSPTASNDFLPPKRSVDHAHDNKLPGSIPGVLSGLGRGKWKVHETTRSGNTSYRRKRHLRTRQAPGAASSETVPKRSPIPSQEDATRNALKILSHGKDDGSDTGRGREYGGRGGLDRGRGRGRGRGRGRGMGRGRFVERDVDEKVMDTDDYATGLYAGDDADGEKLARKVGPEIMNQLTEGFEEMTSRVLPSPLEDEFLDALDINYAIEFEPEYLVEFDNPDIDEKEPIPLRDALEKAKPFLMSYEGIQSQEVWEKTMEETMARVPLLKKIVDHYSGPDRVTTKKRQEELDRVAKTLPESAPSSVEQFTNRSVISLQVWNCKY

SEQ ID NO: 172162 - protein, 111 aa, Glycine max
  Clone ID: PAT_MRT3847_126476C.1.pep
EYLVEFDNPDIDEKDPIPLRDALEKAKPFLMSYEGIQSQEVWEKTMEETMARVPLLKKIVDHYSGPDRVTTKKRQEELDRVAKTLPESAPSSVEQFTNRSVISLQVWNCKY

SEQ ID NO: 172163 - protein, 185 aa, Glycine max
  Clone ID: PAT_MRT3847_126477C.1.pep
MAGICCGVVGESGETSSSSIEPTSRPSARRSLDLLPLRYIAADVSVPAPENSRKRQKLDRCVSSARECENAVQSSKSKVAKAVRNRSSKILTLDSTSPTVYEGCLRYGVTSVCGRRRDMEDAVSVRPSFCQENLSQDDKKEFHFFAVFDGHGCSHVATMCKERLHEIVKEEIHKAKENLEWESTM

SEQ ID NO: 172164 - protein, 144 aa, Glycine max
  Clone ID: PAT_MRT3847_126478C.1.pep
SFFFYFLFFYFSSFYVLIVTFCFFYAKPPHSLLYNWGKPTSPRLPNKRRPPPKKPPGAPKKPPPSANNPKNPPEPPNKRGPPNPRETQDIPPRGLPPQASNAPPTPASATAPQEEKTKAPTKKPPAGPKKSPPYRENPGGKNPP

SEQ ID NO: 172165 - protein, 100 aa, Glycine max
  unsure (1)..(100): unsure at all Xaa locations
  Clone ID: PAT_MRT3847_126479C.1.pep
PEPKQVTGNRGQHTLIGXGSYGRRNYGDPKSGXARTIRNLYARKQPEEEFLAAGAMVSRLKHEKAANLPSICTEGTTRIFAXSLNLMGSFTTILHGRKGG

SEQ ID NO: 172166 - protein, 102 aa, Glycine max
  unsure (1)..(102): unsure at all Xaa locations
  Clone ID: PAT_MRT3847_12647C.1.pep
ANPPHHSHQEHFPLEERGPLLLLDHRSACALVPSNLHSYLETFSHNPTHSSFSPLSSXPISMTNCXNLTIALILGXLLFQHCHYYDKTNLSNDDLTPAHFPY

SEQ ID NO: 172167 - protein, 109 aa, Glycine max
  Clone ID: PAT_MRT3847_126480C.1.pep
FIFLSFFLSSFPLFYSLLVFTSHPLSPFAKALIFSLSNPRFSTFLDQGASFSQFLNHFLFWASLHFGKRSDFSPPFFCFESLVNPLFSIWGGEGNRFYRFNYEEKGEGE

SEQ ID NO: 172168 - protein, 55 aa, Glycine max
  Clone ID: PAT_MRT3847_126481C.1.pep
MKSDFSRLHCNIKEIFCFVLGNAFFQEKMKGIINDRSGFAQYLNGVSSVCSESVY

SEQ ID NO: 172169 - protein, 44 aa, Glycine max
  Clone ID: PAT_MRT3847_126482C.1.pep
GLSFGDLIREQSFCMNAYVSLYPIDRPLSNLYFLPHLRRSFLCL

SEQ ID NO: 172170 - protein, 105 aa, Glycine max
  Clone ID: PAT_MRT3847_126483C.1.pep
THKPPKARSTTSNRSSTTAYRTHTHTHISQILQHKTHDDGTPEVNSTHDKSKLLRDNKRRLKLRETEKIRDTHDRKIQTLEVFRGKEKRKHVTVKRLNGITVALV

SEQ ID NO: 172171 - protein, 396 aa, Glycine max
  unsure (1)..(396): unsure at all Xaa locations
  Clone ID: PAT_MRT3847_126484C.1.pep
ARATSSFCFSNDHLLTSNSRSLSAGQSEFITEISEHGLTQGMVATSSASLNPNLMDNPPTSSGRKSSPGSPLSSSPRFIEACEKPVMLDVYSPDRLAGELFFLDSSLAFTAEELSRAPAEVLGRSSHGTLYKATLDSGHMLTVKWLRVGLVKHKKEFAREVKRIGSMRHPNIVPLLAYYWGPREQERLLLADHIHGDNLALHLYESTPRRYSPLSFSQRIRVADDVARCLLYLHDRGLPHGNLKPTNIVLAGPDFNARLTDYGLHRLMTPAGIAEQILNLGALGYRAPELATASKPXPSFKADVYALGVILKELLTRKSAGDIISGQSGAVDLTDGRVRCEREGRVMDCIDRDIAGGEESSKEMDELLAISLRCILPVNERPNIRQVFDDLCSISV

SEQ ID NO: 172172 - protein, 57 aa, Glycine max
  Clone ID: PAT_MRT3847_126485C.1.pep
REQTILFYQILSYPDFISSRYYFIQYYLILSRFYLIKSYLILSRFYFIYGLGLKTDL

SEQ ID NO: 172173 - protein, 58 aa, Glycine max
  unsure (1)..(58): unsure at all Xaa locations
  Clone ID: PAT_MRT3847_126486C.1.pep
KKCNMYTNIIDPXHHLXLLLAETTIYILLYQQRHGHINKTLLFFISTLSYQYIPYSNF

SEQ ID NO: 172174 - protein, 59 aa, Glycine max
  Clone ID: PAT_MRT3847_126487C.1.pep
KRCVCNPSSCPKYCVFCKRFQMWSRLCMFFLPHLVLPVKVYNYAFCFTSSNRGCRYIYI

SEQ ID NO: 172175 - protein, 104 aa, Glycine max
  Clone ID: PAT_MRT3847_126488C.1.pep
PAAAPARGYTVPGGGVVRPKRHSAKKVPGTAHGFRRPGIRLRPGQPKNPLHFPLGGTGRLRALPPDHLGGGPSGHDYRLLGRDHPAATGLQLGGGTETVPAGRG

SEQ ID NO: 172176 - protein, 64 aa, Glycine max
  Clone ID: PAT_MRT3847_126489C.1.pep
SLSLAWHQGGLLTYLMNDFRTFFFSVSTHPVTDESVVGISVSAAREFAAFVPKIPTLNWVGFQR

SEQ ID NO: 172177 - protein, 163 aa, Glycine max
  Clone ID: PAT_MRT3847_12648C.1.pep
YFLHKHTTTGYQLQSSPKIREATQGEDNYSSTETSISLLPPKISRSIQRGRGHKSAVELVPGLDELKHHLTSFETHSCRKPVINKHQYPENKHSGVVDHNPYMQRIRARMIPLPIDCHNNYTGGEHEQEKAIVPLEIDASDGHRNWFRETLGRRSGVVLEDGP

SEQ ID NO: 172178 - protein, 73 aa, Glycine max
  Clone ID: PAT_MRT3847_126490C.1.pep
TFKFSPPVNWPKKKLKKGFFLSQTFAKKPEKNFPRQKTLFLGRGKKGIFKNIGFGEFFLNHRLKLFYFLKKNF

SEQ ID NO: 172179 - protein, 58 aa, Glycine max
  Clone ID: PAT_MRT3847_126491C.1.pep
LGNFISSFIYFCIAVVIVSGGIKLYAYYIDMDTIRRSLYSYISALAILRCSMKLSDFV

SEQ ID NO: 172180 - protein, 45 aa, Glycine max
  Clone ID: PAT_MRT3847_126492C.1.pep
SIENNNRLVCAYDQFNKSRFVGLMPQNTRNHRGCDQYREKLRSRL

SEQ ID NO: 172181 - protein, 122 aa, Glycine max
  Clone ID: PAT_MRT3847_126493C.1.pep
EKKILKRVPIKIPERLHWSRVHPGKPRRKNFGVTRGPLINPKRGGANLFTKGPGFSPERRGFSLIGLLKKKGKKAGKGGKIQFRPPGALFISNPLDRLVKTPKGGPDPTRGNLGGEDHSQSW

SEQ ID NO: 172182 - protein, 67 aa, Glycine max
  Clone ID: PAT_MRT3847_126494C.1.pep
NYPPCHTVLDKNTLPLLRQRKPHALPDWVFTNLAKPQIHFGLPHCTYVLGASYSINALSSTIDRDAG

SEQ ID NO: 172183 - protein, 112 aa, Glycine max
  Clone ID: PAT_MRT3847_126495C.1.pep
MCSFSSEQLPYLFLGFALHPPWPSKRQHQHLRLNIHKRRRAQLQEARRRKRMIILKLTEIKMRNLKLYMENQSIIEENQKLRKQAMLLHKENDVLLFQLQKKLSEQNNSKTN

SEQ ID NO: 172184 - protein, 107 aa, Glycine max
  unsure (1)..(107): unsure at all Xaa locations
  Clone ID: PAT_MRT3847_126496C.1.pep
RXTRTXARNSARANFFASLAQREREREREXSXYKGXEXSXXXFXXGXPXFXXXGXXXNXXTHLXVSXTHSFTKFPNLLTHPDHNRNSPIPSLISQFSFIDSFXHHTQ

SEQ ID NO: 172185 - protein, 94 aa, Glycine max
  Clone ID: PAT_MRT3847_126497C.1.pep
QILLRITSFSGSPYACMLSRAICAQKLLMPYLHRDGYDHCLNVHQEFEISMIIKTGPLTVWYRENTYCLRDSLIVNSTGNSFFNLGLLSSLLLL

SEQ ID NO: 172186 - protein, 121 aa, Glycine max
  unsure (1)..(121): unsure at all Xaa locations
  Clone ID: PAT_MRT3847_126498C.1.pep
DHTSVYYKVIADPEKRVSTMDGFDRPKGENLSLPKGFDLPTRHXFTIVHIEMKRVVRQTFLNDVRHIRKKRHTVTCXVAISAYSMEWSGRAYLHLCRGNEILSRDYTNSDGWNSKPVMNDK

SEQ ID NO: 172187 - protein, 196 aa, Glycine max
  Clone ID: PAT_MRT3847_126499C.1.pep
GDKTHVSTRVMGTYGYAAPEYMRTGHLTSRSDVYSFGVVLLEMLTGRRSMDKNRPNGEHNLVEWARPHLGERRRFYRLIDPRLEGHFSIKGAQKAAHLAAHCLSRDPKARPLMSEVVEALKPLPNLKDMASSSYYFQTMQADRFSASPNTRNGRTQGALLTRNGQQQRSLSIPHGTHASPYHHQFPQPSPKPNGKA

SEQ ID NO: 172188 - protein, 82 aa, Glycine max
  Clone ID: PAT_MRT3847_12649C.1.pep
TAARRRQMGEVACLTRWVSCLHSYRLKRSRLLGGQISQFFHFFLGWKTRGRIGFLLWKWVKTTIPMVNLTLTQWIGISFSWD

SEQ ID NO: 172189 - protein, 51 aa, Glycine max
  unsure (1)..(51): unsure at all Xaa locations
  Clone ID: PAT_MRT3847_1264C.1.pep
HPRDPCHFNICRSGFLSILKCHGSSVGTNKXNTNATKHIITFLLHNNSYMR

SEQ ID NO: 172190 - protein, 114 aa, Glycine max
  unsure (1)..(114): unsure at all Xaa locations
  Clone ID: PAT_MRT3847_126500C.1.pep
EXIXXVEXXRIXXRRLFEYIXGKNNXKXKIERKXXVXSEVLXSDGXFCEXXFVVRXYVXKRXKEKRTVRRGFKFXKWKXGFVGVRKXGGICKDFSVGEEGVELKGRNGGXKWGE

SEQ ID NO: 172191 - protein, 55 aa, Glycine max
  Clone ID: PAT_MRT3847_126501C.1.pep
KSCYLVRINLYNEEQKEKKENVVEKDKEKGKHAEIMEKLLYEYIILFKNTIYSIS

SEQ ID NO: 172192 - protein, 216 aa, Glycine max
  Clone ID: PAT_MRT3847_126502C.1.pep
MKLSVFHHQHHPMILNCPLTLTRTHKRLYNNGSYRWLPCHCSHSSTSKTAAEPVTVSLSIEGRRALLSCLLTTVAGVYACDVAGAVSTSRRALRGAKIPESDYTTLPNGLKYYDLKVGNGAEAKMGSRVAIHYVAKWKGITFMTSRQGMGVGGGTPYGFDVGQSERGTVLKGLDLGVQGMRVGGQKLQKSKNHELDIELLSIKQSPFGTPVKIVEG

SEQ ID NO: 172193 - protein, 280 aa, Glycine max
  Clone ID: PAT_MRT3847_126503C.1.pep
MESTTLSSQYFSLSLAHYTQIRSHYTVSTKPTIEHPETLQPNQQSNTMKLSVFHHQHHPMILNCPLTLTRTHKRLNNKGSYRWLPCHCSHSSTNKIAAEPVTVSLSIEGRRALLSCLLTTVVGVYACDVAGAVSTSRRALRGAKIPESDYTTLPNGLKYYDLKVGNGAEAKKGSRVAIHYVAKWKSITFMTSRQGMGVGGGTPYGFDVGQSERGTVLKGLDLGVQGMRVGGQRLLIVPPELAYGSKGVQEIPPNSTIELDIELLSIKQSPFGTPVKIVEG

SEQ ID NO: 172194 - protein, 146 aa, Glycine max
  Clone ID: PAT_MRT3847_126504C.1.pep
GSSDLTLLNGLALLVDVPRDKNITAEVMKSLNIPRGVSRVLFRTLNTDRQLMFKKEFDTSYVGFKEDGAKWLAENTDIKLVGVDYLSVAAYDHSIPSHLVFLESKEIILVEGLKLDDVPAGIYSLNCLPLRLVHSEASPIRCILIK

SEQ ID NO: 172195 - protein, 45 aa, Glycine max
  Clone ID: PAT_MRT3847_126505C.1.pep
RVLLLSLKLCWVSTKILGQYGNLLGFHPLELIVSLVCNGGRESVV

SEQ ID NO: 172196 - protein, 286 aa, Glycine max
  unsure (1)..(286): unsure at all Xaa locations
  Clone ID: PAT_MRT3847_126506C.1.pep
MPLPFSKSTMNSLSLFTFLCAICAHSVAVTSAAYPSIPGTETGECSLRGVGVGDGVLVPPRREVYEEGRIFDITHRYVPEMPVWDSTEGLGQHFLWLEKSMKNGSRANNSNMKLGVHTGTHVDAPGHFYDNYYDAGFDVDSLDLTLLNGLALLVDVPRDKNITAEVMKSLNIPRGVSRVLXFRTLNTDRQLMFKKEFDTSYVGFKEDGAKWLAENTDIKLVGVDYLSVAAYDHSIPSHLVFLESKEIILVEGLKLDDVPAGIYSLNCLPLRLVHSEASPIRCILIK

SEQ ID NO: 172197 - protein, 80 aa, Glycine max
  Clone ID: PAT_MRT3847_126507C.1.pep
SCLKLMQYLSSEFFPKNLSSFNSSSKFPSSSIYVHLLSKIIGVISKIQILIVFLIPKVQILFCCIASQCVKHSSGSKVCV

SEQ ID NO: 172198 - protein, 83 aa, Glycine max
  Clone ID: PAT_MRT3847_126508C.1.pep
IKVKDVRASQSPNEIIPDGITKDWKFEKRSSDFYVPDNVSSNGGSGGGNGSLSDMNIDEEAPLISSRVSHIGRMQLANHATGK

SEQ ID NO: 172199 - protein, 78 aa, Glycine max
  unsure (1)..(78): unsure at all Xaa locations
  Clone ID: PAT_MRT3847_126509C.1.pep
TVPAFGLSAGVVVGNAXVLEIGMTFGLVYTGYSTAIDPEKGNGGIIAPIGIGLIVGANIMLGGAFFGADMNAGVTCWP

SEQ ID NO: 172200 - protein, 112 aa, Glycine max
  Clone ID: PAT_MRT3847_12650C.1.pep
PTTKGGRYKPTPTTPPRGNRGTTTQEPSNPTPSGPTTPSTPSNPPSGGGGDYNTPPTHGGGSPPTPNTVSPPSNPNEPGTPTNPVTPPYPTYPKPLTGTRNYRNTHPGNNWG

SEQ ID NO: 172201 - protein, 72 aa, Glycine max
  Clone ID: PAT_MRT3847_126510C.1.pep
MEKKSGSSWSFKKMSKELWPRRLSSSFRSKRLHLPTMTIIVDNVVFKIVSVVEGVVIVSTLCVFYLCCGCHI

SEQ ID NO: 172202 - protein, 84 aa, Glycine max
  Clone ID: PAT_MRT3847_126511C.1.pep
TLSMVSENHPSREMLSLAKVMQSFRIPHFIESNRCTIYSFWMWFPPVYWQASNRFCLRQSLKGAGWYRYLGLNFILYVDNGGME

SEQ ID NO: 172203 - protein, 52 aa, Glycine max
  Clone ID: PAT_MRT3847_126512C.1.pep
DKIMMDPSTNPEYNSTFPFIFTIKKNFFIYHFSPPLNNGISSLYIPPMMLYK

SEQ ID NO: 172204 - protein, 84 aa, Glycine max
  Clone ID: PAT_MRT3847_126513C.1.pep
SNKTESLLSGNFSLKMVEPNKANHQPKYKIPALTFRDGGTQTKKSPPWAGTIHIRTWPSFRRLLQWALHQRLERPKKRGWSPPN

SEQ ID NO: 172205 - protein, 55 aa, Glycine max
  Clone ID: PAT_MRT3847_126515C.1.pep
GPPTNPFGLKGQKGYLKAGQKNPQKRFKPPTQRSKATGTNFPKPVREKGGGQFST

SEQ ID NO: 172206 - protein, 266 aa, Glycine max
  unsure (1)..(266): unsure at all Xaa locations
  Clone ID: PAT_MRT3847_126517C.1.pep
VSSRSTARGEANASLKCYVTRLKEGQNDIXYVTGERKKAXDRAPFLEKLKKKGLEVVEMVGALACCGVXQLKEFEGKKLVSATKEGLKLDESEDEKKKKEELKEKFEGLCHVIKDVLGDKVEKVVVSDRVVDSPCCLVTGEYGWTANMERIMKAQALRDSSMAGYMSSKKTMEINPENPIMDELRKRADADKNDKSVKDLVLLLFETALLTSGFSLDDPNTFGNRIHRMLKLGLSIDEDAGEADADMPPLEDADADAEGSKMEEVD

SEQ ID NO: 172207 - protein, 60 aa, Glycine max
  Clone ID: PAT_MRT3847_126519C.1.pep
VIIVSVIKLSLNAPPSLILTIDSVRKIGLGIAFLSIALFHRALLGFILILNGRLSYENYP

SEQ ID NO: 172208 - protein, 217 aa, Glycine max
  Clone ID: PAT_MRT3847_12651C.1.pep
MENGGNLCDGKEVDQFYQPSGGIEVVVANEDGLSCGSDLKEIDKVKIIQESDLFRGDASEGALWDIFRRQDVPKLQEYLKKHFREFRHIHCCPLKQVIHPIHDQTFYLTMEHKKKLKEEYGIEPWTFTQKLGDAVFIPAGCPHQVRNLKSCIKVALDFVSPENVGECFRLTEEFRTLPINHRSTEDKLEVKKMTIYAMQEVITKLEKARSRQTIVPK

SEQ ID NO: 172209 - protein, 47 aa, Glycine max
  Clone ID: PAT_MRT3847_126520C.1.pep
FFFTSNRLDVFSNLLFLFLARTRGVQPLFNLKLNRHKMTLYIICSIN

SEQ ID NO: 172210 - protein, 56 aa, Glycine max
  Clone ID: PAT_MRT3847_126521C.1.pep
SSRSQPKVQSSVSQSEICISGYLLPQEVPSRFQFPDMSSNNIPVNRGDLQVPRVTS

SEQ ID NO: 172211 - protein, 81 aa, Glycine max
  Clone ID: PAT_MRT3847_126522C.1.pep
GFGIDQRWIKLDLRSPFLEPPSSQLQNSIGRIICLGLLQWSCGFSIKDTMTTWRKVLTLFQATKNLSEKSLTINSVLCYRN

SEQ ID NO: 172212 - protein, 94 aa, Glycine max
  Clone ID: PAT_MRT3847_126523C.1.pep
KNEDTLQSKAAKKFFTKPYTAKLDPWSMYNFLHYQKIKKDVIFEHTERFSSLCFSILGGEGEGWGLLNTPTCFTPKNQFPTLHMFQAQKFVTVI

SEQ ID NO: 172213 - protein, 36 aa, Glycine max
  Clone ID: PAT_MRT3847_126524C.1.pep
RAKEVLIIQNGFVHDDQNKFLVLIKLKLLLKASDKF

SEQ ID NO: 172214 - protein, 33 aa, Glycine max
  Clone ID: PAT_MRT3847_126525C.1.pep
QGWHQARPRVLQMEAASSMALSSPSSAGYGVKL

SEQ ID NO: 172215 - protein, 141 aa, Glycine max
  Clone ID: PAT_MRT3847_126526C.1.pep
STPFRHFSLASVPTLLLSSSRSATSSLKPLGAPWATSARQTMAIAASAETALPQLTTSATGSSPIRPATDTFLLGLIPTSAPTRTSLALLTQAPSRSAATASSSTMATTSSTPALRRRASTTSVRTPTDTPSALTSHSAPT

SEQ ID NO: 172216 - protein, 85 aa, Glycine max
  Clone ID: PAT_MRT3847_126527C.1.pep
PQTHVTNTSSDDILNDIRLAWGRVNKAKLRDFYASHRLGDIDTQAPPQCMHCTLRSKNCLVVKSYRDENNAYISPIKRVESQSNE

SEQ ID NO: 172217 - protein, 80 aa, Glycine max
  unsure (1)..(80): unsure at all Xaa locations
  Clone ID: PAT_MRT3847_126528C.1.pep
TGWHDRDPSTDLRRAGFISLVNLLFFAKTFSTSFSAXLLKQTRMKRSCXEYPFAVAGVYITYMIMQVLDLDATEPKTFVR

SEQ ID NO: 172218 - protein, 37 aa, Glycine max
  Clone ID: PAT_MRT3847_126529C.1.pep
AHIAENFVLQKALSATCCAKPRMLTGICNFKLGLVRG

SEQ ID NO: 172219 - protein, 52 aa, Glycine max
  Clone ID: PAT_MRT3847_12652C.1.pep
SLAAWVASCPAQSDLWHRVRQRERSGLYIKLATRSGASSRVAGLFRSSPFCI

SEQ ID NO: 172220 - protein, 42 aa, Glycine max
  Clone ID: PAT_MRT3847_126531C.1.pep
LSNSPPPLYVGSMFSRPLIILVIAIALEVCHAVCFCPHPPTG

SEQ ID NO: 172221 - protein, 82 aa, Glycine max
  Clone ID: PAT_MRT3847_126532C.1.pep
ECQEGYSSSIPFITPTLFVIILLKKGKLTRIRGHVPPSSLINYHISPRVDFPNLRPTSQIHKWGLIIAIPYKGSPVLDDEIA

SEQ ID NO: 172222 - protein, 65 aa, Glycine max
  Clone ID: PAT_MRT3847_126533C.1.pep
VNSHALTHGHTGKTKHQAPTPKSRREEKPQTSTGERIETLAKIEEEENREGRRRLCASPERQHKT

SEQ ID NO: 172223 - protein, 58 aa, Glycine max
  Clone ID: PAT_MRT3847_126534C.1.pep
KKNQLCKQTGAVLIFYGCKRVCHAMALAFRTRNYFIIITSNPFCSYRYTKKPNYRNEI

SEQ ID NO: 172224 - protein, 163 aa, Glycine max
  unsure (1)..(163): unsure at all Xaa locations
  Clone ID: PAT_MRT3847_126535C.1.pep
SRIYPHYNEGQAQVETNLVKLSLDDVDTPKGSMLHLKISQSKIALPTNTFRGTILRRDPSASFLXEGNFISSVDVERTHRFKGLIKMGATVGISENTGIALACAMNRSFMGRARSDIYTICSQDCELWNPACXKAMTMLFYPNPCADAWSLEFLKRTRFHCDI

SEQ ID NO: 172225 - protein, 178 aa, Glycine max
  unsure (1)..(178): unsure at all Xaa locations
  Clone ID: PAT_MRT3847_126536C.1.pep
MASPMLGDATTSFEDGKLASMTTDDVVRDSXASRILENDIRILKEEVQRSNREWESYKEKIKNNEEKVKLHKQLPYLVANIVEILDMNPEDEAEEDGANIDLDSQRKGKCVVLKTSTRQTIFLLVVGLVDPDKLKPGDLAGVNKDSYLILDTLPSEYDSXFKAMEVDEKPTEDYNDIG

SEQ ID NO: 172226 - protein, 73 aa, Glycine max
  Clone ID: PAT_MRT3847_126537C.1.pep
IFAPKHANPKPCSYVDILTSTFLAMATSSIAQKAPYFARPLTGKWLGLCGKQRLNHFKFNGHDIVSGRKPTSV

SEQ ID NO: 172227 - protein, 87 aa, Glycine max
  Clone ID: PAT_MRT3847_126538C.1.pep
LVILPMYSTCVIIVISQALSGHLGYNELTVHALVSPLSYVRQCSSATMMTELLTLCGLAYTTSEHGQIGVYLHRSWTDLLLTAILLF

SEQ ID NO: 172228 - protein, 38 aa, Glycine max
  Clone ID: PAT_MRT3847_126539C.1.pep
NSDKEAITFLFLISLGHLSLLHISLTFHFNPLDLGFYI

SEQ ID NO: 172229 - protein, 56 aa, Glycine max
  Clone ID: PAT_MRT3847_12653C.1.pep
VMQFVSLLYLFSVKCGFHLLVICAVVKIGLLCQKVKELTEYFSYALHEKTVILFFS

SEQ ID NO: 172230 - protein, 79 aa, Glycine max
  Clone ID: PAT_MRT3847_126540C.1.pep
LDGLKRCKRGYLQLMEKSLKAYIIYDRLWPSKSRYNYNTDGHAWHTWYSSYVSWRIDRTIRHWSGIPASLLVPNLYKLS

SEQ ID NO: 172231 - protein, 68 aa, Glycine max
  Clone ID: PAT_MRT3847_126541C.1.pep
LFSLVLSIVYSMLLTAVLSTFLDRKKVYRASPQSCNIVMRIDRWAYCMTGSWNRSSLVDVAVAGCAFP

SEQ ID NO: 172232 - protein, 130 aa, Glycine max
  Clone ID: PAT_MRT3847_126542C.1.pep
KFLEEKQKGNRQLLEFYTGNPDDAAKRAHYKATKEMWTSAGIVIRGVITQALQKTGGPFAGGDKPGEPDFHIITWLARMATNAGVEPGSPASVAIPKLQEKTGGHAFDPVVSKYWDAWTQRESFKKNNIH

SEQ ID NO: 172233 - protein, 247 aa, Glycine max
  Clone ID: PAT_MRT3847_126543C.1.pep
MLSNRIWQRRALISARTLFSGSASHSSSSSHAISLRFAKANAPSSSHVIFNFARVDRYWFSTQPALELPASKIVDVPLAQTGEGIAECELLKWYVQEGDYVEDFQPLCEVQSDKATIEITSRYKGKISNILYVPGDIVKVGETLLKILVDESTFPFWDSLSVFTTVIDDSDNAKLIDSDPGKGRQTGVSSTPAVRSLAKQHGIDITEICGTGKDGRILKEDVLNLSVKKGIIKNPSTVSQSDSGEQL

SEQ ID NO: 172234 - protein, 75 aa, Glycine max
  Clone ID: PAT_MRT3847_126544C.1.pep
DPKGAPDGPQGTLKSLKQGQTGKQKDFWGGVGANNKKGGTGGTLKQQVYPRANTKELRCLWVPTRLTKQSLAAPW

SEQ ID NO: 172235 - protein, 52 aa, Glycine max
  Clone ID: PAT_MRT3847_126545C.1.pep
KRGLSKIQTWTAKAGTYSKNSSFNIDQLTTSKPIKEEQEETSNMNRSFRQER

SEQ ID NO: 172236 - protein, 377 aa, Glycine max
  Clone ID: PAT_MRT3847_126546C.1.pep
MSVAKKLIRCVILDLDGTLLNTDGIVGNVLKVMLGKYGKEWDGREAQKIIGTTPFEAAAAVVQDYQLPCSAIEFLSEISPLFSDQWCNIKALPGANRLVKHLKSHGVPMALASNSPRESIEAKISYHDGWKNSFSVIIGGDEVRTGKPSPEIFLEAARRLNMEPSSCLVIEDSLPGVTAGKTAEMEVVVVPSLPKQSHLYTAADEVINSLLDLRLEKWGLPPFEDWVEGTLPVDPWYIGGPVVKGFGRGSKVLGIPTANLSTEGYSDLLSEYPAGVYFGWAGLSARGVFKMVMSIGWNPYFNNKEKAIEPWLLHDFNEDFYGEELRLVIVGYIRPEVNFSSLESLVAKIHEDRRVAERALDLPLYSSFKNDSYLRSS

SEQ ID NO: 172237 - protein, 100 aa, Glycine max
  unsure (1)..(100): unsure at all Xaa locations
  Clone ID: PAT_MRT3847_126547C.1.pep
XGXXKXXSWLCXSYRVXLXMXXCXXNGXVVFGSCXAXXLXSHFSHRLXNFXPTNSILXIXQAXQXAXMXXXXXXXKXYXXHPEINPXXSSRIPSLRTRXC

SEQ ID NO: 172238 - protein, 141 aa, Glycine max
  Clone ID: PAT_MRT3847_126548C.1.pep
MSVAKKLIRCVILDLDGTLLNTDGIVGNVLKVMLGKYGKEWDGREAQKIIGTTPFEAAAAVVQDYQLPCSAIEFLSEISPLFSDQWCNIKALPGANRLVKHLKSHGVPMALASNSPRESIEAKISYHDGWFISGILSFFCL

SEQ ID NO: 172239 - protein, 49 aa, Glycine max
  Clone ID: PAT_MRT3847_126549C.1.pep
YRVVKLCWGLFQRRLMAWGGAWLDRRSSYVWRFPFQRGLSFRVHCPCIP

SEQ ID NO: 172240 - protein, 39 aa, Glycine max
  Clone ID: PAT_MRT3847_12654C.1.pep
LTYLHTCITIPFSLELPQGNWSETRLRHLTIGRLGPRST

SEQ ID NO: 172241 - protein, 131 aa, Glycine max
  Clone ID: PAT_MRT3847_126550C.1.pep
SFLFDWFHTGDIGYFDSDGYLHLVGRIKELINRGGEKISPIEVDAVLLSHPEIAQAVAFGVPDAKYGEEIYCAVIPREGSNVDEAEVLRFSKTNLASFKVPKKVFITDSLPKTATGKILRRLVAEHFVSQI

SEQ ID NO: 172242 - protein, 42 aa, Glycine max
  unsure (1)..(42): unsure at all Xaa locations
  Clone ID: PAT_MRT3847_126551C.1.pep
INGVHQLIEKTFFFFSQLGWFVTIIIINCICAVFQNTXXSFI

SEQ ID NO: 172243 - protein, 65 aa, Glycine max
  unsure (1)..(65): unsure at all Xaa locations
  Clone ID: PAT_MRT3847_126552C.1.pep
RAGSNQISLIYAFISHNTVILSHYTEFXSEFETISCQFLHNLPTSNNKXFTYNCDLHTFNYLVYN

SEQ ID NO: 172244 - protein, 114 aa, Glycine max
  Clone ID: PAT_MRT3847_126553C.1.pep
NEVDRFTSRDQISFSTVRDKILSRVDFHFNMFLDCERRNFVVQKYHRDLLLRLAPPASPPPPSPPPPLPVLETSPEKGANSPIRRGPGRRGKDRRAGSRRPRKVVAGGREMEPS

SEQ ID NO: 172245 - protein, 104 aa, Glycine max
  unsure (1)..(104): unsure at all Xaa locations
  Clone ID: PAT_MRT3847_126554C.1.pep
MELEIDIDLLNSPSDMVKRKLKLKRIVQTPNSVYMDVKSHGCFSITAVLRHSQTVEESGNXLTAWCQPTRDLANDTEDGIYKKKVDRVDQQPHCNMSTIQQNCL

SEQ ID NO: 172246 - protein, 116 aa, Glycine max
  unsure (1)..(116): unsure at all Xaa locations
  Clone ID: PAT_MRT3847_126555C.1.pep
MGTRVWCCFMMFFLSLNALAIALEDHNLKTTSRDDIKCTPCGQVPSPPPPXSGGGGAYYYSPPPPSQYIYSSPPPPASTGGGGGGVYYYPPPRGYYPTPXASNPIVPYFPFYYHTP

SEQ ID NO: 172247 - protein, 281 aa, Glycine max
  Clone ID: PAT_MRT3847_126556C.1.pep
MGTRVWCCFMMFFLSLNALAIALEDHNLKTTSRDDIKCTPCGIILFVLVAGYLPFNDPNLMVMYKKIYKGEFRCPRWFSMELRRILTRLLDTNPDTRITVDEIMKDTWFKKGYKEVKFGDLGLEWKSEGEGVKDLNAFDIISFSTGLNLSGLFDSSCGVEEGERFLLRESPAAPTTTYCPPPPSPPSSGGGGAYYYSPPPPSQYIYSSPPPPASTGGGGGGVYYYPPPRGYYPTPPPPNPIVPYFPFYYHTPPPPSTAAPPPVKGSLVCAISFLTLFIAFL

SEQ ID NO: 172248 - protein, 63 aa, Glycine max
  Clone ID: PAT_MRT3847_126557C.1.pep
KSKRFITIYTRLMLSRYNLMLVEHLNIERCIFMYLCIAIYILRVIIFFGCMTTGIDECLILKA

SEQ ID NO: 172249 - protein, 106 aa, Glycine max
  unsure (1)..(106): unsure at all Xaa locations
  Clone ID: PAT_MRT3847_126558C.1.pep
SLYITNICIEIIFQSLYSSPIYGHFGVNLINKSCFMVHVVSRTFPLNLMMKSVHFQVKKRLSFELXNVAVGLSSTVGLSTYSPLSIALARLAQRRIWPSVSIKVAR

SEQ ID NO: 172250 - protein, 60 aa, Glycine max
  Clone ID: PAT_MRT3847_126559C.1.pep
GMLPFPMVQAYSGLLTFSVSWPCSHDHSVINNTDLYLLCYCTVYSIFISYFALMSTKYMN

SEQ ID NO: 172251 - protein, 42 aa, Glycine max
  Clone ID: PAT_MRT3847_12655C.1.pep
GRVGLDMQVGEILKCVKLNLEELNVMHWDIINGWRVFKPPTV

SEQ ID NO: 172252 - protein, 50 aa, Glycine max
  Clone ID: PAT_MRT3847_126560C.1.pep
QKSVSVLAYFFFIIRVTYSIYIYIYLYIFICTYIYIHIYLYIYICEGVLS

SEQ ID NO: 172253 - protein, 87 aa, Glycine max
  Clone ID: PAT_MRT3847_126561C.1.pep
NLGHGNFFNFVGGKVGLPLGFVPGAPVYGRGGNSFWTLELIREFGKIWGLGFPFPVSQKLFGGLVKYGVYFRAGILGKIYWQSGKKL

SEQ ID NO: 172254 - protein, 138 aa, Glycine max
  unsure (1)..(138): unsure at all Xaa locations
  Clone ID: PAT_MRT3847_126562C.1.pep
YAAVSAQLPERDRVPFLFSIKQLVASRNPXALSGEFLGSSYHGSSFLDPHARGASTSYNNAVAFPARGQANYEALANANNFSASSSKCIITFSVTESXRHCGVVFEVLYSVQRSDTYWGAXAPKHVKTQGIWYVQLDS

SEQ ID NO: 172255 - protein, 64 aa, Glycine max
  Clone ID: PAT_MRT3847_126563C.1.pep
VSDSIRIYRHSIQLKKKKKKKKKKKKKKKKKKKRKKTKKKKKKKKKKKKKKKKKMKKKKKGGAL

SEQ ID NO: 172256 - protein, 69 aa, Glycine max
  Clone ID: PAT_MRT3847_126564C.1.pep
WQAGHSVLHIGSNESRIKRNLNISVWSIPQDFMPYIFATEQKRVDNPSYFVLQAYGAYRSIDHFWNGAL

SEQ ID NO: 172257 - protein, 105 aa, Glycine max
  unsure (1)..(105): unsure at all Xaa locations
  Clone ID: PAT_MRT3847_126565C.1.pep
YDGKRTRSRKLRILYSGRDPRVRFILFAQFPTSPYKMQIFAKTLTGKTITLEVESSDTIDLVXAGIQDTEANSPGSLTCHVXGKQIEDGRTLAVYNIQKESTLHL

SEQ ID NO: 172258 - protein, 75 aa, Glycine max
  Clone ID: PAT_MRT3847_126566C.1.pep
FGFRIGVIRITDNYNSYMNIFASLYLGNVELEFEEEFRSHFIWIQDRLNKPAHSFQLTFPIFASLFIEHMELELI

SEQ ID NO: 172259 - protein, 44 aa, Glycine max
  Clone ID: PAT_MRT3847_126567C.1.pep
AFVVCSFLNLVFFSSDSFFFIYFLQSPLSLKFFYFFLNYLCFFF

SEQ ID NO: 172260 - protein, 204 aa, Glycine max
  Clone ID: PAT_MRT3847_126568C.1.pep
NCPPPPRYPPLPHTPNPNQQPPPRGTQRGKPLKKRANPHRPPPDPPPPKTPKGNAPANKTPRRKRGPPAPQDKKPPKEGPPPPKHLGGGEAPRGKKTPPGGKKPTKGAPKKPPQKGPPGPPGGGHRGPPQKRGGARRDPGKHRPPLGGGGPPEKKTPPRGALNPGAPTPPARKGRPPPPGPRETKPPGGHPHRPPPGEKTPVPP

SEQ ID NO: 172261 - protein, 81 aa, Glycine max
  unsure (1)..(81): unsure at all Xaa locations
  Clone ID: PAT_MRT3847_126569C.1.pep
ARAQAYCAVLIIDSTTGGFXSGISXDGQTREHALHAFTLGVKQMICCCNKLDATSPSYSRAMYVETVTEVSSYGNRAGYIP

SEQ ID NO: 172262 - protein, 54 aa, Glycine max
  unsure (1)..(54): unsure at all Xaa locations
  Clone ID: PAT_MRT3847_12656C.1.pep
VELHWNCCAFYIIKHLRCTQGVXTENADCDTKKVTATEKVDPTKVRDYLGQKIG

SEQ ID NO: 172263 - protein, 33 aa, Glycine max
  unsure (1)..(33): unsure at all Xaa locations
  Clone ID: PAT_MRT3847_126570C.1.pep
KYDGTIRPLAIXLSVPHPEGDQSGAFSQIFLPA

SEQ ID NO: 172264 - protein, 386 aa, Glycine max
  unsure (1)..(386): unsure at all Xaa locations
  Clone ID: PAT_MRT3847_126571C.1.pep
HQHPDLTVPFLKAVVPRVRASKREACLWPTQAESFARYVRSMVSNSEETTQDLWEDILFKLNDSRRYRRTVGSIAGSCITAAIPLLASFKQEICLAALDIIEGGXLAIAKVEAAYKLEREIKEATEEALQSLSLYQLKDTLEANEEAADENRLLPAMNKIWPFLVTCIQNRNPVAVRRCLNVISIVVPVCGGDFFTRRFHTDGTHIWKLLITSPFHKKSNFKDEKTPLQLPYRSSSVCSEDSFAETSYLKIQIAVLNMIADLCRNKSSSSALELVLKKVSGLVVGIACSSVVGLRDASLNALHGLASIDPDLVWILLADIYYTAKTENFPPPTPDLPEISEILPLPISPKEYLYVQYGGQSYGFDIDLASLDIIFTKIDSQYQMYS

SEQ ID NO: 172265 - protein, 243 aa, Glycine max
  unsure (1)..(243): unsure at all Xaa locations
  Clone ID: PAT_MRT3847_126572C.1.pep
MHAYVSSEFGSREDCICIKMEMQQLLSMGFPDELAAQALAATGGKSTVKATEWILSHKPNSSTFQPKLDRFFHSQSQEHDEPSKRPKPSPSPSPSPAQPQHWPSFFFKIADKKHANTHIHEPLYERLRPRTLDDVVGQEHLLAPNSLLRSAIQRNRLPSILLWGPPGTGKTTIAKAIVNSTPSTNSYRFVSLSAVTSGVKDVRDAVDEARKLRLKSNQTTVLFXDEVHRFNKSXQQDSVLPRH

SEQ ID NO: 172266 - protein, 113 aa, Glycine max
  Clone ID: PAT_MRT3847_126573C.1.pep
MRKVPPILFSAGGRIIFGVGRVPRRMLTWFLCHVSPFWPLYLASISGHYFGRNFLEGLSASLLTPPEAVWVTGYRVRSLLAPRVAPSVPSNDCISPRFDLSVRHVSDGCDAVM

SEQ ID NO: 172267 - protein, 47 aa, Glycine max
  Clone ID: PAT_MRT3847_126574C.1.pep
LLSNYIITVETKSKSNSFPKVQNTLKSFRMRTKQTLFIVLYAFLACV

SEQ ID NO: 172268 - protein, 45 aa, Glycine max
  Clone ID: PAT_MRT3847_126575C.1.pep
MNVVSALMVTRNQLGAPEGIPFGSVWLFVYAGISFSLVIFAGIMS

SEQ ID NO: 172269 - protein, 147 aa, Glycine max
  unsure (1)..(147): unsure at all Xaa locations
  Clone ID: PAT_MRT3847_126576C.1.pep
QLKELFNVNHFIVSHANPHIAPLLRLKELGRAYGGNFSAKLAHLVEMEVKHMCHQILELGFPLCGLAKLFAQDWEGDVTVVIPATLAQYTKIIQNPSYGELQXASNQGRRCTWDKLLFIKANSGIGLALHECVVILNHMRRLKIISD

SEQ ID NO: 172270 - protein, 76 aa, Glycine max
  Clone ID: PAT_MRT3847_126577C.1.pep
ICTRGVTRVKPITSLPRVMDLRQALSCDLSEIRTPLYCTKPIKFVSEGANLPRSATHGPAHESTQPKGVLHKLIAA

SEQ ID NO: 172271 - protein, 37 aa, Glycine max
  Clone ID: PAT_MRT3847_126578C.1.pep
GSRLPWPLLLLLFYQSTFSGNRVGFVQGSLRWLMLRT

SEQ ID NO: 172272 - protein, 67 aa, Glycine max
  Clone ID: PAT_MRT3847_126579C.1.pep
WKEFSSGDSSLPGTLITIDKSNVTLPLFSTPRISAWLWELVLDHPHISHSPLQQSRAFQFSQRLFSR

SEQ ID NO: 172273 - protein, 65 aa, Glycine max
  Clone ID: PAT_MRT3847_12657C.1.pep
GRKMVEFFHMVADEFQSCKNWKFETQPKDTFCPVIHILVIVMRFIFLNMPWDSTFGALCIVWSIH

SEQ ID NO: 172274 - protein, 59 aa, Glycine max
  Clone ID: PAT_MRT3847_126580C.1.pep
RVRPRVRPRVRCGTKVNHAVLLVGYGTENGEDYWIAKNSYSDKCSSQWLGQNKKKTEHL

SEQ ID NO: 172275 - protein, 86 aa, Glycine max
  Clone ID: PAT_MRT3847_126581C.1.pep
VPHFHYVDEINCDALVELKTSFQKNNPYPDVKYTFLPILIKSLSMALSKYPFMNSCFKEDALEVILKGLFLQHNLMNDRYKFCCPW

SEQ ID NO: 172276 - protein, 76 aa, Glycine max
  Clone ID: PAT_MRT3847_126582C.1.pep
LALENFWGSRQKRAPTRVNRFFSNPIFKILAKIFLKTPRGFFFLKKKKTAKQKREGGFFSGKKNFYLGEALSGVFL

SEQ ID NO: 172277 - protein, 102 aa, Glycine max
  unsure (1)..(102): unsure at all Xaa locations
  Clone ID: PAT_MRT3847_126583C.1.pep
RPFDRGLIVEYFGRMSYVAHNVNQPQEKDLLEGNFSFDIKSRSRLEKVFLSKSTFGWGKTLQFEFIGGGSHSSKKFSXKGESEKPQKVDARLRPRIDPQYNE

SEQ ID NO: 172278 - protein, 39 aa, Glycine max
  Clone ID: PAT_MRT3847_126584C.1.pep
SHPVLWVSLCISYDGVGNVGFRILFSQYLCSTSIDMSIS

SEQ ID NO: 172279 - protein, 93 aa, Glycine max
  unsure (1)..(93): unsure at all Xaa locations
  Clone ID: PAT_MRT3847_126585C.1.pep
PTLYKXGXLLKQPPFTXLRGGDRSLICGXCLHRQIHIXIXSYTPXXYQGXTFXLXVLDXHKQHWGXGPXGLXXXXXKXTQVRXLXXQXQGRVX

SEQ ID NO: 172280 - protein, 43 aa, Glycine max
  Clone ID: PAT_MRT3847_126586C.1.pep
FVIRKCIKCYIDKPGHSLCYKNHPSRKCRIKAYLTKPAFTIYD

SEQ ID NO: 172281 - protein, 51 aa, Glycine max
  Clone ID: PAT_MRT3847_126587C.1.pep
DGHSISVYNFISCFNCAIDCVYTSAIRRKRHSSIYKHVSPRQSLNKISYCF

SEQ ID NO: 172282 - protein, 108 aa, Glycine max
  Clone ID: PAT_MRT3847_126588C.1.pep
MAFLNWWHMLVLVLLLDNMSFYRCVAAHKNGLRTCCILGDSLGDARNNIYFTTLSKANIPPNGTDFKASGRNTTGRCPHGRTTGDLLGEESGQRNYAPPFLASTSTGK

SEQ ID NO: 172283 - protein, 187 aa, Glycine max
  Clone ID: PAT_MRT3847_126589C.1.pep
PPLLAETSNWVIGGLFFATASISLAAWNITQAAILKGYSSQLTILAYYCLFGTIQSAILSLIVVRDPNDWKISPDIDLIAVFYSAVVGSVVTFSVNTWCIKKKGPVFVSLFKPVGIAIAAFSTVVFLGETLHVGSVVGAVIIAIGFYTVLWAQSKGENAKGFQVDGLSSPSAQASPLLEFHESNVLA

SEQ ID NO: 172284 - protein, 64 aa, Glycine max
  Clone ID: PAT_MRT3847_12658C.1.pep
METASSMALSSPSLDGNAVKLGRSTGSMLTVRMRKIVTLQVSSGIPFYGPYFDKYLSGISGELP

SEQ ID NO: 172285 - protein, 138 aa, Glycine max
  unsure (1)..(138): unsure at all Xaa locations
  Clone ID: PAT_MRT3847_126590C.1.pep
TFLLAPQHKGFFVRNDIFHFVEKDPVHQQQPFLXPQSTLDSKLNASIATNKSVSKYMLGGDIQSMDYVATNDVTENGVVDKYGFSEQIMQRAPDTEHIREDNTVEESNGSLQSSVNAVQDHVPVSPDEPAGELQKHTY

SEQ ID NO: 172286 - protein, 60 aa, Glycine max
  Clone ID: PAT_MRT3847_126591C.1.pep
NILNDVLILHLFNLLIRHHENIRIFVHLHLGALSGEKEKIDYTNRGGHTHGFSLGVGHTC

SEQ ID NO: 172287 - protein, 90 aa, Glycine max
  unsure (1)..(90): unsure at all Xaa locations
  Clone ID: PAT_MRT3847_126592C.1.pep
DFNPFLFRKLLIFLHKTDPIYCSSHSQVXASHSSQVLNLCSWGPCLSHIYLAVLSQPTNVVCLSHIYLVVLSQPSNLWSCFRFIICNSSI

SEQ ID NO: 172288 - protein, 289 aa, Glycine max
  unsure (1)..(289): unsure at all Xaa locations
  Clone ID: PAT_MRT3847_126593C.1.pep
MMESGAHFCNSCGEQIGLDANGELFVACHECYFPICKACFEYEINEGRKVCLRCATPYSDRVKDNDGTKVYENQSTTAAQINVSQDVGLHARHVSTVSTVDSELNDESGNPIWKNRVESWKEKDKKKKKKKXAPKAENEAPIPPEQQMEEMQSSEAAAAEPLSMVIPISKTRLAPYRTVIIVRLIILGLFFHYRVTNPVDSAFGLWLTSIICEIWFAFSWVLDQFPKWSPVNREAFIDRLSLRYERPGEPSQLAAVDFFVSTVDPSERTPLITGNTXLSILAGDYAGDK

SEQ ID NO: 172289 - protein, 81 aa, Glycine max
  Clone ID: PAT_MRT3847_126594C.1.pep
QMMSMGAGFCMPFMMLPNAAHHMMNTPHLHQLMGLGMGFRPGTAMPCSLPQFPITPLHGITDNRVHMFGFPNQVPPMPISH

SEQ ID NO: 172290 - protein, 49 aa, Glycine max
  Clone ID: PAT_MRT3847_126595C.1.pep
SVLKKQLVDQCYLDPFLLREPAEWGQQHKYFYQPRVDKNLSCINTSQCY

SEQ ID NO: 172291 - protein, 54 aa, Glycine max
  Clone ID: PAT_MRT3847_126596C.1.pep
NHVRLVNVEPLRQTSSNICTIESHTRKFQLDYNYIILKLSSQLKSAFCTQTQRG

SEQ ID NO: 172292 - protein, 134 aa, Glycine max
  unsure (1)..(134): unsure at all Xaa locations
  Clone ID: PAT_MRT3847_126597C.1.pep
VKREKKTKRANKKPEKERSKNEHRKRDIDDIKKNKEEHNQERRIKTRRKTXKSTKRELKSKXTKKTRVEEKKKTXEKEKHQKKLKCNDEKEDKQNESGNKKRKQKKXRRNEERLSKEKKTISKGKRKEYNGPRA

SEQ ID NO: 172293 - protein, 59 aa, Glycine max
  Clone ID: PAT_MRT3847_126598C.1.pep
SLFVSVHTSTCRTQYLVMTITGETMDVEVERTDTINSVMANSQDKERVALHQQRLIFLR

SEQ ID NO: 172294 - protein, 80 aa, Glycine max
  unsure (1)..(80): unsure at all Xaa locations
  Clone ID: PAT_MRT3847_126599C.1.pep
MARTKQTARKSTGGKAPRKQLATKVSSIITTTINXILEAXIYSNVTVALREIRKYQKSTELMIRKLPFHTLGSKIAQDFN

SEQ ID NO: 172295 - protein, 140 aa, Glycine max
  Clone ID: PAT_MRT3847_12659C.1.pep
YYKFNQMTSTHVLYIIVYSLNHGQVKVLNQRNTHQGAAAQPETPRRPPHPCKATRASHHKRGEKARASARDLTSGLMQILRTNCMQTAYPNSNSNSCKQGYTSGLSHRLAIYGSVTNGRERERTQVIELANCKFAMDKDN

SEQ ID NO: 172296 - protein, 100 aa, Glycine max
  Clone ID: PAT_MRT3847_1265C.1.pep
MRGDWIKIQRDAEKAKRENQTKNTRKTTGTTKYRRNRRQARNRKQRYDINLGTARGRTHKHEEKHGAIIHRESKRGNILLDEEPQPKISDKGERKHRTED

SEQ ID NO: 172297 - protein, 89 aa, Glycine max
  unsure (1)..(89): unsure at all Xaa locations
  Clone ID: PAT_MRT3847_126600C.1.pep
KFFRFTFFWTLFFFLIKRGRVFLNLXXXLDLGNFFYQGGRFTSILTNKKKCVLFSPHQNWTFWGGEKFLGNKLTRGIFYRGVFGRFSHF

SEQ ID NO: 172298 - protein, 127 aa, Glycine max
  Clone ID: PAT_MRT3847_126601C.1.pep
QNAMMVNEFLGQSWSHVLPNSTESLGVEVLKSRGFFTHASWYWIGAGALLGFVVLLNITFTLALTYLNPPEMSRAVIFKESHGNRNKDRTLDDIRLSLRLTGNAPSSNLEIGNLDDNGTESMSSKSA

SEQ ID NO: 172299 - protein, 31 aa, Glycine max
  Clone ID: PAT_MRT3847_126602C.1.pep
VLGIIHYVTPITVESFIMLHLCICNKIGVTY

SEQ ID NO: 172300 - protein, 59 aa, Glycine max
  Clone ID: PAT_MRT3847_126603C.1.pep
FQQSQAITQQNMYYFRTPTCINLVTIRQISRGDSENPFSYNQQVENNHNPCAKLIVNIK

SEQ ID NO: 172301 - protein, 37 aa, Glycine max
  Clone ID: PAT_MRT3847_126604C.1.pep
KLKLLLENYMKLKQPCHELIMLKSLIFMHCCSKIWYY

SEQ ID NO: 172302 - protein, 86 aa, Glycine max
  Clone ID: PAT_MRT3847_126605C.1.pep
GSEKGRPKTKRKGDLQLVPSRKSIRKRRRRRSWRGEGRVFSHNIYSPFSFFDRNEINKNPKLLLLMPKETEDGRGSDAWADAWADA

SEQ ID NO: 172303 - protein, 191 aa, Glycine max
  unsure (1)..(191): unsure at all Xaa locations
  Clone ID: PAT_MRT3847_126606C.1.pep
MEYLNFDSVDKSKTSEDSYFQSITTEFLNSLNTSGLPTHSIKLKIGSPIMLLRNLDQNQGLCNGTRLMVTKMAKHVIAPEIISGKNIGLAVYIPRTAARRRQKGWPFKLLRRXFLIMLSYAMTINKSQGQSLSMVGFYLPKPIFTHGQLYVALSWVNSAKGLKILIHDDXQKSMNSTTNVVYKEVFRNIKS

SEQ ID NO: 172304 - protein, 152 aa, Glycine max
  unsure (1)..(152): unsure at all Xaa locations
  Clone ID: PAT_MRT3847_126607C.1.pep
FGTRWVANRNTPLQNTSGVLKLNQKGFLVLLNATNSAIWSSNIXARLLGLGNFVVRNGQETNEDSVLWQSFDYPXTIVPGMKLGWNLETGLERYGLSWKSVENPAEGDYTVKIDLGGYPQMVIFRVPDIKTRIVPWNGLSIVGYPGPNHLSL

SEQ ID NO: 172305 - protein, 138 aa, Glycine max
  unsure (1)..(138): unsure at all Xaa locations
  Clone ID: PAT_MRT3847_126608C.1.pep
MEYLSFDSVDKSETSEDSYFQSITTEFLNSLNTSGLPTHSIKLKIGSPIMLLRNLDQNQGLCNGTRLVVTKMAKHVIAAEIISGKNIGLAVYIPRMSMSLSQSPWPFKLLRRXFLIMLSYAMTINKSQGQSLSMVGLY

SEQ ID NO: 172306 - protein, 52 aa, Glycine max
  Clone ID: PAT_MRT3847_126609C.1.pep
ETYCSNFCVALLVDAMSMWLHENLFSEGLSMPRSLLIWSIVRWRTLSGAACR

SEQ ID NO: 172307 - protein, 86 aa, Glycine max
  Clone ID: PAT_MRT3847_12660C.1.pep
KEQSGNQTPPKSRGGSPFQKGISLFTKKLKVITSPPHSKFRGSRPPFKQHKQSNTHSPNQRAQKKGKNLFASPKPPHQKTKNFLPG

SEQ ID NO: 172308 - protein, 61 aa, Glycine max
  Clone ID: PAT_MRT3847_126610C.1.pep
NLRRRYTLSMVHNTDPTTDGKYGQSIGRAAAGYTGYPRSEDYAFLCRPTNFPYEDSINSWP

SEQ ID NO: 172309 - protein, 69 aa, Glycine max
  Clone ID: PAT_MRT3847_126611C.1.pep
RSMVGVAGSRIPSSGSAAMGACSGVSTARSTQRRRGLPVTVDVVGNRTSVVSELSSLVRVGARSLELAC

SEQ ID NO: 172310 - protein, 275 aa, Glycine max
  unsure (1)..(275): unsure at all Xaa locations
  Clone ID: PAT_MRT3847_126612C.1.pep
VTYQTELFLDKNKDYVVAEHQALLYASKCPFVSGLFPPSPEESSKQSKFSSIGSRFKQQLQSLLETLSATEPHYIRCVKPNNLLKPSIFENKNVLLQLRCGGVMEAIRISCAGYPTRKTFDEFVDRFSLLSPEALTGSSDEVTACKRILKNVGLEGYQIGKTKVFLRAGQMAELDTRRSEILGRSASIIQRKVRSYLARQSFILLRLSTVQIQAACRGQLARQVYEGMRQEASSFXIQRCFRMHIARKAYKDLYTSGCSIQTGMQGMAARSELHF

SEQ ID NO: 172311 - protein, 64 aa, Glycine max
  Clone ID: PAT_MRT3847_126613C.1.pep
QSKEDRALWVVHKPDWHAQLSLDVTDLYIRYLKSGPGNLEKDVERRFSYALSREDIENAVLGGP

SEQ ID NO: 172312 - protein, 75 aa, Glycine max
  Clone ID: PAT_MRT3847_126614C.1.pep
PPQNLQTASSNSSGSLNQGTPHCTNGQSYHYSDQYRSQSNQLECISIECHYRTARQIWGRSYSPHQIHLSLTLHP

SEQ ID NO: 172313 - protein, 72 aa, Glycine max
  Clone ID: PAT_MRT3847_126615C.1.pep
HFPNSLFLLLTSSSSTSSPHSTFSSNSTSPNLATPIDLTNLFFIFNSHPHSITFNSVFNSLIFLTLSIFFIF

SEQ ID NO: 172314 - protein, 46 aa, Glycine max
  Clone ID: PAT_MRT3847_126616C.1.pep
SSCHSPTLAVICQSPKARVDHQFWISLLRVQSSPTLGNGKKKQHML

SEQ ID NO: 172315 - protein, 76 aa, Glycine max
  Clone ID: PAT_MRT3847_126617C.1.pep
DRSIAMQMRAFNDSLTLAEIGFLHVDGLQGTQWFKHLVFGPPIDHESKLDFFRRIADSLARMDKSSYKERLAAIQH

SEQ ID NO: 172316 - protein, 497 aa, Glycine max
  Clone ID: PAT_MRT3847_126618C.1.pep
MEQYGRSSEGSRSDPSPEWAEPEAQTGLEEPVWQLGMGGGAGEESYPQRPDEVDCTYYLRTGFCGFGSRCRFNHPRDRAVVAGAERTAGEHPERVGQPVCQYFMRTRTCKFGSSCKYHHPRQAGAGGAAATPVSLNYYGYPLRQGEKECSYYVKTGQCKFGATCKFHHPVPAGIQIPPSPFAPVSPLPVPVPSPLYSTMQPPPGPSSQQIGVLVARPPMLPGSLVQSPYGPVVLSPAMVPISGWGPYQASASGAVLPSGTPSNVGSAQLYGITQLPSPAAAYPGPYPPSGSPVGPPSSSQKEQAFPERSNQPEYQYYLKTGEVKFGPSYRYNPPPDMSVPDMSTPKANVILSPAGLPLRPGLKLKSGAPACTHYAQHGVCKFGSACKFDHPMGSMSYSPSASSLADMPVAPYPVGSTIATLAPSSSSSELRPEPSSGSSKESVPSRMPSSTLTGSIGSTLSTGGPISQSSTQPPSQSSGPLAAVTSTTSSNVSHTSS

SEQ ID NO: 172317 - protein, 70 aa, Glycine max
  Clone ID: PAT_MRT3847_126619C.1.pep
LVKLVALYDLRLLPISSLKVERTFFVGSSYKKFYGSERTHTSSQNKGGTFLTTSSRGIPNCVSGKGTSGK

SEQ ID NO: 172318 - protein, 65 aa, Glycine max
  Clone ID: PAT_MRT3847_12661C.1.pep
LSVYNGSLILWQQAAANPYLKWGITPTNTDSFQNDWFRSPTQTTSVVHCPTLTIIKFNTLGGLTC

SEQ ID NO: 172319 - protein, 101 aa, Glycine max
  Clone ID: PAT_MRT3847_126620C.1.pep
LVTIYNWGSFFGMFIFFLFFFFFPHHRLGGFVKKGFTNKFQGPRETPTTGGPITGGALGTKILKRDLAPKNFFGRSGVSFPNLHIMSSPKKKELESRPLWG

SEQ ID NO: 172320 - protein, 57 aa, Glycine max
  Clone ID: PAT_MRT3847_126621C.1.pep
AIRNKKKLQTTSLLDDTLMLAYECHDSHYQKLSIQTITGCGEHYRNNVDINGYRHGA

SEQ ID NO: 172321 - protein, 51 aa, Glycine max
  Clone ID: PAT_MRT3847_126622C.1.pep
RKHLRHWILFFESLNTIVCKYLNTSQFKHICEAHIHCAYKTSSNGTFLDRS

SEQ ID NO: 172322 - protein, 54 aa, Glycine max
  Clone ID: PAT_MRT3847_126623C.1.pep
KSVCKMRYSHYNSYYILLYIIFIISSNFECDETYMHFLKCTSLIIAGLWPIKII

SEQ ID NO: 172323 - protein, 53 aa, Glycine max
  Clone ID: PAT_MRT3847_126624C.1.pep
QEPKTCIHFGAMVQQLIGENANKHTFIVIHTGTFSRDNEKAQDKKQIKTGIKP

SEQ ID NO: 172324 - protein, 100 aa, Glycine max
  Clone ID: PAT_MRT3847_126625C.1.pep
LPGCLNFPLGFLGRAPGELFQKYKGPPNNFSQLGCSPPQTEAPVTGGFKEGFLFFWGFVKAFVFSKFRGPPPGVPSFCFLPKENRRGPFFLGGPLWVWEP

SEQ ID NO: 172325 - protein, 48 aa, Glycine max
  unsure (1)..(48): unsure at all Xaa locations
  Clone ID: PAT_MRT3847_126626C.1.pep
KNVNELVSTHGYSQNQIIVWSTPPCQRYIISTVISCISLIFTCXNMFY

SEQ ID NO: 172326 - protein, 180 aa, Glycine max
  Clone ID: PAT_MRT3847_126627C.1.pep
KTFNPCVYFLSIAKSGGEDIHSFIDSFYFISLFSLDGSMLSHIKFTLFSFPFPFPLSPSKQVTPYPFLPIFYPLSHTHHPRSYGLITRPNPQEESESESHAGAKITFPLFFFLPLPLLLFLLAPLFLLSHLPPTLYFEYFPHTHSISHHQITSFLPPRARSHPLPRSRASHALQPSWFFS

SEQ ID NO: 172327 - protein, 154 aa, Glycine max
  unsure (1)..(154): unsure at all Xaa locations
  Clone ID: PAT_MRT3847_126628C.1.pep
GPCNVDISFRRGRNGFQSKRLYNNGTVLFENIALKDSQVCASVVGXCWRTNAAIESPSGLDRFDSISSGSGFSCGVLKGSDRVRCWGVGSIARKMESEFRNMFMVSIVDGESHVCGLNSSGYLVCRGSNDFGQIDVPKGGALEFSGLALGVEHT

SEQ ID NO: 172328 - protein, 78 aa, Glycine max
  Clone ID: PAT_MRT3847_126629C.1.pep
LVYLLFNATRALSQFSSTKKHSCFTTQIMIMYGYKRKITYMKNLHPLFFLTKFCLRLENSFKYISVNLLIKMWQHGIL

SEQ ID NO: 172329 - protein, 123 aa, Glycine max
  unsure (1)..(123): unsure at all Xaa locations
  Clone ID: PAT_MRT3847_12662C.1.pep
GELRNRLRGTQSSQRVPTEKRQRWPGRANLNNSNSAMYGLQADELTEDSDSWKTILHKXWVTHXPLRVSDQPKRPGDEDPAPYYNMVQKVLDMDAHFGXLNFALLHARKSAWVTNADPRRGPN

SEQ ID NO: 172330 - protein, 116 aa, Glycine max
  unsure (1)..(116): unsure at all Xaa locations
  Clone ID: PAT_MRT3847_126630C.1.pep
FKHHDLVSFIKLTTLTLVIGFIGTGAYSHSLYHWLRLACTHLDKVNFTFDRCQQIYRXEHRSYKYHTCLKYDHNSRKDDDCEACCMSIETPGHVEQDVEAIFHKHLRAWYCDTYQE

SEQ ID NO: 172331 - protein, 160 aa, Glycine max
  unsure (1)..(160): unsure at all Xaa locations
  Clone ID: PAT_MRT3847_126631C.1.pep
ADRKKLRRSIKQKFQRVSDSDLDALLPPKAEITVAKLQNRVHVYAVEGGFPMFFDVDGRGSDIFPTXVGSTTMSSAEALKAGLRGKALRITHCYRDLLWETAEGRCVPNAGFFEDVVFEDPSFVQASHDSDLTEVAGETSXDQQKNPKSDGIEESLDVNE

SEQ ID NO: 172332 - protein, 115 aa, Glycine max
  Clone ID: PAT_MRT3847_126632C.1.pep
MLDKIQKDTHLTYCNRFKQRNIKYISLRYNILPILYKRSPIQAYTNFIKNFENTFKSLLNIIITEIQINIDPNNKLRYASFCSQNPNLTESHKLKEFHYYDKYVRSSLGTWGRNI

SEQ ID NO: 172333 - protein, 204 aa, Glycine max
  unsure (1)..(204): unsure at all Xaa locations
  Clone ID: PAT_MRT3847_126633C.1.pep
MFKKAVEAKSHQRLSGADRKKLRRSIKDKFPRVSDSDLDALLPPKVNQIINSSSIHSCFFVSFHISHTHTHXRIKQAEITIAKLQNRVHVYAVEGGFPMFFDVDGRGSYIFPTVYALWMVPELLPVFVLKGGEVSRFAIGGADLMFPGITVPSEGLSYFLAGEPWAVKVPGNSAPIADGSTTMSNAEALKAGLRGKALRITHYY

SEQ ID NO: 172334 - protein, 329 aa, Glycine max
  Clone ID: PAT_MRT3847_126634C.1.pep
MFKKAVEAKSHQRLSGADRKKLRRSIKQKFQRVSDSDLDALLPPKAEITVAKLQNRVHVYAVEGGFPMFFDVDGRGSDIFPTVYALWMVPELLPVFVLKGGEVSRFVIGGADLMFPGIIVPPDGLPSFRAGEPWAAKVPGNPAPIAVGSTTMSSAEALKAGLRGKALRITHCYRDLLWETAEGRCVPNAGFFEDVVFEDPSLLQASHDSDLTEAAGETSIDQHNNPKGDGPEESLDVNEFQPDSNPALTMPNGNENDTAAEVTEGVADLNLRDTASANDPDDQQTLSTADVNSLLDKCLLQALHTTVKDKDLPLPGSTLWSNHVLPCRP

SEQ ID NO: 172335 - protein, 222 aa, Glycine max
  Clone ID: PAT_MRT3847_126635C.1.pep
MLPPFAVDINGIKDKLTYQFRPWQRSFQFWVRAIDIYTGYKVFQVRVNFVKDAQKQEAMWEKQHELAADKIFAMCYDLGGFFLKIAQIIGKPDLAPAAWVKRLVTLCDRAPPTPFDVVKLVLENELGQGIDDVFERFDVEPLGSASIAQVHRARLKGDTGDVVVKVQHPGIQDLMMTDIHNLQVFALYMQKTDIKFDLYSVTKEMEKQVDLISLLDFFFNLC

SEQ ID NO: 172336 - protein, 62 aa, Glycine max
  Clone ID: PAT_MRT3847_126636C.1.pep
RVDPRVRPRGRVFLFDEISGGKGNRPFRPKVKNPFFKKRPFYVFKEEIVFLPFTVKVSFGAQ

SEQ ID NO: 172337 - protein, 79 aa, Glycine max
  Clone ID: PAT_MRT3847_126637C.1.pep
QRCSSWSWRQRSLGVYRRRNCSHHCSYLFQNSNSKIVPAVTLILFHNNQIRDSKFIIGNHDESQNPKNGMKKRTSSMKY

SEQ ID NO: 172338 - protein, 44 aa, Glycine max
  Clone ID: PAT_MRT3847_126638C.1.pep
STASQRRNLRFGSKADHRVLTLEARLLSLVHAPTPSLFEITTIN

SEQ ID NO: 172339 - protein, 70 aa, Glycine max
  Clone ID: PAT_MRT3847_126639C.1.pep
MASSAIQYSPINAYIALHHPTKFFRKISSPGIGLNNIHRNVPSVPQIIWYGPDRPIYICPITEQVRSYLT

SEQ ID NO: 172340 - protein, 77 aa, Glycine max
  unsure (1)..(77): unsure at all Xaa locations
  Clone ID: PAT_MRT3847_12663C.1.pep
KIKRSSPNYKKSLLSLTSWPVXLPIIIIIIXFYQILFYSIXIPSRFYFIQILFHPILSYLIQILFYFVYGLELKIDL

SEQ ID NO: 172341 - protein, 187 aa, Glycine max
  Clone ID: PAT_MRT3847_126640C.1.pep
GPQNREVKLWDEASDKGRVLPSDTESWKCTQTLELKSSAQPSMDAFFNQVAALSHEAGLLLLANAQRNAIYAVHLEYGSNPESTRMDYIAEFTVTMPILSFTGTSDILPHGEHIVQVYCVQTQAIQQYALDLAQCLPPPYENVGLENSDSSVSRDPSTVEGFHSLDSSLDSTTVMFLADVIFKTMLH

SEQ ID NO: 172342 - protein, 158 aa, Glycine max
  Clone ID: PAT_MRT3847_126641C.1.pep
PEFPARPTRPPTRPPTRPGNIRLKRMGELDTRPFLEAMKQRYNEEDAEERASELCSLWEEYLKDPDWHPFKVIMVEGKEKEIIRDDDEKLNGLKNDLGEGAYKAVVEALLEINEHNPSGRYLTSVLWNYKQGRRATLKEGVQFLSNQWKVLKRKRGMA

SEQ ID NO: 172343 - protein, 487 aa, Glycine max
  unsure (1)..(487): unsure at all Xaa locations
  Clone ID: PAT_MRT3847_126642C.1.pep
MEYSPLSIVITFFVFLLLHWLVKTYKQKSSHKLPPGPWRLPIIGNLHQLALAASLPDQALQKLVRKYGPLMHLQLGEISTLVVSSPKMAMEMMKTHDVHFVQRPQLLAPQFMVYGATDIAFAPYGDYWRQIRKICTLELLSAKRVQSFSHIRQDENKKLIQSIHSSAGSPIDLSGKLFALLGTTVXRAAFGKENDDQDEFMSLVRKAIIMTGGFEEDDMCHSLKPLHLLTRQKTQESHGESRKDKKGNNRRKEHTEKRRTVMVXSSEXEEQEDLVDVLLRLTEKRIHWXLNDDGADTTSSTLEWAMANXKINPKVREKAQAEXRQAYREXKIKHETDLMKLTYLKLGIKETXRLRSPSPLWLPRECCXITIIDWFQKTVKNKIQKNIDPQYLSDADRFIPERFNDSSIDFKGNSFEYIPFGAGRRMCPGMTFGLASITLPLALLLYHFNWELPNKMKPEDLDMDEHFGMTVARKNKLFLIPTVYEAS

SEQ ID NO: 172344 - protein, 171 aa, Glycine max
  unsure (1)..(171): unsure at all Xaa locations
  Clone ID: PAT_MRT3847_126643C.1.pep
MHSELKLMPDKVKNELVVQREEERKESYNLMGNIRLKRMGEIDTRPFLEEMRQRYNEEEAEERASELCSLWEEYLKDPDWHPFKVIMVEGKEKEIIRDDDEKLNGLKNDLGGGAYKAVELTLVGINEHNPSGQYVTKVLYNYKSXRRASLKLRVQFISNQWNFGKRLKGMT

SEQ ID NO: 172345 - protein, 124 aa, Glycine max
  Clone ID: PAT_MRT3847_126644C.1.pep
MPKSSRFLVVAIAVAALCVILPVAAAADLEDPGVLRLPSDSLCGKTTPSSCPAKCFRADPVCGADGVTYWCGCAEAACAGVEVAKLGFCEVGNGGSAPIPGQALLLVHIVWLIVLGFSVLFGLF

SEQ ID NO: 172346 - protein, 154 aa, Glycine max
  Clone ID: PAT_MRT3847_126645C.1.pep
VTHTRTRSIFEGTSTFSKGGVIIIIIIIIIIIIIIIIIIIIIIIISLAGTVMAHSCSDEDTDISESEISEYEDKSYEELKNGSQDVRTSGKTFTCPYCPKKRKQDYLYKELLQHASGVGQSSSQKRKARDKANHLALVKYLKKDLMNVDVPSND

SEQ ID NO: 172347 - protein, 457 aa, Glycine max
  Clone ID: PAT_MRT3847_126646C.1.pep
HASGHLKVGIRLEYELDHHGKKDWFTNSGLKSGLYAWVARADDYKINSIYGEHLRRMGDVKTISELMEEEARRQDKLVSNLTNIIQVKNKHLKEIEVRCHETTDKMNLVMKDKDQLIQAYNEEIQKIQLSARDHFQRIFTDHEKLKLQLESHKNELELRKVELEKREAHNESERKKLAEEIEENASKNSSLQMAALEQMKADENVMKLAEDQKRQKEQLHAKIIQLQKQLDMKQELELEIQQLKGSLSVLKHMEDDEDAEILNKVDTLQKDLRDKEQSLQDLDALNQTLIIKERESNDELQEARQALVDAIKELQSHGNIRLKRMGELDTRPFLEAMKQRYNEEDAEERASELCSLWEEYLKDPDWHPFKVIMVEGKEKEIIRDDDEKLNGLKNDLGEGAYKAVVEALLEINEHNPSGRYLTSVLWNYKQGRRATLKEGVQFISNQWKVLKRKKGMT

SEQ ID NO: 172348 - protein, 38 aa, Glycine max
  Clone ID: PAT_MRT3847_126647C.1.pep
HFLARAPSPNRKMHFFYTSGRAGDKSYFPHLPISCFVR

SEQ ID NO: 172349 - protein, 41 aa, Glycine max
  Clone ID: PAT_MRT3847_126648C.1.pep
YLLHFTHFLILGKPNPLNVFAYRVEGISIQYNYVYYSHLKH

SEQ ID NO: 172350 - protein, 173 aa, Glycine max
  unsure (1)..(173): unsure at all Xaa locations
  Clone ID: PAT_MRT3847_126649C.1.pep
FLFKXXXXECPSEAFXDXXADNCWESVLKRLHHEIMRQRXXGELELPLLERLRSINGHRMFGFLLPSIIQAIEAQDPSHLCVEYWNHKVAPSGSVVDNFTYGSSGIIINTKNFGIDLIKQEKEDILEEMKLILQRASPDELSTMHKLLSSDAQCCEWRVALIALMDEIRNARQ

SEQ ID NO: 172351 - protein, 88 aa, Glycine max
  Clone ID: PAT_MRT3847_12664C.1.pep
MSAGENPLFQIPLMAQEEIQSFSACDCTTAMGSENSTPDSTEMHVGAIETTIDRLARHDCNIDSAMLQVETYYTNSENALAKYQVQRS

SEQ ID NO: 172352 - protein, 113 aa, Glycine max
  unsure (1)..(113): unsure at all Xaa locations
  Clone ID: PAT_MRT3847_126650C.1.pep
NLNYQNLFKYAGLDIDNLQNLESCLFVLFPYFSYMLAEGLGLSGIVSILFTGXAANVFSCAYLVNLIRPAYRQIPPKHQKALWYSGLRGAMAFALALQSIHDLPEGHGQTILT

SEQ ID NO: 172353 - protein, 80 aa, Glycine max
  Clone ID: PAT_MRT3847_126651C.1.pep
YRVQNQLPQGDACSRCFPFSKSLKGLPGRSARDRAAAPSFLGVVFRPGGGKQLLDQGENLAADQRDRQHLEGPPVSLGWG

SEQ ID NO: 172354 - protein, 53 aa, Glycine max
  Clone ID: PAT_MRT3847_126652C.1.pep
PLQFAPPTCLPMMTSVVGNEHQARHWQAELTNNIFTIIPSLSSIIKPTGKRQY

SEQ ID NO: 172355 - protein, 116 aa, Glycine max
  Clone ID: PAT_MRT3847_126653C.1.pep
LNYLLYVSDTENNLVLKDTAICMTKMESGASGLVPHNMPDEDEVRTELSHLFLNNIVDQYIQSWKLISLIRELALGYLRFGVVIRVLNVTYFRIKKKTKTFKDQGREIPSVVFSQP

SEQ ID NO: 172356 - protein, 96 aa, Glycine max
  Clone ID: PAT_MRT3847_126654C.1.pep
FNSIEIRTYHFIFTHPLGHTKEVMEKEEWFKLRFLCVYVQNFPCRYLGEGKCQFWHTVAITPFPPSFFPSHENRVILYITCGFIVEEVNSVYTFAH

SEQ ID NO: 172357 - protein, 53 aa, Glycine max
  Clone ID: PAT_MRT3847_126655C.1.pep
IYNLEGPNGVGTYWCPGAFFVGPHFLWSGSLTQVPMVIKEPVALHFGQLWGMA

SEQ ID NO: 172358 - protein, 88 aa, Glycine max
  unsure (1)..(88): unsure at all Xaa locations
  Clone ID: PAT_MRT3847_126656C.1.pep
RVRDDAGDEILATFKHLSVAIXHSCHPLVAVCKSITHCMYPVRRALVVILYNXTICSLGRAALDTYNGSTNASCATAQQPCRIGWMMF

SEQ ID NO: 172359 - protein, 87 aa, Glycine max
  Clone ID: PAT_MRT3847_126657C.1.pep
VLKVPGVKNLGIPEIPVAPPTTTSAPQSPFSIFPALKQATSSTTNGQSSIPEEASKHSNKKISSSSVISQRLRSLEKQVKGRKKNQK

SEQ ID NO: 172360 - protein, 45 aa, Glycine max
  unsure (1)..(45): unsure at all Xaa locations
  Clone ID: PAT_MRT3847_126658C.1.pep
MVKHNNVIPNGHFRKHWQNYVKTWFNQPARKXQXXGFGPEKKGLS

SEQ ID NO: 172361 - protein, 72 aa, Glycine max
  Clone ID: PAT_MRT3847_126659C.1.pep
RSPIWQSSFTLTTVLVPQHQLRCILDRQITIAKLLIVLSLSFSSPSYVSICSEAHHQKVLMMMTTTQLLRFL

SEQ ID NO: 172362 - protein, 129 aa, Glycine max
  unsure (1)..(129): unsure at all Xaa locations
  Clone ID: PAT_MRT3847_12665C.1.pep
MCLHGREKMIEGGVFREEVQRERERERERREHRCPIKTGTLRDLTYKRCVIGGKKKVRRKKRKHESGCXVVNIKPLSNKITRRTCARGGNAKRRVPRSDIGNHLRGSEVAICKICTSDAAHNVLNNESA

SEQ ID NO: 172363 - protein, 117 aa, Glycine max
  Clone ID: PAT_MRT3847_126660C.1.pep
LKALFAIALHPLNRSTMINLGAVPALFSLVAKDGRVGIVEDATAVIAQVAGCEDAAEAFFKASGVGVLPDLLDLASAASMRTKENGRMGDFIQRSLGNDLVFHLWLNGQREFSSFFY

SEQ ID NO: 172364 - protein, 532 aa, Glycine max
  unsure (1)..(532): unsure at all Xaa locations
  Clone ID: PAT_MRT3847_126661C.1.pep
LELLGSDYTEGVCFFGIVNAIEVVNAFPEEDGLLKFRQWVESPDPTILGRLECKXVVQIPERKGSKIEEKMNSSSCNVKESAVMQNICHAQEQNELSDYIQEIKQTFFNKHRNVSKNWHIPSSFPSDTVISAYYSPHVDKSTEPFTWGKPDHLVLRKLCWEKFGWTGQKADELILPVLKEYNKRETQLRLEAFYNFNERFAKIRSKRIKKAVKGITGKQPSDLIDDSVEEFSKSRKTGREPEDITLETSRGIEGNLEGRRKSKIKQSRKNDTVAKEQSKKKKVNDDPSSAPGTSEIENLQPSLQXKKSNMMSMRSRKPVNYSFKEPEDEDSDDSFDRRNQTGPIEENLSHILGACEDGATDFSMAKECSAMNFPPEENLPTDSLESGGWFCTDAGETCHPGTGNQDSSDDYLKMGGGFCLDDGDTGVKQDTSDNVDTATVDYNADFPHGSDYLDETNRDKSSSDILFSGAEKPENGIQGGGPFNIEPNDLASASSYDHSDIAVLKQENTRNNSGASTGAFSAMPFLKRRRKN

SEQ ID NO: 172365 - protein, 353 aa, Glycine max
  Clone ID: PAT_MRT3847_126662C.1.pep
FGSSLNYIQDNLSWVLGFGIPCVAMIIALLVFMLGTVTYRFNIQQRGKSPFLRIGRVFVAAIRNRRSTLSSTAVKAEQFEFLNKALLAPEDSIEDESCSLSEVEEAKAVLRLVPIWATTLVYAVVFAQVPTFFTKQGITMERTIFPGFDIPAASLQTLVTVAIVLFSPIYDRLFVPMARAITGKPSGITMLQRIGTGISISIFTIVFAALVEMKRLKTAQESGVVDEPNATVPMSIWWLIPQYFLFGVSEVFTMVGLQEFFYDQVPNELRSMGLALYLSIFGVGSFISGFLISVIEKLSGKDGQDSWFANNLNKAHVDYFYWLLAGLSVMGLALFICSAKSYIYNHQGIRREL

SEQ ID NO: 172366 - protein, 47 aa, Glycine max
  unsure (1)..(47): unsure at all Xaa locations
  Clone ID: PAT_MRT3847_126663C.1.pep
XKLGRXXDVKDTNXXFVFXFRXXFGGGKSXGFGLXYXXVEXAKXXXP

SEQ ID NO: 172367 - protein, 79 aa, Glycine max
  unsure (1)..(79): unsure at all Xaa locations
  Clone ID: PAT_MRT3847_126664C.1.pep
QEERCXWYISAHHHNIYIXXHPPLHYIILPSSLYFPKLPSLNFLLPPTTHSKLSQENRGKLEAGXXKQTNSKIPGAINL

SEQ ID NO: 172368 - protein, 61 aa, Glycine max
  unsure (1)..(61): unsure at all Xaa locations
  Clone ID: PAT_MRT3847_126665C.1.pep
IXXKXXHXSRXTPNEXIXPITPXXXXXTLDSXXIXKNIIDFXXTIXLSXXXSLSPSXXXLS

SEQ ID NO: 172369 - protein, 71 aa, Glycine max
  Clone ID: PAT_MRT3847_126666C.1.pep
VIIGRGPDCIIQVSSAHAHSGEKTSIGQLSYTLDGLVGRLIDKILKDARNNYYSTFRYSCELVQLLAPPDR

SEQ ID NO: 172370 - protein, 76 aa, Glycine max
  Clone ID: PAT_MRT3847_126667C.1.pep
WLALDIDSVGCRLCLCSKKGHIFLQVRLLTTLCNQKGSMFLWVTVVFNYVGLIPKFEFSCEPFFSLGLLRYASGFR

SEQ ID NO: 172371 - protein, 108 aa, Glycine max
  Clone ID: PAT_MRT3847_126668C.1.pep
KRRGFLKLTPFRRAQRDKKEGAPPEQFPQGQGPNSPQDPTTDLCKGATHPGFPNPKITQLPKGGGPAPPPRTVPSPEPGTPRLPNISSRWGPRLGNPPGGKPPRISPD

SEQ ID NO: 172372 - protein, 128 aa, Glycine max
  Clone ID: PAT_MRT3847_126669C.1.pep
GVLPWGGAPGCFFDKKMAPAPHFMPQWGPRLVFVGTHRENFGNVLWGGGPPPHQKIFFLKGGVPSPLNPQKRKMQTFFGLSPPGVYPNPGRVSVLGFFKKKPCFFPTKKKKKKSKKKKKKKKENPRDP

SEQ ID NO: 172373 - protein, 77 aa, Glycine max
  Clone ID: PAT_MRT3847_12666C.1.pep
TPFPPNPGCGSPLYHENWRIPIPPPPFSAGTFHALSPVGFYNRPTWDTYNPGPLLDLLGEWMASQQWPDVKFLLESW

SEQ ID NO: 172374 - protein, 46 aa, Glycine max
  Clone ID: PAT_MRT3847_126670C.1.pep
TGIRSPTPLNHFLFSKQRNPPGSGYILKTNKWQAYKLNTDRLIARD

SEQ ID NO: 172375 - protein, 235 aa, Glycine max
  unsure (1)..(235): unsure at all Xaa locations
  Clone ID: PAT_MRT3847_126671C.1.pep
MYRLARRVASSIASPSAKNLVYGGVLSSRNFVSKDINFGVGARAAILQGVTEVADAVKVTXMGPKGHNVIIERSRGNPRITKDGVTVARSIKFKDKSKNVGADLVKQVAKATNTAAGDGTTCATVLTQAILTEGCKSIAAGINVMDLRNGINKAVDAVITELKSRTLMISTPEEITQVGTISANGERDIGELMARXMEKSGKXGVITVVDGNTLXYEMKVEKDEVYQRYISPYLL

SEQ ID NO: 172376 - protein, 262 aa, Glycine max
  unsure (1)..(262): unsure at all Xaa locations
  Clone ID: PAT_MRT3847_126672C.1.pep
RFWWGGFCKIGNDISQFLGPLILNQLLQSMQNGDPSWTGYAYAFSIFVGVVFGVLCEAQYFQNVMRVGYRLRSTLVAAVFRKSLRLTHEARKQFATGKITNLMTTDAEALQQICQSLHTLWSAPFRIVVAMVLLYQQLGVASLLGALMLVLMFPLQTFIISRMQKFSKEGLQRTDKRIGLMNEILAAMDTVKYYAWESSFQSKVQIVRNDELSWFRKASLLGACNAFILNSIPVXVTVITFGVFTLLGGDLTPARAFTSLSL

SEQ ID NO: 172377 - protein, 100 aa, Glycine max
  Clone ID: PAT_MRT3847_126673C.1.pep
TRVQMENKRPLENLKFQIPFFNGGKKFKRGRIFLKIKRFALGGKSPPHKRGFPRKKKGKTPPPKKKKTGAPPLKGFRGFSNKRGGKKLNPNTPFPGFFFG

SEQ ID NO: 172378 - protein, 101 aa, Glycine max
  Clone ID: PAT_MRT3847_126674C.1.pep
PSAEGGGEDEGVDDAADKVDDIDDTFKLHEHPAFDNKQFGTFINRLIKSLTTNLDANLQEMVKKHIERTTKYPLYKIEDIQLLVGVSMGDDPGSGYAYYND

SEQ ID NO: 172379 - protein, 70 aa, Glycine max
  Clone ID: PAT_MRT3847_126675C.1.pep
LVWLVLVRILRSGGFCLFGCQKGWNLDEIFDYKFCGNSRSLLYNSQRLSFRSKMFGNGEAVTHSACSNGS

SEQ ID NO: 172380 - protein, 73 aa, Glycine max
  Clone ID: PAT_MRT3847_126676C.1.pep
MGFVGGEEAIQEPTGHDERILVSVRLRLLNEKVRASNDESERECFCYSGIIYRSNHSASYMSLYPTASSFHSL

SEQ ID NO: 172381 - protein, 57 aa, Glycine max
  Clone ID: PAT_MRT3847_126677C.1.pep
VQGSFGKSNESDNALNKNTIYKRGGKENLVRHLKTLKIFRCPEGAIRCSNSTGCHHG

SEQ ID NO: 172382 - protein, 59 aa, Glycine max
  unsure (1)..(59): unsure at all Xaa locations
  Clone ID: PAT_MRT3847_126678C.1.pep
KGQRRNEESETYFVIXXXGNLCKFVRKFFWVFSFNWXXVMFVPKLHTACNLYGQQLKKC

SEQ ID NO: 172383 - protein, 115 aa, Glycine max
  unsure (1)..(115): unsure at all Xaa locations
  Clone ID: PAT_MRT3847_126679C.1.pep
EEWFDCVDEEDFFEEVSLSAALNGVEDLDYMGRISLATSEGVPNVLSRKNGEKGTRRFAFEDGEKMTLSPVTSVEXAYNRLIVELEKSVTTLAGIECTKDENLPRRKTFDKPKTR

SEQ ID NO: 172384 - protein, 103 aa, Glycine max
  Clone ID: PAT_MRT3847_12667C.1.pep
YISFFKARHYNLFYWPLKRSLSVEYQCFKSCHFKRRPFKTLLHCFFKCQYQYTVFLSIKEDISFLLPIFQEFIFSTKPINPLTFIIKAHFIADKHHTDLVHKL

SEQ ID NO: 172385 - protein, 116 aa, Glycine max
  Clone ID: PAT_MRT3847_126680C.1.pep
KKAQGGGPCVSFVFKKHTPPPFHLGGGWGENPKPTRSVQKSKLQISAFINYYSGQMLKILTILTTSQYFEQIRVGNSAVRGCIFLSNPLIKKNKNGVYKKLHQPYPGEFSFDISAF

SEQ ID NO: 172386 - protein, 473 aa, Glycine max
  Clone ID: PAT_MRT3847_126681C.1.pep
MEERKPLKLYFIHFLAAGHMIPLCDMATLFSTRGHHVTIITTPSNAQILRKSLPSHPLLRLHTVQFPSHEVGLPDGIENISAVSDLDSLGKVFSATAMLQPPIEDFVEQQPPDCIVADFLFPWVDDLAKKLRIPRLAFNGFSLFTICAIHSSSESSDSPIIQSLPHPITLNATPPKELTKFLETVLETELKSYGLIVNSFTELDGEEYTRYYEKTTGHKAWHLGPASLIGRTAQEKAERGQKSVVSMHECVAWLDSKRENSVVYICFGSLCYFQDKQLYEIACGIQASGHDFIWVVPEKKGKEHEKEEEKEKWLPKGFEETNEDKGMIIRGWAPQMIILGHPAIGAFLTHCGWNSTGEAVSAGIPMLTWPVHGEQFYNEKLITEVRGIGVEVGAVEWTPIGIGDRLNLVTRDHIQKGVRRLMDASDEALEIRRRAKDFAQKARQAVLEGGSSHNNLTALIHHLILLRHARLLA

SEQ ID NO: 172387 - protein, 85 aa, Glycine max
  Clone ID: PAT_MRT3847_126682C.1.pep
MFLYPDSHFHSKCFRGRKAVRTEQSKLREQFYKIYGKYCQNVDRNSFGPDSNFLCQFLYFFKAENIEDFLVLVQICPLLWWVCSG

SEQ ID NO: 172388 - protein, 110 aa, Glycine max
  Clone ID: PAT_MRT3847_126683C.1.pep
FFCPPSSFFVKVFGGALSKGLTLVCPHGTPMRVVPFFFTPLLRCFCQPYLCFFLLWAAPPSFLFRHCVFLFFFLFFPLFGGGFFYFVCSSYRALCFILVPALLLSVLFGE

SEQ ID NO: 172389 - protein, 88 aa, Glycine max
  unsure (1)..(88): unsure at all Xaa locations
  Clone ID: PAT_MRT3847_126684C.1.pep
MVRTNHPITIGILIIGQSVMIARLTTINFNLRXFKYLLFIIYLGGIXMLFCYIIKITFSNQPVGKLKKINYILCVFITLFIFKEKKFI

SEQ ID NO: 172390 - protein, 43 aa, Glycine max
  Clone ID: PAT_MRT3847_126685C.1.pep
RFPLPPHGAGFFLDLQKTLRVRVKQRDKGAGDERRALFVSWYS

SEQ ID NO: 172391 - protein, 99 aa, Glycine max
  Clone ID: PAT_MRT3847_126686C.1.pep
TGPLFPFLPTRPKKKKKKKKFIKKKKKKKKKEKYNKNKNTPIPQKKPNFNYTYFHFHSSSFFLTFLLYNPLISKLLLLKKHSLFPIYPLSIISLTNQPS

SEQ ID NO: 172392 - protein, 232 aa, Glycine max
  Clone ID: PAT_MRT3847_126687C.1.pep
LTRCRVVARIRLRVGLGPLSQIVNMFPGGLGGLGEFMKQDGVEEAGGKSMKGMMCIMDSMTQKELDSEGPPKMFPEEGTRIARIARGCGKTPEDINDFINQYRTMSKTLKNITGNKGLMGMLSGMGGGGGAPGGQPGGGMMNPQMMSQLSKALGPMGQALGGGGGLANMMQSMMGALGGGAGGPDGPGGLMDALQGGGVGGGSNGGNFANLMNAFGQQNQGRGQPQRRGRNR

SEQ ID NO: 172393 - protein, 117 aa, Glycine max
  Clone ID: PAT_MRT3847_126688C.1.pep
TPVIMGCVQAKSLDLEESPEYRTLDRLKLDNGYVPSTDFVAHRRSTGQRHHEPNKEYERLHQHQRREQPRKQTNKLIESGVANGEGLHLNKGKVVGREGRRVTRRDDKKLENKCCFE

SEQ ID NO: 172394 - protein, 35 aa, Glycine max
  Clone ID: PAT_MRT3847_126689C.1.pep
ESENFHSIKRYQVFLKLNLYGGKLIMPYPYWKESQ

SEQ ID NO: 172395 - protein, 120 aa, Glycine max
  unsure (1)..(120): unsure at all Xaa locations
  Clone ID: PAT_MRT3847_12668C.1.pep
MEAWFIVIVSLCVCVLIRAIFSLFHNKTITTPPGPPNIPVITSFLWLRKTFSELEPILRNLHTKYGPIVTLPIGSHRVIFIADRTLAHQALIQNGSLFSDRPKALXPSAKSLSCNQHNIN

SEQ ID NO: 172396 - protein, 57 aa, Glycine max
  Clone ID: PAT_MRT3847_126690C.1.pep
MLQRAASNAYSWWWASHIRTKQSKWMEQNLQDMEEKVHAVLKLLEEEGDSFAKRAEM

SEQ ID NO: 172397 - protein, 49 aa, Glycine max
  unsure (1)..(49): unsure at all Xaa locations
  Clone ID: PAT_MRT3847_126691C.1.pep
SNNTRITYHTNNKTTMVHFHQNKFFHSTNLXPFTHQLQHNSIKHQQQQT

SEQ ID NO: 172398 - protein, 47 aa, Glycine max
  unsure (1)..(47): unsure at all Xaa locations
  Clone ID: PAT_MRT3847_126692C.1.pep
IPEDGPLFSCCKGNAPQTPFLVLQVNNVKVWPHGGEXEYCLNGTSTL

SEQ ID NO: 172399 - protein, 731 aa, Glycine max
  unsure (1)..(731): unsure at all Xaa locations
  Clone ID: PAT_MRT3847_126693C.1.pep
IGEMEPQQEMEWNEAQKIPISVDLIVVAKKQLQFLAAVDRNRHLYDGPALERAIYRYNACWLPLLAKHSETPIFEGPLEVPLDCEWVWHCHRLNPVRYKSDCEELYGRVLDNFGVVSTVEGICGWQTEEIWNKLYPDEPYNADLVNLLPEDISKRISKLEKYTKYDLISAAKRQSPFFYQVSRTHMKNDLFIKEAVARYKGFLHLIKRNKEKGIKRFCVPTYDIDLIWHSHQLHPVAYCKDLNEALGKVLEHDDTDSDRTKGKKLDLGFSGTTRQWEVTFGTRYWKAGAMYRGNAPSPITSNPFPSSITCKKVVSSNEYPQEISLPDRKVMEIPRIVLWLAKLFIIXKDINCSKNTCLFNLPVRPQHAKSWTHVTDENGTRIISLQMRDLKNAKNIGNPGKEVVGLMKSGETRTLAEFMENGWSILENLWLFHLPNKSTNDGHLFELTGANKRVRIFPGRKLDYELRHNGKRGNEMNFLTAVEFSIEEPYGKAVALLDLRSRHVTAKEKWMVLPGIILTFIASNIMKKEGYEGIIAKSKDLKVNGPNEENEKTVLNGTGLSSTNMCNEDEGITYKSEISIGGCGNAVESGGCGAGCGGGCGNLIKSGGCAGCGAGCGGGCGNLIKSGGCAGCGAGCGGCGEACGNLIKSGGCGGCGAGCGGGCGGGCGSMLKSGGCGGCGGGCGGCGGGCGNRLESSGCGGCGGDLMDSKCGIDEHFNEELKYVNEEAVTA

SEQ ID NO: 172400 - protein, 255 aa, Glycine max
  unsure (1)..(255): unsure at all Xaa locations
  Clone ID: PAT_MRT3847_126694C.1.pep
MAETIRLAVAVLGNAASVALYAAPMVTFRRVIRKKSTEEFSCFPYIIGLLNCLLFTWYGLPVVSYKWENFPLVTVNGVGIVLELSYVLIYFWYASAKGKVKVAMTAIPVLLVFSIIAAVSAFAFHDNHHRKLLVGSIGLGVSVTMYGSPLIVMKKVIQTKSVEFMPLPLSMCSFLATVLWLIYGLLIRDIFVAGPSAVGTPLXGILQLVLYCKYRKGSVVEDPSKGDLEKGNLEKVEMEIGKVEMNVTNHMNGHS

SEQ ID NO: 172401 - protein, 256 aa, Glycine max
  Clone ID: PAT_MRT3847_126695C.1.pep
LHRVAVFFFFFFIAGNAASVALYAAPMVTFRRVIRKKSTEEFSCFPYIIGLLNCLLFTWYGLPVVSYKWENFPLVTVNGVGIVLELSYVLIYFWYASAKGKVKVAMTAIPVLLVFSIIAAGSAFAFHDNHHRKLLGGSIGLGVSVAMYGSPLIVMKKVIQTKSVEFMPLPLSMCSFLATVLWLIYGLLIRDIFVAGPSAVGTPLGILQLVLYCKYRKGSVVEEPSKGDLEKGNLEKVDMEIGKVEMNVTNHMNGNS

SEQ ID NO: 172402 - protein, 100 aa, Glycine max
  unsure (1)..(100): unsure at all Xaa locations
  Clone ID: PAT_MRT3847_126696C.1.pep
SAYPLLLISSILLIXHIYACQVQPTPPAVKALPYGXYSKTCPKLASIRGGNIFIMVFMADPAQPPALLRIFFHDCFVQGXCDGSSXLNGSPRERDLPPNR

SEQ ID NO: 172403 - protein, 113 aa, Glycine max
  unsure (1)..(113): unsure at all Xaa locations
  Clone ID: PAT_MRT3847_126697C.1.pep
VLTFTKPXSRLFAIKEMRIPMGALHTTGMTTIPYRPMLGKLXPRCPTIGRNAEPAQSRTISWTVCHARGQDQTRPMRXHCLQYTHGLVHVAGNTDRHSVRAAMHELRPMFNDD

SEQ ID NO: 172404 - protein, 364 aa, Glycine max
  Clone ID: PAT_MRT3847_126698C.1.pep
SISEEELKQKFGTSKEIMKSVACTLEGRTYSYNDINISNVVDVASQVAGCAYEYGTGWGKQMAWIYGSVTEDVLTGLTIHKKGWRSEFCMPSPIGFTGFAPGGGPNSMAQQKRWATGLLEMFFCKHCPIISTLFHKLTLRQCLAYMWIINHWGLMSVFEVCYACLLAYCIITNSNFLPQDLGICIPAAFLVIYKIYTASEYLAEGLSIRAWWNNQRMSRITPMNAGFCAFLSVLLKLFRISETVFDITKKDLPSAKDVGDDKDAGRYTFDESVVFLPGTTILLVQLTAMVIKLLGFQPPMATQSGKHGCGLGEIFCSVYLIICYWPFLRGLFETGKYRIPLSTILKSAILTCLFVPLCQRTVPG

SEQ ID NO: 172405 - protein, 101 aa, Glycine max
  Clone ID: PAT_MRT3847_126699C.1.pep
IRLELTHTLCIYLYQPDLVATASAPTPREELVCMAKLAEQAKRYKETVEFMENVCSSAESEELTVEERNLLSVDYKNVNGARRAYRRIISLIEQKEESRGI

SEQ ID NO: 172406 - protein, 200 aa, Glycine max
  unsure (1)..(200): unsure at all Xaa locations
  Clone ID: PAT_MRT3847_12669C.1.pep
PRQLRSHHRRHILHLDPNSFYNGHFASLDLLPRSHFLXSLPHTPSPLPQPPPHPPXSDNIVVIDLIHQPLCMFCADKTINLLMKSGATQYLEFKEIDKSFVYEVNAGLANVPNSRGAIFRDKKLSLKEKNQLMRFFKLVQHNHXDDTXEEKIPEEDLEIAFVSFLEKMKLPPKIKSILLYAIAMLDYDQDNNEVCIELLK

SEQ ID NO: 172407 - protein, 73 aa, Glycine max
  unsure (1)..(73): unsure at all Xaa locations
  Clone ID: PAT_MRT3847_1266C.1.pep
IKPGQXEXXXEEEPGXQKKRRTPLIGASSPLCETNRQGSYKKKKNLFPKEKGLIFPGRKKESCWGIRFKKELK

SEQ ID NO: 172408 - protein, 66 aa, Glycine max
  Clone ID: PAT_MRT3847_126700C.1.pep
SEGKVFEGKDGLNNNPPGISVKLGAECQAISPPLFKRGPCNWGSLKKRAPEIKKLGVSLVQYLDNR

SEQ ID NO: 172409 - protein, 47 aa, Glycine max
  Clone ID: PAT_MRT3847_126701C.1.pep
YFLIHSTLYLHLSSNTHNMLSWYNTLTYMLLLFAYTTSPLQTSWLTN

SEQ ID NO: 172410 - protein, 113 aa, Glycine max
  unsure (1)..(113): unsure at all Xaa locations
  Clone ID: PAT_MRT3847_126702C.1.pep
XXXXXXXXIXXXXXXXXXXXXXAAXGXXIWXRXXPXVXXXKXACCXXLXPXFXXLXXXXXXXXXXXXHIXXXXXXXXXXXXITXXSVVXSQPSRAXSARXRAEFRAYVRVXAT

SEQ ID NO: 172411 - protein, 36 aa, Glycine max
  Clone ID: PAT_MRT3847_126703C.1.pep
KIFQWSKISGGVCYVKWVFASLATTFHASWTWVVFE

SEQ ID NO: 172412 - protein, 98 aa, Glycine max
  Clone ID: PAT_MRT3847_126704C.1.pep
NVFFEIFCYFFPPKKSFFGERTAKFLGFPFFIGVRPHFIIFLKQEQFTSGNFFKKVKWLLPLDMRRKSPGNKKKTGGSLSPNSGFTNAWKGTYFFFLG

SEQ ID NO: 172413 - protein, 78 aa, Glycine max
  Clone ID: PAT_MRT3847_126705C.1.pep
AKVISIATDDGEYEKFEGGELINMEGPYWIWMMDGAEKTLLWSLGIDGIHCPSDFSALDLWYFVGFSFFFLFFSFFGV

SEQ ID NO: 172414 - protein, 60 aa, Glycine max
  Clone ID: PAT_MRT3847_126706C.1.pep
KQFTVFYILLGIFQDLGVAGKTQMPVFSGPQADARYFENPEPSAGFGICVFSRLFDCLIQ

SEQ ID NO: 172415 - protein, 60 aa, Glycine max
  Clone ID: PAT_MRT3847_126707C.1.pep
SLHEHSFKLAHIRSKSRTLGQHGPILNFKKLDVTTNYFLQRFITCIIANFQTGHLCRDDI

SEQ ID NO: 172416 - protein, 60 aa, Glycine max
  Clone ID: PAT_MRT3847_126708C.1.pep
DRFRSRHCLPISFIFVTRLDHSFLHLGPHQAPKHQQPVILWNNSSQSKTKNWHSYLFILK

SEQ ID NO: 172417 - protein, 138 aa, Glycine max
  unsure (1)..(138): unsure at all Xaa locations
  Clone ID: PAT_MRT3847_126709C.1.pep
LPGIAVLNTALWCSTGXLEYETDSPTVWIGELLWIGWAEGRGRAGLVLCGXDNTDHICPGSRVTESDVGWRGGGWCDRLGWGALWIKMILPPIPNEMRTGILTMLDRLRAWMHHLFTGITCSVKLCDHGANPRHATIY

SEQ ID NO: 172418 - protein, 107 aa, Glycine max
  Clone ID: PAT_MRT3847_12670C.1.pep
PAVNYSFSSLHSFFFLPLTFSLTFSFLFQNSFLVHSLYFFFLADQPQIISGISTKTLAQGGNFYVTPRWTVQQTNPISLIFFLFHSIILIIFLVSEYCLIPWFLFSI

SEQ ID NO: 172419 - protein, 50 aa, Glycine max
  Clone ID: PAT_MRT3847_126710C.1.pep
TTPTTSRSRLWRSLIQIRMSAHTQIGDLSGIYYNPIQITLTSPISPNCNN

SEQ ID NO: 172420 - protein, 44 aa, Glycine max
  Clone ID: PAT_MRT3847_126711C.1.pep
HSSIYIAYHRPFFFSRKVFNFRLRDLTFFFIFIQTKSYNYFLPP

SEQ ID NO: 172421 - protein, 50 aa, Glycine max
  Clone ID: PAT_MRT3847_126712C.1.pep
PFQFYKSLLPKIIIFYLCLYKKIIIVFNKNDVTLVSWGELKEYIFLILRD

SEQ ID NO: 172422 - protein, 77 aa, Glycine max
  Clone ID: PAT_MRT3847_126713C.1.pep
GFPNFPFFPLFCSLGCPPCSSCPSCRKVNPVCFCSCPPWPPICFFCCYTLSPGGPCGFCCFMRPFQFQGFYYKICLL

SEQ ID NO: 172423 - protein, 56 aa, Glycine max
  unsure (1)..(56): unsure at all Xaa locations
  Clone ID: PAT_MRT3847_126714C.1.pep
DYPXXFFFSHLEATXLGXTSLPXSCXXSSGMXLSMWESXSXSXARXVXXSXIXLPT

SEQ ID NO: 172424 - protein, 58 aa, Glycine max
  Clone ID: PAT_MRT3847_126715C.1.pep
CCFINGDTFCTLNVAFFMSVIYRERFDNNDESKFTRYKYNFKLLTSQIKRALSYNIIG

SEQ ID NO: 172425 - protein, 118 aa, Glycine max
  Clone ID: PAT_MRT3847_126716C.1.pep
MANQSKENQQATSSTPPIQKSEEDQAASTTMGFKDSLEKQYRKVKEHAETYPYVWASYIVVYGGFALWTTYRWRKLRKTEDRVRTHQERLRKLIEAEESTSSAKVVEKGSTSSDKPSK

SEQ ID NO: 172426 - protein, 63 aa, Glycine max
  Clone ID: PAT_MRT3847_126717C.1.pep
NHFNFNIKTNKKPFITQKGTCRIMKKDGFTKPKTSILSNNIIDIEKRLPIFTFNFKYAIPISY

SEQ ID NO: 172427 - protein, 100 aa, Glycine max
  Clone ID: PAT_MRT3847_126718C.1.pep
MANLPKENQQVTSSTPSIQKSEEDQAASTAMGFKDSLEKQYLKVKEHAETYPYVWASYIVAYGGFALWTTYRWRKLPKTEDRVLTLQERLRTHVRAENLL

SEQ ID NO: 172428 - protein, 45 aa, Glycine max
  Clone ID: PAT_MRT3847_126719C.1.pep
DAVAIPINAQIRTVYGVRNSKAIVVRRKYHTAHALKVNPNHTPPL

SEQ ID NO: 172429 - protein, 60 aa, Glycine max
  unsure (1)..(60): unsure at all Xaa locations
  Clone ID: PAT_MRT3847_12671C.1.pep
FQFKSHVCTDLRDNKQFLIDHPGSARITTAQXGEELKKMIGAVTYIECSSKTQLVNTFIS

SEQ ID NO: 172430 - protein, 89 aa, Glycine max
  Clone ID: PAT_MRT3847_126720C.1.pep
STNGTIVSLLILLFLPPSISISNSIPSTYPLHGATTILLTFLLIFVRNVILKIPTCNLSLFISLISFILSGSVLIWVLSSVLNAINYFF

SEQ ID NO: 172431 - protein, 50 aa, Glycine max
  Clone ID: PAT_MRT3847_126721C.1.pep
TPFPFPRVRRHTHLLVDCAADPRGLFSASERFRSNIGVPTRATRGDPESA

SEQ ID NO: 172432 - protein, 102 aa, Glycine max
  unsure (1)..(102): unsure at all Xaa locations
  Clone ID: PAT_MRT3847_126722C.1.pep
NTARADTTTDDVLQAALLAERGMPDXKERSSETCKHVAINEAATTVEAANSPELKNIEYATTAPIADRELRYVRMKMDPAKCNQGMLTRQSLLEQYTGQLAP

SEQ ID NO: 172433 - protein, 88 aa, Glycine max
  Clone ID: PAT_MRT3847_126723C.1.pep
NHRPHQHQAPPPQAATVGHGSEPTQTNQPHRTPPPRAGKPARGDRTSPAPAPPVRLSEPQSTTTAHRSLGQTRKPRTIRHYTPPIHDL

SEQ ID NO: 172434 - protein, 80 aa, Glycine max
  Clone ID: PAT_MRT3847_126724C.1.pep
LEKKKKKKKRFKNKKKKKGPRGYVQTGTWKRTRVSLSGVATHFPCTADSLFASCGPVVFVHTVEHLYCPLSLTVWACGAY

SEQ ID NO: 172435 - protein, 52 aa, Glycine max
  Clone ID: PAT_MRT3847_126725C.1.pep
KEQEHGAIPRSYSPMRLFSCRLRRRPFFRVFSQDGKMSEVPLRFPPLGGSGS

SEQ ID NO: 172436 - protein, 58 aa, Glycine max
  unsure (1)..(58): unsure at all Xaa locations
  Clone ID: PAT_MRT3847_126726C.1.pep
MSNTCSNCDCADKTNCTKGNSYGVIVETEKSYIXTDDMDDPASEHVWKCMCGTNCSCY

SEQ ID NO: 172437 - protein, 64 aa, Glycine max
  Clone ID: PAT_MRT3847_126727C.1.pep
IPTICAIHQTPFGISFGEMRRRGTSIAREDAQRHIIDNHIFNTLYIECFPLFIFPQVENPNFFY

SEQ ID NO: 172438 - protein, 150 aa, Glycine max
  Clone ID: PAT_MRT3847_126728C.1.pep
GIPGSGDAYGVSKEGVKNREDKIKKDPESGGVSKEGADKVKKDDGLGEEGRNKGDKVKGKPVDNSVSKDGSKSSGKGESTVSSASKRNDGSSGEDCDSSNKCTDEAKKLVACLRVPRNDSPQLLLLIQNKGKGPLTAKISAPDFVHLEKS

SEQ ID NO: 172439 - protein, 50 aa, Glycine max
  unsure (1)..(50): unsure at all Xaa locations
  Clone ID: PAT_MRT3847_126729C.1.pep
PWGKKCTLFFIFYAKIWTSLILSASXXGXWPLPSSYFHGILRGKDVALVR

SEQ ID NO: 172440 - protein, 98 aa, Glycine max
  Clone ID: PAT_MRT3847_12672C.1.pep
MASKFSFLTLLMERRKPSKDNNNNNNDLAFVKAAAWAWYQHNSGSKGKAISEFDATITRRVPRPSRYKLEAMGIMAQEAPSEGSPTIRAKKLSLLDEY

SEQ ID NO: 172441 - protein, 209 aa, Glycine max
  Clone ID: PAT_MRT3847_126730C.1.pep
GSSSSRSSRFCREKMYLLAYRTMKDMHSKGHQPVEELCSSLISHLGQVNAYSEAFSVYNMLKYSKRTMCKSLHEKILHILLAGQLLKDAYVVVKDNAKFISRPATKKFASAFMKSGNLNYINDVLKTLHDCGYKLDQDLFAMAVSRYLDQPEKKDLLLHLLQWMAGQGYAVDSSTRNLILKNSHLFGRQLIAEVLSKQQVKLKHKNLTS

SEQ ID NO: 172442 - protein, 61 aa, Glycine max
  Clone ID: PAT_MRT3847_126731C.1.pep
PSMKTYFPSTPFTTHKSLILVILSSLLVHQTKIKTIENWIRSFLVVEIFISFSSIYSFMIY

SEQ ID NO: 172443 - protein, 101 aa, Glycine max
  Clone ID: PAT_MRT3847_126732C.1.pep
KLKNPRGGGNEKNRGHFWGETKTSLFPLELDLLKPYLFKNRGEQKPLGGKRWAEFFGQIKKKIFWSPNPCLGSKRGGGAHSFFLCEGKHPPNTMGRKKPFC

SEQ ID NO: 172444 - protein, 281 aa, Glycine max
  Clone ID: PAT_MRT3847_126733C.1.pep
MDSHSPVLTSTTSLSSMSKRPCPSQNPRAENLGEVERRLEAFLSLSDVASLSLDLSFERLLQSVPSDADSDLIDRALKMASLLLDAAKHSSRKRASNHNSLSWPLPPDLTIKVFSMLDTQSLCYASAACSLFSKCAKDPMCYANLDLTTLVPKVNNAVVATMIQRAGKALRSLKLGVVPSAATSLGSCPPFVCTIRNAIVEVPNFSWNDKRSRQGRESSILTRCCLSPLSGDGGAPGALLRKLHLYNIERMDNASLGAALSACPSLLDLENGGLHVELRQH

SEQ ID NO: 172445 - protein, 75 aa, Glycine max
  Clone ID: PAT_MRT3847_126734C.1.pep
SYLHGFPQYLILHNGVQSENLTLTRYSHSSNPCSHYACQTHLHHHLLHIFQRLAILSLHTLMGLSQLYHCLSSSF

SEQ ID NO: 172446 - protein, 58 aa, Glycine max
  Clone ID: PAT_MRT3847_126735C.1.pep
CTTYMKVCTQLGTLVTVASHCSILVYPLHLNSKIDSENTLHTKTMQIRETVLFNFAQL

SEQ ID NO: 172447 - protein, 53 aa, Glycine max
  Clone ID: PAT_MRT3847_126736C.1.pep
ICVTFKIIYFSHGIYFHSSILIDLYLEEELTRETNHVGSAMKEEELTRMTLCV

SEQ ID NO: 172448 - protein, 59 aa, Glycine max
  Clone ID: PAT_MRT3847_126737C.1.pep
LKDHYDGRIGPCSPRGNSVHRTENGFVAPFVTGTFIGGYNGTGLKPITTKGDCESRKTP

SEQ ID NO: 172449 - protein, 85 aa, Glycine max
  Clone ID: PAT_MRT3847_126738C.1.pep
LYRVFWCSEMTACVSILLSRCTLVMLCVSFMFTCYFGYSVVLIMFWCGGSVLVGLLFPMFMSLSRSWFWSALFAVRALNFLLAFS

SEQ ID NO: 172450 - protein, 346 aa, Glycine max
  Clone ID: PAT_MRT3847_126739C.1.pep
MLRITRFSGFFSAAMFVTVLVILSPSFQSEAIRSSHRFSFRKAPPFRNAAECASVSGQTTTVCDPSLVHVAITLDVDYLRGSIAAVHSILHNSLCPENIFFHFLVSDTNLQTLVESTFPNLKFNVYYFDPNIVAHLISSSVRQALEQPLNYARNYLVDLLESCVERVIYLDSDLVVVDDVAKLWSASLDSRAIGAPEYCHANFTKYFTAGFWSEPRLSGTFAQRRACYFNTGVMVMDLVKWRKEGYTKRIERWMEIQKSDRIYELGSLPPFLLVFAGHVAPIEHRWNQHGLGGDNVKGSCRDLHPGPVSLLHWSGSGKPWIRLSSKRPCPLDSLWAPFDLYAHSSS

SEQ ID NO: 172451 - protein, 141 aa, Glycine max
  unsure (1)..(141): unsure at all Xaa locations
  Clone ID: PAT_MRT3847_12673C.1.pep
LVLAPTLLDALDQISEPKRPSDKPLRLPLQDVYQIGGTETVPAGRVETGALKPGMEVTXAPTGLTTEVKSAEMHHESPTEAHPVDNAALNAKNAAAKDLKRGYDASDSQDDPAKEAANFTAQSIIMNHPGXIGNGYAPDPD

SEQ ID NO: 172452 - protein, 89 aa, Glycine max
  Clone ID: PAT_MRT3847_126740C.1.pep
DDFTFSHAFGKKRRSWGAVTNMEGAEDNELKEVRKYYPQSPDGIDQAGRAENTERLVGVDSTKQLRVTTLARYCQYHARESERTLAGKK

SEQ ID NO: 172453 - protein, 122 aa, Glycine max
  Clone ID: PAT_MRT3847_126741C.1.pep
TRLVDLKLKSDSEKIAALRRCVDVRNDSFSRTKSAPNMKGNKKSDTSQTLVSYQDKLAAGSLRREQECVMCLSEEMSVVFLPCAHQVVCPECNELHEKQGMKECPSCRAPIQRRIHARFARH

SEQ ID NO: 172454 - protein, 56 aa, Glycine max
  Clone ID: PAT_MRT3847_126742C.1.pep
LFMPLLRHNRLKYRALFLHTEATAITQGPPDFSIIFQLYNGARGSKDSCHTHTLFI

SEQ ID NO: 172455 - protein, 50 aa, Glycine max
  Clone ID: PAT_MRT3847_126743C.1.pep
VFRFGELLIRHNRARMKNIWPLENVLFNVPGLPMAHFIPPAKIFAHINSP

SEQ ID NO: 172456 - protein, 41 aa, Glycine max
  Clone ID: PAT_MRT3847_126744C.1.pep
FRAQTRSNRDSELQLVKKVIEINHHHPPINKTLSDVMTKKT

SEQ ID NO: 172457 - protein, 46 aa, Glycine max
  Clone ID: PAT_MRT3847_126745C.1.pep
NIFIILSSFIQVFLSFFVVDSHMPLISIFLNFLLYYYLTDCNISFK

SEQ ID NO: 172458 - protein, 54 aa, Glycine max
  Clone ID: PAT_MRT3847_126746C.1.pep
EMVTKMIKDKIKTEDQQTEKEMSRWEQRPRKVYIIGNPDIQRHRRTNSVPAMDA

SEQ ID NO: 172459 - protein, 99 aa, Glycine max
  unsure (1)..(99): unsure at all Xaa locations
  Clone ID: PAT_MRT3847_126747C.1.pep
KLPVAEDVRDDDMDDDDEDDDDHDEDDKEDHALSGAEGSKPNKSEKKNPKAMVKLGLKPGTGGXEVTIQKTKNILFFIFQPGGFKKPNSENHVIFGGAK

SEQ ID NO: 172460 - protein, 510 aa, Glycine max
  Clone ID: PAT_MRT3847_126748C.1.pep
MFFNQKIVLFKSFALMGTSNLLLFFSLMSLCAMAASKVVLIGNNITLSFDDIEANFAPAVKGSGKYGVLYLAEPLDACAELTNKVEQLPNASSPFALVVRGGCSFEEKVGLAQKAGFKAVIVYDNEEGGILVAMAGNSAGIRIHAVFVSKASGEILKKYAGLTNVEIWLIPTFENSAWSIMAISFISLLAMSAVLATCFFVRKHRIRRERPRASLVREFHGMSSRLVKAMPSLVFTSVLEDNCTSRTCAICLEDYCVGEKLRILPCCHKFHAACVDSWLTSWRTFCPVCKRDARTGLTDPPPSESTPLLSSTPASMASSVLSSARSSLASSSAIQIARTASMASSALPSARSSLASSSAIQIARTASMASSALHSARSSLASSSAIQISRAASQTPSVSRNHSIASTPYVQPSLRSSYHQSPSLSISRSSVDLRNASQRSLASHLNSPCSMGYPSLSSLNSRYMSPHIPSPSNASVSYMGSSSHQQHPLRYSESAASFSPFASTHSLPEC

SEQ ID NO: 172461 - protein, 88 aa, Glycine max
  unsure (1)..(88): unsure at all Xaa locations
  Clone ID: PAT_MRT3847_126749C.1.pep
ISTPSPTTIHKAYSVIGSVFSIIDNYRHRIHWICDMLNTCPSYTFVLHRAFCSRQVFTANPXTFVQHIFKTNFPVYPKGLTLNRTLGD

SEQ ID NO: 172462 - protein, 56 aa, Glycine max
  Clone ID: PAT_MRT3847_12674C.1.pep
AENTLSILRLSRAYIITLDYIMLKYVLHAETILDILITCMPGTLQKGHDARTPLTL

SEQ ID NO: 172463 - protein, 124 aa, Glycine max
  Clone ID: PAT_MRT3847_126750C.1.pep
PRVRAASQTPSVSRNHSIASTPYGGPSLRSSYHQSPSLSISRSSVDLRNASQRSLASHLNSPRSMGGPSLSSLNSRYMSPHIPSPSNASVSYMGSSSHQQHPLRYSESAASFSPFASTHSLPEC

SEQ ID NO: 172464 - protein, 1000 aa, Glycine max
  unsure (1)..(1000): unsure at all Xaa locations
  Clone ID: PAT_MRT3847_126751C.1.pep
MASAASGATGWYRGRVKAVPSGDCLVIVAISSTKPGPLPEKTITLSSLIAPRLARRGGVDEPFAWESREFLRKLCXIGKEVTFXCDYNVPSISRDFGTVFLGDKNVAMLVVSLGWDKVREHIVLNCXVQQKLAELGTVXEQAKQEAXGSIFRRTSSPDEAIRNLPPSAIGDSSNFNARALLDANKGIPMEGIVEQARDGSTLRVYLLPEFQFVQVFVAGIQAPQMGRRAVPESVAEPEVTADATNGDVPGEPRAPLTSAQRLAASTSALASASAETAADPFAHEAKFFTEIRVLNRDVRIVLEGVDKFNNLIGSVYYPDGDSAKDLALELVENGFAKYVEWSANMMEEEAKRKLKTSELQAKKXRLKIWXNYVPPATNSKAIHDQNFTGKEVEIVGRKCITVAESSGPRWRRKTVPGGKRTSRERRQVLDATRDEKPAPYAREAKEFLRRRLIGRQVNVQMEYSRKVSPTDGSVVPSAASDSRVMDFGSVFLLSGAKVDNDDAPSSAPPAGSQQNGVNVAELIVGRGFGTVIRHRDFEERSNYYDALLAAESRAISGRKGTHSAKDPPVMHITDLTTASAKKAKDFLPFLHRSRRIPAVVEYVLSGHRFKLLIPKETCSIAFSFSGVRCPGRDEPYSDEAIALMRRKIMQRDVEIEVETVDRTGTFLGSLWESRTNVAITLLEAGLAKLQTSFGSDRIPDFHLLEQAEQSAKRQKLKIWENYVEGEEVSNGAPVENKQQEVLKVTVTEVLGGGKFYVQPVGDQKIASIASIQQQLASLNLKDAPVLGAFNPKKGDIVLCYFHADKSWYRAMVVNTPRGPVESPNDLFEVFYVDYGNQEVVPYSQLRPVDPSVSAAPGLAQLCSLAYIKIPNLEEDFGQEAAEYLSELTLNSGKEFRAKVEEKDTSGGKVKGQGTGAILAVTLVAVDAEISVNAAMLQEGLARTEKRNRWDRKDRQTALDNLENFQDEAKTSRRGMWQYGDIQSDDEDTAPPPRKTGGGRK

SEQ ID NO: 172465 - protein, 511 aa, Glycine max
  Clone ID: PAT_MRT3847_126752C.1.pep
MASTASGATGWYRGRVKAVPSGDCLVIVAISSTKPGPLPEKTITLSSLIAPRLARRGGVDEPFAWESREFLRKLCIGKEVTFRVDYNVPSISRDFGTVFVGDKNVAMLVVSQGWVKVREQGQQKGEASPYLAELLRLEEQAKQEGLGRWSKVPGAAEASIRNLPPSALGDPSNFDAMTFLNANKGLPMEAVVEQVRDGSTLRIYLLPEFQFVQVFVAGIQAPQMGRRAAPESVVEPELTSDDTNGDVPGEPRAPLTSAQRLAVSTSAETAADPFAHDAKFFTEMRVLNRDVRLVLEGVDKFSNLIGSVYYPDGESAKDLALELVENGYAKYVEWSANMMEEEAKRKLKTAELQAKKDRLRMWTNYVPPPSNSKAIHNQNFSGKVVEVVSGDCIVVADDSIPYGSPLAERRVNLSSIRCPKMGNPRRDEKPAPYAREAKEFLRTRLIGRQVNVQMEYSRKVSPTDGSVVPSAASDSRVMDFGSVFLLSGAKVDNDDAPSSAPPAGSQQNGVE

SEQ ID NO: 172466 - protein, 95 aa, Glycine max
  Clone ID: PAT_MRT3847_126753C.1.pep
IPSWLVDWISEEGGYFIGNLRPAHMDWRFFSLVNLWAIVSSLGTTRQNQGILILIEVNWDDIVAQMPLKIWYPALVGVVWRITSGCVPITTYGSF

SEQ ID NO: 172467 - protein, 81 aa, Glycine max
  unsure (1)..(81): unsure at all Xaa locations
  Clone ID: PAT_MRT3847_126754C.1.pep
MALQRLILTHVGAAEAGRAILLTLARPXLLRDRFGSLVAVIIQPALFIGPSAGVQLLDIYWKDEHRVMGTSQVSTGAERDR

SEQ ID NO: 172468 - protein, 56 aa, Glycine max
  Clone ID: PAT_MRT3847_126755C.1.pep
CYQSTNQLMTSLLAGMWKTSLHSHLDPLSGNWSFELLKLVYMTYDPITNQDFVAYN

SEQ ID NO: 172469 - protein, 497 aa, Glycine max
  unsure (1)..(497): unsure at all Xaa locations
  Clone ID: PAT_MRT3847_126756C.1.pep
GPDSRVDPRVRFISLSFCSSIVPSRIPHDKSNKTHSHHQPTFPLIRFGISAPAVKKRHWKKGEFPATSQPSFPNDTRRKTPLKNLKKKFDKKNDAKAWVNTVTESLSERIHNKHWLQALQVFDMLREQTFYQPKEGTCMKLIVLLGKSGQPHRAHQLFTTMIEEGLEPTPELYTALLAAYCRSNMIDEAFSVLNEMKKLPLCQPDVFTYSTLIKVCVDAFKFDLVQLLYEEMAERSITPNTVTQNIVLGGYGKAGMFDQMEKVLSSMLQSTTCKPDVWTMNTIISVFGNMGQIDMTEKWYEKFRYFGIEPETRTFNILIGAYGKKXMYDKMSSXMEYMRKLQFPWTTSTYNNVIEAFADAGDAKHMECTFDQMRAEGMKADTKTLCCLINGYANAGLFHKVISSVRLAGKLEIPENITFYNAVLSACAKAEDLMEMERVFKRMKDSQCQPDDTTYTIMIEAYRKEGMNDKIYYLEQEKQTMMTDDKKASQFENEILI

SEQ ID NO: 172470 - protein, 55 aa, Glycine max
  Clone ID: PAT_MRT3847_126757C.1.pep
MIRKVASLILIKQGKRASTWMMMIRKFCCPSNSHLQGNSGSFDQNVIKKIVVELI

SEQ ID NO: 172471 - protein, 79 aa, Glycine max
  Clone ID: PAT_MRT3847_126758C.1.pep
FVNRGKRISGLLSKKSLFFQLGLFCTRHVYNLGKKLPRHFEREDLPFFFVFLAKIFLLKIFPPPLCLGFLANKKLWRGV

SEQ ID NO: 172472 - protein, 52 aa, Glycine max
  Clone ID: PAT_MRT3847_126759C.1.pep
ESISNSSQNRGAIKPKLIQHNQCNYMDWWIASFTVPPELYVVCMLVKPNPLV

SEQ ID NO: 172473 - protein, 78 aa, Glycine max
  Clone ID: PAT_MRT3847_12675C.1.pep
AKSNNMNRKKKQRAICCQQHKPISSHIINLRERTEHTFCCSESEAGLRLIICSELFVVWQRFVGRKRVVLFCRERCLV

SEQ ID NO: 172474 - protein, 84 aa, Glycine max
  Clone ID: PAT_MRT3847_126760C.1.pep
INFSNFPGPFWFFPNPFFPRLGFGVLKFKCLLGVNSPSLTQFFFSKGFFFFCFEINNAPPPNFPFPIRDLNPFADPPIRNFNWF

SEQ ID NO: 172475 - protein, 211 aa, Glycine max
  Clone ID: PAT_MRT3847_126761C.1.pep
KPSNPLTYSRSNMDDGGGPSISVVYFDGHTEATVGEVTVDSSFNFKKFVSFLSQKIGISPHKLSVYLATFGTDRRIPISGKVNFAAVARDNAAASSFFFVERTKRPRSRKNKSRSKGNSRNNSNAPRENVVLLRRNDTVAGHVLGRAEYEKWVRDLQMERERYWLSMGMRMLCEECLTGTDGGFHWCVYDAVTVGFRSPAGPVARPGKGSG

SEQ ID NO: 172476 - protein, 82 aa, Glycine max
  Clone ID: PAT_MRT3847_126762C.1.pep
LTALTVFRTYHTPGIPGPHYWARAACWGGLGVILCGRLLLFIAIPPNLSFLRALSHALLLQAAFISPLLILKVGGCPPPPPQ

SEQ ID NO: 172477 - protein, 44 aa, Glycine max
  Clone ID: PAT_MRT3847_126763C.1.pep
TLLFYILKQNIRLFFRILDFEFHPFDDMAFAFSLFLSRLQVFVS

SEQ ID NO: 172478 - protein, 69 aa, Glycine max
  Clone ID: PAT_MRT3847_126764C.1.pep
FKDPCCIKILPPFEKPKKVIFLSFWAKGHFNSLFPQGGFKPLFPSFGVFDIPPSGFKKKKRWWSFGSKP

SEQ ID NO: 172479 - protein, 152 aa, Glycine max
  Clone ID: PAT_MRT3847_126765C.1.pep
MSLVGKISTEIGVHATAAKWFNLFATQLHHVQNLTDRVHETKLHHGDDWHHNESIKHWTCTIDGKITTCLESIESVDEPNKTITYKLFGGDIGHKYKVFKLIFQAIDTDHGGVIIKWTVEYEKIDENVDPPYGYIEYLHSGSKQIDGNLLKP

SEQ ID NO: 172480 - protein, 234 aa, Glycine max
  Clone ID: PAT_MRT3847_126766C.1.pep
LLLTMEDVEDKIPPVTSSKITEETTLAEHVGDKLPSESSPEAEETPLAELVGDRLPSEASPKIAEETPLAEHVGDKLPSQFSSDIVEDTPLAEHAGDKLPSEFSSEIVEETPLAEHVGDNQPSASSSKIDEETPPAEHVTDNSESSSKTAEESPLAEHVVDKLPSESTTKIADEMPLADPPEENTEVINPPGNQSSTEAPTIPLSNGKMEPGTHLPVDEFSELAVLPNASDDQT

SEQ ID NO: 172481 - protein, 64 aa, Glycine max
  Clone ID: PAT_MRT3847_126767C.1.pep
GKKPPPPGDSFKNTPLFPPPPPGEGSKKTTFPVAPGGTILAAEKPSPNTGGNRNLRTQWPNKEK

SEQ ID NO: 172482 - protein, 74 aa, Glycine max
  Clone ID: PAT_MRT3847_126768C.1.pep
ADSIGAHILTYNIWVHQTTLLKSALFFHSEACLDRKSTTFNCVESLLSMSYLRSHLRMGSKGNQLLENLFQPHL

SEQ ID NO: 172483 - protein, 40 aa, Glycine max
  Clone ID: PAT_MRT3847_126769C.1.pep
AHGTFQIMGTCHSDYGIETYVLVPAATQLFYMNRKVDCYC

SEQ ID NO: 172484 - protein, 65 aa, Glycine max
  unsure (1)..(65): unsure at all Xaa locations
  Clone ID: PAT_MRT3847_12676C.1.pep
MYNELLRRXMFIHVSHYQXAPLKXSQFSXXTKHXVPFGQVLKKXKGGNHVVXGCFGXXMEXFPFK

SEQ ID NO: 172485 - protein, 54 aa, Glycine max
  Clone ID: PAT_MRT3847_126770C.1.pep
IIIINDTVPGAISVRHQRIEPTAKRNTADRLSRRSRRWRYSGRVRCWRLWITWT

SEQ ID NO: 172486 - protein, 131 aa, Glycine max
  unsure (1)..(131): unsure at all Xaa locations
  Clone ID: PAT_MRT3847_126771C.1.pep
MEYAPNVYVLSKIISLGELFGTRKFVYFPNPPNRLFEDMVKCISAIFCKLVDPFIKNPGLFXPVNPCFKKXAFFFGDQENIWSPGLRKNSPFNGRLDNPFHLEGPKDFIGPTTPMVEVSWFSNDNQKLGFP

SEQ ID NO: 172487 - protein, 103 aa, Glycine max
  unsure (1)..(103): unsure at all Xaa locations
  Clone ID: PAT_MRT3847_126772C.1.pep
XXSYXXSXFVLXXXXXXXXVLAXHXGCPXXFFXXVXXXXSRLXGPPXXXSXXXEXRXXXXXXXXCRVXTXKPXXTRXXXXPXXXXDVXSDXGXXCXQAXXXXX

SEQ ID NO: 172488 - protein, 178 aa, Glycine max
  unsure (1)..(178): unsure at all Xaa locations
  Clone ID: PAT_MRT3847_126773C.1.pep
RQIQTELELLASLRNRNLMSLRAYVREPDGFSLVYDYASTGSLADVLNRVRENELPFGWEVRLTLAGGVVFALQXRYTDKSDIFSFGMILGVLLTGKDPTDPFFGEAASGGSLGCWLRHLQQAGEAHEALDKSMLGEEGEEDEMLMAVRIAAACLSDMPADRPSSDELVHMLTQLHSF

SEQ ID NO: 172489 - protein, 73 aa, Glycine max
  unsure (1)..(73): unsure at all Xaa locations
  Clone ID: PAT_MRT3847_126774C.1.pep
AWHPRTYSPRVYSASEGXYEXSHXXTDTLXXKNGLFKNQXXFXIXXNXXXRSXXSXXIGRFXXCXQGGLXDHP

SEQ ID NO: 172490 - protein, 143 aa, Glycine max
  Clone ID: PAT_MRT3847_126775C.1.pep
PALVQLFKFQSLTASVQVVWLKVELCRLMEEKRSAILRAEELETALMEMVKEDNRLQLSARVEQLEQEVAELQQVIADKKEQEAAMLQVLVRLEQDQKVTEDARRRSEQDLAAHKFEVHVLQVWVLFYMFHVLLSRHPFNAIA

SEQ ID NO: 172491 - protein, 36 aa, Glycine max
  Clone ID: PAT_MRT3847_126776C.1.pep
RTKDQKSIPVSLKSLEVNYTKFISFLLRRLTLKDFP

SEQ ID NO: 172492 - protein, 177 aa, Glycine max
  Clone ID: PAT_MRT3847_126777C.1.pep
ERERERERESCSEDPYLAAEGVNHAQRAISNAHGPNEHLKGVALRMLGLCLGKQAKVASSDFERSHLQSKALESLVAAIRLEPNNSDLIFELAVQYAEHRNLPAALRSARHFFNKTGGSVSKSWRLLALILSAQHRFSEAEVVTDAALDQTARWEQGPLLRLKAKLMISQSRPMDAI

SEQ ID NO: 172493 - protein, 53 aa, Glycine max
  Clone ID: PAT_MRT3847_126778C.1.pep
GRVKKTGTPYRGIWGKVPGPHGNSGIVQEKFKSNFPPRSMGARVKVFMYPTKI

SEQ ID NO: 172494 - protein, 93 aa, Glycine max
  unsure (1)..(93): unsure at all Xaa locations
  Clone ID: PAT_MRT3847_126779C.1.pep
VVTFSNTIVHIEPYMNSRFQLLSTTTNGRFCSRGXDLSKVKVKVACAAFVLSSSYTPTSLLVSGTQIYRCIIAVYSDRHTYNENIHTYIYMYV

SEQ ID NO: 172495 - protein, 51 aa, Glycine max
  Clone ID: PAT_MRT3847_12677C.1.pep
EIKSILSPPHGGGYLFPKKRKGQRAKLFKNINRGGAPNLKKSNLPYYWGEG

SEQ ID NO: 172496 - protein, 57 aa, Glycine max
  Clone ID: PAT_MRT3847_126780C.1.pep
GKLDPLKWMIHNLGIIIYNIVLFICICKDSRKFLSSPLFFFFFFYFLIFIFFFSDAW

SEQ ID NO: 172497 - protein, 57 aa, Glycine max
  Clone ID: PAT_MRT3847_126781C.1.pep
SQGIFSQTVRVRKVHHLASERRVHVSVPHHDHLRILSAPCRQKFEPRKTPSRYKYKQ

SEQ ID NO: 172498 - protein, 47 aa, Glycine max
  unsure (1)..(47): unsure at all Xaa locations
  Clone ID: PAT_MRT3847_126782C.1.pep
PPFFFKHFKWFFSFXVARQPTIRIYMLGTWKLRHSHTPFSRCQQFDP

SEQ ID NO: 172499 - protein, 107 aa, Glycine max
  Clone ID: PAT_MRT3847_126783C.1.pep
MAKGRKFPTTTRTDRFLGMGTYSSQASAATDLSEFREEDVWSTSEDRDRDVNAYPGEWEALAPPRRRSSRELQGHRHVGGLSLAFEDGSGGAGTRIVPHQYRAQHDA

SEQ ID NO: 172500 - protein, 60 aa, Glycine max
  unsure (1)..(60): unsure at all Xaa locations
  Clone ID: PAT_MRT3847_126784C.1.pep
TSVDESSDXFGTVQIPSPWKPVLEDSSTLQIFFDYYAITKPPLSKEVCTCVCFYDCIFNV

SEQ ID NO: 172501 - protein, 283 aa, Glycine max
  Clone ID: PAT_MRT3847_126785C.1.pep
MSGKGEILISRRQWNEEQLEENLEECHGTVRDAAITMGTHVSPLREYDKFQRELERRIWHKAFTRQPDRRINVALFKEFYANLYDPEDKSPRDPWGFGARGALLSLFKVLLYTPRPSGACFQAMHSRGPSDASAPSSSTPAPASTSAPPPPAPSGTSAQNIDVLVPMLQSLHHGLCLAMQSIHDLAQHRPIISMEDFMAQVAWPGVHPSPVGGGEAPTAQEPQPEPEATPAETPEVTLAATPMDVTEYTDYAADMAAVQSTWDPWPTSARDIHLPAQDALSSP

SEQ ID NO: 172502 - protein, 81 aa, Glycine max
  unsure (1)..(81): unsure at all Xaa locations
  Clone ID: PAT_MRT3847_126786C.1.pep
DIQSRSRLAXXSSTXAQFVXGKXFPYDILGAGSPSSERFXPEREXXKXPKTXDTRLRPXIDPQYXEVXAQMXXXLFNLSLD

SEQ ID NO: 172503 - protein, 356 aa, Glycine max
  Clone ID: PAT_MRT3847_126787C.1.pep
MVNNMIVQIHHGRLSENDSRRYFQQLIDGVDYCHSKGVYHRDLKPENLLLDSLGNIKISDFGLSAFPEQGVSILRTTCGTPNYVAPEVLSHKGYNGAVADVWSCGVILYVLLAGYLPFDELDLTTLYSKIERAEFSCPPWFPVGAKMLIHRILDPNPETRITIEQIRNDEWFQRSYVPVSLLEYEDVKLDDVNAAFDDAEEPRADQQCDNDDMGPLMLNAFDLIILSQGLNLATIFDRGQDSVKYQTRFISQKPAKVVLSSMEVVAQSMGFKTHIRNYKMRVEGVSANKTSYFSVILEIFEVAPTFYMVDIQKAAGDTGEYLKFYKNFCSNLEDIIWKPPHEASKSRISKTKSKRR

SEQ ID NO: 172504 - protein, 73 aa, Glycine max
  unsure (1)..(73): unsure at all Xaa locations
  Clone ID: PAT_MRT3847_126788C.1.pep
YLMRSGLMEAPERTDNVKTAGSKELDPXDPGWYYVKXASMXKKDQLXRGGLGVEAWQRNYGGSMKNGRRTSCL

SEQ ID NO: 172505 - protein, 86 aa, Glycine max
  Clone ID: PAT_MRT3847_126789C.1.pep
WLTCNKVVEVLRQGADHSTHAAVASMLKYILCITSSMLFSEGLSYSVDDQTLTDAMSAFANASESSAMTDTYLTLIRATKTSCFFE

SEQ ID NO: 172506 - protein, 87 aa, Glycine max
  Clone ID: PAT_MRT3847_12678C.1.pep
STWLVSPVSIQSVIRIRSVTLSISNMSLHLTLQLAERPTQHPSKQPDPNFSRTRDPGHSGASNIRVESRLLLPIIASTNHHYPNHRM

SEQ ID NO: 172507 - protein, 52 aa, Glycine max
  unsure (1)..(52): unsure at all Xaa locations
  Clone ID: PAT_MRT3847_126790C.1.pep
VGVGGFFFFFFFFFFFFFFFFFFFFFTKRGDLKILRXIPPSKRSGEKLGLIF

SEQ ID NO: 172508 - protein, 463 aa, Glycine max
  Clone ID: PAT_MRT3847_126791C.1.pep
MASSFLSAASHAVSPSCSLSTTHKGKPMLGGNTLRFHKGPNSFSSSRSRGRISMAVAVNVSRFEGIPMAPPDPILGVSEAFKADNSDVKLNLGVGAYRTEELQPYVLNVVKKAENLMLERGDNKEYLPIEGLAAFNKATAELLLGADNPAIKQQRVATVQGLSGTGSLRLGAALIERYFPGAKVLISAPTWGNHKNIFNDASVPWSEYRYYDPKTVGLDFEGMIEDIKSAPEGSFILLHGCAHNPTGIDPTPEQWEKIADLIEEKNHIPFFDVAYQGFASGSLDEDAASVRLFVARGIEVLVAQSYSKNLGLYAERIGAINVISSSPESAARVKSQLKRIARPMYSNPPVHGARIVADVVGNPVLFNEWKAEMEMMAGRIKNVRQQLYDSITSKDKSGKDWSFILKQIGMFSFTGLNKNQSDNMTNKWHVYMTKDGRISLAGLSLAKCEYLADAIIDSYHNVS

SEQ ID NO: 172509 - protein, 39 aa, Glycine max
  unsure (1)..(39): unsure at all Xaa locations
  Clone ID: PAT_MRT3847_126792C.1.pep
ATRFXLHFHSEKLXFLFLALIYSKHTIDIYFNVFIIKMS

SEQ ID NO: 172510 - protein, 177 aa, Glycine max
  Clone ID: PAT_MRT3847_126793C.1.pep
AASVRLFVARGMEVLVAQSYSKNLGLYAERIGAINVVSSSPESAARVKSQLKRIARPMYSNPPVHGARIVADVVGNPVLFNEWKAEMEMMAGRIKNVRQQLYDSITSKDKSGKDWSFILKQIGMFSFTGLNTNQSDNMTNKWHVYMTKDGRISLAGLSLAKCEYLADAIIDSYHNVS

SEQ ID NO: 172511 - protein, 179 aa, Glycine max
  Clone ID: PAT_MRT3847_126794C.1.pep
MASSVLSAASHSVSPSCSLSTTHKGKPMIRDNTLGFHRGPNSFSSSRSRGRISMAVAVNVSRFEGIPMAPPDPILGVSEAFKVDNSDVKLNLGVGAYRTEELQPYVLNVVKKAENLMLERGDNKEYLPIEGSAAFNKGTAELLLGAEHPAIKQQRVATVQGLSGTGSLRLGAALIERYF

SEQ ID NO: 172512 - protein, 121 aa, Glycine max
  Clone ID: PAT_MRT3847_126795C.1.pep
PSPKRGGFFSSPSLTPPHHTTHHLLTIPPTTFFLTPPPQSLSPAVSHTTALPCCPASPPAAYRFGLLHHPLPRPMGCLRRPVSINLIRALNTSFLLSCKIAALDGDRTLDSSIEIARRMLS

SEQ ID NO: 172513 - protein, 231 aa, Glycine max
  unsure (1)..(231): unsure at all Xaa locations
  Clone ID: PAT_MRT3847_126796C.1.pep
MASSFLSAASHAVSPSCSLSTTHKGKPMLGGNTLRFHKGPNSFSSSRSRGRISMAVAVNVSRFEGIPMAPPDPILGVSEAFKADNSDVKLNLGVGAYRTEELQPYVLNVVKKAENLMLERGDNKEYLPIEGLAAFNKATAELLLXADNPAIKQQRVATVQGLSGTGSLRLGAALIERYFPGAKVLISAPTWGNHKNIFNDASVPWSEYRYYDPKTVGLDFEGMIEDIKVRL

SEQ ID NO: 172514 - protein, 247 aa, Glycine max
  Clone ID: PAT_MRT3847_126797C.1.pep
IRLEIFFDEMRFVITKNPINLLNSQGSLVLFRVPSVARNFLHPSSSKWTPRSSNPLRFSFSSLRVSVSCASSSSTVYGGWDYLGSSDAPGESNALRNFLVSIGIDDRKNVFVFLLGLVCALAISRVKVSSIVILPASALVFAVGFSVGFFRTGTFGEVRAGGSKRREKEENSNSKLSSEKLRSLVEFFDELDVVVDSLKSDVQSAIRDNKIRVGDFYGYVEVTDKIKISAKNARNVVRALIDNEDKP

SEQ ID NO: 172515 - protein, 228 aa, Glycine max
  unsure (1)..(228): unsure at all Xaa locations
  Clone ID: PAT_MRT3847_126798C.1.pep
PRVRDKPRKILPGVVGRATIGSLIILARAVTLALSHLHSQQGFPEALLVQLLKVMLHSDVEARVGAHLIFSILLFPSSFHTNEISSLRSRYLGQHNKRHSHAPSVSASASITALLEKLRRNRNTKVENHGNXCHDQERDIVAEDWKQGCGLKNSPNFYKLTSIIDKATGSPSLTDTEPYVMKLTEDQMAQLLSAFWIQANLPDNLPSNIEAIAHSFILTLIGLRIKNL

SEQ ID NO: 172516 - protein, 115 aa, Glycine max
  Clone ID: PAT_MRT3847_126799C.1.pep
KTFFMLADQIISVVFFIHSKSLLHRYIKPDNFLMVLGRLANQFYAIDFGLANKYIYSSTHQHIPYSENNNFTETSRYAIMNTHLVIEQSIIDDLDSLDYVLTYFLRGILSWLFLK

SEQ ID NO: 172517 - protein, 86 aa, Glycine max
  Clone ID: PAT_MRT3847_12679C.1.pep
KYTQLYINGDIDESISGRTYVTIDPRKEEASAREREGEREGIKIAGQATRKACDSGPWPRSPGSERARIMTKCADLDDENIEELAG

SEQ ID NO: 172518 - protein, 32 aa, Glycine max
  Clone ID: PAT_MRT3847_1267C.1.pep
HYVFCKFCLRKQKSFILDQLLCLKKQGGIIIS

SEQ ID NO: 172519 - protein, 75 aa, Glycine max
  Clone ID: PAT_MRT3847_126800C.1.pep
NRPVLVWFEDFAIKSFNSFFLNSFKSGGFNFKFNLETNPKMAFKKSGQTLSNALIFFSPTMDRLGGPMAPVAILD

SEQ ID NO: 172520 - protein, 135 aa, Glycine max
  unsure (1)..(135): unsure at all Xaa locations
  Clone ID: PAT_MRT3847_126801C.1.pep
DLQGKAENKQALRRNLGLSSTDVRRPLVGCITRLVPQKGVHLIRHAIYLTLELGGQFVLLGSSPVPHXQNEFEGIANHFQNHDHIRLILKYDESLSHVIYAASDMFIIPSIFEPCGLTQMISMRYGAIPIVRKTG

SEQ ID NO: 172521 - protein, 109 aa, Glycine max
  Clone ID: PAT_MRT3847_126802C.1.pep
LVTKSDVYSFGVVLFELISSIRPSSLEGTDDDTLAQYAKRKILNNQLNEVVDPSFRFGSDKNIMEMITAVAELAFQCVQCPKEFRPSMKQLLQTLQGIREGTWGFNQIT

SEQ ID NO: 172522 - protein, 306 aa, Glycine max
  Clone ID: PAT_MRT3847_126803C.1.pep
GLHVIHIAAEMAPVAKVGGLGDVVSGLGKALQKKGHLVEIVLPKYDCMQYDRVCDLRALDVLIDSYFDRQLYKNKIWEFARAGLPVYFIEPHHPDKFFWRGKFYGEHDDFRRFSFFSRAALEFLLQAGKKPDIIHCHDWQTAFIAPLYWDIYAPKGLNSARICFTCHNFEYQGTAAASELESCGLESHHLNRPDRMQDNSAHDRVNSVKGGIVFSNIVTTVSPTYAQEVRTSEGGHGLHSTLSAHSKKFIGILNGIDTDAWNPATDAFLPVQYNATDLQGKAENKQALRRNLGLSSTDVRRPLVII

SEQ ID NO: 172523 - protein, 63 aa, Glycine max
  Clone ID: PAT_MRT3847_126804C.1.pep
NSLGWEHPQQPGNRQTQIKTLIENIKDPFYKILGGKKLKFSKSLKVVGTHNKPLGKLNFKFFF

SEQ ID NO: 172524 - protein, 52 aa, Glycine max
  Clone ID: PAT_MRT3847_126805C.1.pep
HHIMAWPAVPCPRTLHETTPSLVVRRHHLHVLLLVLHPDQEADAHLLGVVHG

SEQ ID NO: 172525 - protein, 53 aa, Glycine max
  Clone ID: PAT_MRT3847_126806C.1.pep
PYLLTLTPKLCWLHSTLNTESGEYILMLLKSFTDEDCGLLATVRYGKGHIATV

SEQ ID NO: 172526 - protein, 72 aa, Glycine max
  Clone ID: PAT_MRT3847_126807C.1.pep
LESVLSLISVPDFFVARLLVAWHCHAYDMFPLRMNTGYGARTPEVKCASWLHAVEAHNIFGFDTIPEECLES

SEQ ID NO: 172527 - protein, 104 aa, Glycine max
  unsure (1)..(104): unsure at all Xaa locations
  Clone ID: PAT_MRT3847_126808C.1.pep
LLHPHALTSSVRSPSQRMLDSAMPNLLVCXGTEAXDIDVSPMFRSLAITVRIGAGADGSKIHPADASYREAANVFXKLKTNTDYLPLNGDGFIQSISSKWYSPN

SEQ ID NO: 172528 - protein, 209 aa, Glycine max
  unsure (1)..(209): unsure at all Xaa locations
  Clone ID: PAT_MRT3847_126809C.1.pep
MYDWLKLEDINASLYLVKCDSVLNRVTHKQGEKQTKMTKCCNGICLFFVLICVIWAPMLMYSSGNPTNIANPIKDASYQVDIKTVSGRLNLYQTTLCERLRWDLLNSNANPDPYGYLDAYNKNDIQLICCQADASTLWLVPLVVRTRVIHSLEWNTDMEIFFTWIFSRDRPKWKEVVKYDKAGDPKYLPTQADVQRXLNGFMNKLRIYN

SEQ ID NO: 172529 - protein, 44 aa, Glycine max
  Clone ID: PAT_MRT3847_12680C.1.pep
PIKLYPSKDLLNSTSYYTLSASAMTRAYSLILHSNTLPTINLAI

SEQ ID NO: 172530 - protein, 78 aa, Glycine max
  Clone ID: PAT_MRT3847_126810C.1.pep
NNFFTHPFLTDFFLWGGPPPSFYIQKKELGDGGATFFCGNFFLKKINNFPFNFPPARGFFFGKSFFFRKKKKKGGVFF

SEQ ID NO: 172531 - protein, 51 aa, Glycine max
  Clone ID: PAT_MRT3847_126811C.1.pep
IGLDARPEYVVNSIFELFIELLATEEHCDLGVVYALHIKVHAAHDSRKYGG

SEQ ID NO: 172532 - protein, 88 aa, Glycine max
  Clone ID: PAT_MRT3847_126812C.1.pep
DWRETEESFPPMIPKDGPQLCHFQLDVWTCSPHTHSAFSALFFLPQCCTGCWSPLVPFFHFFNRFLLLVIAMIFFQWGKMGKNKEKGH

SEQ ID NO: 172533 - protein, 173 aa, Glycine max
  unsure (1)..(173): unsure at all Xaa locations
  Clone ID: PAT_MRT3847_126813C.1.pep
NRSLCEKKEKRMLPPQQQSRVGGLQTSLSLVSSDPRLSPEEPRSNSDNLRESPTESASSRETWPTADAIAAKKMENGKAEMDCPDQSVIRCVSSADKISLQDIARERVDIICEKMHHLPDEFLEELKNGLRVILEGGNGSQHREEFFILHKLVQSRSDLTAQTLXRAHRVQLE

SEQ ID NO: 172534 - protein, 142 aa, Glycine max
  Clone ID: PAT_MRT3847_126814C.1.pep
YSVREQIRERACSEQLKHLKEARNEYREEVIDCVRHCAWYRISLFSRWKQRGMYAMCMWVVQLLLVLSNMDSVFIYIPEYYLEALVDCFHVLRKSDPPFVPSTIFFKEDFFIVTFVVTHFNDPKKSSADLISSVYIGAIPGV

SEQ ID NO: 172535 - protein, 60 aa, Glycine max
  Clone ID: PAT_MRT3847_126815C.1.pep
LRVEIRGLNIQRVQQTKQISHRVREHKYINLFLNFNYSASPPSFELTHETFELACSNSKS

SEQ ID NO: 172536 - protein, 44 aa, Glycine max
  Clone ID: PAT_MRT3847_126816C.1.pep
TSDGYYIIMANMYSFIGRWEEAENVRRTMKERCSMGKKAGWSLL

SEQ ID NO: 172537 - protein, 51 aa, Glycine max
  Clone ID: PAT_MRT3847_126817C.1.pep
NGANNWVNFIKKSSPQSLIHTQFCSGLTNPLQFEIFSSFHFTNLGIPFWQI

SEQ ID NO: 172538 - protein, 92 aa, Glycine max
  Clone ID: PAT_MRT3847_126818C.1.pep
FFRDRKKTPPPWPTPKDHLQPGKGPGGLKKKQNYNNCPPLNGRPKTRMPKKKAFLGFRGKNKNPLFGSSTPKKFLLTPGPPAAGPQKGGPNQ

SEQ ID NO: 172539 - protein, 64 aa, Glycine max
  Clone ID: PAT_MRT3847_126819C.1.pep
AINGGKASDGLQVSESSNDVDASTVNSDTSSGTVHSGSSWLIDHRARQLVLLLPYIPLGRLLPD

SEQ ID NO: 172540 - protein, 132 aa, Glycine max
  unsure (1)..(132): unsure at all Xaa locations
  Clone ID: PAT_MRT3847_12681C.1.pep
IINQQILTYXSKSYPQXTTAINXVQKSNQSPNHNIKKHVKWQLHMFNTRKLLLRNSKPIKMKVAKTGFQNHFFEFPIHHPQSLFLRHLEKPQEEVAKTGFRSGGTWICRRGVETALGDRKKKRFEKRNERRR

SEQ ID NO: 172541 - protein, 119 aa, Glycine max
  Clone ID: PAT_MRT3847_126820C.1.pep
FVGDLAFEGSKMAHPYMKCTGCFFITLGNMADDTINSEAFPHKLVQVGEIHEKVVLEFSQEEFLTDRSTHVRPTTTLVADGRTYLYAKVHDSSVSTIPGDYVIGVKLTTIHTMRAYGLN

SEQ ID NO: 172542 - protein, 100 aa, Glycine max
  unsure (1)..(100): unsure at all Xaa locations
  Clone ID: PAT_MRT3847_126821C.1.pep
PELSLEGKHNTLNTSALPYVNNVPHHENIIGCASSADVXDRYRHLRRYNAIYICGTDEYGTGTDTKVLVENCSPEEICDKYDAILKEVNNWFNVSSCEFG

SEQ ID NO: 172543 - protein, 72 aa, Glycine max
  Clone ID: PAT_MRT3847_126822C.1.pep
AGTQHKQLVLELREVGITKLLIVNWVSHLFFFSSGILKFLPLIGGVVCLESCQSDRLPPAIGLFYANVCAPI

SEQ ID NO: 172544 - protein, 518 aa, Glycine max
  Clone ID: PAT_MRT3847_126823C.1.pep
MAMAMALRRLSSSIDKPLRPLFNAGSLYYKSSLPDEAVYDKERPGVTWPKQLNAPLEVVDPEIADIIELEKARQWKGLELIPSENFTSVSVMQAVGSVMTNKYSEGYPGARYYGGNEYIDMAETLCQKRALEAFRLDPAKWGVNVQPLSGSPANFHVYTALLKPHERIMALDLPHGGHLSHGYQTDTKKISAVSIFFETMPYRLNESTGYIDYDQMEKSATLFRPKLIVAGASAYARLYDYERVRKVCDKQKAILLADMAHISGLVAAGVIPSPFDYADVVTTTTHKSLRGPRGAMIFYRKGVKEINKQGKEVLYDYEDKINQAVFPGLQGGPHNHTITGLAVALKQATTPEYRAYQEQVLSNSFKFAQALSERSYELVSGGTENHLVLVNLKNKGIDGSRVEKVLEAVHIAANKNTVPGDVSAMVPGGIRMGTPALTSRGFVEEDFVKVAEFFDAAVKIAVKIKGESKGTKLKDFLATIESSSTFQSEIAKLRLDVEEYAKQFPTIGFDKATMKHKN

SEQ ID NO: 172545 - protein, 38 aa, Glycine max
  Clone ID: PAT_MRT3847_126824C.1.pep
ITCHKSNQEIQIRRQRFLTNFLCNIFFPVTADDNVSEY

SEQ ID NO: 172546 - protein, 217 aa, Glycine max
  unsure (1)..(217): unsure at all Xaa locations
  Clone ID: PAT_MRT3847_126825C.1.pep
ASSPSLNAGSLYYKSSLPDEAVYDKERPGVTWPILLNASLEVVDPEIADIIELEKARQWKGLELIPSENFTSVSVMQAVGSVMTNKYSEGYPGARYYGGNEYIDMAETLCQKRALEAFRLDPAKWGVNVQPLSGSPANFHVYTALLKPHERIMALDLPHGGHLSHGYQTDTKKISAVSIFFETMPYRLNESTGYIDYDQMEKSATLFRPKLXGAGAS

SEQ ID NO: 172547 - protein, 154 aa, Glycine max
  Clone ID: PAT_MRT3847_126826C.1.pep
LSLYHFRDAILKGHTDRFCVLNADVCCSFPLEQMLRLFEEKDGEAVILGTRVANDAATNFGCIVSDTHSKRVLHYVEKPESHISNLINCGVYLFSTEAFFPSIKSAMKRRADRPRLLYYPSSDTLDSSYVARSGQDNDDDGEKTGSSVSTGLLS

SEQ ID NO: 172548 - protein, 83 aa, Glycine max
  unsure (1)..(83): unsure at all Xaa locations
  Clone ID: PAT_MRT3847_126827C.1.pep
WYLXTLPTSXFAXXVIQVASXLISSHNHCLKHGNGNECQDHSSKXLSHCLXXXXXXYDLKTPLDXAELLSISTKQPSNQEGXL

SEQ ID NO: 172549 - protein, 88 aa, Glycine max
  unsure (1)..(88): unsure at all Xaa locations
  Clone ID: PAT_MRT3847_126828C.1.pep
VHEHCNNQLYQHEHETLYQRXCQLNRYAKGSIPADEFFTIPEFAIHPLYQRLIHMADXSNLKDFAAHXSVSSAKASAQHKIELFAQGF

SEQ ID NO: 172550 - protein, 57 aa, Glycine max
  Clone ID: PAT_MRT3847_126829C.1.pep
SIILFPLTQIIKHSNISPSKATFIFCKITKPHFFTYPLNASHNKPLLTQNKKKPHLI

SEQ ID NO: 172551 - protein, 56 aa, Glycine max
  Clone ID: PAT_MRT3847_12682C.1.pep
ILFTKGNSLVKKSPEKGPSPRPVADLATLIWQKTAWVAQTGQILYEDSNQQALSIT

SEQ ID NO: 172552 - protein, 69 aa, Glycine max
  Clone ID: PAT_MRT3847_126830C.1.pep
QRPNKIKMALRLIYQMFYHKLRLKPNILISPENSNWKLLKSLPKQNPRIPSIKFRESTIPAKKNKIGIL

SEQ ID NO: 172553 - protein, 91 aa, Glycine max
  Clone ID: PAT_MRT3847_126831C.1.pep
LQRIQYPTINQRRKLQLHLGIFFLRDYISDLTKTHALPRIFPPKILVVLMRCDIKVYNHSYIFFYLSFFHHIIYYISNFSFSLLVVKKTRD

SEQ ID NO: 172554 - protein, 79 aa, Glycine max
  Clone ID: PAT_MRT3847_126832C.1.pep
LPILAPLPIGFAVCLVHLTTIPITGTGINPARSLGAAIIFNKDLGWYEHWILWVGPFIGATLASLYHQVVIKAIPFKSK

SEQ ID NO: 172555 - protein, 132 aa, Glycine max
  Clone ID: PAT_MRT3847_126833C.1.pep
KTTIRTDINIIIQRVSIHSKILLCPFTISHTFLIHVSFTLSSLRSSHLQYLAVMTRVHSITLSHYSFLLIPSTICISPLLITYIFPWPNTSQPSSLIYKLKVYHQSFGKEKKMMFSETWEPMLIIKHNGDYK

SEQ ID NO: 172556 - protein, 61 aa, Glycine max
  Clone ID: PAT_MRT3847_126834C.1.pep
MQKSALPLSDANANKKREELRRKATLVKLLRWHFGYPDFRDMQLDAIQAVLSGKDCLCLMP

SEQ ID NO: 172557 - protein, 55 aa, Glycine max
  Clone ID: PAT_MRT3847_126835C.1.pep
LLAASSLRLVLEKENYWKLHIVVFHGPKSRLSFVSFFCFCCPVYLMYRCCMYPFE

SEQ ID NO: 172558 - protein, 122 aa, Glycine max
  Clone ID: PAT_MRT3847_126836C.1.pep
MKNHTQTLPLDLIELILLKLPVKSVTRFKCVCKSWLSLISDPQFGFSHFDLALAVPSHRLLLRSNEFSVHSIDMDFGAVHFTLPPPSPPLADYASLFTPAFHQHWIDFHRKHWMLGSCRGLV

SEQ ID NO: 172559 - protein, 164 aa, Glycine max
  unsure (1)..(164): unsure at all Xaa locations
  Clone ID: PAT_MRT3847_126837C.1.pep
QDVQKNLPXSCLNQLDPTSCFFPQNLINYVETPLFLLNAAYDAWQVQESLVPHSADPHGSWNDCKANHAHCNSSQIQFLQDFRNQMLNDVKGFSETSQTGLFINSCFAHCQSERQDTWFADDSPLINNVPVAIAVGDWFLDRKTVKAIDCAYPCDNTCHNLVFK

SEQ ID NO: 172560 - protein, 44 aa, Glycine max
  Clone ID: PAT_MRT3847_126838C.1.pep
SQTFDKDRLLGMLNYQPSSLNTKDGSDRTRQQFTSNTQKEGDIP

SEQ ID NO: 172561 - protein, 72 aa, Glycine max
  Clone ID: PAT_MRT3847_126839C.1.pep
FLNIKEQNSMRKKFHTMSRHFNRNLISMKIYKQGQFIKINYNTVMETQNQILFPKQITSFKETLNQSKYSAT

SEQ ID NO: 172562 - protein, 35 aa, Glycine max
  Clone ID: PAT_MRT3847_12683C.1.pep
TRTSTYANTPIHYASDTLSIWGESCRSRSRQRTLS

SEQ ID NO: 172563 - protein, 100 aa, Glycine max
  Clone ID: PAT_MRT3847_126840C.1.pep
MAVRRRQKGEGQREKRRSQPPQKHNTRTKSEEAQNADQQRKTRTKTRSRSGPRSRERQPPRQRTPRDTAHLTNQECNPTGSHHRSSRIIRGRRPPEKTPT

SEQ ID NO: 172564 - protein, 77 aa, Glycine max
  Clone ID: PAT_MRT3847_126841C.1.pep
SLALDSGRGISYFRTCWVNFFGKIYRAKLKLRKGLPSAWMIPQRFHPFNQKVLLAGEEKTEFFPWRWATDLKRLSGK

SEQ ID NO: 172565 - protein, 144 aa, Glycine max
  Clone ID: PAT_MRT3847_126842C.1.pep
FQLKFRKDLRLHILAVLCCRPEHVSNFVDAESFFGPDSRLVYKHFATLYFMFIFDSSENELAMLDLIQVFVETLDKCFRNVCELDIVFNYSKMHTILDEIILGGQVLETSSNEVMKAIEEISRLESASNAINLVPKSVSGWRSR

SEQ ID NO: 172566 - protein, 107 aa, Glycine max
  Clone ID: PAT_MRT3847_126843C.1.pep
CPSISGELNTLITAAHNPNKSSSAEINTVTQKACETERKWNEETQADSAGGAEKEAHCGHMLHKVCCSLLCARTHCPFFYRSQAQRQDLHDSGCAKLDAGARATLFI

SEQ ID NO: 172567 - protein, 87 aa, Glycine max
  Clone ID: PAT_MRT3847_126844C.1.pep
HAFVLCNHDYTRTAGGRGINGQGDQREHQGPPDLRQPGQNNWRGGEDPGPMALTPELEVPSGASTGTNEGRELKDGGPGNPGKGQQK

SEQ ID NO: 172568 - protein, 204 aa, Glycine max
  Clone ID: PAT_MRT3847_126845C.1.pep
MYAASTMKSMYKPPLPRSPIRLRPSHAVHSSNSIALQTPPGSLTKSQKPVISPNMRPEYRTISCELRALTKMVRDEFSKANSEKAASANSSVLFERGRFYDEYSARRNERLMRKKGVTAVDEGKAKPVRSLGVTMESGKKSSSVRKMGTLRKSISAAYSSGVSETPRYMLRSMTKENKKPPLAAKFDKSVVAGDKKMGTRARRI

SEQ ID NO: 172569 - protein, 51 aa, Glycine max
  Clone ID: PAT_MRT3847_126846C.1.pep
EREREREREREREREREREREREREREREREREPRAEFLPPRGRLCREVIW

SEQ ID NO: 172570 - protein, 31 aa, Glycine max
  Clone ID: PAT_MRT3847_126847C.1.pep
DPMKWSTIFCAVLVQTLEFQLITVPGSAGFR

SEQ ID NO: 172571 - protein, 73 aa, Glycine max
  Clone ID: PAT_MRT3847_126848C.1.pep
RINYHHVIHLICGLLDCIREDFLVHCVRKYKTCSTSVSNYPNKLINLFSHNLYYLPVIVSPQDIFCWQDNFIK

SEQ ID NO: 172572 - protein, 108 aa, Glycine max
  Clone ID: PAT_MRT3847_126849C.1.pep
VRKGRKKTGLPTAAVETAATDGTATTPATAQQQQQRNCNSERLRQLIIENIHSKPSVAKRQIQSKVAEEINGKIDVICARHAFSYIVNSELFCEAEHNGVIWLCFKQQ

SEQ ID NO: 172573 - protein, 38 aa, Glycine max
  Clone ID: PAT_MRT3847_12684C.1.pep
KALIVLLYIHYSLLSYRSVLLDGDYRIFRELVKLPPCL

SEQ ID NO: 172574 - protein, 315 aa, Glycine max
  Clone ID: PAT_MRT3847_126850C.1.pep
ACKESYTKRCWGFGLGLGFRVVSLSHGFRKLSIDHIVSAYKRTNRRVIFLDYDGTVVPQSSISKTPSPEVISVLNALCNNPKNIVFIVSGRGRDSLSEWFTSCQMLGLAAEHGYFLRWNKDSEWEASHLSADLDWKKMVEPVMQLYTEATDGSNIEVKESALVWHHQDADPDFGSCQAKELLDHLESVLANEPAAVTRGQHIVEVKPQGISKGLVAEQVLMTMVNGANPPDFVLCIGDDRSDEDMFESILRTVSCPSLPSAPEIFACTVGRKPSKAKYFLDDASDVVKLLQGLAASSNPKPRHLAHSQVSFESTV

SEQ ID NO: 172575 - protein, 53 aa, Glycine max
  Clone ID: PAT_MRT3847_126851C.1.pep
EIRQRGIAESSFTSSNSKTTSAIYFTPNDLSFFKCQPLSSYCAGPSVSSFRIY

SEQ ID NO: 172576 - protein, 55 aa, Glycine max
  Clone ID: PAT_MRT3847_126852C.1.pep
DQNAGSAVCSLLNSSVLVSYGLHMMLEFPLLNLYLRTNIHEVLFHKKPMLVTDNE

SEQ ID NO: 172577 - protein, 59 aa, Glycine max
  Clone ID: PAT_MRT3847_126853C.1.pep
PPIQGNFSAEDGKSFEAGKKGPGYPSLYPQRMQAHIIKHFLGRVSCFYDIINYRFFFFV

SEQ ID NO: 172578 - protein, 155 aa, Glycine max
  Clone ID: PAT_MRT3847_126854C.1.pep
MMHLSLYFTVVAIALLFSFTSSSADTHENFVQCLYNYPNSGTSISKVVYTQTNSSYTSTLDSSIQISRFLNASSKPLVIVTPLVISHVQVTIICSQHHGMQITTRSGGHDYDGLSYIAKDPFVVLDLKNLREIKVDVEKSNAWVQAGSTIGELYY

SEQ ID NO: 172579 - protein, 134 aa, Glycine max
  unsure (1)..(134): unsure at all Xaa locations
  Clone ID: PAT_MRT3847_126855C.1.pep
VTRGESFTADHNYTITDGIDMATATTLCQKSAGGDYLRRNINQMSTARWGASAGWAREWSQLHYASRKTMAMXEVLYLVLERCXLELFVRTPYECRLMXRTAWSGSEWLYEEDAPTIVQSDELRAMPTKWNATD

SEQ ID NO: 172580 - protein, 71 aa, Glycine max
  unsure (1)..(71): unsure at all Xaa locations
  Clone ID: PAT_MRT3847_126856C.1.pep
HSPKRAIHYLLKNGNFEEGSYMSPNKSWGVLIPPDIXDAYNRLPVSMVESLIAVKNIDTDDYAVPEGTRTM

SEQ ID NO: 172581 - protein, 67 aa, Glycine max
  Clone ID: PAT_MRT3847_126857C.1.pep
SPFFLYLVKQPPKSLQPEKGSLGPFFFQEDPFFIFAPTYNGFFCQLSRSRHHRDRGVWPLDPTVYVS

SEQ ID NO: 172582 - protein, 55 aa, Glycine max
  Clone ID: PAT_MRT3847_126858C.1.pep
VNEINHSTLYVLKSEIFILDLKNGQLFSRCEITAEDCDNTNTTQCTYPLSKRTTK

SEQ ID NO: 172583 - protein, 109 aa, Glycine max
  Clone ID: PAT_MRT3847_126859C.1.pep
MMPAHGLIISLIFVSILANEASLVHEANGSFPMVPLVEAGKMEMMMVMNESRRKLGSFQICALCTCCGGAKGMCLPSPCCYAINCNIPHRPFGFCSFTPKTCNCFGCHL

SEQ ID NO: 172584 - protein, 34 aa, Glycine max
  unsure (1)..(34): unsure at all Xaa locations
  Clone ID: PAT_MRT3847_12685C.1.pep
ITASDPLSNVDKEKAXILMYCTGGIRCDVYSSLL

SEQ ID NO: 172585 - protein, 53 aa, Glycine max
  Clone ID: PAT_MRT3847_126860C.1.pep
DWMKWQHTKHSSFIGGGEVMYHHMAWQPSHVHFVKGLYNSSPVIRLTLVGLVV

SEQ ID NO: 172586 - protein, 139 aa, Glycine max
  unsure (1)..(139): unsure at all Xaa locations
  Clone ID: PAT_MRT3847_126861C.1.pep
WSYPVRTASFLLGHRCPLLYAKVPDSXVSSLPRDFVIYVKFSSIKPLFAYWLNPEILSSQVLGTITHSFLHXTVWNLMVSMRTPCEFYIINKQSFCQLFIDLLDGRILLDXTVDWIKLIQNSFNKKIKVRVAACKNSCL

SEQ ID NO: 172587 - protein, 88 aa, Glycine max
  Clone ID: PAT_MRT3847_126862C.1.pep
QEKITLYRNLPFTAERSETHGCTFQGRKTCGVAPNVYLRKMLEKPKVGLQMLRVKGSGVCFYARRRYYHPTRASHGMAAFNQIWKIMT

SEQ ID NO: 172588 - protein, 294 aa, Glycine max
  Clone ID: PAT_MRT3847_126863C.1.pep
VLAQIKKKRVMLAMEELLCELSDHEKRNEQGLPPGFRFHPTDEELITFYLASKVFNDTFSNLKFAEVDLNRCEPWELPDVAKMGEREWYLFSLRDRKYPTGLRTNRATGAGYWKATGKDKEVYSASSGTLLGMKKTLVFYKGRAPRGEKTKWVMPEYRLDAHFSLPHTYPSKEEWVICRIFHKSGEKRTPVLQVQGHSDAFFVPNKKFFTSITCKLISFSAARLPKPGSDSPTRPKWPLSPSSFPIGNLQRQKPPIGPTLQAPPAKLHPEDQGTNYYSKSDQNGGRYILSSITR

SEQ ID NO: 172589 - protein, 175 aa, Glycine max
  Clone ID: PAT_MRT3847_126864C.1.pep
MLLVLSTIHFTFFTLHSEERMRVPNCSSFFTLPLRHFITLANTLGFILLILFISGIIEFPSFSLLSQFSTQPIKDQSKAFTDVVGAFKKWDSEVGCARFKKEINQQRNGSNYGFSTSLQDQFGGQLECGVLKMKHVSILVKGWTWIPDNLNNMYICPCGLSCLWTKSLVLADNPD

SEQ ID NO: 172590 - protein, 62 aa, Glycine max
  Clone ID: PAT_MRT3847_126865C.1.pep
MYDYLEVPYITVLGASAFVRHKQRNAINYYNDDYIPGALYSDVDGISTHATKSPHMLASYEA

SEQ ID NO: 172591 - protein, 26 aa, Glycine max
  Clone ID: PAT_MRT3847_126866C.1.pep
LSLHYEDVPSLEDYPLILKLTQRSSA

SEQ ID NO: 172592 - protein, 114 aa, Glycine max
  Clone ID: PAT_MRT3847_126867C.1.pep
VSSLGFPKRFLEEKQDQGIFQCQQPPPCSPSPTPSSSSSSARGNVNGRCHGMLVIDIPNECPSSSLSPSGSRCAEDEVKSPMAVPLRSFKRLLSREKKLSPCSPSSVDVEQAQS

SEQ ID NO: 172593 - protein, 172 aa, Glycine max
  unsure (1)..(172): unsure at all Xaa locations
  Clone ID: PAT_MRT3847_126868C.1.pep
VIPDCNIVGAMLKVDTYDTNPENAVWSFFDAPFIGGRPIQVVTLTNTMVHIEPYMNSRVQLLSTTTNGDFVQGKDLSMVKDNVACAAVGLTSRYTPTSLMESELQKDRGLIVEYLGRMSYVAHYVNQPQXKELFEGNFSLDIKSRSTLEKVFSTQAQSVSGKTFKFDLNGAG

SEQ ID NO: 172594 - protein, 823 aa, Glycine max
  Clone ID: PAT_MRT3847_126869C.1.pep
MSAEPDHSASKGKVKLDNDPSGAEKRDENEVATAILKKKKKPNSLIVTDATTDDNSILALSNNTMETLQLFRGDTVLVKGKKRKDTVLIVLADDDLDDGSVRMNRVVRHNLRVKLGDVVTVNPCPDIKYAKRIAVLPMADTIEGLTGSLFDVFLAPYFREAYRPLRQGDLFTARAAMRTVEFKVVEIDPPEYGIVAQDTVIHCEGEPIQREDEEGNLNEVGYDDIGGCRKQMAQVRELVELPLRHPQLFKSIGIKPPRGILMYGPPGTGKTLMARAVANETGAFFFLINGPEIMSKMAGESESNLRKAFEEAEKNSPAIIFIDEIDSIAPKREKTNGEVERRVVSQLLTLMDGMKARSNVVVMAATNRPNSIDPALRRFGRFDREVDIGIPDPTGRLEILQIHTKNMKLADEVDLETIAAETHGYVGSDIASLCSEAAMQQIREKMDLIDLDEDTIDAEVLDSLGVTQENFRFALGVSNPSALREVAVVEVPNVRWEDIGGLEDVKRELVESVQYPVDHPEKFLKFGLSPSRGVLFYGPPGTGKTLLAKAVANECAANFISVKGPELLSMWFGESESNIRDIFDKARAAAPCVVFLDELDSIAKSRGGSQGDAGGASDRVVNQLLTEMDGMTSKKNVFVIGATNRPEQLDNALCRPGRLDTLVYVPLPDQPGRESILKAQLRKTPVAKDVDLSYIASKTHGFSGADLGFITQRAVKLAIKESISLAIEKQKEREAAEGDDTKMDEDVDEEDPVPELTKRHFEEAMSMARRSVTDTEIRRYEAFAQSMKNSAGGSAFFRFPEGGAEGAAAEAQQNGAGEEDLYD

SEQ ID NO: 172595 - protein, 140 aa, Glycine max
  Clone ID: PAT_MRT3847_12686C.1.pep
AIKNDGIFSLYKGMEATFWRHWWWSGGYFGTIYAIKGALPKPTSKKTELSNNLIAGTAGGFVGTAINTPFDVVKTRIQLNGAGEWTYPALLRLARDEGISGMYKGFAPKVLRLAPGGGVLLLVVELLSGMARKSLGPPYI

SEQ ID NO: 172596 - protein, 44 aa, Glycine max
  Clone ID: PAT_MRT3847_126870C.1.pep
VQVQVLVLVGVPWAFHRDRPGRPSAYLHILGLLICLNSAVAPPD

SEQ ID NO: 172597 - protein, 67 aa, Glycine max
  Clone ID: PAT_MRT3847_126871C.1.pep
IFSFTSFSIYCITYIRITPLMINTTYRQANNTIQQYKITTLTNSFQDSLQQLLADHIFYSKFTTKTG

SEQ ID NO: 172598 - protein, 58 aa, Glycine max
  Clone ID: PAT_MRT3847_126872C.1.pep
IYHQFRLFWYMLFLFHLTIISLFVCVCGVPMSYILDIITVLKGLCFIVAHIYLVFRQM

SEQ ID NO: 172599 - protein, 48 aa, Glycine max
  Clone ID: PAT_MRT3847_126873C.1.pep
QFDDYNQPCTVKNNLFVDPFHGFLPCHTQNKKQQSTTTVYINLISSRI

SEQ ID NO: 172600 - protein, 187 aa, Glycine max
  Clone ID: PAT_MRT3847_126874C.1.pep
SGVSGVLTVMSLGMFYSAFARTAFKGESQQSLHHFWEMIAYIANTLIFILSGVVIAEGILGDENVFYHGTSWTHLLLLYAYVQVSRCIVVGALFPFLRYFGYGLDWKEAIILIWSGLRGAVALALSLSVKRSGGKSSELTPETGTLFVFFTGGTVFLTLIINGSTTQFILHYLGMDKLSAAKKRILN

SEQ ID NO: 172601 - protein, 501 aa, Glycine max
  unsure (1)..(501): unsure at all Xaa locations
  Clone ID: PAT_MRT3847_126875C.1.pep
RHLATHTHPPLSAMDERHIQKSYWLQHSADLSVEAMMLDSKAAHLDKEERPEVLSLLPPFEGKSVIELGAGIGRFTGELALKAGQLLAVDFIDTAIKKNETINGHHNHVKFLCADVTSPNMSNNVSEGSVDVVFSNXLIMYLSDIDVEKFTDRMIRLLIDGGYVFFKGTCFXQSGNSKRKYNSTHYKVPRFNTKVIKECHMSDNXGNSFELSLVGCKCIGAYVRNKKNQNQICWISLKVRSQDDRGFQRFLDRVEYSHKSILRYERMYGPGFVSTGGLETTKEFVAKLGLKPGQKVLDVGCGVGGGDFYMAENFDVEVIGIDLSINMISLAIERAIGLNYAVEFDCADCYRKTYPENTFDVIYTRDTMLHVKDKPTLFRSFYKWLKPGGKILITDYCKSAGSPSLEFAEYIKKGGYYLHDIKAYRQMLEDAGFDDVIAEDRTDQFVNTLQQELNALENKKDDFIGDFSEEDYNEIVERWKAKQTRGASREQMWGLFIAKKN

SEQ ID NO: 172602 - protein, 59 aa, Glycine max
  unsure (1)..(59): unsure at all Xaa locations
  Clone ID: PAT_MRT3847_126876C.1.pep
MSNTCGSCYCTDKTSCTKGNSYRAIVXTEKRNIETVHMDVPAAEHDHKCIYAPNCTCTD

SEQ ID NO: 172603 - protein, 70 aa, Glycine max
  unsure (1)..(70): unsure at all Xaa locations
  Clone ID: PAT_MRT3847_126877C.1.pep
CSALLLRLVVPLVLVVCVLRCGWFSFPXFVVLFXVGRXSXVLGFWLRSRLFPGTPPLALLLPXXDSTALL

SEQ ID NO: 172604 - protein, 115 aa, Glycine max
  Clone ID: PAT_MRT3847_126878C.1.pep
LTNKRAASAGETKPLRRSARIAAQKAAKEKAAKQKARDGSTASTKSAGRGRPSRSPKKSGPKSRRSPAGRGGGRSQTPRKKKQPLKKKAPGPRSRTPGRRVKKPSTKKSPAPRRA

SEQ ID NO: 172605 - protein, 108 aa, Glycine max
  unsure (1)..(108): unsure at all Xaa locations
  Clone ID: PAT_MRT3847_126879C.1.pep
MSRLWFSTPFFVIILPVAVAALFFRLEPFDPGFLPVQLGRSTVAVPASNGHVRVGSEAMGEGHLEGPEDLAYDAAARVVYTGCEDGXWIKRVTVNDSVLDSAVEDWVN

SEQ ID NO: 172606 - protein, 62 aa, Glycine max
  Clone ID: PAT_MRT3847_12687C.1.pep
TFREKGGHGKGPRIDSSSSGRRSNGKPFLRRHFSFGSRSSKSMLDNQPTRKKGFFWAKSSKE

SEQ ID NO: 172607 - protein, 139 aa, Glycine max
  Clone ID: PAT_MRT3847_126880C.1.pep
MSGTGVVSMDHVLVALGETKEEREVRIRSLFNFFDAANNGYLDYAQIEAGLSALQIPPEYKYARELCEVCDANSDGRVEYHEFRRYMDDKELELYRIFQSIDVEHDGTILPEELYEALLKAGIEMNDEELAHFVEHVDK

SEQ ID NO: 172608 - protein, 81 aa, Glycine max
  Clone ID: PAT_MRT3847_126881C.1.pep
FRHVLPRLISLKIRRVYALPCHSFRVKADLYTERVIGRYVAGATVPKSRSIALTRVTPKGRASSQIIVLTYNSLDLSSDAW

SEQ ID NO: 172609 - protein, 83 aa, Glycine max
  unsure (1)..(83): unsure at all Xaa locations
  Clone ID: PAT_MRT3847_126882C.1.pep
LMHEXVXNETAXXLLGCKSKPLRIXVXIVXRWXXPSGSTLTRNMXXXXWSFALXXNSXTXRPSXGMXKHSEPSQLYNXVHKXX

SEQ ID NO: 172610 - protein, 571 aa, Glycine max
  Clone ID: PAT_MRT3847_126883C.1.pep
MATHFNLQHQLFSNSRSVGLDIRKRTTAYALQHANSNALDERNNNSLNSGLLVGSLSVCYTSLKKCSSLAASAKAHFSCSDDQSKEADEVTNVISTSQGMEISRVDCVVWLLHESSRSFSKAINSLGVAMSGPALAMAWIGKDVHEWHRRIAYQVAVYALMKAAIDLEILLSHERLNEFSPVKKILSPLMNQMGERIEIRLKMKHPYLVQWFRETEMPRIAGYFIPLLKKWSVEYAGRKLFSGIAGIIVAITCCSAVVKLGARRICCPLFVLSLEDALVKLMDFSLNLAPVDKLHWLATEAGFELNFLSHFGGKVFPSEKTEDLEFWIGLAHKKLLKAFCKESITSKKQNFQQKIQADNLATLGLFTYLGKRTRIFLSAMGIKDLDGVVKNFLSYLECGILFIYPEFSSIRVYQCFMEVVTDEIGWLDFYGSYVQINCKEKRSKHNARQAEKEIISSVVFTVCYDVFSGFAHFNRTTQQSLDTASRSYLLRCQGLLSICLQYHWAAYDNSGESLNTVDHASFDNHTSYMGSINGPKLPLVFEVQQMSHRPRVRFNYRRMSKEQFPKQLYIQ

SEQ ID NO: 172611 - protein, 167 aa, Glycine max
  Clone ID: PAT_MRT3847_126884C.1.pep
MHSYGYRVNALLTFAITILAVMSAMASLSDNLNSPTPFVHAQVTNINWFQKQPNGDDEVSMTMNISANLQSLFTWNTKQVFVFLAAEYETQKKPLNQISLWDGIIPSKDHAKFWIHTSNKYRFIDQGSNLRGKEFNLTMHWHVMPKTGKMFADKIVMPGYKLPEEYR

SEQ ID NO: 172612 - protein, 92 aa, Glycine max
  Clone ID: PAT_MRT3847_126885C.1.pep
IGTCKTMPIYSASIYTGYRYTYTYMCYKSILLSHTQTLGTIICRNPSKNSADISAVSGSAAPHMHIVLFCPCSHQQGVARPPPYGPYSISLR

SEQ ID NO: 172613 - protein, 65 aa, Glycine max
  Clone ID: PAT_MRT3847_126886C.1.pep
WKDLEQRCIWRGSKQSTVVTLILLTFWCTRTRRWTKNGITLTCIHIRQPLTCCSLRFSPIWSSSS

SEQ ID NO: 172614 - protein, 55 aa, Glycine max
  unsure (1)..(55): unsure at all Xaa locations
  Clone ID: PAT_MRT3847_126887C.1.pep
RKFFFRLGMLSVNLXFERGGIGRFLKSLAYGLFDRDVPDFTWEVVKSLKGEKVRG

SEQ ID NO: 172615 - protein, 73 aa, Glycine max
  Clone ID: PAT_MRT3847_126888C.1.pep
AKKTQKGSWCHPFTWWGDSLVSSAGVPSLLLIMNSVLSWGKHNFLRATPHFVDLNYIQWGSILFFPKKYTKNT

SEQ ID NO: 172616 - protein, 204 aa, Glycine max
  Clone ID: PAT_MRT3847_126889C.1.pep
MNPNLDSISEYRKKVSSYNERVEELNAVTQERDDTKKQYDEWRKKRLDEFMEGFNAISLKLKEMYQMITLGGDAELELVDSLDPFSEGVVFSVRPPKKSWKNIANLSGGEKTLSSLALVFALHHYKPTPLYVMDEIDAALDFKNVSIVGHYVKDRTKDAQFIIISLRNNMFELADRLVGIYKTDNCTKSITINPGSFVACEKAV

SEQ ID NO: 172617 - protein, 66 aa, Glycine max
  unsure (1)..(66): unsure at all Xaa locations
  Clone ID: PAT_MRT3847_12688C.1.pep
STKDAVLADDSRKRKVVTXDVTQKVXVDIRLPKHDSDFLCKMRIFESQRESVWLLRKLRILFSLRS

SEQ ID NO: 172618 - protein, 57 aa, Glycine max
  Clone ID: PAT_MRT3847_126890C.1.pep
KIAIMIKLDTVHIAVIRGNVVDVIWLRGGNDPLSVGKILTRIHHARGSHICHDYRYI

SEQ ID NO: 172619 - protein, 73 aa, Glycine max
  Clone ID: PAT_MRT3847_126891C.1.pep
VKKRVGLEVKISVFGEVSLIVCEGLVVRNWEGMVVIRIPYFSFYWRLYTPFENWMDNPSGAILASLTDHIESV

SEQ ID NO: 172620 - protein, 69 aa, Glycine max
  Clone ID: PAT_MRT3847_126892C.1.pep
RELEYSGTTPNPEAMFHWTRFLGANRNNPTVRCWHTVSYGACRTSYGYFMYQTHIPSSTNHDVYNDSTR

SEQ ID NO: 172621 - protein, 58 aa, Glycine max
  Clone ID: PAT_MRT3847_126893C.1.pep
MLVGREMRFCYFIFLVSSLMREISMLHCILSSLMSETMLLLCYFISLHSYKGVYDCDY

SEQ ID NO: 172622 - protein, 109 aa, Glycine max
  Clone ID: PAT_MRT3847_126894C.1.pep
KPQKPGKKKGFPHFLKKPPLEPGPKKKAPQKQKNPPPKNPVKDHGIKKPLSKRSWKQPGGPNPRGGASLKGTSPPGGLPPQQFPRLRGETRKTQSCTPQGKGRPPRGPP

SEQ ID NO: 172623 - protein, 75 aa, Glycine max
  unsure (1)..(75): unsure at all Xaa locations
  Clone ID: PAT_MRT3847_126895C.1.pep
MALPVVVDAEXLKEVDNARRDLAAIXSLNRNWAPLMLRFAXHDAGTYGARTKNWLDLSGSDPLTGEEYSHGANNG

SEQ ID NO: 172624 - protein, 74 aa, Glycine max
  unsure (1)..(74): unsure at all Xaa locations
  Clone ID: PAT_MRT3847_126896C.1.pep
IRIGPGPIIKVSNKSGAPGLIHICCGIIWFRGVKELIIQIGDVIIILFQLVISGPLLIGLGKLXRIGYLTGARY

SEQ ID NO: 172625 - protein, 55 aa, Glycine max
  Clone ID: PAT_MRT3847_126897C.1.pep
HNVNKDVAGCTLDNQIVKNTSCENFKKNFSWVYPPCYRMSPTRLKIDGINKSTIC

SEQ ID NO: 172626 - protein, 88 aa, Glycine max
  Clone ID: PAT_MRT3847_126898C.1.pep
GHIPGFNQSNLRYLNVSNNRIFGEIGVSYALIRFNASSFCCNPCLCRDQIEKACNNGSLPPSTSPSYPLIPRTMGKSSSSSLNRTRWI

SEQ ID NO: 172627 - protein, 270 aa, Glycine max
  Clone ID: PAT_MRT3847_126899C.1.pep
LAPAVTSFSSRGPNLPSPGILKPDIIGPGVNILAAWPFPLNNDTDSKSTFNIMSGTSMSCPHLSGVAALLKSSHPHWSPAAIKSAIMTSADIINFEHKLIVDETLYPADIFATGSGHVNPSRANDPGLVYDIQPDDYIPYLCGLGYGDTEVGIIAHKTITCSETSSIPEGELNYPSFSVVLGSPQTFTRTVTNVGEANSSYVVMVMAPEGVEVKVRPNNLTFSEANQKETYSVSFSRIESGNETAEYAQGFLQWVSAKHTVRSPILVDFV

SEQ ID NO: 172628 - protein, 52 aa, Glycine max
  Clone ID: PAT_MRT3847_12689C.1.pep
ASPTSSLYVTLLPIQYVSPPSAFSYLKVRKPHNFDTPPILLSLLIDYLHSVP

SEQ ID NO: 172629 - protein, 154 aa, Glycine max
  Clone ID: PAT_MRT3847_1268C.1.pep
FYTQSSPPFFPAPAHRLTKHRFSPSLVVLFNRVLSVKDSNKLLVASLKIQSSIDLQRHRKHTNTHFVICIFRALHRLIKLVVTAAAQIFLFFVPLRERAFGFNSMAGGKAKKEKGKPHQQQKHMPYQGGISFHKSKGQHILKNPLLVDSIVEKA

SEQ ID NO: 172630 - protein, 50 aa, Glycine max
  Clone ID: PAT_MRT3847_126900C.1.pep
SIPSQCSKHKGDDFFYSEQSLRYQHHHHFLRYLLHPLKLLMHYTLFNYFF

SEQ ID NO: 172631 - protein, 88 aa, Glycine max
  Clone ID: PAT_MRT3847_126901C.1.pep
TYMKKPNRGDTDIPSPRWAIAKRKERQGRLQPPLGGLAMVVVVGGMVGGVPPVGNIKLLLLIRLELLSVVVIARCVIHVPLGALVRGV

SEQ ID NO: 172632 - protein, 44 aa, Glycine max
  Clone ID: PAT_MRT3847_126902C.1.pep
IPIPFPVSPKPKPKPKPKPKHKLNFPNPLSHFSPKPNTPKPIFD

SEQ ID NO: 172633 - protein, 55 aa, Glycine max
  Clone ID: PAT_MRT3847_126903C.1.pep
HSSFYYHYYCYTHNHDHGIGRTIMDYNLPASLTITMHILRYQQTKLMTWSPLSHR

SEQ ID NO: 172634 - protein, 358 aa, Glycine max
  Clone ID: PAT_MRT3847_126904C.1.pep
MTNDNIAVTDLTSALNEENRADLVNALKSKIQSLAGAHSDVLETLSPNVRKRVESLREIQGKHDEIEADFLKEKEALEAKYQKLYQPLYTKRYEIVNGVIEVEGAANETTDESEEDKEKGVPSFWLNAMKNNDVLAEEISERDEGALKFLKDIKWSRIENPKGFKLDFFFDTNPYFSNTILTKTYHMIDEDEPILEKAIGTEIEWYPGKCLTQKVLKKKPKKGSKNAKPITKTESCESFFNFFKPPEVPEDDADIDEDLAEELQNQMEQDYDIGSTLRDKIIPHAVSWFTGEAAQGDEFEDLEDDEDEEEDEDEDEDEEDDEDEDDEEEDDTKTKKKKSGKAQAGDGDGERPPECKQQ

SEQ ID NO: 172635 - protein, 169 aa, Glycine max
  Clone ID: PAT_MRT3847_126905C.1.pep
ITGCSLIGYMVGTATLSHRLGGLYCLYCLYETQPFNPSFKVYLSLGELKKLRILVADAKANDIKVALALVKRMLERNTFLFGSVDLMEGCVTETVNELQQLQNARIQVAYEKLFDSTSIDNYIQMDLGLEVDLDLLKKKSSGYATAKNVAIQEASNILDVENIKHLQKD

SEQ ID NO: 172636 - protein, 75 aa, Glycine max
  Clone ID: PAT_MRT3847_126906C.1.pep
TQIIITQTTNKTHFLISINSFEFSKYSVLIFIKTFQLYKIVSEIISMHPTNQVHISKVNSSLTKKKKKNSRLVLS

SEQ ID NO: 172637 - protein, 262 aa, Glycine max
  Clone ID: PAT_MRT3847_126907C.1.pep
MTNNNDNIAVTDLTSALNEENRADLVNALKSKIQSLAGAHSDVLETLSPNVRKRVESLREIQGKHDEIEADFLKEKEALEAKYQKLYQPLYTKRYEIVNGVIEVEGAANETTDESEEDKEKGVPSFWLNAMKNNDVLAEEISERDEGALKFLKDIKWSRIENPKGFKLEFFFDTNPYFSNTILTKTYHMIDEDEPILEKAIGTEIEWYPGKCLTQKVLKKKPKKGSKNAKPITKTESCESFFNFFKPPEVPEDDVDIDEDLV

SEQ ID NO: 172638 - protein, 80 aa, Glycine max
  Clone ID: PAT_MRT3847_126908C.1.pep
PLHSHVIPPCITTLPPQHTTKGQVVPTWLSRVTNGSHVVAGILRTHLSDNPSFSLPHTFYGVTFQAYPTSPPPIIDVGYP

SEQ ID NO: 172639 - protein, 77 aa, Glycine max
  unsure (1)..(77): unsure at all Xaa locations
  Clone ID: PAT_MRT3847_126909C.1.pep
WAALATWVQEYVPLHCAGSXDDQHXIPARQHRWNEAVDKRRGDLTDILWRPKSGTLLDHLETRLIVIWVGSGLAALV

SEQ ID NO: 172640 - protein, 69 aa, Glycine max
  Clone ID: PAT_MRT3847_12690C.1.pep
RAISHQLLVSLLDWRISTSRSLCSLRAIMSQSDHTSAFTRRSAILYKVEAPFDHADYGADVGGGEGRRA

SEQ ID NO: 172641 - protein, 68 aa, Glycine max
  Clone ID: PAT_MRT3847_126910C.1.pep
IVLVVLESASRKYGDLTCPNCGNFNFSFRTVCNQGHCRAPRPSLAVTPPAPVIGPYRGSHPVYHGGFG

SEQ ID NO: 172642 - protein, 60 aa, Glycine max
  Clone ID: PAT_MRT3847_126911C.1.pep
QFFDKYCLGRILQSVTPTTSNHLDLTTYKKIKSHLNLTKYVGQFEVLFIRCRALSWWRIS

SEQ ID NO: 172643 - protein, 89 aa, Glycine max
  Clone ID: PAT_MRT3847_126912C.1.pep
LALFGSRMMKRREFIMAGGEHIEIIKMIEWITAEQEEINMTGIEIDMRGAGEMNMNKSIGVERRMGIDMAIGRVYITCLLNLNYIQFIK

SEQ ID NO: 172644 - protein, 76 aa, Glycine max
  Clone ID: PAT_MRT3847_126913C.1.pep
KKPHIEKLNRKTKKKSKKKKGKSKTGRYNRTEKKKGKSSGLKGKSPVKITSQIKFKMAKINEQLHGKDPLEKHPRK

SEQ ID NO: 172645 - protein, 48 aa, Glycine max
  Clone ID: PAT_MRT3847_126914C.1.pep
MSVPVSPGVCIIDARDILSWTPPMTLLTPLDVVIAVANTLHYYLCLLV

SEQ ID NO: 172646 - protein, 103 aa, Glycine max
  Clone ID: PAT_MRT3847_126915C.1.pep
ALPSPLLGPAACGPLSPFAGLGFGVPPRPSNGLFPPFGPDLLPFNFLCPGSFFPYSFFHLSWPFPPPFSSLRASLGCLSVSPLPLEKCFFNPSLHILLIPGVF

SEQ ID NO: 172647 - protein, 83 aa, Glycine max
  unsure (1)..(83): unsure at all Xaa locations
  Clone ID: PAT_MRT3847_126916C.1.pep
FLASGVPGLAXLXLRPPPAAPXRRPAXXGFLLPLXXPVXXXLPFLFXALARXXXXSPCVAXAXRLVRLGCXXWXRPVXXAFLP

SEQ ID NO: 172648 - protein, 47 aa, Glycine max
  Clone ID: PAT_MRT3847_126917C.1.pep
RTRGRTRGGLKCLKLLDGFSFLPPDKASLLSGNIQLAEIGLISKDNA

SEQ ID NO: 172649 - protein, 259 aa, Glycine max
  unsure (1)..(259): unsure at all Xaa locations
  Clone ID: PAT_MRT3847_126918C.1.pep
MFPAVMSNSNSWSEEATVSCGTRITGLNHVVTTTISPQQPQKIKKKRNLPGNPDPDAEVIALSPKTLLATNRFVCEICNKGFQRDQNLQLHRRGHNLPWKLKQRSNKDVKKKAYVCPEPSCVHHNPSRALGDLTGIKKHYCRKHGEKKWKCEKCSKIYAVQSDWKAHSKTCGTREYRCDCGTLFSRKDSFITHRAFCDALAEESARLSANNLAAAAGATXHHHNNKPIPISISFPNPTTELPKPPNDQFQPMGLISRKP

SEQ ID NO: 172650 - protein, 178 aa, Glycine max
  Clone ID: PAT_MRT3847_126919C.1.pep
KHKREQQEHALVHSAGGSFLALDQPYLDHGDVHDRRQGPYAAIDDGPPEMQHAASTGLFVNVPSPTRGLRNGLATRPYSYHQAPRYDEVRVSKGSGNIHPILERQDEDDLERGGNVRNPFSDPAHGPEPSPSHDRFSNAEAKLHEFKRVLNSGLDMLHQRSIQGPAPNPWAVPNYRDL

SEQ ID NO: 172651 - protein, 301 aa, Glycine max
  Clone ID: PAT_MRT3847_12691C.1.pep
GSRIKVKCYATWCGWRFSGSVPSSDTTTEEFLNENQVDHPVWLIATVGLQESIINSITVCKYKKNEGLVEGTECSVCLNEFQEEETLRLLPKCNHAFHVPCIDTWLRSHTNCPLCRAGIVSNSVNSEAPAPVSNSEQENANLGRNQDTLLDNSRINEGGLSSNMVAGESSEAIDESNSKDRVNDETQNNGVLMNIEIQTEMGSVSTTECESHRVVDDHKHDDDTMLHTDNLGKQDQDGDYYYSKTCKTVRRSSIEECLHLSPVSMKRSFSSCNGRTLTSRGYMSLNSKLNSSLLEFSFYER

SEQ ID NO: 172652 - protein, 83 aa, Glycine max
  Clone ID: PAT_MRT3847_126920C.1.pep
MKSTIFFALFHFCAFSISYLPSASADFVLHNERSPLDNGGTYYILSDTIRFGGLRAAPWVNERCPRTVVHSRTDLDQRIGLII

SEQ ID NO: 172653 - protein, 118 aa, Glycine max
  Clone ID: PAT_MRT3847_126921C.1.pep
NYEHTSASFSSLFPIIHKCFPHQASSKKKPPAVPRMAPTPTEPVGMACQAQAWLRLKARAPPAPREVDPGGAPDRVGLGWPEVKGALEADEAPEKATAPAVAPDPAMVVLEGLRTASM

SEQ ID NO: 172654 - protein, 47 aa, Glycine max
  Clone ID: PAT_MRT3847_126922C.1.pep
SFNQVRKIMTPRFIRRSLLYDSYMLGQQECDPCSYGSSSAIRNSVPT

SEQ ID NO: 172655 - protein, 81 aa, Glycine max
  Clone ID: PAT_MRT3847_126923C.1.pep
VVETQGPGRTILGQARSASAGHPHECVHRLIWSAHGSVSSSECSISPLSYGVVLRGKSLDGQSHSDAPLPLKANACKSSSV

SEQ ID NO: 172656 - protein, 68 aa, Glycine max
  Clone ID: PAT_MRT3847_126924C.1.pep
IHSTIIRYCPCINLYPSMFSISKFLINTTHLSISILTFPKKHLDIRINSSFSGNQRWRRTAKRNHTAL

SEQ ID NO: 172657 - protein, 36 aa, Glycine max
  Clone ID: PAT_MRT3847_126925C.1.pep
VGYESFFSATVLAMHLDVKVLHSEFQYVYNQSGSII

SEQ ID NO: 172658 - protein, 86 aa, Glycine max
  Clone ID: PAT_MRT3847_126926C.1.pep
LIRTSLWKIWEACGDRHRIKSRGNKTVMGGAPPLSFTDRSSESEHKFQIMQRIPHFQKFWRVACGTEKAGMRVLSVFLISKHTHCT

SEQ ID NO: 172659 - protein, 286 aa, Glycine max
  Clone ID: PAT_MRT3847_126927C.1.pep
MAAFRWKSFEENEDRPAKPRHFGVTEIQSPHCTLFSHNLLQDIFESMGDYVDGLKFSGGSHSMMPKATIKQIIDMAHQHDVYVSTGDWAEHMISKSPSGFKEYVEECKQLGFDTIELNVGSLEIPEETFLRFVRLVKSGGLKAKPHFQVKFNESDIPKGGDRAYGAYIPPVPRSFELVEDVNLLIRRAERCLEAGADMIMIDADDVSKHADNMRADIIAKIIGRLGIEKTMFEASNQRISEWFIKQYGPKVNLFIDHSNVVDVECLRGRNLGRNLASFLGASDFLF

SEQ ID NO: 172660 - protein, 423 aa, Glycine max
  Clone ID: PAT_MRT3847_126928C.1.pep
MAQLKASPVTAPSLHTTGVALRGKLSKVVLAYSGGLDTSVIVPWLRENYGCEVVCFTADVGQGIQELEGLEAKAKASGASQLVVKDLKEEFVSDYVFPCLRAGAVYERKYLLGTSMARPVIAKAMVDVAKEVGADAVSHGCTGKGNDQVRFELTFFALNPKLNVVAPWREWDITGREDAIEYAKKHNIPVPVTKTSMDSRDRNLWHLSHEGDILEDPANEPKKDMYIMSVDPEDAPDQPEYVEIGIESGLPVSVNGRRLSPASLLAELNEIGGKHGIGRVDMVENRLVGMKSRGVYETPGGTILFAAARELESLTLDRETIQVKDSLALKYAELVYAGRWFDPLRESMDAFMQKITETTTGSVTLKLYKGSVTATSRTSPFSLYRQDISSFESGQIYDQADAAGFIRLYGLPMRVRAMLEHGI

SEQ ID NO: 172661 - protein, 77 aa, Glycine max
  Clone ID: PAT_MRT3847_126929C.1.pep
TLLYSRLWSLVPDCTPESFNIFSLAVSYFLLDLGTQSSIFGCVVLLPLRYSLLPSTFTLYSLRSRLSTIPVTVLGPQ

SEQ ID NO: 172662 - protein, 276 aa, Glycine max
  Clone ID: PAT_MRT3847_12692C.1.pep
FNSLTKYNGDKMVPVPASQVKQIAGRAGRRGCLYPDGLATTLHLDDLDYLIECLKQPFDDVKKVGLFPSYEQVELFSGQLPDLTFTQILEKFGENCRLDGSYFLCQHNHIKKIANMLEKVQGLSLEDRFNFCFAPVNVRDPKAMYHLLRYATSFGQKLPVNVAMGMPRSSARNDAELLDLETRHQVLSMYLWLSNHFDEETFPYVKKVEAMASCIADLLGQSLVKANWKPESRIKGRPKTEKSEGQLETRSAVELQTEKTEMGYSRTRSLLKLYEK

SEQ ID NO: 172663 - protein, 54 aa, Glycine max
  Clone ID: PAT_MRT3847_126930C.1.pep
WNSAGGVAALKSTAFTEAGRVLPSTFSRLGHKETLCLCTPFRLRETYDLLAYYT

SEQ ID NO: 172664 - protein, 148 aa, Glycine max
  unsure (1)..(148): unsure at all Xaa locations
  Clone ID: PAT_MRT3847_126931C.1.pep
MTQLKASPASACSFLAIAPSFHHASITTGHLLRHQFSKAKPLSLKELGLKTSVGANKLQVIKAAARIDTEVVSETTKGGGLRGKLNKVVLAYSGGLDTSVIVPWLRENYGCEVVCFTADVGQGIKELDGLEAKAKASGAWQLVGXDLG

SEQ ID NO: 172665 - protein, 321 aa, Glycine max
  Clone ID: PAT_MRT3847_126932C.1.pep
MAQLKASPACSTRATAPSFHTTGHLYHHFWKAKPSSFKELGLRTSVGANKLQVIKAAARSDTEVVSETTKAGGLRGKLNKVVLAYSGGLDTSVIFPWLRENYGHLSHEGDILEDPANEPTKDMYMMSVDPEDAPDQAEYVEIGLESGLPVSVNGKRLSPASLLAELNEIGGKHGIGRIDMVENRLVGMKSRGVYETPGGTILFAAARELESLTLDRETIQVKDSLALKYAELVYAGRWFDPLRESMDSFMQKITETTTGSVTLKLYKGSVIVTSRMSPFSLYREDISSFESGQIYDQADAAGFIRLYGLPMKVRAMLEQGI

SEQ ID NO: 172666 - protein, 427 aa, Glycine max
  unsure (1)..(427): unsure at all Xaa locations
  Clone ID: PAT_MRT3847_126933C.1.pep
MSQLKASPVTAPSLHTTGVALRGKLSKVVLAYSGGLDTSVIVPWLRENYGCEVVXCFTADVGQGIQELEGLEAKAKASGASQLVVKDLKEEFVSDYVFPCLRAGAVYEXRKYLLGTSMAHPVIAKAMVDVAKEVGADAXVSHGCTGKGNDQXVRFELTFFALNPKLNVVAPWREWDITGREDAIEYAKKHNIPVPVTKKSIYSRDRNLWHLSHEGDILEDPANEPKKDMYIMSVDPEDAPDQAEYVEIGIESGLPVSVNGKRLSPASLLAELNEIGGRHGIGRIDMVENRLVGMKSRGVYETPGGTILFAAARELEFLTLDRETIQVKDSLALKYAELVYAGRWFDPLRESMDAFMQKITETTTGSVTLKLYKGSVTVTSRKSPFSLYREDISSFESGQIYDQADAAGFIRLYGLPMRVRAMLEQGI

SEQ ID NO: 172667 - protein, 320 aa, Glycine max
  unsure (1)..(320): unsure at all Xaa locations
  Clone ID: PAT_MRT3847_126934C.1.pep
MTSDGATSAATNRRKPSWRERENNRRRERRRRAISAKIYSGLRAQGNYNLPKHCDNNEVLKALCAEAGWAVEEDGTTYRKGCRAPYPGDGVGTSTRNTPFSSQNPSPLSSSFPSPIPSYQVSPSSSSFPSPSRLDANNPSNLIPYIRHAFPASVPPLRISNSAPVTPPLSSPTSRNPKPIXHGDSIAKASMASSFNHSHHPFFAASAPASPTHRHLYAPPTIPECDESDTSTVESGQWLNFQAFAPSVSPVPISPTMNFIKPVVSQQHKHNLNLPGNGIQEMRISEPEFAMQVKPWVGERIHEVGLDDLELTLGSGKTPA

SEQ ID NO: 172668 - protein, 172 aa, Glycine max
  Clone ID: PAT_MRT3847_126935C.1.pep
IIQDQEYSSIRPLIDWLDYNGYTVVTKATKEFIDASGRRKVKGNMDIELAVDAMELAEHIDQMVLFSGDGDFRSLVEAVQRRGVRVTVVSTIASQPPMIADELRRQADVFTDLVELQSKLGRDPSERPAPRDRGEREARHHAPQFLQRATTMAPRGDDDFEEVRRPGQAASS

SEQ ID NO: 172669 - protein, 61 aa, Glycine max
  Clone ID: PAT_MRT3847_126936C.1.pep
ILAGVQQAHHKCLLLYHCRCDIHVSDEFIGQSSAGILDADRQREWLTHDRTDSLTAHTSHM

SEQ ID NO: 172670 - protein, 66 aa, Glycine max
  unsure (1)..(66): unsure at all Xaa locations
  Clone ID: PAT_MRT3847_126937C.1.pep
FPQPAPKVHPWGCRPTHAMVLYISGTPIDAQXRYDAGVKNMLHRSFEGEGFPDKKYIVKEGQLAIQ

SEQ ID NO: 172671 - protein, 52 aa, Glycine max
  Clone ID: PAT_MRT3847_126938C.1.pep
KEVQKVGRTQGNLQDFQVETLTLESSYCKTCLFGHQLHVASLIYLEVPTSQL

SEQ ID NO: 172672 - protein, 85 aa, Glycine max
  Clone ID: PAT_MRT3847_126939C.1.pep
IPSLVTCGFSFLGILVPDLDLDFVAKGKVVHPKHLGFMLVTMTCIPLSIRFWGENIHKSMFTTSKFSLPPGNDPNYRAREVHILF

SEQ ID NO: 172673 - protein, 77 aa, Glycine max
  unsure (1)..(77): unsure at all Xaa locations
  Clone ID: PAT_MRT3847_12693C.1.pep
KNFFEPPRPLWPLFSLFDQKGETPGTGFNISIFRNYRSKILSNFSNFXNVFLKLLNFRLIQSVFSGISKVFSFKLKG

SEQ ID NO: 172674 - protein, 126 aa, Glycine max
  Clone ID: PAT_MRT3847_126940C.1.pep
PPTWRDSFNLDRGAILGLSHSFFNVLSFRPKTQHPSIKDLYFVGASTHPGTGVPIVLAGAKLVPDQVLKHLGLPPQIPKFFPDEKKGARNVSPLDVQQTSVVWQSVQVILALVMTYLLWIVFQRAY

SEQ ID NO: 172675 - protein, 108 aa, Glycine max
  Clone ID: PAT_MRT3847_126941C.1.pep
WWKPPKTPGGGAKQKKMESPIKNGGGPPPPGGEKGGPNPHPLGGAPPFGKPKKSPKPWFSPSPGEKRSKGGGTHKGPGSKKTQGAHHKKKGSPGANGGPSLGRGDSLF

SEQ ID NO: 172676 - protein, 61 aa, Glycine max
  unsure (1)..(61): unsure at all Xaa locations
  Clone ID: PAT_MRT3847_126942C.1.pep
IWRQQLHLMRLQSEMFQAGIKGWFEPLGXHIQLQWANLMGKIQASVATNSIASTSETLEDQ

SEQ ID NO: 172677 - protein, 347 aa, Glycine max
  unsure (1)..(347): unsure at all Xaa locations
  Clone ID: PAT_MRT3847_126943C.1.pep
MSSLNQSLFPYDSSSLTVSSSVFNPYAFLSNRHHTLTLTLHTSQRRRQMSSLLPQVAKNKAMWLNPKVLGFNPPERWGHSACFSKGLMYVFGGCCGGLHFCDVLTLDLNKMVWSKLTTTGEKPGPRDSHSAVLVGHKMIVFGGTNGFKKMNHIHILDLVTKEWVRPECKGNPPSPRESHTATLVGDERIVIFGGSGEGHANYLNDLHILDLRTMSWTSPEXKGDLPVPRDSHSTLAIGNKLIVYGGDSGDQYHGNVHMLDMTTMTWSKLSIQGSPPGVRAGHAAVNIGTKVYIIGGVGDKRYYNDVWIFDICNFTWTQLDIDXHQPQGRFSHTTVAASIGFAIYGGC

SEQ ID NO: 172678 - protein, 122 aa, Glycine max
  Clone ID: PAT_MRT3847_126944C.1.pep
SSFCHQLLGTGHRQTMVSENDEMPIGWPFGLGFLNMRFRDAESLPAAPVEPHSMHIPSTSFSSFSSSNLDTESTASFFQDNSVSLGHLIGLRPGEKGLLVLPKHTKIRRNGEEENISKLFMF

SEQ ID NO: 172679 - protein, 92 aa, Glycine max
  Clone ID: PAT_MRT3847_126945C.1.pep
MTKRTKKVGVTGKYGTRYGASLRKQVKKMEITQHAKYTCTFCGKTTVKRQATGIWDCKSCKRTVAGGAYVVATPAAAAMRSTLRRLREIAEV

SEQ ID NO: 172680 - protein, 62 aa, Glycine max
  Clone ID: PAT_MRT3847_126946C.1.pep
QAHATSYTYLTAQRMVINQSEHYNGNGYSTLWRSKSTYVKTCHKSEQLPVDIIYKKCATETS

SEQ ID NO: 172681 - protein, 53 aa, Glycine max
  unsure (1)..(53): unsure at all Xaa locations
  Clone ID: PAT_MRT3847_126947C.1.pep
HFASNSRIIHIKFPSMLKKAQAMLVATNXSFFFPRKEARVKFILDCISLERAL

SEQ ID NO: 172682 - protein, 131 aa, Glycine max
  unsure (1)..(131): unsure at all Xaa locations
  Clone ID: PAT_MRT3847_126948C.1.pep
THASAHAXGLREEGRRGNRXXERXHTLPPTXIKGHPQPRXAASSLLPSMMLFFSPKYPYPFLFFPGGTRXXPAPXDKETRXXGEAARARXGXGREEPRRHGGAGGDARKRRPRRRTADGRRXQRXXRHERR

SEQ ID NO: 172683 - protein, 112 aa, Glycine max
  Clone ID: PAT_MRT3847_126949C.1.pep
MKTVSLVHKTEELANKTVVFDFEGTLLRSASLFPYFMLVAFEAGGLLRSLVLFVSYPLVWLVGEDQLGLKIMVFLTLFGIKKDTFRIGSAVLPKFFLENMGWEGFEAIMRCN

SEQ ID NO: 172684 - protein, 81 aa, Glycine max
  Clone ID: PAT_MRT3847_12694C.1.pep
TIVFIEPLCWPLHNTSERWGYLSVILIKKEVIYGVPCLLWPNTVSLRKWGCAIKRCKTLPFWTCGGGGKILSRFLFQFRIH

SEQ ID NO: 172685 - protein, 261 aa, Glycine max
  unsure (1)..(261): unsure at all Xaa locations
  Clone ID: PAT_MRT3847_126950C.1.pep
SSFFFLPAPPLHLPLPRRQRPLKTFKLSNAASDLRLEAAQNAINSIGLGFDITQDIXFDNCKKGSRLIFVNEEQCRHLEIPGGVSIPNVPNSIKCVRGESIRFESDVLTRDQMMEHFNQQMLLSGNLASGHLCASFGLSDSNLKTLASIKPLAYDGWFIKRYTIELERRQGELLDHVKEAVPSSWDPEALARFVPRAGSLVVGGVSLRRQVALYLGLGLTSYLRPSRIPYLFNGAAPSWFVVSAAYRSLLFILSNNNKSSN

SEQ ID NO: 172686 - protein, 57 aa, Glycine max
  Clone ID: PAT_MRT3847_126951C.1.pep
LEPHALARFLVLPFTLLCLFLRRPSEIPVTPLAGDPLVLPHPTSAFPMRIMPSLGPA

SEQ ID NO: 172687 - protein, 130 aa, Glycine max
  unsure (1)..(130): unsure at all Xaa locations
  Clone ID: PAT_MRT3847_126952C.1.pep
FEDMASYWPQLHYVARNSLEMLDAYVDHFVNDLREYVLHIPEDAGQSRRKGLSRIEWLQKVDWPTIPQIDEFHXMQRMMNAPDLNDYIDLLMSIDVXGLHKSXKGFANKIVFDXDSCVLPYTHKFFDGNF

SEQ ID NO: 172688 - protein, 38 aa, Glycine max
  Clone ID: PAT_MRT3847_126953C.1.pep
NVWKVEQSAINIVLPLPLLLLFNYKEKLHFTPLISLKN

SEQ ID NO: 172689 - protein, 34 aa, Glycine max
  Clone ID: PAT_MRT3847_126954C.1.pep
LVCQGITTLFFVFYSSALINHPPGFTFDMDRREN

SEQ ID NO: 172690 - protein, 88 aa, Glycine max
  Clone ID: PAT_MRT3847_126955C.1.pep
TRADSARVRLREDDRLGKLETLEVVKKLKVIVFFVAIIILGAEWQCNGSEHELEQGNSYQISPGEMKTAPGGKYIREVSCKSWRLGVE

SEQ ID NO: 172691 - protein, 98 aa, Glycine max
  unsure (1)..(98): unsure at all Xaa locations
  Clone ID: PAT_MRT3847_126956C.1.pep
HVAALQIIIDRTPSPDCNIINAMLXEDTYHTSPXNAGEKVFVAPFTGRRPIRLATYHNTILQMEPYMNTRVQLLSTTTNGDFDQGKNLTMCNSNVPCA

SEQ ID NO: 172692 - protein, 87 aa, Glycine max
  unsure (1)..(87): unsure at all Xaa locations
  Clone ID: PAT_MRT3847_126957C.1.pep
GSSGSCGQRAYDLSRLARDEDAMSLEWVKELVKDMKLETLXDPNWLGNGSIAEVVELIQVGFLCTQKSXMMRPKMTAVARVLQAVGS

SEQ ID NO: 172693 - protein, 193 aa, Glycine max
  Clone ID: PAT_MRT3847_126958C.1.pep
MGPKGEKKNTRRGVLLYDFFLFYIILLSLFGFVFCFYYRLVFPLCQKDVEKAKKLRGFIAEKRCAPLMLCLVCFMDYRFDAFWCVSCAYGTLLEPLTRAQTPVDPSDIAIRLLEPLKAEFPILSYADFYPLAGVVAVEIMGGPEVPFHPGRESTQIGNQLNITTMGEVTCFLFQILALWRINNSYALDFAVDR

SEQ ID NO: 172694 - protein, 330 aa, Glycine max
  unsure (1)..(330): unsure at all Xaa locations
  Clone ID: PAT_MRT3847_126959C.1.pep
VKEERRKKKIANFEIVEIXKMKREERPAAIKILQYDCGYLCFFELVNIGIAIEHREEAEERXTKKRLRITSRAKVRKKWVTSXGLESVQSEINDLDWESTFFLRHLPLSNASDNADLDQDYRKTMKKFALELEKLAEQLLDLLCENLGLEKGYLKKVFYGSKGPNFGTKVSNYPPCPTPDLIKGLRAHTDAGGIILLFQDDKVSGLQLLKDDQWIDVPPMRHSIVINLGDQLEVITNGKYKSVMHRVIAQTDGTRMSIASFYXNPGDDAVISPAPALVKELDETSQVYPKFVFDDYMKLYAGLKFQAKEPRFEAMKANASVVDVGAIATV

SEQ ID NO: 172695 - protein, 83 aa, Glycine max
  Clone ID: PAT_MRT3847_12695C.1.pep
CYASKWLFHLKAVTWEKKIVDGFLSELGFVLMAKGLEGNLFILLMNKHFYMWSYMQNMKEEGQVIVVTEYGFGVLSKVDRVLI

SEQ ID NO: 172696 - protein, 88 aa, Glycine max
  Clone ID: PAT_MRT3847_126960C.1.pep
NNDVDTITFLSYPTSSKYKYLQRIIRDGKQEQKRGMYTKTQLCLLLTSFCPAISDNILNSNQHLSLNKTIAEIHDAELITLMLASSLN

SEQ ID NO: 172697 - protein, 348 aa, Glycine max
  Clone ID: PAT_MRT3847_126961C.1.pep
MSLVDLMGGEIGFVSEPGIGSTFSFTGTFRKGESTSLDAMQQNNHFGSEFQGLRTLVVDSRKIRAEVTRYHLQRLGMSVDVTYSLNSACSCLSNVCNKSMSTQLAMILIDKDAWDKECHILYTIKKRRQNGIKGDPMNLPKIFLLATHLSSNEQDGLKSVGIIDDILMKPLWLSSLIQCYRVSLGTENKRVNREKVSKLGNLLIDKQILVVDDNAVNRRVAHRVLQKYGAKVTAVESGRAALKMLELPHNFDACFMDLQMPEMDRFEATRKIRCLESEVMEKIACGQASAEMFGNISYWHIPILAMTADSTQSSNEECIKCGMNDYVSKPFEEEQLYMAMARFFKSDS

SEQ ID NO: 172698 - protein, 395 aa, Glycine max
  Clone ID: PAT_MRT3847_126962C.1.pep
MASASATLLKSSPVLDKCEWVKGQTLRQPLVRCNPSSASALTIKAASYADELVKTAKTVASPGRGILAMDESNATCGKRLASIGLENTEANRQAYRTLLVTVPGLGEYISGAILFEETLYQSTVDGRKIVDVLVDQNIVPGIKVDKGLVPLAGSNDESWCQGLDGLASRSAAYYQQGARFAKWRTVVSIPNGPSALAVKEAAWGLARYAAISQENGLVPIVEPEILLDGEHGIDRTFEVAQKVWSEVFFYLAENNVLLEGILLKPSMVTPGAESKDKATPLQVADYTLKLLHRRIPPAVPGIMFLSGGQSEVEATLNLNAMNQSPNPWHVSFSYARALQNTCLKTWGGLPENVKAAQDALLFRAKSNSLAQLGKYTAEGESEEATRGMFVKGYSY

SEQ ID NO: 172699 - protein, 88 aa, Glycine max
  Clone ID: PAT_MRT3847_126963C.1.pep
SNDESWCQGLDGLASRSAAYYQQGARFAKWRTVVSIPNGPSALAVKEAAWGLARYAAISQENGLVPIVEPEILLDGEHGIDRTFEVAQ

SEQ ID NO: 172700 - protein, 54 aa, Glycine max
  Clone ID: PAT_MRT3847_126964C.1.pep
MEKMELAETPLPLLSLNHVSFVCKSVSESVKFYEDVLGFLLIKRPSSFKFEGAW

SEQ ID NO: 172701 - protein, 147 aa, Glycine max
  Clone ID: PAT_MRT3847_126965C.1.pep
GIQFCLMVCGASGTGRTTFVNTLCGKQVLQPMDADDPTTAHIEEGVKIKPVTVELELDEGSTRVSLTIVDTPGFGDSIDNEAAFHEIVDFLERQYDDILAEESRIKRNPRFRDNRIHVLLYFIQPTGHGLRELDIELMRRLSLRVNV

SEQ ID NO: 172702 - protein, 46 aa, Glycine max
  Clone ID: PAT_MRT3847_126966C.1.pep
GKNKGTQLNSQKLFTFHITNKITGGAHPPPRPRWKETLLIKPKPKF

SEQ ID NO: 172703 - protein, 114 aa, Glycine max
  Clone ID: PAT_MRT3847_126967C.1.pep
TRTRPFTLSKKKRKQEKQTGAKKKKGKKKKPTKKKKKRKGGAHRKDRGKPTREANERAWQNSPQRQLDETPNKTGATGKPTGAQPKGEGNHPRSPHDERGKGAAPTAVPKKRPA

SEQ ID NO: 172704 - protein, 116 aa, Glycine max
  Clone ID: PAT_MRT3847_126968C.1.pep
MIMGIGDKKKKTNTRECETTSSLELQLKKRNEELEEELSQSKEREEHVRRQLRAALDRLTVAEEAEERLCAQLGDLEAEALQQAREYHARIVSLVDQLSQAHSLLLNTPIPLHSRS

SEQ ID NO: 172705 - protein, 160 aa, Glycine max
  unsure (1)..(160): unsure at all Xaa locations
  Clone ID: PAT_MRT3847_126969C.1.pep
LTLSATYKRGVQFRHNCVNYKRKTVRCAVTSADASPPPSTSLAKEPHKYFDHVIITVRAGDGGHGAVLNQQQQQQQQQQQGKTKLKKGKGSLKRDFDGSLILPMGGHGGDVVLYADECKDTLLEFHNKGRYHAKRGGNVDAMGVLTXMLRDGLAAPTLRI

SEQ ID NO: 172706 - protein, 276 aa, Glycine max
  unsure (1)..(276): unsure at all Xaa locations
  Clone ID: PAT_MRT3847_12696C.1.pep
MSGLYNQISSPSTARANSPNINMRSNFEAESQYLTELLAEHQKLGPFMQVLPLCTRLLNQEILRVSGKNGMMQNQGFSDYDRVQFGSPKPNLMPSLDIQPNFTGWNSLSHEGLAGVQGLNVDWQTSPGVPSSHIVKRILRLDIANDSYPNFNLVGRLLGLRGNSLYWFSXNTGWGVFIKGKGSIKELNKEELLRGRPGYEHLNEPLHVLIEAELPVNVVDIRLRQAQEIIEELLKPMDESQDLHKRQQLRELAMLNSNFREDSPQLSGSPSTFNSN

SEQ ID NO: 172707 - protein, 84 aa, Glycine max
  Clone ID: PAT_MRT3847_126970C.1.pep
EKKCLKHKLQRGGAEILQRPELLLLSLKIPPKHQLHKILQLPRPTPRTPHVNWISQIYKQISPKENAQAFFFFLKPSMSKPPNC

SEQ ID NO: 172708 - protein, 109 aa, Glycine max
  unsure (1)..(109): unsure at all Xaa locations
  Clone ID: PAT_MRT3847_126971C.1.pep
SPTLASTTSGSTVSEQTRILKAQFLKDVQTYHTHTALKFGSTLHFLHQRLPQYKVXQLKLRAEHRDPQDLTPHIDKYINDVSILKTKKGTAEELIADFEASECNNATSR

SEQ ID NO: 172709 - protein, 94 aa, Glycine max
  Clone ID: PAT_MRT3847_126972C.1.pep
TQRDVGDGSGVVAVDSSSVFPVSGNVYPDGLYFTILRVGNPPKSYFLDVDTGSDLTWMQCDAPCRSCGKGAHVQYKPTRSNVVSSVDSLCLDVQ

SEQ ID NO: 172710 - protein, 145 aa, Glycine max
  Clone ID: PAT_MRT3847_126973C.1.pep
PLNPIISLFKRSMTLLRANVTQSIRRCVLFLKGRAEELGKLYNAGIEGFQNSQEFQDLISAIYLSGLRDGLLEAQAVLLALNMDRKTPVFKEKEEEHVIDHDVAVNESAIVADIPIPIGPDVDNPISDTDNPSSSKDFFNWQEFI

SEQ ID NO: 172711 - protein, 57 aa, Glycine max
  Clone ID: PAT_MRT3847_126974C.1.pep
FIPWSSLISGATNYFWLLCNHPYQGETLIQIVDQHPKHLRNSIQVLSLVYLFSIIIY

SEQ ID NO: 172712 - protein, 82 aa, Glycine max
  unsure (1)..(82): unsure at all Xaa locations
  Clone ID: PAT_MRT3847_126975C.1.pep
KRIKKREXRPRRYRIATIINFYIVLRSVFFVRHPVSLCFKDLDTIYAPLGVLLVVLCIFISFFYHRNLFSTCKVNFNRSLVP

SEQ ID NO: 172713 - protein, 100 aa, Glycine max
  unsure (1)..(100): unsure at all Xaa locations
  Clone ID: PAT_MRT3847_126976C.1.pep
WLLFKFHDYNYXLKIKGCIDKDSGDLAGLRGSRKSIILGTQHRRDEHVNNPSNTPALCTIGHXTLRELRGGNGGRASREADLIVTEELVMITFETYVYEP

SEQ ID NO: 172714 - protein, 40 aa, Glycine max
  Clone ID: PAT_MRT3847_126977C.1.pep
TSITSNPSYIICNSYNIINLFCITINHTSILSHYQKSIII

SEQ ID NO: 172715 - protein, 181 aa, Glycine max
  unsure (1)..(181): unsure at all Xaa locations
  Clone ID: PAT_MRT3847_126978C.1.pep
MAFSALKEEDLKLMLAARVHIGTKNIDPQQHRYVWRRRQDGVYIINLGKTWEKLQLAARVIVAIENPEDVTVISARQYGQRSVFKFAQHTGAQYIGGRYTPGTFTNQIQKKFLEPRLLVVTDPITDHQPVKESSYVNIPVIAFTSYDAPLTHXDLAIPCNNQGKQSIALMYWLLAREVQRM

SEQ ID NO: 172716 - protein, 90 aa, Glycine max
  Clone ID: PAT_MRT3847_126979C.1.pep
AFIDLGPEYRTIYSQACEEEGLSTALRKLGPPRQIEGSPPSLLGVVLFKKKFCSLRGFLQNKAGSFYLEIHQSVFGIVSNTGKSPWLFME

SEQ ID NO: 172717 - protein, 133 aa, Glycine max
  Clone ID: PAT_MRT3847_12697C.1.pep
MIQGTNRLRILCLNTLEGTSFVVQVECTTTFFNTENKRGYISCGSVQVEGKSTWVVQREQGRVHPLCIFACKGFYKAKGHFGAVAARPGELELSVEAMSSLRLVGYFTMKLFGGPCEPKAMMRTRQGIRARNL

SEQ ID NO: 172718 - protein, 644 aa, Glycine max
  Clone ID: PAT_MRT3847_126980C.1.pep
PTRPPTRPNFCYQKTTSKFEALRLVCATSCSSHQPWASPIPTLTTLPKCTTAEHVNQLHARMITTGFLKNPSLTAKLVLSCISSPREPLVEFARYVFFKHHAFRDFRDDPFLWNALLRSHSHGCDPRGALVLLCLMIENGVRVDGYSFSLVLKACARVGLVREGMQVYGLLWKMNFGSDVFLQNCLIGLFVRCGCVELARQLFDRMADRDVVSYNSMIDGYVKCGAVERARELFDSMEERNLITWNSMIGGYVRWEEGVEFAWSLFVKMPEKDLVSWNTMIDGCVKNGRMEDARVLFDEMPERDSVSWVTMIDGYVKLGDVLAARRLFDEMPSRDVISCNSMMAGYVQNGCCIEALKIFYDMKRATNVVPDDTTLLIVITAFAQLGHVEDGVVIHHYLMDKGYSLNGKLGVALIDMYSKCGSIDNAISVFENVEQKCVDHWNAMIGGLAIHGMGLMAFDFLMEMGRLSVIPDDITFIGVLSACRHAGMLKEGLICFELMQKVYNLEPKVQHYGCMVDMLSRAGHIEEAKKLIEEMPVEPNDVIWKTLLSACQNYENFSIGEPIAQQLTQLYSCSPSSYVLLSNIYASLGMWDNVKRVRTEMKERQLKKIPGCSWIELGGIVHQFSVQDRTHPQVTEIYSLLSSL

SEQ ID NO: 172719 - protein, 72 aa, Glycine max
  Clone ID: PAT_MRT3847_126981C.1.pep
KKGGGNKPLFKNRAPNRKPPFFLVKKRRKKKKQDGEPRFQKKNNNFLTFHFLKKKKTPPLLEGKKRETPLVC

SEQ ID NO: 172720 - protein, 88 aa, Glycine max
  Clone ID: PAT_MRT3847_126982C.1.pep
TPPTPPPFQSTTTTFLTFFPPSNPQPHTKKQPSNLQSHPPEIATTPNKKKKNWVLFQTTINYFCFYYSLLTNEIIKDSTNYTNFERKK

SEQ ID NO: 172721 - protein, 164 aa, Glycine max
  unsure (1)..(164): unsure at all Xaa locations
  Clone ID: PAT_MRT3847_126983C.1.pep
KLGIRLVQEIKDCLSYVYRYWTEKGICWARNSNVQDIDDTAMGFRLLRLHGYQVSADVFKNFERNGEFFCFTGQTTQAVTGMFNLYRATQIMFPGERILEHGKHFSAKFLKEKRAANELVDKWIIMKNLAEEVAYALDVPWYASLPRVETRFYIDQYXGESDXW

SEQ ID NO: 172722 - protein, 83 aa, Glycine max
  Clone ID: PAT_MRT3847_126984C.1.pep
KKGGVWPHFPPPKGGPPPFFPPPPKKAPPPLGGEGGGPPPQSKTPPGGPPPPKFPGGNPQARSFLVKNNLFKFGGALSPPKLV

SEQ ID NO: 172723 - protein, 84 aa, Glycine max
  Clone ID: PAT_MRT3847_126985C.1.pep
AVEYQFTINFNPFYHGRLALKPKPYFKNHPHFFFIKPNTLSHGTLNFIVYHCTISVNTNTNPQALYLPLSIHFNNHHPTMPPKC

SEQ ID NO: 172724 - protein, 343 aa, Glycine max
  Clone ID: PAT_MRT3847_126986C.1.pep
ILHPAEKVIIEPASSRSGTNVNPVNPSIRSSVPPPTFAKFFAIASLQQYTNSFSQENLIGGGMLGNVYRAELPNGKLLAVKKLDKRASAHQKDDEFIELINNIDKIRHANVVELVGYCSEHDQRLLIYEYCSNGSLYDALHSDDDFKTRLSWNSRIRISLGAARALEYLHEQCQPPVVHRNLKSAHILLDDDLSVRASDCGLAPLIASGSVSQLSGNLLTAYGYGAPEFESGIYTYQSDVYSFGVIMLELLTGRQSHDRARARGEQFLVRWAVPQLHDIDALSRMVDPSLNGNYPAKSLSNFADIISRCLQSEPEFRPAMSEVVLYLLNMMRKESQQSESNEK

SEQ ID NO: 172725 - protein, 34 aa, Glycine max
  Clone ID: PAT_MRT3847_126987C.1.pep
ACCSIIAICNKDLGRVLRILGRLLLILYTLNLII

SEQ ID NO: 172726 - protein, 83 aa, Glycine max
  unsure (1)..(83): unsure at all Xaa locations
  Clone ID: PAT_MRT3847_126988C.1.pep
LAFVVAAAGVLLSTLRERGXXXMXXWLCGYAFECVLHMAFVCXEFRTRIGDSSXHTTYSVXXRLEPMSTLATSVWWVFGFYWI

SEQ ID NO: 172727 - protein, 257 aa, Glycine max
  Clone ID: PAT_MRT3847_126989C.1.pep
MKPNFDLEVEACAEYESEVSSQVASNVSIQETSIGPCSDSLTNISNITNPIGIHPNSDAISLDLSLNFKNSEPGGRDSIGFSFSSTSESSNEPASQTTAATIPRVFSCNYCQRKFFSSQALGGHQNAHKRERTLAKRAMRMGFFSERYANLASLPLHGSFRSLGIKAHSSLHHGFLPTMRPPEIKSNARYDQGYLGHPIFLEDDESDLLWPGSFRQVAEAGDSHQNFILTGSSNLSFTEVNPPVDIDNSTPDLTLKL

SEQ ID NO: 172728 - protein, 78 aa, Glycine max
  Clone ID: PAT_MRT3847_12698C.1.pep
IRLEVSSYLEGEVAKEFIAWLVKCRGRRDFPEEVAIVEELGRRHADGSFTDEMNTILDNLAARDFINWLIQTKITDRK

SEQ ID NO: 172729 - protein, 93 aa, Glycine max
  unsure (1)..(93): unsure at all Xaa locations
  Clone ID: PAT_MRT3847_126990C.1.pep
RAGRRVRPRFLFAETVFLWAAYYLLVLVLFKHIVAPYSYXLSIERNDSSWQKAFSDIRCNKNYLYXRNHHMQCYNPWNKTNLIYSVQVALQIL

SEQ ID NO: 172730 - protein, 61 aa, Glycine max
  Clone ID: PAT_MRT3847_126991C.1.pep
HPIFLEDDESDLLWPGSFRQVAEAGDSHQNFILTGSSNMSFTEVNPPVDIENSTPDLTLKL

SEQ ID NO: 172731 - protein, 180 aa, Glycine max
  Clone ID: PAT_MRT3847_126992C.1.pep
NSDIFFMLLIMFPRVRSDPEGRLGEAPRPELREQGRISGACFDAARGIVPGLKVRGTDYKTADGTCVRDYIDVTDLVDAHVKALEKAQPSNVGIYNVGTGKGSSVKEFVEACKKATGVDIKVDYLPRRPGDYAEVYSDPSKIKRELNWVAKHTDLQQSLKVAWRWQKSHRDGYGVSNALF

SEQ ID NO: 172732 - protein, 120 aa, Glycine max
  Clone ID: PAT_MRT3847_126993C.1.pep
MKPNFDLEVEACAAYESEVSSQVASNVSIQETSIDAISLDLSLNFKNSAPGGRDSIGFSFSSTSESSNEPASQTTAATIPRVFSCNYCQRKVFSSQALGGHQNAHKRERTLAQRAMRMGF

SEQ ID NO: 172733 - protein, 153 aa, Glycine max
  Clone ID: PAT_MRT3847_126994C.1.pep
RPELREQGRISGACFDAARGIVPGIKVRGTDYKTADGTCVRDYIDVTDLVDAHVKALEKAQPSKVRFYNVGTGKGSSVKEFVEACKKATGVDIKVDYLPRRPGDYAEVYSDPTKIKHELNWTAKQTDLQQSLKVAWRWQKSHRDGYGVSNAVL

SEQ ID NO: 172734 - protein, 35 aa, Glycine max
  Clone ID: PAT_MRT3847_126995C.1.pep
VINFLNKNKELHIIHLLILQYCLIQVFLCYYKNIV

SEQ ID NO: 172735 - protein, 77 aa, Glycine max
  Clone ID: PAT_MRT3847_126996C.1.pep
PITATPKLILCLASKKNIFFSLQGLYYQTHTCFCDPTLSKLLPKIKICIRFLFSAQQKTHKLSCPPQKVTPQHHKEK

SEQ ID NO: 172736 - protein, 123 aa, Glycine max
  Clone ID: PAT_MRT3847_126997C.1.pep
DIFQLLPTFNLLFVLKFFLFFWFTTTSSGLRSKTQTFFCLFLFHHNLFFFYLTHGVTHRNSSILFFASSEVSHSQTHSRFRLPLLIIRFKPTSTFVFHFCFQRPAAFLSSHCTRHKSSAELYQ

SEQ ID NO: 172737 - protein, 43 aa, Glycine max
  Clone ID: PAT_MRT3847_126998C.1.pep
MDMDRRSWLWRRKSSEKNPGEIESSGSMSSHSERFSDDLVPSF

SEQ ID NO: 172738 - protein, 91 aa, Glycine max
  unsure (1)..(91): unsure at all Xaa locations
  Clone ID: PAT_MRT3847_126999C.1.pep
RKTNPLMELINHSLIDLPTPSNISAXXDFGSLLGACLXLQITTGLFLAMHYSPDASTAFSSIAHITRDVNYGXIIRYLHANGASIFFICPT

SEQ ID NO: 172739 - protein, 258 aa, Glycine max
  unsure (1)..(258): unsure at all Xaa locations
  Clone ID: PAT_MRT3847_12699C.1.pep
MSTSKCAFRRGCPNKWRAFEEVALLTCPSGLDFAMGAADPTVGREALAAAAAMHRVPPAATPAVSATYCNGRKLASRNVKDACDTTRPYXEPNRKRLGCXVSLMLLHAILMILMYTVHIQIERRIYYDEVQGLTVEWLETTSTLVLSMSTSKCAFRRGCPNKWRAFEEVALLTCPYNLDFTMDNSNQSEVMKVDDSITAMDREEPISRSDLSETVIDPAFFPLTVCLLSTIPVALHAVGGDDGPLDIGVRLYMSSYIG

SEQ ID NO: 172740 - protein, 66 aa, Glycine max
  Clone ID: PAT_MRT3847_1269C.1.pep
LRVQPNGHFISLTRFQVNISLPASFLVYSGISSYTHDIFHISTYCLCICGGVLTDAGGRISKSFLL

SEQ ID NO: 172741 - protein, 98 aa, Glycine max
  unsure (1)..(98): unsure at all Xaa locations
  Clone ID: PAT_MRT3847_126C.1.pep
FRVGLEASEKPSIWVIRERNPTEVLNRWINXLSFEERTQGEGLLIRCWAPEVLILLHPAIGGFLTHCGWNSSIXAICAGMPMLTLPVFVDQLFNVKFI

SEQ ID NO: 172742 - protein, 494 aa, Glycine max
  unsure (1)..(494): unsure at all Xaa locations
  Clone ID: PAT_MRT3847_127000C.1.pep
TRPKNHPRSPAISLXTGLVYVRRVQITPCKVYFCGPEMNVSNRVLRHFREHIDNFLRVSFVDEELDKLFSTDLSSRSQNKKTEIYTRILSILKNGIVVGDKKFEFLAFSSSQLRENSLWMFAPTETGCTAAYIRKWMGNFSQIRNVAKYAARLGQSFGSSTETLSVHRDEVEIIPDVKKLTYDGNEYVFSDGIGKISLEFAQKVAKKCGYDCTPSAFQIRYGGYKGVVAVDPKSCYKLSLRKSMRKYDSDNTKLDVLARSKFQPCYLNRQLISLLSTLGIKDDVFEKKQRETVNQLNTILTDSLKAQEVLDLMSAGEITNVLKEMLICGYKPNEEPFLSMMLQTFRASKLLELRLKSRIFIPKGRAMMGCLDETRTLEYGQVFVQFSNNRLQNLSDDFFSYDLPKNYMVKGKVVVAKNPCLHPGDVRVLQAVDVPDLYHMVDCVVFPQKGPRPHPNECSGSXDLDGDIXXCXXDHEXLILXRPIDPMDYTAPCT

SEQ ID NO: 172743 - protein, 87 aa, Glycine max
  Clone ID: PAT_MRT3847_127001C.1.pep
EKEQEEDDKAVPLTGPATKRKIQAVAISRLRSVLTVFSKNHRSNLPFGLGSRVVGTLFGYRRGHVHFAFQRDPTSQPAFLIELATPI

SEQ ID NO: 172744 - protein, 54 aa, Glycine max
  Clone ID: PAT_MRT3847_127002C.1.pep
TKLYVTSQLHSTITELYSNYTSFNSNLLYIIHYAYWMHYMYHMKNYRYLPYSLY

SEQ ID NO: 172745 - protein, 63 aa, Glycine max
  Clone ID: PAT_MRT3847_127003C.1.pep
FEFQPSGSVKSFCEKKETIFLNQQEDIFGWEKIKRGLFKTQIQIGWVKSKTINGYYELFPPPN

SEQ ID NO: 172746 - protein, 165 aa, Glycine max
  Clone ID: PAT_MRT3847_127004C.1.pep
HEHHSSVEPRQEAVTEYRVLGPQINGCSWVELRPLTYRKHQLRVHCAEALGTPIVGDYKYGWFVHSRWKQMPRVDIEPTTGKPYKLRRPEGLDVQKGSVLSKVPLLHLHCRELVLPNIVKFMHVLNNSSEELRTSLREQPDVLRFVATMPSHMRISWNLMSSYLV

SEQ ID NO: 172747 - protein, 86 aa, Glycine max
  Clone ID: PAT_MRT3847_127005C.1.pep
LEWDLSKGSLKPSTLFLRLLSLHFSISLSNFHRRFQGPATLGNCPGSGPNSFAQHVSVFASISDEQFQCYPCTLITSEEANGEWLL

SEQ ID NO: 172748 - protein, 50 aa, Glycine max
  Clone ID: PAT_MRT3847_127006C.1.pep
IIVTIHFLPTPKSTLSHFNSKNQRVHQIPSNRKQQQTAKIISVPFNNRVD

SEQ ID NO: 172749 - protein, 251 aa, Glycine max
  Clone ID: PAT_MRT3847_127007C.1.pep
MSLNAMAFTKLRVSSFTSSLASNNSRPSIYQPWNLSLQSSKIGMVPNKLSIKSVAFSDKVPSQTYLGTKDLDQVIRKGQEALLNSSDPLRTLKIIDTIQKLGIEHHFEKEINLQLGRVGDWDTAEDLFATALQFRLLRHNGWPTCSDVFNKFLDKSGNFKESVTRDIWGMLSLYEASYLGAKGEEVLQQAMDYSRAHLCQSLPHLSPKVRSIVAEALKLPSNQRMVGLEAKNYMVEYSQASNQIPALLELA

SEQ ID NO: 172750 - protein, 49 aa, Glycine max
  Clone ID: PAT_MRT3847_127008C.1.pep
LVLFKANNIVLIWRFHLCDSNFFNFDFQETKAERHGSRTTSTNNASSAT

SEQ ID NO: 172751 - protein, 81 aa, Glycine max
  unsure (1)..(81): unsure at all Xaa locations
  Clone ID: PAT_MRT3847_127009C.1.pep
NXKLFGFFGAXXALXAWPCLGAGXQXFRWRMKTGYGARXSXXXCAXPRLAGXAHSLXAXQPLPXEGXRPPPGSIXGAPRRA

SEQ ID NO: 172752 - protein, 62 aa, Glycine max
  Clone ID: PAT_MRT3847_12700C.1.pep
LTLLVRSFFAYYAINTISFSLEMVSTYDMGGYMLIASSTSLIMPPGMGFTRLISACTYTFSS

SEQ ID NO: 172753 - protein, 96 aa, Glycine max
  unsure (1)..(96): unsure at all Xaa locations
  Clone ID: PAT_MRT3847_127010C.1.pep
RGADEHVRSAVSIARLGVIALRDNEMRFQIYKDGLRFIDGHNYHXDRTYMLGLNRVSDLTNEECRAMCWGTKIDPRLRLGXIASNRHAPRVGDILP

SEQ ID NO: 172754 - protein, 79 aa, Glycine max
  Clone ID: PAT_MRT3847_127011C.1.pep
CFSGWGIFQLFFPCDRGYNVASLRSLGHGLFCPLPLFCGLPSLREGDLTWCGHIPYVYFWLVKVSCIHWFLSVTKSTKV

SEQ ID NO: 172755 - protein, 69 aa, Glycine max
  Clone ID: PAT_MRT3847_127012C.1.pep
NLFIIHFRWLLLGLSRCSIHIRAFICCTTGIQCRELQTQWYCWRKAPKQQGSCVSIDLILFEGFHIESC

SEQ ID NO: 172756 - protein, 250 aa, Glycine max
  Clone ID: PAT_MRT3847_127013C.1.pep
MGLSSLHVCMDSSDHWLQGTIHEESGMDSSSSPSGDMLTCSRPMIERRLRPPHDQALKCPRCDSTHTKFCYYNNYSLSQPRYFCKTCRRYWTKGGTLRNIPVGGGCRKNKKVSAKKSNDHQLVNNNNINQTRPPHHHHPKDLQLSSFPDVQFSHLSNLLGTNANPSFMEGKYGIGMIENPRPIDFMMESKLEGIIGSGSSSRNNFDFFGNSDMSMGMTSVGLGDMNSTQNGLPPNFHHHGLSAFGGMSMS

SEQ ID NO: 172757 - protein, 68 aa, Glycine max
  Clone ID: PAT_MRT3847_127014C.1.pep
PLVKEEMWRRIEFSNKILQQGLKALIRWYQIWPQTHYHIYNLMLCADNVKRKEKYQQQLTHVIAACVS

SEQ ID NO: 172758 - protein, 87 aa, Glycine max
  Clone ID: PAT_MRT3847_127015C.1.pep
SLSDHVGHGNKKKIAGITVGVTIVGLIITSICILMIKNPRVARKFSNKHYKNKQGIEDIELPTFDLSVLANATENYSTKNKLGEGGF

SEQ ID NO: 172759 - protein, 100 aa, Glycine max
  Clone ID: PAT_MRT3847_127016C.1.pep
SPSRGPSHSRGRSYSRSRSRSRSYSRDRSQSKSPKGKSSQRSPAKSPSRSPSRSRSRSRSLSGSRSRSRSPLPPRNKSPKKRSASRSPSRSRSRSKSLSR

SEQ ID NO: 172760 - protein, 55 aa, Glycine max
  Clone ID: PAT_MRT3847_127017C.1.pep
CCYSKEEPEAFLNEPFLQENIFACAQILAKGPAKTMILLTKHLYFLKRGRFLKEA

SEQ ID NO: 172761 - protein, 68 aa, Glycine max
  Clone ID: PAT_MRT3847_127018C.1.pep
PPNPFPPQSLGLPPFAPPKGRAPKKGGPPGPIREMPFPPKKPKFKRARKAIKGVAPAKRLKKLKSRAA

SEQ ID NO: 172762 - protein, 88 aa, Glycine max
  Clone ID: PAT_MRT3847_127019C.1.pep
MKVAFAAVLLICLVLSSSLFEVSMAGSAFCSSKCSKRCSRAGMKDRCMKFCGICCSKCNCVPSGTYGNKHECPCYRDMKNSKGKAKCP

SEQ ID NO: 172763 - protein, 644 aa, Glycine max
  unsure (1)..(644): unsure at all Xaa locations
  Clone ID: PAT_MRT3847_12701C.1.pep
SARAIASEQEATGMPQLDFSCRILVLGKTGVGKSATINSIFGQAKTTTGAFQPATNCIQEVVGNVNGLNIAFIDTPGFLPSSTNNMKRNKRVMLSIKRFIRKSSPDIVLFFERLDFINAGYVDFPLLKLVTEVFGSAIWFNTIIVMTHSSSAIPEGPDGYTFNYESYISYCTNIVQHHIQQAVFDSKVENPVLLVENHSRCPQNIMGEKILPNGQVWRSQLLLFCICTKVLGDVNSLLKFQNSVELGPLNSPRIPSMPHLLSSLLRHRLVSNLSGTDDEIEEILLSDKKEEDEYDQLPSIRVLTKSQFEKLPEPLKKDYLDEMDYRETLYLKKQLKEDYRRRKEKLLSTDKKFLNSDNPDDQQAPTEPVLLPEYAVVXSFDSDCHSHRYRWLVSDDRLLVRPVLDPQGWDHDVGFDGINLETTTEIKKNVYASVVGQMNKNKQDFSIQSECVAAYVDPSGPTYSMGVDVQSSGKDFICTIHSNTKLKNIKHNIADCGVSLTSFAKKYYVGAKLEDTVFVGKRLKFVLNAGRMEGAGQMAYGGSFEANLRGDDYPVRNDNVSLTMTVLSFNKEMVLSGSLQSEFRLSRSSKASVSANLNSRKMGQICIKISSSEHLQIASVAILSIWKFLSRRKETKNLVKEVMD

SEQ ID NO: 172764 - protein, 159 aa, Glycine max
  Clone ID: PAT_MRT3847_127020C.1.pep
FGSRRRRQKGGKSRKYSKGYATGFVPDFRHAVETIDESEGLGSLGRVDMELTALADSCAPKRKRPGLNTCGGDYAGSFNVPFRHFSLSAMSGFERKDLKVRLTWELEQVREFQKKIDGMNSSVVGGLSLFSDIRGCSAGQKRPKLESQHSTMEVSVPPG

SEQ ID NO: 172765 - protein, 97 aa, Glycine max
  unsure (1)..(97): unsure at all Xaa locations
  Clone ID: PAT_MRT3847_127021C.1.pep
FMSHEMEALAENPGRSRDLKHPSKNPTKPPQPNQFPSHLDAPNVSSTARALCDILTRSSPXDIESALSSSGIVPEEECTNEVLRLSYNYPSSAVKFF

SEQ ID NO: 172766 - protein, 89 aa, Glycine max
  Clone ID: PAT_MRT3847_127022C.1.pep
QFPRNSIAEASLPNRRCITDSWLSRFHHIITKTDQSDEQMAFAMMQSGSSDDSSRSVKRGDIVWVRVHFPHKWHPALVLSSRDNLGVQV

SEQ ID NO: 172767 - protein, 283 aa, Glycine max
  Clone ID: PAT_MRT3847_127023C.1.pep
ACSCLCSFRQGQLLHAHLIKTPFQVNVYVGTALVDFYSKCGHLAEAQRSFISIFSPNVAAWTALINGYAYHGLGSEAILLFRSMLHQGIVPNAATFVGVLSACNHAGLVCEGLRIFHSMQRCYGVTPTIEHYTCVVDLLGRSGHLKEAEEFIIKMPIEADGIIWGALLNASWFWKDMEVGERAAEKLFSLDPNPIFAFVVLSNMYAILGRWGQKTKLRKRLQSLELRKDPGCSWIELNNKIHLFSVEDKTHLYSDVIYATVEHITATINSIIPSNYLYSSHGE

SEQ ID NO: 172768 - protein, 386 aa, Glycine max
  Clone ID: PAT_MRT3847_127024C.1.pep
MARGKAKKKEEGEDTDVANPETLERKRLKSLAISNKILSETPARSSVHLNPSSVVAKHHGKDIIKKSQRKSSRYLFSFPGLIAPIAGGKIGDLKDLGTKNPVLYLDFPQGQMKLFGTIVYPKNRYLTLQFPKGGKSVMCEDYFDNMIVFSDAWWIGRKDENPEESKLEFPNELYEGHQAEYDFKGGAGAGAASVVNQGVPRTNIQRVEQESPKTPTEDDLSDNEINLKDTKELVPVRHSTRTAKKSYKFAEISSGDDSGENGPELSDDEEKVVEVDTAIQKKTVVFDLDDEDDAPVDQPAKKNNESASRSKGKEVSQSLFKNAEKKNTPRSPRKSPSSKPSGQKSQPAGSKRKTDLVEFSYDDGDDIEEFSNASEDANESDEDWIA

SEQ ID NO: 172769 - protein, 94 aa, Glycine max
  unsure (1)..(94): unsure at all Xaa locations
  Clone ID: PAT_MRT3847_127025C.1.pep
MLGVFSXSIVSPTDXLVAAGCRTPSLKXTSVALRXRFCVNNSFAVIVEAVEHVQFVYTHHNESPFQSXSFAVYDDVLCLFEGSLDIMGNLRQHI

SEQ ID NO: 172770 - protein, 159 aa, Glycine max
  Clone ID: PAT_MRT3847_127026C.1.pep
RLREDDRRGKEEGEEEANLTNPETIERKRLKSLAISHNILSETPARSSVQLNPSSVVAKHHGKDIIKKSQRKSSRYLFSFPGLIAPIAGGKIGDLKDLGTKNPVLYLDFPQGQMKLFGTIVYPKNRYLTLQFPKGGKSVMCEDYFDNMIVFSDAWWIGR

SEQ ID NO: 172771 - protein, 220 aa, Glycine max
  Clone ID: PAT_MRT3847_127027C.1.pep
NHLEDTKELVRVGHSTETAKKSYKFAEISSGDDSGENSPDLSDHEEKVAEVDTAVNDHNSSKKKTVVFDLDDEDDAPVDQPAKKNNESASRSKCKEVSQSASASASTEVKSSNRGSLVQATISTLFKKVEEKKTPRSSRKSPSSKPSGQKSQPAGSKRKTDLDEGSKKRARKTKDKDPGKKIKAKSKEDDVEDGDDDGDDIEEFSNASEDANESDEDWIA

SEQ ID NO: 172772 - protein, 63 aa, Glycine max
  Clone ID: PAT_MRT3847_127028C.1.pep
ENKLPFFREIQSPSHYSIYILIRETYLGLLTPRVPSILLSHAGTKPFNFARGGMRAHTPQRGT

SEQ ID NO: 172773 - protein, 314 aa, Glycine max
  Clone ID: PAT_MRT3847_127029C.1.pep
ERREKRASNDGGGGGKEERRRRRIAERGSDRMALITGRINALPPTPPSSASSPTHPHIPRHAQSLSVAAFDSNSDDQQQHLPPRHQRPQSLSAFADYHEDLTGGAENKRSASLSSARLRHQGGFKYSNMENFDFNPEEEPLIQDSDTITEASNQVSEGNASKMKPPSVTSNTKNSAHDTQQLKQPRRHNATFFSSRELNICILASEPTRALSSLIIALLVVFYYMISERVLASRPLYILLLTDVTLVLARLYGGKASLLEETEGEKVKATGDGHNWGDAVKLMERGLVTYQAIRGVFIDCSIYLVVVVCGTSLM

SEQ ID NO: 172774 - protein, 73 aa, Glycine max
  Clone ID: PAT_MRT3847_12702C.1.pep
GRTQTPSHFQFIYPKAPWIQTPGNHFIFPPPGKTLWGANLAKGGGRFFKGAPLAPKFPGKPFQTKTGSPYPRP

SEQ ID NO: 172775 - protein, 196 aa, Glycine max
  unsure (1)..(196): unsure at all Xaa locations
  Clone ID: PAT_MRT3847_127030C.1.pep
MQAREITGLNYLLPSDPCPYPGHYSMVQNTIPTFQLHKLSNQFYGLQKPPPKVLADFSPPQSSCISSNSTSDEADEQQQSLINERKHRRMISNRESARRSRMRKQKHLDELWSQVVWLRNENHXLMDKLNHVSESHDKVAQENVQLREEASELRQMICDMQLHSPYHPPPLSPIDDDVSPYVKSDSSITDSLDLLG

SEQ ID NO: 172776 - protein, 83 aa, Glycine max
  unsure (1)..(83): unsure at all Xaa locations
  Clone ID: PAT_MRT3847_127031C.1.pep
KEMSLSLVKSCVTLIKWRVSSGLCENRIWNLFSFFPLVGLIPLILMEPAFGIHKWLVETLFMKCPLLCIMIXKKKKKGAARDL

SEQ ID NO: 172777 - protein, 91 aa, Glycine max
  Clone ID: PAT_MRT3847_127032C.1.pep
SSTNPARPPPVLRPQAIPVALGPTTSGSAWVACGLAPAPAAARVAAAGLEDHPASGMAMVASFIPPEMEVAIVKATSHDDDPASDKYIRRS

SEQ ID NO: 172778 - protein, 60 aa, Glycine max
  unsure (1)..(60): unsure at all Xaa locations
  Clone ID: PAT_MRT3847_127033C.1.pep
VSDEFPHLYAEILGCVPLLRIHLSNIILKGYYFTCAGFFNPLDMVHKNTTFEKTAXFQAL

SEQ ID NO: 172779 - protein, 120 aa, Glycine max
  Clone ID: PAT_MRT3847_127034C.1.pep
AQRLREDDRRGQQSEKVLLCCRAQEVAVAARKTIQIASAATRTLLSRRSSCPTKLNGLAFSYSSPQKRALSFSRLPVLLVGAQVSLTPLHSATASAMFTSLLSLHNTNWGCLSEGFATTL

SEQ ID NO: 172780 - protein, 466 aa, Glycine max
  Clone ID: PAT_MRT3847_127035C.1.pep
MSRKGLMEQDLSKLDVTKLHPLSPEVISRQATINIGTIGHVAHGKSTVVKAISGVQTVRFKNELERNITIKLGYANAKIYKCEDERCPRPMCYKAYGSGKEDSPMCDVPGFENSKMKLLRHVSFVDCPGHDILMATMLNGAAIMDGALLLIAANESCPQPQTSEHLAAVEIMRLQHIIILQNKVDLIQENVAINQHEAISKFIQGTVADGAPVVPISAQLKYNIDVVCEYIVKKIPIPERNFVSPPNMIVIRSFDVNKPGYEVDEIKGGVAGGSILRGVLKVNQFIEVRPGIVVKDESGNIRCTPIYSRIVSLYAEQNELQFAVPGGLIGVGTTMDPTLTRADRLVGQVLGEVGSLPEVFVELEVNFFLLRRLLGVRTKGSERQGKVSKLAKGEMLMLNIGSMSTGARVVAVKNDLAKLQLTSPVCTSKGEKIALSRRVEKHWRLIGWGQIQAGITLDVPPAPHLS

SEQ ID NO: 172781 - protein, 87 aa, Glycine max
  unsure (1)..(87): unsure at all Xaa locations
  Clone ID: PAT_MRT3847_127036C.1.pep
RLKVLQYKHWLTAQDDVNLLSIAVSPYVCNVQMAHMLKGRESRYVEENVSKQSDLLLKYNAVHKTVSEFEHNEHDITXSVVIAEYIY

SEQ ID NO: 172782 - protein, 149 aa, Glycine max
  Clone ID: PAT_MRT3847_127037C.1.pep
RDLELALTRADRLVGQVLGEVGSLPEVFVELEVNFFLLRRLLGVRTKGSERQGKVSKLAKGEMLMLNIGSMSTGARVVAVKNDLAKLQLTSPVCTSKGEKIALSRRVEKHWRLIGWGQIQAGITLDVPPFPHLNSSQVFIAAGVSCDLS

SEQ ID NO: 172783 - protein, 69 aa, Glycine max
  Clone ID: PAT_MRT3847_127038C.1.pep
FFKIILGLVSLSHASVVDFCVSDYTSPNGPARYSYKSPAKVTVDDIVYTGLCTPGNTSNIIKTAVIPAF

SEQ ID NO: 172784 - protein, 56 aa, Glycine max
  unsure (1)..(56): unsure at all Xaa locations
  Clone ID: PAT_MRT3847_127039C.1.pep
XXXYAXIXRXXLXANXPHXLXCRXDPSXMTXRPLLLFRNLATAXWANFPAXSRXSE

SEQ ID NO: 172785 - protein, 59 aa, Glycine max
  Clone ID: PAT_MRT3847_12703C.1.pep
SLASNCFLGLIIENARPVYDVYVRFFPTKSSCPFFYFFIFSFIFFFFFFYRTSGRTRER

SEQ ID NO: 172786 - protein, 183 aa, Glycine max
  unsure (1)..(183): unsure at all Xaa locations
  Clone ID: PAT_MRT3847_127040C.1.pep
MSRKGLMEQDLSKLDVTKLHPLSPEVISRQATINIGTIGHVAHGKSTVVKAISGVQTVRFKNELERNITIKLGYANAKIYKCEDERCPRPMCYKAYGSGKEDSPMCDVPGFENSKMKLLRHVSFVGLSGHDILMGTMLNGAAIMDGXALLLIAANESCPQPQTSEHLTAVNIMXLQHNIILQT

SEQ ID NO: 172787 - protein, 99 aa, Glycine max
  unsure (1)..(99): unsure at all Xaa locations
  Clone ID: PAT_MRT3847_127041C.1.pep
GRVGCLFFVLILISFIGSIFFGIATNDDPANGKXKRWYFRPDDPEFXFEPNGPVAGANFAFFTGLMVDRYLIPIYLFXSLEMXKVLQSVFINQEGARCF

SEQ ID NO: 172788 - protein, 207 aa, Glycine max
  unsure (1)..(207): unsure at all Xaa locations
  Clone ID: PAT_MRT3847_127042C.1.pep
MFPLLRSNHPMCAFSAAVTTILLLFPAATSQAQILKKETYFFGPFNQSYFTTFAVLPSAAINLGALQVTPDSTGNVSLANQSGRIFFSTPFTLWDDENLNGKLVSFNTSFLINVFRPQNNPPGEGIAFLIAPSSSTVPNNSHGQFLGLTNAATDGNATNKFIAVELDTVKXDFDPDDNHIGLDINSVRSNXSVSLTPLGFEIAPNVT

SEQ ID NO: 172789 - protein, 86 aa, Glycine max
  Clone ID: PAT_MRT3847_127043C.1.pep
LFFHCSFFFLRILLYFSNIITNILFFMQPYNLKPFTGQEAQVQQGQENQAHNSEKLRSLLKLPQTCEWCNSKTKRNERRKRREKKK

SEQ ID NO: 172790 - protein, 100 aa, Glycine max
  Clone ID: PAT_MRT3847_127044C.1.pep
MLYLRKHGTKNLNSLVEFYERNTGLEAKDNAVVGQPSNFLSDEHSTMKGFSLKEIFNREPYLALSILFLCLRIILFVFPTIMPRLKAFWTSYASHLNLQI

SEQ ID NO: 172791 - protein, 117 aa, Glycine max
  unsure (1)..(117): unsure at all Xaa locations
  Clone ID: PAT_MRT3847_127045C.1.pep
FFTVVNSTYVPCNPPPKTPKHPPVPKSPSPKQVSCPIYSVKIGEXADVIGFIIPQLGNPPKTPCCSLIHGLADLEAALCLCTALKANVSGINLNVPLNLSLLHNYCGTDVPKGFLCY

SEQ ID NO: 172792 - protein, 48 aa, Glycine max
  Clone ID: PAT_MRT3847_127046C.1.pep
SQFILISCFPNFNTQNVKQCYIAHGQASRKGNNQDTTVLSTLKIEKLK

SEQ ID NO: 172793 - protein, 326 aa, Glycine max
  Clone ID: PAT_MRT3847_127047C.1.pep
NNEMPPVIITVRDIALMDAVQVVFPSSSNLLCRFHISKNVKAKCKLIVHPKERYDLVMDAWDSVMNSPNEGEYMQRLTLLEKVCSDFPTFGDYVKNTCLIMNNQKLVETMHFRVMHLGNTTIDRFETAHWRLENLLQDSGGDMCSCWDAVNNMIKLQHAKITKSFGNNDRMAELRKPFYSGKQAFVASWTTSYIADHYDRSRTVGIDIDGSLCGCTIRTTHGLPCACELAKYSRTWHPIPLQAIHVHWRTLNFSDQEMNNEGLELALQREVDALHNQFQELDYAGKITLKAKLRELAFPDAILMCPSPENYFDAPKALGFRERQIN

SEQ ID NO: 172794 - protein, 59 aa, Glycine max
  Clone ID: PAT_MRT3847_127048C.1.pep
YIDSRVMLIKGQYGVDVGECGNACNYYRFTPWPFLLEVCLNLKSYLKCTGACADAWVGI

SEQ ID NO: 172795 - protein, 48 aa, Glycine max
  Clone ID: PAT_MRT3847_127049C.1.pep
LNRLGCVLLFLNPKRSLNPLTSLKNAKSKGALYFYLIPPTYHFYNKFE

SEQ ID NO: 172796 - protein, 163 aa, Glycine max
  unsure (1)..(163): unsure at all Xaa locations
  Clone ID: PAT_MRT3847_12704C.1.pep
MPYDGKLHGIPKVCKIHGCITLREPYRVIETCPDIDILDDGYWRKXVGQKVTKGNPNPRSYYVCTHPRCAGNKHVERASHDLRAVITPYEGAHTHNVPAPRFSDGHFVNRALLNNVSDHTNSAYTLVLVLPVIHQCDNSLHIQRSQAAPKGPCRLTLDMLESP

SEQ ID NO: 172797 - protein, 153 aa, Glycine max
  unsure (1)..(153): unsure at all Xaa locations
  Clone ID: PAT_MRT3847_127050C.1.pep
QAPEDESIKTIYVGGLGARVTEHDSRDHFYAHGQIXSIKMVLQRTCAFATYATTTMCIKRHHXELYNTLVIKVLRLKLVWCTSYTSKPESDGSYQAXQLASEAHSGLLPGAFISQXQNQDQTQGMLYYYNPPPVERKEALHVMDPYVWVLLLM

SEQ ID NO: 172798 - protein, 60 aa, Glycine max
  unsure (1)..(60): unsure at all Xaa locations
  Clone ID: PAT_MRT3847_127051C.1.pep
FGSSAIAALCPLYYYSXKHPVNYLLLAVFTVSLGFGVGLSCAFTSGKIHRLCPLFFFVVI

SEQ ID NO: 172799 - protein, 52 aa, Glycine max
  Clone ID: PAT_MRT3847_127052C.1.pep
SILVANIIYKLEVSYMEAFKYKVKGHCSFHVKSYLIYPSLSYISLSIQIFNL

SEQ ID NO: 172800 - protein, 77 aa, Glycine max
  Clone ID: PAT_MRT3847_127053C.1.pep
VATLNNPSSWSHCGFPRERPRACVPQNTFYVPFASSRIWLVAVIYKKGESPCESGRLNPGYNHGLPFMQLLDHCRPF

SEQ ID NO: 172801 - protein, 82 aa, Glycine max
  unsure (1)..(82): unsure at all Xaa locations
  Clone ID: PAT_MRT3847_127054C.1.pep
DVSAEEAIIRLQIHLFWANMLFQRYLVEXKSGMDDXRKILDAAIEXLAGASEADISMVLKNNCANGDAREGSRGHNSITLVK

SEQ ID NO: 172802 - protein, 73 aa, Glycine max
  Clone ID: PAT_MRT3847_127055C.1.pep
NPKMAGGIKFCWGTPTFLKTFGRVPKTQVGGFWAPPRGTQKTREIWGNLLNGPGKEGPSFKKPKKLQKGLGTG

SEQ ID NO: 172803 - protein, 120 aa, Glycine max
  Clone ID: PAT_MRT3847_127056C.1.pep
AVRGQSTASVMSIGILKKVQGLVQKWMLILSCLVFVIEAGENDKTMEPPSLYDSGSPLPFVVVHDLPLPANLHVSKHVLSHGAPIAALSPVKPPSYGPFTTAGPSALAQPPLSPYASNWL

SEQ ID NO: 172804 - protein, 88 aa, Glycine max
  unsure (1)..(88): unsure at all Xaa locations
  Clone ID: PAT_MRT3847_127057C.1.pep
HSTNDNYNPPLAPLMEPYDLSKWSMYRTAISHFIALLPSLYITXLTISGDKRHYDTKVLCNTEYDGVGIXASSWTFSHMIVILVYWTA

SEQ ID NO: 172805 - protein, 109 aa, Glycine max
  Clone ID: PAT_MRT3847_127058C.1.pep
AYKTFKKMVFLEYSMTISYPSSYQTNQKKSLQSYLELYCIGTHTSSDQFGHYKLQNSHAHCLHSSCTKKSCANNPVIEGPFLVINPRQAHAGQDHRTFDRQWRYTPSVV

SEQ ID NO: 172806 - protein, 130 aa, Glycine max
  Clone ID: PAT_MRT3847_127059C.1.pep
RKALVFFVVPILEAWHCHPSNLFLFRMNTGYGARPPEVKCPGWRLAVEAHTIFGFEPILEECVEAPKDFIFGDHYRSASKPVNQQAYFFAGDLEFHPKAPFGLRYFGHLPFNFSNLQKHCLWGGEFFPAL

SEQ ID NO: 172807 - protein, 160 aa, Glycine max
  Clone ID: PAT_MRT3847_12705C.1.pep
GSRDFSSLVPPRQRPMKSRVSLQLGQTMRPPRRMDKSNLQLPALPRFHPAKYPSACSSLSGTPRSEQNMPCGPVSPGLQQRVYTEAQRSRYQYQREVMHGFIGRGTEPASVRLAPVGSPGLPMTPLTLDEPEDGYIGASHGSSQLATNESKGAAESDNQA

SEQ ID NO: 172808 - protein, 65 aa, Glycine max
  Clone ID: PAT_MRT3847_127060C.1.pep
FRFRPRIISSATLETLMMEKSNEMWTMGSKALFACCIIMVGVCTVVTKRNREALQVYREVHQQKA

SEQ ID NO: 172809 - protein, 73 aa, Glycine max
  Clone ID: PAT_MRT3847_127061C.1.pep
LEPPWGGLCKKLDAQADYAKPIMNNPHAYAVSANNAADEEPTTYLPSEYKARGYQPTDYMRTGIKTAMNQTFA

SEQ ID NO: 172810 - protein, 81 aa, Glycine max
  Clone ID: PAT_MRT3847_127062C.1.pep
GCGVWGPALGMFHSISLSGSRGVAFVFLIQLEWFEDSSAFVAVQCSFACGGLCMSSFGTNRDTSCKYAVATSKNPKESIDG

SEQ ID NO: 172811 - protein, 92 aa, Glycine max
  unsure (1)..(92): unsure at all Xaa locations
  Clone ID: PAT_MRT3847_127063C.1.pep
DLSTNTDFDSIRVDSVEVLSISKISGRGKGGKGLIKGGAERHRXVLRYNIQGITNPAIARXAHMCCMNRIIGLIYQETRGVLKIMLENVIRD

SEQ ID NO: 172812 - protein, 63 aa, Glycine max
  Clone ID: PAT_MRT3847_127064C.1.pep
FLNILKKAKPRGGTEFFILSKKGKVFLSPGGGFLQTKGICFLKKENFFLTFRTGGVFFAKAFL

SEQ ID NO: 172813 - protein, 145 aa, Glycine max
  Clone ID: PAT_MRT3847_127065C.1.pep
TRLLHLVAPEKEKPPQAKKREGTNVECSGRKCLHCGAEKTPQWRTGPMGPKTLCNACGVRFKSGRLVPEYRPAASPTFMSTKHSNSHRKVLELRRQKEMQRQQHHQQLMSQSSIFGVSNGGDEFSIHHHHHNHHLHCGPDFRHVI

SEQ ID NO: 172814 - protein, 148 aa, Glycine max
  Clone ID: PAT_MRT3847_127066C.1.pep
FPLMSIYSFHELLFAIRLLICNDKCEGRFVFSCQLLKPSMMALQQASVSRTDSGPGGDNSKSQLQTLLTRAGYGAPFYSTKQLKNNQFQATVEFNGVQIMGQPYINKKNAEKDAAAEALQWLMGRRETGNEDINHMTMLLKKSKKDHN

SEQ ID NO: 172815 - protein, 37 aa, Glycine max
  Clone ID: PAT_MRT3847_127067C.1.pep
QTAAKILPVKLVKNKCHENIIQQLIYLVAQQEKQKDV

SEQ ID NO: 172816 - protein, 105 aa, Glycine max
  unsure (1)..(105): unsure at all Xaa locations
  Clone ID: PAT_MRT3847_127068C.1.pep
ADASGILSLERQEEHTRIIGSGARNSHAHQDMAVAEVPNLEKEAPVKGICQAGHATTSITHXSFSTITGGDIPADEYRMTKQLNLKXVVNRYMIVPYNPALHVDH

SEQ ID NO: 172817 - protein, 61 aa, Glycine max
  Clone ID: PAT_MRT3847_127069C.1.pep
RIHFGTVGKDYIPIAEHVPIHIACLKPLVKAHVHWQQVGLYIGQNLPLANQHGGRHITHTD

SEQ ID NO: 172818 - protein, 87 aa, Glycine max
  unsure (1)..(87): unsure at all Xaa locations
  Clone ID: PAT_MRT3847_12706C.1.pep
RTHRIIGKIKMVATAGISVNTGISXRPSLRIDXRGHAKSDIYTICXHDCELWNSACAKAMTMXXNPHPRYGAWRGAFLKRTEYHCDI

SEQ ID NO: 172819 - protein, 159 aa, Glycine max
  unsure (1)..(159): unsure at all Xaa locations
  Clone ID: PAT_MRT3847_127070C.1.pep
LSSPATRTPRGSEPPEQGRXEARAATTRHGARRGEEANEEGGRPRAAGGARPRPTERAGPGSVNKDKKGKRRPAQERGRSLPRSPSKRSTPTPCRQLSTTLRPPHAHLATNIQQLAPEQHLPSLTHKVAGRRTRALPSTVAVGPATRLLEHVSSTDSDL

SEQ ID NO: 172820 - protein, 58 aa, Glycine max
  Clone ID: PAT_MRT3847_127071C.1.pep
GRQMNFCLNFFLTKCKLLPKFLSIDLGPQQNKSTSYRSKVYFHKNTRRVHRVFYCLQH

SEQ ID NO: 172821 - protein, 74 aa, Glycine max
  unsure (1)..(74): unsure at all Xaa locations
  Clone ID: PAT_MRT3847_127072C.1.pep
MGSKNIMVVLKVCCXVLFVEGVTNALLELNLFKXDHSSSDDEVSKPCCDLCMCTALKPPKGLVQILWVNSFHSL

SEQ ID NO: 172822 - protein, 179 aa, Glycine max
  unsure (1)..(179): unsure at all Xaa locations
  Clone ID: PAT_MRT3847_127073C.1.pep
VFAFDGDDNLISVHEYVKPYFSGSKLKSFLAGHNITISDGIDKTSATLQIRKLADCDFFMRNFKHMSNVLRVVSEDKASLWSQXLHYVLCNKLEMQEAYLVNFRKSVTRIVFASSKEALXLRRKASFRIEWLXKADVPTISQIEEFHXMQKIMKASDQMIFCLLRALFVGYTGQKFSNK

SEQ ID NO: 172823 - protein, 65 aa, Glycine max
  Clone ID: PAT_MRT3847_127074C.1.pep
TYHLTHYIIIISNIITNLLNNFNNFTLYLITTINIIPLIPHINHITPYLNIQFKYIPKNTHNSSN

SEQ ID NO: 172824 - protein, 39 aa, Glycine max
  Clone ID: PAT_MRT3847_127075C.1.pep
QASTTAGLGIYWGQNIDDGTLTYTCDTGHLEIVKPILFL

SEQ ID NO: 172825 - protein, 64 aa, Glycine max
  Clone ID: PAT_MRT3847_127076C.1.pep
DVSTRFVTVYGRIPLVWTSVKADDTRNIRFWQRRKVNFPNIFRNSTDIRLLASSVTQFMLASCA

SEQ ID NO: 172826 - protein, 77 aa, Glycine max
  Clone ID: PAT_MRT3847_127077C.1.pep
TTPRNGFLKKNLIISLGGSKTYFKTPITQKKTGKVGPTFFGLRRLFPPFKTQGGPKFLGGGPKNFQKAPFLGTLGKG

SEQ ID NO: 172827 - protein, 169 aa, Glycine max
  unsure (1)..(169): unsure at all Xaa locations
  Clone ID: PAT_MRT3847_127078C.1.pep
RFLCLRQPVVGGLTPFTDGNLKKGKHLPVSNIGPRENHVLQIPLMAHEEIAASIACVWRTALGSKNSKPKATGMHGGAVASIIDRLAXTDSTINGPMLSVDTYHTTPVNAVRSMLVAPVRGPRPIRAVTFTCTTVLMEPDMNXWLQRHTTTTNGDHXSGKDLKMLERCR

SEQ ID NO: 172828 - protein, 52 aa, Glycine max
  Clone ID: PAT_MRT3847_127079C.1.pep
IGDDAIHGEEAYALWGDGEKYDPTRHGSSRVEKTSASPRVNVTGARGVTIDL

SEQ ID NO: 172829 - protein, 111 aa, Glycine max
  Clone ID: PAT_MRT3847_12707C.1.pep
LTSVNLPLKEIAVVHTVIMISATSAFFCFRLYGIPMWRLIVGQNLLYVRDKRSHHHLVGLLENLRVYCSRAGPSVHLVPWVHGATISSQSLHSSSPAKKMVLIRIISSRIP

SEQ ID NO: 172830 - protein, 86 aa, Glycine max
  unsure (1)..(86): unsure at all Xaa locations
  Clone ID: PAT_MRT3847_127080C.1.pep
YLTSNQSDXPQIHPPLHGGGIPTSPPPPXWFLXXEKKKKPPPPTKXLPGXXTKKTLXQMGESQRSPRAELKHAPLQSTNYTTILAN

SEQ ID NO: 172831 - protein, 134 aa, Glycine max
  unsure (1)..(134): unsure at all Xaa locations
  Clone ID: PAT_MRT3847_127081C.1.pep
AIMWNPFSSLPSDHYSPHRYTTFEGYYSKFRLPSGASIALIISWIPGVAKDRDYPKSDTCSSFSSKGESGVTGAPYLIIFAYVTKDCRQWFLKEYTPETXSQGSSGKDRRGFLIKWDQGEFEWDGQDVMRWDIN

SEQ ID NO: 172832 - protein, 78 aa, Glycine max
  unsure (1)..(78): unsure at all Xaa locations
  Clone ID: PAT_MRT3847_127082C.1.pep
MKRFIKNLTPKLDAEQQELFKKHIEGAXKYLLCKIKDFQFVVGESMGDDACXVFXXXKXGGVDPTFLSLAYALKEVKF

SEQ ID NO: 172833 - protein, 81 aa, Glycine max
  Clone ID: PAT_MRT3847_127083C.1.pep
IIFDGTTFIIPWAVVLGSGACECELIPEVSAFWQWSFKIPYCVETIDYLSDFEVKKRLIAAGCFTFWWWVLHIWVSGQVVE

SEQ ID NO: 172834 - protein, 80 aa, Glycine max
  Clone ID: PAT_MRT3847_127084C.1.pep
KVKPIDNRALSWYAPLSATINLWILPRKTAFRSCPLKPTPTFARAHPPPPPPLGPPPTPPPPPPPKEWRTSYSDDGKPYL

SEQ ID NO: 172835 - protein, 210 aa, Glycine max
  Clone ID: PAT_MRT3847_127085C.1.pep
LSKLVFDAAGRLPMTWYPEAFTNVPMNEMSMRADPSRGYPGRTYRFYTGGRVYGFGHGLSFSDFSYNFLSAPSKISLSRTIKDGSRKRLLYQVENEVYGVDYVPVNQLQNCNKLSFSVHISVMNLGGLDGSHVVMLFSKGPKVVDGSPETQLVGFSRLHTISSKPTETSILVHPCEHLSFADKQGKRILPLGPHTLSVGDLEHVVSIEIY

SEQ ID NO: 172836 - protein, 50 aa, Glycine max
  Clone ID: PAT_MRT3847_127086C.1.pep
FHFPYYLIKTIWRGVPCPNYQPRKCLSKQATNHRRPVFLKNNLYFEGGSE

SEQ ID NO: 172837 - protein, 37 aa, Glycine max
  Clone ID: PAT_MRT3847_127087C.1.pep
NFELSGGGEYELRIYVYLSPVRISSICSATPFTRSAV

SEQ ID NO: 172838 - protein, 79 aa, Glycine max
  Clone ID: PAT_MRT3847_127088C.1.pep
GNKISLFSAYKAKTGIDMVQPHLCWNRTVDQGREHQVRVGRDSSGHGWASLPNSYVMQIRAQTHSHAAAERGVRGSDVT

SEQ ID NO: 172839 - protein, 38 aa, Glycine max
  Clone ID: PAT_MRT3847_127089C.1.pep
TDTFGMLRNGIGGSNSGVLVCVPYSMNESVSFACHQES

SEQ ID NO: 172840 - protein, 767 aa, Glycine max
  Clone ID: PAT_MRT3847_12708C.1.pep
MVAVDSATLGFPRMGPNRELKFALERFWRNQISEDELFQVAHAVEEANWRKQIDAGVSRVGVGLFSLYDHVLDWTYYLGLAPERFAKVPMGLSQYFAMARGVDGIPALDMTKWFDSNYHYEVPELSAKSTPKANFSSYLSNMKRALAIVGTNKVVPIILGPLTYLALSKYDGATLDDLLVKILPIYTVLLNELAALGVTEVQVHEPSLVGTSADQLAKHLATVYGSKDQKGAIQHEKIALNLTTYFEEINHDVYQWFATSPVSAISLDFTRGDNLSVLQKFGFPAGKRLGAGLVDGRSVWKFNPDTILSQVTEIKKVLAVSDNTSLTIQTSSSLQHVPYTTDPEKTLNAGETDGLLDVLSFAYEKLAELEVVKKIAEFGEEAAKAEIDAAKKAWSVYYEKNPAKTAVQSRLAAVTEADFKRPSPFAERRPLQLKGLPVLPTTTIGSFPQTPQIRALRRKLKAGDITLDHYRGKIDEQIAYNIGIQEALGLDILVHGEPERTDMVEYFAEKLNGFAFTQSGWVQSYGSRCVRPPIIFADLERPVDMTVREFVVAQSFTTKPVKGMLTGPVTILNWSFPRKDISRKEQAFQLALCLRDEVADLEAAKCTVIQVDEPALREGMPLKSSKKDEYLNWAVDAFRLSTGVAKNETSIHTHMCYCEFADCMHAIDAIDADVNSIENARSDDETIREFKSIGYKRDLGPGTYDIHSPVVPPKEEIVKKLKSFLNLLPAEQVVVNPDCGLKTRKWPETIAALRNMVDATLEVRATL

SEQ ID NO: 172841 - protein, 198 aa, Glycine max
  unsure (1)..(198): unsure at all Xaa locations
  Clone ID: PAT_MRT3847_127090C.1.pep
MDRAQLLLVGVPLFLFCSDLFSLFTHHPPPPPHHHHPHHHPPHHHHPPHHHHHPPHHPPHHHHHPPHHHQQPVIIEFPPEKPISNIATPGLGNTVYINFCSSCSYKGTAVTMKNMLEIALPGTEVILANYPPSLAKRLLSKLGPVVQIGVVGVDDAGEHIFTMLGFGAPAPWYYNLRANRVGTIARTXLLGNALQTFL

SEQ ID NO: 172842 - protein, 107 aa, Glycine max
  Clone ID: PAT_MRT3847_127091C.1.pep
AYFVVIDSPLNKLTSLKESIDAPEDFFTLPLDNVGNQLIQFGLFLPPAPFVVAIFGGGAGIFGMNFEIELFEVPSAFQGVLIITGVCGVFIFSAFGGFFKDRRLMPL

SEQ ID NO: 172843 - protein, 129 aa, Glycine max
  Clone ID: PAT_MRT3847_127092C.1.pep
MIKTLNPYPNPAKTAEIMSRYRPIAPKPETSPNSSMSEGSCSSLSQKINQSPYLRNLWPQLQARPTRTRKRGRAPLTLPSSSLKRHKTTHIPSFCPPCHVVTSSPAKNLSFQGFAPLPNHGLGVLNCTM

SEQ ID NO: 172844 - protein, 157 aa, Glycine max
  Clone ID: PAT_MRT3847_127093C.1.pep
MREHSMASRKGFLSKVSSMFVSSSTDLELKSTEGDLELDEAEMFNWNMSNDNNKNNTVTESKKRPRSGKKKKVNPVASSSMPVAIPDWSKILKEDFKEHKKREFVSDHDYDRVPPHEYLARTREASHSVHEGKGRTLKGRDLRSVRNSIWKKLGFED

SEQ ID NO: 172845 - protein, 85 aa, Glycine max
  Clone ID: PAT_MRT3847_127094C.1.pep
ASATFLAARKAEKIFAVFCSILPPATHSLPQEHMLFQIPIYVFNLHHHDHHQLQLSKTCHFNLPIYAFLHSLSETASAIFLRDLT

SEQ ID NO: 172846 - protein, 212 aa, Glycine max
  Clone ID: PAT_MRT3847_127095C.1.pep
MTSYGTTILAHLFGLLALILLLVWLLNYREGIEYDSENPLRVFNVHPFMMFFGFIFLIGQAILSYQTVPGPHETKKIIHLTLHFIAIILGIVGLCAVFKFHDMVYWEDVTSLHSWIGIGTFCLVGLQWLMGLGFMLQGSSQSRSAMAPWHVAGGRALFFMAICAALTGLMEKYTMLKPALHQRESHLINFTGLAILLFGVFVDMAVGLARYA

SEQ ID NO: 172847 - protein, 98 aa, Glycine max
  unsure (1)..(98): unsure at all Xaa locations
  Clone ID: PAT_MRT3847_127096C.1.pep
WFSPSRIKLPRWPSTRLNSGLTFGAPLFTLINVFPDATCSSGIIRFHLGPLFDQNDRFGGQVAGLQLVGGQRRETATTDHRVAAEGLSIPRYAARXAH

SEQ ID NO: 172848 - protein, 66 aa, Glycine max
  Clone ID: PAT_MRT3847_127097C.1.pep
SVPSGLVPIILLGRKAGTGRAFPLRFVVARRAMPYSTLTLSPVVGKKQGRLSKSPPFCRLLAAVLT

SEQ ID NO: 172849 - protein, 56 aa, Glycine max
  Clone ID: PAT_MRT3847_127098C.1.pep
KLQLGAHSFQKNGSVFFSNLIPSIKTRTNFWLVSFLGQKPGFLLNFPELKDNFKSL

SEQ ID NO: 172850 - protein, 194 aa, Glycine max
  Clone ID: PAT_MRT3847_127099C.1.pep
MYSAMLLTGWSTSVGESGKLVDVGWPSAWRANPTRPRTIYLWFDPTREYHRSSVLWNMYQIVFYVDDYPIRVFKNSNDLGVKFPFNQPMKIYNSLWNADDWATRGGLEKTDWSKAPFVASYKGFHIDGCEASVNAKFCDTQGKRWWDQPEFRDLDAAQWQKLTWVRQKYTIYNYCSDRKRYPQVSPECARDRDI

SEQ ID NO: 172851 - protein, 157 aa, Glycine max
  Clone ID: PAT_MRT3847_12709C.1.pep
MFTAPFPTSTVTLSGESVTSPPRHVRFRSVISFATATFTEEQQHKAAPYLRPHHGMALSATLYDILGIRATASGEEIRAAYRRLARVCHPDVAPVERKESSAGEFMKIHAAYCTLSDPEKRDSYDRSLFRRQQRPVKTTSSGASGYGGRNWETDQCW

SEQ ID NO: 172852 - protein, 352 aa, Glycine max
  Clone ID: PAT_MRT3847_1270C.1.pep
MAGGKAKKEKGKPHQQQKHMPYQGGISFHKSKGQHILKNPLLVDSIVEKAGVKSTDVILEIGPGTGNLTKKLLEAGKKVIAVEIDPRMVLELQRRFQGTPHSNRLTVIQGDVLKTELPYFDICVANIPYQISSPLTFKLLKHEPAFRAAIIMFQREFAMRLVAQPGDKLYCRLTVNTQLHARVFHLLKVGRNNFRPPPKVDSSVVRIEPRKPRIEVKQKEWDGFLRICFNRKNKTLGSIFRQKSVISLLEKNYRTVRALELGQEDSLKEVDAKMDFSSFGDDRGMEMDDDGADDDEMEVEDGEADEVQSEFKDKVLGVLKEGDFEEKRSSKLTLQEFLYLLSLFNKTGIHFY

SEQ ID NO: 172853 - protein, 76 aa, Glycine max
  Clone ID: PAT_MRT3847_127100C.1.pep
TASVWDSRYLQDISDRKSISREGSSIADDWDERHHSVEEVKAMLMQRKEAAAMKRDKTLSQAFSEQVLIPLLSVFY

SEQ ID NO: 172854 - protein, 121 aa, Glycine max
  unsure (1)..(121): unsure at all Xaa locations
  Clone ID: PAT_MRT3847_127101C.1.pep
FSLASPRFGFAASFSCFCLXAVSGGSRXSASVSSSLWRVSSFSRLSVCGLGGGPVVVRGCFPVSLPPVGLVWSLLRVXPLLFRLXVAPFXAXLLRLGGSLASKFSLSLFVVSSNHRRVGNQ

SEQ ID NO: 172855 - protein, 40 aa, Glycine max
  Clone ID: PAT_MRT3847_127102C.1.pep
LPCLFVQVATLGSSTASSLDMVSAPILFLQQSPTKIPPHF

SEQ ID NO: 172856 - protein, 280 aa, Glycine max
  Clone ID: PAT_MRT3847_127103C.1.pep
MSDTHQPFMSVQPPMKLHHPFNPQASSSNFDGDPPCKTAGKTKPPHTKLLRVILTDHDATDSDSSGDDDDPKNPPKHKKVKRQITHITINLPSFSEAPTPAPIPTPSSSSSIDPTRLTLPKKRPAVPRRRSKFRGVRQRPWGRWTAEIRDPNQRKRVWLGTFDTAEEAAAVYDDAALKLKGPNAVTNFPLSAAGKTEHDTAPPEAAFSGEGFSSPTSVLTYFDGDSTPLYGFRYGEVDAFGFDIDAPFSLTDVNLGVLSQRFGKEDFGEFDPDEFLTWPS

SEQ ID NO: 172857 - protein, 40 aa, Glycine max
  Clone ID: PAT_MRT3847_127104C.1.pep
ADCYIIHKHMPFVPSVKPPPPITRRSLTPIRMYACTHTYA

SEQ ID NO: 172858 - protein, 80 aa, Glycine max
  Clone ID: PAT_MRT3847_127105C.1.pep
RYWKKKIERSLREAEDELQDALANEEESSLSLGATIYASRFAANALRNLRENSRHNRMQQRLLPLLPPKPAEPDFTSQKH

SEQ ID NO: 172859 - protein, 41 aa, Glycine max
  Clone ID: PAT_MRT3847_127106C.1.pep
QASEFYDNYRSDMLFCSKNIEYVLKKEMLSMRMLHPKHELQ

SEQ ID NO: 172860 - protein, 100 aa, Glycine max
  unsure (1)..(100): unsure at all Xaa locations
  Clone ID: PAT_MRT3847_127107C.1.pep
FPMAPLFPLFPLYPPHSMKSPKRVEPLRRGRGKMVLIITDVIIIIAPMVIGLIPLNLLRPPCPQISPRMINPQMVKKVGLIPXKPXMPXKLHQAWGSRPK

SEQ ID NO: 172861 - protein, 102 aa, Glycine max
  unsure (1)..(102): unsure at all Xaa locations
  Clone ID: PAT_MRT3847_127108C.1.pep
GGYRGGPRRPFRLSEGRVPRFTNRRRPSGATXKSNQHRVVRTPVGKCDAQPTXRGQGALLSLVTWRRFQGIPNXGPADSIRNRWLRNRWSVNLAFGGVCSGG

SEQ ID NO: 172862 - protein, 92 aa, Glycine max
  Clone ID: PAT_MRT3847_127109C.1.pep
TILNEFEMMEEEKTLKEMLKALQQQVLLKKAHAESSDNVIKQTSLKSNCPQHFHPLVNEVENIFQHWSFLIFSFKTQFPLSAQMSIILGGLN

SEQ ID NO: 172863 - protein, 76 aa, Glycine max
  unsure (1)..(76): unsure at all Xaa locations
  Clone ID: PAT_MRT3847_12710C.1.pep
CGPGFFFLGVAWFGSLGDGCLRFVLVVLLGVCGRGFVSFLWCGLWGFARVQVPASVSLGXGIILGVESGRSEALAS

SEQ ID NO: 172864 - protein, 125 aa, Glycine max
  Clone ID: PAT_MRT3847_127110C.1.pep
MEVGKKKMMLKSLIKKVIKGLPLFLAPNGVRSTRRVCYMSDIDEENEHATKVPEDVKEGHFAVIAMHGEETKRFVVELDYLTDPAFLKLLEQAREEYGFQQKGALAVPCTPEELQKIIENRPLRN

SEQ ID NO: 172865 - protein, 174 aa, Glycine max
  unsure (1)..(174): unsure at all Xaa locations
  Clone ID: PAT_MRT3847_127111C.1.pep
MALLMYFVLFLALAGHSSALYCVCKDGVGDQALQKAIDYACGAGADCTPILQNGACFQPNTVKDHCNYAVNSYYQRKGNAPGTCDFAGAATTNANPPTASSGCVYPSSPSNAGTTPSTXPGTTPSTGGTTPTFAISPTSTTGINNANGASLKPTNNTKLLLLFFVLTLWLAMRV

SEQ ID NO: 172866 - protein, 217 aa, Glycine max
  Clone ID: PAT_MRT3847_127112C.1.pep
MALVIYFVLFLALTGHSSALYCVCKDGVGDQALQKAIDYACGAGADCTPILQNGACFQPNTVKDHCNYAVNSYFQRKGQAQGSCDFSGAATPSQTPPTAASTCVYPSSPSNAGTGTTATPTTTTPTTGTPPTTLTPTTPTTTTPGTTTGTSPTTGTGTGTGTGTTIGNPNVFGMSPTSSTGTGGGFNDPNKGVVHLQDISMLLVSLVITFLLVMLRV

SEQ ID NO: 172867 - protein, 215 aa, Glycine max
  unsure (1)..(215): unsure at all Xaa locations
  Clone ID: PAT_MRT3847_127113C.1.pep
MALLMYFVLFLALAGHSSALYCVCKDGVGDQALQKAIDYACGAGADCTPIXPNGACFQPNTVKDHCNYAVNSYFQRKGQAQGSCDFSGAATPSQTPPTAASTCVYPSSPSNAGTGTTATPTTTTPTTGTPPTTLTPTTPTSTTPGIGTGTGTTTGTGTGTGTTTGXPNVFGMSPTSSTGTGGGFNDSNKGVVHLQDTSMLLVSLVLTLLLVLLRV

SEQ ID NO: 172868 - protein, 94 aa, Glycine max
  Clone ID: PAT_MRT3847_127114C.1.pep
ELSVKRCILLKPEVTQNSYTASRRGYSLTKTGILVEGRAPQLLYPEVGTSKMVIPSQTTKRTQNQSNHSRLLIQLKDKTTRKGDLSRKYELGYF

SEQ ID NO: 172869 - protein, 70 aa, Glycine max
  Clone ID: PAT_MRT3847_127115C.1.pep
FKKHPTPLTPYLRPPISFPPPKNFITFPARLPKILKIKLCLQIIQIHLITNIFSNKIFPNKYLPSTLLNH

SEQ ID NO: 172870 - protein, 92 aa, Glycine max
  Clone ID: PAT_MRT3847_127116C.1.pep
IPLTVVDDQEPYHLIVSFARLMGITCSISDNILRGKHATVDGQYCLQLHVHVPCSAYRCKKQLERGRKVYLVQSIMDSFKKLNHLIYRNMIG

SEQ ID NO: 172871 - protein, 66 aa, Glycine max
  Clone ID: PAT_MRT3847_127117C.1.pep
FTSNICYYTNHANDIIFQDILSIDMRCRNVAIRFVTRFIKFPTFSIYTWIDVGRLYWQEHVGTRNY

SEQ ID NO: 172872 - protein, 83 aa, Glycine max
  Clone ID: PAT_MRT3847_127118C.1.pep
HGLWRLVVELWGVVESLKDQGLCRWNSTFKSAQQSVKSHMRSLSRANKLSSAMLSSTLLHGEKTKQSEESLRTVMYLSCWGPN

SEQ ID NO: 172873 - protein, 91 aa, Glycine max
  Clone ID: PAT_MRT3847_127119C.1.pep
ITYFLSDMPTLTRKPTTETSADTEDACKMNQKKNKNKSAGGIPKKKNKTPPKIRRKNNKEAGTPPYNKKKKSTNRPRRAKNLKNTTRTPPR

SEQ ID NO: 172874 - protein, 71 aa, Glycine max
  unsure (1)..(71): unsure at all Xaa locations
  Clone ID: PAT_MRT3847_12711C.1.pep
RVKGPVRMPTKVFNFPPGKSPCGEGPHPWDSFXRGGPKRIFVFSSSPEGVKQIPSIPIXPGVEVEVPLANG

SEQ ID NO: 172875 - protein, 444 aa, Glycine max
  Clone ID: PAT_MRT3847_127120C.1.pep
MGGVCSRKRDQHVVEDDLHRGVSGRYWSGFLFISRSSSAVILTPLFFHFHFLCEFLFPYTNQMGIKGLTKLLADNAPKSMKENKFESYFGRKIAIDASMSIYQFLIVVGRSGTEMLTNEAGEVTSHLQGMFSRTIRLLEAGIKPVYVFDGKPPDLKKQELAKRYSKRAEATEDLSEALETANKEDIEKFSKRTVKVTKQHNDDCKRLLRLMGVPVVEAPSEAEAQCAALCKAGKVYAVASEDMDSLTFGASKFLRHLMDPSSKKIPVMEFEVAKILEELNMTMDQFIDLCILSGCDYCDSIRGIGGLTALKLIRQHGSIENILENLNKERYQIPDNWPYQEARRLFKEPLVITDEKELDIKWSSPDEEGLITFLVNENGFNRDRVTKAIEKIKVAKNKSSQGRLESFFKPTANPSVPIKRKETPVNNAKETNKKTKAGGGKKKK

SEQ ID NO: 172876 - protein, 524 aa, Glycine max
  unsure (1)..(524): unsure at all Xaa locations
  Clone ID: PAT_MRT3847_127121C.1.pep
LISRGVSTFSYDFHKYNSFSILPRDIRHSKSLNELVDSHCLTEVSLEAFRDCALQDIXLGEYVGVNDDWMDVISSQGLSLLSVDXAGSQVTDDGFAXLKDCSSLQALTLSYCDQFSEYGLKHISGLSNLTSLSIRKSSSVKPDGMRAFSNLFNLEKLDLERCSEIHGGFVHLKGLKKLEYLNIGCCKCVTDSDIKSISELINLKELQIFNSSITDIGITYLRGLEKLTTLNVEGCNITAACIEFIHALTSLACLNLNRCGLSDDGFEKIWGLRILKRLSLAFNRNTDACLVHLKDLTNLEYLNLDSCRIGDGGLANLTGLTLLKSLVLSDTDIGNSGLRYISGLKKLEDLNVSFTTVTDNGLKRLSGLTQLKSLNLDARQITDAGLANLTSLSGLITLDLFGARISDNGTTFLRSFKNLQSLEICGGGLTDAGVKNIREIVSLTQLNLSQNCNLTDKTLELISGMTALRSLNVSNSRITNEGLRHLKPLKNLRTLTLESCKVTASGIKKLQSTDLPNLISFRPE

SEQ ID NO: 172877 - protein, 42 aa, Glycine max
  Clone ID: PAT_MRT3847_127122C.1.pep
DNMHIHFHNVKIFLQCGSGCAYYLYIVVPFPEKKKAWPGRLE

SEQ ID NO: 172878 - protein, 59 aa, Glycine max
  Clone ID: PAT_MRT3847_127123C.1.pep
EILGEFHKPRTFNVFIVVTVKTAFYLNFQYEETSFLHPRVYNPCLVHYIGLVLVYLRES

SEQ ID NO: 172879 - protein, 112 aa, Glycine max
  Clone ID: PAT_MRT3847_127124C.1.pep
RGSPWGKCQVGPHFGGSGPFSVCLGGPSKVPFPFFPPAMEPFLFPFFFPELGKLSIRWECYPKFGGLTFPLNPGGGLFFQDLFFPPCDAPRFPPFKALAFFFVYPCESQTCF

SEQ ID NO: 172880 - protein, 174 aa, Glycine max
  unsure (1)..(174): unsure at all Xaa locations
  Clone ID: PAT_MRT3847_127125C.1.pep
MGGVCSRKRDQHVVEDDLHRGVSGRYCRSGSTKWLRARSLRAKPNHCAGGGTCPSLMDLCIKKMREDFHKYNSFSILPRDISQQIFNELVDSHCLTEVSLEAFRDCALQDIDLXEYXGVNDDWMGCHLFQGVVLTFXLMVAGSXVTDDGIATPKGXAQSSALTLSYCDQFSDMG

SEQ ID NO: 172881 - protein, 137 aa, Glycine max
  Clone ID: PAT_MRT3847_127126C.1.pep
ALTGLSGLITLDLFGARISDNGTTFLRSFKNLQSLEICGGGLTDAGVKNIREIVSLTQLNLSQNCNLTDKTLELISGMTALRSLNVSNSRITNEGLRHLKPLKNLRTLTLESCKVTASGIKKLQSTDLPNLISFRPE

SEQ ID NO: 172882 - protein, 74 aa, Glycine max
  unsure (1)..(74): unsure at all Xaa locations
  Clone ID: PAT_MRT3847_127127C.1.pep
MGGVCSRKRDQHVVEDDLHRGVSGXYCRSGSTKWLRARSLRAKPNHCAGGGTCPSLMDLCIKKMREVHVFCQLC

SEQ ID NO: 172883 - protein, 56 aa, Glycine max
  Clone ID: PAT_MRT3847_127128C.1.pep
FNSLRETPNMGTTLWDLLLKLPHCSPAMHDLQYECILNIRDQTIAVRAAEMAWENA

SEQ ID NO: 172884 - protein, 36 aa, Glycine max
  Clone ID: PAT_MRT3847_127129C.1.pep
CVCVVALARSRYNTAIRVDRLSLMGSPYRESPRASR

SEQ ID NO: 172885 - protein, 62 aa, Glycine max
  Clone ID: PAT_MRT3847_12712C.1.pep
LPFLIYYWINPSTWFVIEHFFLDSKVFPEKIEFIFIFQSNLITLVPEVPGLEKKIWVLIAQI

SEQ ID NO: 172886 - protein, 92 aa, Glycine max
  unsure (1)..(92): unsure at all Xaa locations
  Clone ID: PAT_MRT3847_127130C.1.pep
VFPPSACFVSFVGACGVVAVLVWLFFFVALVWFGFFVAGFAVVVGFGFFGLPPRFGCRGVLGVLGLIPPCCLCWFFFCLFGXVGRTRSSGPV

SEQ ID NO: 172887 - protein, 36 aa, Glycine max
  unsure (1)..(36): unsure at all Xaa locations
  Clone ID: PAT_MRT3847_127131C.1.pep
XTTGPCRAFHCSLTKSSKMFTLTLFFSKKKFHHGVL

SEQ ID NO: 172888 - protein, 122 aa, Glycine max
  unsure (1)..(122): unsure at all Xaa locations
  Clone ID: PAT_MRT3847_127132C.1.pep
MPDEQHQMEXKADGGASKPYPQHAGPIRTNGYIVTKRRPCKVAEDATCKPAKHGHAQRHSGEIDIPTATKPEDIGPSCHNCDVPHLNRTGYKLIHLAEDGCPSPLTESGHTNDDLMLSTEES

SEQ ID NO: 172889 - protein, 135 aa, Glycine max
  Clone ID: PAT_MRT3847_127133C.1.pep
QRRNGKNPGVPKFNPFEKNPLFPSWVNTKKARPNPLSKNLPTLNGKWNPPCTGPLTPGGGGFPPRVTVTFASPLAPVLFVFFLSFFPTFAGFPRKVLNGGLLLGSQLRVLRPLNPQKNLFRGRVHVGAHPPNKRF

SEQ ID NO: 172890 - protein, 34 aa, Glycine max
  Clone ID: PAT_MRT3847_127134C.1.pep
ARFDWDSHFEEGKSQGNLDSRMDAQPQLSGDDSQ

SEQ ID NO: 172891 - protein, 102 aa, Glycine max
  unsure (1)..(102): unsure at all Xaa locations
  Clone ID: PAT_MRT3847_127135C.1.pep
KLRNWKNPGFPKLNPFEKNPLFPSWLKTKKAPPNPLSKNLPTLNGKWNPPCTGPXTPGGVGVTPRVTVTFASPLAPVLFVFFLSFFPTFAGFPRKALNGGLP

SEQ ID NO: 172892 - protein, 93 aa, Glycine max
  Clone ID: PAT_MRT3847_127136C.1.pep
RGWCIDGKLDEAQRLAGEMYRGGFDLGVGAYNAMLDCVCKLCREKDPFQLHSEAAKVLVAMEYRGVPRNTETFNVLITNLCKIRKTEDALGFF

SEQ ID NO: 172893 - protein, 55 aa, Glycine max
  Clone ID: PAT_MRT3847_127137C.1.pep
VTFEYLNRYYCVIISYIDVQHRQISSVLNGYNTTNFDALHMFLLEELLLMKSLPL

SEQ ID NO: 172894 - protein, 61 aa, Glycine max
  Clone ID: PAT_MRT3847_127138C.1.pep
VIHNRRRCTFCLTLLTRPRSPVFRMERASPHPRVFVSVMRLSVWSFKNALTHQVAHVRTCR

SEQ ID NO: 172895 - protein, 62 aa, Glycine max
  unsure (1)..(62): unsure at all Xaa locations
  Clone ID: PAT_MRT3847_127139C.1.pep
SCCGRNCGCXAAANSXNGCICCKMYPYLIYTERTTTKTLVMGVSPLKDQFDSAEMGFPASKE

SEQ ID NO: 172896 - protein, 64 aa, Glycine max
  Clone ID: PAT_MRT3847_12713C.1.pep
YTSGEHDWNSGGRVVDSDRHGLRTETLDHLLNLGQERTMYVDLYYGSDLMLMGDLRMMMHVLSH

SEQ ID NO: 172897 - protein, 166 aa, Glycine max
  Clone ID: PAT_MRT3847_127140C.1.pep
ATIQVQYPSDIMAKKLWKILEAKARGEGGGCSITYGALDPVQITQMAKHLETVYVSGWQCSSTASSSLEPGPDLADYPSNTVPNKVAQLFTAQLVHDRKQRWTRSQALAKGEDLPPPIDYLRPLIADADTGHGGLTAAMRLTKMMIQALAAVIHIEDQAPATKKCG

SEQ ID NO: 172898 - protein, 98 aa, Glycine max
  Clone ID: PAT_MRT3847_127141C.1.pep
QVEGLSHSCVRCFLTHCMWNSTIERVSDKTSMVVVPLGTVQITNAKLMETMSKTGVRVSHHMSANRIVVGPGMDACLVAGTGEVLLPLTHSIRLGPGF

SEQ ID NO: 172899 - protein, 70 aa, Glycine max
  Clone ID: PAT_MRT3847_127142C.1.pep
MADWGPVFVSVVLFILLTPGLLIQIPGKGKMVEFGNFQTSGVSILVHSILYFALVCIFLMAIGVHMYTGS

SEQ ID NO: 172900 - protein, 147 aa, Glycine max
  unsure (1)..(147): unsure at all Xaa locations
  Clone ID: PAT_MRT3847_127143C.1.pep
RPSPRWNVFLTNGGSTVKSMINHPQSVHSFQAETSTLKSHVPNGTLHSPETLGTDACPNDAGAYHAGGTTGSQSGWGGNNEDNLPRLRPSPSLTSRTPRDVKPEDXTVFSVQERCVRQKILPLPSPPTCPLAPDVNALAHGFCKEEF

SEQ ID NO: 172901 - protein, 317 aa, Glycine max
  Clone ID: PAT_MRT3847_127144C.1.pep
MQSFPPIPTLACLYLTFFTSLLFLLPFSRAGLLSEPVSDPNQPLEPGSNTVPAFPVQTQALTCRLDLSDELFGGVKDACGKDLDRSRCCPVLAAWLFAAHARTALDVSAAPPPSSADLPMMPDDSQKCVNSLQDSLLSRNIRIPQPNATCDAILCFCGIRLHQITSLTCNAAFNVSLSHRNATPTAAVRNLENNCRNSSYAGCTKCLGALQKVKGYKNETKGSDRVKKMFNRDCQLMGLTWLLAKNKTAYIPTVSAVLRAMMYSAHPHESKCSPDQENMPLAVDSLQFESGHAPSRPSKFCVTVLPLVVLLLFSAFV

SEQ ID NO: 172902 - protein, 314 aa, Glycine max
  unsure (1)..(314): unsure at all Xaa locations
  Clone ID: PAT_MRT3847_127145C.1.pep
MAHPPPRERTIRKMAAPDFTYENLCIQYPDEDVPYVLKTGLIHLLPKFHGLVGEDPHKHLKEFHIVCSTRKPPDVQEDHIFLKAFPHSLEGVAKDWLYYLAPRFITSWDDLKRVFLENFFPASRTTTIRKDISGIRQLSGESLYDCWERFKKLCASCPHHQISEQLLLQXFYEGLSNMERSMTDASSGGTLGDMTPAKARNLIEKMASNSQQFCARNDAIVIRGVHEVATNSRTSSETKKLEGKLDALVNLVTQLALNQKSVPVARVCGLCSSADHHTDLCPSMQQPGAIEQPEAYAANIYNRPPQPQQQNQPQ

SEQ ID NO: 172903 - protein, 92 aa, Glycine max
  Clone ID: PAT_MRT3847_127146C.1.pep
FPLCPSSVLLHCSHVLVSFGRGPPIGSLFLLVFAVVFVPVLTRSCPLLELLILFLFPCSLRGVPFLFSPFPFSVVAGVNAKRFFLLCVSPRA

SEQ ID NO: 172904 - protein, 312 aa, Glycine max
  Clone ID: PAT_MRT3847_127147C.1.pep
MATLVVHNQTSSAQDAEALQQAFKGWGADDKAIIAILGHRNVHQRQEIRKAYEEIYQEDLIKRLESEISGDFERAMYRWMLQPADRDAVLVNVAIKNGTKDYHVIAEIACVLSAEELLAVRRAYHRRYKCSLEEDVAANTTGNLRQLLVGLVTSYRYEGDEINVKFSQTEANVLHESVKEKKGNSEEVIRILTTRSKTQLVATFNRYRDEHGISISKKLLDQTSDDFHKVLHTAIRCINDHKKYYEKVLRNAVKKFGTDEDGLSRVIVTRAEKDLKDIKELYYKRNSVHLEDEVSKETSGDYKKFLLTLLGK

SEQ ID NO: 172905 - protein, 69 aa, Glycine max
  Clone ID: PAT_MRT3847_127148C.1.pep
SGSSQRLSRFLSSSRVVDIFRSFKKTHRHKDAEPTEFEESLVQALSDLQNTNNYLKSDLKDLYINSSVQ

SEQ ID NO: 172906 - protein, 201 aa, Glycine max
  unsure (1)..(201): unsure at all Xaa locations
  Clone ID: PAT_MRT3847_127149C.1.pep
MHLFLDLFVAGTDTTAYGLERTMTELMHNPEAMRKAQXEIAETIGVGKPVEESDVXKGWPYLQSVIKESLRMHPPAPLLLRRAGKTGRASLRATQVPQGTQXLINEWAIGRNPAIWEDAHRFSPERFLDSDIDVKGRHFKLTPFGSGRRICPGSPLAVRMLHNMLGSLINNFDWKLENNIDPIDMDLDQSLRAIPVLVNAN

SEQ ID NO: 172907 - protein, 116 aa, Glycine max
  unsure (1)..(116): unsure at all Xaa locations
  Clone ID: PAT_MRT3847_12714C.1.pep
RNEIAATAKASVEKCQASTDYVVXNSGCLNHRLFARETDMRPTQIITHSIWKAHDILDRTLKSXEAILADFDQQSGAKPKKVQGPHDDGKNCFGTIDQLRRNIKFFGDNNVSMNDD

SEQ ID NO: 172908 - protein, 281 aa, Glycine max
  Clone ID: PAT_MRT3847_127150C.1.pep
MDTVLSTTLLLMLACSIVHVLRSLQARMRRKSNYNLPPGPSLLTIIRNSKQLYKKPQQTMAKLAKTYGPIMRFTIGQSTTIVISSIEATQEVLQTHDSLFSDRTNPDITTSYNHNRYSLVFLPVSPLWQELRKICHGNLFSAKTLDASTDLRRMKMKELLTDIRQRSLNGEVVDIGRAAFMACINFLSYTFLSLDFVPSVGDGEYKHIVGTLLKATGTPNLVDYFPVLRVFDPQGIRRHTTNYIDKLFDVFDPMIDERMRRRGEKGYATSHDMLDILLDIS

SEQ ID NO: 172909 - protein, 265 aa, Glycine max
  Clone ID: PAT_MRT3847_127151C.1.pep
VVLTSFFRSNLRFMVKHSRTSQASYAKDFHELIQVYGRKQNMTGNEKYFISDDSDHVSNSSDASSISDTDSVSPDDNQDDYAYKDINIMHSGNTDDFLTGRELSVDFLENDVDAFQSVDNSDVTCGEFCVQPAHKEWELSETIDPPKKPEGRLKFLKKPLEQGPTIIYVPTRKETLRIAKYLCKFGVKAAAYNAGLPKLHLRRVHEEFHENTLEVIVATIAFGMGIDKSNVRRIIHYGWPQSLETYYQEAGRAGRDGKLADCILY

SEQ ID NO: 172910 - protein, 130 aa, Glycine max
  unsure (1)..(130): unsure at all Xaa locations
  Clone ID: PAT_MRT3847_127152C.1.pep
PVGGTILRSDLLAKKLXTHGNLRASVDLQRTHCIIGMINMAGTAGLPENTGISLPCAMNKPFLGRARTDPYSISSQDCELWNPACAKTMTLSFNPHPXSHAWSLKFLNRTGFHXEIICATGWTAPPLHDA

SEQ ID NO: 172911 - protein, 69 aa, Glycine max
  Clone ID: PAT_MRT3847_127153C.1.pep
MFNHRTVKGLALTKISFKTSRQSFRPKNFKNAAVVTNYGDNNAYSHFEDLGSTTGQWDLYGSYAPLPYN

SEQ ID NO: 172912 - protein, 98 aa, Glycine max
  Clone ID: PAT_MRT3847_127154C.1.pep
QENAKPARHHFISLPAQYGREQITPAHGLRTLRATTQEQVETRLISHGIPKAVLQLTFAPTTTDKPYPYTTITIHYDTKKYHTSTSSSCMQHRVLHPQ

SEQ ID NO: 172913 - protein, 110 aa, Glycine max
  Clone ID: PAT_MRT3847_127155C.1.pep
DVFVLVSKAKKQMIAVINKLMWVACVLISVAFIAMSYIIVGDHKELAIAATVLGTVIMAATLGTLCYWVITHHLEASRLRSLRTTMSSRQSMSMSMMSGSENEYKTVYAI

SEQ ID NO: 172914 - protein, 526 aa, Glycine max
  unsure (1)..(526): unsure at all Xaa locations
  Clone ID: PAT_MRT3847_127156C.1.pep
RYIPKMMKKQLTGIRGDSPLQSAIRVGNLELVLEIISQSPEDELKELLSKQNNSFETALYVAAENGHLDILKELIRYHDIGLASFKARNGFDAFHIAAKNGHLEILKVLMEAFPEISMTVDLSNTTVLHTAAAQGHIEVVNFLLEKGNSLVTIAKSNGKTVLHSSARNGYLEVVKALVEXEPEIAMRIDKKGQTALHMAVKGQNLELVDELVKLNPSLANMVDAKGNTALHIATRKGRLQVVQKLLEXREINTDVINKSVETALDTAEKNGRLEIANFMQHLGAQSATSIKSLTTDTVLEHKQIVSDIISEVHXQLEHTIKTQRRMQGIAKRINKMHTEGLNNAINSNIVVAVLIATVAFAAIFNVPGQYPEKPSELSPGMSPGEAYIAPDIGFMIFIIFDSTALFISLAVVIVQTSVVVIERKAKRQMMAVINKLMWVACVLISVAFIAMSYIIVGDHKELAIAATALGTVIMAATLGTLCYWVITHHLEASRLRSLRTTMSSRQSMSMSMMSGSENEYKTVYAI

SEQ ID NO: 172915 - protein, 68 aa, Glycine max
  Clone ID: PAT_MRT3847_127157C.1.pep
QPPLRSRNSHTFLSDLSLSFWSSIPSRQHRIVPVCPSKSSCVTSLPAFMYVTVSHPLSSFSVVPIWSK

SEQ ID NO: 172916 - protein, 119 aa, Glycine max
  unsure (1)..(119): unsure at all Xaa locations
  Clone ID: PAT_MRT3847_127158C.1.pep
SGSREEKKERVLKLNMNKAVSVYGLLGLFAGVIFSSCICGTPRNFKVENDSGLMVKIETSLNNSTIPKTIYNGFLILAIKFVHYLFSRGYKSAAPYTMILPFWVAFTLSVSYMSXLSLS

SEQ ID NO: 172917 - protein, 176 aa, Glycine max
  unsure (1)..(176): unsure at all Xaa locations
  Clone ID: PAT_MRT3847_127159C.1.pep
TTLRPYDLLYIRVDIPPSSSGVSISLNSDVDLDVSRVERVPKSSLPLICFRXALNTSLKDSAVKGINGLDVEQCFPMEKNITMKLTNEQISPGAWYIGLFNGIGASRTQSKMIIRGSAYSFSANISVEACSNSMMRGELCNSTVYPLSCTASDVYNSMKATVKKPMMENAMTCKSN

SEQ ID NO: 172918 - protein, 159 aa, Glycine max
  unsure (1)..(159): unsure at all Xaa locations
  Clone ID: PAT_MRT3847_12715C.1.pep
MWGSVDNSSDDEQIACDPEITFRGRSVRPLKWLSEVSSCRYLPEGEMVTVCQILISRLAYMPNTVSVQSPATICGDIHGQFYDLMKLFQIGGDILETNYVFLGDYVDRGYYSLETISYLMLLLLKYPDRITLLRGNHETRRVSHQYGFYDEVPQKYXNS

SEQ ID NO: 172919 - protein, 91 aa, Glycine max
  Clone ID: PAT_MRT3847_127160C.1.pep
ALSNGAKACATRSSATVAVCKAAACASLWSPPPATAIPTLASICVSDFRFFTFSIFSLSALFSDRIELNKPQAPFTIRRPRDSELCTEPRA

SEQ ID NO: 172920 - protein, 105 aa, Glycine max
  Clone ID: PAT_MRT3847_127161C.1.pep
MVTVQIKQFKSKNSLSIKKELSIMGFSLRGLQRRVDVPKGRVAVYVGENQKKRFVIPISYLNQPSFLEVLNQAEQEFGFDHPMGGLTIPCNENVFLDVTSRLHSR

SEQ ID NO: 172921 - protein, 68 aa, Glycine max
  Clone ID: PAT_MRT3847_127162C.1.pep
TKFANGDPVWIQSKNRWKHPSRSFMLCLNKEGHVNSPFVLVLKGERFGLGCGSSLGGPIQLTHRSCIW

SEQ ID NO: 172922 - protein, 131 aa, Glycine max
  Clone ID: PAT_MRT3847_127163C.1.pep
DSFENLLFSVCRFRELTGTYPQNITVVSYDFKENRFAHLHRSAIGFPESRFFYAGTPATSNAKAAALKGEELVRTQFQVDPYGCRGSLYHKKLKRDPFHRSIPYPNGCPEIEGLFRYCGPTPYPGALPWAQ

SEQ ID NO: 172923 - protein, 94 aa, Glycine max
  Clone ID: PAT_MRT3847_127164C.1.pep
VSTTLAAAQARLWNVREERDQFEEANNQIVEHLKIKEDELSKSISSCRVEADVIKTWINFLEDTWALQMIKSHSLTLLVPIPNASSNLLFHSSD

SEQ ID NO: 172924 - protein, 69 aa, Glycine max
  unsure (1)..(69): unsure at all Xaa locations
  Clone ID: PAT_MRT3847_127165C.1.pep
NDSILIXKLWDNAMDXEVSSLRESVDYNRKKVLSHEYLIEEMQKELKAHRAEIVNVSKVVFRNPMDPKK

SEQ ID NO: 172925 - protein, 81 aa, Glycine max
  Clone ID: PAT_MRT3847_127166C.1.pep
MIIPIRCFSCGKVTGDLWEKFVKLIEEDGLSDGDALDQLGCKRYCCRRMVMTHVDLIEKLLKYTPDGRNYKKIEMQTHQDA

SEQ ID NO: 172926 - protein, 282 aa, Glycine max
  Clone ID: PAT_MRT3847_127167C.1.pep
MAGIRMIDIAVNFTDGMFKGIYHGKQCHVSDIATVLNRAWAAGVTRIIVTGGSLEESREALAIAETDGRLFCTVGVHPTRCKEFEESGDPEKHFQALLSLAKEGIQKGKVVAIGECGLDYDRLHFCPAEIQKKFTAGVTHSFTGSMDDCIKLLSFDKMYIGINGCSLKTTENLDVVKGIPVERMMIETDSPYCEIKNTHAGIGFVKSTWPSKKKEKYDQECIVKGRNEPCLVKQVLEVVAGCKGINDVSNLSRTLYHNTCRIFFPHDLDSAADALLAGGNST

SEQ ID NO: 172927 - protein, 253 aa, Glycine max
  unsure (1)..(253): unsure at all Xaa locations
  Clone ID: PAT_MRT3847_127168C.1.pep
KYEKTTEGGVHPTRCKEFEESGDPEKHFQALLSLAKEGIQKGKVVAIGECGLDYDRLHFCPAEIQKKYFEKQFELAYITKLPMFLHMRAAAADFCEIVEKNKDRFTAGVTHSFTGSMDDCIKLLSFDKMYIGINGCSLKTTENLDVVKGIPVERMMIETDSPYCEIKNTHAGIGFVKSTWPSKKXEKYDQECIVKGRNEPCLVKQVLXEVVAGXKGINDVSNLSRTLYHNTCRIFFPHDLDSAADALLLGNST

SEQ ID NO: 172928 - protein, 34 aa, Glycine max
  unsure (1)..(34): unsure at all Xaa locations
  Clone ID: PAT_MRT3847_127169C.1.pep
GSSFYRVGHCLIFLTNNRECAYLYMYIYLYLXLY

SEQ ID NO: 172929 - protein, 50 aa, Glycine max
  Clone ID: PAT_MRT3847_12716C.1.pep
QIYSKLLILLYLRGAKEIKPVILMRVNDDAMNNGCDGPLLSSSRSRTRAE

SEQ ID NO: 172930 - protein, 283 aa, Glycine max
  unsure (1)..(283): unsure at all Xaa locations
  Clone ID: PAT_MRT3847_127170C.1.pep
NGFSLSLGNEFRCIRGIRIYRSFHIRAYPNCWFSLCMAKGGIRMVLILDYLDNXIRQLEKNIETIMNSIEFPLLDQTTKNSVISTTLNDLSNWSRLSSLWPLLYGTSCCFIEFASLIGSRFDFDRYGLVPRSSPRQADLILTAGTVTMKMAPSLVRLYEQMPEPKYVIAMGACTITGGMFSTDSYSTVRGVDKLIPVDVYLPGCPPKPEAIIDAITKLRKKISREIYENQMSSQRENRCFTTNHKFHIGYSTHTGNYGQELFYQLPSTSEIPSDTFFLKYNKK

SEQ ID NO: 172931 - protein, 53 aa, Glycine max
  Clone ID: PAT_MRT3847_127171C.1.pep
DPLWQYHGTLGTFDILGDLRTTKCLEIASSILQYYRRRPPRVLVSRKRPPVAS

SEQ ID NO: 172932 - protein, 70 aa, Glycine max
  Clone ID: PAT_MRT3847_127172C.1.pep
ESAMSQLGELCDHVHIHAQKTLPSSSSSSDDLCAASGSMRCVEHVDRQTRALPPSHWRSLHKGAGANDMW

SEQ ID NO: 172933 - protein, 140 aa, Glycine max
  Clone ID: PAT_MRT3847_127173C.1.pep
ERQHSEAQKFPHPFQISVTLLLESMQASTFGVEEATFGVQSRRGLVGFREFRNGSVLRPRRVCMANNNIDLCGLRLGSVTMETELTNARVGFGGIFGPSVKPRSVRVMASGLYAVAGGFDLFGLLAIVNFSGLHLPMMCM

SEQ ID NO: 172934 - protein, 137 aa, Glycine max
  Clone ID: PAT_MRT3847_127174C.1.pep
IARQASIPLFSNNPFLIPLVTLTNPLCLFFLPRPFSFTIWRQLPLPHPTLDAALSAAPSSHAAVAASAVSTPSLKLNKCTFFFFNHRCSTHESRGTTVTTFEALPFRFSVKSTPSMGSGKSRDISRFSTAAKFTSLF

SEQ ID NO: 172935 - protein, 162 aa, Glycine max
  unsure (1)..(162): unsure at all Xaa locations
  Clone ID: PAT_MRT3847_127175C.1.pep
MPTNEDFQSVSNCYVFKSRLQEYAQKAGLPTPVYETIKEGPSHEPSFRSTVIVNDVRYDSLPGFFNRKAAEQSAAEVALVELIKSNLVNQSITQPVHSHETGLCKNLLQEYAQKMNYAMPMYQCKKDETPGRASVFSCTVDIGGXSSKSKEEAEIEAARTAL

SEQ ID NO: 172936 - protein, 232 aa, Glycine max
  Clone ID: PAT_MRT3847_127176C.1.pep
MPTNEDFQSVSNCYVFKSRLQEYAQKAGLPTPVYETIKEGPSHEPSFRSTVIVNDVRYDSLPGFFNRKAAEQSAAEVALVELIKSNLVNQSITQPVPSRDKMGQIHTENLGIGANINHEVETHASVNGESGVLEKKTETFTSEAANNFENGVSVNYQEKETLAGESSLAVNSQEGIFENGKSTELYSKENNLVTVVTELSSVSNGGIPETGVEVNKQQYNGEMVSDHCVVGG

SEQ ID NO: 172937 - protein, 60 aa, Glycine max
  Clone ID: PAT_MRT3847_127177C.1.pep
DKSSNKVFLRYIQFLRDFEQCSTYVWGHVVLAFLYREMYTVTDYKLKSIGGMCILIQMWT

SEQ ID NO: 172938 - protein, 67 aa, Glycine max
  Clone ID: PAT_MRT3847_127178C.1.pep
IGYKIKIRGLNEMAGEEIEHFQGYQLYNTTHDHAYGFSVELTRKENTYAMVWSLPKIYLVRTHFLAG

SEQ ID NO: 172939 - protein, 45 aa, Glycine max
  Clone ID: PAT_MRT3847_127179C.1.pep
RIIPNVSSCSQDLMCVSAKRRFRVCILFSGERKREEIPACKREKE

SEQ ID NO: 172940 - protein, 153 aa, Glycine max
  Clone ID: PAT_MRT3847_12717C.1.pep
MGKTAASNPALQVSVSFGRFENDSLSWEKWSAFSPNKYLEEVEKCATPGSVAQKKAYFEAHYKNIAARKAELLAQAKQMEKDSPRSQRQNGEDLSCNTCGTDAECDMSPTPGSSEGVNHETNSIGHIVRTDVSTLMEAVAVSIDYQGSSVEGE

SEQ ID NO: 172941 - protein, 88 aa, Glycine max
  Clone ID: PAT_MRT3847_127180C.1.pep
LGWILYIFGRGVCLSVDTPTEGSFFRPSTLIGVAGSSVTDSLPGYFRAKYTSYDRSIVVTAAKAIRPAGVRLILYASNARTFCQKYGN

SEQ ID NO: 172942 - protein, 110 aa, Glycine max
  Clone ID: PAT_MRT3847_127181C.1.pep
RFPPRFRPDLSFASYHSTQTDLGPSLGKPGETSPPDSKSSPSVLIHSLGKSTTDNDVRIQQLQEILQDLQMRLESSEAERKQLQVELQSRRAELVCLNNTEDFREQLLDL

SEQ ID NO: 172943 - protein, 146 aa, Glycine max
  unsure (1)..(146): unsure at all Xaa locations
  Clone ID: PAT_MRT3847_127182C.1.pep
MSYRRGSDQPPQRRILRTQTAGNLGADPILDSEVVPSSLVEIAPILRVANEVEASNKRVGYLCRFYAFELAHRLDPQSSGRGVRQFKTALLQRLEKENVTTQEGRKKSDAREMQAFYGPYYEKDIQALDNXAADKAPRXRVTKAYQ

SEQ ID NO: 172944 - protein, 178 aa, Glycine max
  Clone ID: PAT_MRT3847_127183C.1.pep
MKKGENKGRTRSFPVDPNVPRWVCQNCRNPLCIVGADSYADKFFNDPSRSGMQGSSIHGASSVLSTTKMDNSYVVLPKQRPLAQGNAPRPRGDAAAQPGKAMEESFVVVYKSESGIDGNGAHLLGTGADSGGHLPPHNSGFNSTITVLTRAFEIATTQTHVEQPLCLDCMRILSDKLD

SEQ ID NO: 172945 - protein, 415 aa, Glycine max
  Clone ID: PAT_MRT3847_127184C.1.pep
MAKKAVLIGINYPGTKAELRGCINDVWRMHRCLIERYGFSEDDITVLIDTDESYTEPTGKNIRSALTRLVRSAEPGDVLFVHYSGHGTRLPAETGEDDDTGYDECIVPSDMNLITDDDFREFVDGVPRGCRITIVSDSCHSGGLLEEAKEQIGESTKGEEEQSSSGFGFSSFLHRTVEDAIESRGFHIPSALRHNRGRDDDGDEAQNRDIELPDGGYVKNRSLPLSTLIDILKQKTGKDDIDVGKLRPTLFDVFGEDASPKVKKFMNVIFNKLQHGSDESGGGILGLVGGLAQEFLKQKLDDNDEGYAKPALETKVESKHEAYAGPTKRGLPDGGILMSGCQTDQTSADASPAGNAASAYGAFSNAIQAIIEETDGAITNQELVQRAREKLKNSGFTQKPGLYCSDHHVDAPFVC

SEQ ID NO: 172946 - protein, 43 aa, Glycine max
  Clone ID: PAT_MRT3847_127185C.1.pep
MAYYALKPAHFNDNKISQRILISHSQNFYSFIFSYINNNNNTD

SEQ ID NO: 172947 - protein, 113 aa, Glycine max
  Clone ID: PAT_MRT3847_127186C.1.pep
MISSSPATGILDRLGKASSAEELFSLLGVEYDPKIANVARLHILKRMGQYLAQEKFAGAAEPEIRTRCKAMLERAYGDSGASSPTDERAFKVMKDAVSDSKKAEREKVRKQPC

SEQ ID NO: 172948 - protein, 77 aa, Glycine max
  Clone ID: PAT_MRT3847_127187C.1.pep
EPMDIMTVLQLVLRKSLAYGGSPRGLHEGAKVIEKHAAQLCVLAEDCDQPDYVILVKAPCADHNARLLTPPSAKTPA

SEQ ID NO: 172949 - protein, 69 aa, Glycine max
  Clone ID: PAT_MRT3847_127188C.1.pep
KIGSLFVHQLQHSMKKIFMEPEEPLYKAGLVVGYPPQQSDRKYVRGSTHFDIPVLRIYRVIPLCPGAEY

SEQ ID NO: 172950 - protein, 147 aa, Glycine max
  Clone ID: PAT_MRT3847_127189C.1.pep
ARDHSEADAPGKRLAKPLIFCRSESDCPMENGYARPVEGIYVLVDMQNMVVLEFEDRKLVPLPPVDPLRNYTPGETRGGSDRSDVKPLQIIQPEGPSFRVNGYFVEWQKWNFRIGFTPKEGLVIYSVAYVDGSHGRRPVAHRLSFVE

SEQ ID NO: 172951 - protein, 107 aa, Glycine max
  unsure (1)..(107): unsure at all Xaa locations
  Clone ID: PAT_MRT3847_12718C.1.pep
NCILYRSGGCPPGGYSVSSHAQGSHGHGGMGAMLTGGAAXAVAAYGAHHFFHGSHGSYGQCAPYVAHMPHGKFMTHGKHCKFKHGKHMPVWQALNACQILLAWVLVH

SEQ ID NO: 172952 - protein, 35 aa, Glycine max
  Clone ID: PAT_MRT3847_127190C.1.pep
ARAHWYLLLSPDLLSTSALRDSSFLTISLDWFSSC

SEQ ID NO: 172953 - protein, 166 aa, Glycine max
  Clone ID: PAT_MRT3847_127191C.1.pep
NPKSVPHFLQRALPSHKSLVVCPLDIWLTRGIFNFPHIIPNMDPHMTIVATPFKKHLMTELALKLAILNYNSISNRRTKPVPPCRPLVKGQQVLQVQILLIEAHVALATFQQVMNLHIRKIFNPQQGNLLHSLISSRQTRHSHVHSNNLHLILIGSSSSRIIIGRQ

SEQ ID NO: 172954 - protein, 122 aa, Glycine max
  unsure (1)..(122): unsure at all Xaa locations
  Clone ID: PAT_MRT3847_127192C.1.pep
XXXXXXXXXXXXXXXXXXAPSLQGPSSPLSPCPPPHPPTPQWCKALCASPVQFQSQVVMLNIGGRNQLTTVCVWCAIEFNHDAVNSEIQPDSVGFMCPACKAKISGQVNVLLDCGSPNAGCL

SEQ ID NO: 172955 - protein, 315 aa, Glycine max
  Clone ID: PAT_MRT3847_127193C.1.pep
ARAMRHRLCSSVGDGVIIKDGKFECQFCHKVFLERRRYNGHVGIHVRNYVRKVEDLPGQANVQGTDDKSPVRGQDVPLRISKMDALIEIAQNSIMEDSVTEPHSSAKLNRIPASDIAVGYIDQDRNSESPISEQKMEDSMTGNNVDHDLDEELVEEIDDDNHVINVKMVTFLDNMGLLSVNKQDVNVPETSKVKDDVPLTIEELDQSGMDLDDNSQNCLLPLSKHHIIPESEKSENSVCANTKGQFILDEGISNKSELEFSLNGLKDVPVTVSTNVQKMVRPASEENVVHSWDFNSSISTEQSLGCLPAFNSDEV

SEQ ID NO: 172956 - protein, 127 aa, Glycine max
  unsure (1)..(127): unsure at all Xaa locations
  Clone ID: PAT_MRT3847_127194C.1.pep
SATRADTRPARIRLSDVQWLCYHPWYYNSLTCTCWNEYFKEEPYTAAXIETISGDKLTSFLNNNAAYLEVLKVAKQYKLHQRDSHVYSETQRAHAFKDGGFSNLRDEDTLKKPGDLINENHHICSGL

SEQ ID NO: 172957 - protein, 100 aa, Glycine max
  Clone ID: PAT_MRT3847_127195C.1.pep
PTGLYPCIIQMTKFNVIRLYILWPVLNRKKLGLYNLSPITTRNFYKSGNLPANPALLHGYACMKPLGTKLRSLHYVWSPAALAQKSTFNRPLPYLLRSLC

SEQ ID NO: 172958 - protein, 79 aa, Glycine max
  Clone ID: PAT_MRT3847_127196C.1.pep
TCVLTDQCAVVHEAHNFEAYRNGPSEQSAQSCSKRSNHGAFLQSQLTQIVELSFIEGTPLVSLETSHLGAPNWKPSGKA

SEQ ID NO: 172959 - protein, 44 aa, Glycine max
  Clone ID: PAT_MRT3847_127197C.1.pep
LKTLILEFMGILLTYIMLNFSTFARCGTSPRTCNPTIRAWEKLA

SEQ ID NO: 172960 - protein, 72 aa, Glycine max
  Clone ID: PAT_MRT3847_127198C.1.pep
ASWYTQIESLPKSIGKLQNLETLDVRQTKVFQIPKEISKLLKLRHLLANEISSIAVKVCIGGMTSLQKICLL

SEQ ID NO: 172961 - protein, 101 aa, Glycine max
  Clone ID: PAT_MRT3847_127199C.1.pep
RIYLLLLLLLPPVNKSRVLVSSFSLFTKLISLSNILLEVDMQTKKKTSRRNASQERGSPKVSRAQRKVSQNGQAAEKKVTDLITSSARKNKSLSTLENKTR

SEQ ID NO: 172962 - protein, 57 aa, Glycine max
  Clone ID: PAT_MRT3847_12719C.1.pep
HLIFLHLLLRIIPATQLLIILLRSLIEQPRVIVFEKIVFLISHQFITIDDVKKFLSN

SEQ ID NO: 172963 - protein, 46 aa, Glycine max
  Clone ID: PAT_MRT3847_1271C.1.pep
KEYYRARWSITQPSTACCKSLRNVDMSCMCRHTNKFHSDVIAGLVV

SEQ ID NO: 172964 - protein, 45 aa, Glycine max
  Clone ID: PAT_MRT3847_127200C.1.pep
VSTDGLYSNFMLFFNKDLSSSLLKDLNHFQMGLSFIPLRTHFFQD

SEQ ID NO: 172965 - protein, 94 aa, Glycine max
  unsure (1)..(94): unsure at all Xaa locations
  Clone ID: PAT_MRT3847_127201C.1.pep
MMESCDCIDTQYPPDELLVKYQYISDVLIALAYFSIPVELIYFVQKSAFFPYRWVLMQFGAFIVLCGATHFINLWTFSPHSKAXAXVMTIAKVS

SEQ ID NO: 172966 - protein, 40 aa, Glycine max
  Clone ID: PAT_MRT3847_127202C.1.pep
HHAIGYFFLACIPDDFSAQVTFVVLYHLIDQCNFAKIKLS

SEQ ID NO: 172967 - protein, 50 aa, Glycine max
  unsure (1)..(50): unsure at all Xaa locations
  Clone ID: PAT_MRT3847_127204C.1.pep
EKHQLQFPSKETKAHSDYLVKECSTXGPPIQDIPYVKYTDLEDYKLQGYG

SEQ ID NO: 172968 - protein, 152 aa, Glycine max
  unsure (1)..(152): unsure at all Xaa locations
  Clone ID: PAT_MRT3847_127205C.1.pep
NLISLGFFVPALILIAWACHGPCXLWFSLILKTGYAERLCQVSCTRVKLCQIAHAMRSFITISEDRHQPSSDFMNGHRLISDCNSANRRAFSYATXRELHHYNIFILCMHNSVLSNVPYSAKHXYGVADFTDTLHVECVTHGDSSMLPTTLN

SEQ ID NO: 172969 - protein, 79 aa, Glycine max
  Clone ID: PAT_MRT3847_127206C.1.pep
ARDHNILLTSWMNMPVYEADFGWGKPMQFTLAHVFHQVDRVGIFPSPDGDGVVVYLNFETAQLQLLKKLFYADMYVSSL

SEQ ID NO: 172970 - protein, 67 aa, Glycine max
  Clone ID: PAT_MRT3847_127207C.1.pep
FGIYGNSYQGEKCLTGRGMTVLRDESRVKAYIIPVCSFKTQPFLSHNRFRRWISIEYQELDLDQRWI

SEQ ID NO: 172971 - protein, 55 aa, Glycine max
  Clone ID: PAT_MRT3847_127208C.1.pep
IFIFTSSEHMRGFSINLIPASPPIKEEKIIKNKGEKKNISNFEQAIFSFLIDQNK

SEQ ID NO: 172972 - protein, 81 aa, Glycine max
  Clone ID: PAT_MRT3847_127209C.1.pep
AHMRSSTQNSMDNTRLKKIPYIIPSTEEQHKCTAKVIKHFNYILLGGSSQLNDPITYPVSARESLYFIQLIKMPDECGEKK

SEQ ID NO: 172973 - protein, 167 aa, Glycine max
  unsure (1)..(167): unsure at all Xaa locations
  Clone ID: PAT_MRT3847_12720C.1.pep
TPKEAMSSMRKTPTKHVSXRTPWYDPHQVKYMRPFLWEPLVYLSGECTSNYHXDTAGLVAYTXNYDKNRELKVIHYKWAMLGALGCVFPELLSRNGVKFGEAVWFKAGSQIFSEGGLDYYGNPSLIHAHSILAIRDTQGILMSADEGYPIAPDPLSXVTDPIYQCGS

SEQ ID NO: 172974 - protein, 250 aa, Glycine max
  unsure (1)..(250): unsure at all Xaa locations
  Clone ID: PAT_MRT3847_127210C.1.pep
LTYNQQDLVFAPYGPRWRFLRKLSTVHMFSAKAMDDFRELRQEEVERLTCNLARSSSKVVNLRQLLNVCTTNILARIMIGRRIFSDNSSNCDPRADEFKSMVVDLMVLAGVFTIADFIPCLHWLDLLGVIPPTTTLYERFDKFLTSILEDLKISPTEKPHDLLSAFLSLKETPQGEHQLIASEIKAVLXDMFTAGTDTSSSTVEWAITELXIKNPRIMIPVQQELDGVVGHDRLVTALDLPHLPYLQAVV

SEQ ID NO: 172975 - protein, 104 aa, Glycine max
  unsure (1)..(104): unsure at all Xaa locations
  Clone ID: PAT_MRT3847_127211C.1.pep
MNYDPSCGRNLGFQKNEKMNVDLESLAEATSVSIGSLISTTILYPLDTCMTKYHAEARSSGRIKYRNLTDLLSEAISNRQALSLYQGLGTXNLQSFILQSFYFY

SEQ ID NO: 172976 - protein, 48 aa, Glycine max
  Clone ID: PAT_MRT3847_127212C.1.pep
MSGAFIKYIVVNSRWLSSHRTVGSASLGYTKSKLQMDTFFNAKLTRQH

SEQ ID NO: 172977 - protein, 49 aa, Glycine max
  Clone ID: PAT_MRT3847_127213C.1.pep
GNIPRLFQKLVFPEQCQMWILIHIKTRPGVPTNVHVTSLNFASNAYLFS

SEQ ID NO: 172978 - protein, 156 aa, Glycine max
  unsure (1)..(156): unsure at all Xaa locations
  Clone ID: PAT_MRT3847_127214C.1.pep
SVKTSPTFGEAAMGRIAQGTMVLAHGGYEKILLNTLETVPDERLLNSYAXYISTCAAPVMGVLNVSTAEIAYSSDNAILYINDNQTEWNYDDAMIPLHDLKSATTSSNTYNCAEKYIQVISADNYELWFMDLLNYDGAVXSLQDALESGKYNDEHS

SEQ ID NO: 172979 - protein, 75 aa, Glycine max
  unsure (1)..(75): unsure at all Xaa locations
  Clone ID: PAT_MRT3847_127215C.1.pep
PIILRIRTFRFRNLSHIIIIIQVNRDQSRSHFPLTIAVSSFETGILTHYLFTDYHPMHAPLQSLHSRSFHETXYP

SEQ ID NO: 172980 - protein, 91 aa, Glycine max
  Clone ID: PAT_MRT3847_127216C.1.pep
KNKTKLGSYIKKTFCPFNSQKGPPKTLFLITNPLKKKKVSPWLKSQIGTKKSLKKAIRFLIQGPVKVGTAFVPPKTGGLANLPGRKNLTRG

SEQ ID NO: 172981 - protein, 42 aa, Glycine max
  unsure (1)..(42): unsure at all Xaa locations
  Clone ID: PAT_MRT3847_127217C.1.pep
RCSNTTKKNLSDLYLLSXXILSKGALSKVIXQLFFXVLYEIE

SEQ ID NO: 172982 - protein, 28 aa, Glycine max
  Clone ID: PAT_MRT3847_127218C.1.pep
KEQILPSYEEKMFRLTPPQFYEKSLRWC

SEQ ID NO: 172983 - protein, 265 aa, Glycine max
  Clone ID: PAT_MRT3847_127219C.1.pep
GSSKLAFTGSTDTGKVVLELAARSNLKPVTLELGGKSPFIICEDADVDKAVELAHFALFFNQGQCCCAGSRTFVHERVYDEFLEKSKKRALRRVVGDPFKKGVEQGPQIDVEQFEKVLRYIRSGIESHATLECGGDRLGSKGFFVQPTVFSNVQDDMLIAQDEIFGPVQSILKFKDIDEVIRRANKTRYGLAAGVFTKNVSTANTLMRALRAGTVWINCFDVFDAAIPFGGYKMSGIGREKGIYSLHNYLQVKAVVSPVKNPAWL

SEQ ID NO: 172984 - protein, 101 aa, Glycine max
  unsure (1)..(101): unsure at all Xaa locations
  Clone ID: PAT_MRT3847_12721C.1.pep
HVFNPDLTISVPQGTKHRCSXGIDTLMLLTTYDLSVTLDLPCYNMNLLLAMLSPYLTTSATXPTNSXITTIHYILXLYSNDFNTNHSFENNNTQTWLMYAT

SEQ ID NO: 172985 - protein, 76 aa, Glycine max
  Clone ID: PAT_MRT3847_127220C.1.pep
DWLWDNSSNKESQLIGLKRAIKMNNKIQAFYGIHEFKIDAHLIIKECMHVQIERERYQNMTCGAVKQLSLAQFFFF

SEQ ID NO: 172986 - protein, 91 aa, Glycine max
  unsure (1)..(91): unsure at all Xaa locations
  Clone ID: PAT_MRT3847_127221C.1.pep
CFASXIQFNGLLXSVXXRXSRXITXXXXPXXXLXIPLLSNEXSXEMSRRRFAFKGIVXSGVSVXASXLTXXXNXXXKVLKDCRTSXXGXIM

SEQ ID NO: 172987 - protein, 55 aa, Glycine max
  Clone ID: PAT_MRT3847_127222C.1.pep
VQGDFLDFVRVNPHLSYATVENAPGANRLCSFRENIFPATYGHVKFPFLSSSNTC

SEQ ID NO: 172988 - protein, 49 aa, Glycine max
  Clone ID: PAT_MRT3847_127223C.1.pep
YTRGKRPHFIKCFSSKAMVPDMDTSPHHSYVSGTESKENIKFYGSMAGK

SEQ ID NO: 172989 - protein, 59 aa, Glycine max
  Clone ID: PAT_MRT3847_127224C.1.pep
LSVVVSAVIMGCHVPLGEPVTNLISFYFRFSQVSGDGDGVVNLLCFPFGKCYKTNAIEE

SEQ ID NO: 172990 - protein, 62 aa, Glycine max
  Clone ID: PAT_MRT3847_127225C.1.pep
ARQLSFYTLKRASLFAKIPLVRCPDRHMASVLLVTLQADYACLSSPKSVSLDVPCPASTTEL

SEQ ID NO: 172991 - protein, 499 aa, Glycine max
  Clone ID: PAT_MRT3847_127226C.1.pep
MEHCNCYMFTLSLLLLLLLTPPSLSDDLGFDFPAKKLIRDLNLFPSEDVNIVPRHSNSHANKIVEKPLRFPNLVPSDSGISLDDLAHRAGYYLIPHSHAAKMFYFFFESRNSKKDPVVIWLTGGPGCSSELAVFYENGPFKIANNMSLVWNEYGWDKVSNLLYVDQPTGTGFSYSTDKRDIRHDEEGVSNDLYDFLQAFFAEHPEYVKNDFFITGESYAGHYIPAFAARVHRGNKAKEGIHINLKGFAIGNGLTDPGIQYKAYTDYALDMGIIQKADYERINKVMVPACEMAIKLCGTDGKIACTASYFVCNTIFNSIMSHAGDINYYDIRKKCEGSLCYDFSNLEKYLNQKSVRDALGVGDIDFVSCSSTVYQAMLVDWMRNLEVGIPALLEDGINMLVYAGEFDLICNWLGNSKWVHAMEWSGQQEFVVSSEVPFTVDDSEAGLLKKYGPLSFLKVHDAGHMVPMDQPKASLEMLKRWTQGTLSESAADAEKLVAEL

SEQ ID NO: 172992 - protein, 56 aa, Glycine max
  Clone ID: PAT_MRT3847_127227C.1.pep
GFVPNTLPSSFSLTSLIVQTYPSHLPCLSPKKLLSFRERKSLVFSCGKHLTHRIEP

SEQ ID NO: 172993 - protein, 70 aa, Glycine max
  Clone ID: PAT_MRT3847_127228C.1.pep
INTTLSTTEASWHMLKMVRLSKYLFLPSNDKTQTLLLSIQYRIVHSILHSYILFWNDILIHLISFDHNNG

SEQ ID NO: 172994 - protein, 141 aa, Glycine max
  unsure (1)..(141): unsure at all Xaa locations
  Clone ID: PAT_MRT3847_127229C.1.pep
LVCITLLSINRIEIYGKSCRLRWVKHLRPDFKRGHITPQEESIGLELHARWGNRXDLFSHSLEPACFHIMAAYIFQGLDCXTINFRWSAIARSLPGRTGNEIMIYWRTHFKEKAKSPYDAAEKARNRLMRKQQFHQPLLRQ

SEQ ID NO: 172995 - protein, 91 aa, Glycine max
  unsure (1)..(91): unsure at all Xaa locations
  Clone ID: PAT_MRT3847_12722C.1.pep
FLGLGIVKRSNHAHEFLRLAAETMHCVCLMQSVDXSSDSWNEEPNLMGLTFEGYLPAIIKRMDRAGKSDRQEGIMDPTVAIEGEITTLEEA

SEQ ID NO: 172996 - protein, 78 aa, Glycine max
  Clone ID: PAT_MRT3847_127230C.1.pep
TRAPYISTVTASLGRVSHQNLCILYTFGSANTSFSRQERLLHLLMNPFMSLRVYLESGQILNRCFPRLSLQHPQLILQ

SEQ ID NO: 172997 - protein, 49 aa, Glycine max
  Clone ID: PAT_MRT3847_127231C.1.pep
TNKHFFPFFLKKKNGLGTGNHPSEIILGDPSGVEKFQGFRTRLRGFAKF

SEQ ID NO: 172998 - protein, 54 aa, Glycine max
  Clone ID: PAT_MRT3847_127232C.1.pep
SLFSLSHQFMFFVYCLSSLSLGSFFYLVIYLPKTQTHSLLFSLSLRLVMASFVT

SEQ ID NO: 172999 - protein, 51 aa, Glycine max
  Clone ID: PAT_MRT3847_127233C.1.pep
LRDKFNEEIHLMRYTHPISAIASTGIACHLDAGNGIILSPLSYRKIMNHST

SEQ ID NO: 173000 - protein, 67 aa, Glycine max
  Clone ID: PAT_MRT3847_127235C.1.pep
PRTPMTPTTLLTPGSARKADNAWRSDFHPGSNSATKSIGDQMTDKPIPNTPTVYDWMNRGENRRRHR

SEQ ID NO: 173001 - protein, 94 aa, Glycine max
  unsure (1)..(94): unsure at all Xaa locations
  Clone ID: PAT_MRT3847_127236C.1.pep
TQTTHNTAAATAPKPKAXEKKXXNPXRETKAQKXAPKNXXGERGERPTRAAKEPEQHRGQAPXAPKARHTXXAPGTRRNEKXARHXTARGDKAT

SEQ ID NO: 173002 - protein, 59 aa, Glycine max
  Clone ID: PAT_MRT3847_127237C.1.pep
VVRTVTWCSVWPCLVSPLILFVSTSAYVKWILEKKRKISLVLERFKVYVICVKVHKIVV

SEQ ID NO: 173003 - protein, 54 aa, Glycine max
  Clone ID: PAT_MRT3847_127238C.1.pep
HSYPLTALFLHKFGGSFFNNRMLTVPLNTSLGIKREKFLGKNTTFTNVPYRGSE

SEQ ID NO: 173004 - protein, 53 aa, Glycine max
  Clone ID: PAT_MRT3847_127239C.1.pep
INSKFNNKQKSKYCVIPPTLQKKKKVSDFQGSLSNLFCFPLSIRGNSNKSSVL

SEQ ID NO: 173005 - protein, 119 aa, Glycine max
  Clone ID: PAT_MRT3847_12723C.1.pep
PKKVKVIPPFRRLLSKLPTWSLFIANAMHSWGFFIVLSWMPIYFSSVYRVDLRHAAWFSAVPWALMAVMGYFAGLWSDMMIQSGTSVTLTRKIMQLSESVLETSYCTVQFNCLYMKGDS

SEQ ID NO: 173006 - protein, 105 aa, Glycine max
  unsure (1)..(105): unsure at all Xaa locations
  Clone ID: PAT_MRT3847_127240C.1.pep
TXGNDXXXXPXXNXXXXXXXSXLXXVXXXXXPXXCXXWXXXXXXXXXXXXXXXXXXXNXXXXSXVXXXXXXXXXPXMXXXXXXXXXXCXXXXPRAEFRAYVRVXA

SEQ ID NO: 173007 - protein, 42 aa, Glycine max
  Clone ID: PAT_MRT3847_127241C.1.pep
HPIVQGKLFLGGDSKLMVIKKAAKLCNACGALNIILVPSLMT

SEQ ID NO: 173008 - protein, 39 aa, Glycine max
  Clone ID: PAT_MRT3847_127242C.1.pep
ARWLELSAHQWKTLLILITMNYMLAINPSWKYFRTMRHL

SEQ ID NO: 173009 - protein, 84 aa, Glycine max
  Clone ID: PAT_MRT3847_127243C.1.pep
VSHSIVTKYGDGNKAQYDYSATCSMLKYLQLCIDQKYTKTSIYLNRINHDAWLHRAISCCYMPGQLVWQKGTPQIYPTTYLMNI

SEQ ID NO: 173010 - protein, 59 aa, Glycine max
  Clone ID: PAT_MRT3847_127244C.1.pep
SFNPFDIVKANFQAKEGFPRDQQRFFFAGKQLKDERPLVGYNIQKESPLHLVPGPRGGF

SEQ ID NO: 173011 - protein, 100 aa, Glycine max
  unsure (1)..(100): unsure at all Xaa locations
  Clone ID: PAT_MRT3847_127245C.1.pep
STSQDAQDLFRGLWPAYAGTPTNHRIVDLDVIYAVFTAFLQVDXMALGGSFPFCSFLAGVLSXEGTAVLAVGLTIQVLTENKEFKDLAPDGAFAEFGLWN

SEQ ID NO: 173012 - protein, 61 aa, Glycine max
  Clone ID: PAT_MRT3847_127246C.1.pep
QCSVKHTVSATPATCPQACMVISTTVKFVNKFQFGEPSQDAVKMKMWLKIRRKRRINTNLQ

SEQ ID NO: 173013 - protein, 71 aa, Glycine max
  Clone ID: PAT_MRT3847_127247C.1.pep
FCTINYALILKFFQLNLLVCELKLSSLSLSTSTADLPRLIIRQGDPILTSNAVFIDGDQSSKVQRLELSIS

SEQ ID NO: 173014 - protein, 114 aa, Glycine max
  unsure (1)..(114): unsure at all Xaa locations
  Clone ID: PAT_MRT3847_127248C.1.pep
NLVTLQWHTLVYWSTAGRSPPPRXPGSAPPQPSDLEPWRGPLPISGLGSTGSIGSHTLRVAAEFPXRWQVVSLAAGSGIPRLADQIPSWLSELVGLSAVPPGADLQEAAAAGDH

SEQ ID NO: 173015 - protein, 69 aa, Glycine max
  unsure (1)..(69): unsure at all Xaa locations
  Clone ID: PAT_MRT3847_127249C.1.pep
LLLSGRICKAARIIPGQKGEGHRVWQAHXDYAYGCLPMINDQCSRAKRCSLHQDYAILNYWSLLPAQGS

SEQ ID NO: 173016 - protein, 384 aa, Glycine max
  unsure (1)..(384): unsure at all Xaa locations
  Clone ID: PAT_MRT3847_12724C.1.pep
RSSIRLGQVVMAWGVALWSLATFLTPWASQTSLLALLAVRALLGIAEGVALPSMNNMVARWFPQTERSRAVGISMAGFMLGCAIGLTLSPILMSQGGIFGPFVIFGLSGFLWVLVWLSATSSTPDRSPQISKYELEYILNRRHKSFSVETAKPKKVKVIPPFXRLLSKLPTWSLIIANAMHSWGFFIAFFLGRPYTSAQSFLGPLLLLLAGPAGPLPYRVDFLHAAWFSAVPWALMAVMGYFAGLWSDMMIQSGTSVTLTRKIMQCIGFVGPGLCLIGLATAKNPAIGSAWLTLAFGLKSFSHSGFLVNLQEIAPQYSGVLHGISNTAGTLAAIFGTVGAGLFVELVGSFPGFLLLTSLLYFLAAIFYCLFATGERVNFDDPVV

SEQ ID NO: 173017 - protein, 245 aa, Glycine max
  Clone ID: PAT_MRT3847_127250C.1.pep
MATRLQFENNCEVGVFSKLTNAYCLVAIGGSENFYSAFEAELADVIPVVKTSIGGTRIVGRLCVGNKNGLLLPHTITDQELQHLRNSLPDQVVVQRIEERLSALGNCIACNDHVALTHTDLDKETEEMIADVLGVEVFRQTVAGNILVGSYCVFSNRGGLVHPHTSIEDLDELSTLLQVPLVAGTVNRGSEVIAAGMTVNDWTAFCGSDTTATELSVIESVFKLREAQPSAIVDEMRKSLIDTYV

SEQ ID NO: 173018 - protein, 83 aa, Glycine max
  Clone ID: PAT_MRT3847_127251C.1.pep
LSSPSGYLILNKHNYQKWGLLSESQDSSSKQVADELRDSCKLVRSSSSGSSKHRGRESHKGPSGWSLWGDDDQFGPYSSKKGS

SEQ ID NO: 173019 - protein, 99 aa, Glycine max
  Clone ID: PAT_MRT3847_127252C.1.pep
MSSGAVKGPVKGQMKGLLKGLRYISQIFDEEDEKEIQIGFPTDVKHLAHIGAENAKASQPSWLSEFKELSEGGTVTKGTSEGDASIVEDDANSKGEGSR

SEQ ID NO: 173020 - protein, 75 aa, Glycine max
  Clone ID: PAT_MRT3847_127253C.1.pep
YSKFNVKSYSSALKMKWSDRFCYGMGFFWPFLYSVALCLFFLFKGAYKVDYKETLLWASSFCSLYMFHSCFCIRK

SEQ ID NO: 173021 - protein, 57 aa, Glycine max
  Clone ID: PAT_MRT3847_127254C.1.pep
GKRGSQCTLLEISYLFLCTLIWLIVYDCIQIIVKILLIISSCVACNKIFNIPSKKAY

SEQ ID NO: 173022 - protein, 69 aa, Glycine max
  unsure (1)..(69): unsure at all Xaa locations
  Clone ID: PAT_MRT3847_127255C.1.pep
LKSICLSRSKSEYIHCNFSNRKEEYVFEVKMVEDVLPQISKFKYMGSIIQDDGKINEDVTXRIQAGWIK

SEQ ID NO: 173023 - protein, 71 aa, Glycine max
  Clone ID: PAT_MRT3847_127256C.1.pep
ILTLLIQSRKDNVWVGHLLSGYSLPMEDPNQSKGEKNVEIGGTWRQSIKAAYEATYSAFPGGEILAHLDHK

SEQ ID NO: 173024 - protein, 106 aa, Glycine max
  Clone ID: PAT_MRT3847_127257C.1.pep
RSSLTETVTRADRDSIRVCITIVVVNVFGEVSEVFPKLLMLKHVRKLGGLKRVVVVVGEDEVCHSQWFSVQRNARRVPRVVEVRPELHLVVVLALRQQRCLLQCPS

SEQ ID NO: 173025 - protein, 49 aa, Glycine max
  Clone ID: PAT_MRT3847_127258C.1.pep
HTNPPCHSANHLVLLSWCTMYTLQAVQKNVHFKGIYKLYLIKKTFKENA

SEQ ID NO: 173026 - protein, 126 aa, Glycine max
  unsure (1)..(126): unsure at all Xaa locations
  Clone ID: PAT_MRT3847_127259C.1.pep
XFXXXFFLFLFFFFFXXXFLXFLXSFPXXHXLSXXXFFXVFXSXXFXHVXSPFSLLLFVCXFFFXXLXXXXRLCVXFLFXVSLFXXVLXXXALXLXFFXXFWXCCLSLVXXXXXXSXSXXXVXLKL

SEQ ID NO: 173027 - protein, 132 aa, Glycine max
  unsure (1)..(132): unsure at all Xaa locations
  Clone ID: PAT_MRT3847_12725C.1.pep
PKAGKKLPKKGGPAGKGKKKKRTPKGGGPTKISFFKVFKRVPPPFGFSSKALGFLNSFFNDFFXKVAPDFFKFARSTKKPPLPSREFXPPVRLFLPGDLAKPPVFWGAKAVPKFPSFLTDFFAPSLRFRGFF

SEQ ID NO: 173028 - protein, 530 aa, Glycine max
  Clone ID: PAT_MRT3847_127260C.1.pep
PVSLVGISEIRTLVKLSNELGYLGWEKYPFECLPPSFEPDKLVELILPKSNIKQLWEGTKPLPNLRRLDLSGSKNLIKMPYIGDALYLESLDLEGCIQLEEIGLSIVLSPKLTSLNLRNCKSLIKLPQFGEDLILEKLLLGGCQKLRHIDPSIGLLKKLRRLNLKNCKNLVSLPNSILGLNSLEDLNLSGCSKLYNTELLYELRDAEQSKKIDIDGAPIHFQSTSSYSREHKKSVSCLMPSSPIFPCMRELDLSFCNLVEIPDAIGIMCCLQRLDLSGNNFATLPNLKKLSKLVCLKLQHCKQLKSLPELPSRIYNFDRLRQAGLYIFNCPELVDRERCTDMAFSWTMQSCQVLYIYPFCHVSGGVSPGSEIPRWFNNEHEGNCVSLDACPVMHDHNWIGVAFCAIFVVPHETLSAMCFSETERIYPDFGDILVDFYGDVDLELVLDKSDHMCLFLVKRMDFIYHFHLKHKYLGRLVLECDDEWKESYAEVKKYGYRWLYEEDIEGPSNPLARKSKFGGNEEKVSRREKR

SEQ ID NO: 173029 - protein, 192 aa, Glycine max
  Clone ID: PAT_MRT3847_127261C.1.pep
VVTILLHCPTSRSFPNWSVLKLQHCKQLKSLPELPSRIYNFDRLRQAGLYIFNCPELVDRERCTDMAFSWTMQSCQVLYLCPFYHVSRVVSPGSEIPRWFNNEHEGNCVSLDASPVMHDHNWIGVAFCAIFVVPHETLSAMSFSETEGNYPDYNDIPVDFYKDVDLELVLDKSDHMWLFFCWSKEGSLNISI

SEQ ID NO: 173030 - protein, 60 aa, Glycine max
  Clone ID: PAT_MRT3847_127262C.1.pep
HMVNRPASTTATTHITDCECSCSSNMNHYISPIAPQSVFIWLHVQSAPLSWLHNFLKNSS

SEQ ID NO: 173031 - protein, 535 aa, Glycine max
  unsure (1)..(535): unsure at all Xaa locations
  Clone ID: PAT_MRT3847_127263C.1.pep
MAFTSNDVIQCTSSSSFEYDVFVSFRGEDTRNSFTGFLLQALKKEGIEAFKDDKDIRKGESIAPELIRAIEGSHVXFVFSKDYASSTWCLRELAHIRNCIQTSPRHLLPIFYDVDPSQVRKQSGDYQKAFAQHQQSFRFQEKEINIWREVLELVANLSGWDIRYKQQHAVIEEIVQQIKNILGSKFSTLPYDNLVGMESHFAKLSKLICLGPANDVRVVGITGMGGIGKSTLGRALYERISHQFNSLCYIDDVKKLYQGYGTLGVQKELLSQSLNEKNLKICNVSNGTLLVWERLSNAKALIILDNVDQDKQLDMFTGGRNDLLGKCLGKGSIVIIISRDQQILKAHGVDVIYRVEPLNDNDALGLFCKKAFKNNYMMSDFKKLTSDVLSHCEGHPLAIEVLGSSLFGKDVSYWGSALVSLRESKSIMDVLRISFDQLEDTHKEIFLDIACFLYDHDVIYVKEILDFRGFNPEYGLQVLVDKSLITMRRIVEMHDVLRNLGKYIVREKSPWNPWKWSRLWDFKDLNIVSLDNKVK

SEQ ID NO: 173032 - protein, 332 aa, Glycine max
  unsure (1)..(332): unsure at all Xaa locations
  Clone ID: PAT_MRT3847_127264C.1.pep
MLVEVLLQEVLVQEVKYQGGSIMSEKSPRKPWKWSRLWDFKDFLKVMSDNKAADNVEAIFLIEKSDILRTISTMRVDVLSTMSCLKLLKLDHLDFNVKINFFSGTLVKLSNELGYLRWEKYPFECLPPSFEPDKLVELILPKSNIKQLWDALXPLPNLRRLDLSGSKNLIKMPYIGDALYLESLNLSGCIQLEEIGLSIVLSPKLTSLNLRNCKSLIKLPRFGEDLILGELVLEGCRKLRHIDPSIGLLKKLRELNLKNCKNLVSLPNSILGLNSLQYLNLSGCSKVYNTELLYELRDAEQLKKIDIDGAPIHFQSTSSDFRQHKKSVSCLM

SEQ ID NO: 173033 - protein, 57 aa, Glycine max
  Clone ID: PAT_MRT3847_127265C.1.pep
LTFSASTALAAFTTSDLLCVATADRLVRSALPSMNPVLVNNAIFARIFDWKGWRTRG

SEQ ID NO: 173034 - protein, 163 aa, Glycine max
  Clone ID: PAT_MRT3847_127266C.1.pep
MRVDALSTMSSLKLLYLGYWNVGFEINFSGTLAKLSNELGYLSWEKYPFECLPPSFEPDKLVELRLPYSNIKQLWEGTKPLPNNLRHLNLSGSKNLIKMPYIGDALYLESLDLEGCIQLEEIGLSVVLSRKLTSLNLRKMQSLIKLPRFGEDLILKNLDLEGM

SEQ ID NO: 173035 - protein, 176 aa, Glycine max
  Clone ID: PAT_MRT3847_127267C.1.pep
FFFFFFFFFFFFFFFFFFFFFFLGRGGHPGKPEPDPEGDPLYLKGSKKKAGGRKEKNGARGKKEIRAQTQKKKGREKKREKPGAPKGGANPKKLAGRQRPRSKQKNESANRQKETAHRPGKGGFFIGPKGGFFFHQGKGQRRGDLPRRARKEVNQAGQPVWPKKAKTRLEGGQRGD

SEQ ID NO: 173036 - protein, 135 aa, Glycine max
  Clone ID: PAT_MRT3847_127268C.1.pep
VSYLLPSSPIFPCICKLDLSFCNLVEIPDAIGIMCCLQRLDLSGNNFATLPNLKKLSKLVCLKLQHCKQLKSLPELPSRIYNFDRLRQAGLYIFNCPELVDRERCTDMAFSWTMQSCQVCMFLLCSCHLFLSPFL

SEQ ID NO: 173037 - protein, 539 aa, Glycine max
  Clone ID: PAT_MRT3847_127269C.1.pep
MASTSNAIIQCTSSSSSFEYDVFVSFRGEDTRNSFTGFLFEALKKQGIEAFKDDKDIRKGESIAPELIRAIEGSHVFLVVFSKDYASSTWCLRELAHIWNCIRTSSRLLLPIFYDVDPSQVRKQSGDYEKAFSQHQQSSRFQEKEIKTWREVLNHVGNLSGWDIRNKQQHAVIEEIGQQIKTILGCKFSTLPYDNLIGMESHFATLSKLICLGPVNDVPVVGITGMGGIGKSTLGRSLYERISHRFNSCCYIDDVSKLYRLEGTLGVQKQLLSQSLNERNLEICNVCDGTLLAWKRLPNAKALIVLDNVDQDKQLDMFTGGRNDLLRKCLGKGSIVIIISRDQQILKAHGVDVIYQVEPLNDNDALQLFCKKAFKNNYIMSDFEKLTSDVLSHCQGHPLAIEVIGSYLFDKDFSHWRSALVSLRENKSKSIMNVLRISFDQLEDTHKEIFLDIACFFNDDDVEYVKEVLDFRGFNPEYDLQVLVDKSLITMDEEIGMHDLLCDLGKYIVREKSPRKPWKWSRLWDIKDFHKVMSDNKVE

SEQ ID NO: 173038 - protein, 76 aa, Glycine max
  Clone ID: PAT_MRT3847_12726C.1.pep
QHVDYAGRLPSRLSVVPLDAPGIPPLSSGKFRLCVVDGTTATGISVYALLENGAVMYGGHDGAVIVVQVGESAHVR

SEQ ID NO: 173039 - protein, 86 aa, Glycine max
  Clone ID: PAT_MRT3847_127270C.1.pep
YKRNVGEDKETTIKPVGRVHEGKLLEKELTIMTVLTVNVVETSTVEGMLLAGGLKKEDSGQVGSMGTLKDVRIMERFLFTLWWLAQ

SEQ ID NO: 173040 - protein, 710 aa, Glycine max
  Clone ID: PAT_MRT3847_127271C.1.pep
MASASNAIIQCTSSSSSSFEYDVFVSFRGEDTRNSFTAFLFEALKKQGIEAFKDDKDIRKGESIAPELIRAIEGSHVFLVVFSKDYASSTWCLRELAHIWNCFQPSTRHLLPIFYDVDPSQVRKLSGDYEKAFAQHQQSSRFQEKEIKTWREVLERVASLSGWDIRNKEQPTVIDEIVQKIKKIVGCKFSILRNDNLVGMESHFSTLSKQLGPVNDVRVVGITGMGGIGKSTLGRALYERISHQSRAARADSARGKLYRLEGSAGVQKDLLSQSLNETNLKIWNLSYGTELAWRRLHNAKALIVLDNVEEDKQLNMFTANRKNLLRERLGRGSIVIIISRDQQILKARGADLIYQVKPLDDTDALRLFCKNAFKNNYIMSDFKTLTSHVLSHCEGHPLAIEVLGSSLFGKDVSYWGSALVSLRESKSIMDVLRISFDQLEDTHKEIFLDIACFLYDHDVIYVKEILDFRGFNPEYGLQVLVDKSLITMRRIVEMHDVLRNLGKYIVREKSPWNPWKWSRLWDFKDLNIVSLDNKATENVEAIVHEEDYDIEKDSDLEEDSNLEDYDLEDSDLEEDSDLEDYDLEEDSDLEDYDLEEDSDLEDSHFLPTVRVDALSTMSNLKLLKFRYAGYEINYSGTLTKLSNELGYLTWVKYPFECLPPSFEPDKLVELILPKSNIKQLWEDRKIISIIIIIIFLYCFHLNKQIKRQTF

SEQ ID NO: 173041 - protein, 111 aa, Glycine max
  unsure (1)..(111): unsure at all Xaa locations
  Clone ID: PAT_MRT3847_127272C.1.pep
XARVRKLGIRLEGKLMXLXFXSASVXFYHQXIPLXXPXXXXKSIWDTKTXAXIXGGXLXINPRXVQDRXXPXHEPPTLSAVSPPTAXVTXGALLNXXXGFLXXFLGSXIGQ

SEQ ID NO: 173042 - protein, 86 aa, Glycine max
  Clone ID: PAT_MRT3847_127273C.1.pep
TDPTLHQSLAQPKVKHRSHPKSTPSASVEWPANAIENRPQHLFHKPAPPYLPLHKARYLRFHTQRCKWFDSQGGNSCYSSDAKTNA

SEQ ID NO: 173043 - protein, 89 aa, Glycine max
  unsure (1)..(89): unsure at all Xaa locations
  Clone ID: PAT_MRT3847_127274C.1.pep
NIHILLTFDQDSSNPYPYHDDNYISVVAAPCSIQRLLENPSSTIYNIVHFLEAQSTSSSSTIYFDVCYRFKHTYLXLGVCNGLVCLLDC

SEQ ID NO: 173044 - protein, 56 aa, Glycine max
  Clone ID: PAT_MRT3847_127275C.1.pep
LGGLWAPLKDIVGSFLSRACSWVSLIVSVCLRGVLSSSVHFFLVVVSMFIFLFPPP

SEQ ID NO: 173045 - protein, 127 aa, Glycine max
  Clone ID: PAT_MRT3847_127276C.1.pep
LELNDMVLQGIIKEEQLDTFNIPFYTPSPSEVKLEVLKEGSFAINCLEVSVVHWSAWDEWSVLDFESESGYNLTQSMRAVAESMLVSHFGEAIIDELFSRYQEILADRMSKEKTKFINVTILLTRKP

SEQ ID NO: 173046 - protein, 77 aa, Glycine max
  Clone ID: PAT_MRT3847_127277C.1.pep
RISTKSLMETSRKRYGRTSAWIFFTEIIFLTNFERFLNTRRAEPFCSSFLEPSGRPKWAWFLFAPPFSLNTPPFYFS

SEQ ID NO: 173047 - protein, 174 aa, Glycine max
  Clone ID: PAT_MRT3847_127278C.1.pep
FSLENPNSITRPPTRPRFRYSHFSNMTAAFQEGGGGGGGGGDDDATIDVHTTRGTPIRYLPLDHLYSATSPCRVTASGSSNVMSKKIKARKLTLTHNNHFNNHDQKKTAPSSSSSLTLPPKPPLLFVYSRRRRKRHSPSATASFVDGAENDESERRLLKKRKIGSTELERLGVD

SEQ ID NO: 173048 - protein, 124 aa, Glycine max
  unsure (1)..(124): unsure at all Xaa locations
  Clone ID: PAT_MRT3847_127279C.1.pep
GYPTTNYHTSYIIRGSLIKILKVDSIPEREFKNAVSCGVPSPXEQAXRIYYILWNADDMSTNXGLGRTDSNKATFAXYYRISIDTDCSLKXYIVNAGAEVDAEDLDPDSRIRLMXVEQYLMMYN

SEQ ID NO: 173049 - protein, 42 aa, Glycine max
  Clone ID: PAT_MRT3847_12727C.1.pep
ELFYDSRKITIVHSLSTSQDLNLPRSKRHFRNFPSRLTMCNN

SEQ ID NO: 173050 - protein, 380 aa, Glycine max
  unsure (1)..(380): unsure at all Xaa locations
  Clone ID: PAT_MRT3847_127280C.1.pep
MAEVEDIDNPHHDHHHYLSSSTTQPPMINFPRDLLRTFVGVNNNSNKNNNNSQHHNLPMPVVKLEDEKEELELSLGLSMNGRFGVDPTAKKIKRTTSIPEFVRDEEMGYAAAMGCTGSLVRTCSLPTETEEEWRKRKELQTLRRVEAXRKRSEKQRNMKALREQQQRSEGSNPVEQGAGEYGEVAPPLARTVSLTARVCGLGLNGDSEKEKKEKRSGIELPPPSPSQGSIGSSGISEAESQQGQGTTPMDVRSPTSANLLPDSELKSPAGVAENNTGKNAAAAAAVTMRSQSNKYSPPQSRTKDIVRNLLEDMPCVSTKGDGPNGKRIEGFLYRYGKGEEVRIVCVCHGSFLTPSEFVKHAGGGDVANPLKHIVVSPSFL

SEQ ID NO: 173051 - protein, 286 aa, Glycine max
  unsure (1)..(286): unsure at all Xaa locations
  Clone ID: PAT_MRT3847_127281C.1.pep
MASGWVKSLQCKSRAYQDVYHPSSSCRNTVQNIRDLVMSTAKPRPRHHNXNLRPCLFRKTPAPDSPXSAAKPDFETTINRSMSVTATATRHADPRFPYSTSELXEGHXSRNVVEIIFHTSWGPKPFSGLVEMIFKVHNGPRTVSRFEEFREAVKGRAETGPAHDYEENARCRADGNEVMRFHCLGPTSGGAPYGGACALSFPGGKEAAICTFSGSGGAHESSGGGRGRRAMLVCRVIAGRVSKQIGFMESLLDGRVGFDSVSGDNGELLVFDSRAVLPCFLIIYKL

SEQ ID NO: 173052 - protein, 77 aa, Glycine max
  Clone ID: PAT_MRT3847_127282C.1.pep
ISGPDLTTVNRARAVMVASITGIMSIAGFSTRTTYNNLTCIARYICRVQCMHVSTPYSQKNTQTLKYLPDLTDAQST

SEQ ID NO: 173053 - protein, 56 aa, Glycine max
  Clone ID: PAT_MRT3847_127283C.1.pep
ILSFNTFKVSVYFCLINDILLFIDNVDLGTACGKYYRVCCLSIIDPGDSDIIKTLP

SEQ ID NO: 173054 - protein, 120 aa, Glycine max
  Clone ID: PAT_MRT3847_127284C.1.pep
LELHRGGGRSRTSGSPGLQEFGTSSLKKLILDGCPNLQQLPEEGLPNSISNLWIINCPNLQQLPEEGLSNSISNLFIIACPNLEQRCQNPGGQDWPKIAHIPTVRCTSYFRDRRDACVIM

SEQ ID NO: 173055 - protein, 101 aa, Glycine max
  Clone ID: PAT_MRT3847_127285C.1.pep
VEVAPEIKLSENTQTQNLKQTVDLEGSEKNTPSKISQIKYPHASDIDDQDHRMSHPPRNGTQRDLVAVQYIGTRFSGSQTQLSVRSDLGAREETLSNCAGQ

SEQ ID NO: 173056 - protein, 83 aa, Glycine max
  Clone ID: PAT_MRT3847_127286C.1.pep
FTSLRGELFCCSCANQPLFHQKSFFLAFIQFNSDPLLVKIRSNKLPPVGLMTAPWMSSQVFSPLKASLKLHCLCQSADPEATP

SEQ ID NO: 173057 - protein, 134 aa, Glycine max
  unsure (1)..(134): unsure at all Xaa locations
  Clone ID: PAT_MRT3847_127287C.1.pep
TRCCATRMIATASCGLRADAHSQRVLALADELDWTXAHYVQTTTTYSAGDNYFFHSVLHMIEGTXWXILTAETDEIIFXLLRLTGDKAYPEWDLKLLHACEMNYRMDLHYVALLDDNSGVMNYMMHMLFLAETL

SEQ ID NO: 173058 - protein, 71 aa, Glycine max
  unsure (1)..(71): unsure at all Xaa locations
  Clone ID: PAT_MRT3847_127288C.1.pep
DCSPQQKXMAEGSHSYGNATNTSGIEVNEKVISGSWAHQQMLSSLIVGATHSIDLMDGMLSNHPHPVTILV

SEQ ID NO: 173059 - protein, 42 aa, Glycine max
  Clone ID: PAT_MRT3847_127289C.1.pep
AIGRHRLVHHEEGAQYGSGYRLVWWSFKMSTNKTAMNICVSK

SEQ ID NO: 173060 - protein, 449 aa, Glycine max
  Clone ID: PAT_MRT3847_12728C.1.pep
MRECISIHIGQAGIQVGNACWELYCLEHGIGPDGQMPSDKTVGGGDDAFNTFFSETGAGKHVPRAVFVDLEPTVIDEVRTGTYRQLFHPEQLISGKEDAANNFARGHYTIGKEIVDLCLDRIRKLADNCTGLQGFLVFNAVGGGTGSGLGSLLLERLSVDYGKKSKLGFTVYPSPQVSTSVVEPYNSVLSTHSLLEHTDVAVLLDNEAIYDICRRSLDIERPTYTNLNRLVSQVISSLTASLRFDGALNVDVTEFQTNLVPYPRIHFMLSSYAPVISAEKAYHEQLSVAEITNSAFEPSSMMAKCDPRHGKYMACCLMYRGDVVPKDVNAAVATIKTKRTIQFVDWCPTGFKCGINYQPPTVVPGGDLAKVQRAVCMISNSTSVAEVFGRIDHKFDLMYAKRAFVHWYVGEGMEEGEFSEAREDLAALEKDYEEVGAESGEGQDEDEDY

SEQ ID NO: 173061 - protein, 114 aa, Glycine max
  Clone ID: PAT_MRT3847_127290C.1.pep
ARNLWADLCACSREKMIEGHGREKMIEGHGREKMIEGHGREKMIEGHGREKMIEGHGREKMIEGDRNRTTKKSYPYSSSRKRRVSVRLSLPHPVFLFYIHSLLLFRMRLMRTVT

SEQ ID NO: 173062 - protein, 277 aa, Glycine max
  Clone ID: PAT_MRT3847_127291C.1.pep
KYIKCKLTSPVAKPFSITSAPDDDYLSVHIKILGDWTRSLKAKFTQACQQPLNGQSGLLRAECLKGDNSPSSFPKVLVDGPYGAPAQDYREYEVVLLVGLGIGATPMISILKDMVNNFKAIDEEEGIGGAKSPTRLSDFKTSRAYFYWVTREQGSFDWFKGVMNEVAEEDRRKVIELHSYCTSVYEEGDARSALIAMLQSLNHAKNGVDIVSGTRVMSHFAKPNWRSVYKRIALNHPDARVGVFYCGPSALTHELRQLALDFSHNTSTKYDFHKENF

SEQ ID NO: 173063 - protein, 62 aa, Glycine max
  unsure (1)..(62): unsure at all Xaa locations
  Clone ID: PAT_MRT3847_127292C.1.pep
VMSHFAKPNWRXLYKRIALNHPDARVGVFYCGPSALTHELRQLALDFSHNTSTKYDFHKENF

SEQ ID NO: 173064 - protein, 59 aa, Glycine max
  unsure (1)..(59): unsure at all Xaa locations
  Clone ID: PAT_MRT3847_127293C.1.pep
FIAALFVGLATGQIKSGAPCRXKVFFKKNQLLKIKKKFGAKKMYFEINFRTPVEPQKNF

SEQ ID NO: 173065 - protein, 84 aa, Glycine max
  unsure (1)..(84): unsure at all Xaa locations
  Clone ID: PAT_MRT3847_127294C.1.pep
MIQLKYLCYETFSSMIIDSRVAEARTLPXSALLPSKVDIPTVGPLPLVAPLPNIPVTLPTVPELPAVPIVPLAVVIVNNAQIIP

SEQ ID NO: 173066 - protein, 58 aa, Glycine max
  Clone ID: PAT_MRT3847_127295C.1.pep
GRWVHINYRIQLSWFRRNQTEPIIVLLLRHAYCFCIFVWGTSLLLLKYYFPGRKYPYW

SEQ ID NO: 173067 - protein, 60 aa, Glycine max
  unsure (1)..(60): unsure at all Xaa locations
  Clone ID: PAT_MRT3847_127296C.1.pep
KFNYYYTCSLSFDLKVYISRTITXINRNLDVQSLKEIISAMVSEQKGKKQKKAXGMRQMK

SEQ ID NO: 173068 - protein, 68 aa, Glycine max
  unsure (1)..(68): unsure at all Xaa locations
  Clone ID: PAT_MRT3847_127297C.1.pep
SVILNILYDLKIEHNFILDRFFVXXQFISYCLARAVRPKTLSVYHGVFCSVLXXRNLSFIDNGLLVKE

SEQ ID NO: 173069 - protein, 73 aa, Glycine max
  unsure (1)..(73): unsure at all Xaa locations
  Clone ID: PAT_MRT3847_127298C.1.pep
CSDIIFTILFWVALAGESHVHASLPEEDYWEAVWPNTPIPTVLXELLKPLSACVEIXDELSKQIVDTQYLKTI

SEQ ID NO: 173070 - protein, 137 aa, Glycine max
  Clone ID: PAT_MRT3847_127299C.1.pep
SRARGALSFVGGGHNIKGGRCVCLFGAKIFVYDFRCALSGYIFYFVGKTPCVCVFPPPFVGLPQSAQCFFILGGVGGFFFLFGGPPCEEFLFSPGVFPFVCVSTSAPCFFVHFFCVTTLGARKCVKKTPKRVSLNIV

SEQ ID NO: 173071 - protein, 56 aa, Glycine max
  Clone ID: PAT_MRT3847_12729C.1.pep
SSCSLVCAGCEQKVRKWKEGKVFQTPHFLKSLLYESEEFEKFSASLTGLSLMQISR

SEQ ID NO: 173072 - protein, 97 aa, Glycine max
  Clone ID: PAT_MRT3847_1272C.1.pep
LFPFLPFLYFLQHTTHSVGVIEEAPSLFSFEMTMHISSVEEATDAYTIIYDAKSLICFFIHTESLFTNYNLSLLLNTHPTTSKISFSSSIYGKSSSP

SEQ ID NO: 173073 - protein, 73 aa, Glycine max
  Clone ID: PAT_MRT3847_127300C.1.pep
FRSSSARVQSLPPDCVLPAAAANCKLIVPSVIASSATVAAPVINRSSRWSPSAEAQSYAVLVKACTPLFTYTG

SEQ ID NO: 173074 - protein, 37 aa, Glycine max
  Clone ID: PAT_MRT3847_127301C.1.pep
LLKDSSNHDPSYRSHLLGWYDNFYYREHRLIVCELLK

SEQ ID NO: 173075 - protein, 536 aa, Glycine max
  unsure (1)..(536): unsure at all Xaa locations
  Clone ID: PAT_MRT3847_127302C.1.pep
MTSKTDGFTTCHRHPSTPVTGFCASCLRERLAGIDSSSADSPELRRTKSFSGRTADAPSSSAAPEPRRRSCEVGLPPLGGLLSDPFNVADKNKKPPNRTAEICSGPAGVGTGENEGGNAVRVSGDDDGEGKTMKEFIDLELRDKKNTGRDFRDIAASFRDAASVFSKGLMKWRRKENPKRNRNNDGASAGVGSVEKLGLRTLHETQSEVGEYGFALGRRSCDTDLRLSVDDSRFSFEAPRASWDGYLIGKAFPRVSPMVCVGDRVLLEEEGEESLENGEECCPGGSAQTKHYYSDWHRRRRSSARSNSRKKPLMGDVDELRVISNAKVSPASTELFYGAKVLITENDLRDANLKTSNSVLSDSVMESASKDDACDAAYGDGQKGLNRFHKWGKWWCKLGIVQRRREDRLGEGEYAGGGXVVNEPIAESWQKLRRVVNGQASESVCEKLIRSHSVCCRDPCRTVGLANGFVGSETKGHVFNGRQKFMLQRNRSVRYSPSNADNGLLRFYLTPLKSYRRSRSGKTSLKSSNPTARSFF

SEQ ID NO: 173076 - protein, 41 aa, Glycine max
  Clone ID: PAT_MRT3847_127303C.1.pep
NPRVFPWCPFYSNRFLVKGLKDGAPKAKTLKSQDEPICPPK

SEQ ID NO: 173077 - protein, 53 aa, Glycine max
  Clone ID: PAT_MRT3847_127304C.1.pep
LRIPHIHNTTPAIHDNTNDSYAVREIFKRLYHLEPNLGPIVVHCSADIGRTGT

SEQ ID NO: 173078 - protein, 45 aa, Glycine max
  Clone ID: PAT_MRT3847_127305C.1.pep
WGGFPLGFLIEDPVKCVYFIEIMSCYYGGSHKEWFSIDKFKFFGV

SEQ ID NO: 173079 - protein, 53 aa, Glycine max
  Clone ID: PAT_MRT3847_127306C.1.pep
TSVMLFKYRSRSHTVMVTTLFEISQMDSRTLGTSSPGLTASRSRSPPYRMTTV

SEQ ID NO: 173080 - protein, 94 aa, Glycine max
  Clone ID: PAT_MRT3847_127307C.1.pep
IMKLSVNTAGGLLCLWSKEYFSLNNSFQRDGYIGLEGTWKEGGQSVIFVNVYSPCELELKRRLSEELKSLKENSSCDHWKEVYMVSIKWVGKDD

SEQ ID NO: 173081 - protein, 123 aa, Glycine max
  Clone ID: PAT_MRT3847_127308C.1.pep
FLVMDKIGVEHMMECGDSKKGKGDAGEKPRVPASADVAEACFAVKRQMEVLQAENGLLRNAVEDLRREIVGGRSGGSILGKNPKKNERKTTSDYGNFPGKSTEAEASEELKKALMGAAGGSSA

SEQ ID NO: 173082 - protein, 81 aa, Glycine max
  Clone ID: PAT_MRT3847_127309C.1.pep
FWFPLEAIRTSFYIGSARVLLLTTPAQYIQWVVASSAVRHDATNYNGKVPICSSEVPTQQSVRTANETHCDKSITCQSSLV

SEQ ID NO: 173083 - protein, 65 aa, Glycine max
  unsure (1)..(65): unsure at all Xaa locations
  Clone ID: PAT_MRT3847_12730C.1.pep
VESVQTLMAILRLSRSLIHVPTVRRKTGCVTATYPSTHGRRRALPYECTSPSDLLILAGGXCCHF

SEQ ID NO: 173084 - protein, 156 aa, Glycine max
  Clone ID: PAT_MRT3847_127310C.1.pep
SCISKTPSRAKKSNINEVIRSVRFYPVSVILGEDSEPQSSYHKCNIIYESEPNLGVRSSSIKELKKNTARGNENGAEEAAARGFVKGYRNSGQGEFDFRGFYDDDDEDDDDDVSCSSSDMFELDHLIGAARYQEELPVYETTNLETNKAIASGLCL

SEQ ID NO: 173085 - protein, 95 aa, Glycine max
  unsure (1)..(95): unsure at all Xaa locations
  Clone ID: PAT_MRT3847_127311C.1.pep
XPRRADXHLXNXXRPXXXXXXXXXXXXXXXTXXXPXXHXXXXXXXTXAXAXXEXXXXXXXXXWXXSXXTXXXRXXXXXXXXSDXXXXVXLXXGXV

SEQ ID NO: 173086 - protein, 548 aa, Glycine max
  Clone ID: PAT_MRT3847_127312C.1.pep
MDTPNAQPQAASASTPRKKMTKQLTGKRDDTPLHSAARAGNMTVLKDTVGGTEEGELRVLLTKQNHAGETVLYVAAEYGYVDMVRELIQYYDLAGAGIKARNGFDALHIAAKQGDLDIVKILMEAHPELSMTVDPSNTTAVHTAALQGHTEIVKLLLEAGSNLATISRSNGKTALHSAARNGHLEVVKALLGKEPSVATRTDKKGQTAIHMAVKGQSLEVVEELIKADPSTINMVDNKGNTALHIATRKGRARIIKLLLGQTETNALVVNRSGETALDTAEKTGNSEIKDILLEHGVRSAKAIKAQPGTATARELKQTVSDIKHEVHYQLEHTRQTRRGVQGIAKRINKTHAQGLNNAINSTTVVAVLIATVAFAAIFTVPGQFADEPKDIPAGSGMTIGEANIAPQAAFLIFFVFDSIALFISLAVVVVQTSVVIIESKAKKQMMAIINKLMWLACVLISVAFLALSFVVVGKDQKWLAIGVTIIGTTIMATTLGTMSYWVIRHRIEASNLRSIRKSSMGSRSRSFSVSVMSDSELLNNDRKILYAI

SEQ ID NO: 173087 - protein, 51 aa, Glycine max
  Clone ID: PAT_MRT3847_127313C.1.pep
IILQKFSIRTFFFLILSRKIIYIYLFIVTNFNFNKDKDEKIPIICMPNKME

SEQ ID NO: 173088 - protein, 234 aa, Glycine max
  Clone ID: PAT_MRT3847_127314C.1.pep
MAAFTSIVVQYSSTSSLQSLVPSLEATRDHNSWWGRVRSYRSTGKNSLQQNITRGLTIQNAATKPAKSPAEEDWKVKREYLLEKRVRSVDAKEAFRLQKENNFVILDVRPEAEFKEAHPPDAINVQIYRLIKEWTAWDIARRAAFAFFGIFAGTEENPEFIQSVEAKIDKNAKIIVACSAGGTMKPSQNLPEGQQSRSLIAAYLLVLNGYTNVFHLEGGLYKWFKEELPTVSEE

SEQ ID NO: 173089 - protein, 59 aa, Glycine max
  Clone ID: PAT_MRT3847_127315C.1.pep
CLCVSPWCIHHIMEDQNGSDKWCQWLIEVNPYLAILSFQFFFLRMYFITMVSLKHGMNY

SEQ ID NO: 173090 - protein, 99 aa, Glycine max
  unsure (1)..(99): unsure at all Xaa locations
  Clone ID: PAT_MRT3847_127316C.1.pep
WNPSLAXXTXTSFXSSETXTPSSSTITAAPSSSAGEXTXSXSXITAASSXSAXTXXXSXSAXXAXXSFXGXXXGXXFSAGTXSYXXLGXXXKLXVXSAG

SEQ ID NO: 173091 - protein, 44 aa, Glycine max
  Clone ID: PAT_MRT3847_127317C.1.pep
IELIHATSIHNVGASCLFTYFNHGPLTFVLLGASQGNRRDYPNA

SEQ ID NO: 173092 - protein, 52 aa, Glycine max
  unsure (1)..(52): unsure at all Xaa locations
  Clone ID: PAT_MRT3847_127318C.1.pep
MIHKKLLEKKKKKKKKKKKKKKKKKKKKKKKKKKKKKKKKXXGGAGSQFPLL

SEQ ID NO: 173093 - protein, 73 aa, Glycine max
  unsure (1)..(73): unsure at all Xaa locations
  Clone ID: PAT_MRT3847_127319C.1.pep
RLPLTGHSGSRLLSNRCKGCTTVGHSPILKKTSEMVYDPHTNPIVSWSQTRHIFLIXDSHEFCKALISKYFKH

SEQ ID NO: 173094 - protein, 102 aa, Glycine max
  unsure (1)..(102): unsure at all Xaa locations
  Clone ID: PAT_MRT3847_12731C.1.pep
PQSLYSEFGSRKVLXXFXATIXXAWQCHAXDXXLLXMHTGXGAXXPDVXCAXXXXAXEAHNIXGFXTIXEXCVDXXXEYIHGXQYXXDSXXVNQQAXXMPET

SEQ ID NO: 173095 - protein, 370 aa, Glycine max
  Clone ID: PAT_MRT3847_127320C.1.pep
MTPENGKEKKDFDAEAAGMKRYRNGEIWEFEDDMGVSDGDGTGVLLGLDGGTTSTVCICMPMIPFSHSQLQSLPILARAVAGCSNHNSVGEIAARETIEQVMADALSKCGSKRSLVQAVCLAVSGVNHPTDQQRILGWLRDIFPSHVRLYVRNDAVAALASGTMGKLHGCVLIAGTGSIAYGFTEDGKEARAAGAGPVLGDWGSGYGIAAQALTAVVRAHDGRGPSTMLTSSILQTLGLSSAEELIGWTYADPSWARIAALVPVVVTCAEAGDEVANKILLDSVQELASSVKAVVERLGLCGQDGKSAFPLVMVGGVLEANRRRWDIGKEVMNCISKYFSGVIPIRPKVEPAVGAAWLAWNFLMKECHKG

SEQ ID NO: 173096 - protein, 43 aa, Glycine max
  Clone ID: PAT_MRT3847_127321C.1.pep
AKFIYVTSYTNLTLYDRLNQSIKTPTQPQNKCITKERKQQIKT

SEQ ID NO: 173097 - protein, 57 aa, Glycine max
  unsure (1)..(57): unsure at all Xaa locations
  Clone ID: PAT_MRT3847_127322C.1.pep
HTVVGLQLPVRTSGVTTRPCACVNTXERYGYKNPTERRRPPLVPKKKKKXXKKKRPL

SEQ ID NO: 173098 - protein, 34 aa, Glycine max
  Clone ID: PAT_MRT3847_127323C.1.pep
FLGPFCTSTSLRASIAHRYHENSHKRVEFVSLAI

SEQ ID NO: 173099 - protein, 54 aa, Glycine max
  Clone ID: PAT_MRT3847_127324C.1.pep
LSHPFTNTSLLIQLPPECKCRPLVCLLKRRALLSADFQDRSIRNYSSCTLVGVP

SEQ ID NO: 173100 - protein, 130 aa, Glycine max
  Clone ID: PAT_MRT3847_127325C.1.pep
FCFCFEKMARETIDKVRDHGELEEELELLLDEIPHATSHNLLRHHHHHHHHHHGDDDDAVFVTKQTHHGHAHAHGMYYDDDFKSPMSGFSLQSDGSSSSLFSSSPPPFEDLKSTVASRSFDSKIPDFTVK

SEQ ID NO: 173101 - protein, 37 aa, Glycine max
  unsure (1)..(37): unsure at all Xaa locations
  Clone ID: PAT_MRT3847_127326C.1.pep
NLPSILLTFYSQEFFTIQPFXTNVYLITSHKYLPSYP

SEQ ID NO: 173102 - protein, 59 aa, Glycine max
  Clone ID: PAT_MRT3847_127327C.1.pep
KVSNQNQWMNMPWKQGLKRPMLPYPPTNTHRLSEHLEDCIQNHALRPLSRRHAAYDRRL

SEQ ID NO: 173103 - protein, 730 aa, Glycine max
  unsure (1)..(730): unsure at all Xaa locations
  Clone ID: PAT_MRT3847_127328C.1.pep
TRPYDYHQMPAPFIQIKLLKILALLGSGDKQASGHMYTVLEDIIRRSDSMTNIGNAVLYQCICCVASIYPNPKLLEAAADVIAKFLKSDSHNLKYMGIDALGRLIKLSPHIAEQHQLAVIDCLEDPDDSLKGXRKTFELLYKMTKSSNVEVIVDRMIDYMISISDDHYKTYIASRCVELAEQFAPSXHWFIQTMNKVFEHAGDLVNIKVAHNLMRLIGEGFGEDDDAAYSQLRSSAVESYLQIIGEPKLPSAFLQVICWVLGEYGTADGKYSASYITGKLCDVAEAYSNDETVKAYAXVSALTKXYAFEIAALEPNRLEYGCEKTTEGGRKVDILSECQSLIEESLASHSTDLQQRAYELQALIGLDVQAVETIMPRDASCEDIEVDKNLSFLNGYVQQSLERGAKSYIPEDVRTGMGNMNNFRSQDHHETLQHGLRFEAYEVPKAPMQPKVTPVSFASSADIVPVPEVLSSRETHHISSVGSTSEAGSSELKLRLDGVQKKWGKPMYSSSTSSASVSYSTSQKPTNGATQVDGATTVNSKVRDSYDSRKTQVEITPEKQKLAASLFGGSTKPEKRSSTSHKVSKSNGSRGSKAAVVPNEVAVEKAIHQPPPADLLDLDEPTVTTAPPSVDPFKELEGLLDPSTKSATNHNTTVSGGDSIPVSGGYDVNLLSELSNAATKATREETIVKPLPQSIMGRDAKDSLEKDALVRQMGVNPSSQNPNLFSDLLG

SEQ ID NO: 173104 - protein, 106 aa, Glycine max
  Clone ID: PAT_MRT3847_127329C.1.pep
APVKKSKSLKSNESLNAKLALADKSGKYSLGYKSALKQMRSVKAKLILIAGNCPPLLMLYIDYYTMYDKIYAHHFNGRNVALGTAYGKILRVGDMTVTDQGDYDLL

SEQ ID NO: 173105 - protein, 63 aa, Glycine max
  Clone ID: PAT_MRT3847_12732C.1.pep
HQPSTLLGVPAVASVADASAPNIVNFKGFLSRASIQNDTSMLLLLSSIMNHYVIDNTGYPNYY

SEQ ID NO: 173106 - protein, 591 aa, Glycine max
  unsure (1)..(591): unsure at all Xaa locations
  Clone ID: PAT_MRT3847_127330C.1.pep
EYYNNYISFRCVYFQVASFTGEKQAVSSYSKFLVDAYKSGVHEGSIAGAGLGTVMLVIFCGYALAVWFGAKMIMEKGYNGGTVINVIIAVLTASMSLGEASPSLSAFAAGQAAAYKMFQTIERKPEIDAYDPNGKILEDIQGEIELRDVDFSYPARPEELIFNGFSLHIPSGTTAALVGQSGSGKSTVISLVERFYDPQAGEVLIDGINLKEFQLRWIRGKIGLVSQEPVLHCXPSIKDNIAYGKEGATIEEIRSASELANAAKFIDKLPQGLDTMVGEHGTQLSGGQKQRIVIARAILKNPRILLLDEATSALDAESERIVQEALDRIMGNRTTIIVAHRLSTVRNADVIAVIHRGKMVEKGTHIELLKDPEGAYSQLIRLQEVNKETEGNADQHNNSELSVESFRQSSQKRSLQRSISRGSSLGNSSRHSFSVSFGLPTGVNVADPEHESSQPKEEAPEVPLSRLASLNKPEIPVLVIGSVAAIANGVIFPIFGVLISSVIKTFYEPFDEMKKDSKFWALMFMILGLASFLIIPARGYFFAVAGCKLIQRIRQMCFEKVVNMEVSWFDEPENSSGAIGARLSANAASVR

SEQ ID NO: 173107 - protein, 63 aa, Glycine max
  unsure (1)..(63): unsure at all Xaa locations
  Clone ID: PAT_MRT3847_127331C.1.pep
XXEXPTXGXPNSXAQQRKPGXGKGXAXDXTCKKDTKEXTXEAXKQGXRHXDTAAAYGSEQALG

SEQ ID NO: 173108 - protein, 42 aa, Glycine max
  Clone ID: PAT_MRT3847_127332C.1.pep
AAQIFPLPCVIILVCINFFVFFYFFFFYFFFFFFFFFSGRVV

SEQ ID NO: 173109 - protein, 90 aa, Glycine max
  Clone ID: PAT_MRT3847_127333C.1.pep
HFWGKGKNPRARVKKKSPGLKPQNLGGAPPPGEGNPRGKGSPPGPGGPPPARGQKTIPPGGPPPKSRGGLNNLGRPPFGPNPQEPPKFGG

SEQ ID NO: 173110 - protein, 57 aa, Glycine max
  unsure (1)..(57): unsure at all Xaa locations
  Clone ID: PAT_MRT3847_127334C.1.pep
RDLKSFSTNKKLKLTLSENSTCYEPQEVISGDRVALPPASAGILXNHGWLPARRSAL

SEQ ID NO: 173111 - protein, 81 aa, Glycine max
  unsure (1)..(81): unsure at all Xaa locations
  Clone ID: PAT_MRT3847_127335C.1.pep
LCCFLLKDLQNLLYFASFSVDYGMFKFCIANTEFDWRKGSEQYKLIENCLATVDXKSYKPWLIFLAHKVLGYSSTRFYATE

SEQ ID NO: 173112 - protein, 110 aa, Glycine max
  Clone ID: PAT_MRT3847_127336C.1.pep
AGNRGLKKKVALAPLFGAGKMGLGPPIPGGFPPSYPRAKKVFVAFEARGGKLWGFPLKKSFWGSMNSGGVDMVPPGGRPGSAIIGVFFLNRFVSKKVQWMHIAMGGPVWN

SEQ ID NO: 173113 - protein, 65 aa, Glycine max
  Clone ID: PAT_MRT3847_127337C.1.pep
NKENKKIEMQHYIYNTIEEVALDKNPMLLLSFVVLTLYMVFRTLDLVFSSSDLPQTTHLVIKRWR

SEQ ID NO: 173114 - protein, 70 aa, Glycine max
  Clone ID: PAT_MRT3847_127338C.1.pep
LTLFLSLKGFLCSLPTSKVTILIFEPHFVDEKIKNEYHLGYLKFETLNNLLFWVFHNLLIFFLGSENEKK

SEQ ID NO: 173115 - protein, 122 aa, Glycine max
  Clone ID: PAT_MRT3847_127339C.1.pep
PRVRFSVKKKKKSCSDIRVSGWEEGKTLPPRKFLWLCALRLNLIYSDNIDLLPQFPLSTTKSTLGFVFISNSTTSPTTPWQLFNHCDLLSVHQSHPQILTLSQPLPLIIPPNRLAQRVAVLP

SEQ ID NO: 173116 - protein, 320 aa, Glycine max
  Clone ID: PAT_MRT3847_12733C.1.pep
VRLYFIHGGKRIWLSSFLETAANSARVLPIIISYIHKRRRHRSSALISIKPPLFLASALIGLLTGLDDYLYACGVARLPVSTFSLIQASHLAFTAVFAFLLVRHRFTPYSVNSVVLLTVAAVVLALRSSGDRPAGESSRQYVIGFVMILAAAALYGFVLPLMELVYKKSRQRITYSLVMEIQLVLCFFATLFCTVGMIINNDFKVIPREARDFKLGETKYYVVLVWSAIMWQFFFLGAIGVIFCASSLLSGIIIAAFLPVTEVLAVIVYKESFHAEKGVALVLSLWGFVSYFYGEIKQDREKNKNRCPETDLPQSLPPNA

SEQ ID NO: 173117 - protein, 59 aa, Glycine max
  unsure (1)..(59): unsure at all Xaa locations
  Clone ID: PAT_MRT3847_127340C.1.pep
TTAMHVGALEIMIDSYXRSGWNIIRAQILGDAYHYTTENADRLVFGAPLRGGRSNREDT

SEQ ID NO: 173118 - protein, 39 aa, Glycine max
  Clone ID: PAT_MRT3847_127341C.1.pep
KGPLQGKAKADCFRDNVYRGFDRVSHKKAKERVGWFFQG

SEQ ID NO: 173119 - protein, 131 aa, Glycine max
  unsure (1)..(131): unsure at all Xaa locations
  Clone ID: PAT_MRT3847_127342C.1.pep
NWSGRTTYGGSCEFVETATHRTLGAPFGARRRQKGEKGIGDGTACYGMDDGDDIYMRSWTGTIIVPHIAGREGRTHQLWLFCDKDYPQKPPSGRLPSRTNMTXVHHETGAGEPKKLGPLGKWQRHVTMEDI

SEQ ID NO: 173120 - protein, 82 aa, Glycine max
  Clone ID: PAT_MRT3847_127343C.1.pep
IIGLAGPSIQIYCYASLQRQWLGLSVPLPNLISLPFYLFDRWHKDNTWLTDLNCLHFLPFGVIGIMPVPSHLSCRVKSLLAK

SEQ ID NO: 173121 - protein, 34 aa, Glycine max
  Clone ID: PAT_MRT3847_127344C.1.pep
KRVSVRSDRRQSFRRWYLIVAVSTYSIFMRQGSL

SEQ ID NO: 173122 - protein, 43 aa, Glycine max
  Clone ID: PAT_MRT3847_127345C.1.pep
QGLPIRCPSSPIFQKYGSSPVVFGDTYLQITSILKPGWNFASI

SEQ ID NO: 173123 - protein, 259 aa, Glycine max
  unsure (1)..(259): unsure at all Xaa locations
  Clone ID: PAT_MRT3847_127346C.1.pep
SGFPRRPRVRRNIAEAPIEAVFTNPSYGKFERGEALENIAQDVKRVLEEEGDEESLKVLSKAVDTVRKKVVRKRIIAEGYRLDGRQLDEVRPLYCEAGYVSMLHGSALFSRGETQVLCTVTLGAPTDAQRLESVVGPPTKRFMLHYSFPPFCINEVGKRGGLNRREVGHGTLAEKALLAVLPPEDDFPYTVRVNSEVMASDGSTSMATVCGGSMALMDAGIPVREHVAGVFCGVLSVSFDPSTGXIADYRILTDILGLG

SEQ ID NO: 173124 - protein, 97 aa, Glycine max
  Clone ID: PAT_MRT3847_127347C.1.pep
KTSILPFYRGEKYYQPDPIFDFSKHHNSHFLFLYHPLNKIIPHITLFELLNTYIPMFSNLNSGPQPSCLQPFLILIHLTSLVHHDHTCLLYKNFIQL

SEQ ID NO: 173125 - protein, 87 aa, Glycine max
  Clone ID: PAT_MRT3847_127348C.1.pep
PLLNPRVEPTRPHLLRSLNCFPLRMKPKSKAPSHFRYQLNGKCFALYQHLLSKLSLLPLNHTSMHTRRLSTLTSESSRPKSENNLCN

SEQ ID NO: 173126 - protein, 90 aa, Glycine max
  unsure (1)..(90): unsure at all Xaa locations
  Clone ID: PAT_MRT3847_127349C.1.pep
MSLRNIVRGRPEEATNADTFTGAEDEVRSTVMXAVVASRCHGDCIKLTDIGDVTSATHKYDAMAHACALDVAVDESGDMSGGHINPADIL

SEQ ID NO: 173127 - protein, 57 aa, Glycine max
  Clone ID: PAT_MRT3847_12734C.1.pep
VPACSSSGVGMLRRSYITEVMLWMHAFVSLSPLRRLTLPMCCRVCCKTKQILFFFFF

SEQ ID NO: 173128 - protein, 266 aa, Glycine max
  Clone ID: PAT_MRT3847_127350C.1.pep
MKKEDSVKVERPVKKEKTPEEIEEAKMVTFKEKFDVLKHDFEKQNNANDIKTNNKLEEQDGNRELATISSNPKEEITVQSTSMPLSTAESGRQSSLSPIGHKPPLQPVSKTDKTTGSLTLKHANFVLSQRQPKRCATHYYIACNILHQQCTKMKPPLPAAIGSGSVCDTKHNNVNCVPYAESMAFGKQSQKHLPIVNQNASQEKGWAATSIPSLTAAKGSNNVKPMDSAHRVQLVLQQGPNPGPTGNLVHGPAFLLSSSQHQASVT

SEQ ID NO: 173129 - protein, 154 aa, Glycine max
  unsure (1)..(154): unsure at all Xaa locations
  Clone ID: PAT_MRT3847_127351C.1.pep
IITSLGICPFHHSYTSRILLYVGYINNVTLLRSITMIGRHKPPLQPVSKTDKTTGSLTLKHANFVLSQRQPKRCATHYYIACNILHQQCTKMKPPLPAAIGSGSVCDTXHNNVNCVPYAESMAFXKQSQKHLPIVNQNASQEKGWAATSIPSLT

SEQ ID NO: 173130 - protein, 32 aa, Glycine max
  Clone ID: PAT_MRT3847_127352C.1.pep
ECGSSSPPPPSPPPPKPYYYHSPPAPRAKKRP

SEQ ID NO: 173131 - protein, 118 aa, Glycine max
  Clone ID: PAT_MRT3847_127353C.1.pep
TLDELNGNLNDLNDVEKLKAVGSKCLTLFREFQDSITKVHWKAPCFSGDGEWVVGGSANKGEHKIYVWDRVGHLVKILEGPKEALIDLAWHPVRPIVVSVSLNGIVYIWAKDYTENWS

SEQ ID NO: 173132 - protein, 41 aa, Glycine max
  Clone ID: PAT_MRT3847_127354C.1.pep
KGDWKLVGDVPWGMFFLPCQRLGVFKSFYPLGLAPRGVLKC

SEQ ID NO: 173133 - protein, 44 aa, Glycine max
  Clone ID: PAT_MRT3847_127355C.1.pep
QLLLAAPFFFYFSPPLKENHTFWEGLSHTNTLMIHTQLAIVTNP

SEQ ID NO: 173134 - protein, 68 aa, Glycine max
  unsure (1)..(68): unsure at all Xaa locations
  Clone ID: PAT_MRT3847_127356C.1.pep
MMDTNMKKGKNLAVTMATKAGTRARELKSIKSDLCFMQERGGXLEEENRRLRDGTAKGARPEEDDQGR

SEQ ID NO: 173135 - protein, 219 aa, Glycine max
  Clone ID: PAT_MRT3847_127357C.1.pep
TRPLSHPDPPESEPDVVVSKPEPDVVVSKPEQQQQQQPAIYYFPGAEQRVVVYYTSLRVVRPTFEACKSVLSILRGFRVQIDERDVSMDSGFTAELNRIMGRPELGPGPSLPRVFIAGRYVGGAEELRQLNEVGELKKILLDLPAVDPTAECHVCAGHRFVLCDECNGSRKVYTEKTGFKTCNACNENGLVKCPSCLPSTSPPPILSSTTSKFNNEIQN

SEQ ID NO: 173136 - protein, 59 aa, Glycine max
  Clone ID: PAT_MRT3847_127358C.1.pep
FKKMVDSGLRPNLAAYNRLVDGSVKVGKIDAAKAFLWLLANNLMIDAALLHSMMTVLIV

SEQ ID NO: 173137 - protein, 141 aa, Glycine max
  Clone ID: PAT_MRT3847_127359C.1.pep
MAYAHGFAPIFKLGFVFSSVSPSQKRHPLVFPASHCGYSLKFYDGVLSARSCKFKNPSFVKQGSIRGFRALKSVELDQYVTSDDEEDEMSDGFFEAIEELERMTREPSDVLEEMNDRLSARELQLVLVYFSQDGRDSWCAL

SEQ ID NO: 173138 - protein, 64 aa, Glycine max
  Clone ID: PAT_MRT3847_12735C.1.pep
SKGLGLTLNLNLTEGATNKNLVTHHHFQKANYPYYSRHDYPHRHQVEGPIVYYLHWIPRFLGHL

SEQ ID NO: 173139 - protein, 468 aa, Glycine max
  Clone ID: PAT_MRT3847_127360C.1.pep
TRPKVSAVGTRPVTLSSLFRFESGSVSLLSKSKSSFGVACSLASSSPAKALRRILDSPGVHQGPACFDALSAKLVENAGFQFCFSSGFSISAASLALPDTGLISYAEMLHQGQLITQSVSIPVIGDADNGYGNAMNLKRTLKGYIAAGFAGIILEDQVSPKACGHTRGRRVVSREEAVMKIKAAVDARRESGSDIVIVARSDARQAVSLEEALVRSRAFADAGADVLFIDALASREEMKAFCDVSPLVPKMANMLEGGGKTPILNPMELQDIGFKIVAYPLSLIGVSIRAMQDSLTAIRGGRIPPPGSMPSFEEIKDILGFNAYYEEEKRYATTTNPQLSKRESSNLYSIQRRDQVDTEQTNQSFKDPIVEVITPDDVYNKYGADSSRNPFSGIWSRTLRVKITGRDGFERLDLRIPAGFLDGITNIVPALGGINIKELLDDATEEVGGKLLLDFQDRMGDRIQVFLE

SEQ ID NO: 173140 - protein, 295 aa, Glycine max
  Clone ID: PAT_MRT3847_127361C.1.pep
MEKVKVLRRLLETPGVHQGPACFDALGAKLIESAGFPYCITSGFSIAASRLALPDTGFISYGEMLEQGQLITQAVSIPVIGDADNGYGNAMNLKRTVKGFIAAGFAGIILEDQIAPKACGHTRGRKVIPREEGVMKIRAAVDARRESGSDIVIVARTDARQAVSLEEALTRCKAYGDAGADVLFIDALASVQEMKALCQLSPHLPKLANMLEGGGKTPILSPQELEDVGYKLAIYPISLIGVCIRAMQDALTAIKGGAVPPPGSMPSFEEIKDIVGFNSYYKEEERYATSTNHQP

SEQ ID NO: 173141 - protein, 170 aa, Glycine max
  unsure (1)..(170): unsure at all Xaa locations
  Clone ID: PAT_MRT3847_127362C.1.pep
MSDAFCSDCKRQTEVVFDHSAGDTVCSECGLVLESHSIXXTSEWRTFANXSGDNDPNRVGWGPSFHHNFYLXLPTELHRMQPRGGGVFFLAWDRVNPTAYHLKTRPCHSGCAPXREACQDLSLVVLMLKLFGKKAVDCYKRTFICIPHLCQDRANEIYKRVEDQKSSRGR

SEQ ID NO: 173142 - protein, 95 aa, Glycine max
  Clone ID: PAT_MRT3847_127363C.1.pep
KETRKKCRSQPGPLIIKFIKESRHIDLIFQFPSTQPCCLHYVIQSIGLLCTDSIEYMTNNIDELNTEKRKTLIHKTKKLELLWETNTITLGEQTS

SEQ ID NO: 173143 - protein, 64 aa, Glycine max
  Clone ID: PAT_MRT3847_127364C.1.pep
QKKVFSRQNPVCWYRTWTSMLGEFPVRTYWIAVCYDLQEPSGPLNFLTAPFCYAHCGAPLPFLN

SEQ ID NO: 173144 - protein, 73 aa, Glycine max
  Clone ID: PAT_MRT3847_127365C.1.pep
NSDAVVQCSFGKSSIETLTVFRGVVLAGLFVSKGDKNSTDDYPEFMIKELIATEKVLQATFRSMSRNESRTFY

SEQ ID NO: 173145 - protein, 61 aa, Glycine max
  Clone ID: PAT_MRT3847_127366C.1.pep
FEDYVRVMSNVNCSVLSSLAQVCGCMNKKGLKITSILYMPPSRMYAPDHIFFFRTRAGTRG

SEQ ID NO: 173146 - protein, 265 aa, Glycine max
  Clone ID: PAT_MRT3847_127367C.1.pep
MDRHKCKLCSRSFSNGRALGGHMKAHLATLPLPPKPHSYSSSSDSEQEQEQESLNYALRENPKKSFRVADPEDRESETESRNPTRQRSKRNRKSTMPKLTPPPHPEPEPLSSVSDTSPEEDVAMCLMMLSRDTWQQHKHANAATPKRRCSSGSEIKKNVRGNHLCHKCHKSFRSSRAFGSHRNVCCPREEGQNNYNNNRSTKVFECPFCYKVFGSGQALGGHKRSHLIPSSSSTVNDSVKLKHSFIDLNLPAPAEDDDLSVVSDA

SEQ ID NO: 173147 - protein, 144 aa, Glycine max
  Clone ID: PAT_MRT3847_127368C.1.pep
WIATIPRNRRKVFELFFYTHYLYTLFIVFFIFHVGIFYACTILPGFYLFLVDRYLRFLQSRRRVRLVSARVLPCETVELNFSKSHDLTYNPTSIMFINVPSISKLQWHPFTITSNSNLEPKMMSIVIKGEGTWSQKLYQMLSTP

SEQ ID NO: 173148 - protein, 41 aa, Glycine max
  Clone ID: PAT_MRT3847_127369C.1.pep
AYHTYFYVHAPTDDPIPPLWAQPERSNDLSTRHVGFSWCSC

SEQ ID NO: 173149 - protein, 83 aa, Glycine max
  Clone ID: PAT_MRT3847_12736C.1.pep
GVTLWVLTFGVKLLAMYLLTAYLLFEASHYSHFCEYALFDYNSVLLHMTRPVEGLLTVSCVSIILSTIVVLNITVCAIFGVWP

SEQ ID NO: 173150 - protein, 55 aa, Glycine max
  Clone ID: PAT_MRT3847_127370C.1.pep
PGPSPRSFLGCWASVLRACPRWPWALPSRVLCRGVSGASFLHVPPPLSSSRGLSP

SEQ ID NO: 173151 - protein, 119 aa, Glycine max
  Clone ID: PAT_MRT3847_127371C.1.pep
MARSVTVIFLVLVSLAVVLAIQKTPQIQVYSRHPPENGKPNFLNCYVSQFHPPQIEIELLKNGKKIPNIEMSDLSFSKDWSFYILAHTEFTPTETDVYACRVKHVTLKEPKTVTWDRDM

SEQ ID NO: 173152 - protein, 73 aa, Glycine max
  Clone ID: PAT_MRT3847_127372C.1.pep
EKEHVILYFGIRNLPGCRILGEERNQNFLPVQWGRFLSKDSVYALQPRLYLSSLNFSFLCLLYVIMNYSCVVN

SEQ ID NO: 173153 - protein, 176 aa, Glycine max
  Clone ID: PAT_MRT3847_127373C.1.pep
SGRHDDCLSFAVDELPVIHGRSPLDCYDAFFRSFADAFQDLFDSTITDVTVGLGPNGELRYPSYPPGSDGQGFTGVGEFQCYDRYMLEQLRRHAAEAGEPLWGLSGPHDAPRYGDSPDACGFFNDHGGSWQSAYGDFFLSWYAGQLVGHGDRVLAVANGALGDTPVEASAKVPFMH

SEQ ID NO: 173154 - protein, 65 aa, Glycine max
  Clone ID: PAT_MRT3847_127374C.1.pep
GNHVFMFNIECFSVLIVLALHASCCLNKKYICSLEFSFTPKECLLLFNVFVLQLFQYKQRMREKN

SEQ ID NO: 173155 - protein, 384 aa, Glycine max
  Clone ID: PAT_MRT3847_127375C.1.pep
LLLIDSQILLGSDAGGRQDGLLWYKDSGQLLNGDFSMAVIQANNLLEDQSQIESGCLSSNESGPYGTFIGVYDGHGGPETSRFINDHLFHHLKRFTSEQQSMSVDVIRKALQATEEGFISVVARQFSLSPQIAAVGSCCLVGVICNGTLYIANLGDSRAVLGRAVKATGEVLAMQLSAEHNASIESVRQELHASHPDDPNIVVLKHNVWRVKGLIQVSRSIGDVYLKKAEFNREPLYAKFRLREPYKMPILSSEPSISVHHLQPHDQFIIFASDGLWEHLSNQEAVDIVQNSPRSGSARRLVKAALQEAAKKREMRYSDLKKIDRGVRRHFHDDTTVIVVYLDSNLVSRASTVKFPGISVRGGGINLPHNTLAPCTTPTEIGGT

SEQ ID NO: 173156 - protein, 95 aa, Glycine max
  Clone ID: PAT_MRT3847_127376C.1.pep
WCGAHSWTCALLAPSSSLIVFLWGFSAEFRTKQEKKKGFTLCPIFHTELFNFQFSFSCTTLLFLQTPSSSAYRLAPKTTHTRILFLSVDLMDPQI

SEQ ID NO: 173157 - protein, 199 aa, Glycine max
  unsure (1)..(199): unsure at all Xaa locations
  Clone ID: PAT_MRT3847_127377C.1.pep
MASAASISSSQPEAPKVHASDISSIKAFAESKGASLIPYTYHSITEHHDDDVADELAASIPVIDLSLLTSHDPQIHAKAVHQLGKACAEWSFFMLTNHGIPESLVEELMKKSREFHDLPMEEKKEFGNKGPFEPIRHGTSFCPEAENVHYWRDYLKAITFPEFNFPYKPPGYRESAYDYSKKIRGVTRKLLEGISXEFG

SEQ ID NO: 173158 - protein, 128 aa, Glycine max
  unsure (1)..(128): unsure at all Xaa locations
  Clone ID: PAT_MRT3847_127378C.1.pep
MLSGLMNLLRACFRPGSDGFTLAGSDAGGRQDGLLWYKDSGQHLSGEFSMAVIQANNLLEDQSQIESGCLSSNESGPYGTFVGIYDGHGGPETSRFINDHLFHHLKRFTSEQXXSCRWDVIRKALQAT

SEQ ID NO: 173159 - protein, 56 aa, Glycine max
  Clone ID: PAT_MRT3847_127379C.1.pep
SVLRTLEGKREKYEGKTVNQAPPSFWNCYLVLSGRVFVLCCNLKERSFNFKSRKLW

SEQ ID NO: 173160 - protein, 117 aa, Glycine max
  Clone ID: PAT_MRT3847_12737C.1.pep
SKICVVYLENFIWQFGNLGPEHHKNKFFSHPFRGELMEILKPFMKTSSFLTTALIILSSESPSSSSFNFPYYFLLYSHPNVYTHTSSPFYLLQSQLFLIGSEQPPNSLLGLNHLKPV

SEQ ID NO: 173161 - protein, 68 aa, Glycine max
  Clone ID: PAT_MRT3847_127380C.1.pep
KLGVFRNVIQVLLFYFASHITISLFFFPLIPAKRVIFDPLKLISHFLFWDCRCCLFEISFILSWLVEK

SEQ ID NO: 173162 - protein, 48 aa, Glycine max
  Clone ID: PAT_MRT3847_127381C.1.pep
NVIAMVAHAKHHLYSCSSTYLDLCLIIRRFLYNLLMRFFYHLALILNE

SEQ ID NO: 173163 - protein, 185 aa, Glycine max
  Clone ID: PAT_MRT3847_127382C.1.pep
MIKKTNTHYTKFRSQRDKDMEQEGEKGREEKRQIQQQQPPPQQHQKCPRCDSMNTKFCYFNNYSLSQPRHFCKACKRYWTLGGTFRNIPVGGGSRKVKRGKTNSPSSSSSSSSCSNLLSQPQQNLLMRPSPPPLTTNTMVQSTSPYYYNLGVGGNGYLSFHSSLNNNTPSQPSDQYLKVGDHSSP

SEQ ID NO: 173164 - protein, 554 aa, Glycine max
  unsure (1)..(554): unsure at all Xaa locations
  Clone ID: PAT_MRT3847_127383C.1.pep
MHAPVLVLKDSLKRESGSKVRYAIIQAAKAVADVVRTTLGPRSMLKMLLDAQGGIVVTNDGNAILRELDLAHPAAKSMIELSRTQDEEVGDGTTSVIILAGEMLHVADAFIDKIHPTVICRAYNKALEDAIAVLDKIAMPIDAQDRGIMLGLVKSCIGTKFTGQFGDLIADLAIDATTTVGVXVGQGLRDVDIKNYIKVEKVPGGQLEDSRVLKGVMINKDVVAPGKMRRRIVNPHIILLDSPLEYKKGENQTNAELLKEEDWSLLLKMEEEYIEELCMQILKFKPDLVITEKGLSDLATHYLSKHGVSAIRRLRKTDNNRIAKACGAVIVNRPDELQESDVGTGAGLFEVKKIGDEYFAYIVDCKEPKACTVLLRGASKDLLNEVERNLQDAMSVARNIIKNPKLVPGGGATELTVSAALKQKSSSIEGIEKWPYEAAALAFEAIPRTLAQNCGVNVIRTMTALQGKHANGENAWIGIDGNTGSITDMKERKIWDAYNVKAQAFKTAIEAACMLLRIDDIVSGIKKKQAPGAAPSKPKVETEADADSEQILPD

SEQ ID NO: 173165 - protein, 375 aa, Glycine max
  unsure (1)..(375): unsure at all Xaa locations
  Clone ID: PAT_MRT3847_127384C.1.pep
SRADSARGKVQHANIQAAKAVADIIRTTLGPRSMLKMLLDASGGIVVTNDGNAILREIDLAHPAAKSMIELSRTQDEEVGDGTTSVIXLAGEMLHVAEALIDKNYHPTGICRAYDKALEGCIXLGLDQNAMPVDPNDRGTMAGDSQKLIGTNFWICXIYVSYILPWLLNLAIDATTTVGVEIGQGLRDVDIKNYIKVEKVPGGQLEDSRVLKGVMINKDVVAPGKMRRRIVNPHIILLDSPLEYKKGENQTNAELLKEEDWSLLLKMEEEYIEELCMQILKFKPDLVITEKGLSDLATHYLSKHGVSAIRRLRKTDNNRIAKACGAVIVNRPDELQESDVGTGAGLXEVKIGDEYFAYIVDCTQACTVLGAVSIK

SEQ ID NO: 173166 - protein, 46 aa, Glycine max
  Clone ID: PAT_MRT3847_127385C.1.pep
KRPKPSIILCIISIITYAYMSLYILSIIANYLISLQTKSVKDHLYS

SEQ ID NO: 173167 - protein, 39 aa, Glycine max
  Clone ID: PAT_MRT3847_127386C.1.pep
SKGETIDIMCVFSIHLLFRCYIGLLCTIEVLMDIVFFTV

SEQ ID NO: 173168 - protein, 128 aa, Glycine max
  Clone ID: PAT_MRT3847_127387C.1.pep
TPRVRGRVGYPKSREKRDALVSSLKEETLLATSGYPGGNPGYKALKLIGEQNPYVQEYLWNDERTACSIPPTFLPGAVVIHKHKPILKPLGFVKNLYQTRNYYNILASHPFLKAFFSQRGFFIDPLER

SEQ ID NO: 173169 - protein, 224 aa, Glycine max
  unsure (1)..(224): unsure at all Xaa locations
  Clone ID: PAT_MRT3847_127388C.1.pep
MLEDIESSTTRLCKMGFGRNSTSRSGDYLEGMLNDYVGGRNKLKAQKSAATTTKFVAVLTCLQFFFAVYATFLLYYMGPSIDLRTKPEFTWATKIAQQWKQLIITPHVVGHYQEAASSLIKEDLLPTTPSQVCENEKIDFMQKKSNDVQMIKIKRELYDEVLSFQSKTFGSETLQELISMRSKWDLKGPNRPKITVLLNHFKKRTXLCSLDSLLHXTXPFHHVW

SEQ ID NO: 173170 - protein, 107 aa, Glycine max
  Clone ID: PAT_MRT3847_127389C.1.pep
FFWGLPFFFLGLGGRLFFFSLAPSVFWVVPSLAASLAILVFLFRMSVQAYCSPPQWSALLLSLRGALSSFLACPLFFLSLAAMALWFFFFLPQVWVRLLPLQKPSCG

SEQ ID NO: 173171 - protein, 66 aa, Glycine max
  Clone ID: PAT_MRT3847_12738C.1.pep
YAYVALVIVPFSVALWTSALLHQHFVQSFTGLPSLNVSRSRIVDWISRKRSISGLGLTRTRASYPE

SEQ ID NO: 173172 - protein, 86 aa, Glycine max
  Clone ID: PAT_MRT3847_127390C.1.pep
MFGRAPNKSDISRYYKNPRAPARTLSKEILKKVTKKPAFRITPTRGGIPRRLKNQSQAYEVLRDPEKRGIYNQIGDNPLTKESAGA

SEQ ID NO: 173173 - protein, 107 aa, Glycine max
  Clone ID: PAT_MRT3847_127391C.1.pep
MSCGQVWIGFLLALSLLNSCALVYSYPTPNSPSHPPHHGAHKPGCYQHTPPTHRHRKIPPPPSLPFLSPLPPGAFYFFSPPPPSPTHYPKTPRPVGLGPPPPRFRVL

SEQ ID NO: 173174 - protein, 88 aa, Glycine max
  Clone ID: PAT_MRT3847_127392C.1.pep
ILFLSLQYSRDNNFETAWGIFGVINAKVTTEFTSKPLPSHSLIKGLFWDYICCYTVHTKYLLLLKLAIPVRLRKLLIIRSEHSKLNPK

SEQ ID NO: 173175 - protein, 71 aa, Glycine max
  Clone ID: PAT_MRT3847_127393C.1.pep
CRSRNRETARGDSFAGDDSMAPEMPRSTSRKTDLVRGMGMLSRSLMYVSRGSWALCAKKSRVLPLRDIEPH

SEQ ID NO: 173176 - protein, 56 aa, Glycine max
  Clone ID: PAT_MRT3847_127394C.1.pep
SFSISTLTWIEVLVIGYVEAQRNVHLDAHKRLNHCGIYLDLLCRVSDPEKKAILQL

SEQ ID NO: 173177 - protein, 45 aa, Glycine max
  Clone ID: PAT_MRT3847_127395C.1.pep
SRVFILFYFIYLFTFTRIVLLFISLSREFSTILVIVFLILCLALS

SEQ ID NO: 173178 - protein, 91 aa, Glycine max
  Clone ID: PAT_MRT3847_127396C.1.pep
TAEKCLAEYGVDRPTMGAVLWNLEYALQLQESEQEGESYDDSSARETVNVTTTIIPGSPSSNVIREGDNGNGYSDISATEVFSQLMNSEGR

SEQ ID NO: 173179 - protein, 58 aa, Glycine max
  Clone ID: PAT_MRT3847_127397C.1.pep
VHHSAPCIHVTLVRRYVYVSIVHMVCLRRSLVTHNILLWRAWHILWSNKNSWSTRARA

SEQ ID NO: 173180 - protein, 38 aa, Glycine max
  Clone ID: PAT_MRT3847_127398C.1.pep
LSFNHRKYILYDFYSFSLVGWKVTFKRLIKMLMLNIFL

SEQ ID NO: 173181 - protein, 145 aa, Glycine max
  Clone ID: PAT_MRT3847_127399C.1.pep
TCNFHIPLPEYASFDSSNFTGVKQEGISSASVNSGFFTTLVEAGDVKAVFTGHDHVNDFCGKLTGIHLCYAGGFGYHAYGKAGWSRRARVVLVSLEKTDNGRWEDVKSIKTWKRLDDQNLTGIDGQVLWSKSFGSNRRKKQDDGS

SEQ ID NO: 173182 - protein, 63 aa, Glycine max
  Clone ID: PAT_MRT3847_12739C.1.pep
FPYHKCDILLRNSITIPPSCPFRISQFKYLSHLAADWIMMSMKNIRWGLSFGDKIIAFCQFEA

SEQ ID NO: 173183 - protein, 67 aa, Glycine max
  Clone ID: PAT_MRT3847_1273C.1.pep
TTCPCNSITIGVYISLMVPDGTSSSQGGVRKLNLQSTAKFHVPAREPEHFLLQSSKQSSNESMVFDS

SEQ ID NO: 173184 - protein, 33 aa, Glycine max
  Clone ID: PAT_MRT3847_127400C.1.pep
FKSIFMLNIGAYVDKVLLEKNMVHLFKAVTSVD

SEQ ID NO: 173185 - protein, 33 aa, Glycine max
  Clone ID: PAT_MRT3847_127401C.1.pep
FVLVHRFVVRATILVACITRTIFWARLPGRGPQ

SEQ ID NO: 173186 - protein, 278 aa, Glycine max
  Clone ID: PAT_MRT3847_127402C.1.pep
MHKRLFITLLGFIILLAGCDYSKEENQTGIFYNVFVKSMDGFLHFLGRVFQDNYGFAIISIVLIVRFILLPFMLIQVKNMHMMREKTKVVQPELDAIRDKMKHATSQEERNAANQLLMKKYQSYGINPLKNMLGCLPVLIQMPILMGLYMSLKYPSSHGITEYPHFLWFDLTQPDLIMTIIAAIMYFVQPLVNSIHYPKDQRKTYYFMMVFSPIFITYASLHSAAALGLYWSISAAFLIVQMHFAHSHYKKVALHEAKKLKQKLEQNKDNSELLTEES

SEQ ID NO: 173187 - protein, 63 aa, Glycine max
  Clone ID: PAT_MRT3847_127403C.1.pep
SQDHSSSQKHKMHLVLHKDYTFASLTFLEKASSSSKRTYLLHALNTRTLPSVHFADGIDVPTS

SEQ ID NO: 173188 - protein, 71 aa, Glycine max
  Clone ID: PAT_MRT3847_127404C.1.pep
MESVSRRRGGGIFESLYKVVMRRNSVYVTFVIAGAFLGERAVDYGVHKLWEANNVGKRYEDIPVLGQRPSE

SEQ ID NO: 173189 - protein, 77 aa, Glycine max
  Clone ID: PAT_MRT3847_127405C.1.pep
ERNMPKRYSKFSFSLDRRACVYIYRLKYIFYLYIIIKFEFTFCKKNYLLLLFLKLQYAKYWCPDMPKPMCLINVNKS

SEQ ID NO: 173190 - protein, 71 aa, Glycine max
  Clone ID: PAT_MRT3847_127406C.1.pep
MEAVSRRRGGGIFESLYKVVMRRNSVYVTFVIAGAFLGERAVDYGVHKLWEANNVGKRYEDIPVLGQRQSE

SEQ ID NO: 173191 - protein, 48 aa, Glycine max
  Clone ID: PAT_MRT3847_127407C.1.pep
IQKQTELGCIEPIMSLLPQPTSTYRPNLLKHPEVVYFATTCTKLAVVC

SEQ ID NO: 173192 - protein, 53 aa, Glycine max
  Clone ID: PAT_MRT3847_127408C.1.pep
LVIDYRINLNELPLHVSSKSNKMNFKSNIICIFWYEKYEAFWKFCVSFPNYWL

SEQ ID NO: 173193 - protein, 72 aa, Glycine max
  Clone ID: PAT_MRT3847_127409C.1.pep
RPGLFNLMVMWRCLILADTVSLPAADSVNNSIDGTRKTKEGIEDDTKTQLKYMRCQFHENSVRENSFIFRQQ

SEQ ID NO: 173194 - protein, 202 aa, Glycine max
  Clone ID: PAT_MRT3847_12740C.1.pep
MGSVTEGKLRFCIDRGGTFTDVYAEIPGQTDGQVLKLLSVDPLNYDDAPVEGIRRILEEFTGEKIPRNSKIPTEKIEWIRMGTTVATNALLERKGERIAVCVTRGFRDLLQIGNQARPSIFDLTVLKPSNLYEEVVEVEERVQLVQSEEEEESRVGLHLGVREFQGSLAGLGKPFNEEALKPILKNLLDKEFSGLAVGLVPS

SEQ ID NO: 173195 - protein, 80 aa, Glycine max
  unsure (1)..(80): unsure at all Xaa locations
  Clone ID: PAT_MRT3847_127410C.1.pep
VQXPFIFTPLEKDSSSNGTLALGTDAKKSTSGAGDDGCNMTSPSTHVDKKTDGADGPKEDVHVYTKIVTMACSEDEAASE

SEQ ID NO: 173196 - protein, 39 aa, Glycine max
  Clone ID: PAT_MRT3847_127411C.1.pep
ITYKAYDTITYMCKRCLHYNNPTRALSQRETSYGITTMI

SEQ ID NO: 173197 - protein, 493 aa, Glycine max
  Clone ID: PAT_MRT3847_127412C.1.pep
MEPSSISPPPAPPATAVPFPAEPNDHLPPPIPEPPSNHPPYAEMIYTAIEALKEKDGSSKRAIAKYIEQVYTQLPPNHSDLLTQHLNHLKSRGLLQMVKKSYALPRSVPVSVPGPAPTQGTSAVPAAVVAITTTPRPRGRPRKAQNPVQNSPLRSGPKRGRPPTKSILRARIAKRGQSSRHRGKKPGRPPTATTTDVSASAGPKRRPGRPPKNQSQPTLIPFAPAVSAASVDTEHVAASAETAPVDADAALGPRARGRPKKYADEMIAAGRGRGRGRGRGGGGRGRGRGRGELPAQPRKPGARPVGRPKKGSTSASTSQNAANEDLRRKLEHFQSKVKESLAVLKPHFNHESPVTAIAAIQELEVLGTMDLNVPLRDETLPHQVELPPPQPPVQQQQQPPQQQLQQPPQQPPQATPSTTTTAATATDISANISSISSAAVPPSPAFAAVPATAAAAATATATAIPAPGTASFPPTVSSLGIRPRLGRITWSSI

SEQ ID NO: 173198 - protein, 497 aa, Glycine max
  Clone ID: PAT_MRT3847_127413C.1.pep
MEPSSISPPPAPPATAVPFPAEPNDHLLPPISEPPSNHPPYAEMIYTAIEALKEKEGSSKRAIAKYIEQVYKEHLPPNHSILLTQHLTLLKSSGMLQMVKKSYALPRSVPLTGAAPAQAHDAATSALQLTSPRPRGRPRKAQIPVQNLPQDINVQVQQNAEPVWAALGLADEPVQTEGSSKKRGRPKKSVTPGAGPAKRGRPPGSGKRLGRPPKEKSVTATTTTDVSGPKRRPGRPPKNQSQPTPIPFAPADAAAAVGTEYVPRAETVPVDAAAALGPRARGRPKKYADEMVAAGRGRGRGRGRGGGGGRGRGRGRGQLPAQLRKSGARPVGRPKKGSTSASTSQNAANEDLRRKLEHFQSKVKESLAVLKPHFNHESPVTAIAAIQELEVLGTMDLNAPLRDETLPSQEEQPPLQQQQQPPQQQFPPPQQQPPQQHLAPQQLPPQPQAPIFQQTYPPFHLPQFHHHQPTLQFQQQPQPPQLFQHQAQPPSHQQFHP

SEQ ID NO: 173199 - protein, 136 aa, Glycine max
  Clone ID: PAT_MRT3847_127414C.1.pep
KTKKKGGAKSFFFLQTVNKNFFQPQTSKTKVKGALTKTMAIRNFPTGGNEHKGPPPFSNFNRVFTKKFEKSKIPLGNKMPNIFFHMNFAGVHQWQKIIWGAGGNFHQVSHLFQVAASPFLKKNATMLFGPTLFFQG

SEQ ID NO: 173200 - protein, 74 aa, Glycine max
  unsure (1)..(74): unsure at all Xaa locations
  Clone ID: PAT_MRT3847_127415C.1.pep
ASPGSAVAADTAAAMASASVVLKKTDPTYSSTLIKHATQLVTFADQNRGSYSEDITGVQTXITPLGYGDELYGQ

SEQ ID NO: 173201 - protein, 438 aa, Glycine max
  unsure (1)..(438): unsure at all Xaa locations
  Clone ID: PAT_MRT3847_127416C.1.pep
ARGNSRSVGVXKTLVFYAGRAPSGERTDWVMHEYTLDEEELKRCLGVKDYYALYKVYKKSGPGPKNGEQYGAPFNEEQWADDDIVDFNINSADQEAPNDVDNGNVLQPLLDDEIDNIIRGILDDELVLDQQHVNGYPDFPQVVSEETQSTVVDQFSEAVMFPEPVRITQPSNQFFDAQPSFDFNRPVTSHLHVSETSEVTSASNIKTKELDFNEDGFLEINDLIDTEPTLSNVENSVEYQHFEDGLSELDLFQDAQMFLRDLGPIIHETDSHAYTNALVSSNIECQSYQLLPNPEDANQTVGEFWMHGESNQLSSPGVVYESVGFPTEGNNNQSSTVEDVATSSLSSALWAFVESIPTTPASAAESALVNRALNRMSSFSRLKIKHTNIAASGKDTGTMKRAGRKGLPFLFFSILIALCAFCWVFVGNLRLVGRSISP

SEQ ID NO: 173202 - protein, 128 aa, Glycine max
  Clone ID: PAT_MRT3847_127417C.1.pep
LTRSLKYAIPMMPIDEQILSKVAQDMAEEWLACVDEEDYFEGVFLDAALNGVAGLDYIDRIPVASFMGFADDPSREGGALGITMTVSVDGVKMTTTARTRDEEAHCKIIAEREISAPTLLELERPKDE

SEQ ID NO: 173203 - protein, 151 aa, Glycine max
  Clone ID: PAT_MRT3847_127418C.1.pep
MEPSSISPPPAPPATAVPFPAEPNDHLPPPISEPPSNHPPYAEVQQNAEPVWAALGLADEPVQTEGSSKKRGRPKKSVTPGAGPAKRGRPPGSGKRLGRPPKDKSVTTTTTDVSGPKRRPGRPPKNQSQPTPIPFAPADAGPARGTEYVAA

SEQ ID NO: 173204 - protein, 178 aa, Glycine max
  Clone ID: PAT_MRT3847_127419C.1.pep
AYTNAFVSSNIESQSYQLLPNPEDANQTVGEFWMHGERNTPSASEGFVDSFSLSSPGVVYESVGFPTEGNNNQSSTVEDVATSSFSSALWAFVESIPTTPASAAESALVNRALNRMSSFSRLKIKHTNIAAAGKDTATMKRAGRKGLPFLFFPIIIALCAFCWVFVGNLRLLGRCVSP

SEQ ID NO: 173205 - protein, 555 aa, Glycine max
  unsure (1)..(555): unsure at all Xaa locations
  Clone ID: PAT_MRT3847_12741C.1.pep
MMEKADSVQKLXTRMRLWEFPDQYVIEPTDGSSGSSLSVSRVDGSMKLIDEVPECSTLRVPKIYTIFXILVGMLKLLAGSYLLVITEREXAGSYPGHPIFKISKXKIFQCDNSLKNTPPEKKKIEMEFSGMQIVAEXTSDSSIXYESNLTXSARRSNDLYDESRFLLLYILSFFFNLFINDTVFSXSLIYSLLYTIVDXASANFVETEQIMQFNGYTASFVQVRGSIPLLWQQIVDLTYKPKFELLKLEEAPRVLERHFLDLRKKYGAVLAVDLVNKHGGEGRLCEKFGDASQHVAGNDVRYLHFDFHHVCGHVHFDRLSILYDQISDFLERNGYLLLNEKGEKMKEQLGVVRTNCIDCLDRTNVTQSMIGRNMLEYQLRRLGVFGAEETISSHPNLDENFKILWANHGDDISIQYSGTPALKGDFVRFGHRTIQGILQDGVNALLRYYFNNFVDGTKQDAIDLLQGHYIVSVGRDTAATSQKGGLEAIASFPLALGLVLTGFLFATMSLRQVQYDFRHFFFXSLLWAGISIGIAAFVRANGRVFCNRPRLHNPR

SEQ ID NO: 173206 - protein, 158 aa, Glycine max
  Clone ID: PAT_MRT3847_127420C.1.pep
MRTEPVSSVSFVKSKTNVLGYPLIYASFFFVFGHELGVVYESVGFPTEGNNNQSSTVEDVATSSLSSALWAFVESIPTTPASAAESALVNRALNRMSSFSRLKIKHTNIAASGKDTGTMKRAGRKGLPFLFFSILIALCAFCWVFVGNLRLVGRSISP

SEQ ID NO: 173207 - protein, 127 aa, Glycine max
  Clone ID: PAT_MRT3847_127421C.1.pep
KPGPANGGIQELKGLGTRALNGPLRDETLPHQVELPPPQPPVQQQQQPPQQQLQQPPQQPPQQHLAPQQLPPQPPIFQQTYPPFHLPQFHHHQPSLQFQQQQQQPPQPPPQLFQHQAQPPSHQQFHP

SEQ ID NO: 173208 - protein, 244 aa, Glycine max
  Clone ID: PAT_MRT3847_127422C.1.pep
MGEASGAGSADCFSQMMSSMPGFRFHPTDEELVMYYLKRKICGKRLKLDVIRETDVYKWDPEDLPGQSILKTGDRQWFFFCHRDRKYPNGGRSNRATRRGYWKATGKDRNVICNSRSVGVKKTLVFYAGRAPSGERTDWVMHEYTLDEEELKRCQGVKDYYALYKVYKKSGPGPKNGEQYGAPFNEEEWADDDIVDFNINSADQEAPNDVADNVNVPLPFLDDEIRMSIREILDDELHIHCCNR

SEQ ID NO: 173209 - protein, 87 aa, Glycine max
  unsure (1)..(87): unsure at all Xaa locations
  Clone ID: PAT_MRT3847_127423C.1.pep
CNKQGLDIVTASVGAVEALKDQLGVSRXIIYALRCAQKHMKNHVRSLSQALKNVSSSXSVSKLKGEKAKQAKESLRAVMYLSCCGPN

SEQ ID NO: 173210 - protein, 70 aa, Glycine max
  Clone ID: PAT_MRT3847_127424C.1.pep
ENEFNHSSTMVKNIKIPIPLTSHVNLTINNNLLLQPLHSLLFHFHNPHEFPHPPFSLFLLLPLSLSLFSM

SEQ ID NO: 173211 - protein, 90 aa, Glycine max
  Clone ID: PAT_MRT3847_127425C.1.pep
MLEVKNMVEEIRAKDVCGYITIVHGFYDAVKAVKKWPSPMGQLGLGSLISDSKRTGPIWLGMMDQMEQARLLKCSSKSYRAYLAQCIFFL

SEQ ID NO: 173212 - protein, 72 aa, Glycine max
  Clone ID: PAT_MRT3847_127426C.1.pep
NIEIFSRYSNSYLKLSTCHAAHMNASLEVSKHTLVLRCGLYANSTFVLKLLSNLMGFHLSLVLIIPPKCSSR

SEQ ID NO: 173213 - protein, 145 aa, Glycine max
  Clone ID: PAT_MRT3847_127427C.1.pep
INGCYCAFDLTERSFSEILLPIDFDLDNFQLCVLAVLGELLNLCAVEEIRHSVEIWAMGEYKVRSSWTKTTVVSLDYFSSLSLFPICSTEDGDIVGTDGCNVLIKCNDEGQLQEYQIYSNGPYRSAVYTESLLSLPCDREPAENV

SEQ ID NO: 173214 - protein, 88 aa, Glycine max
  Clone ID: PAT_MRT3847_127428C.1.pep
DFVSFVNRRDLERENQRRTIIYMKWSLLTGPVAILGGVVVAIAAANVIFVKNVRLLMNQPSPRLLNQKTNSKQKSFVRIAFSMACPNI

SEQ ID NO: 173215 - protein, 103 aa, Glycine max
  Clone ID: PAT_MRT3847_127429C.1.pep
WKKIFIFQGFLPGGPKIFPQIFQGLIFPKIGGRKPPPPLYPTKRSNRVPKGGHLCFVVQTGFPSKKTKRVETLIRGGFSFKTSFFLKRWGANGPFSPGYSLEN

SEQ ID NO: 173216 - protein, 76 aa, Glycine max
  unsure (1)..(76): unsure at all Xaa locations
  Clone ID: PAT_MRT3847_12742C.1.pep
FNQPLTWSYGKKYELPLVQXSLWGSNNLAPLSGLDSKGATAVGNHPDIIVXHPELDFDADDDHPVLIQQYELFAYM

SEQ ID NO: 173217 - protein, 518 aa, Glycine max
  Clone ID: PAT_MRT3847_127430C.1.pep
MMIQKMFDPTRSGMTRSSSHVASIYDNDFLELVWENGEIVVRGGSSNRSRKTNDERIHEDASINKRTRLNPLLYSLEDHFPPQRDSDMSTSHQSNNGQDSCQSSQSKNSCKLHEEFANLLKPVSTGNSHLQQCLPSSPLKKQRTDSTQTPRPAKVNFSNFSIPAVFLKSTTTTTTNNYQGNSATQQTKNHSSPARVEEIEALKVDKSAKETQCFQKQTSLTVERSTKLPTPAVDEHSGCEKTTEGVLGIHRSQGQTSTSEALRAKAKAYNNNNINMCHEPLLASSSVCSLGASNDPNLGFRKHEDTDDSTYLSDNDGEPEDMVKQDREGNRVKRSRNPEVHNLSEKKRREKINKKMRTLKDLIPNCNKVDKASMLDDAIDYLKTLKLQLQANFQIMSMGSGLWPLMMGFRPPQLPIPPLSAITDNRLIQMFGSPNQIPPMPMPHAPFFPIIGNSATQSHLANNTTTTAAATTNLAEHLANSLHGNATKLAPPSQISFQHHHTSTSTPTLATPFIFPQK

SEQ ID NO: 173218 - protein, 195 aa, Glycine max
  Clone ID: PAT_MRT3847_127431C.1.pep
LISFNQMIQKMFDPSRSGMTRSSSHVASIYDNDFLELVWENGEVVVRGGSSNRSRKTNDERIHEDASINKRTRLNPLLYSLEDHFPPQRDSDMSTSHQSNGQDSCGQSSQSKLHEEFANLLKPVSIGNNHLQQCLPSSPLKKQRTVDSTQTPPTPKVNFSNFSIPAVFLKSTTHQGNSATQQTNNHSSSARMEEI

SEQ ID NO: 173219 - protein, 428 aa, Glycine max
  Clone ID: PAT_MRT3847_127432C.1.pep
MAARSDHQTVPLSVLLRRELANEKIEKPEIAHGQACQSKKGEDLTLLKTECQRVVGDGVSTYSVFGLFDGHNGSAAAIYSKENLLNNVLSAIPPDLNRDEWIAALPRALVAGFVKTDKDFQEKGQKSGTTVTFVIIEGWVVTVASVGDSRCVLESSDGELYYLSADHRLETNEEERVRITSSGGEVGRLNTGGGAEVGPLRCWPGGLCLSRSIGDMDIGEFIVPVPYVKQVKMSTAGGRLVICSDGVWDSLPAEVALDCCRGMPADAAAPHIVKEAVQAKGLRDDTTCIVVDILPQEKPPVSAPQTKRPVKGMLKSMFRKKSSESSSYIDKEYMEPDVVEELYEEGSAMLSERLDTKYPVCNMFKLFMCAVCQVEIKPGEGISIHEGAPDSRKFRPWDGPFLCSSCQEKKEAMEGKRSSGRISSGSDE

SEQ ID NO: 173220 - protein, 126 aa, Glycine max
  Clone ID: PAT_MRT3847_127433C.1.pep
GHSIGYARCVTFRDHIYNDSNIDANFAKQLKYICPTNGGDSNLSPLDSTAANFDVTYYSNLVQKKGLLHSDQELFNGGSTDELVKEYSDDTEDFYEDFANSMIKMGNIQPLTGNQGEIRVNCRNVN

SEQ ID NO: 173221 - protein, 576 aa, Glycine max
  unsure (1)..(576): unsure at all Xaa locations
  Clone ID: PAT_MRT3847_127434C.1.pep
IENDHCLGGSIGYIYFSVAALSHLTLMVVELFKNSLMEDGIDDPXDVTVQLIHGXVLIGVILIKFFWWRSLFAEALGVRPLMSLLFQLMKYLFGEXHXFYDSSSIRWEPSRVSSDLSIVDLDVPFGFVFAVGATMNCYANLTVLAVVTWQVLFVSIPMIYFAIRLQRYYFASAKELMRLNGTTKSFVANHLAESVAGAVTIRAFEEEDRFFEKNLYLIDVNASPYFHSFAANEWLIQRLETVSAVVLASAALCMVVLPPGTFSSGFIGMALSYGLSLNMSLVFSIQNQCNIANYIISVERLNQYMHIPSEAPEVIEGNRPPANWPAAGRVQINELQIRYRPDAPLVLRGITCTFEGGHKIGIVGRTGSGKSTLIGALFRLVEPAGGKIIVDGIDICSIGLHDLRSRFGIIPQDPTLFNGTVRYNLDPLSQHSDQEIWEVLGKCQLQEAVQEKEEGLDSSVVEAGANWSMGQRQLFCLGRALLRRSRILVLDEATASIDNATDLILQKTIRTEFADCTVITVAHRIPTVMDCTKVLAISDGKLVEYDEPMNLIKREGSLFGKLVKEYWSHFQSAESH

SEQ ID NO: 173222 - protein, 100 aa, Glycine max
  Clone ID: PAT_MRT3847_127435C.1.pep
AFTLITIVHEKSLGSPNCAYTSTDGVFHMSAAFGGVRASLFMLSSPSSRYITSPSMYSVIPPACHKLSVCPDVAIINQFASWRQQYSTVYTSPETEHLCI

SEQ ID NO: 173223 - protein, 77 aa, Glycine max
  Clone ID: PAT_MRT3847_127436C.1.pep
PFLIPSLNLSPEKYQNSHPKYQTFVSCTKVKKNHEFNVMGLFKMRYCCSAMVIPRAGLINGKESQVGCKSSSTFTFI

SEQ ID NO: 173224 - protein, 66 aa, Glycine max
  unsure (1)..(66): unsure at all Xaa locations
  Clone ID: PAT_MRT3847_127437C.1.pep
TNRSXLXXSXNSTXHXQVRYGXXAXAWCRWXPELXXSTXTVRVXCRRPSPXXQVXEWHXXXTSXWR

SEQ ID NO: 173225 - protein, 302 aa, Glycine max
  Clone ID: PAT_MRT3847_127438C.1.pep
MARCESVSTTMPLNAKILIALIFLAFAITATTSTRILDEIETPEEPNSAAESPVVSPLPLVAESPVAEVKGVDQQHHTLSFFMHDILGGSNPTARAVTGVVTNPALNAQVAFAKPNGANLPLNNGVPQNNNNGGILNNNNLPFLTGLGGTTASVFNNNNLLNGGAGFPVTNTNQLPEGMTLQKVMFGTMTVFDDELTEGQELGSGLVGKAQGFYIASAVDGASQLMAFTAKFEENGYVDSLSFFGVHLTQVSESQIAIVGGTGKFLNAEGFAIIKTFPVIGGQQHNTDGVQTLLQLTAYLAY

SEQ ID NO: 173226 - protein, 99 aa, Glycine max
  unsure (1)..(99): unsure at all Xaa locations
  Clone ID: PAT_MRT3847_127439C.1.pep
HEHLNKPTKIASFVSFLVLLLADLILMPQRLATYYKPIKKPPMYKPSMYKPTNVKPPVYKPKSPVYKPKPTVYKPPYMKPPYXKPPYXKYPPLQDNTHA

SEQ ID NO: 173227 - protein, 62 aa, Glycine max
  Clone ID: PAT_MRT3847_12743C.1.pep
NTRGVSQREILKEKGHLRNLTFEKGKGKCTWQKKRGVDITKTFLHRLEKFRLTEWSKPASTK

SEQ ID NO: 173228 - protein, 57 aa, Glycine max
  unsure (1)..(57): unsure at all Xaa locations
  Clone ID: PAT_MRT3847_127440C.1.pep
MMAPKGLIFLAVLCFSALSLSRCLAEDTGLVMNFYXESCPQAXDVIFVHVRLLYLRD

SEQ ID NO: 173229 - protein, 248 aa, Glycine max
  unsure (1)..(248): unsure at all Xaa locations
  Clone ID: PAT_MRT3847_127441C.1.pep
RETSAAMDVEEQPSPNASDVKRFGLKNSIQTNFGDDYVFFVNXNDDWSAMAVSLSTNAVKLYSPVAGQYYGECKGHSETINQILFSGPSNPHVLCSCSSDGTIRAWDIRTFQQVSSINAGPSQEVFSFCIGGTGGNLVAAGCKSQILFWDWRNMKQVACLEDSHVDDVTQVHFVPNEQGKLISASVDGLICTFDATGDINDDDHLESVINMGTSIAKVGDFXGENYQKLWCLTHIETLGIWNWKDGRN

SEQ ID NO: 173230 - protein, 89 aa, Glycine max
  Clone ID: PAT_MRT3847_127442C.1.pep
SLRAHYSVWLYLSRWYISRTIPTVHDNISFHVLLLILVFHPFRLVFACHLRSRLPLKDVVLNSCVIQDPSQLFNPLFITQCLANTPRVV

SEQ ID NO: 173231 - protein, 348 aa, Glycine max
  Clone ID: PAT_MRT3847_127443C.1.pep
IKREDWSAMAVSLSTNAVKLYSPVAGQYFGEFKGHSETVNQISFSGPSNPHILCSCSSDGTIRAWDARTFQQVSSINAGPSQEHASAHASGTGGNLVAAGCKSQILFWDWRNMKQVACLEDSHVDDVTQVHFVPNEQGKLISASVDGLICTFDATGDINDDDHLESVINMGTSIAKVGIFGENYQKLWCLTHIETLGIWNWKDGRNEGNFSDARTIASESWNLDHVDYFIDCHYSREAEKLWVIGGTNAGTMGYFPVNYEGVATIGAAEAILEGGHASVIRSVLPMSTIPSGPTNSPSQGIFGWTGGEDGRLCCWLSDDSSESNQSWISSTLTMKPERTCKKHRHHPY

SEQ ID NO: 173232 - protein, 176 aa, Glycine max
  unsure (1)..(176): unsure at all Xaa locations
  Clone ID: PAT_MRT3847_127444C.1.pep
EKLLSEESFLRLKESGTGLHTKSVDELISMAHKFYDEVALPKLAMDFGSLELSPVDGRTLTDFMHLRGLQMRSLGKVVKLAENLPHIQSLCIHEXFKHLPSAVTKHVDTLLKTXASIASTLNFLLVGSRTEDGADQILIDDHNLRFNGTSVFVQRFGWXLNDEFHXLXKLSILRGL

SEQ ID NO: 173233 - protein, 50 aa, Glycine max
  Clone ID: PAT_MRT3847_127445C.1.pep
LRSLEITHSIAICHDGLAHAAMFPLMSSPTTSDSLREHGYAIKRGSLATP

SEQ ID NO: 173234 - protein, 81 aa, Glycine max
  Clone ID: PAT_MRT3847_127446C.1.pep
APRTGTWYCVTRAPTTFFCSHVHSCPYPNPNIYYLLIITSFTAPHMACFLLWVLGFNLMPVSNSSSLLAHSPQCVAATAFV

SEQ ID NO: 173235 - protein, 166 aa, Glycine max
  Clone ID: PAT_MRT3847_127447C.1.pep
MMVRLEKKHLVACWTWVFGMWLTSSVTGRKQTRDENEHRERKFRRDEDDREGRKFRRDEDVYGERKNLRDEDVHGERKNLRGEDDDRERKHSKDKDGRGERKHRRDDDDDVSHERKQCRRDEDDREERKQHRRDDDGRGERKHRREEEERGKKGYERESRSKRARY

SEQ ID NO: 173236 - protein, 71 aa, Glycine max
  Clone ID: PAT_MRT3847_127448C.1.pep
VKKNPTGGFIQQIYYQSNSTKGKFCPKNMMHLEFIFLFSNYKTKFKGPHFLCVQGICLNKSQPVGVIFKGP

SEQ ID NO: 173237 - protein, 62 aa, Glycine max
  Clone ID: PAT_MRT3847_127449C.1.pep
RSLATFWRPGHKCGRKWGLPYLGGTPPASKLITGSTWCFNEEIHLGKAWCVEIRITPPKREV

SEQ ID NO: 173238 - protein, 78 aa, Glycine max
  Clone ID: PAT_MRT3847_12744C.1.pep
LCLKSTFSSIIKFVFKKKEGKKKKGGREKKKKKKKKKNKKKKKKKKKKKKKKGRPPNRELGPPEINFGTGPEGGPILP

SEQ ID NO: 173239 - protein, 60 aa, Glycine max
  Clone ID: PAT_MRT3847_127450C.1.pep
ANLVFFPVRSAARLGIFPRPLPPPPLPPKWQPQPSRSIDHNHNFHQIDRHPRADSARCRA

SEQ ID NO: 173240 - protein, 53 aa, Glycine max
  Clone ID: PAT_MRT3847_127451C.1.pep
KEQTTILRCGELRQQIGKYPPYNYTNACISLFTPSHSLIQPLHIFSQHTLLSL

SEQ ID NO: 173241 - protein, 101 aa, Glycine max
  unsure (1)..(101): unsure at all Xaa locations
  Clone ID: PAT_MRT3847_127452C.1.pep
WLLSKAPRSLSHTLPPSLPLHTPSQPPPSSLNPPPFLLPSPTLTPPSLSTLPSPPFPLPKPXPNPXPSPPPPPPPPXPPPPKPHKPYILCGSHRPYSLVPT

SEQ ID NO: 173242 - protein, 354 aa, Glycine max
  unsure (1)..(354): unsure at all Xaa locations
  Clone ID: PAT_MRT3847_127453C.1.pep
THALFNQESXDKKRRLVDIVHLAMLQSKIGRVDSLDDDGFPYVGANLQSGDIIIGKCAESGADNSVKLKHTERGYVQKVVLSSNDEGKNFDAWALRQVRSPRLGDKFSSMHGQKGGLGFLESQENFPFTRQGIVPDIVINPHAFPSRQTPGQLLEAALGKGIACGGILKQATPLSTPSVDAITEQLHRAGFSRWGNERVYNGRTGEMVRSLIFMGPTFYQRLHHMSEDKVKFRNTGPVHPLTRQPVADRKRFGGIKFGEMERDCLIAHGASANLYERLFTLSDSSQIHICSKCKNVANVILRPVSGGRKIRGPYCRHCESADDIVVAHVPYGAKLLCQELFSMGINLKFETQLC

SEQ ID NO: 173243 - protein, 108 aa, Glycine max
  unsure (1)..(108): unsure at all Xaa locations
  Clone ID: PAT_MRT3847_127454C.1.pep
MTLKTKMLVQKVCLLLLSLVGVTAAPMELTSFKIVNSSSDKHNNYPKQCCNFCICKPSLLLQXTCKNIRLNPSNSNCKSCICTHSQPRQCRCLDXNDFCYKPCKSTHD

SEQ ID NO: 173244 - protein, 70 aa, Glycine max
  unsure (1)..(70): unsure at all Xaa locations
  Clone ID: PAT_MRT3847_127455C.1.pep
AIFSFLHXXXQQXGRDTLMMRAGPPKTLTNLCPSFPFPTKPQNQSTTSHAFPSTRLRHRAIYAVANAAHP

SEQ ID NO: 173245 - protein, 114 aa, Glycine max
  unsure (1)..(114): unsure at all Xaa locations
  Clone ID: PAT_MRT3847_127456C.1.pep
LIPPRDAFCGPAPRKARLICEATNLSPKQITVCWLQDGKPVQSGFTTEPVTGEGTGSRPQTYKAISTLTITESDWLNLNVLTCRVDHRGLTLWMNVYCTCAASPSTDXLAFPIP

SEQ ID NO: 173246 - protein, 107 aa, Glycine max
  Clone ID: PAT_MRT3847_127457C.1.pep
GSRGYPINLQHLSLPHTIPSISLTVCTVVCLPCSSHYLCFKCISSSNTPKIIPKNSNSSKFSFCTNPKFSWVFCPYIKSHCFIHYKSSFNNNSHTCPSYTFLYLLYL

SEQ ID NO: 173247 - protein, 68 aa, Glycine max
  Clone ID: PAT_MRT3847_127458C.1.pep
IMDLTLRGEMSWTCSSPLQSGPAWSQKIHDLGMCPELVRQDDSNMAVGVPSLHYWEELPGGEADSTCI

SEQ ID NO: 173248 - protein, 113 aa, Glycine max
  Clone ID: PAT_MRT3847_127459C.1.pep
IPVPEAAIPLFGSLGYDPNSGVRPVKRVFHPNVENELVKGFFKGEFKEEAPIFVDPEVPVFANGQLPPQKLVLGGLKLIPILLLKTKGKAFPRFCERALLLLIFPHGRFPPQF

SEQ ID NO: 173249 - protein, 229 aa, Glycine max
  Clone ID: PAT_MRT3847_12745C.1.pep
NGIPGATHASGNIFSSSLSPLVHFTIEILRSASSHAYHHSPFTTMLPCDYCHSKPAILFCRPDSAKLCLLCDQHVHAANALSLKHVRFQICDSCKTDTAVLRCSTDNLVLCHHCDVETHGAAASSHHQRHRLHGLSGCPSVTEIASALCLDFRAQDPVVPTAASGGRDEVYEQVLEIARQRNDDLGAEQLKFDESPINDVVVVDEMLMQQTPFTSLLYVPNSESEFHSR

SEQ ID NO: 173250 - protein, 158 aa, Glycine max
  Clone ID: PAT_MRT3847_127460C.1.pep
MGNSLKTPCFQLNTNSSSSSKSVKLIFWEGTSRSLKGKHIAGEIMFEFPEMMVCHADSFFIGQPIPVLSIDDKLMPGQTYFILPIDLFACNNLTVASISSLGSCPNKSPIKFGACPFEYLKGSDGRVAIKVMPEFITRLITGGDQKENNNNIAGTPGS

SEQ ID NO: 173251 - protein, 145 aa, Glycine max
  Clone ID: PAT_MRT3847_127461C.1.pep
AVVEAGLGHCLVPVGEVVFIKIIRNELTGQPEGYGYDEFVSHATAERVLQTYNATDQTFRLNWASFDIVERKPDADLEHSILDGDLDFDITDYPIQDMYHKHYPPRVRPVMHNTLRMLKVLKTCQQCLCLWRNCMTPWQCLMSIN

SEQ ID NO: 173252 - protein, 94 aa, Glycine max
  Clone ID: PAT_MRT3847_127462C.1.pep
FRVSVVVSIRSTRIRVLDNYILWTSLNIDTPSTFDPLVCLDADPSGSQLKLYYRDLQPKTDFGTRVIALDADSSLLSRINHVQKYTGMPTQKYI

SEQ ID NO: 173253 - protein, 173 aa, Glycine max
  Clone ID: PAT_MRT3847_127463C.1.pep
VFRPSTESLPSVDDDVGVAEEENCCRGIENLELWGDAVKWGSEFRLNSSEECCMACKRMCSGEGGPCMCNSWVYCGDREACGPRFGECWLKKQKDALNPDRRDSGDLVMWTSGFVFDKGEGIVGMETDHGILRIKLLPECAPHSVSYILELLALPHCVGCQLHRAESRGSFWD

SEQ ID NO: 173254 - protein, 63 aa, Glycine max
  Clone ID: PAT_MRT3847_127464C.1.pep
IIIKKQNSRAKRSEVTCVPALHCTTNYKPEKQHHPSFLPSRKEMEDVITEAAPPSRLLEEDLN

SEQ ID NO: 173255 - protein, 222 aa, Glycine max
  Clone ID: PAT_MRT3847_127465C.1.pep
MATRVIPPRILRKLRYNTATKPLNSSHPPLSPSLSPSPCLLPAPLPSPAVLRPSAAASDDLSFRDVEKLFSSVSTTSLLRSSAVLHATAVEPMVDFGTWLLRSNLMHVHGIRDLILATVRNTFFDHFCAGEDAITTAASIRHLNRAGLRGMLVYGVEDANDNDACHRNFKGFLHTIDVSRSLPPSSVSFVIVKITAICPMSLLERMSDLLRWQHKDPCFSLP

SEQ ID NO: 173256 - protein, 205 aa, Glycine max
  Clone ID: PAT_MRT3847_127466C.1.pep
MATRVIPPRILRNLRYNTATKPLNSSHPPLSPSLSPSLCIPAPPPISAVLPPSDDLSFRDVEKLFSSVPTTTLLRSTAVLHATALEPMVDFGTWLMRSNLMQVPGLSDLILATVRNTFFDHFCAGEDATTTADSVRHLNKAGLRGMLVYGVEDANNNDACHRNFKGFLHTIDVSRSLPPSSVTPSSSFSPTFLNQNPFSERIYKK

SEQ ID NO: 173257 - protein, 40 aa, Glycine max
  Clone ID: PAT_MRT3847_127467C.1.pep
GIPRVRPTRTHTCKSTKDVGGAICSITHRGFYGGCLKTQH

SEQ ID NO: 173258 - protein, 54 aa, Glycine max
  Clone ID: PAT_MRT3847_127468C.1.pep
LIWVLLKGPKPKVGGFFFFWGVFEFKEAISLMLVWRINPKNFLSVYVKVVLHYE

SEQ ID NO: 173259 - protein, 67 aa, Glycine max
  Clone ID: PAT_MRT3847_127469C.1.pep
APIAWFPNLMIMNSFFESSGYCVPLREAIVKRCLGADFSPLPLPLPFFERTESDRFIVWVTVVLVFA

SEQ ID NO: 173260 - protein, 46 aa, Glycine max
  Clone ID: PAT_MRT3847_12746C.1.pep
GNHPILQKFSKPIKISAILFILTWKIDLINSKIFLQNFFPNFKNFS

SEQ ID NO: 173261 - protein, 130 aa, Glycine max
  unsure (1)..(130): unsure at all Xaa locations
  Clone ID: PAT_MRT3847_127470C.1.pep
MERVTSSFMGSFFFWAILVLDLVLKASGNQEGDALNALKSNLQDPNNVLQSWDATLVNPCTWFHVTCNSDNSVTRVDLGNVDLSGQLVSQLEILTTWNFLELYSNKITGKIPDELGNXTKLVSLDLYLDT

SEQ ID NO: 173262 - protein, 71 aa, Glycine max
  Clone ID: PAT_MRT3847_127471C.1.pep
LEKVAETIHLLVQPGESFLLLLTGEVQKETAAEILGLHPCGFRPQHSSKLGNEFRLFSNYDPGTRLGGWEK

SEQ ID NO: 173263 - protein, 93 aa, Glycine max
  Clone ID: PAT_MRT3847_127472C.1.pep
NLGKKKIFRAGVPGKQIKGPHVIRFFPLKNFPRPGGGIPLKKSVFAPHIFSWCVGPKAPHMFFKKGVRVYAKFSWFRGAFLPSKSSNPEKDFF

SEQ ID NO: 173264 - protein, 89 aa, Glycine max
  Clone ID: PAT_MRT3847_127473C.1.pep
WLRLHQHHACCSCAVMDPRAPPPAPVPPPSPSPSIRPATLVELTLGCNVALVGWDTREEDQRLTETWLCLQPALVGQPRAWLPIMWPHP

SEQ ID NO: 173265 - protein, 59 aa, Glycine max
  Clone ID: PAT_MRT3847_127474C.1.pep
MAEFTDFVKFLQVIQSREQGYPIIVSSIPRETNALYSLRDPSEVLIFLSRLAKWRKTSY

SEQ ID NO: 173266 - protein, 334 aa, Glycine max
  unsure (1)..(334): unsure at all Xaa locations
  Clone ID: PAT_MRT3847_127475C.1.pep
RPTRPYGCEKTTEGKRTSAVNKRALREDGGGGGGGGAMRYRGVRRRPWGRYAAEIRDPQSKERRWLGTFDTAEEAACAYDCAARAMRGLKARTNFVYPTSPQPSSAXPNTSPRNPSSLNMLLFRDLIHSNPSLLSSSSTQNFHDQFYNKSTSTFSSLPVSPSLAPPSYSMNNSCGGSLSVKMNTFPTCGTNFAEKGDDGDGFFSRESSDSGLLEEIVNKFLPRTKPSKCETTFANPQEESLLLPPLVSESTLVSTGQQYYDDDMKKGFPKNEGLGVFYSDQGFPMQQFDTSNGFNSMAMENDQNIINNAENCVVEDVFQYQELLNAFAIRMQNA

SEQ ID NO: 173267 - protein, 43 aa, Glycine max
  Clone ID: PAT_MRT3847_127476C.1.pep
LPVHCFRGLSIGLLKEPHDFWYQMWIYIAVRRPIGDPKSGFEG

SEQ ID NO: 173268 - protein, 65 aa, Glycine max
  Clone ID: PAT_MRT3847_127477C.1.pep
LRMICKCLWLLNLKNVNGGLCLYMQILIKIVIGKSVRPTIRFYGLTYRLPKLLGNWKFKCSLIIE

SEQ ID NO: 173269 - protein, 126 aa, Glycine max
  unsure (1)..(126): unsure at all Xaa locations
  Clone ID: PAT_MRT3847_127478C.1.pep
ARDFLEAYRPVSKGDLFLVRGGMRSVNFKVVETHPVEYCVVAPDTAIFCEAEPFIRDDEQILDELGCDYVGGVTKQMAHICELFELTLTHLTFSIIIGATPPNGILLYTTPKIWXTLIARARANET

SEQ ID NO: 173270 - protein, 84 aa, Glycine max
  Clone ID: PAT_MRT3847_127479C.1.pep
KIWSIYCLLSQLFPIVEKKRRCYTIKKGKKNFVNCLFMGIPALSNPNNGQHILRITDPISLAGPTEDDVIKTRELEKYLQGVGL

SEQ ID NO: 173271 - protein, 108 aa, Glycine max
  Clone ID: PAT_MRT3847_12747C.1.pep
MATKAIEQPAGVGFDFSNYARNQFLGDRLNGQPKATSTGTTIVGLKFGGGNSGEEEGICLGADTRATGGPIVADKNCEKIHYLAPHMRCCGAGTAADTEFVTNLISSN

SEQ ID NO: 173272 - protein, 82 aa, Glycine max
  Clone ID: PAT_MRT3847_127480C.1.pep
LALKKQRRCVGVGVGAGDRGRDKAYKITYHLITLLDPELSFYCHISPSIRSLHCYRDWLTSEGSQSDPSPEWTVAAYSYTGL

SEQ ID NO: 173273 - protein, 45 aa, Glycine max
  Clone ID: PAT_MRT3847_127481C.1.pep
DLCKSVEDIWEHPNLEGINTEDRNKSWPYLEDMERIMSSKKSPAK

SEQ ID NO: 173274 - protein, 83 aa, Glycine max
  unsure (1)..(83): unsure at all Xaa locations
  Clone ID: PAT_MRT3847_127482C.1.pep
AHTKAAKAIKLHPATLEVMRXSVRKTHTAQAFXGSPWTWLYRNKYLSHFSGEPSSYLTGLIPINYSLYTAKLSADPSTLARNR

SEQ ID NO: 173275 - protein, 159 aa, Glycine max
  Clone ID: PAT_MRT3847_127483C.1.pep
DTKVMQNSTDPPSKRSTVEKRMDKIIYFLFLVLFLISFIGSIFFGIATRKDLENGVMKRWYLRPDDTTIYFDPKKAPVAAMLHFLTALMLYSYLIPISLYVSIEVVKVLQSIFINQDLHMYYEEADRPAHARTSNLNEELGQVDTILSSRSSRFGSSRP

SEQ ID NO: 173276 - protein, 158 aa, Glycine max
  Clone ID: PAT_MRT3847_127484C.1.pep
MAASALYNAHMFLLPPLSHKTRKPFHSLCFNPPPSISIPRSKFYGATVAATKLPRRIFRGHGLVADDSGIAPEPESPYSEAGAGIDLNLPRRSLLVQFTCNLCGERTKRLVNRLAYERGAVFVQCAGCLRLHKLADNLGLITEYDFREKINKDSETDQ

SEQ ID NO: 173277 - protein, 76 aa, Glycine max
  Clone ID: PAT_MRT3847_127485C.1.pep
TYTSPYFRFGFSWFWLFGWFLFHGFLILMVLPGAKKPIKEVGVGIPYSWLVTGLIFTLRKAMVPMGKGWLTLPLNL

SEQ ID NO: 173278 - protein, 54 aa, Glycine max
  Clone ID: PAT_MRT3847_127486C.1.pep
DDHVNHIVVEVSDIFLDLQLGSLSQKLCPFISPRILAQYMNLLQYAHALFTLLH

SEQ ID NO: 173279 - protein, 62 aa, Glycine max
  Clone ID: PAT_MRT3847_127487C.1.pep
NYLSILNSIVTPILEHQNKILEGYYRVSTKFSLFCKLKVKTPAFIQKTTKEYGIIISKKQKN

SEQ ID NO: 173280 - protein, 54 aa, Glycine max
  Clone ID: PAT_MRT3847_127488C.1.pep
NLHCSYAKNYIIHLGFYHISVTQGIEELLNNWSHSKLHWRNKKFENHVSCIKSI

SEQ ID NO: 173281 - protein, 80 aa, Glycine max
  Clone ID: PAT_MRT3847_127489C.1.pep
RCAPPLKKKKTTPAPPNNFQDKEIKRRKRCLSIKKAGGSKKTCRKNPKREINLWVKTQRKQREPKKKTRAPGGGPLGTNP

SEQ ID NO: 173282 - protein, 159 aa, Glycine max
  Clone ID: PAT_MRT3847_12748C.1.pep
MGWKAAEKLIRHWKVLRGDNVMIIRGKDKGETGNIKRVIRTQNRVIVEGKNLVKKHIKQGQGHEGGIFTVEAPIHASNVQVIDPVTRKPCKVGTKYLEDGSKVRVSRGIGASGSIIPRPEILKIRTTPRPTVLGPKDTPMDLVLEKTYDAKTGRGMPEL

SEQ ID NO: 173283 - protein, 91 aa, Glycine max
  Clone ID: PAT_MRT3847_127490C.1.pep
PASPYAGCLPPDLGANAGGGGYQTQPDLYRYQHGLTNPPYWSTTYGPENIHSQCLYNSYMGHQYLSIFGLPEAENQLHILIRQVGQAIPRC

SEQ ID NO: 173284 - protein, 185 aa, Glycine max
  Clone ID: PAT_MRT3847_127491C.1.pep
QRETEEQNLKCKVCVCVAMADVSDSQEQPVLDSAELEMKKKRLLVELESALGGEKSVTAQASSSSSSSLGLGIEVIDETALLDSVAKKNGGSRRTKNNNNGHNHKKSKPSNKIGNKKYSRKELESLRFVNMARQRKFWKAIHAAFQTTVAMEYDALASSPLPHNKPILSVAATNGRWRYMNVFVH

SEQ ID NO: 173285 - protein, 103 aa, Glycine max
  Clone ID: PAT_MRT3847_127492C.1.pep
ARLTGLVSLGDRDQLPSQSDACLALSNSPVSQASQADHLVQGFQSEYFQQNVCLDRASNHLDPMIHLQVILCESARQGEKDMPDSQEKDSQLEPNRLEGNSAN

SEQ ID NO: 173286 - protein, 154 aa, Glycine max
  Clone ID: PAT_MRT3847_127493C.1.pep
MSGPLDRFARPCFEGFSGHDERRERKSDFENSEDDRRTRIGSLKKRAINASSKFRHSLRKKSSRRKTASRSNSVSIEDVRDVKELQAVDEFRQALILDNLLPPRHDDYHTLLRFLKARKFDIEKAKHMWANMIHWRKEYGTDTIMEDFEIRELN

SEQ ID NO: 173287 - protein, 90 aa, Glycine max
  unsure (1)..(90): unsure at all Xaa locations
  Clone ID: PAT_MRT3847_127494C.1.pep
SXGVVSVPXLRXXXRXNIXXRVHSXTXPXHLXAARRLHLGCTDIIVGVXPXSXRVLAAXXTXIXTSHXXRXIRXPQTPSEIPAVGNXKXP

SEQ ID NO: 173288 - protein, 142 aa, Glycine max
  unsure (1)..(142): unsure at all Xaa locations
  Clone ID: PAT_MRT3847_127495C.1.pep
IIWTVKHTERSIAETGLTLLLEMXKKLQASQGCYRTYRPYXKTIEHEXFAVLTDTFXMPGFKFNVSGAKTLVLTAETGALPTFWDAXTIDPANYALLTRVYYKPLXSTSFPSITGYEVTQXANGLCESTNDLPTFKTHALDY

SEQ ID NO: 173289 - protein, 75 aa, Glycine max
  unsure (1)..(75): unsure at all Xaa locations
  Clone ID: PAT_MRT3847_127496C.1.pep
PVVKRGPRKSLSSCFTFKCGGSKMMMMKLTHKNSACVVSVLRFCTVTREKIKHAPGTHNGHRDFQXGXXXXXRGA

SEQ ID NO: 173290 - protein, 101 aa, Glycine max
  unsure (1)..(101): unsure at all Xaa locations
  Clone ID: PAT_MRT3847_127497C.1.pep
PPPPNRGGPALNFPGFKXRIFNFPGGGGNPAKQAFYRAIVNMDTLGEGSYKEGPLFNPRGSDNPPPWTFDKQGDGANKIKKAPPQGGGGQKLTNPTRGVRP

SEQ ID NO: 173291 - protein, 95 aa, Glycine max
  unsure (1)..(95): unsure at all Xaa locations
  Clone ID: PAT_MRT3847_127498C.1.pep
LALPLAATVNCADHTGANNLYMHXLNGIKGRXNRLPPACVRDMLMATAEKGQPDLPPTVLAAGIRRQRTPXQLRDCDYMHFEDNAGVLFNSKGEV

SEQ ID NO: 173292 - protein, 151 aa, Glycine max
  Clone ID: PAT_MRT3847_127499C.1.pep
QRYAVQSRRDVLALPMKEYASRSQIKHPLFTMSEGDEDPLNITASGDLILDVAHEENAQRYSNRVDTKTLQHKSRYFENLLIDRFNEGQQLSRDLEAMLLISYSHIAHGSSELLPHVPIVNVGRIGISKSSAMQALLADFLRALHGLDLSV

SEQ ID NO: 173293 - protein, 159 aa, Glycine max
  Clone ID: PAT_MRT3847_12749C.1.pep
MGWKAAEKLIRHWKVVRGDNVMIIRGKDKGETGTIKRVIRSQNRVIVEGKNLVKKHIKQGQGHEGGIFTVEAPIHASNVQVLDPVTGKPCKIGHKYLEDGTKVRVSRGIGSSGSIIPRPEILMIRTTPRPTVLGPKDTPMDLVLEKTYDAKTGRGMPEL

SEQ ID NO: 173294 - protein, 92 aa, Glycine max
  Clone ID: PAT_MRT3847_1274C.1.pep
LENPIHAAAASALAFSVGALVPLLAASFIRDYKVRLGVILGAVSLALVVFGWLGAVLGKAPTFRSCVRVLLGGWLAMAITFGLTKLIGSSGL

SEQ ID NO: 173295 - protein, 63 aa, Glycine max
  Clone ID: PAT_MRT3847_127500C.1.pep
AISSQESSMLGFPGIAFRQIRKRKSGGLAYRSNSYSRADTITPPSRDTRPKALTPRDSKRVDP

SEQ ID NO: 173296 - protein, 115 aa, Glycine max
  unsure (1)..(115): unsure at all Xaa locations
  Clone ID: PAT_MRT3847_127501C.1.pep
LNQNRTPEAGRHQXAGHMSLIQSDAVYQTLCAPGVYPXNLNNMKELREMTAKHSWTPQPTCPDKGRLLNMLFKLINAKNTMAIADYTAYALLATDLAVPADGKISAMAINRENYE

SEQ ID NO: 173297 - protein, 223 aa, Glycine max
  unsure (1)..(223): unsure at all Xaa locations
  Clone ID: PAT_MRT3847_127502C.1.pep
MEWFRCPVSGLLLPLFFFLAFFIFFPRKEQNYVTHLPPPSFLSTIKLNHTNITTFSPSPLPQPPPPPPLELLSIFAPANESYNNTSTVLSGVIKKYPSLDKIEEGLARARASIRESARFINYTSPTREKIVPKRSIYWNARAFHQSQKEMLKRFKVWVYEEGEQPLVHYGPVNNIYSIEGQFIDEMDNYHKWSHFRARNPNQAHVFLIPFSIVNIXQYVYNRN

SEQ ID NO: 173298 - protein, 64 aa, Glycine max
  unsure (1)..(64): unsure at all Xaa locations
  Clone ID: PAT_MRT3847_127503C.1.pep
LTCTIHNKNSAKASNFCHYLGSILVVNLRXVTHSSHQPSEQDQIVARIKSTXTXXXSIICWRLY

SEQ ID NO: 173299 - protein, 62 aa, Glycine max
  Clone ID: PAT_MRT3847_127504C.1.pep
NNPNFFVQDKGKSQSLTNHYHNLLYFPTIFFSLAVSLISTSQGKFKTTQKKIKIIHLILIIS

SEQ ID NO: 173300 - protein, 90 aa, Glycine max
  Clone ID: PAT_MRT3847_127505C.1.pep
LGISVGFPESSWIFLGFAWLRVIIFEPGARKGCPLSVTSSYKGSCVMFAGGWICLIQSVVRVCGFVDVGGGVTPNAFTVCRDSGKSLIIG

SEQ ID NO: 173301 - protein, 54 aa, Glycine max
  Clone ID: PAT_MRT3847_127506C.1.pep
IPFVNQKNVEDLSVSKIFNKYGFSSKTKVLVLVEKVNPYLVSLIRKYFPPKVIG

SEQ ID NO: 173302 - protein, 139 aa, Glycine max
  unsure (1)..(139): unsure at all Xaa locations
  Clone ID: PAT_MRT3847_127508C.1.pep
MAPNNNRTKGSHFPLLAFLFLCLLAPLLFFFFASPLHDQGDDSAVSSEKVARSKEWQALQDLKLLFSKEVLDVIVSNTNDVGPLSLENXRKNNLSASWRVAGLRTSNAMNQLNQPADNVREEKHNGKERRFSVDRAQWT

SEQ ID NO: 173303 - protein, 78 aa, Glycine max
  Clone ID: PAT_MRT3847_127509C.1.pep
CHKSEGRRSELRIQISLFHQENPLRSKTENPTILMWLLPPVRPNSPHPHRHHPSPPSAPPGFQCESSTSSSSCSTSSE

SEQ ID NO: 173304 - protein, 332 aa, Glycine max
  Clone ID: PAT_MRT3847_12750C.1.pep
MESCVPPGFRFHPTEDELVGYYLKRKINSLKIDLDVIVEIDLYKMEPWDIQDRCKLGYEQQNEWYFFSHKDKKYPTGTRTNRATAAGFWKATGRDKAVMSKNRIIGMRKTLVFYKGRAPNGRKTDWIMHEYRHQTSEHGPPQEEGWVVCRAFRKPSPSHRPGFDHPWCSTSSQQQHFFRDQIQSYSSRPLSIADILDETNNVPHPNAEGTSFSHPFSSDHQQHLNNLLSNQTVAIMDKQLIELPQLDSPTASLAIKECNQQQHNGLTNEEYCSDERSNNSNAQGIDWKSLDNLFGSQLSDNAAYFSHPNLPLMMPHNHDQASHILGCFPDSS

SEQ ID NO: 173305 - protein, 115 aa, Glycine max
  unsure (1)..(115): unsure at all Xaa locations
  Clone ID: PAT_MRT3847_127510C.1.pep
LRVGANNAFLITMPNAAASMYRYLVGDLLDEDNNMTSTYIERTAYVKITHGNFADDTNXFEDFPHKSEQLGETQDNKVLKLSQEECLTCRSTNVRAATTLVVERRAYVRAIVHDS

SEQ ID NO: 173306 - protein, 93 aa, Glycine max
  Clone ID: PAT_MRT3847_127511C.1.pep
WQIEQNVMSMDEAYKMMQIRLVRFVLFSVQRGKKISMQKLFSLFLDTLELQLCHILYFLVFTFQFCLKGCGQFLPIISFAIVFYPENSLSLNH

SEQ ID NO: 173307 - protein, 349 aa, Glycine max
  Clone ID: PAT_MRT3847_127512C.1.pep
GYSSSGEVLNCNAYEVATACALAVRADKLICITDGPILDESGHLIRFLPLQEADMLIRKQVEESETAANYVKAVAEESFKSLKNFNGAVHSPRNGKPFSECHNSTFHNGVGFDNGNGLSGKHGFAIGGQESLSRTNGYLSELAAAAFVCRGGVQRVHLLDGTISGVLLLELFKRDGMGTMVASDLYEGTRMAQVTDFSGIRQDDRRVEASGILVKRTDEELLKTLDSFIVVEREGHIIACAALFPHFEEKCGEVACIAVSPDCRGQGQGDKLLDYMEKKASSLGLNMLFLLTTRTADWFVRRGFSECSIDYLPEKKRRMINLSRNSKYYMKKLLPNISRLEVGVKSASS

SEQ ID NO: 173308 - protein, 231 aa, Glycine max
  Clone ID: PAT_MRT3847_127513C.1.pep
MEKMRVIVITVFLFIGAAIAEDVGIGLLSEAEAHVSPKLKKFITPCTSHVGETCSTTSSSGSEALMQNQGGLALCLFDSMERCLVDHGAQLYQTSVTNLQVEPSEVFPRKNNPQGGRKSKLDDHQVQPLSFRLPPFRLPPMPKLGPTSPIIRTIPSPPIAPRDLSLIETIQLRTALRTCTHVTARTCLTAPNVATSDLEACLTPSMNQCIYPRGAEYGINDNMLEVLLVEE

SEQ ID NO: 173309 - protein, 224 aa, Glycine max
  Clone ID: PAT_MRT3847_127514C.1.pep
MEKMRVIVITVFLFIGAAIAEDVGIGLLSEAEAYVSPKLKKFITPCTSHVGETCSTTSSSGSEALMQNQGGLALCLFDSMERCLVDHGAQLYQTSVTNLQVEPSEVFPRKNNPQGGRKSKLDDHQVQPLSFRLPPFRLPPMPKLGPTSPIIRTIPSPPIAPRDLSLIETIQLRTALRTCTHVTARTCLTAPNVATSDLEACLTPSMNQCIYPRGAEYGSPPIRA

SEQ ID NO: 173310 - protein, 85 aa, Glycine max
  Clone ID: PAT_MRT3847_127515C.1.pep
STGLILGQATEDAVIELTNLPSFLSIEIMIYTLVKSHLTHADPTHYVIYFLYTFLTIPFLLAFEHVKIHGITRGYQSSTDSIESV

SEQ ID NO: 173311 - protein, 57 aa, Glycine max
  Clone ID: PAT_MRT3847_127516C.1.pep
QWFTFTVELSVDFIINYVKVNIRPVSKINYDITLYLIKANAWAYAWVDPGFPEGYVQ

SEQ ID NO: 173312 - protein, 80 aa, Glycine max
  Clone ID: PAT_MRT3847_127517C.1.pep
FTMPHPITGHQILTSRRGQMNDNHTQWMISEKFFNTRCVWLYFLCALFPAELGDWFCVWMINTSLRYNPSYFTGSTGPDL

SEQ ID NO: 173313 - protein, 75 aa, Glycine max
  Clone ID: PAT_MRT3847_127518C.1.pep
HHSLNFDMHKKRESHKIKAIGFTFIGFIWCPKVRVLAEEASSFNISIAFPEGLRREKKKEGKDRFDGSKRITYNT

SEQ ID NO: 173314 - protein, 100 aa, Glycine max
  unsure (1)..(100): unsure at all Xaa locations
  Clone ID: PAT_MRT3847_127519C.1.pep
GXXXRSVLXXPXGXXLYXCXXXXXXXCXLXPKXXXXXXRFXLXXFXFXXXXXXXKFXXFGXLXXXFFFXXXSLVVXXXXXXVLXLXXSRXIXXXSXRXCX

SEQ ID NO: 173315 - protein, 152 aa, Glycine max
  Clone ID: PAT_MRT3847_12751C.1.pep
LHQMSIGLFRLIGSLGRNMIVSNTFGSFAMLVVMALGGYIISRDRIPVWWVWGFWISPLMYAQNSASVNEFLGHSWDKKAGNQTTYSLGEAVLKERSLYAESYWYWIGLGAMVGYTILFNILFTIFLANLNPLGRQQAVVSKDELQLGKIKG

SEQ ID NO: 173316 - protein, 59 aa, Glycine max
  Clone ID: PAT_MRT3847_127520C.1.pep
RQPNAYMTQARTGHINISKKTKPEALTRLLMTRPTYLKDEDKTYTCTPVAGRSTQPTVQ

SEQ ID NO: 173317 - protein, 106 aa, Glycine max
  unsure (1)..(106): unsure at all Xaa locations
  Clone ID: PAT_MRT3847_127521C.1.pep
LLRPRLWPRLVFSSCCRCWRRSSSFSPGPARLPAPSAFSSSVWLFRWFPRGPWFRLAPARSLFPFPPFRPLSSWGAPVGFLSXAGGFGGGPRMAPVLGVAVPGVNK

SEQ ID NO: 173318 - protein, 82 aa, Glycine max
  Clone ID: PAT_MRT3847_127522C.1.pep
MSKLATLLTLALLLSFNLIYASRPNPSLISVSSLHGDVATTKAEEIDGESCEEGTEECLARRTLAAHLDYIYTQKDKLGQHF

SEQ ID NO: 173319 - protein, 63 aa, Glycine max
  Clone ID: PAT_MRT3847_127523C.1.pep
FYNKFAPLQSGIMSFGWNCKHPDMIYMVFIGPPVMETTSTMATGNEAGSAIIMGILTFIIITG

SEQ ID NO: 173320 - protein, 52 aa, Glycine max
  Clone ID: PAT_MRT3847_127524C.1.pep
FCPIDSSIITCLSYPTQSQPTLSYVISFKPNKLIGSSMVSRVKLCASVIIRV

SEQ ID NO: 173321 - protein, 391 aa, Glycine max
  Clone ID: PAT_MRT3847_127525C.1.pep
MASPCLRHAQLSSFPPPARLRSGAYGGAARLVALPGRRAGDIVDLEITKEVVTENKEDSNANAEKDVVVSKKDDNNQSSPNTKVIEGSSKATPKRSEKGVKKANGTYRTRRNRRELGLKGIEERIAAGLDNPELGPFLLKQTRDMISSGENPRKALDLAVRALKSFEICADGKPSLDMVMCLHVLATIYCNLGQYNEAIPVLERSIDIPVLEDGQEHALAKFAGCMQLGDTYAMMGQIENSLLFYAAGLEIQGQVLGETDPRFGETCRYVAEAHVQALQFDEAEKLCQMALDIHRGNGAPASIEEAADRRLMGLICDSKGDYEAALEHYVLASMAMAANDHEVDVASVDCSIRDAYLALARYDEAVFSYSKALTVFKSTKGENHTTVASVY

SEQ ID NO: 173322 - protein, 34 aa, Glycine max
  Clone ID: PAT_MRT3847_127526C.1.pep
SPRFDYILTHHAMVVADNGTHVNRHLISNSLGKP

SEQ ID NO: 173323 - protein, 45 aa, Glycine max
  Clone ID: PAT_MRT3847_127527C.1.pep
HGAAMRTNTFTLRMNTGYGVLTREVTCSSRRLAVEAHNSDSDFIP

SEQ ID NO: 173324 - protein, 58 aa, Glycine max
  Clone ID: PAT_MRT3847_127528C.1.pep
IFSTIPNNCSERHLIIIISCTIHIQSKALILKHYSTINITHMIHHFAQELPLLNPSSK

SEQ ID NO: 173325 - protein, 139 aa, Glycine max
  unsure (1)..(139): unsure at all Xaa locations
  Clone ID: PAT_MRT3847_127529C.1.pep
MLSTVMSPLLTTPTTSTMRLDLHSSGSGVCQFKTALLWRLENENLTTHVRRKTSDAREMQTFYGQYYEKYIQALDKAADKVRAQLTKAYQTAVVLFEGLKEVNRTEYIPVSDEIMEAHXRLIEEMKQLYAPYNIXPLDP

SEQ ID NO: 173326 - protein, 73 aa, Glycine max
  Clone ID: PAT_MRT3847_12752C.1.pep
ERGEIPMELSPCRTNQVPLISLTSHSRVLSSVNAKVCYSGPVSRIPIVSLQVPGSRLLFSTNACKKGCSHTIP

SEQ ID NO: 173327 - protein, 79 aa, Glycine max
  unsure (1)..(79): unsure at all Xaa locations
  Clone ID: PAT_MRT3847_127530C.1.pep
GTALKRHGPSYLGAKDDTDRKHDECSSSVRQADGEDNMEPKTRPACDDREPEEIPCLQRHXIHHMRTKLDLSAEHHYER

SEQ ID NO: 173328 - protein, 78 aa, Glycine max
  Clone ID: PAT_MRT3847_127531C.1.pep
QIGKPIPHSCLKPHSILHCITHSNLALFPYSAHLFKKKWLIGLLTHPPLYAFSQMGTKKKNQFLGLSLCYYLVGQHKT

SEQ ID NO: 173329 - protein, 68 aa, Glycine max
  unsure (1)..(68): unsure at all Xaa locations
  Clone ID: PAT_MRT3847_127532C.1.pep
DLLLNWNKFGSESRNLGDLLYRMNGXSVLKSSALHPPXEYMLQQKSHRGRFDTIKTSGKIPTRNPAGG

SEQ ID NO: 173330 - protein, 32 aa, Glycine max
  Clone ID: PAT_MRT3847_127533C.1.pep
KFPLLTSSKVTHNLISTNLEHLFISLLYFLIL

SEQ ID NO: 173331 - protein, 73 aa, Glycine max
  unsure (1)..(73): unsure at all Xaa locations
  Clone ID: PAT_MRT3847_127534C.1.pep
KFFHPVIESXVLLLFSLLGLSSRPSITTHRSILDLDLTKFTTQHQVPXXXXXWKSEXGXVXDXEEEEVKXIEI

SEQ ID NO: 173332 - protein, 83 aa, Glycine max
  unsure (1)..(83): unsure at all Xaa locations
  Clone ID: PAT_MRT3847_127535C.1.pep
ESXXXRXRRXAXSQSXLXKMXXXHQHSHXSAGIQVGXAAGNLLTRTWHPDRRHDXSDSNFXVAHDXSTLLQRNGLAALPVXFX

SEQ ID NO: 173333 - protein, 213 aa, Glycine max
  unsure (1)..(213): unsure at all Xaa locations
  Clone ID: PAT_MRT3847_127536C.1.pep
MVDSGSDFAGIICSICYEPLNPINEDLQSVSICGHVFHELCLQQWFEYSSKGKKHTCPICKQGCRASDACRLYFQSVGDANNSVKPSKCFELEEDAGVLRREVKRLEVKVSGLNSQVEGQTKELEGLNEELCTCKEQAKIETAXKNEALNQKASIQFQLQMKSEELEKSTXECFRLKERNMALAKELAALKXVSDLDIDERRVXKLATLGNGA

SEQ ID NO: 173334 - protein, 52 aa, Glycine max
  Clone ID: PAT_MRT3847_127537C.1.pep
NHSSPIDTSTLGSSQNPHTIIDSQIYMLMKLAVHRCKHVHILGTQLDIPKSG

SEQ ID NO: 173335 - protein, 129 aa, Glycine max
  unsure (1)..(129): unsure at all Xaa locations
  Clone ID: PAT_MRT3847_127538C.1.pep
KRHTLRTYIRLTDGVDKSSATWQFIKLADCDFLKRNFKQMANVLLVASEDKAXLWSQLYYVTSYNLKMQDAYLVNLVNLLRELYMRNPDEAPQLRRKAVSRVEWLQTSDVPTIAQIEEFHSMHMMMNAP

SEQ ID NO: 173336 - protein, 24 aa, Glycine max
  Clone ID: PAT_MRT3847_127539C.1.pep
EFPLIISSSVKLHTDISVLFNSMI

SEQ ID NO: 173337 - protein, 50 aa, Glycine max
  Clone ID: PAT_MRT3847_12753C.1.pep
PRLWYFQQDHGYYEKINPWFLYKVAIDGGVWLIRARIPPSPGGRSIISCI

SEQ ID NO: 173338 - protein, 44 aa, Glycine max
  Clone ID: PAT_MRT3847_127540C.1.pep
AAQVLVAWTCQGAGYQRFPPRMKSGYGARPSQVKCARSKPAAEA

SEQ ID NO: 173339 - protein, 115 aa, Glycine max
  unsure (1)..(115): unsure at all Xaa locations
  Clone ID: PAT_MRT3847_127541C.1.pep
IQFDQSGRIXGAAIRTYLLERSRVCQVSDPERNYHCFYMLCAAPPEDVKKYKLGDPRMFHYLNQSNCFELEGVDESKEYRDTRRAMDIVGISSEEQVFCSDFICSFSGSSSLTYD

SEQ ID NO: 173340 - protein, 50 aa, Glycine max
  Clone ID: PAT_MRT3847_127542C.1.pep
YLCLDEVYVRENCFLVVSFVRFYLVFENYVIFFLIFFFLCLLMFFRLTIE

SEQ ID NO: 173341 - protein, 413 aa, Glycine max
  Clone ID: PAT_MRT3847_127543C.1.pep
GASKSDSDEEDNTGTSGSLDEESASDYSSEQSITASGEVTGSDESVSGNEGEDNADPLIQISDTVNVCENQNGGAPSGAAGFRDLMSTKSLESWLDEPARSSKGSEIEQSRVRRSSARITIGNIGGRGLKPKCYTLLDPVNGNGLKVNYSFSSETSSISSHLVCLEVLFENCSLEPMFDIVLIEEDYSKSSDSTDRTSSPTENTLKFHVNKPALVSMEEIPSLEPGETTNRTLLVRFHHHLLPLHLALFCNDKKFPVKLKPDIGYFIKPLPLSIEDFRDKESRLPGMFEYVRSCTFTDHILELNKRSNSLTEDKFLVICETLALQMLSNANLSLVSVDMPVAANLDDASGLCLRFSSEILSNSMPCLITVTVEGKCSDPLIVSVKVNCEETVFGLNFLNRVVNFLVEPSVTHL

SEQ ID NO: 173342 - protein, 71 aa, Glycine max
  Clone ID: PAT_MRT3847_127544C.1.pep
LDVRLSSSQHTSRVVVPLVSHDAKHVLHLLSHTREAGHHYQHIRIPIHDGVQHTHNVLPILATRHVKFVTT

SEQ ID NO: 173343 - protein, 50 aa, Glycine max
  Clone ID: PAT_MRT3847_127545C.1.pep
NRGSDHRQHLELIFQLQHPYRICLERPHINIRNDAAGSPSGDAGETQASV

SEQ ID NO: 173344 - protein, 61 aa, Glycine max
  Clone ID: PAT_MRT3847_127546C.1.pep
CNCSILTRKATKKTVRGEPGPKGPLHLRHRQSRLIPALRGGYGQLGVSTFTKASFYKKGCR

SEQ ID NO: 173345 - protein, 68 aa, Glycine max
  Clone ID: PAT_MRT3847_127547C.1.pep
MHVSGVLDRVAVHDLVIFVHRVRYCLSVSELNVVREYEICGPPTCIAPTDQFIVNVEVEVHKFISKKK

SEQ ID NO: 173346 - protein, 218 aa, Glycine max
  Clone ID: PAT_MRT3847_127548C.1.pep
RYSIYRLLILGLSEDETVRRVAAGAIANLAMHEANQELIMAEGGITLLSMTASDAEEPQTLRMVAGAIANLCGNDKILMKLRSQGDVKALLGGVRCGQIARNDMVARGIANFAKCESRASSQGIKSGTSFLIEDGALPWIVHNANNEAAPIRRHIELALCHMAQQEVNAKDMINGGALWELVRISRDCTREDIRNLARRTLTSILPFKSELRRLRIDV

SEQ ID NO: 173347 - protein, 112 aa, Glycine max
  unsure (1)..(112): unsure at all Xaa locations
  Clone ID: PAT_MRT3847_127549C.1.pep
CLTEFNSRASVDVRRTHRIGGMIKMVATVGISENTGISLACAMNRSFRGRASSDIYTICSQDCELRNPACTKSMTMSFNPNPCSDAWSLEFLERTXGYHCDVICDTGWTASP

SEQ ID NO: 173348 - protein, 274 aa, Glycine max
  Clone ID: PAT_MRT3847_12754C.1.pep
MTVAKFATAGIRGVPSVRRASSQTAAASEVSPQAAAWDDVDDWEVADGGEGTPPRVRGGVPSFQEATSATTELKHAIDKIYLSSNSSECDGCSLSGHVSVMSPSHSELENKSRVTEAILNPSESNRALQAFQLLSECPEAQSVVASIACDPNIWNAIVQNPALQDFFQSQQTADFEVEETHDQRLGNLPYSDSVYAFIDSLNVLQNVKFTVSEMLSRVPNYLQNMFGFLSGQTSSAVIDARGNTKANFIDPITMGGTFMGLAVLVVMVIMLKRA

SEQ ID NO: 173349 - protein, 293 aa, Glycine max
  Clone ID: PAT_MRT3847_127550C.1.pep
MNELSLLKGSFSVLGNCAKCVDNYKLCNLSCIACGLYALPLFIKVIQGWDPLQNPSHGLELVSEWKALLQEELDSVDMWDVLTPYTQLVSEVVLIAIRKSCINTWQVQDPEPMLWFLESWKKLLPASVLATILDNIVMPKLSSAVDTWEPHRETIPIHTWVHPWLTSIGALVGGLFDSASWEQLMLRFIVPKLQLVLQEFQVNSESKNVDKFCWVMNWASVIPIHLMVGMMDKFFKLKPGRMHNGHQIYGFGNVGTTIDFLNQKVYAQNEETWSLESLQGLLELHNKSLSKRC

SEQ ID NO: 173350 - protein, 102 aa, Glycine max
  unsure (1)..(102): unsure at all Xaa locations
  Clone ID: PAT_MRT3847_127551C.1.pep
WERLVYKTTKKRASGPKCPXNGKRIKGNPHLRPAEYKRSRLPRKRSNVICGYPGVLLGSAARERLTRALLAEEEKIVDKGPERPRRVKGKAGPHKGKFEKTP

SEQ ID NO: 173351 - protein, 508 aa, Glycine max
  Clone ID: PAT_MRT3847_127552C.1.pep
GDKFFWFSDVEFARETLAGVNPYSIQLVKEWPLTSKLDPQIYGPQESTITREVIEPQIITYGTIEEALKEKKLFMLDYHDLFLPYVSKVRKIKGTTLYGSRTLFFLTDQGILKPLAIELTRPPMDGNPQWKQVFQPSCDSTNLWLWRLAKAHVLAHDSGYHELISHWLRTHCVVEPFVIATHRQLSSMHPIYRLLHPHLRYTMQINSLAREALISANGVIEISFLTNKYSMELSSVAYDQLWQFDSQALPNDLISRGMAVADPNAPHGLKLTIEDYPFANDGLLIWDAIKQWVTDYVNHYYPTPSIIESDQELQAWWKEIKTVGHGDKSEEPWWPNLNTSKDLIDIITTIAWVASGHHAAVNFSQYAYGGYFPNRPTIARNKMPTEDPSEEEWGNFLNKPEQTLLECFPSQIQATLVMVVLNLLSDHSLDEQYIGKYMEPSWAENPTIKVAFERFNRRLKEIEGIIDSRNGNSNLKNRHGAGIMPYELLKPFSGPGVTGKGVPYSISI

SEQ ID NO: 173352 - protein, 51 aa, Glycine max
  Clone ID: PAT_MRT3847_127553C.1.pep
CAQHKQKKFDRPWEPRARSMLEPIIINVHPVIGPREFLDLFRFSRKTFLCV

SEQ ID NO: 173353 - protein, 87 aa, Glycine max
  Clone ID: PAT_MRT3847_127554C.1.pep
THCVVEPFVIATHRQLSSMHPIYRLLHPHLRYTMQINSLAREALISANGVIEISFLTNKYSMELSSVAYDQLWQFDSQALPNDLISR

SEQ ID NO: 173354 - protein, 64 aa, Glycine max
  unsure (1)..(64): unsure at all Xaa locations
  Clone ID: PAT_MRT3847_127555C.1.pep
KXGLPTTTNNFAIRIGEYLHSLAVTGTRIVHYHKIGVLTWGEKASPFHLYTDGSTLVYNKHKLF

SEQ ID NO: 173355 - protein, 78 aa, Glycine max
  Clone ID: PAT_MRT3847_127556C.1.pep
PLYTSYALGLLPYFGTRKLTSLFRDHYLSLSSILEYFLYGNIPFLTLVMLSTVLMDLFLILFKVPWVCIFFHKRINKC

SEQ ID NO: 173356 - protein, 43 aa, Glycine max
  Clone ID: PAT_MRT3847_127557C.1.pep
RLPLTNQKILHRTNPTITKKKKRKKKSKLNKEGEGTWVLLGLT

SEQ ID NO: 173357 - protein, 97 aa, Glycine max
  Clone ID: PAT_MRT3847_127558C.1.pep
ESRCPPYTTKRSIPDSTAILTRHAYLRSAKRLIETRGTYDDVTHMKKASDDENPVANHSVQMEKHNALEAQVIRFEHEHSEEDIAASNSGEKFRHEH

SEQ ID NO: 173358 - protein, 75 aa, Glycine max
  unsure (1)..(75): unsure at all Xaa locations
  Clone ID: PAT_MRT3847_127559C.1.pep
KHGTRLERRPNGIKPRGREKTKRGREKXNARARPGGKDARRKTTTQSTSGARPTRDEPTHGGGGRRGRGPQPAPT

SEQ ID NO: 173359 - protein, 205 aa, Glycine max
  Clone ID: PAT_MRT3847_12755C.1.pep
GSPKASHNVNKEHEEVLRSKPSILALSDELDKLRQPLATALSEELQINDTSSQNPHHETEIENETLVESSGSIEPNSNSRNDVVVEDLLNFLYFGSLFDVKSDFVSTMLTRTHERGCCLTYDYVIDDATDLLGEKDLDSISALRGLLVSRPADSSFSHKSVLHCCVEHAKLWLAKSEQPHRPDADVTYAALREKVNNIMSSEYFT

SEQ ID NO: 173360 - protein, 71 aa, Glycine max
  Clone ID: PAT_MRT3847_127560C.1.pep
GLPLAMGVNTLNNLNNQGQGGQKVNLWSLWVVLMVKGGKIGKIGAPSLGFFNFSILSPLLLIGRFSGNHHG

SEQ ID NO: 173361 - protein, 40 aa, Glycine max
  unsure (1)..(40): unsure at all Xaa locations
  Clone ID: PAT_MRT3847_127561C.1.pep
GTTQRYDLLANFXTEGNLRASVYLLRTHSIMGMVKMVPTV

SEQ ID NO: 173362 - protein, 89 aa, Glycine max
  unsure (1)..(89): unsure at all Xaa locations
  Clone ID: PAT_MRT3847_127562C.1.pep
MAFGESQTKLAIEHSTTGLITSAKLAADAAHSALKSDSDKLDKANVADTAGDLNDAVLKYGKLDDVHGIXQYVDKAADYTHDYQGDNTT

SEQ ID NO: 173363 - protein, 103 aa, Glycine max
  Clone ID: PAT_MRT3847_127563C.1.pep
MGTFPRFDPITTQDRSNQTVASDLDGTLLVSRSAFPYYLLVALEAGSVLRALLLLTSAPFVYFTYLVLSETLAIKTLIFITFAGLKLKDVELVSRSVLPRFYA

SEQ ID NO: 173364 - protein, 94 aa, Glycine max
  unsure (1)..(94): unsure at all Xaa locations
  Clone ID: PAT_MRT3847_127564C.1.pep
MGAEPTISGGWVGLDKGYVVTNKELPSHPSHRXGKTSNMVHYVRNLIXDGAGFAPYEXRLTQLVNDENDKTALDVAKRKLGTHTRANNKHEEMS

SEQ ID NO: 173365 - protein, 186 aa, Glycine max
  unsure (1)..(186): unsure at all Xaa locations
  Clone ID: PAT_MRT3847_127565C.1.pep
TAGLTADPETFAIICELNAIHSRWAMLVVLGLYVPLTVAXSSEVKLVQALWMKACSXLNYAGLDXLSIPSLVLADSLLFVYATLFILLSAVEVYRLDGMHIYKVTVPIYPGGSCDPLSLADDPYAFAELNVNELTNGRLYMLYIFRIYVQAIVTVKDSICRTIADHLACAINNNVLAYTSDVGHGK

SEQ ID NO: 173366 - protein, 180 aa, Glycine max
  Clone ID: PAT_MRT3847_127566C.1.pep
ARADFSFTIAPVDGIGFPENEFVLEALSLLQQLIVQNSSLLVSLIIDDEDVNSIFSTIASYETYDAIPVQEKKKLHAIGRILNITAKTTISSCNAVFESLFSRLMDNLGFSVRFPNSDIPPSQRVKFGFLYVCIELLAGCRELIVGSDEPALQYVFEHETCCTMLHRFSTPLFNAFGSVL

SEQ ID NO: 173367 - protein, 81 aa, Glycine max
  Clone ID: PAT_MRT3847_127567C.1.pep
LYIVLWNFSCISSLHLQACNSCILQMIDSRNLPLPNLLQARKLEAQLDEHMNSYRKLVSANVSTKADIAESDLWSWIERLL

SEQ ID NO: 173368 - protein, 51 aa, Glycine max
  Clone ID: PAT_MRT3847_127568C.1.pep
FRKLPESQFLAQRQINKQTPANTKRHQPAEALTKTTKPIPLQISNNGSHVD

SEQ ID NO: 173369 - protein, 52 aa, Glycine max
  Clone ID: PAT_MRT3847_127569C.1.pep
FFPFKGPVKRLLVFLISINTVPIPSILPTWCNPSKPLYIHHPIPLYNYHLPK

SEQ ID NO: 173370 - protein, 75 aa, Glycine max
  Clone ID: PAT_MRT3847_12756C.1.pep
VIFPRMILKNIRYNTATKPLKTTHPSLSPVTATASLDKKPSSPATDAWAIYAQAFVTTETAVLKQEDTEHMIATE

SEQ ID NO: 173371 - protein, 47 aa, Glycine max
  Clone ID: PAT_MRT3847_127570C.1.pep
LGKYVLLVTVQSHRTAVECVLFLFCYLQQYNFMKYAETLMLFTVIIL

SEQ ID NO: 173372 - protein, 187 aa, Glycine max
  unsure (1)..(187): unsure at all Xaa locations
  Clone ID: PAT_MRT3847_127571C.1.pep
VFNCPQLREVSLEFSCQENDSTDLKTMIEGLGRSCLRLQNIHIASIWLSHSAVLALTAAQLRGLRMLSLVLGSEITDASVAAIASSYPNLELLDLSGSGISDSGISMICNVFPDTLTRLLLALCPNVTSSGIQFATFQLPHLXIMDCGMTICDPNMQNPTADENNCKLQETSASNVHFTNQKLIIKH

SEQ ID NO: 173373 - protein, 98 aa, Glycine max
  Clone ID: PAT_MRT3847_127572C.1.pep
KSSSPLQLARPVAICSEKPLLPLLLCCSAALLRCCSARLTLAWPTRDQLARNRHWCWPVHCHVDHPWRTRHCCWRVAFILEILLEQTHPGNLLQNQPY

SEQ ID NO: 173374 - protein, 234 aa, Glycine max
  unsure (1)..(234): unsure at all Xaa locations
  Clone ID: PAT_MRT3847_127573C.1.pep
FLSMTRLRRLGAAVGAAMATAYGGAILVSTPVSASDHSVGGSHLAAVREKIHDPFAVVPAREVQRSALTGASAANPLDMLVIGGGATGSGVALDAVTRGLRVGLVEREDFSSGTSSRSTKLIHGGVRYLEKAVFKLDYGQLKLVFHALEERKQLIDNAPHLCHALPCMTPCFDWFEVVYYWMGLXMYDLXAGARLLHLSRYYSCKESVELFPTLGKGGKGRSLRGTVVYYDGAD

SEQ ID NO: 173375 - protein, 64 aa, Glycine max
  Clone ID: PAT_MRT3847_127574C.1.pep
HEDRGNTCNTEARITLFTRDQPALNSYSDDKALDETMLRWLANGHKDPDWQGRTILAQNGHGVG

SEQ ID NO: 173376 - protein, 53 aa, Glycine max
  Clone ID: PAT_MRT3847_127575C.1.pep
LRLIPRADPTIGGRSFFIFFLPPKALLLNKGAINLIVPYLQYQYSIPTHSMQF

SEQ ID NO: 173377 - protein, 268 aa, Glycine max
  Clone ID: PAT_MRT3847_127576C.1.pep
AVQTLDSLNSLLIGKVIMESTENASSYFNPITQKSTSYAAFNGASNDFSEQFIPGAKPLGLSSQLVVLPTPGNFSHSTHVTNGELNDRNKNPHVTKSAFGFPFLQPTVNEQAKTSWYSPYRSSPSWLSISTDEMLPGTFSRQFSASSSQNFPQNLWGNNFTTPFVNHSAEVRFPSNHLTSSLGPMQTTPLSRVSIGHPLHVPVTPSTINSDNININKVADRLKFDDHQLCTNTRKRPAGPANLDDSRKPTKLLNMRVQENFSRMTRLP

SEQ ID NO: 173378 - protein, 296 aa, Glycine max
  unsure (1)..(296): unsure at all Xaa locations
  Clone ID: PAT_MRT3847_127577C.1.pep
PFPHHPTRLPVTELQSREREDIHRPNSSDMCSSHYVPPLNSELNCKKNSFVEQNQCDRVWNHNGNGVVSLKEGSHHISPSSSQPTMRLMGKDVPIGRSSQEMQQFAGDVWPDEESRRRNYSEYAALDHSLLGRSSKQNWASGSPLQISADNVLQSAKIQSNQAAQSTILMSSTYSGFSQQFIDRLGNHVSQNGSLGVNRNASSYFNPITQKSSSYSVFNGASNDFSEQFIPGAKPLGLISQSVVLPTPXHFSHSPHVTNGELNDXNTNXHVTKSXFGFSFLQPTVNEQAKTSWFIV

SEQ ID NO: 173379 - protein, 318 aa, Glycine max
  Clone ID: PAT_MRT3847_127578C.1.pep
MANFPVVDMGKLNTEERAAAMEIIKDACENWGFFELVNHGISIELMDTVERLTKEHYKKTMEQRFKEMVASKGLESVQSEINDLDWESTFFLRHLPVSNVSDNSDLDEEYRKTMKKFALELEKLAEQLLDLLCENLGLEKGYLKKVFYGSKGPNFGTKVSNYPPCPTPDLIKGLRAHTDAGGIILLFQDDKVSGLQLLKDDHWIDVPPMRHSIVINLGDQLEVITNGKYKSVMHRVITQTDGNRMSIASFYNPGNDALIAPAPALVKEDETSQVYPKFVFDDYMKLYAGLKFQAKEPRFQAMKATESSNINLGPIATV

SEQ ID NO: 173380 - protein, 465 aa, Glycine max
  Clone ID: PAT_MRT3847_127579C.1.pep
MVKAEIEKKGCSTRRWLWLVMALVAVFVAMVMSSRTSPKALFGAIDRACPCARGTPKYSGMVEDCCCDYETVDRLNEEVLHPSLQELVKTPFFRYFKVKLWCDCPFWPDDGMCRLRDCSVCECPESEFPESFKKPDHRLSMTDLVCQEGKPQAAVDRTLDSKAFRGWTEIDNPWTNDDETDNDEMTYVNLQLNPERYTGYTGPSARRIWDAVYSENCPKYPSQELCHEEKILYKLISGLHSSISIHIASDYLLDEATNLWGQNLTLMYDRVLRYPDRVRNLYFTFLFVLRAVTKASDYLEQAEYDTGNPNEDLTTQSLIKQLLYNPKLQAACPIPFDEANLWKGQSGPELKQKIQQQFRNISAMMDCVGCEKCRLWGKLQVLGLGTALKILFSVDGQENSSHTLQLQRNEVIALTNLLNRLSESVKFIQEMGPTAERIMEGGHFSAHTRTLISSWKKIWSYVSKT

SEQ ID NO: 173381 - protein, 38 aa, Glycine max
  Clone ID: PAT_MRT3847_12757C.1.pep
HALLSFTLGVKQMICCCNKMDATTPKYSKARYDEIVKE

SEQ ID NO: 173382 - protein, 44 aa, Glycine max
  Clone ID: PAT_MRT3847_127580C.1.pep
MFVIFGGNKGHNIKGNLVIMLKNVNDIYNITSVNATIGIGIYII

SEQ ID NO: 173383 - protein, 89 aa, Glycine max
  Clone ID: PAT_MRT3847_127581C.1.pep
LIWSPFEGRECERVRSELPVDEDNRHQLQLQRNEVIALTNLLNRLSEFVKFVHEVGPTAERIMEGGHFSAHTRTLISSWKKIWSYVSKT

SEQ ID NO: 173384 - protein, 481 aa, Glycine max
  Clone ID: PAT_MRT3847_127583C.1.pep
KARCFVSEAPTLGNSVMVKSEIEKKGCSTRQWLWLVMALVAVFVAMAMSSKTSPKALFGAIDRACPCARGTPKYSGMVEDCCCDYETVDRLNEEVLHPSLQELVKTPFFRYFKVKLWCDCPFWPDDGMCRLRDCSVCECPENEFPESFKKPDRRLSMTDLVCQEGKPQAAVDRTLDSKAFRGWTEIDNPWTNDDETDNDEMTYVNLQLNPERYTGYTGPSARRIWDAVYSENCPKYPSQELCQEEKILYKLISGLHSSISIHIASDYLLEEATNLWGQNLTLMYDRVLRYPDRVRNLYFTFLFVLRAVTKASDYLEQAEYDTGNPNEDLTTQSLIKQLLYNPKLQAACPIPFDEANLWKGQSGPELKQKIQQQFRNISALMDCVGCEKCRLWGKLQVLGLGTALKILFSVDGQENSSHTLQLQRNEVIALTNLLNRLSESVKFVHEVGPTAERIMEGGHFSAHTRTLISSWKKIWSYVSKT

SEQ ID NO: 173385 - protein, 122 aa, Glycine max
  Clone ID: PAT_MRT3847_127584C.1.pep
SHHFYLSSFILCRFPGLLGKEKSLCRYLHAPTTSPCFLVIIIICNFVLAYTTHTPLPSCLHSKILTPVEEVMEAVYRLKPLLPCLEEEVVRVGNATTSEMRVGSTANCCYLQLEAPQQNNVT

SEQ ID NO: 173386 - protein, 113 aa, Glycine max
  Clone ID: PAT_MRT3847_127585C.1.pep
REKGEKKKKFYGGPLWKRTQNHKFFFSSSHPRANFFFFFPFLAPFFSLISKGPHRKQPVGRRGSFSPFPFFLNPNPTPPGTTMVGHHRNPRFLRNLHFLPRKNPWFLQGHKGF

SEQ ID NO: 173387 - protein, 97 aa, Glycine max
  unsure (1)..(97): unsure at all Xaa locations
  Clone ID: PAT_MRT3847_127586C.1.pep
REKIQQQFRNISALMDCVGCEKCXLWGKLYYISSYVLLLLPVDEDNRHQLQLQRNEVIALTNLLNRLSESFKFVHEVGPTVERIMEGGHFSAHTRTD

SEQ ID NO: 173388 - protein, 249 aa, Glycine max
  unsure (1)..(249): unsure at all Xaa locations
  Clone ID: PAT_MRT3847_127588C.1.pep
AEEFGDSYQELCQEEKILYKLISGLHSSISIHIAFDYLLDEATNLWGQNLTLMYDRVLRYPDHVRNLYFTFLFVLRAVTKALDYLEQAEYDTGNPNEDLTTQSLIKXLLYNPKLQAACPIPFDEAXLWKGQSGPELKQKIQQQFRNISALMDCVGCEKCRLWGKLQVLGLGTALKILFSVDGQENSSHTLQRNEVIALTNLLNRLSESVKFVHEVGPTAERIMEGGHFSAHTRTLISSWKKIWSYVSKT

SEQ ID NO: 173389 - protein, 108 aa, Glycine max
  Clone ID: PAT_MRT3847_127589C.1.pep
LHTLDHCSAFTLRSSHTDTLTSLTNSQSDTPPPSFLFLSFYCSLSHHFYLSSFILFLFPGLLGKEKSLCRYLHAPTTSPCFLVIIIICNFVLAYTTHLPFLAFFTAKY

SEQ ID NO: 173390 - protein, 160 aa, Glycine max
  Clone ID: PAT_MRT3847_12758C.1.pep
MAATASNNDVAAANDGPVMSLINKRLRALRKKLNRILAMEEAVTLGKPLNKEQEEVLRSKPSVLALIDELDKLRQPLATALSEELQINGTSSQNPRHETETENETLAESSGSTEPNSNSRNDVVVEDLLNLLYFGSLFDVKSDFASTMLTRTHERGCCLT

SEQ ID NO: 173391 - protein, 45 aa, Glycine max
  unsure (1)..(45): unsure at all Xaa locations
  Clone ID: PAT_MRT3847_127590C.1.pep
XXXFFXLXXXVXMXCXLXXXVQTXSGXXRASSRXRXLCLRVVXAV

SEQ ID NO: 173392 - protein, 230 aa, Glycine max
  unsure (1)..(230): unsure at all Xaa locations
  Clone ID: PAT_MRT3847_127591C.1.pep
MIFRTLLFLLAFMVTNSVAVMDKKTYIIHMDKTKIKASIHSQDNTKPWFKSVVDFISEASLEEDIAPQLLYVYETSMFGFAAQLSNKQLEYLNQIDGFLSAIPDELLNLHTTYSSHFLGLQNGKGLWSASNLASDVIIGVLDTGIWPEHISFQDTGLSKVPSRWKGACEASTNFSXSSCNKKLVSARFFLQGYEKFAGRINETLDYRSARDAQGHGTHTASTAAGNMVSN

SEQ ID NO: 173393 - protein, 37 aa, Glycine max
  Clone ID: PAT_MRT3847_127592C.1.pep
LFYVPTLDAAKNNGDTTLVVGDRNYLNTTIGSLDVKP

SEQ ID NO: 173394 - protein, 77 aa, Glycine max
  Clone ID: PAT_MRT3847_127593C.1.pep
EIPWRGAGVAIPMFSIRSESDLGVGEFLDLKLLVDWAVATGFHLVQLLPINDTSVHGMWWDSYPYRYDSFKIIVDIR

SEQ ID NO: 173395 - protein, 102 aa, Glycine max
  Clone ID: PAT_MRT3847_127594C.1.pep
ARPSPSVSSSPSPRLTRVPARLPRPPKRLARNRCIDSCPLDNISGVHNGVDECIVVSSKKILVWSITTLFLLSPTKGHVPNLLMIPSHTIPCSQNKAFKAHS

SEQ ID NO: 173396 - protein, 66 aa, Glycine max
  Clone ID: PAT_MRT3847_127595C.1.pep
VREKVMEKLLFHLLGRDREREIWCLTITVIATVISLSTCRHEGHRHWNRIQNALTPVHHHFHKASL

SEQ ID NO: 173397 - protein, 476 aa, Glycine max
  Clone ID: PAT_MRT3847_127596C.1.pep
LETAVLLALIGANSTVVAAGLLHDSLDDAFLTYDYIVGMFGAGVADLVEGVSKLSHLSKLARENNTASKSVEADRLHTMFLGMADARAVLVKLADRLHNMMTLDALPGAKQQRFAKETLEIFAPLANRLGISTWKEQLENLCFKHLNPSQHEELSSKLVESYDDAMITSAIERLEQALKDEGISYNVISGRHKSLYSIYCKMLKKKLTIDDIHDIYGLRLIVDKEEDCYKALTVVHRLWSEVPGKLKDYICRPKFNGYQSLHTVVMGEGKVPLEVQIRTKDMHLQADFGFAAHWRYKEDDCQHSSFVLQMVEWARWVVTWQCEAMSRDCSSVGYADSVKPPCKFPSHAEDCPYSYKPDCGQNGPVFVIMIENDKMSVQEFSANSTVLDLLKRSGRASSRLTTYRFPLKEELRPRLNHKPVSDPNSKLKMGDVIELTPAIPDKSLTEYREEIQRMYDRGLTVSSMGTAASTMVGSRS

SEQ ID NO: 173398 - protein, 282 aa, Glycine max
  Clone ID: PAT_MRT3847_127597C.1.pep
CRVGGRVGQDPYGIFNTEESIPRDIGPYKNLVIFTSSSMDPKFISSPSSIPLLRKLRILMSNLQTVDLKSLTNQQKLAFWINVCNACIMHGFIQYGVPSTPEKLLALMNKATLNVGGNIINAQAIEHFILRKRDISNVKEVQRKGEWEEKESFVRELYGLEFNDPNVTFALCCGTRSSPAVRIYTADGVTAELEKSKLDYLQASILATSTKRIGFPELLLRNMLDFSVDTDSLVEWVCSQLPTSGTLRKSMVDCFRSHSNVKPSTIVEKIPYDYEFQYLLTI

SEQ ID NO: 173399 - protein, 55 aa, Glycine max
  Clone ID: PAT_MRT3847_127598C.1.pep
MVETILRGTCWRMLQHQGPSITTCYDLNTHTKLSLCCLLLVPKISSGAMTTLRCI

SEQ ID NO: 173400 - protein, 49 aa, Glycine max
  Clone ID: PAT_MRT3847_127599C.1.pep
HHSYLRKEIHSSIMMSNGLEFIKYLLWHNFYHFPYSILWMNNIYLKTQP

SEQ ID NO: 173401 - protein, 100 aa, Glycine max
  Clone ID: PAT_MRT3847_12759C.1.pep
ARRQRKKYVDHRGAKPNLEAKTCNDNNVNLKIQDLNALLPKGGVESLNPLKIKDNPPPEEKIKKSKVLLNLFHHTHKRPHEFPPPGSWGKEPPLLSMCSP

SEQ ID NO: 173402 - protein, 23 aa, Glycine max
  Clone ID: PAT_MRT3847_1275C.1.pep
RVKINLPHISLMLKCYLSHITKC

SEQ ID NO: 173403 - protein, 41 aa, Glycine max
  Clone ID: PAT_MRT3847_127600C.1.pep
CLMSQPVLASNRCSIIVQGIVSLDIIIQLVFVGVAKKKKKN

SEQ ID NO: 173404 - protein, 100 aa, Glycine max
  Clone ID: PAT_MRT3847_127601C.1.pep
NSRVRPTRPVGSSQNIMEYQQQKQQWKRSQRTKPSSSSSSHINNLDDGCLMHIFNFLPPIPGMTPFFSLSLSYLFFALQFFSLKSQSFCLIQPYPDVCFV

SEQ ID NO: 173405 - protein, 63 aa, Glycine max
  Clone ID: PAT_MRT3847_127602C.1.pep
LIRSCHLCLHLSEALDTRERICHRTLTILVRPLRERPYLANVHCCEGPYDRVRPAPLTAYLPV

SEQ ID NO: 173406 - protein, 54 aa, Glycine max
  Clone ID: PAT_MRT3847_127603C.1.pep
HYSIYKKGYIISTEITASLKATLNVQNNSYTKQIISLAALCIPTLWGLKRVKSA

SEQ ID NO: 173407 - protein, 70 aa, Glycine max
  Clone ID: PAT_MRT3847_127604C.1.pep
QGARARNLDQPRSQVASTYNPIHKHLLLDDKKRARKSHSVVAQDLRDRKLLHALVTGCTLYYLLHDWVIG

SEQ ID NO: 173408 - protein, 83 aa, Glycine max
  Clone ID: PAT_MRT3847_127605C.1.pep
NQTPFFSRHNLWSNYYYVCYNYVVTCWHFSQTRVFVAFFSKQTTFCMVPIYIPAIDSRLEEPFSFVVLSNFKQLYVVVLQEPK

SEQ ID NO: 173409 - protein, 41 aa, Glycine max
  Clone ID: PAT_MRT3847_127606C.1.pep
AMSLALFLCINSFLMLSLTHEPWGENSFHPNSLTKLINTTH

SEQ ID NO: 173410 - protein, 46 aa, Glycine max
  Clone ID: PAT_MRT3847_127607C.1.pep
ILVIIDVIYEMKKVNRLFLFIIYFVLREVLSYINISYICICVRDIF

SEQ ID NO: 173411 - protein, 298 aa, Glycine max
  Clone ID: PAT_MRT3847_127608C.1.pep
LDQQHKVIPLLLLLFQVLLVASQTDSQDYSGLNSLTESWSNKPQNWVGPDPCGSGWDGIRCSNSKITQLRLPGLNLAGQLSSAIQSLSELDTLDLSYNTGLTGTIPQEIGNLKKLKSLSLVGCGFSGPIPDSIGSLKQLTFLALNSNRFSGTIPRSLGNLSNIDWLDLAENQLEGTIPVSDDQGRPGLDLLLKAQHFHMGSNKLTGTIPEELFNSSMHLKHLLFDHNQLEGGIPVSLSTVSTLEVVRFDKNALTGGVPANLSKLGNLSEIYLSHNNLNVILPDFTGMNSLTYVDLSDT

SEQ ID NO: 173412 - protein, 283 aa, Glycine max
  Clone ID: PAT_MRT3847_127609C.1.pep
MTMDDDSSIYVGGLPYDATEETIRTVFNLYGAILDVKIINDPRTRGKCYCFVTFTNPRSAIDAINDMNGRTIDGRVVKVNGVRTRGGRSNFGRERYYYHNDERNGDWDRSRDRDRDYDHDSNDRDGYRNRSSDWGRDRDRSRDRDQDRDRRFEHMHDYDQAREAMLENDWIREDDRVENEQEHSRGHGGDVDRDHNIDLNVDRKMDRTSDPDRSFGEDRKDQSRRNNDLNVTNQHIMDLSSDSAGTHNEQLEAQLERSTQQLDQLKKEVSQMEGGFEEKRLHV

SEQ ID NO: 173413 - protein, 107 aa, Glycine max
  Clone ID: PAT_MRT3847_12760C.1.pep
VRPRVCFAFAPASAASSDIWLGASLVAAAVAAFMWGPAVALVDVCLSGGGRGLLFGGGGILLGCSVFGVVGLLWALFLVAASAGEVDEESGLSLCAPRCRCMRGRPR

SEQ ID NO: 173414 - protein, 107 aa, Glycine max
  unsure (1)..(107): unsure at all Xaa locations
  Clone ID: PAT_MRT3847_127610C.1.pep
HSSVHAFGKISIDSKDVDVTEWKGDILAVGVTEKDLSRDTNSNFENAILRKIDSLLDGLLTESSYEEDFSGKVGQSTDLRITXLGSKKVVLIGLGQSPCTPSPFKGL

SEQ ID NO: 173415 - protein, 411 aa, Glycine max
  Clone ID: PAT_MRT3847_127611C.1.pep
MTENSLSLETPVSRPVDDLMEPLEQVQPLSSVESPPDRDTAREMQNILVSSSVDFVPDNQSINDSLVMEPPEQEGQLPSAGILSSNQDLANLPLVTRTEDQPSNEDGIPNHIPETSIEIQNQAVGQCASNVELDSCSRQVVHPASNMDLDSLLPGGFRRQSSDTRNLSTLTENNSHPVQPASQSASRIIRHLCLDPLTNELERLRSWAETTEGEYENKKLQLKYDFEKELEELYRKYDIKRKEVEVEFQNIRKNLDTQHNIVLVNKILAEAFRAKSMDLKVSGASRMQQDASVPMQLFQLASQQNATQPCLVGASSCGPPAASVQSSYATTTTQTMVSPIQATYSTPGTFSSVSPRLPHINSLSSPLGNVQTAGEIRAPAPHLQPYRPPTSIPASSPCTVPAWEARSAYTR

SEQ ID NO: 173416 - protein, 84 aa, Glycine max
  unsure (1)..(84): unsure at all Xaa locations
  Clone ID: PAT_MRT3847_127612C.1.pep
DDATRARTQVKSXLLLHIYGTSPVAEYIVRQMLTYGPRFPLAEVLARKDAGDARTIKRVANRFIYDKDAVIADTGAIQRLPEYD

SEQ ID NO: 173417 - protein, 195 aa, Glycine max
  Clone ID: PAT_MRT3847_127613C.1.pep
FAREWKGPASNVWSLECTVIEMLTGKPPWEGNSFHALSRIGFSGEVPEFPRRLSELGRDFLEKCLRREPWRRWSCDQLLQHPFLLPCGEIAESSPRCVLDRVDTEFAEFDQEEEEEEETRIENENFARSRIGKLAMRVRVNWETEGWVVVREFASDAEPAVAVDSSEDVKDGACPGNIGSVRVEKGLHVGTNLEF

SEQ ID NO: 173418 - protein, 210 aa, Glycine max
  unsure (1)..(210): unsure at all Xaa locations
  Clone ID: PAT_MRT3847_127614C.1.pep
GPPPALPPPAPGCPFTRGGPPSTPPFAGSPPQKFVFLGPPPPPLKSPPPRGPTPRGFEDRKPCPGGGPPPFLARPCPPLSPPWVLPPPGPPEPPXSPKGPGGEPTXPPPGLGAPFPPRAGLKFPGPAPLIGGAPLPRPGFLKPRFLGAGWGPQLSPPPPTPPLLSPWEGVFFFPPPRFFKKKKKKKKKKKKKKKKKKKKKKKKKKKKNNP

SEQ ID NO: 173419 - protein, 509 aa, Glycine max
  Clone ID: PAT_MRT3847_127615C.1.pep
MAKLHFAFSFSLLFLLSNASAAPSTTLPAKIVSGFLSNAVPAFTKWVWSLKAPTKTAIGAKSMMKFESGYTVETVFDGSKLGIEPYAVEVLANGELLILDSANSNIYRISSSLSLNTRPKLVAGSAEGYSGHVDGRLREARMNHPKGIAVDNRGNIYIADIMNMAIRKISDSGVTTIAGGKWSRGGGHIDGPSEEAKFSNDFDVVYIGSSCSLLVIDRGNQAIREIQLHFDDCAYQYENGLTLGIAMLVGAGFFGYMLALLQHRLGTTVASQDLEGAAMSGISPSPYQKPLKSVRPPLIPSEDESDKQEESFIRSIGKLLTNAGASVVEIMGALFPGFRKKPQSYEFQSQPLFQQPQKQVNAWPVQESFVIPDEDEPPSIDPRSPTPRKTYAFMSQDAEKMPQLWQSHAFYSGWGGDLQQQQQLKLQQQQQQQQQQQLKHHRHLYHSSVPHTYYEQSHEEINEIVFGAVQEQEGKKETVVIKPVDYGQSLYDHHYIRPRNSSMGHINKY

SEQ ID NO: 173420 - protein, 87 aa, Glycine max
  unsure (1)..(87): unsure at all Xaa locations
  Clone ID: PAT_MRT3847_127616C.1.pep
QFLLVQDLAAVVSPGYVPQQPLMAFXEIGGVSPAASLSHTHEMPFVQRCGLKTAHLLRFHQLKPPTPRGLADPAALYQLPIIGGALF

SEQ ID NO: 173421 - protein, 276 aa, Glycine max
  unsure (1)..(276): unsure at all Xaa locations
  Clone ID: PAT_MRT3847_127617C.1.pep
MAKLHFALSFTLLLLLCNASAAPSTTLPAKIVSGFLSNAVPAFTKWVWSLKAPTKTAIGAKSMMKFESGYTVETVFDGSKLGIEPYAVEVLPNGELLILDSANSNIYRISSSLSLNSRPKLVAGSAEGYSGHVDGRFREARMNHPKGITVDNRGNIYVADIMNMTIRKFSDSGVTTIAGGKWSRGGGHIDDPSEEAKFPNELDVVYVGSSCSLLVIDRGNQAIRXIQLHFDDCAYQCENGFTLGIAMLVGAAFFGYMLALLQRRLGTIVASQDVSA

SEQ ID NO: 173422 - protein, 54 aa, Glycine max
  Clone ID: PAT_MRT3847_127618C.1.pep
LNPNESNTHSYSYAVIIQYWPPPAIPCPVNGKKENLRPLLFVVRLTIHEPLCDL

SEQ ID NO: 173423 - protein, 105 aa, Glycine max
  Clone ID: PAT_MRT3847_127619C.1.pep
LLSLSLWRLSILQPPTLVPFFFNPKSCILQTPSFISSLHAHLIYLYGKKIKSIEPDKCCVVEVEVDVGGRSDNGGFGGAEEEAARVCSSVGFRGVFGSFFLFGGG

SEQ ID NO: 173424 - protein, 45 aa, Glycine max
  Clone ID: PAT_MRT3847_12761C.1.pep
FLLYNLKIFLYIFFISLNILILSHASYPHFFSLKVRSLLSSSAAV

SEQ ID NO: 173425 - protein, 158 aa, Glycine max
  Clone ID: PAT_MRT3847_127620C.1.pep
LKGGVINFQNLSIKNNGVLLFIFKKFVLINLWCGFEQTEKVRMELEEQRMRQSRMLVSAIQEAMVNKLKEKDEEIQRMEKLNWALQERVKSMCMENQIWRELAQTNEATANYLRSNLEQVLAHVGEERATAAEVADDAQSSCGSNDAADAGDDTAASA

SEQ ID NO: 173426 - protein, 132 aa, Glycine max
  Clone ID: PAT_MRT3847_127621C.1.pep
KKKKKNKGENGGSASATPNNNGGGEEISKVEALVPSNLDTSFTPKDLISPPIQHAYPYPPQVYYPPPPAYGLSYNTAYPVSSTASYYVGAPIMPMHAYTTPYSRLPPPPPPSDPIKHYVEDEYESDGYCSIM

SEQ ID NO: 173427 - protein, 72 aa, Glycine max
  Clone ID: PAT_MRT3847_127622C.1.pep
SVHFILHPIISFPFYIPLGPRLIFIHLSPTTLTHTQTTTHTTTIPLTTHIPILTILLFSNTFPIPSKNCFNF

SEQ ID NO: 173428 - protein, 89 aa, Glycine max
  Clone ID: PAT_MRT3847_127623C.1.pep
VTTSCCCDGSPSRSYLSASLSRYDREGDTSQLAAVDIGVSTVDPLKEPPLVTANTVLSFLAVDYPVDKVSCYVSDDGAARFTFEALLRH

SEQ ID NO: 173429 - protein, 162 aa, Glycine max
  Clone ID: PAT_MRT3847_127624C.1.pep
MGAGSFLKVVLKNFDVLAGPVLSLAYPLYASVRAIESKSPVDDQQWLTYWVLYSLITLFELTFAKVLEWIPIWPYAKLILTSWLVIPYFSGAAYVYEHYVRPLFVNPQNVNMWYVPSKKDSLGKPEDVFTAAEKYIEEHGTEAFENLLSKAGKSRKSGRHAN

SEQ ID NO: 173430 - protein, 63 aa, Glycine max
  Clone ID: PAT_MRT3847_127625C.1.pep
IVTLLLVLKTQNSIGINSWQQYTFLDIVFKLILTGSRFWESILCYFYLIIKMAANVTQHVHES

SEQ ID NO: 173431 - protein, 90 aa, Glycine max
  unsure (1)..(90): unsure at all Xaa locations
  Clone ID: PAT_MRT3847_127626C.1.pep
KLMKMAGSVRTGGKGTVRSLIWTYEYFSFSPPPRSSTMHSVVGFHSICWLFSFFGLNTKCICCVECSLXFCLMFVLERRRLSTRQQPQMT

SEQ ID NO: 173432 - protein, 272 aa, Glycine max
  Clone ID: PAT_MRT3847_127627C.1.pep
MGTMGIAMILAPAIGPTLSGYIVQNYDWNVMFYEAGNKGWGSTEIVTMFIVGTVFIIFFILRELRMKAPMLSLEVLKYPTYTLTTVINMIVMMSLYGGMILLPLYLQNLRGFSALDSGLLLLPGALVMGALGPVAGMNALPPRLISHGNAFVNTMRQLAGSIGTAILVTVMTTQQTNHLSAFSEELDKTNPVIQDHMRELAQQYGGESAAMKLLLEHVNKLASVEGVNDAFIVATIISAIALILSLFLQGKKKAQLSAEKANAEDYPSQQDK

SEQ ID NO: 173433 - protein, 54 aa, Glycine max
  unsure (1)..(54): unsure at all Xaa locations
  Clone ID: PAT_MRT3847_127628C.1.pep
VFPFLSSSAITLHTIEKIMMINHHVVILLICSLQLLLSTQIMITKXXXANTSKL

SEQ ID NO: 173434 - protein, 130 aa, Glycine max
  Clone ID: PAT_MRT3847_127629C.1.pep
KKKKKKKKKKKKKKKKKKKKKKKKKKKKKKKKKKKKKKKKKKRGAPLKKTNLKTPDLKKKNFLKGAQKKNKWALFKKIGKGKNLGLPKKNPFEKKPLFPNGKKKKKPPPKPLSKKFPPLKGKRNPPLKGQ

SEQ ID NO: 173435 - protein, 62 aa, Glycine max
  Clone ID: PAT_MRT3847_12762C.1.pep
FLEFEHGTFRQPQVKSTLSIDLNFLDPGELVSRGGPVPNSPYSESYYARSLAVVLQRRDWEN

SEQ ID NO: 173436 - protein, 56 aa, Glycine max
  unsure (1)..(56): unsure at all Xaa locations
  Clone ID: PAT_MRT3847_127630C.1.pep
TTRKRAFEHLSLILCLETHHPHRCYSIARALTPVDLXSSTMCSLTLXXXRTPLRTL

SEQ ID NO: 173437 - protein, 81 aa, Glycine max
  Clone ID: PAT_MRT3847_127631C.1.pep
KIQHTPIGNKIRFSYRGSNRRFQFSSYLELSDVFIHISFRSKSMSTFKSKHVRKLGFFEQNSELQCLSRKQCVSFFYALNS

SEQ ID NO: 173438 - protein, 53 aa, Glycine max
  unsure (1)..(53): unsure at all Xaa locations
  Clone ID: PAT_MRT3847_127632C.1.pep
EXAMXMIXXILIRLXXGRXWYXXRYRSXINSXVDXLXXXPELTYACMRXXXXX

SEQ ID NO: 173439 - protein, 60 aa, Glycine max
  Clone ID: PAT_MRT3847_127633C.1.pep
HGEVLAETGEEEYVLCVDCECKHYPRKLAELLRLIACWGARYSIGRPKFFDNMLNLDGSA

SEQ ID NO: 173440 - protein, 65 aa, Glycine max
  unsure (1)..(65): unsure at all Xaa locations
  Clone ID: PAT_MRT3847_127634C.1.pep
LDLGLEXTRHAHSLSAPFELCLSLKKPQYFSYDLLTFNALNIQSYMQIIYYIRTFLIINSEYLYL

SEQ ID NO: 173441 - protein, 74 aa, Glycine max
  Clone ID: PAT_MRT3847_127635C.1.pep
SRLRSNWLGTDRRRVTVKDLVVVVEDHVKQDQVGLAGQNPQLLHQGPLNYMGWQVKPQHLVMPAMQSHEWLGCF

SEQ ID NO: 173442 - protein, 40 aa, Glycine max
  Clone ID: PAT_MRT3847_127636C.1.pep
TYPAGLTHIACLFKYTITYFITYTTNLKHILNQTMDDSAQ

SEQ ID NO: 173443 - protein, 34 aa, Glycine max
  Clone ID: PAT_MRT3847_127637C.1.pep
LLKTYFILKLYISLTSLYIRQYTHILLKKIRTRG

SEQ ID NO: 173444 - protein, 98 aa, Glycine max
  Clone ID: PAT_MRT3847_127638C.1.pep
TVMFHKGVTVTQGLINSLCEGSLRSNQRVPIIHQPWSVWSTPAEGAAAALQSTRLFWISQMEHWSDLGPRLCQAAPAAKVIVNPATRACPAVLLVDGS

SEQ ID NO: 173445 - protein, 65 aa, Glycine max
  Clone ID: PAT_MRT3847_127639C.1.pep
MNSSTNAAAAMNDQLFNPTSIFGLRLWVVLGVCVGAAIALILLLMFVWVAFKRCRTDPDSIPDVS

SEQ ID NO: 173446 - protein, 96 aa, Glycine max
  unsure (1)..(96): unsure at all Xaa locations
  Clone ID: PAT_MRT3847_12763C.1.pep
NESKEFLAYKQMQDDDGHISQYCKLDNELLTLSTSSLHIAALVATFFASPTTRMMGHKXLMFLGGLIFLAGALMNGIADNIEMLIIGRLSLGYGET

SEQ ID NO: 173447 - protein, 154 aa, Glycine max
  unsure (1)..(154): unsure at all Xaa locations
  Clone ID: PAT_MRT3847_127640C.1.pep
TISYHLQVLPDFYTRLVEDKGHKFGPCFINATPGSYYGRLFPSNFINFFHSSTSLHWLSQDPLLGLTREAESLNXGNCYIVSTSPPEVYKAYLKQSQEGFKLFLKSRWEELMPGGAMVLVFPGRNETPRRSLREVISLTLNDMLLEVNSFYFYQ

SEQ ID NO: 173448 - protein, 243 aa, Glycine max
  Clone ID: PAT_MRT3847_127641C.1.pep
MNFPLPARAARVYLPCYDILRNWLEEFTAKKAPTTTTYVPLVAGSLARSLACTTCYPIELAKTRMQAFKETQIGKKPPGVIQTLLGVVSNVKSTNTPQNSLQGYRVLWTGMGAQLARDVPFSAICWSTLEPTRRKLLGLIGGDDANALSVLGANFGAGFVAGTLAAGATCPLDVVKTRRQIERDPVRALKMTTRQTLMEVWRDGGLKGLFTGVGPRVGRAGPSVGIVISFYEVVKFVLHHQYT

SEQ ID NO: 173449 - protein, 77 aa, Glycine max
  Clone ID: PAT_MRT3847_127642C.1.pep
PPWSFFCEGHGSTCGCRSPQKCLEKRPPPEPRSPRPLPKKSDCLWAILLAPGIPPGGPPLKEFSPPQVLGVLFKLYF

SEQ ID NO: 173450 - protein, 43 aa, Glycine max
  Clone ID: PAT_MRT3847_127643C.1.pep
SYTWILHYCSHFSFDSNVIDRSLSWDSRRNSHVVENASTFIFK

SEQ ID NO: 173451 - protein, 164 aa, Glycine max
  unsure (1)..(164): unsure at all Xaa locations
  Clone ID: PAT_MRT3847_127644C.1.pep
MLTGCTLSCPGVGKGTYASRLCNLLDVPHIFTGYLVRHDLXCNGLICSQLSQSVKQGKMVXRXMIMSLLXQRGLSDGESKGESXFILDGCSRTINHCXILHSVTDMXLGGQSEAPRETTACXCLGRRICNLCGRHVNIASITVNGENVRPVMDMAPLITTTHWM

SEQ ID NO: 173452 - protein, 500 aa, Glycine max
  Clone ID: PAT_MRT3847_127645C.1.pep
MTTAFERHALPLFLFLFLTPIINASIHDYSNEPFTHRSDAFFFHGGSEALFAKSFIRFETVTFARPRESASVHGRMQSNTGLVEAIILEVRDRNRIGGSYLKSDLICCDPKLAKDRNCNLGEVIIQKNPDNHELPKRIKTFFQGTDEQVQMDAVTLEINATGMYYLYFMFCDPSLKGTTIQGRTVWRNPNGYLPGKMAPLMTLYGFMSLAYLLLGLAWFLRFVQFWKDIIQLHYHITAVIALGMCEMAVWYFEYANFNSTGTRPMGITLWAVTFTSVKKTLSRLLLLVVSMGYGVVRPTLGGNVIAYRVLLLGLLYFSASEALELVEHLGNINDFSGKTKLLLVLPVVCLDSCFILWIFSSLSKTLEKLQTRRNLAKLELYRKFTNTLAVSVLLSIAWIGFELYFNATDPLSELWQIAWIIPAFWCLLSYALLVVICILWAPSRNPTRYAYMEETGDDFDEEGISLTSSVAKISGDVAAKLDRKAIDHAFGEDLEEDKRE

SEQ ID NO: 173453 - protein, 99 aa, Glycine max
  unsure (1)..(99): unsure at all Xaa locations
  Clone ID: PAT_MRT3847_127646C.1.pep
MFLEIEYGGVYPQLFWLCWAVNSRSSHVFESIRTALGIGFFPAFLIXVDPFSVAIWPVLCAVRHGIVSSYSSHHRLRRLLDKCYSLEVWANECPSAYGT

SEQ ID NO: 173454 - protein, 124 aa, Glycine max
  unsure (1)..(124): unsure at all Xaa locations
  Clone ID: PAT_MRT3847_127647C.1.pep
GVWGLSPWLFALFPCFLVVAFGXVFSCLCSRFGFVXFWGFVPVXFWLWFRFLFPVSCAFLVGVFFSLLASFSGRAAACFSFRGAGPPWFLSRVLGFFLPASWAPRSCPGVCLSGLRRRFFRRER

SEQ ID NO: 173455 - protein, 66 aa, Glycine max
  Clone ID: PAT_MRT3847_127648C.1.pep
HVKLQLTSFQAMIMNLLSSFLFNTLLVLFQHVVSQTFITGYNCGKCHKVFHYRKVITSKFLAQIFF

SEQ ID NO: 173456 - protein, 50 aa, Glycine max
  Clone ID: PAT_MRT3847_127649C.1.pep
QVHKGLLCSTLIVKASAPRVNPCKQSMEASPLLFKLHRYKLCASSAFTHV

SEQ ID NO: 173457 - protein, 346 aa, Glycine max
  Clone ID: PAT_MRT3847_12764C.1.pep
FGSSFGVHFFTYSELEEATNFFDPARELGDGGFGTVYFGKLHDGRVVAVKRMYENSYRRVEQFVNEVEILTGLHHQNLVSLYGCTSRHSRELLLVYEYIPNGTVADHLHGQRAKPGTLAWHTRMNIAIETASALVYLHASEIIHRDVKTNNILLDNHFSVKVADFGLSRLLPTHATHVSTAPQGTPGYVDPEYNEYYQLTDKSDVYSFGVVLIELISSMPAVDISRRRHEINLSNMAIKKIQSGALHEIVDTTLGFETDFKVRKMISAVAELAFQCLQSSKDVRPSMAEVLDRLEDIRSDGSHRSKHEVLDISEDDAALLKNVPPPPSPDSHLVTISNSTPPNDSQ

SEQ ID NO: 173458 - protein, 214 aa, Glycine max
  Clone ID: PAT_MRT3847_127650C.1.pep
MQTKEVVSSLSYLLPSNPCSYPPSNNYTSMIQNSIPTFQFQRFSNQIYGCNNSHNTTYQVPDFSPQSSCISSNSTSDEADDQNLSLINERKHRRMLSNRESARRSRMRKQKHLDELWSQVVWLRNENHQLIDKLNHVSETHDQVLQENSQLKEEASELRQMIRDMQIHSPCGGPNSFITPLEDHDVDHVPSAYLRSDDSSNQFNSCNNNMDLLG

SEQ ID NO: 173459 - protein, 48 aa, Glycine max
  Clone ID: PAT_MRT3847_127651C.1.pep
MQVINSIKVKKKKKKKKKKKKKKKKKKKKKEVNKKNKKAKIRGLHCKC

SEQ ID NO: 173460 - protein, 52 aa, Glycine max
  Clone ID: PAT_MRT3847_127652C.1.pep
APFFFFYLLFFLYTETKDSIPCINGWRHNGVVLMNHLRALLMRHYFLCINGS

SEQ ID NO: 173461 - protein, 207 aa, Glycine max
  unsure (1)..(207): unsure at all Xaa locations
  Clone ID: PAT_MRT3847_127653C.1.pep
MADSTPLLSQPDSSSSPDTQKPQPPPPPRNQQHPSLGSTVELCIGEFNWSQFLQSILVSLAWIFDAQQTFISVFTDAPPAWRCTEQAGNACKTANTNTVCNLPEGSWAWDGPTQASMVSDWGLECANSSITGLPASMFFAGCLLGGFLLASLADSSLGRKNMLFFSCLVMAITSFLVTFSPNVSIYSALKFLCGFARATIGTXALVL

SEQ ID NO: 173462 - protein, 91 aa, Glycine max
  Clone ID: PAT_MRT3847_127654C.1.pep
RHGASEVRGDTFTPSYAQDFKPAYMEGFEQAKGDTPSYAGFPAYMEGFEQAKLGTSCQRTGRVTTKVSTFWPRLYWRGKIVIVIELVGGLY

SEQ ID NO: 173463 - protein, 50 aa, Glycine max
  Clone ID: PAT_MRT3847_127655C.1.pep
SAIASPSTTPAFFAKPHYPSLGPLLNLSTLYWIITHSMSLYSKMTLQKLL

SEQ ID NO: 173464 - protein, 80 aa, Glycine max
  Clone ID: PAT_MRT3847_127656C.1.pep
GYGLGEKVNIYLCDGVDGEEMVGIGVEVGPKTFTKGVCTVGCMIFTGQWTCTTLDDGHTWDAYNHIAGHHAKAGPDHALN

SEQ ID NO: 173465 - protein, 64 aa, Glycine max
  unsure (1)..(64): unsure at all Xaa locations
  Clone ID: PAT_MRT3847_127657C.1.pep
RSHLAFQSDLTHRXSHXSSXXSXXKTFXXAIXKRXRXKEXSXXQATHPKRHRQRRNXXXXGCVE

SEQ ID NO: 173466 - protein, 238 aa, Glycine max
  Clone ID: PAT_MRT3847_127658C.1.pep
MNATLLQPPLSPFQRATTTNSPEPRDQKLLSLLRDRKTEEAWLAYSHSTHLPNPTCLSRLVSQLSYQNTLSSLTRAQSIVTRLRNERQLHRLDANCLGLLAVSATKANHTLYAASLLRSMLRSGYLPHVKAWTAVVACLASSPDRGDGPAEALQLFRSVTRRLRRLPDPAMAAASRPDTAAVNAALNACANLGDPRAFLQVFDEMPQFNVAPDALSYNTMIKLCCRIGRKDLLVFVLE

SEQ ID NO: 173467 - protein, 79 aa, Glycine max
  Clone ID: PAT_MRT3847_127659C.1.pep
RQTCLFCLEVQRFNSSTTFIARPLQIIIILFAPHLYVCFQSIELLFQDKGSPSLHHRTSRIATRRILSLSVTALNNAYV

SEQ ID NO: 173468 - protein, 68 aa, Glycine max
  Clone ID: PAT_MRT3847_12765C.1.pep
SIGESDLLSEFQYLKGKNSLLAHILTRNVSFAQRMKSHDQGKFCGYVGSKLMIRNRVMEIHKHVLTII

SEQ ID NO: 173469 - protein, 65 aa, Glycine max
  Clone ID: PAT_MRT3847_127660C.1.pep
KTCWIISSREWNRHSPIHQTSQIGLEFTDVVRKKLVRLWWDSTDVENGVEREIFEVLKGLIATLV

SEQ ID NO: 173470 - protein, 97 aa, Glycine max
  unsure (1)..(97): unsure at all Xaa locations
  Clone ID: PAT_MRT3847_127661C.1.pep
VIHLPVGIPAFGKNRXHCTGGVTSSYVHYCLSRYPSFILPIIGCGRGGPCWPTSVSSVAVLSASCPSWHRNRVDVCRRRQFKPSRPHRAPLPPLWLR

SEQ ID NO: 173471 - protein, 101 aa, Glycine max
  unsure (1)..(101): unsure at all Xaa locations
  Clone ID: PAT_MRT3847_127662C.1.pep
LFLCSASLSIQPSFLILQSNHLILTLTYTHILTPIVPPIASKLILKELKDFHKDPPTFFNACPFSEDIFHFPSTINYPSYIPYSXSLFLITIYFPSDYPFK

SEQ ID NO: 173472 - protein, 257 aa, Glycine max
  Clone ID: PAT_MRT3847_127663C.1.pep
EFVRISTEEAEGYRKIVKLRRSLMSSILKSREDKLTLSKKEEKLSGDVKLFQQEVSAARASLQELSSRKSSIQQDIASFKQRIVFIDKRVPELEAEKKVATTARNFKEAARIATEAKSLCVEKESIQINMDMATLNLEKLEEEINDTLNKLQETEGMILLKEKELAMVRYQKLLLAAATARAEKAAAVEMGDVEEANLLLAEAEAADCDAEKLKSTYKFEAEDFTDLQRHLISMDLVSHLDQKQLEELAVSLRLFTG

SEQ ID NO: 173473 - protein, 184 aa, Glycine max
  Clone ID: PAT_MRT3847_127664C.1.pep
IDVKGDSNCGYRAVAAQLGMGEESWALVRQDLIRELQQWQDNYAKLFGSNDRVAELRKSLYVGKQASVASWMTIPDMGYVIASRYNVVLVTLSLQECMTFFPLRGRPPLSQSSHRLISIGFVHKCHFVQVVLKADSAIPPTALQWSRYCNAESRSWETSYVSRMQQFRSLFPQKEIGYVDIIED

SEQ ID NO: 173474 - protein, 119 aa, Glycine max
  Clone ID: PAT_MRT3847_127665C.1.pep
QVKNLNLLRPQFSAMANSHLSTPSELFSRQHKPPRVPNLIGGSFLDSKSLTFIDVINPATQEVVSQVPCTTDEEFKAAVSAAKKAFPSWRKTPITKRQRVMLKLQELMRRGVGKLELNG

SEQ ID NO: 173475 - protein, 103 aa, Glycine max
  Clone ID: PAT_MRT3847_127666C.1.pep
MLFRFSLLLPLFLSTAFASESDHRYQQDDPVILWVNKVGPYNNPQETYNYYSLPFCRSPGNPAHKWGGLGEVLGGNELIDSQLEIKFLGNVEKTTFCRIELDE

SEQ ID NO: 173476 - protein, 137 aa, Glycine max
  unsure (1)..(137): unsure at all Xaa locations
  Clone ID: PAT_MRT3847_127667C.1.pep
RERARYKEPLVDSWEXMKXLMRRRFVPSLYQRELHNKLQRLTQGSRSVDEYYKEMEVSMIRANVMEDXEATMARFLHGLNSDVRDVVEWQNHVELENLVHQASKLEQQLKRKSVMRRSSSNFHSPDWKVRNDYMESD

SEQ ID NO: 173477 - protein, 61 aa, Glycine max
  unsure (1)..(61): unsure at all Xaa locations
  Clone ID: PAT_MRT3847_127668C.1.pep
SXXXXXXXXRMLCGVGLGMKKTEAPXATTDKESESQCFFFGFQRPTKLNEKDPQRLKELNN

SEQ ID NO: 173478 - protein, 394 aa, Glycine max
  Clone ID: PAT_MRT3847_127669C.1.pep
ITLYFLQRHQQLLSSSSSQELYIAYTNYPSLISFFLSISLLFLSEALDDDDDGTSPILPGLPDDVSKHCLALVPRSNFPAMGGVCKRWRGFIRSKEFITVRKLAGMHEEWLYILTAGSEGKGSHWEVMDCLGHNRRSLPPMPGPAKAGFGVVVLNGKLLVMAGYSSIDGTASVSAEVYQYDSCLNSWSRLSSMNVARYDFACAEVDGLVYAVGGYGATGDSLSSAEVYDLDTDKWTPIESLRRPRWGCFACGFEGKLYVMGGRSSFTIGNSKFVDVYNPEKHGWCEMKNGCVMVTAYAVLEKKLFCMEWKNQRKLAIFNPEDNSWKMVPVPLTGSSSIGFRFGILDGKLLLFSLEEEPSYKTLLYDPNAAPGSEWHTSDIRPSGLCLCSVTIKA

SEQ ID NO: 173479 - protein, 87 aa, Glycine max
  unsure (1)..(87): unsure at all Xaa locations
  Clone ID: PAT_MRT3847_12766C.1.pep
SSFPFGASRSGRCXCSWLLAWCFPLCFFFCXXXXXXXRPPPSVVGCCWXFCCSSSLSPRLAVLXSXVFCVFFXASXGGSXRRPGVFF

SEQ ID NO: 173480 - protein, 32 aa, Glycine max
  Clone ID: PAT_MRT3847_127670C.1.pep
LLSMPRLVSSTQSTLLCCKSIFSIPVEFDYCH

SEQ ID NO: 173481 - protein, 241 aa, Glycine max
  Clone ID: PAT_MRT3847_127671C.1.pep
MSTGELLNIEPLELKFPFELKKQISCSLQLSNKTDSYVAFKVKTTNPKKYCVRPNTGVVTPRSTCDVIVTMQAQKEAPADMQCKDKFLLQSVKTVDGTSPKDITADMFNKEAGHVVEECKLRVLYVSPPQPPSPVPEGSEEGSSPRGSVSENGNANGSDFTQAARGFTERHESQARSAEARALISRLTEEKNNAIQQNSKLCQELELLKREGNKSRGGVSFVIVVLIGLLGIIMGYLMKTT

SEQ ID NO: 173482 - protein, 98 aa, Glycine max
  Clone ID: PAT_MRT3847_127672C.1.pep
REPSLLACIFILPSPLNLTNKGASTCMSRRGKGGNGLGQGRATGHRMVLTDNIQGIITPAIRHLARHSGIQRISGHSYDETLGILKIILQNVSLDAVI

SEQ ID NO: 173483 - protein, 209 aa, Glycine max
  Clone ID: PAT_MRT3847_127673C.1.pep
MTTAEETSNLDLIRQHLLGENIISDSSFFSNLLHHPMKLEAPSSPEFDFTSYISDNTSFFTFLEGYDLMADMKFVDSDNTIPSKEVKKCNISPEPLVSSKEKPKKLEYDKAKRYRGVRRRPWGKFAAEIRDPTRKGTRVWLGTFDSEIDAAKAYDCAAFKMRGQKAILNFPLEAGLSDPKPNSCGRKRRRESHDHELELPQVQVHHGVS

SEQ ID NO: 173484 - protein, 169 aa, Glycine max
  unsure (1)..(169): unsure at all Xaa locations
  Clone ID: PAT_MRT3847_127674C.1.pep
MGRVSFYRGYGKTFKKPRRPCEKGRVXAEXKLGGECGLXCKRELGGGXYALXRIRDNARDLLTLXEKNPRRIFEGEALLXRGXRYGLLXETQNKVEYVLXLTVENFLERALQTLGFKCRHGKSIHHARVLIKXRHIRGWRQGVNIPSFCGRGDSQEHIGFSLTSPLGGG

SEQ ID NO: 173485 - protein, 116 aa, Glycine max
  Clone ID: PAT_MRT3847_127675C.1.pep
MSGQAFVANHLLGAIEGTHLTNAVLMGQDGGVGAQSPAFLQLKPEGIPAIMNDFNGPGSLVPPGWFLGGPKFLVFQGEPGAAIRGRKGPGGVPVKKTGAALIMGINDEPMTPGHCT

SEQ ID NO: 173486 - protein, 100 aa, Glycine max
  Clone ID: PAT_MRT3847_127676C.1.pep
EVTYRYWCYSSTHGDRLTSSAFIIICLSWLLASSHSGISVTIHLHQFVNTYTLVSSHTLFSSIDWLLSGCSEIFYSAFDAELTQVIPVIKRSIGGTRIGG

SEQ ID NO: 173487 - protein, 108 aa, Glycine max
  Clone ID: PAT_MRT3847_127677C.1.pep
KDYVRKLQYGNDHLDFLKDSSYRVLLKGELVPFNITSLCRFPLYDADFGWGEPTWVGSPALTFKNLVVFIDTKNGGGIEAYVSLKVEDMTKFEADEELLACVSKARVC

SEQ ID NO: 173488 - protein, 77 aa, Glycine max
  Clone ID: PAT_MRT3847_127678C.1.pep
VILWDRFNKRLKKYLKAILSNNKILSKILTLVTKIKFTFCDMICKCFTKYHKSTEKYINKDDNYNGNWGSSIFCVSN

SEQ ID NO: 173489 - protein, 63 aa, Glycine max
  unsure (1)..(63): unsure at all Xaa locations
  Clone ID: PAT_MRT3847_127679C.1.pep
RSSVLKVTYAIDQATRHMPARDSCMCXTSLPYNKPISHSLYLYSLCSPVWLFPPLIDKLKHSG

SEQ ID NO: 173490 - protein, 61 aa, Glycine max
  unsure (1)..(61): unsure at all Xaa locations
  Clone ID: PAT_MRT3847_12767C.1.pep
LHRLPVVYHEAGHAVRRCLLEHAXPCCKXTIDAHANGGLGLGQLVPIENLVITQVQLHHLT

SEQ ID NO: 173491 - protein, 108 aa, Glycine max
  Clone ID: PAT_MRT3847_127680C.1.pep
MEGPCLTRLEMADASLLMLLAAVSRFTKKMSGSGKQSLGILPLWWESMTWVKELFRRNRGSTFPSMHSVYIAEFVLTDGEVGGWPSHGQCGSTEIKSSSKMKLWMVTN

SEQ ID NO: 173492 - protein, 486 aa, Glycine max
  Clone ID: PAT_MRT3847_127681C.1.pep
MTRWPDTTQSILDRNFSDHCPIILRSKVIDWGPKPFRVLDCWLLDKTFKDVVNECWTSGHQSGWGGFVLKEKIKRLKSRLKVWNKEQYGDTFKKVKQLEEELNRLEQATMDRQLSSQEMMTRRQLQEDLWVAAHSHESLLRQKSRSRWIKEDDCNSRYFHLMMNASRRQNLLKGIMLEGSWVTEPQRVKEAVREFFQQRFNEPEPIRPTLEGIPFLKINQQQNAMLVGRFEEEEVRKAIWDCGSDKSPGPDGLNFKFIKKFWKIIKPDILRFLDEFYVNGIFPKGGNASFIALIPKVPDPQQLSEYRPISLIGCIYKIVSKILARRLKKVMPSIIDERQSAFIEGRHLLHGVLVANEVVEEAKRKQKSCIVFKDGFQPVLLNGGHGGAIADFHGGFLKKRHRIAVAWRVWDGGRGGYGGVAENGVPPAPHTRTQPRHSQPHEHTAAANQRWSRPAQTAAISLGCDPSVTNLCLPYCVLLNEIKLLW

SEQ ID NO: 173493 - protein, 67 aa, Glycine max
  Clone ID: PAT_MRT3847_127682C.1.pep
YISQISNEIFQQLGYEILVKCIFYPQSTHNYGTAKSRHANTAVLQLYHMPRKDRVNIVIFITIHNAA

SEQ ID NO: 173494 - protein, 93 aa, Glycine max
  unsure (1)..(93): unsure at all Xaa locations
  Clone ID: PAT_MRT3847_127683C.1.pep
FALGDSEKTLPAKKVPRLISCILATVTVLYFSWWAXPIYCLVHCQLFYITCXYYARLHDVSIXFDSCSISNDCXHWIVPIVSIHKQFVVFHVF

SEQ ID NO: 173495 - protein, 985 aa, Glycine max
  Clone ID: PAT_MRT3847_127684C.1.pep
MTRWPDTTQSILDRNFSDHCPIILRSKVIDWGPKPFRVLDCWLLDKTFKDVVNECWTSGHQSGWGGFVLKEKIKRLKSRLKVWNKEQYGDTFKKVKQLEEELNRLEQATMDRQLSSQEMMTRRQLQEDLWVAAHSHESLLRQKSRSRWIKEDDCNSRYFHLMMNASRRQNLLKGIMLEGSWVTEPQRVKEAVREFFQQRFNEPEPIRPTLEGIPFLKINQQQNAMLVGRFEEEEVRKAIWDCGSDKSPGPDGLNFKFIKKFWKIIKPDILRFLDEFYVNGIFPKGGNASFIALIPKVPDPQQLSEYRPISLIGCIYKIVSKILARRLKKVMPSIIDERQSAFIEGRHLLHGVLVANEVVEEAKRKQKSCIVFKDGFQPVLLNGGHGGAMADFHGGFLKKRHRIAVAWRVWDGGRGGYGGVAENGVPPAPHTRTQPRHSQPHEHTAATTSGSDAPAQTAATSSGSDASVTNDGLQRGVLAEKTKLLSRRRRRRREEEEGVGCLASASISILVNGSPTKEFSPYRGLRQGDPLAPFLFNIVAEGLNGLMKEAIERKIYTSFSVGRDKVDVNILQYADDTIFFGEATMENIKAIKIILRAFEMVSGLKINFAKSSFGSIGMPDVWKQSAADYLNCSLLATPFVYLGIPIGANPRKSQMIPRRVADRLVSIQRRFLWGAGEDQHKIAWVKWDDVCLPKNKGGLGIMDITKFNLALLAKWKWNLFYHNGELWARILDSKYGGWRGLDAATNDNNASLWWGDLKLALHHPQHEIVLTGGLTWKVGNGAKIKFWEDDWSYGDTPLLAKYPSLYLISDQQHNYIQEMGQQTDKGWEWKFKWRRHLFDRELEMADCFLTDVAGSCIQIHKKDEWIWKTEPTGQYSERLQTKANLRRRRVAINDTLCPFCGNSEENEAHVFLTCDRILPLWWESMTWVKELFRRNRGSTFPSMHSVYIAEFVLTDGEVGGWPSHGQCGSTGIKSSSQMKLLMVTN

SEQ ID NO: 173496 - protein, 120 aa, Glycine max
  Clone ID: PAT_MRT3847_127685C.1.pep
VLIVCSVPLPFFGLFSQCHGCLSFELVPWYRVFCCPVFSFPVVLGLFFLFALLLPLLLIVLSLCGSDLLLLVFGFILSRALWVLSFVCLLLAFGFSVCFLGLWCWGFCGQLFFIGPPFFF

SEQ ID NO: 173497 - protein, 42 aa, Glycine max
  Clone ID: PAT_MRT3847_127686C.1.pep
LLMHASLSPELGLSIEGLVTRFVFMQDGQHYWRGSATERPET

SEQ ID NO: 173498 - protein, 180 aa, Glycine max
  unsure (1)..(180): unsure at all Xaa locations
  Clone ID: PAT_MRT3847_127687C.1.pep
MPGSLRNLSLSPKIFSFTLLLSLNSLLFFPCCYSLDEQGQALIAWKNSLNITSDVLASWNPSASSPCNWFGVYCNSQGEVIEISLKSVNLQGSLPSNFQPLRSLKILVLSSTNLTGSIPKEIGDYVELIFVDLSGNSLFGEIPEEICSLRKLQSLSLHTXFLQGNIPSNICNLTSLCELD

SEQ ID NO: 173499 - protein, 44 aa, Glycine max
  Clone ID: PAT_MRT3847_127688C.1.pep
CFPSFDSVSLHKIPFNQFPSLCIVLLIDIMSSNLRLTKTQQTNN

SEQ ID NO: 173500 - protein, 55 aa, Glycine max
  Clone ID: PAT_MRT3847_127689C.1.pep
GQTCEHALISFTLGVKQMISGWDKMDAPTPNVSKARNDEIVNEAYYDLRKVRYYP

SEQ ID NO: 173501 - protein, 72 aa, Glycine max
  Clone ID: PAT_MRT3847_12768C.1.pep
SWSFLFARLLCVFFVCRSCCGFPASCCSGSCFGSRALGAGASPCCPLLFLTSFAGVVASGRVPCLRGRACVV

SEQ ID NO: 173502 - protein, 61 aa, Glycine max
  Clone ID: PAT_MRT3847_127690C.1.pep
TEKVYVSHPPEQFVHPLQFISRRRGALDYLSLCASYLHNNLVQALRIFTYEKNNCCVPRNS

SEQ ID NO: 173503 - protein, 73 aa, Glycine max
  unsure (1)..(73): unsure at all Xaa locations
  Clone ID: PAT_MRT3847_127691C.1.pep
LRKLQAQMKDFQRELEDARASRDEIFATAKENEKKAKSLEADLMQXQEDLAAAERARKQADLEKEELAEELAS

SEQ ID NO: 173504 - protein, 334 aa, Glycine max
  Clone ID: PAT_MRT3847_127692C.1.pep
MASSLGRRRTHAPKSSSTLNDDVSCEECGGGHSPSKLLLCDKCDRGYHLFCLRPILPSVPKGSWFCPSCSNHKPKSFPLVQTKIIDFFRIQRSPEALSNQDTRRKRKRGGGLVVSKKKRKLLAFVPSEDPNRRLEQMASLATALTTTKTEFSNQLTYMLGMAPRSANRPALERGGMQVLSKEDTETLNLCKRMMERGEWPPLMVVFDPLEGFTVEADRSIKDLTIITEYVGDVDFLKNRENDDGDSIMTLLSASDPSRTLVICPDKRSNIARFINGINNHTPEGKKKQNLKCVRFDVGGECRVLLIANRDITKGERLYYDYNGDEHEYPTEHFV

SEQ ID NO: 173505 - protein, 89 aa, Glycine max
  Clone ID: PAT_MRT3847_127693C.1.pep
MAEPPSPVHWVAVVAPTATGSEKEPFGKLQLFCRDPTGSLSAKKVRTEEKKAPRRVNGEGGSGGNSMQLQPTAAPLAQSYCRPASWSFG

SEQ ID NO: 173506 - protein, 69 aa, Glycine max
  Clone ID: PAT_MRT3847_127694C.1.pep
QGIKIPPMGGGLSFFCRLGLKKRVEPPPPLVNWQKLFKRRGPPSPQKDTRGGRCKFYGWLKGNSFPPWV

SEQ ID NO: 173507 - protein, 76 aa, Glycine max
  Clone ID: PAT_MRT3847_127695C.1.pep
VGVHEYEHPQRKPASSKGNEKIEEPFRRNGKEIGEDLKNKGKQTCGICLSEVDQSRVKGVLNCCTHFFCLACINEW

SEQ ID NO: 173508 - protein, 69 aa, Glycine max
  Clone ID: PAT_MRT3847_127696C.1.pep
TREGGWRKATTFIEKIQASYGSWDGSYKVGWGYKARGGGKNIITSIKSFTNCSNNRKAWEWVGCNQIPY

SEQ ID NO: 173509 - protein, 113 aa, Glycine max
  Clone ID: PAT_MRT3847_127697C.1.pep
GHNMAKLEQSTEPLQIHHETDDIPRVQRTWLQQLFTGTSTVTTSSADCIHRGCYGSRLRDAKQTVTGTNHDLVTEDRPYGNATRLMKADMNRDRTCDMGKAKDIRSIGRTIDK

SEQ ID NO: 173510 - protein, 20 aa, Glycine max
  Clone ID: PAT_MRT3847_127698C.1.pep
AKIQDKEGIHPDQHRLIFVG

SEQ ID NO: 173511 - protein, 104 aa, Glycine max
  unsure (1)..(104): unsure at all Xaa locations
  Clone ID: PAT_MRT3847_127699C.1.pep
KWISTNVQSTVRSLPPTGLTVETPFIDNSESGQQRFRTVSDHFIPVFHKKAYLHWHTGXTIRXIEFTEADSIINDRVCDYHHYQHVTADHEGYDYHHDEEHHEH

SEQ ID NO: 173512 - protein, 95 aa, Glycine max
  Clone ID: PAT_MRT3847_12769C.1.pep
MGQVIHVAVVAASLGCVSTLLMVFIWRLCHHKKEHRNFVQPNSLARMENLQAGIARLHQQPTIYHQFADHKNKNKGNFYVFHNGVSRKGHLVNWD

SEQ ID NO: 173513 - protein, 66 aa, Glycine max
  Clone ID: PAT_MRT3847_1276C.1.pep
RTKMIRKTPKDLRQTNSARQSQFDALNHNPTPKINTHQHGEQTFQIVVQSKRNSWSKRFSFRASWL

SEQ ID NO: 173514 - protein, 74 aa, Glycine max
  Clone ID: PAT_MRT3847_127700C.1.pep
RNFSPTQAGTGQKNIPEKGTSGQNHINIGRPCNYQKQALSQILERGTPNRHDSTIFQKPNFPPRGPNSLLKQQK

SEQ ID NO: 173515 - protein, 94 aa, Glycine max
  Clone ID: PAT_MRT3847_127701C.1.pep
GFLKKKNLFFLGPNCPLFPPFFFFKREKRGPPPPWGGFGPKGVLCFFLFWGKAGVFNPGPKKSWALDPPPFLGGEKKKKKKKKLKKKKKTYKLP

SEQ ID NO: 173516 - protein, 120 aa, Glycine max
  Clone ID: PAT_MRT3847_127702C.1.pep
MGVFTFVVRKSGAEWSAKQHSGDIEASADSTFDLQRKLVQAALAVDSSGGVQSSFSPVSPTSAVFQVIVGGAVFVGGGGGAVAAAPAGGAAAADAAPAAEKKEEKVEEESDDDMGLGLFD

SEQ ID NO: 173517 - protein, 617 aa, Glycine max
  Clone ID: PAT_MRT3847_127703C.1.pep
MDSDYGIPRELSDLQKIRSLYQPELPPCLQGTTVRVEFGDATTTADPTDALTVCRAFPNTYGHPLAHFLRATAKVPDAQIITEFPPIRVGIVFCGRQSPGGHNVIWGIHNALKIHNPNSVLLGFLGGSEGLFAQKTLEITDDILSTYKNQGGYDLLGRTKDQIRTTEQVNAALAACNNLKLDGLVIIGGVTSNTDAAQLAETFVVAKCPTKVVGVPVTLNGDLKNQFVETNVGFDTICKVNSQLISNVCTDALSAEKYYYFIRLMGRKASHVALECTLQSHPNMVILGEEVAASKLTLSEIAKQITDAIQARAEQDKYHGVILLPEGLIESIPEVYALLKEIHGLLRQGVEVDKISSQLTPWASALFEFLPPFIRRQLLLYPESDDSAQLSQIETEKLLAYLVEVEINKRLKEGTYKGKKFNAICHFFGYQARGSLPSKFDCDYAYVLGHICYHILAAGLNGYMATLTNLKNPVNKWKCGAAPIASMMTVKRWSPNPGATSIGKPAIHPATVDLRGKAYELLRQKAQSFLMDDIYRNPGPLQFDGPGADAKVITLSVEDQDYMGRIKKLQEYLEQVRTIVKPGCPQEVLKAALSVMASVTEVLAAMSTSYTNTLASL

SEQ ID NO: 173518 - protein, 611 aa, Glycine max
  unsure (1)..(611): unsure at all Xaa locations
  Clone ID: PAT_MRT3847_127704C.1.pep
MDSDYGIPRELSDLQKIRSLYQPELPPCHQGTTVRVEFGDATTTAEPTXAHTFRRAYHNTNRHPLFHLFTQTSKHHXNTEQKKVSSNSAGAISSSDSSSYLLFLFLSSWGSISCGSTTCRCSCNSTTTTSNEYCTTHYHLEHSGGRRHGRERGLNSTGGINGESGLHELPLEIEGGIGGGLDVAGMLLGAPFAAGFAXTKVKTPMVIGYSKRNPXLEIEASQRAKLQSDTICKVNSQLISNVCTDALSAEKYYYFIRLMGRKASHVALECTLQSHPNMVILGEEVAASKLTLSEIAKQITDAVQARAEQDKYHGVILLPEGLIESIPEVYALLKEIHGLLRQGVAVDKISSQLTPWASALFEFLPPFIRRQLLLYPESDDSAQLSQIETEKLLAYLVEVEINKRLKEGTYKGKKFNAICHFFGYQARGSLPSKFDCDYAYVLGHICYHILAAGLNGYMATVTNLKNPVNKWRCGAAPIASMMTVKRWSPNPGATSIGKPAIHPATVDLRGKAYELLRQKAQSFLMDDIYRNPGPLQFDGPGAGAKVITLSVEDQDYMGRIKKLQEYLEQVRTIVKPGCPQEVLKAALSVMASVTEVLAAMSTSSTNTLSAM

SEQ ID NO: 173519 - protein, 161 aa, Glycine max
  Clone ID: PAT_MRT3847_127705C.1.pep
MGVVSNEYSNGSVQGCNSLEEKLDDLRGLLGKADGDPLRIVSVGAGAWGSVFAALLQDTYGQFRDKVQIRIWRRPGKTVDRATAEHLFEVINSREDVLRRLIRRCAYLKYVEARLGDRTLPADEILKDGFCLNMIDTPLCPLKVVTNLQEAVWDADIVVNG

SEQ ID NO: 173520 - protein, 66 aa, Glycine max
  Clone ID: PAT_MRT3847_127706C.1.pep
SLLLLISFMYLTTTSDPLSPATASFKPPQPVPTIPVAVPKQPLVTSWAQPPRDSTPESTPLLDYCG

SEQ ID NO: 173521 - protein, 84 aa, Glycine max
  Clone ID: PAT_MRT3847_127707C.1.pep
LFSAYKAKTGLHLVQANICRNRTVDHVRKHHVRGGRDSNVDGSANQNNSCVMQITAQTHSHDFEERGVRRADVTYLDEVILMPN

SEQ ID NO: 173522 - protein, 122 aa, Glycine max
  Clone ID: PAT_MRT3847_127708C.1.pep
MEGLLPLVYKAIKKRKTRRQYQCLSSGAALSYNMNVAEFYPQTHDHGHGYNYMQEPSTSMQKVVDHDDDDTENIGYLRYNSVREFSNGFSSPHQQRTCAADSPDSKQLVRFRSQKLFSCLAG

SEQ ID NO: 173523 - protein, 43 aa, Glycine max
  unsure (1)..(43): unsure at all Xaa locations
  Clone ID: PAT_MRT3847_127709C.1.pep
VKSGHWLNEDQPIKLSLGNWXXHVXXVDILYHLFVGLYLVVVD

SEQ ID NO: 173524 - protein, 84 aa, Glycine max
  Clone ID: PAT_MRT3847_12770C.1.pep
GGQALCLYFTTCFMKFDTTAVNIVDGKRHSKKLFLCVCISEQLFYKNPFSSCILQLLDIHHLYITLQHCPWLYIFPLVPVLPHK

SEQ ID NO: 173525 - protein, 111 aa, Glycine max
  Clone ID: PAT_MRT3847_127710C.1.pep
MIKTLNPYPNPAKTAEIMSRYRPIAPKPETSPNSMSEGPSSSSLSQKIKQSPYLRNLWPQLQARPTRTRKRGRAPLTLPSSSLKRHKTTHHHVLGFCPPCHHVVTSSSSSP

SEQ ID NO: 173526 - protein, 275 aa, Glycine max
  unsure (1)..(275): unsure at all Xaa locations
  Clone ID: PAT_MRT3847_127711C.1.pep
SNIFLTKDNNIRLENFGLAIXLNAKDLASSVDGTPNYMCPELLADIPYGYKSDMWSLGCCMFEIAAHQPAFRAPDMAGLINKINRSSISPLPIVYSSTLKQLIKSMLRKNPEHRPTAAELLRHPLLQPYVLRCHNASSNVLPVYPLVNPKDKARRPNKSSGGKDHKDKEAGLVNCLERIHPIEGNADIQISNLPNDVVTISTSAEDNLETRMADLMSYIVESYTSISGSKDGSTTLPKSLILKPKEDSINLYIVVRTCAFQMSHEFVPSEIELLG

SEQ ID NO: 173527 - protein, 79 aa, Glycine max
  unsure (1)..(79): unsure at all Xaa locations
  Clone ID: PAT_MRT3847_127712C.1.pep
LIXELLQQFLFQRENSKFTERPXLLXCIFDRXKLIWYXQRNXKFYGXKVLSLSTVLWSNRIXDHSESSMQDVLLLRMMF

SEQ ID NO: 173528 - protein, 93 aa, Glycine max
  Clone ID: PAT_MRT3847_127713C.1.pep
RQTLNHHLGADTTTMPRALHLKRRTCYTTKAIMSYTREDGLKHIKERRAVKSISRLHNFTKDNVAYNVTAANRGGATLEAITGDPELAEQATD

SEQ ID NO: 173529 - protein, 44 aa, Glycine max
  Clone ID: PAT_MRT3847_127715C.1.pep
VNIVGSLYSKEFRFVLDRPCLRKNMTLRFTQGVRAPCSRLCLSS

SEQ ID NO: 173530 - protein, 159 aa, Glycine max
  unsure (1)..(159): unsure at all Xaa locations
  Clone ID: PAT_MRT3847_127716C.1.pep
PPRPPPPHPPPPPPPPPPPPPLPDPPHPPPPPPPSPPPTPPLVPSTTAPPPPAPPAPPPSIHPTRPPPPPPPPPPRLPAPPLPPTPPPRPPPPPPSPPAPPPAHGXPPPSPGPAPPRPPYDARSAPIPAPPARHTSVPPSIPSAGMASQTGICKLALVQ

SEQ ID NO: 173531 - protein, 195 aa, Glycine max
  Clone ID: PAT_MRT3847_127717C.1.pep
MSNRIILRQAGGSTNRRQPLLLQRRPSKMATRVGEVVGGTAAECVAVCCCFPCGVANFLLLAIYKVPAGLCRRVLKKRRHQKMLKEGLRKPTRRHCSCGCCDDVSGSRIYPMCANDAVDVKRLCSTTTELDNNDDATRALEKEMWDQFYGTGFWRSSSNREVREEEVKPSQTLPSSNINVLVPNPQPQLFASSSS

SEQ ID NO: 173532 - protein, 100 aa, Glycine max
  Clone ID: PAT_MRT3847_127718C.1.pep
MGSSAADSASWYCAMVLLAMILLGSIRESTMAEEEGEPIKGNNLRQRPCDEIYVVGEGETLHTISDMCNDPFIVERNPHIHDPDDVFPGLVIKIIPIHQY

SEQ ID NO: 173533 - protein, 97 aa, Glycine max
  unsure (1)..(97): unsure at all Xaa locations
  Clone ID: PAT_MRT3847_127719C.1.pep
HILRFSRTKKEWKMMIRLQQVAANSTLLVTRNPISLKDTGKFEKKRNXEREREKELSIHSCILHVRYMCYLFSLLVSLCLFLCFTSITLFCLLNKEL

SEQ ID NO: 173534 - protein, 71 aa, Glycine max
  Clone ID: PAT_MRT3847_12771C.1.pep
PTRLHLFYKEEEHVKLHTNGTGPHTDSSHAASNFLRCMTSTPSSSIDDEYQYSLIRYNANKEARTVEAHTK

SEQ ID NO: 173535 - protein, 221 aa, Glycine max
  Clone ID: PAT_MRT3847_127720C.1.pep
MSQLAPKQFMTESQSNQDHEQVVVISQKKLKRRRVCVMVTGAVLLLLIVLVIVAIILAFTLFKTKEPRTQLVSATLEGIAPRLTLPAIDLQINVTLDLKVRVENRNRASLKHEGGKSVLLYKGKEVGDAYINPGLIPSRGSTILPCRLTLQVEKLASNLTSLVGDLMGGEISMDTVTRIPGKVTFLGFIKKHIVAESNCQFTISVSELKITNQTCKSKAKL

SEQ ID NO: 173536 - protein, 169 aa, Glycine max
  Clone ID: PAT_MRT3847_127721C.1.pep
FGSSQNNGFSGDFPIGLWSLPKIKLIRAENNRFSGKIPESVSGAGQLEQVQLDNNTFAGKIPQGLGLVKSLYRFSASLNRFYGELPPNFCDSPVMSIVNLSHNSLSGQIPELKKCRKLVSLSLADNSLIGEIPSSLAELPVLTYLDLSDNNLTGSIPQGLQNLKLCSFN

SEQ ID NO: 173537 - protein, 44 aa, Glycine max
  Clone ID: PAT_MRT3847_127722C.1.pep
VFPAAPLPITGEQHGKAGGSIYLPQKSVRSLGLKWCISLVRTWS

SEQ ID NO: 173538 - protein, 75 aa, Glycine max
  Clone ID: PAT_MRT3847_127723C.1.pep
RRTKTDIQRLFRSICQCFVQCPLLFYNYTTNNTIATSTERSPRQVIAVQCEARTGRICGDRVLPRSQQLGQTPPY

SEQ ID NO: 173539 - protein, 379 aa, Glycine max
  Clone ID: PAT_MRT3847_127724C.1.pep
PPRAFLPECVFLQACAVPRSAPSRLRPWHPASVLARAPQPPRCLWPRALVRLPATELGFAAYQGRGAAPTRPQLAMSFTSRSIFRSLMAAMEELELNAHNVNIKSEHAHMYLYIIREQQIDDLVPYPKRINIEAGKEEITVEAVLEELAREIHSSVGVRMHRLGVVVWEIKLWMAACGQANGAWRVIVNNVTGHTCTVHLYREKEDTITHKVVYSSVSVKGPLHGVAVNENYQPLGVIDRKRLSARKNSTTYCYDFPLAFETALEQSWAIQQPGFQRAKDKNLLKVTELKFADKEGSWGTPLVPVENYPGLNDVGMVAWFMEMCTPEFPSGRTILVVANDVTFKAGSFGPREDAFFRAVTDLACTKKLPFNYLAANSGA

SEQ ID NO: 173540 - protein, 62 aa, Glycine max
  Clone ID: PAT_MRT3847_127725C.1.pep
ISNNFFKNNAYLLERQHNVEHLPSKYIITIAHIRFTFFSYYTLSLYKILRIHLFENLFPNCS

SEQ ID NO: 173541 - protein, 95 aa, Glycine max
  Clone ID: PAT_MRT3847_127726C.1.pep
QERCNQCGILLMVPPEVHVFECAVCHGITQIRPTAGPWSQAYNSFHHLAGRFRGFVNTMMTISVNSNPSYYGTTHEFGYYPQPPQSLRPSYHVYG

SEQ ID NO: 173542 - protein, 67 aa, Glycine max
  Clone ID: PAT_MRT3847_127727C.1.pep
ASYCLCIEVHRSTAGPSSIKDFNLVPGLEKSIALQLVLVSFAAVSTCFPAKMIMRKQNRTLFYKARV

SEQ ID NO: 173543 - protein, 46 aa, Glycine max
  Clone ID: PAT_MRT3847_127728C.1.pep
FERLLLSLIFGNSAVGLHCLQRCYELVRFPGCSLLCCHMSKYKKLY

SEQ ID NO: 173544 - protein, 60 aa, Glycine max
  Clone ID: PAT_MRT3847_127729C.1.pep
KIMKMARLPVIFFPFLTLLLISVSTNINVLGELPFSAMFVFGDSLVDMEITTISTPWQEP

SEQ ID NO: 173545 - protein, 55 aa, Glycine max
  Clone ID: PAT_MRT3847_12772C.1.pep
CLSSVVSKALTWGKEEVLGNGSRTYSWGRNRRQSLLHQRRMIFLNLLVTRMRWCR

SEQ ID NO: 173546 - protein, 356 aa, Glycine max
  Clone ID: PAT_MRT3847_127730C.1.pep
MASGASPQLQMRLKSSFIGDRLLRCSTSRHQPLPQLFRYNPGTKHVSMQLSRTLSGLTNLFFNRRNLDELPNSKRKRLRPGKVSPRRQVPKNIPRPPYVNSMIPPGIASGAEVHDKKGIECMRASGRLAAQVLQYAGTLVKPGITTDEIDQAVHQMIIDNGAYPSPLGYGSFPKSVCTSVNECICHGIPDSRALEDGDIINIDVTVYLNGYHGDTSATFYCGDVDDEAKKLVQVTKECLDKAISICAPGVEFKKIGKTIHDHADKYRYGVVRQFVGHGVGSVFHAEPVILHYRNNESGRMVLNQTFTIEPMLTIGSINPVMWNDDWTVVTEDGSLSAQFEHTILITPDGAEIMTQC

SEQ ID NO: 173547 - protein, 174 aa, Glycine max
  unsure (1)..(174): unsure at all Xaa locations
  Clone ID: PAT_MRT3847_127731C.1.pep
HGIPDSRXLEDGDIINIDVTVYLNGYHGDTSATFYCGDVDDEAKKLVQVTKECLDKAISICAPGVEFKKIGKTIHDHADKYRYGVVRQFVGHGVGSVFHADPVILHYRNNESGRMVLNQTFTIDKAQPMLTIGSINPVMWNDDWTVVTEDGSLSAQFEHTILITPDGAEIMTQC

SEQ ID NO: 173548 - protein, 100 aa, Glycine max
  unsure (1)..(100): unsure at all Xaa locations
  Clone ID: PAT_MRT3847_127732C.1.pep
RXDXXSAXLIFXXNXXFWTXXSXPSLPXLXXXXXXXLXXXSXGSFQSXRSXLXXLSXXXXRMXXXLSXXIXLXXXXXXSXXQXXXXXRXRIPSXTYXCXQ

SEQ ID NO: 173549 - protein, 67 aa, Glycine max
  Clone ID: PAT_MRT3847_127733C.1.pep
DKGSVLYKGQFFQNLFLFRNLTFFFFNLFRNFPKSLMGRKNGSDSKASRNLQKHRRKDYWPPDPFRL

SEQ ID NO: 173550 - protein, 82 aa, Glycine max
  unsure (1)..(82): unsure at all Xaa locations
  Clone ID: PAT_MRT3847_127734C.1.pep
IRSISSKSSTASARALVTGAAGQIGYALVPMIARGVMLGPDQPVILHLLDILPAAPPPPGXKMELVGAAFPLLKGVVATTDV

SEQ ID NO: 173551 - protein, 129 aa, Glycine max
  unsure (1)..(129): unsure at all Xaa locations
  Clone ID: PAT_MRT3847_127735C.1.pep
GLSFTNLFITLFAKKEMRILMVSLHAVVETTILYKLKLGEIVTTIPTIVFNVETVEYKNIIFTVWDVGGHDMILPLWKHYFQYTTGLIFVVDSADIDLVCXCLHKLGIMLNDHKLIDPVLLVYGYDQDL

SEQ ID NO: 173552 - protein, 59 aa, Glycine max
  Clone ID: PAT_MRT3847_127736C.1.pep
NGFKFIGGHMFSSICNGLLWELKNPLTKSHVLCSLNSFSSFFFLVGHTKSKTIVFMRSR

SEQ ID NO: 173553 - protein, 164 aa, Glycine max
  Clone ID: PAT_MRT3847_127737C.1.pep
LDRRFCVASFFRFSFFIFLALEGNTFFKKMEVLVGPAFTIDVPSSPPRDGGSENRIFLNGSPEKDDGSNFRISGPPKFFAGGESESSSSIGTPDDSDNEEEEVQSQLKIRTGLGSLDAMEDSLPIKLVPLISLSFSHFFDLMLSYSSNVFLFSLRLGLFYFGFV

SEQ ID NO: 173554 - protein, 225 aa, Glycine max
  Clone ID: PAT_MRT3847_127738C.1.pep
PKCVAQKGEAMAVSSTTATVCIPAKNIPTTQAPKIGFSSTIAFAAKPRRRLLRIRSSSAETSGTEVDSETSIEVPEETSSLISALNVEKILRGLPITDADHYGRLGIPRGCPFDLVGGAYNIKVQELKSQNLEEDELEKKLELLKESYTILSSEEERRIYDWSLARAENTDKFVWPFEVDITQSKISKEDPPQLDPEDVGPTRVVGYFLLGWIMLSIVLSIALNL

SEQ ID NO: 173555 - protein, 68 aa, Glycine max
  Clone ID: PAT_MRT3847_127739C.1.pep
KRHSSKVMRYENDRLVLNLNSIVAVSSRQPNGAFSIVLLNRDATILHYFTRWDNSVPRVDPLTLFLMI

SEQ ID NO: 173556 - protein, 129 aa, Glycine max
  unsure (1)..(129): unsure at all Xaa locations
  Clone ID: PAT_MRT3847_12773C.1.pep
MAPKALIFLAALCFSPLPLKSLLAHDNGRGVNFYKESFPQAEDIIKEQVKLLYKHQKNTGFLRLRNIFHDCAVQSCDAXLLLDSTTRSLSEKETYXSFGLTNFMYIETITXALERECPSVVSXADILIL

SEQ ID NO: 173557 - protein, 40 aa, Glycine max
  Clone ID: PAT_MRT3847_127740C.1.pep
LDSEVTPVRGLPTLENCNIFPYTEVFSISGWSWKHPAHVR

SEQ ID NO: 173558 - protein, 92 aa, Glycine max
  Clone ID: PAT_MRT3847_127741C.1.pep
CMFPVFPPPQPLFLITLVTPGTMVKFCPFRVLNFGHLPPLKFYQVVFGCWYLLKSLPLVLKGFSLISKFSLVVPPVPCTCAFPFFWGIHYSK

SEQ ID NO: 173559 - protein, 43 aa, Glycine max
  Clone ID: PAT_MRT3847_127742C.1.pep
RGYGSLVYDLASIVASVQTRGPGWCSWLGQGPLWSYEFMCCNY

SEQ ID NO: 173560 - protein, 104 aa, Glycine max
  unsure (1)..(104): unsure at all Xaa locations
  Clone ID: PAT_MRT3847_127743C.1.pep
VRKKLSPFSSGMISWAQEQGLFSXRGFQRAASHVCGLSLSXNVVEIVFHLFDANEDGNLSPEEFVSVLQHRERDIAHPVETGIMGFLSCCWKCKDTSPSSRLLS

SEQ ID NO: 173561 - protein, 54 aa, Glycine max
  Clone ID: PAT_MRT3847_127744C.1.pep
ESSKFKKIHKIPIKQHLEFIESICPAPPPKRHSFTLEVLEVSFPTISLRILSGG

SEQ ID NO: 173562 - protein, 94 aa, Glycine max
  Clone ID: PAT_MRT3847_127745C.1.pep
TNAASPTRSQQQATQSPRTPSSRPSPRPTSFSDNPSTSYSSNSAPYSGSTAIASPPTPPSQASPPSPPSVTLSPKTLTSMTSPKSVPPPTTSSP

SEQ ID NO: 173563 - protein, 480 aa, Glycine max
  Clone ID: PAT_MRT3847_127746C.1.pep
MMKMKLVKTLLLLLCVKLFCYAVIGAPQTCPANNEDKCGDSDEWKGEFFPDIPKIKYEGPSSKNVLSFKWYNAEEEILGKKMKDWLRFSVAFWHTFRGTGADPFGAPTKYWLWEDGTNSLNMAKRRMRANFEFISKLGVDFWCFHDRDIAPDGKTLEESNANLDEVVALAQELQTKAKKRVLWGTAQLFMHPRYMHGAATSSELKVYAYAAAQVKKAIEVTHYLGGENYVFWGGREGYQSLLNTDMERELNHLARFFEAAVAYKKKIGFNGTFLIEPKPQEPTKHQYDWDAATSANFLRKYGLTGEFKLNIECNHATLSGHSCHHELETARINGLLGNIDANTGDPQVGWDTDQFLVDIQEATLIMLSVIRNGGLAPGGFNFDAKLRRESTDVEDLFIAHIVGMDTLARGLRNAAKLIEDGSLAELVRKRYQSFDTEIGAQIEAGKADFELLEKKVKEWGEPKVASAKQELAEMILQSVL

SEQ ID NO: 173564 - protein, 70 aa, Glycine max
  unsure (1)..(70): unsure at all Xaa locations
  Clone ID: PAT_MRT3847_127747C.1.pep
KKKRXVKRXSRCTERKKKMGXAKFXXRFGLSXXKKWVKLFIXFYDRGLXFLGLXFLXCLRKFRGYXFNXX

SEQ ID NO: 173565 - protein, 142 aa, Glycine max
  unsure (1)..(142): unsure at all Xaa locations
  Clone ID: PAT_MRT3847_127748C.1.pep
RAAERRGMMRRVQRWRCVWNCIDRPSQQLRLLHEGPDTVEELLERHLVKNKNENQLENQRQLTSTRREALCLYRDILRATRLFIXPDSRGILWRDILRDNARTEFEQSRFESLSEIVTRLLIGCLXALHSAIDKLAEKHKQR

SEQ ID NO: 173566 - protein, 54 aa, Glycine max
  unsure (1)..(54): unsure at all Xaa locations
  Clone ID: PAT_MRT3847_127749C.1.pep
MAYALMIYHVDQSNVSTKEHIXIFVDALYPGCHCLPRCLAYHIAGRSILDVLQL

SEQ ID NO: 173567 - protein, 64 aa, Glycine max
  Clone ID: PAT_MRT3847_12774C.1.pep
HFQRNSYSDRLYCVLKFSILSIALVRLYACFSYKTAGAQFTITGAAGVCAPLAPHPVFVHSKVG

SEQ ID NO: 173568 - protein, 146 aa, Glycine max
  unsure (1)..(146): unsure at all Xaa locations
  Clone ID: PAT_MRT3847_127750C.1.pep
MGTLSVCCLCYLYFVHVLCVCCCSTEQSFAYRLMGLSPCCDLIGLMIGPWTAAEDEILSTYLMNNGGHGSWRPLPRMAGLVRSGSSRRLRWSXYLTPALTVVPLLLQEXILCIQLHGLLGNAWAAVASHLPGRSDGEIXDLWNILL

SEQ ID NO: 173569 - protein, 66 aa, Glycine max
  Clone ID: PAT_MRT3847_127751C.1.pep
PGLCPTVENKGEHPNLGANPSGIPPGRTGNRDPAFCNLTVQHSVKNGHPSLPGKGLPSKSIPSFKG

SEQ ID NO: 173570 - protein, 238 aa, Glycine max
  Clone ID: PAT_MRT3847_127752C.1.pep
PRVRAPLLGDSVKSIVQFSLEVCSSQNLESNTRHQAIQIISWLAKYKSSTLKKHKLITPILQVLCPLLAESTNETEDDDLAPDRAAAEVIDTMALNIPKHVFQPVFEFASVSCQNANPKFREASVTALGVISEGCLELMKSKLEPVLHIVLGALRDPEQMVRGAASFALGQFAEHLQPEIVSHYESVLPCILNALEDVSDEVKEKSYYALAAFCENMGEDILPFLDPLMGRLLTALQN

SEQ ID NO: 173571 - protein, 64 aa, Glycine max
  unsure (1)..(64): unsure at all Xaa locations
  Clone ID: PAT_MRT3847_127753C.1.pep
GSSLPTYSIRGVYIPTFAFKIQIFIKTLTGNTITLDVESYNTIYNVNAKIQDKEXIPPDQQRLI

SEQ ID NO: 173572 - protein, 104 aa, Glycine max
  Clone ID: PAT_MRT3847_127754C.1.pep
IIEDRLLKTPYVGKKMFNRDCQLMGLTWLLAKNKTAYIPTVSAVLRAMMYSAHPHESQCSPDQENMPLAVDSLQFESGHAPSRPSKFCVTVLPLLVLLFSAFVV

SEQ ID NO: 173573 - protein, 80 aa, Glycine max
  Clone ID: PAT_MRT3847_127755C.1.pep
RWRLAPHPQPYRGSHVFGPHTEYHWPAAKNTPQAPVSRGLLPTMLYFDSCVHGTAFAFCANAFNELIKMQTEEPKKNGFS

SEQ ID NO: 173574 - protein, 134 aa, Glycine max
  Clone ID: PAT_MRT3847_127756C.1.pep
IKITQGIKLPFLPFNGNKKMRNNNFTVSSMHGDMPHKERDAIMGEFRAGTTRVLITTDVWARGLDVQQASLVINYDLPKNRELYIHRIGRSGRFGRKGAAINFVKSDDIKILRDIEQYYSTQIDEMPMNVADLI

SEQ ID NO: 173575 - protein, 62 aa, Glycine max
  unsure (1)..(62): unsure at all Xaa locations
  Clone ID: PAT_MRT3847_127757C.1.pep
XXGXGXXXXXXXXKLSARIFLEICSWHKFKLRRSEHDHLKKVSHPTGQAEGGARFSWRRGST

SEQ ID NO: 173576 - protein, 78 aa, Glycine max
  unsure (1)..(78): unsure at all Xaa locations
  Clone ID: PAT_MRT3847_127758C.1.pep
SLKGPCQDPGVFWPNSQWFGGKALKAVVPMGFGGSFLGPLLCTHCIXTDPEPVESARGRELRFFAYVDPIDVSRNLTR

SEQ ID NO: 173577 - protein, 656 aa, Glycine max
  Clone ID: PAT_MRT3847_127759C.1.pep
MLPHKHTLVVVATVATLALAAVLAAPQADLASERAALLSLRSSVGGRTLFWNATRDSPCNWAGVQCEHGHVVELHLPGVALSGEIPVGIFGNLTQLRTLSLRFNALRGSLPSDLASCVNLRNLYIQRNLLTGQIPPFLFHLPDLVRLNMGFNNFSGPFPSAFNNLTRLKTLFLENNQLSGPIPDLNKLTLDQFNVSDNLLNGSVPLKLQTFPQDSFLGNSLCGRPLSLCPGDVADPLSVDNNAKGNNNDNKKNKLSGGAIAGIVVGSVVFLLLLVFLLIFLCRNKSAKNTSAVDIATVKHPETESEVLADKGVSDVENGGHANVNPAIASVAAVAAGNGGSKAEGNAKKLVFFGNKVKVFDLEDLLRASAEVLGKGTFGTTYKAVMEDGPVVAVKRLKDVTVSEKEFKEKIDVVGVMDHENLVPLRAYYYSRDEKLLVHDYMPMGSLSAILHGNKGAGRTPLNWEMRSSIALGAARGIEYLHSQGPSVSHGNIKSSNILLTKSYDARVSDFGLTHLVGPSSTPNRVAGYRAPEVTDPRKVSQMADVYSFGVLLLELLTGKAPTHALLNEEGVDLPRWVQSVVREEWTSEVFDLELLRYQNVEEEMVQLLQLAVDCAAQYPDKRPSMSEVVRSIQELRRSSLKEDQDQIQHDNDILL

SEQ ID NO: 173578 - protein, 110 aa, Glycine max
  Clone ID: PAT_MRT3847_12775C.1.pep
TQDLFKGFKATRKSGIKKNQKLSPPYKKKNLNAPKKVWAPQKSAPRGSKNQYSQTHFFGLAQKSNWEAKGPFGQKGENGHFWSHPLKGFLGKKSQEKKGPGHVPPPGGVP

SEQ ID NO: 173579 - protein, 292 aa, Glycine max
  Clone ID: PAT_MRT3847_127760C.1.pep
ISDQSSEKIHRKQIKHLFLDLFVAGPVVAVKRLKDVTISEKEFKEKIEAVGAMDHESLVPLRAYYFSRDEKLLVYDYMPMGSLSALLHGNKGAGRTPLNWEVRSGIALGAARGIEYLHSRGPNVSHGNIKSSNILLTKSYDARVSDFGLAHLVGPSSTPNRVAGYRAPEVTDPRKVSQMADVYSFGVLLLELLTGKAPTHALLNEEGVDLPRWVQSVVREEWTSEVFDLELLRYQNVEEEMVQLLQLAVDCAAQYPDKRPSMSEVVRSIQELRRSSLKEDQDQIQHDNDILL

SEQ ID NO: 173580 - protein, 610 aa, Glycine max
  unsure (1)..(610): unsure at all Xaa locations
  Clone ID: PAT_MRT3847_127761C.1.pep
MLPQKHTLVATLAVVLAVAQAVDLASERAALLALRSAVGGRTLFWNATRESPCNWAGVQCEHDHVVELHLPGVALSGEIPVGIFGNLTQLRTLSLRFNALRGSLPSDLASCVNLRNLYIQRNLLSGQIPPFLFDFADLDLVFYGTTSFSFVKVSPTNASNTNTIGINKHNRSGAYKKLDQCRFLKQXKVKYNKLAXTINHNMDHVPFEEHXPSCTGATVIDPPPPSTTNDVARPDAKEVRTAFFAKNNAGALYFSKSGPXVLADKGVSDVENGAGHANGNSAVAAVAVGNGGSKAAEGNAKKLVFFGNAARAFDLEDLLRASAEVLGKGTFGTAYKAVLEAGPVVAVKRLKDVTISEKEFREKIEAVGAMDHESLVPLRAYYFSRDEKLLVYDYMSMGSLSALLHGNKGAGRTPLNWEVRSGIALGAARGIEYLHSRGPNVSHGNIKSSNILLTKSYDARVSDFGLAHLVSPSSTPNRVAGYRAPEVTDPRKVSQKVDVYSFGVLLLELLTGKAPTHALLNEEGVDLPRWVQSVVREEWTSEVFDLELLRYQNVEEEMVQLLQLAVDCAAQYPDMRPSMSEVVRRIQELRRSSLKEEDQDQIQHDNDIQL

SEQ ID NO: 173581 - protein, 50 aa, Glycine max
  Clone ID: PAT_MRT3847_127762C.1.pep
SGRLMNWSTRGVRGTNNTALKQLKGEYLVWLNKFACFLRVGHTTMYLNTK

SEQ ID NO: 173582 - protein, 40 aa, Glycine max
  Clone ID: PAT_MRT3847_127763C.1.pep
ELGPMGAMNKSVVRAGDGYSDIVLYPSLSHHMLDFSVDHA

SEQ ID NO: 173583 - protein, 83 aa, Glycine max
  Clone ID: PAT_MRT3847_127764C.1.pep
IRWTPDKIFLMVARFMCEVIVFLGGKVIVYVHLVSWWERYLRVVLCSPYMGITAIEIRTTSVFEANFVYLCFSERVVPVYVKY

SEQ ID NO: 173584 - protein, 39 aa, Glycine max
  Clone ID: PAT_MRT3847_127765C.1.pep
KKGKCAPKKGSRLYCIKCLQGHFNYSNNEDSCSIMKKKE

SEQ ID NO: 173585 - protein, 154 aa, Glycine max
  Clone ID: PAT_MRT3847_127766C.1.pep
APDLRNLKLYFFEVHHGDIIFICSDGVHDNFDPQQHGLKPRDVSAELNGDNWKAFESHRRADELKSQFRTDQLKMLIKQMAEPTPQLIVNALLNYCIKITSKCRTYMEQNIGPKQPPSYAEFPGKFDHPTCVAFRVGGVNNPEDVASASPGLHV

SEQ ID NO: 173586 - protein, 95 aa, Glycine max
  Clone ID: PAT_MRT3847_127768C.1.pep
MSYSSGIVVSGGQGATQLCGMDREARVLRYREKRKNRKFEKTIRYASRKAYAETRPRIKGRFAKRTEIDSDVERLYSPGAAALMLDTPYGVVPTF

SEQ ID NO: 173587 - protein, 70 aa, Glycine max
  unsure (1)..(70): unsure at all Xaa locations
  Clone ID: PAT_MRT3847_127769C.1.pep
KAHANHTLSVAIVRRGKEYHLYGSIVFTGRCGAALDDGVMTEECGAAIGDDYXIARIAWRCSWGADGCMK

SEQ ID NO: 173588 - protein, 37 aa, Glycine max
  unsure (1)..(37): unsure at all Xaa locations
  Clone ID: PAT_MRT3847_12776C.1.pep
TRTGFKAVSPDLVRRKVGLHSAXSLHLFDGLESDSAE

SEQ ID NO: 173589 - protein, 67 aa, Glycine max
  Clone ID: PAT_MRT3847_127770C.1.pep
VGIRRTLQPMLRPLSSGLKIKPTNTPLSSCVELCLHQKNEHLFLVVCKKFVDERQSKNSHPETWAIV

SEQ ID NO: 173590 - protein, 61 aa, Glycine max
  Clone ID: PAT_MRT3847_127771C.1.pep
KCEQVDRVVVLWGPCYLKKLLAVLDLNEIHMPLAAKRTQKEVPYYLRVFSLYPFGTFRFKR

SEQ ID NO: 173591 - protein, 177 aa, Glycine max
  Clone ID: PAT_MRT3847_127772C.1.pep
MAVALSSCTSLSSVLFSTVKFRYSLRHRPIVASFHCNNHPLRVSSSSSSSSSSKSNRKKEGAGHKKQSKDERPARGNVLESQQTSSKPFGIQRKNKDLIFDSKDQQVEQSILQDSAFLNAVVKVYCTHTAPDYSLPWQKQRQYTSTGSAFMIGDRKLLTNAHCVEHDTQVKVMNHNM

SEQ ID NO: 173592 - protein, 72 aa, Glycine max
  Clone ID: PAT_MRT3847_127773C.1.pep
TTTWMIHRSLGHRCTYGSLYADNQMQTGVHPTCNFVSICAMRRTAAFRAHLCLGLADLYVVLAEQDYPGSLP

SEQ ID NO: 173593 - protein, 95 aa, Glycine max
  unsure (1)..(95): unsure at all Xaa locations
  Clone ID: PAT_MRT3847_127774C.1.pep
DRRVRKGYQTFNYNSYPQSSYKVAXVDFGRCIAQTLSLIIKMSTLVSDLHLYNIANVKALAXADITHCITHSQDMNNTSSSXLPNCLNDLNLVDI

SEQ ID NO: 173594 - protein, 65 aa, Glycine max
  Clone ID: PAT_MRT3847_127775C.1.pep
VPQVNTAIQECGSAPMAPNLLTVYKGTVAVLKPGILTTRHFRGPGLSFLLWAPEQKGLPITFFAH

SEQ ID NO: 173595 - protein, 117 aa, Glycine max
  Clone ID: PAT_MRT3847_127776C.1.pep
MESCAQFGWWVVLILCLAFQIQPNYGFYLPGSYPHNYDVTDELWVKVNSLTSIDTEMPFSYYSLPFCKPEGGIKDSAENLGELLMGDRIENSPYRFRMYTNESEIYLCQIQALSRDQ

SEQ ID NO: 173596 - protein, 124 aa, Glycine max
  unsure (1)..(124): unsure at all Xaa locations
  Clone ID: PAT_MRT3847_127777C.1.pep
SPLPTELFFGHSISGQAGPSPSLITQLPGFNANLPSKHYSRYISIDXNAQRGKNLVYYFGSSQSRPQNDPFGLSLNGXPGGSTFDCFIYEHGPLNYHAAYSKRNLPTLHINPYSLSKGSNIIYL

SEQ ID NO: 173597 - protein, 56 aa, Glycine max
  Clone ID: PAT_MRT3847_127778C.1.pep
FSSECLGPLCFCATATCWINRDFVQSSLNMESNICCRFGFLKNTCPSLYAIVSSYY

SEQ ID NO: 173598 - protein, 207 aa, Glycine max
  Clone ID: PAT_MRT3847_127779C.1.pep
MSDGPGLGAVLLMYGWQALQPSCLLNIFFITWTLVLLQLMTSVSLHPKVNAGILSPGLMGLYVVFLCWCAIRSEPEGAECIRKSESANKTDWQSIISFVVAILALVVATFSTGIDSKCFQFRKSDPPAEDDVPYGYGFFHFVFATGAMYFAMLLIGWNSHHSMRKWTIDVGWTSAWVRIVNEWLAVCVYLWMLVAPIIWKSRHADST

SEQ ID NO: 173599 - protein, 111 aa, Glycine max
  unsure (1)..(111): unsure at all Xaa locations
  Clone ID: PAT_MRT3847_12777C.1.pep
ASSINNKNGSVNNNPCTFIALVPWGEASFVGAHSYWNLYVYXKNKNRAGDSSFAGVKKQTQFSVFHSPNNKRYPISQWHIFQGSINKISFLTDGTYIATGGRDGYLPVVDY

SEQ ID NO: 173600 - protein, 54 aa, Glycine max
  unsure (1)..(54): unsure at all Xaa locations
  Clone ID: PAT_MRT3847_127780C.1.pep
WNSKVLLQFPVARIARFLKAXKYDERDVAGAPVYLGAGLDYLRSEVLELCGFAV

SEQ ID NO: 173601 - protein, 49 aa, Glycine max
  Clone ID: PAT_MRT3847_127781C.1.pep
VDFNKLEKLYSFYILQIKFFIISSLLRSSSKLSFRAFHHLLVANEHQGW

SEQ ID NO: 173602 - protein, 150 aa, Glycine max
  unsure (1)..(150): unsure at all Xaa locations
  Clone ID: PAT_MRT3847_127782C.1.pep
RSXNSRXRPTRLRFLLPSILNPKKAIKSLPPSLSLSFPFPRFHHHRASFLSFSPAPLTCYYHCPVRAFNGSAPRYKTPQTDSLRFKCYWTTRRIYAQMLGSLAGVKPLLSLSLSLSCLSFHASSFFVNTFFAFSLRVGGNLNSVTVLSHS

SEQ ID NO: 173603 - protein, 41 aa, Glycine max
  Clone ID: PAT_MRT3847_127783C.1.pep
TWLHIVYCVHMLAGIGLFLSIIYVFSCLSLIFPKTRFWSCD

SEQ ID NO: 173604 - protein, 48 aa, Glycine max
  Clone ID: PAT_MRT3847_127784C.1.pep
DRKGSYYPPPLDILHIYGVNSTRSENRCIIMNNVSSLTSLILVTDSRG

SEQ ID NO: 173605 - protein, 58 aa, Glycine max
  Clone ID: PAT_MRT3847_127785C.1.pep
FYFINWKYKTMLEFGFLGFLGLFCLFSGFGNFCFGRLNHFKIRYLITPYHDWDDDYIL

SEQ ID NO: 173606 - protein, 69 aa, Glycine max
  Clone ID: PAT_MRT3847_127786C.1.pep
ASSQEEVILLGVIGTPFLNRVQIALTLNGVEYQYLENDLNDGSDLLLKHSPRDNMTPGSDDDEKPVSDS

SEQ ID NO: 173607 - protein, 61 aa, Glycine max
  Clone ID: PAT_MRT3847_127787C.1.pep
SFTNMPGTLSYRKITFLGNQFLIIHRLGKKKTFSLIQRKCATFLIMEGAQKASNATRHKMN

SEQ ID NO: 173608 - protein, 66 aa, Glycine max
  Clone ID: PAT_MRT3847_127788C.1.pep
GGGGANSNTSTTNYWNLTMRQEANNPAQRVPINAANLDNKKAVPESEALPPLRPCLYGVPRLLQHG

SEQ ID NO: 173609 - protein, 42 aa, Glycine max
  Clone ID: PAT_MRT3847_127789C.1.pep
NQRRVFLFVVYCIKIHQTNSLSPESLRIMACVSSAWTKIVYK

SEQ ID NO: 173610 - protein, 55 aa, Glycine max
  Clone ID: PAT_MRT3847_12778C.1.pep
DYIYLIFSNTTLLFHSYSLNILTLFIYCSTIILNIIFLYYNFLLMGPFRSFMYHF

SEQ ID NO: 173611 - protein, 235 aa, Glycine max
  Clone ID: PAT_MRT3847_127790C.1.pep
RADSARGHHRHKHEHEADDDRDIELPHVDHGYVKNRSLPLSTIIDILKQKTGKNDIDVGKLRLSLYDIFGEDASPKVKKFMKVILNKLQQGDGGSGKQGGILGLVGSLAQEFLKQKIDSSDDGGYAKPAMETKVESKYEAYAGTSSAKPRLSDGGILMSGCQTDQTSADASPAGNSASAYGAFSNAIQAVIEESDGAVTNQEIVLKAREKLKRGGFKQRPGLYCSDDHVDGPFVC

SEQ ID NO: 173612 - protein, 95 aa, Glycine max
  Clone ID: PAT_MRT3847_127791C.1.pep
MGSLMASASITLAFAIILFSLPSEISANNYIYSSPPPPKKPYHYPSPPPPVPSPPPPKAPYHYTLHHSNYFKCFKRKILIVLVDATFFDKLQYLV

SEQ ID NO: 173613 - protein, 100 aa, Glycine max
  Clone ID: PAT_MRT3847_127792C.1.pep
IPVLFWVARESKSAMVINPMEEMGVPNNTMAGESGKKGTIWVGLSQIWGPKVVALNLGPEPSARIIVISGPPNKPQQAKTFFQPFILRGPCHIPFPMAHN

SEQ ID NO: 173614 - protein, 64 aa, Glycine max
  Clone ID: PAT_MRT3847_127793C.1.pep
ETQFFPSILRKPLPAGATPRHCRVWIISTCNFSIPERKVVETHITHVLIFMVAVTIYNELVLSD

SEQ ID NO: 173615 - protein, 83 aa, Glycine max
  Clone ID: PAT_MRT3847_127794C.1.pep
LFRQNLYRRSKLYDARKSSSILSRDARTRRWAIKKSESGYKRMEEFLALRLREIMKTNSCDFFVSKVAEIEATMNSGYYSSRG

SEQ ID NO: 173616 - protein, 73 aa, Glycine max
  Clone ID: PAT_MRT3847_127795C.1.pep
SITLLSRGYKTESWTMIIPMFIWLLKKSLISCERSCYWQCLARFRQTFVLCMTAKRSPAWTASFLGSMELSLW

SEQ ID NO: 173617 - protein, 52 aa, Glycine max
  Clone ID: PAT_MRT3847_127796C.1.pep
TLKDHIKLIDNDSICTPLITSTHDMLYSKCIKNIKKRKATSVVVSPRPNYGP

SEQ ID NO: 173618 - protein, 63 aa, Glycine max
  Clone ID: PAT_MRT3847_127797C.1.pep
RKLGSSRADGLLCVIRYPDHVDIAHPLLKLERYRTRGAYTNPFCQTTVKRYKHCGRHYTLGLI

SEQ ID NO: 173619 - protein, 451 aa, Glycine max
  unsure (1)..(451): unsure at all Xaa locations
  Clone ID: PAT_MRT3847_127798C.1.pep
MRKKTMLNFFKLLKAIREILSIASLMALGTFIDQGEAPDFYFQKYPEDHPVFGFFTWRWVLTLGFDHMFTSPIFLGVLALLGASLMACTYTTQLPLIKVSRRWSFLHSAEAIRKQEFSESLPRASIQDVGTILMGAGYEXVFLKGPSLYAFQGLAGRLAPVGVHIALLLIMAGGTLSACGSFRGSVTVPQGLNFVVYDVLAPSGFLSSPTDAFNTEIHVNKFYMDYYESGEVSQFHTDLSLRNMDGKEVMRKTISVNDPLRYGGITIYQTDWSISALQILKDNEGPYNLAMAPLQINGDKKLFGTFLPVGDINSPDVKGISMLARDLQSIVLYDKEGKFAGVRRPNSKLPINIDGSEIVIVDAIGSSGLELKTDPGVPVVYAGFGALMITTCISYLSHSQIWALQDGTTVFVGGKTNRAKMEFPEEMSRLLDKVPEIVESNLPKHADSISG

SEQ ID NO: 173620 - protein, 101 aa, Glycine max
  Clone ID: PAT_MRT3847_127799C.1.pep
WLGLEGATLNLNILQLVLLFIQTDPGVPVVYAGFGALMITTCISYLSHSQIWALQDGTAVFIGVKTNRAKMEFPEEMNRLLDKVPEIVESSLPKQADSISG

SEQ ID NO: 173621 - protein, 50 aa, Glycine max
  Clone ID: PAT_MRT3847_12779C.1.pep
SIEYRYLKYIFLYINYIINSIKNLCKISLLTLNPPFSIPSSGLKAFIGTE

SEQ ID NO: 173622 - protein, 148 aa, Glycine max
  Clone ID: PAT_MRT3847_1277C.1.pep
MEILQKGETDSNRIEAQIYSLRSAIESAETKHQEEQIECSVKIRKAYELIEQIKSESSKRESQLEAELKRKNADIEELKANLMDKETELQCIVEENEKLNLKLEKRMSSQREHELQKELRKLDDCVAGLKADLMEKKTPLQSIFEENE

SEQ ID NO: 173623 - protein, 58 aa, Glycine max
  Clone ID: PAT_MRT3847_127800C.1.pep
AYHVAMLYEGTPHHTTVHDYTRNLLTAIGHFVLSLTMILLKLHPVTVSYLTLMQLTMK

SEQ ID NO: 173624 - protein, 59 aa, Glycine max
  Clone ID: PAT_MRT3847_127801C.1.pep
FSLFIVVKKSHTILQDTRHEEREQTWYKSTLCYGEKWGIYRNETSKVERDLDICQEKLI

SEQ ID NO: 173625 - protein, 168 aa, Glycine max
  Clone ID: PAT_MRT3847_127802C.1.pep
MKFFSAIEFLSSFLVLMFFYPFCHSLDNTITINHPIRDGDVLVSNGLGNFALGFFSPRNSTNRYVGIWYNKISEQTVVWVANRDTPLNDTSGVLKISNNGNLVLHDNSTRSLNPVWSSNVCIESTNNISAKLLDTGNLVLIQTNNNNILWQSFDYPGNTMLPFMKLGL

SEQ ID NO: 173626 - protein, 96 aa, Glycine max
  unsure (1)..(96): unsure at all Xaa locations
  Clone ID: PAT_MRT3847_127803C.1.pep
VSPDGTQFSITWPDRRIRAFRFSSGXLRRGYDESLEAAHDLQRSDASLYRLESIECGXRMAVEKEIETTESALLTNAVFDXSSDVLIYATLLGIKI

SEQ ID NO: 173627 - protein, 65 aa, Glycine max
  Clone ID: PAT_MRT3847_127804C.1.pep
SRSAWALVKRLLVLFQWAFHCHRPAWSLYIRSKVLTVKLKQQIFFLGLVFVYRAVFGGPGHGGFK

SEQ ID NO: 173628 - protein, 408 aa, Glycine max
  Clone ID: PAT_MRT3847_127805C.1.pep
MEKPQNGEEKEETTASFCGYDSLHRLLKDNLNPHHFQEVSRLLTGLNCGKALEAVSLPESATSLSAEHGFDIQAFSFCADKELLREPRIVRVGLIQNSIVLPTTAHFADQKKAIFEKLKPIIEAAGSSGVNVLCLQEAWMMPFAFCTREKRWCEFAEPVDGESTKFLQSFALKYNMVIVSPILERDINHGEVIWNTAVVIGNHGNIIGKHRKNHIPRVGDFNESTYYMEGNTGHPVFETAFGKIAINICYGRHHPLNWLAFGLNGAEIVFNPSATVGELSEPMWPIEARNAAIANSYFVASINRVGTETFPNQFTSGDGKPAHADFGHFYGSSYVSAPDASCTPSLSRNRDGLLVTDMDLNLCRQVKDKWGFRMTSRYELYADTLARYVKPDFEPQVTSDPLLHRKSL

SEQ ID NO: 173629 - protein, 160 aa, Glycine max
  Clone ID: PAT_MRT3847_127806C.1.pep
AGFQWFREFLEVFICFSSINLVPCSVSFSNLTYFEVDSCKNMLYLFTSSTAISLTQLKTMKIRCCNSIEEIVSEEGDESHEDEIIFEQLNCLKLKELGKLRSFYKGSLSFPSLEEFTVMDCERMESLCAGTVKTDKLLEVTLEGYLIPLETDLNSAMQNP

SEQ ID NO: 173630 - protein, 52 aa, Glycine max
  Clone ID: PAT_MRT3847_127807C.1.pep
MALQADSLGPASFSVLKEGKSGETLKDSTLFGLSFSQPIKANFTSSAFKCKR

SEQ ID NO: 173631 - protein, 54 aa, Glycine max
  Clone ID: PAT_MRT3847_127808C.1.pep
MPFVKALLVGTKMLLSFNTNSRVFSVNFQYGPATPRITPPPNCHTQCLYSPSWS

SEQ ID NO: 173632 - protein, 126 aa, Glycine max
  Clone ID: PAT_MRT3847_127809C.1.pep
FLGVPLISPRFVNFSPPGFSSLGGNPQLSTKNLLIFPPTPHRGFGKIKNLAVFLKICNSPLGVFNLTFPPLWPLKKFGPQPHPFLVPCSKVPPLKFFPPPVWPLFPFFKKGPFFPHTKCPNFPFFF

SEQ ID NO: 173633 - protein, 42 aa, Glycine max
  Clone ID: PAT_MRT3847_12780C.1.pep
GRSSEREKKDTLQLAEIKHARRAMVGFMGFSVRASPSGYGSL

SEQ ID NO: 173634 - protein, 529 aa, Glycine max
  Clone ID: PAT_MRT3847_127810C.1.pep
MSGTGTFFYGSVIQPLIRYHYLSPPIPIRPLCCISPLITSIHSNDAVSPQNGTLRFQTEHQQHSEEPLPVPSLSAAEENKATTKLRKKKEDDVVSDNRFKLRNGREVFEEKAYLVGVERKNDVQDFGIEESLSELSQLADTAGLLVVGSTYQKLTSPNPRTYIGSGKVSEIKSAIHALGVETVIFDDELSAGQLRNLEKIFGGDVRVCDRTALILDIFNQRAATHEASLQVSLAQMEYQLPRLTKMWTHLERQAGGKVKGMGEKQIEVDKRILRNQIGILKKELESVRKHRKQYRNRRFSVPVAVVSLVGYTNAGKSTLLNQLTGADVLAEDKLFATLDPTTRRVQMKNGKEFLLTDTVGFIQKLPTTLVAAFRATLEEISESSLLVHVVDISHPLAEQQINAVDKVLSELDVSSIPKLIVWNKVDKVSDPQKLRLEAEKRDDVVCISALSGNGLQEFCNAVQDKLKDSMVWVEALVPFENGDLLSTIHQVGMVEKTEYTEQGTYIKAHVPLRFARMLTPMRQLCVSQP

SEQ ID NO: 173635 - protein, 47 aa, Glycine max
  Clone ID: PAT_MRT3847_127811C.1.pep
VKIFDSICVHIYCATFPYSRLFSKDDIHQKAKSRSFIKNCFRRILLA

SEQ ID NO: 173636 - protein, 127 aa, Glycine max
  Clone ID: PAT_MRT3847_127812C.1.pep
FPFYPHKSPGPVPPEILKPSLRGEVYPLSPPPSRVGPRPPLPWAGTRLVKNLGGDYPTFLFFFPCPPKTRPPDAFPPFKTGRPGSPHPCPPLLCAGPPKGPYSGNPGGNPSPPSIFNPPVTPGLPPF

SEQ ID NO: 173637 - protein, 108 aa, Glycine max
  unsure (1)..(108): unsure at all Xaa locations
  Clone ID: PAT_MRT3847_127813C.1.pep
MGSESGSAKIGFDIVLCGHLRKRLKACIESCGEQEWNLNMXLHNSIDDCLLESVLGVIDAQTLADSLAIYLENILPSVVGRATIGSMIILARTLTLALTLLHSQLGFP

SEQ ID NO: 173638 - protein, 37 aa, Glycine max
  Clone ID: PAT_MRT3847_127814C.1.pep
SFDDGYFIKDRHSWNCLNQLIFCQLLVGLTKQRRLGY

SEQ ID NO: 173639 - protein, 140 aa, Glycine max
  Clone ID: PAT_MRT3847_127815C.1.pep
SMDDNWIGFVFCVTFERNIIRPAVSSSSPHCSFSSSHPFRLSFESEYTEEYFDMPLNLELNKIYGSKHLWVIYISREHCHFVKTGAHITFKAHSSVKINAWGMKSIFRQDIDDLERMQQGESLPLHPNDVVHHVDFDSVE

SEQ ID NO: 173640 - protein, 52 aa, Glycine max
  Clone ID: PAT_MRT3847_127816C.1.pep
MNTMPCAQREQMNHSTAMIGHGKGNECNPRSVINKPLNTNLVFYTGLEFYFL

SEQ ID NO: 173641 - protein, 93 aa, Glycine max
  Clone ID: PAT_MRT3847_127817C.1.pep
VLVWKWEESNFACFVIYECVFFEDLCLAHWDDFLRLAFLSFLRYWWVCNCWQWIGFDFGGGYCVCCNWFMCFVWSGTSRAFKVVSWAVLVFDS

SEQ ID NO: 173642 - protein, 65 aa, Glycine max
  Clone ID: PAT_MRT3847_127818C.1.pep
IASVRPFVAWRTYCFVIFTYDMVQGHACMPTHIIEVRRNQQTSGKSSLSGEGGIIFLEEFMKKKD

SEQ ID NO: 173643 - protein, 37 aa, Glycine max
  Clone ID: PAT_MRT3847_127819C.1.pep
YRKLLELVKIKIMKSPINSCLVCFNKSYFKHLLLCLA

SEQ ID NO: 173644 - protein, 133 aa, Glycine max
  Clone ID: PAT_MRT3847_12781C.1.pep
LHHKEADILGSSSYDQGSSWAMEVGGHLKVHSILVENLSKNGQMLVEMLCEECSHFLEIAEAIRSLGLTILKGATKAHGEKMWICFVVEGQNNRNVHRLDILWPLVQILQSKSTVYSQLTCWFLETMATHWQV

SEQ ID NO: 173645 - protein, 68 aa, Glycine max
  Clone ID: PAT_MRT3847_127820C.1.pep
FLLQQVFTENPVRDNRQGGKLSIKKRALFSTTCLRYKLSQKFLLPESEKFKFKFKMVELIEMQFDYPE

SEQ ID NO: 173646 - protein, 100 aa, Glycine max
  Clone ID: PAT_MRT3847_127821C.1.pep
IKSAMVRVKPTGVLALIANPVTRREPIHWSNNQIHFLQRILSMAYRISTCPYSSAGAIWGSSFIAPRAHKNHNGLCAIHSPSRPLFNPKKIGEFKSSLVQ

SEQ ID NO: 173647 - protein, 133 aa, Glycine max
  Clone ID: PAT_MRT3847_127822C.1.pep
SQYLDYVFLEFSSLFCLYLLFSHARENFLNYKIFFHTDFSLPVNPNIGLEIQHTHIRMHIHIFLMTQKPTIYLLAGKAVQDKYYIISQDETSLLFSNGKVKSHSNAKIQYYIQRQSTSPEDGTPSSDTVSTNV

SEQ ID NO: 173648 - protein, 56 aa, Glycine max
  Clone ID: PAT_MRT3847_127823C.1.pep
IKASILLLRSSFDIIENSFSSSTTFAYTFLVSDLCTLFTLCSLTTCLALLGLSNLL

SEQ ID NO: 173649 - protein, 39 aa, Glycine max
  Clone ID: PAT_MRT3847_127824C.1.pep
KAGTFSREALPLISPSLFHFYPNMTRDYSSSILKKPFFF

SEQ ID NO: 173650 - protein, 113 aa, Glycine max
  Clone ID: PAT_MRT3847_127825C.1.pep
LLWDFKIQGPFPTPLNKNEIFRFKSPPPFMGKVSFTPRFIYFTFFFVIWFKREVGLSWANFTLATRFNFQLKPLRSYVHAPPNSKNQKREKGSQRMILVLNLKLKGELFVAVF

SEQ ID NO: 173651 - protein, 47 aa, Glycine max
  Clone ID: PAT_MRT3847_127826C.1.pep
RWVERGALISTCTKGRRSGEVSLEVLWGACGNHWVALNCMFSLCVQQ

SEQ ID NO: 173652 - protein, 129 aa, Glycine max
  unsure (1)..(129): unsure at all Xaa locations
  Clone ID: PAT_MRT3847_127827C.1.pep
RSIKKGLFRDSMLKTRATGGAIHAWRRKSPHDLARHAFYTNLSSNMTLRRIRVRGGNXVNCMALKLDTCHYICSIETVTRITRNLDVRFNASYNDLALTQTLRKSAFAQVDAAPFRQWFLPHYGAQIGA

SEQ ID NO: 173653 - protein, 46 aa, Glycine max
  Clone ID: PAT_MRT3847_127828C.1.pep
LHELAWETPLILQIQSLSLNYFLVNFYPTCCTPTVLWPPTPAIDPR

SEQ ID NO: 173654 - protein, 67 aa, Glycine max
  unsure (1)..(67): unsure at all Xaa locations
  Clone ID: PAT_MRT3847_127829C.1.pep
SVKGLSDRIPFGTRKMMNYAXQGEAXRKLWWSPAAILTCKSFIXLGYKGEKVIEPFSNWFPPLFPLG

SEQ ID NO: 173655 - protein, 492 aa, Glycine max
  Clone ID: PAT_MRT3847_12782C.1.pep
MSRTMMNVYCQYVCEKTTEGGTKYEGGSSGCKDMRLESEKNVSSFLNDFVTDNAGFNDVICPSEKVRVDSACFPSVFLDTVVCESDKLHYADINQKGAVNFAQPSEANSQQHIEKSKFHTEPFFKDISDFQTEPCYKDASQMLNFPAGCELHEALGPAFSKVGKCFDWPTQVNQEMKPVEMSDEISTSQLTSESCPEHLLEAMLVNINHSNNDVNSELSFCTSKQSAMASAKNHEASIHNVHTINSEGYLMDQLSLVREDKHHSLSSSSGICGVMSSKGVSSTFHSSNSGQLERSSEPSKNSKKRARPGESCRPRPRDRQLIQDRIKELRELVPNGAKCSIDSLLERAIKHLLFLQSITKHADKLTDFADTKSKLHHKEADILGSSSYDQGSSWAMEVGGHLKVHSILVENLGKNGQMLVEMLCEECSHFLEIAEAIRSLGLTILKGATKAHGEKIWICFVVEGQNNKNVHRLDILWPLVQILQSKSTVYSQ

SEQ ID NO: 173656 - protein, 55 aa, Glycine max
  Clone ID: PAT_MRT3847_127830C.1.pep
TLSITHKDHTHLLNCIKTSEALILPLGRSFSTLWLLISADPKPYIDPSNVPKLDL

SEQ ID NO: 173657 - protein, 65 aa, Glycine max
  Clone ID: PAT_MRT3847_127831C.1.pep
EDYSDRISPHGLNMWLHAPMHHYGITLSLLRDHVMELNKYLAQKSRIHMGHLPVGDGISVNPHIT

SEQ ID NO: 173658 - protein, 147 aa, Glycine max
  Clone ID: PAT_MRT3847_127832C.1.pep
TAGAPPQQEARAVARPPQEERGRTRLKQIPAAISPPQVYSAVPPPQQNILTMPAPKKLVPPSSNGMPPPLLRTMPPPPPPKFSDPFEVKVHTKNKTLLKTKSDAVPDTLVNLMEYGEEDDDDIDDSSEESLPHDTRATGVQKPFWAL

SEQ ID NO: 173659 - protein, 83 aa, Glycine max
  unsure (1)..(83): unsure at all Xaa locations
  Clone ID: PAT_MRT3847_127833C.1.pep
DHLTHAVVIRQDCIVWAHRTICPXNKPEEITAVMNDYKEPVSLAPTGMQLGGTXYMGPHGGPRARIQRKKGTGGATGMNTRAD

SEQ ID NO: 173660 - protein, 68 aa, Glycine max
  Clone ID: PAT_MRT3847_127834C.1.pep
HLFYIQLFATTYASCHNLSMVHLSTYQLPPSNYNYHTLLLSQQSQPHSFNSALYYSLLELHLDPLYIF

SEQ ID NO: 173661 - protein, 93 aa, Glycine max
  Clone ID: PAT_MRT3847_127835C.1.pep
NRNVYPQSPIPHSKVAALIQPFTSLILKSSRDFEIFTHSLNLTRSPISNRRVFTTSTKSVKHSDSRSLWPAQRVIFFPLRNRTPTSSKKLQDS

SEQ ID NO: 173662 - protein, 104 aa, Glycine max
  unsure (1)..(104): unsure at all Xaa locations
  Clone ID: PAT_MRT3847_127836C.1.pep
KSNPQWWEMIFPREGWGPNKGYEMGSSEWANQTSGHXSFQRTDPKQXTVYNTVMGISQDFEIDGKTLTPAFSVPRDAARSSKNAESSAECGPCVFHGWNGGLIQ

SEQ ID NO: 173663 - protein, 57 aa, Glycine max
  Clone ID: PAT_MRT3847_127837C.1.pep
KVFLLVWLRNKYVLMVVNLYRIPTSLWGILVCVSYGKQKITMVSIFKNIKTRIELSP

SEQ ID NO: 173664 - protein, 83 aa, Glycine max
  Clone ID: PAT_MRT3847_127838C.1.pep
GSRTACESAFNMSRRRRASLLPVCPGCAGDDAPAELAARGRGEEGGWEESDWDSQRLCHRRSCWSSTHALSEISLWFAYATKF

SEQ ID NO: 173665 - protein, 73 aa, Glycine max
  unsure (1)..(73): unsure at all Xaa locations
  Clone ID: PAT_MRT3847_127839C.1.pep
LKPLVLFSCAIIHVMMPWIIIELLICPVVFLLSCSCYVQIQLYIRSSVCGLMIFFLFKXXRCLNGGKGXGGNX

SEQ ID NO: 173666 - protein, 76 aa, Glycine max
  Clone ID: PAT_MRT3847_12783C.1.pep
NTHTMDTEGLSVICAGIGTIEVDDEGNVIGYIKGQYCLGTNLSHFQFSFFFFLFYPSEFDLMKNSDSSLLMFITDY

SEQ ID NO: 173667 - protein, 67 aa, Glycine max
  unsure (1)..(67): unsure at all Xaa locations
  Clone ID: PAT_MRT3847_127840C.1.pep
GLSLLLRLXXXXGRLSWGLVLCXVVFFCXPALXXLXAVLCCAWPCLFPCAXXXPXLXSPFCRLLXAX

SEQ ID NO: 173668 - protein, 178 aa, Glycine max
  unsure (1)..(178): unsure at all Xaa locations
  Clone ID: PAT_MRT3847_127841C.1.pep
APATSGAVLNGLGSSFLSGGNMSQTLLASAIGGQVGAAVTVNPRRLIVVAAAAPKKSWLPGVTGGGNSRHPKWLDGSLPXDYGFDPLRLGKDPALLTWYKEAELIHGRCAMAAHLGTLAERALSRVLWLEARPDPNAGASFSFRSLLGTHSSSWCALRTPYGRFSHPLSSTCDWRLPW

SEQ ID NO: 173669 - protein, 60 aa, Glycine max
  Clone ID: PAT_MRT3847_127842C.1.pep
VTSPQLLTHSSPTLSKALPSRHNLRQYACHTQPSKHNTLEPHKWSSILPQDTLRSTCRYT

SEQ ID NO: 173670 - protein, 289 aa, Glycine max
  unsure (1)..(289): unsure at all Xaa locations
  Clone ID: PAT_MRT3847_127843C.1.pep
MLKSRSLDGTVTHFTPLLDVSHHKENTRQYRWWNSKILDLEEAKHQLLFSLPMFLTNLFYYLIVLVSVIFAGHLGDLQLAGATLANSWFSVTGLAVMVGWSGALETLCGQGFGAEEYQMLGIYLQASCIISLICSIIISIIWVYTEPILVVLHQSQDIARTTSLYTNVLIPGLCALSFLQNISRFLPTQSVRKVIXVSFSALPLLGHIFIAXALIFCTDLSFIGAPVAVSISLWISIPLLVMYIMYAERFRQTWTGFSFESFNYIFTDLKLALLSAAMVWYVSKNLTLS

SEQ ID NO: 173671 - protein, 43 aa, Glycine max
  Clone ID: PAT_MRT3847_127844C.1.pep
LTVSNSNVTSLIYYNIIHIVPSSYTHHDPYTNHTHYHLIYISL

SEQ ID NO: 173672 - protein, 168 aa, Glycine max
  Clone ID: PAT_MRT3847_127845C.1.pep
ARGIVEDLKDDSEPYRRMVMETIEKVVTNLGASDIDARLEELLIDGILYAFQEQTSDDANVMLNGFGAVVNSLGQRVKPYLPQICGTIKWRLNNKSAKVRQQAADLISRIAVVMKQCHEEQLMGHLGVVLYEYLGEEYPEVLGSILGALKSIVNVIGMTKMTPPIKDL

SEQ ID NO: 173673 - protein, 172 aa, Glycine max
  unsure (1)..(172): unsure at all Xaa locations
  Clone ID: PAT_MRT3847_127846C.1.pep
EFGSSFIHSPSLIFKITFTFLPSLISQTMSTIHQTHTRREGEDKEFSFWGSSNIIPSENDCDQPQGNESRLKKEAYFGETHQRKSLKYEYSRFCSTVSDPSRSKAISEGQRELMEMMQDMPESGYELSFQDMVVHEKQVLEPEQQPHQNETSLENTLMQSSSGNKAQLXRVS

SEQ ID NO: 173674 - protein, 76 aa, Glycine max
  Clone ID: PAT_MRT3847_127847C.1.pep
FVRAPLHFFFFICPLSSPAWGVSYILRGGGCSLHFTVLNFFRPYVSSFIKKCIKKYLAGVSLPLKKCIEPFRMIEE

SEQ ID NO: 173675 - protein, 78 aa, Glycine max
  Clone ID: PAT_MRT3847_127848C.1.pep
VGATTPSMLTANATDWTTTMSYRISTSTRITLGINVATANMLIRDTISSADTERYVANCYLAELNMAAAQAHCNLCLA

SEQ ID NO: 173676 - protein, 171 aa, Glycine max
  Clone ID: PAT_MRT3847_127849C.1.pep
IKKSLVIMTAKHPKGRRLIHQSTSYFQTDRANPAVYSQEGISEMRGNYFSSVFSFSKQKTKTKSLNKWPQLDSMGSVNSNTEKQLMYHSMSLPDASANSTASSQADKPVSSQVEGESRPEPSDIGDKLLSLSENFDDFKASKQAKLEDWLEGTSNHGENCLPGDEKMALRK

SEQ ID NO: 173677 - protein, 78 aa, Glycine max
  Clone ID: PAT_MRT3847_12784C.1.pep
PIKNLYYLEAAVSATASINLLGLRGIIQKKKRENLGLGGEGRVFFYILTRGTFHYFENPLSMHLGLGRQTAGSTKHPF

SEQ ID NO: 173678 - protein, 77 aa, Glycine max
  Clone ID: PAT_MRT3847_127850C.1.pep
MALLFTVVCGYGGGGGSDGCGGVEHGGGGYGEGAGGGEGAGAGYVAVGGGHGGGGGSCGGGGCWLVLMVVDPEDVLF

SEQ ID NO: 173679 - protein, 117 aa, Glycine max
  unsure (1)..(117): unsure at all Xaa locations
  Clone ID: PAT_MRT3847_127851C.1.pep
PRVRPHVHPLVRIHNSTFHDERANMGNAPVLPETTKNFNTLLYXGFKIMSLSGRTLDIQAVSDASXKQAGYHTWERSILKDPQDPYTRYASAYKTSASEXLVRPGYNIAGIIGDRWS

SEQ ID NO: 173680 - protein, 94 aa, Glycine max
  unsure (1)..(94): unsure at all Xaa locations
  Clone ID: PAT_MRT3847_127852C.1.pep
CEXSXVVREIAXKERXLXLXXYSPTVCXXRXDEPMCRAEKMXXCXXKXXCXVXXHXXLXXLPXXSXXXXXKTXXXXXXHEXXXXXLEPIRXLGQ

SEQ ID NO: 173681 - protein, 76 aa, Glycine max
  Clone ID: PAT_MRT3847_127853C.1.pep
FFFFNNNFTIYFNKHDTSVWVKKNHGRAKIYSQSNSIQRYLLWGANTQKHCCLLENFQIKNEPQTTNLHTHALLKL

SEQ ID NO: 173682 - protein, 81 aa, Glycine max
  Clone ID: PAT_MRT3847_127854C.1.pep
LTVNFSVMAPFNTLFLQASILPKLMLELNSFLIYHSYWTDKADSLRSLESYVYIFSCSSHSIGKQVYETPRFFSAFASQRS

SEQ ID NO: 173683 - protein, 50 aa, Glycine max
  Clone ID: PAT_MRT3847_127855C.1.pep
SSTHPLTHSTFSHTPIVTYSSYFKLTEAFPSPLYLITLSNSDYNLHHTHL

SEQ ID NO: 173684 - protein, 491 aa, Glycine max
  Clone ID: PAT_MRT3847_127856C.1.pep
MLSFSTLRRSSPFLARRFSTQRSQIRHASTSSSSSSSLHNTANPVRTWFGRNALSTVLAGASVSGLLLYGYSSSHNSEFDSSLLKSSISSLVDRSTPISEDQERRRSFLSKISLPECSGALLFGDSFKRKVFFNYEKRIRLRSPPEKVFEYFASDRSSEGEVLMKPADLMRAVVPVFPPSESHLVRDGYLEGERRPGHLCCPSSEFFMLFDVNNDGLISFKEYIFFVTLLSIPESSFSVTFKMFDVNNNGEINKEEFKKVMALMRSRHRQGVHHRDGLRTGLKASDSVEDGGLVEYFFDKDGNGCLQHDKFVNFLRGLHDEILRLEFAHYDYQSCQTISAKDFALSMVASADMSHLGRLLERVDGLNDDPRLKDARITFEDFKNFAELRKKLLPFSLALFSFGEVNGLLTRDDFQRAASHVCGISLSNIVVEIVFHLFDANRDGNLSFDEFVRVLHKREKDVAQPVETGIRGWLSCGGNRMHNPSSSWMFS

SEQ ID NO: 173685 - protein, 68 aa, Glycine max
  Clone ID: PAT_MRT3847_127857C.1.pep
LDSAIDLDTIIAYGAVEINLNCDLQRLLTVHERDLWNMMCLYNKAFSGLTSDAGQYLDESLSSDMDVL

SEQ ID NO: 173686 - protein, 236 aa, Glycine max
  Clone ID: PAT_MRT3847_127858C.1.pep
MVVVSPKMANATPNGSVPHNHVGAVLITIPTIKIDGKQTLATEDHTSIDYLQRAQWLRAAILGANDGLVSVASLMMGVGAVKRDAKAMLLAGFAGLVAGACGMAIGEFVAVYTQYEVEVGQMKRDMNMSVGGERDLEMEMERRTLPNPLQATLASALCFSIGALVPLLSAAFIENYRTRIIVVVAMSCLALVVFGWVGAKLGKTPKLKSCVRFLLGGCIAMSITFGSTKLLGASAL

SEQ ID NO: 173687 - protein, 77 aa, Glycine max
  Clone ID: PAT_MRT3847_127859C.1.pep
PRVRKTETAYKAPTATYTSAGRIFDSKSTPQYTDCLTRLEEFNHDQNECLQHSGGYKMCKKIERAALLERNKHRSLF

SEQ ID NO: 173688 - protein, 119 aa, Glycine max
  Clone ID: PAT_MRT3847_12785C.1.pep
CGPQTVPNCLPKLIYLGFSKGYGVPLAVLILLPFFFFIPVQTVFSKHTCPRNQAFSFGPKRIKPQMWPLFFCGDFLSFFKTKSFLKISVCQLLPPFKIPPFSVRGVKKNPQHKPPPCKI

SEQ ID NO: 173689 - protein, 104 aa, Glycine max
  Clone ID: PAT_MRT3847_127860C.1.pep
SPEGGPSPCMFSGLCIGVLSWVSSCFFHFVGFRFFIRSGVFFWLFLGREPRFFLGCSCRCRCFCSLFCAPGFCFSVVPSFFFVCFLRFVFFQGMVVASPPKMES

SEQ ID NO: 173690 - protein, 55 aa, Glycine max
  Clone ID: PAT_MRT3847_127861C.1.pep
HQKASYHTCIYFSNIRILVCKLDRGRRRFLIHGGHFEHRVMVDLVIVVLRTEKRS

SEQ ID NO: 173691 - protein, 108 aa, Glycine max
  Clone ID: PAT_MRT3847_127862C.1.pep
GTLIKPLAVCGHPSHLPRSKFTALHCLHLGYPSLILHRVLHRLEAYHHTLILIYNPPPLAIHHTLILIYNPPSLAIHHPLILLAKPITFILSFLRLHLSRELVITINT

SEQ ID NO: 173692 - protein, 52 aa, Glycine max
  Clone ID: PAT_MRT3847_127863C.1.pep
IMMHLLWLLCGHVFVQFNFSFQFFPISVFPGCVCLAGIPLHVFVYYIPLEPF

SEQ ID NO: 173693 - protein, 104 aa, Glycine max
  unsure (1)..(104): unsure at all Xaa locations
  Clone ID: PAT_MRT3847_127864C.1.pep
APXXXVXPXFSXVLAFXGXXPXXXXXXLAXXGFVAXXAVXXAXGXGVXXXXXXGGXPWFLGXXVVLXLASLVXLFXGVXVXSXSPGFVSSGAXLWDGXFAXLGX

SEQ ID NO: 173694 - protein, 397 aa, Glycine max
  Clone ID: PAT_MRT3847_127865C.1.pep
MANASGFFSPSVPHFKVRVKPLTTAIGFSAKVVCVGNIEGAEKHASTVSPSSQSPIPRLVSKGCKLVGCGSAVPALQISNDDLSKMVDTNDEWISVRTGIRRRRVLSGKDNLTGLAVEAARKALEMAKVDPDDLDLILMCTSTPEDLFGSAPQIQKQLGCKANPLSYDITAACSGFVLGLISAACHIRGGGFNNVLVIGADALSRYVDWTDRGTCILFGDAAGAVLVQACNSEEDGLFGFDLHSDGSGQRHLNASIKENESNNALDSNGSVFGFPPKQSSYSCIQMNGKEVFRFAVRCVPQSIESALEKAGLPASSIDWLLLHQANQRIIDAVATRLELPSERVISNLANYGNTSAASIPLALDEAVRSGKVKAGQTIATAGFGAGLTWGSAILRWG

SEQ ID NO: 173695 - protein, 223 aa, Glycine max
  unsure (1)..(223): unsure at all Xaa locations
  Clone ID: PAT_MRT3847_127866C.1.pep
MANASGFFTPSVPHFKVRVKPLNTAIGFSAKVVCFGNIEGAEKHASTVSPSSQSPIPRLVSKGCKLVGCGSAVPALQISNDDLSKMVDTNDEWISVRTGIRRRRVLSGKDNLTSLAVEAARKALEMAKVDPDDLDLILMCTSTPEDLFGSAPQIQKQLGCKTNPLSYDITAACSGFVLGLISAACHIRXGGGFNNVLXIGADALSRYXDWTDRGTCILFGDAA

SEQ ID NO: 173696 - protein, 48 aa, Glycine max
  Clone ID: PAT_MRT3847_127867C.1.pep
EDFSLNINWYRRIIRLCDENSQTFIMMYGVQSIVVFTFKLGIEKTIKP

SEQ ID NO: 173697 - protein, 58 aa, Glycine max
  Clone ID: PAT_MRT3847_127868C.1.pep
NPRILKSNRKSKYGEALSLYDSDEDDEELDDDDNEDDDDDWLSDVSFVISLSVVKSCL

SEQ ID NO: 173698 - protein, 229 aa, Glycine max
  unsure (1)..(229): unsure at all Xaa locations
  Clone ID: PAT_MRT3847_127869C.1.pep
SRVYSDALETLSPTEPLSMNCSVSDVSGLDNVVADMCGASSTDKQAHDFMMSRFLTAAKAMTIQPPQYASSRKQTVLTEQPREFIKLVPEQKKSFVSRHITDIVPYTGQCQEEEEEEEESDNETNDYANNSAKGCGLFPRLCVRNSLCLLNPVPGTKMGNQFPLYSAYEVGKPDKSSHIRSHRPAPSIKKAXDAINKSKSSSRAASPDKQDVRKKWTSESSYTYSELKS

SEQ ID NO: 173699 - protein, 157 aa, Glycine max
  Clone ID: PAT_MRT3847_12786C.1.pep
MEPEGQKGTVNPSAMLASLLSRRAKLHEDLRSIEKQVYDMETSYLQDPGQCGNVLKGFEGFLSSSKNTALLKRSRKFQPEDRLFSLSSVTSPAAEDLAAGRDDGRPDYGPGRSKGGGIYANGQGKPKKGRGGARDAKRARASSEQDFDYEDDPDLTL

SEQ ID NO: 173700 - protein, 80 aa, Glycine max
  Clone ID: PAT_MRT3847_127870C.1.pep
FDHINRLDKVAITKLKVSFMQKEDTPTVLIVHQWTYKGGKKERAKLLSKEKVETCKGKQDNVDVYEKRRCFASLLLYLEK

SEQ ID NO: 173701 - protein, 43 aa, Glycine max
  Clone ID: PAT_MRT3847_127871C.1.pep
PPYTFQLIRIMVTLTQLQPSALSTIRQSLCCTCNCKRCRLCLC

SEQ ID NO: 173702 - protein, 54 aa, Glycine max
  Clone ID: PAT_MRT3847_127872C.1.pep
KEPCFYKLNQKSLLCEGKKATINHSRTLHNPMIVSLSYIKHSATANKQVQLQPD

SEQ ID NO: 173703 - protein, 36 aa, Glycine max
  Clone ID: PAT_MRT3847_127873C.1.pep
ATLLLFFFFLRKMSGEHRLTYDTSKDIEEKKDSKEI

SEQ ID NO: 173704 - protein, 101 aa, Glycine max
  Clone ID: PAT_MRT3847_127874C.1.pep
TFSPVTGSNGYDPWLQNALFPRLSGGLKAQESATQNEMIHGSQSASASNHLLKTSPANNWSKNEWPVKGTVEGLGNSSVARPHNGNLHPTSDVQSFWSSFD

SEQ ID NO: 173705 - protein, 63 aa, Glycine max
  Clone ID: PAT_MRT3847_127875C.1.pep
MSLRRFLGYSDGEVMRSDAKPCSRLMRHTAAIFSVGGALGFWVLCRMHYGLCYLFPSLLSCSI

SEQ ID NO: 173706 - protein, 68 aa, Glycine max
  Clone ID: PAT_MRT3847_127876C.1.pep
LICHCAPISNSIPWLKARKLSLDSLQQFCRLLHDLGCWNNSTTNKLTWIFLLENVSNWSLHPPYPSNP

SEQ ID NO: 173707 - protein, 48 aa, Glycine max
  Clone ID: PAT_MRT3847_127877C.1.pep
SRERGTNRGRDKRISFARCLELPLSLRNSQHHRLPLWYTKGFNTSNIG

SEQ ID NO: 173708 - protein, 113 aa, Glycine max
  Clone ID: PAT_MRT3847_127878C.1.pep
FLLQMAEVEDRDNNTRHHHHYISSTTTTQSPMNNFPRDLLRTFMGVNNNNNNNNNSNNNNHHNLPMPVVKLEEELELSLDLSMNGRFGDGPHGEEDKENNFDTGVCKRPGDGI

SEQ ID NO: 173709 - protein, 34 aa, Glycine max
  Clone ID: PAT_MRT3847_127879C.1.pep
DQVNSGWNNVGSHFRFVCHKQVTCLEFIVSGFNK

SEQ ID NO: 173710 - protein, 82 aa, Glycine max
  Clone ID: PAT_MRT3847_12787C.1.pep
GKRQKGYVFLLKNESQKILLKPCLGGGFFPSKGFPTGGNRDKVFLNNFKRGVGLIRGGGLKGFPVRRAFFYLWCEEIKFYPK

SEQ ID NO: 173711 - protein, 437 aa, Glycine max
  unsure (1)..(437): unsure at all Xaa locations
  Clone ID: PAT_MRT3847_127880C.1.pep
ATPLLLFLLFSLVEGLHNPKCDATHQQDHDGSTLQVFHVFSPCSPFRPSKPMSWAESVLKLQAKDQARLQFLASLVARRSIVPIASGRQITQSPTYIVRAKIGTPPQTLLLAMDTSNDAAWIPCTACDGCSTSTLFAPEKSTTFKNVSCGAPQCKQVPNPTCGASACAFNFTYGTSSVAANLVQDTVTLATDPIPAYTFGCIQKVTGSSVPPQGLLGLGRGPLSLLSQXQKLYQSTFSXYCLPSFKTLNFSGSLXRLGPVAQPIRIKFTPLLKNPRRSSLYYVNLVAIRVGRRIVDIPPEALAFNANTGAGTVFDSGTVFTRLVEPAYNAVRNEFRRRIAVHKKLTVTSLGGFDTCYTAPIVAPTITFMFSGMNVTLPPDNILIHSTAGSVTCLAMAPAPDNVNSVLNVIANMQQQNHRVLFDVPNSRLGVARELCT

SEQ ID NO: 173712 - protein, 108 aa, Glycine max
  unsure (1)..(108): unsure at all Xaa locations
  Clone ID: PAT_MRT3847_127881C.1.pep
MTNTSSLTMQLAMADNSAVSPAPLLPESFLRTYVSGVCNKLTPQSITLSRPKALSVFADTKNARRXLKGTCVDESVSTLIQEDDGPTTDYGRIYCLTPGLHGFHLHVY

SEQ ID NO: 173713 - protein, 55 aa, Glycine max
  Clone ID: PAT_MRT3847_127882C.1.pep
VIVLITTGQVIKFQPADSSEAPKPLVIEETDAAPPQADEMPYTILYTFICHTDDY

SEQ ID NO: 173714 - protein, 212 aa, Glycine max
  Clone ID: PAT_MRT3847_127883C.1.pep
EQQLTDSQVADNLIGVIFAAHDTTASALTWVLKYLHDNANLLEAVTKEQEGIKNKLAMENRGLSWDDTRQMPFASRVIQETLRSASILSFTFREAVTDVELEGYTIPKGWKVLPLFRSIHHSADFFPQPEKFDPSRFEVPPRPNTYMPFGNGVHSCPGSELAKLELLVLLHHLTLSYRWQVVGNEDGIQYGPFPVPKHGLPVKITPRNKIFT

SEQ ID NO: 173715 - protein, 52 aa, Glycine max
  unsure (1)..(52): unsure at all Xaa locations
  Clone ID: PAT_MRT3847_127884C.1.pep
KKVFPLFSQSLNKPPYKKNCKASRTGSEINSGVKESNSGGRPXFLFFFFNFF

SEQ ID NO: 173716 - protein, 49 aa, Glycine max
  Clone ID: PAT_MRT3847_127885C.1.pep
KSSLIKFTLNFLIIYLSMYNKRRSFKISVNDDKLRVEWVILIESKLSIF

SEQ ID NO: 173717 - protein, 83 aa, Glycine max
  Clone ID: PAT_MRT3847_127886C.1.pep
MEGRQILSRFCPKSSSVSSIPIVKQQYSLKFPLLPSSSSHLSSQSQNLDVPSRAVHPISIVHKEVCSSSWRRIWCSSSSSSSS

SEQ ID NO: 173718 - protein, 442 aa, Glycine max
  Clone ID: PAT_MRT3847_127887C.1.pep
MPAVGMAPDAHLAIYKVCDLFGCSESAILAGMDTAIQDGVDILSLSLGGPPAPFFDDPIALGAFSAIQKGIFVSCSAANAGPFYSSLSNEAPWILTVGASTIDRRIVAAAKLGNGEAFNGESVFQPNNFTSTLLPLVYAGANGNDSSTFCAPGSLQSMDVKGKVVLCEIGGFVRRVDKGQEVKSAGGAAMILMNSPIEDFNPFADVHVLPATHVSYKAGLAIKNYINSTSTPTATILFQGTVIGNPHAPAVTSFSSRGPSLESPGILKPDIIGPGQNILAAWPLSLDNNLPPFNIISGTSMSCPHLSGIAALLKNSHPDWSPAAIKSAIMTSANTVNLGGKPILEQRLLPADVFATGAGHVNPLKANDPGLVYDLQPTDYIPYLCGLNYTDKEVGFILNQKVKCLEVKSIAEAQLNYPSFSIRLGSSSQFYTRTLTNVDPPT

SEQ ID NO: 173719 - protein, 104 aa, Glycine max
  Clone ID: PAT_MRT3847_127888C.1.pep
KSRAAPKCKKSKKSQNKSVVKQVTTAEGLDDAWAWRKYGQKPIKGSPYPRSYYRCSSSKGCLARKQVERSHLDPAVFLVTYTAEHSHPHPTRRNSLAGTTRKNN

SEQ ID NO: 173720 - protein, 46 aa, Glycine max
  Clone ID: PAT_MRT3847_127889C.1.pep
MQELCFFVAIKKKKKKKKKKKKKKKKKKKKKKKKKKKKKKKKKKKK

SEQ ID NO: 173721 - protein, 90 aa, Glycine max
  unsure (1)..(90): unsure at all Xaa locations
  Clone ID: PAT_MRT3847_12788C.1.pep
TKQASSGSPWYGPDRVKYLGPFSGEPPSYLTGEFPSDYGXNTAELSADPETFTRNHKLKMIHSQXTMLITLIYIFPKLLSHNNIKFRQSI

SEQ ID NO: 173722 - protein, 38 aa, Glycine max
  Clone ID: PAT_MRT3847_127890C.1.pep
HPPLPDFENDLRIPKVTLWIIEPRFKDQFERVEYFYSW

SEQ ID NO: 173723 - protein, 97 aa, Glycine max
  unsure (1)..(97): unsure at all Xaa locations
  Clone ID: PAT_MRT3847_127891C.1.pep
CKERIASVSGEMEQGIMVMTIFWGYGNNCSAKCKNYLHXWQFFFKVREQFKKVGNGLFWXQKLKPNLDSMLMANALVGTLXFKKNYYSKDSHLVPFN

SEQ ID NO: 173724 - protein, 131 aa, Glycine max
  Clone ID: PAT_MRT3847_127892C.1.pep
HVYDLQRTHRIRGMGEMAATDGIPENTRIALACAMNSSFRRRASSDIYTICSQDCELWNPACTKAMTMSLNPNPCSHTWSLEFLKRTTSHWNIIGVSARTATLMHDVHVTIDWFIASEECVPKTYCVLNTQ

SEQ ID NO: 173725 - protein, 233 aa, Glycine max
  Clone ID: PAT_MRT3847_127893C.1.pep
PEKPWGFEEYHAGEEVGDGSEEFVWCNDNELNSKMEGIWPIGYPNFSEKMEKLKSRIEMVGRKMLPVILEKGSIEFVGGHHEVGTLCCVYKHRRDDHSVSSSLKYDVIRMLIRGTDYSHSLCFHVCNGSSHFHLYSKKTWLSFCPQPAALIVTAGDQTQTFSGGEYKHVIGRPIFKGEKEETISMAFLYSTQTTKDNFQTSRGRTISLGQQAILALILPLVYHVINFFYKKLN

SEQ ID NO: 173726 - protein, 45 aa, Glycine max
  unsure (1)..(45): unsure at all Xaa locations
  Clone ID: PAT_MRT3847_127894C.1.pep
PGVGQALFEKLTNNLTVHYQEWFTQHSSTFFMRVIGPLRLRVXRA

SEQ ID NO: 173727 - protein, 80 aa, Glycine max
  Clone ID: PAT_MRT3847_127895C.1.pep
NELNNFNLSVSTLTFVSFIHGGLITSSLSPTHEISHTMALSIKNSEIEFVDHEGGESLAHADLVSPWTPHQCRTVQIKRV

SEQ ID NO: 173728 - protein, 257 aa, Glycine max
  unsure (1)..(257): unsure at all Xaa locations
  Clone ID: PAT_MRT3847_127896C.1.pep
SVRRRRRRRNPPDMEISGTVPSSXPLSLLSSDDGDPLLGSRIRAGKDDALTADTDLEASSSGRIASRKQKYWVSSIKLFGVELSPDNVAVAMVYFVQGVLGLARLAVNFYLKDDLHLDPAEAAVISGFSALPWLVKPLYGFISDSVPLFGYRRRSYLVLSGLLGALSWSLMATFVDNKYSAGFCILLGSLSVAFSDVVVDSMVVERARGESXSTXGSLQSLCWGSFAFGGNVSXYFSGSLLDAYGVRVVFGGTSLLS

SEQ ID NO: 173729 - protein, 80 aa, Glycine max
  Clone ID: PAT_MRT3847_127897C.1.pep
LILTHLSVVLADLDLMNSISYSSSRTNHHKAWGSLTKTIMVIFHNKYEMNVHQMFLGPKPFKGDQTPQKRGTNRVGFQHG

SEQ ID NO: 173730 - protein, 87 aa, Glycine max
  Clone ID: PAT_MRT3847_127898C.1.pep
MGVLSPHRIQLSLFPIVVVLLSLTLSASAANSGHNTFLHCLVNHSEPFHPITPAIFTPNNTSFSSVLEAYIRNLCFNTSTTRKPFLI

SEQ ID NO: 173731 - protein, 77 aa, Glycine max
  Clone ID: PAT_MRT3847_127899C.1.pep
YIGKLGNITIHSLAVFRLRSSISIYYTPGRQHTICSISCTLFSDCEYHTALANQYSHDKVLFIPHLIKNYRTYSPTI

SEQ ID NO: 173732 - protein, 34 aa, Glycine max
  unsure (1)..(34): unsure at all Xaa locations
  Clone ID: PAT_MRT3847_12789C.1.pep
YYNHSYWQYNERSYVKKFPLXLLTAAANETNTYR

SEQ ID NO: 173733 - protein, 45 aa, Glycine max
  unsure (1)..(45): unsure at all Xaa locations
  Clone ID: PAT_MRT3847_1278C.1.pep
NGVVLXMTKDKXXXKKVRXXVNSXSKRKXXERLXLVRXXPTMXXR

SEQ ID NO: 173734 - protein, 143 aa, Glycine max
  unsure (1)..(143): unsure at all Xaa locations
  Clone ID: PAT_MRT3847_127900C.1.pep
PPMFSRVDSKHNKRSPPTQKKNGGFKPGKGFVVPPGQPLGQKSSKKKNFPKIFFEGNLXNNKKFSFSRKDNIVSSLGKVIKKRALKNPFXKGNGVFXKKKNFFFPFKFPKKKSGFSPFGLKTMWRGVKTGDANGKKRPPFFFS

SEQ ID NO: 173735 - protein, 46 aa, Glycine max
  Clone ID: PAT_MRT3847_127901C.1.pep
ISIQETAVENDALNGPYLISLPLRNLHVMHTRFSWVSPWYLTVISL

SEQ ID NO: 173736 - protein, 127 aa, Glycine max
  unsure (1)..(127): unsure at all Xaa locations
  Clone ID: PAT_MRT3847_127902C.1.pep
SLSGHSSGIDSVSFDSSEVLVAAGAASGTIKLWDLEEAKIVRTLTGHRSNCTSVDFHPFGEFFASGSLDTNLKIWDIRKKGCIHTYKGHTRGVNAIRFTPDGRWGCSCGEDKYXKVWDLTAGKLLHD

SEQ ID NO: 173737 - protein, 222 aa, Glycine max
  Clone ID: PAT_MRT3847_127903C.1.pep
TNRSTSVFGKCATKTNTPSTIPHESSVGGHISSNVNDKGDIFSVPSNQYAEFNMFLDPLAAKIVFESEVNITLIPLNTQRRVRSFSTIIGELRRTPRTPEAVFSERLLSRLYRLKQTHNRYQHMDTFLGEILGAVVLAESHSGLNPKFEAKAVKVLADGNESSDGKTVVDEKGGKLMRILSSVDAKAYHSLYAKKLGDENQSAKIGSFEEQRRKWSHPHIIN

SEQ ID NO: 173738 - protein, 184 aa, Glycine max
  unsure (1)..(184): unsure at all Xaa locations
  Clone ID: PAT_MRT3847_127904C.1.pep
SDSIEKSDTIESEGFSTITTEFINSLSTSRLPNHKIKLKVDSRIMLLRNLDQNEGLCNSTRLIITMFADHIIEAKIMSGKGQGNTVYIPRLATSPSQSPWPFKLIRRKFPIIVSYAMTINKSQGQLLASVGLYLPTPVFSHGQLYVALFRCXNKNGLKVMIYDKDKKPLSTTTNVVFKEVFQNL

SEQ ID NO: 173739 - protein, 96 aa, Glycine max
  Clone ID: PAT_MRT3847_127905C.1.pep
KKPPKGPAPPRFGKKRAGTQKAGAPPLCLDGGNKNPPQNPFEEQPGPYGGPQSQAPKKGFARYKVNPGKAIGGGLPPMGVIIGLRAGVGAVGALLV

SEQ ID NO: 173740 - protein, 36 aa, Glycine max
  Clone ID: PAT_MRT3847_127906C.1.pep
SPSDFQTRISTDNQPSTQGIELMLQLLMMRVSSDLA

SEQ ID NO: 173741 - protein, 60 aa, Glycine max
  Clone ID: PAT_MRT3847_127907C.1.pep
PQGISKLNTSKHLKMKDSRNSTHSITCTNTHVSSCNRPLLHVHILLITILQYDTLRSVCI

SEQ ID NO: 173742 - protein, 71 aa, Glycine max
  Clone ID: PAT_MRT3847_127908C.1.pep
SPTRSQKWTPSPPHIRFLEGSTGLGPNAFFSLNHNNFFNRLFSYRSFFFKDSVLYTSREEEKGLIKQLSMG

SEQ ID NO: 173743 - protein, 134 aa, Glycine max
  Clone ID: PAT_MRT3847_127909C.1.pep
MATKPKTLELTVLSAEGLHVRGKPTPNIKVFAVVRAESITSHTTAMVTTTTTNGSDNGFQYLWNDKFWVELGPRARCVTIEVKCRTETGVVRDVGVARIAVSDFLGGSSVPDHCLQSLCYRLRDWDGRENGVVI

SEQ ID NO: 173744 - protein, 143 aa, Glycine max
  unsure (1)..(143): unsure at all Xaa locations
  Clone ID: PAT_MRT3847_12790C.1.pep
GSRSSMHLASGIVTLGDMGYKKLSRYCYDSNXVHYNLVNSVSNGIGSIDGHSTDADHTGMVIAKDLDSTNVTVLLWTHXSPISALCFYPSGTILMSASIHGPNLNVFKIMPASAKWPACVTGTYYVHLTWWQRGSQMQLYKIS

SEQ ID NO: 173745 - protein, 57 aa, Glycine max
  Clone ID: PAT_MRT3847_127910C.1.pep
IFHTLSRDYCLRYFMYDSSSLYCEPCDITRRIFRFLDVILCTSLNPYMTRWVFLGSV

SEQ ID NO: 173746 - protein, 132 aa, Glycine max
  unsure (1)..(132): unsure at all Xaa locations
  Clone ID: PAT_MRT3847_127911C.1.pep
TLYRDISKYNQLETQEAAQEESGWKLVHGDVFRPPSNSDLLCVYXGTGVQFFGMILVTMIFAALGFLSPSNRGGLMTAMLLLWVLMGLYGGYSSARLYKMLKGTEWKRIALKTAFMFPATAFAIFFVLNALI

SEQ ID NO: 173747 - protein, 105 aa, Glycine max
  unsure (1)..(105): unsure at all Xaa locations
  Clone ID: PAT_MRT3847_127912C.1.pep
RRVRWCLSWRLLXGVWXCRVRVFGAPXLGLLRVLGVCLSLRLVAXFPASGLCRXLALCXCGLARGGXAXXRAFVSALWVCSLXXGGVFXCSECRPAXXLAFRRYR

SEQ ID NO: 173748 - protein, 117 aa, Glycine max
  unsure (1)..(117): unsure at all Xaa locations
  Clone ID: PAT_MRT3847_127913C.1.pep
QHRNPTTGGSKNEKRKPPQQHGNKQTQTPAENQRQQPNPTKQQEHPRETQKTKGPTQDKRPQNPPKNPTPKPGRGNPPREQHRPQTRSKKXQQPHKRQPREQPAXPPESQEHQQXQG

SEQ ID NO: 173749 - protein, 111 aa, Glycine max
  Clone ID: PAT_MRT3847_127914C.1.pep
DQQARLLELEETSVKTYYQISDSECSLIEVESLPTQVDHPSTFEPEITHEASEKTGDSVDVAEMEQVSEDENPMADQSTQMEGHNGFEAQLSLLRRNLWLSLLQRLDNYPS

SEQ ID NO: 173750 - protein, 153 aa, Glycine max
  unsure (1)..(153): unsure at all Xaa locations
  Clone ID: PAT_MRT3847_127915C.1.pep
MIASLIFYGDNRLSAKTILTRRDTDILRADYTHSEXMTQCLPRDMRXHRVYTSQIYICPSSLSGEIKYKRKWSNIHICGXFYDGRYKFGTKHDKNRAATEEEMMEVTXNRGIPADVLAKRAHESEKHAAHESLKDQIPAGDKLPSTKVNTVAK

SEQ ID NO: 173751 - protein, 64 aa, Glycine max
  Clone ID: PAT_MRT3847_127916C.1.pep
TKLHFQQVCISHYNHKSQSLTGLQAAPCDQICPVGNRQGSYHCRKKDLKFTKGQKIVCSKRHNN

SEQ ID NO: 173752 - protein, 577 aa, Glycine max
  unsure (1)..(577): unsure at all Xaa locations
  Clone ID: PAT_MRT3847_127917C.1.pep
MRTRLSSTRVIFVASLCFLASFELLQAKTIDPYKVLGVDKNASQREIQKAFHKLSLQYHPDKNKAKGAQEKFSQINNAYELLSDEEKRKNYDLYGDEKGNPGFQSGHPGGQDGCTYFTGGLHLQCHLRCCKAKIWQGMGGQGGSKSFSFSFGSSGNSNPFGFGLDDLFGSFFGXENFISSVLSGDVPFREXNTGEACTRVLGXKVGFDCYGCMLMYRVKRYIESFVFFYTIKSANDLIKITAHRILLINANSSRLFYLASFCKELGIYPRRAPRLFVFSYKENEKGSLVEYSGDLDAKNLKAFCQEHLPRFSKRTDLNHLDQFSTTGKLPRVLLLSTKKDTPVIWRVLSGLYHKRITFSDAELHDVADPRVKTLEVDALPAIVGWLPNGEKRILKTGISVKDLKSAVLDLSNILDSFEKVSKKESSGQAKKAQTDSDEGRIPLLSKSNFEALCGEKTPVCIIGAFRSSKAREKLESILSLVSQKSLSRRPSQGSSSSRDSIFYVLLDAAKQKSFLKAFDKTDYKSSNNLLIAYKPRRGKYSVFMGEMTIEEAEKFISSVLSGDVPFRETSRKPVLEY

SEQ ID NO: 173753 - protein, 55 aa, Glycine max
  Clone ID: PAT_MRT3847_127918C.1.pep
KTPFRKHLQNHFFQSALIISLYKAWKPLNIRLSHNFLMWWNNDLSKRGIHMPVEP

SEQ ID NO: 173754 - protein, 105 aa, Glycine max
  unsure (1)..(105): unsure at all Xaa locations
  Clone ID: PAT_MRT3847_127919C.1.pep
KQTXXKXTGGKAXRKQLATKAAXKXAPTTGXXKKPHXXXPXTXALXEIRKYQKSTELLIRKXPFQRLGRRKCSRTSRLILRFPEPTPPCHLQESLLRPYPWLGLF

SEQ ID NO: 173755 - protein, 169 aa, Glycine max
  Clone ID: PAT_MRT3847_12791C.1.pep
VKLFGELAPSGNPDLQLSAVRELSIMTAMSHPAAMRFIPDHDPRESISNNLVLSDSLTREPARCLILRANGELSLLDLDDGRERNLTDSVELFWVTCGQSEDKTNLIEEVSWLDYGHRGMQVWYPSPGANSFKQEDFLQLDPELEFDREVYPLGLLPNAGVVVGVSQRM

SEQ ID NO: 173756 - protein, 195 aa, Glycine max
  Clone ID: PAT_MRT3847_127920C.1.pep
MSSHALNTNVNALDHFEIPVTTPFQDVSASVPSIAAFCRSSSFRNIFLTENWAELPLKENDTNDMVIYGALRDAAATGWFPANGNEVSNVSVAVKMENEGQNSKTTAARGTRTPPKKGLSYRGVRRRPWGKYAAEIRDTKRNGVRVWLGTYETAEDAALAYDRAAFKMRGSKAKLNFPHLIGSDHEPIKVTLKKH

SEQ ID NO: 173757 - protein, 280 aa, Glycine max
  Clone ID: PAT_MRT3847_127921C.1.pep
LGRARRFDSINKLLEHMVKDGCQPNVVTYNRLIHCYGCANYLKEALNVFNEMQEVGCEPDRVTYCTLIDIHAKAGFIDVAMSMYKRMQEAGLSPDTFTYSVIINCLGKAGNLAAAHWLFCEMVEHGCVPNLVTYNIMIALQAKARNYEMALKLYHDMQNAGFQPDKVTYSIVMEALGHCGYLEEAESVFVEMQQKNWVPDEPVYGLLVDLWGKAGNVEKASEWYQAMLNAGLLPNVPTCNSLLSAFLRLHRLPDAYNLVQSMVALGLRPSLQTYTLLLSC

SEQ ID NO: 173758 - protein, 111 aa, Glycine max
  Clone ID: PAT_MRT3847_127922C.1.pep
KRSHTPVTKPFRKTQTSGESLIVSFHLRTWRMSWSWRRRRAQNIPILGIGIWLWIRIIGHVILYNRENGKILLSLYQCHPTESLKLTKGKNRTSQQGGIKQKTKPNEKRKT

SEQ ID NO: 173759 - protein, 71 aa, Glycine max
  Clone ID: PAT_MRT3847_127923C.1.pep
WEDEALHLVVLKYPERNYLFRAELEWPKLPPSPFACVRPPVRRHFSVNYEALAPIQINILIPFKYLVLTFR

SEQ ID NO: 173760 - protein, 40 aa, Glycine max
  Clone ID: PAT_MRT3847_127924C.1.pep
MPVPAGGVRMPATNRVNRRAGLKTHGLWQRAIGFDPNAPN

SEQ ID NO: 173761 - protein, 61 aa, Glycine max
  Clone ID: PAT_MRT3847_127925C.1.pep
TTRSEVRNCQGINHQRQANATISCVINQIGPKSNTIRSPPGTHVRLHRYEYPLTVLEAYVR

SEQ ID NO: 173762 - protein, 103 aa, Glycine max
  Clone ID: PAT_MRT3847_127926C.1.pep
LIFPSTSRVICGLLRETRKISNIGVFTMEWLVEVQSGLPFWSNPYIPNSSKISAASPSVCSQNGGYSHLLFCVVFVAHSNVRPFGFQTRPFNFSLIKGWWGIL

SEQ ID NO: 173763 - protein, 59 aa, Glycine max
  unsure (1)..(59): unsure at all Xaa locations
  Clone ID: PAT_MRT3847_127927C.1.pep
YELTIGESWLXPARLPGPXNXIXRVDEPXLVRRXARRSRTTRSRXSRAXRTRXCDXFQX

SEQ ID NO: 173764 - protein, 93 aa, Glycine max
  unsure (1)..(93): unsure at all Xaa locations
  Clone ID: PAT_MRT3847_127928C.1.pep
LLNIQLESSTTNGDIVXGKELVMVKDNDTXAAIGLTSRFIPPPKTVSGLLKDRGTNEESFGRMXYFDHNVNLSSMKDMPYGNPTFENKPPVIL

SEQ ID NO: 173765 - protein, 134 aa, Glycine max
  Clone ID: PAT_MRT3847_127929C.1.pep
PRLELQGVNPFLNSWSWEWHQLRLNCILLLWVFPLRSMASHVQLAALATPALSSVVLESFGFKQRWPLYPLLSPLCGFFFSKICSMWYAPLWTTLFKRAPLEFSGLFLPLSEFKCSVLVMGVLRSWLPCVYIYT

SEQ ID NO: 173766 - protein, 66 aa, Glycine max
  Clone ID: PAT_MRT3847_12792C.1.pep
FCFCFLLRKEGPRDEVGTGPWGRHRLRQRLPYLAPSPNQLAAPAHAFFFFFFKFLKLEPLVRLRVP

SEQ ID NO: 173767 - protein, 110 aa, Glycine max
  unsure (1)..(110): unsure at all Xaa locations
  Clone ID: PAT_MRT3847_127930C.1.pep
LSRNGNVVLTSEGANLHNLVXMCRSLEVCGTLKAMGNRVASNWSRSCISPDDNHVAAGSADGSVYIWSISKGDIVSTLKEHTSSVLCCRWSGIAKPLASADKNGIVCVWT

SEQ ID NO: 173768 - protein, 65 aa, Glycine max
  Clone ID: PAT_MRT3847_127931C.1.pep
ICSYSSIHFDAVYHLTLEMYATQQGKVLALSVLMPNAMQLSEPRILHFGYLSVIPILSKLAGWLH

SEQ ID NO: 173769 - protein, 276 aa, Glycine max
  Clone ID: PAT_MRT3847_127932C.1.pep
MDAENGEERKHHEASTSENSAETSTNGEKREKGKQKEKPETVPFHKLFAFADSTDILLMAVGTIGAIGNGLGLPLMTLLFGQMIDSFGSNQQNTNVVEEVSKVSLKFVYLAVGSGLAAFLQVTSWMVTGERQAARIRGLYLKTILRQDVAFFDKETNTGEVIGRMSGDTVLIQDAMGEKVGKFLQLIATFIGGFVIAFIKGWLLTVVMLSTLPLLALSGATMAVIIGRMASRGQTAYAKAAHVVEQTIGSIRTVASFTGEKQAVSSYSKYNTVSVR

SEQ ID NO: 173770 - protein, 325 aa, Glycine max
  Clone ID: PAT_MRT3847_127933C.1.pep
MKAIVITRPGGPEVLQLEEVEDPLVGDDELLIGVHATSLNRADTFQRKGSYPPPKGASPYLGLECSGTVLSLGKNVSSWKIGDQVCALLAGGGYAEKVAVPVGQVLPVPAGVSLTDAASFPEVACTVWSTVFMMSRLSQGETLLVHGGSSGIGTFAIQIAKYRGSRVFVTAGSEEKLAFCKSIGADVGINYKTEDFVARVKEETGGQGVDVILDCMGASYYQRNLDSLNFDGRLFIIGFQGGVSTQADLRPLLAKRLTVQGAGLRNRSLENKAVIVSEVEKNVWPAIAEGKVKPVVYKSFPLSEAAEAHQLMESSQHIGKILLLP

SEQ ID NO: 173771 - protein, 88 aa, Glycine max
  Clone ID: PAT_MRT3847_127934C.1.pep
HVDKITQSMNLTSVDTRPKRMKPDDDDPVMLSSNNRTGEDFCDRIHKDVLKHTKSAMFCGSSATHKPHRDGKEHELEDEDIVHIIKTV

SEQ ID NO: 173772 - protein, 51 aa, Glycine max
  Clone ID: PAT_MRT3847_127935C.1.pep
VYGHWRMAMIVLDQRMEKRSNHAYVVAGHSLILEFGSGRVNMNTAIESLYH

SEQ ID NO: 173773 - protein, 85 aa, Glycine max
  Clone ID: PAT_MRT3847_127936C.1.pep
WPPKATPGLKFFPQKKNLGRVKCFAVLNNLMKKNQTPLINFFNPFFLLQLSPGTKWGNFQFPGTSKTKIFCKKKPKNPLFFGGTP

SEQ ID NO: 173774 - protein, 62 aa, Glycine max
  Clone ID: PAT_MRT3847_127937C.1.pep
NQHVLTSDILTVKRTERDTPKTSAINSNNEIKTDITKCFDMLYHLSLRKTQLFYYRWWIKGY

SEQ ID NO: 173775 - protein, 156 aa, Glycine max
  Clone ID: PAT_MRT3847_127938C.1.pep
MNGGAFDFIEENGNGSDSDSNSDDAPEYYQPISAVEDSGSSDDEHDGEFGHLPNGFAAHGVVENGISSLDLNDITEKSSSDEEEEEEEERIRELFERSSREDENRRNAPLTAENATRVMEAMRGVSFAGVVPDWAGRDADDRWIDQLRRLRQSSNT

SEQ ID NO: 173776 - protein, 80 aa, Glycine max
  unsure (1)..(80): unsure at all Xaa locations
  Clone ID: PAT_MRT3847_127939C.1.pep
SLAAGSNISLIAYQIRGFRPEGGRLKNDSLTDELRXALGEVDHKPXIIPGALGFIAAARHPEATTVVTRIVGCAGLKSTV

SEQ ID NO: 173777 - protein, 114 aa, Glycine max
  Clone ID: PAT_MRT3847_12793C.1.pep
TLAQSSSQRCLRFPPSSTAEFPPSKPVARRSSELRLEARRDGVCVFVVIKSGVPSFKTLCSLLSAFTFLFCILLEHLRWLLLQHRTALGSMYLDGQLGKTIARLQCLLEELDSS

SEQ ID NO: 173778 - protein, 103 aa, Glycine max
  unsure (1)..(103): unsure at all Xaa locations
  Clone ID: PAT_MRT3847_127940C.1.pep
SLGYAALIPYVEPVXVQAQSAEVDCNWFAEGDDGQEGVAHMDELQCAEYESLPTETNLVGTSKEXQLDLLCDEKASVXTTHDERVKTSKHEVNDACLDGTEEY

SEQ ID NO: 173779 - protein, 75 aa, Glycine max
  Clone ID: PAT_MRT3847_127941C.1.pep
HDLRVHCHAQDAHVTLKHCQCQAHPLECYTSDKSHCVSHLSVISSTPFVVGHFFFCKVFTTCPPTCPRTRPPTRK

SEQ ID NO: 173780 - protein, 100 aa, Glycine max
  Clone ID: PAT_MRT3847_127942C.1.pep
SLCCDCLSLSTNRSNHCSYPGLYKISGHVCNHNNCVGPSDDYNSFVICGGNTCCKGKNLATVSMMLATVPNMFTNPSHSRIPPPLHRWSASPGVHQSAVV

SEQ ID NO: 173781 - protein, 38 aa, Glycine max
  Clone ID: PAT_MRT3847_127943C.1.pep
RARTMIDHVIAQQHSHSDCCSDQIIKGLALVYVLAGTD

SEQ ID NO: 173782 - protein, 80 aa, Glycine max
  Clone ID: PAT_MRT3847_127944C.1.pep
AADSSSYKSVAGRAAIQSSNSYERRIGCIQQPATQEVIVGATRSTKKNSWFFLATRSMDQTMDIGRPAAAAAAEAARARA

SEQ ID NO: 173783 - protein, 248 aa, Glycine max
  unsure (1)..(248): unsure at all Xaa locations
  Clone ID: PAT_MRT3847_127945C.1.pep
IFVVGNNNNIGCCCCCEGVYSVRVDAXEGKVVVAGDVDPAKLVKKLKRGGKHAEICQNQKGGMMCNQIQNYPINPQFQNMQLGIGGKDNNNNHKGQKEKGTAAAAGQLAHFPILKGVQDLKVPAKEQKSVKFNLPEEDEFDASDDGYDEDGLGHGHPMQNKIMPMMINHNHKDNSGGSRNINGSVKKADVIDQAMLFKGKGGNFDEAEADNDGGKKGSSSQKDEIKKGDLDKPKAVSEVDSHKKKNGK

SEQ ID NO: 173784 - protein, 44 aa, Glycine max
  Clone ID: PAT_MRT3847_127946C.1.pep
SKPQLYKDLIDNHVDELEISYPIHFSVAFHGNMMPLAIQQPLRM

SEQ ID NO: 173785 - protein, 91 aa, Glycine max
  unsure (1)..(91): unsure at all Xaa locations
  Clone ID: PAT_MRT3847_127947C.1.pep
STDSCFLVTAMPFIMIQCPRLPPRQFIVRRAGGRKAGPPSLAHMLLPVVLKGRTSFPNVPPFIFFLAGSCGVILFNAPLFCFSGPKENYXK

SEQ ID NO: 173786 - protein, 45 aa, Glycine max
  Clone ID: PAT_MRT3847_127948C.1.pep
FFFFFFVWLTRGYGEFSLKAIVNLLRGSIIWISFYLCGEKNKLNF

SEQ ID NO: 173787 - protein, 85 aa, Glycine max
  unsure (1)..(85): unsure at all Xaa locations
  Clone ID: PAT_MRT3847_127949C.1.pep
RPRTPGEDGTSKPEQHHRAIXXHRTKERGTGTSFFFEXQEYQKIYGEKEGLGQLTLGHXQRKANPDRSLARARRGELEFTGHQLL

SEQ ID NO: 173788 - protein, 77 aa, Glycine max
  Clone ID: PAT_MRT3847_12794C.1.pep
FPPRFTHFVSLRVAFAFALFSISLFMLLFSFCFRALLSAYFCSCFSSVLVFVFTYALCSLLSFHPFLSKYTTIEYTN

SEQ ID NO: 173789 - protein, 62 aa, Glycine max
  Clone ID: PAT_MRT3847_127950C.1.pep
GTLYTQTRGSYGIKRGRRQRIIHKQSHLYVEHIIQEGYQTRRSNIIRLSRILHTFHAYGSNG

SEQ ID NO: 173790 - protein, 46 aa, Glycine max
  unsure (1)..(46): unsure at all Xaa locations
  Clone ID: PAT_MRT3847_127951C.1.pep
TKKXISTFKLSLQYLLLAILNRFLNNLVPIKLXNPLSILLYFSNFS

SEQ ID NO: 173791 - protein, 106 aa, Glycine max
  Clone ID: PAT_MRT3847_127952C.1.pep
SCLEGNRERVVAGASTVEHALRGAFEWGKGCDARAAACVGEVLAMRLKTEAPELGVGGGGGVHFDAEREIEKKSVDNGDAVWAVVRALRNRGVKVFVAGDRNSGSP

SEQ ID NO: 173792 - protein, 176 aa, Glycine max
  Clone ID: PAT_MRT3847_127953C.1.pep
MSGESASAIHKGQVDLLDFIDWSGVECLNQSSTHSLPNAIKQGYREDDGLHLESDADEQLLLYIPFTQVVKLYSFVIKGPEEEGPKTVKLFSNKEHMGFSNVNDFPPSDVANLSEENLKGKPVLLKYVKFQNVRSLTIFIEDNQSGSEITKVQKIVLHGTTVETTDMKGLKKIEDH

SEQ ID NO: 173793 - protein, 63 aa, Glycine max
  Clone ID: PAT_MRT3847_127954C.1.pep
WIPPMPLSMVFLHDAPEASGAFTVCLNQFMQFRIMERWIRVYLLAPSKVPANGSSEDGTVTAG

SEQ ID NO: 173794 - protein, 38 aa, Glycine max
  unsure (1)..(38): unsure at all Xaa locations
  Clone ID: PAT_MRT3847_127955C.1.pep
VXMSRPRPXNELXXIXDAILMMVXXMVLXFXRRRLXXK

SEQ ID NO: 173795 - protein, 83 aa, Glycine max
  unsure (1)..(83): unsure at all Xaa locations
  Clone ID: PAT_MRT3847_127956C.1.pep
ERKTKGINGAGGWTDHMRGGPYHISALNVVDLKKLLVTVFGDNLIVLYETVIXDPNNLADSDQDVTNYAXHIIDSLSVPQEWV

SEQ ID NO: 173796 - protein, 129 aa, Glycine max
  unsure (1)..(129): unsure at all Xaa locations
  Clone ID: PAT_MRT3847_127957C.1.pep
YPPTPLRVSGSQTDRGPIEEYFGRMSYVVSNVNQPLETYLLEGNYPFDIKSRSTWENXPLQSSLSSGKTFXYDIFGAESHSSEDFPEDEDHEKPKLIDAXSRQRIYPQYTEVHAHRETNLGTLDLDDVE

SEQ ID NO: 173797 - protein, 89 aa, Glycine max
  Clone ID: PAT_MRT3847_127958C.1.pep
NTRMGNLVEIFAQGVRIAARFHSNSPHTGRKYSTPPSLSETHAPPSHGGPNTSSALVKEAVAARPLHVILYSVSQPHICLFFGCSTHSL

SEQ ID NO: 173798 - protein, 64 aa, Glycine max
  Clone ID: PAT_MRT3847_127959C.1.pep
PKSRSDPLGGIPISLRTSKASLTHYKHLTAQHHIYIITPTLMWPTPDYLVQLLTTKGLVTSGMT

SEQ ID NO: 173799 - protein, 81 aa, Glycine max
  Clone ID: PAT_MRT3847_12795C.1.pep
GGVFKAWGPVFVKVGPAPLFDFFRGGNSLNLKSLVGLSCQTVAAMFKGKTPGEISKPFTLKNGFPPEEKKEVCRENQWAFE

SEQ ID NO: 173800 - protein, 52 aa, Glycine max
  Clone ID: PAT_MRT3847_127960C.1.pep
FNAHTVDTYHTIQTSVRALIDEFILRVPSKTRPHPILPAESLSKSTLNKARA

SEQ ID NO: 173801 - protein, 253 aa, Glycine max
  Clone ID: PAT_MRT3847_127961C.1.pep
TRPRWRGFLSPLTRRFNVYVPDLLFFGDSHTTRPDRSEAFQAQCVAALLQAHGLQRTSVVGISYGGFVAYSLAAQFPERVEKVVLCCAGVCLEDKDLDEGMFQVKTVDEAADILLPQTPEKLRQLVQLAFAKPVKTMPTCFLNDYINVMCTDNRQERKELIETLHKDRKLSNLPKITQPTLIIWGEKDLVFPMELAHRLQRHLGENAQLVVIKNAGHALNVEKPKEMYKNLKSFLIDPATPTPTAQKNHSNGS

SEQ ID NO: 173802 - protein, 348 aa, Glycine max
  Clone ID: PAT_MRT3847_127962C.1.pep
MAACISFTATRDRCFRFTFSNAGLKSATTDLGDGTIMHWWAPKAPKDSKPNLLLLHGFGANAMWQWNDVLSPLTRRFNVYVPDLVFFGDSHTTRPERSEAFQAQCVAALLLAHGLHTTSVVGISYGGFVAYSLAAQFPELVEKVVLCCAGVCLEDKDLDEGMFQVKTVDEAVDILLPQTPEKLRQLVQIAFAMPVKAIPTCFLNDYINVNFTAMVLTRVKLLLTNNQKNVKRTIIGIGLLGTGRVMCTENRQERKELIETLHKDRKLSNLPKITQPTLIIWGEKDLVFPMELAYRLQRHLGENARLVVIKNAGHALNVQKPKEMYKNLKSFLIDLTTPTVPKNQSNGT

SEQ ID NO: 173803 - protein, 204 aa, Glycine max
  unsure (1)..(204): unsure at all Xaa locations
  Clone ID: PAT_MRT3847_127963C.1.pep
DKLRDELSCAICLEICFEPSTTPCGHSFCRKCLRSAADKCGKKCPKCRQLISNGRPCTVNTVLXNTIQLLFPQEVEARKEASALNTNLRNDRRQPFRGASTTTSSTQQDEDAALARMLQRQIDEQRSPGTTRTRFARLRARRGGVSTSQHEDAALALRMRREEFMQTYRGSSQSSRLPSSLLAREKLRAMVSRAMNRREDLRQG

SEQ ID NO: 173804 - protein, 59 aa, Glycine max
  Clone ID: PAT_MRT3847_127964C.1.pep
EEYADAHRARQPLPSIETISLADSIGTDRSRSPHTYMTYTWRNGSRFVTGLSKFSPHPR

SEQ ID NO: 173805 - protein, 102 aa, Glycine max
  Clone ID: PAT_MRT3847_127965C.1.pep
YTRRHPGEAIRNGGTASRDLRAALTQCVQQVRRYEYHHYLSLLELPPNMRKAEHALRAMNVETARAKEVASDPRNGLMRQDWWQEAIDKMHAKKLIEQPNST

SEQ ID NO: 173806 - protein, 77 aa, Glycine max
  Clone ID: PAT_MRT3847_127966C.1.pep
VFKGVLITSIGLSFNVVFLSPHQMPKMNMKWCPGSVASKVSSMFSGGHKRSSYHFRHRPVCYFASYIEPDVTLQSTV

SEQ ID NO: 173807 - protein, 48 aa, Glycine max
  Clone ID: PAT_MRT3847_127967C.1.pep
ILLYMYYHGHTGRCSNVTNTCCCGQSEQACILQNFKVEDLCAGRALLC

SEQ ID NO: 173808 - protein, 47 aa, Glycine max
  Clone ID: PAT_MRT3847_127968C.1.pep
PRVRSSGSMCTLSGVIIRSGLKVWLGPYYKVRSKIFPALTIFSQKCP

SEQ ID NO: 173809 - protein, 61 aa, Glycine max
  Clone ID: PAT_MRT3847_127969C.1.pep
MDPSCNPPLIVLMHQGKTRPIFCGNIEYEARQSELERLFSRYMKVDRMDMKSECAFIYMAD

SEQ ID NO: 173810 - protein, 56 aa, Glycine max
  Clone ID: PAT_MRT3847_12796C.1.pep
GFCVLRHSLPSLFMHYFHFAKGSIITRKNYKVLGPVLLAYKESTTGAFLVFQKVGG

SEQ ID NO: 173811 - protein, 43 aa, Glycine max
  Clone ID: PAT_MRT3847_127970C.1.pep
NLCFIDTLRFLCRDQWFPGYPWLRSMKITASIRSISFGLHMMR

SEQ ID NO: 173812 - protein, 64 aa, Glycine max
  Clone ID: PAT_MRT3847_127971C.1.pep
SIFISASFVKKPLVSFLIAFFSKEYSLFSPPEFFWKKKNFQTAAGGFLTHYPLTNREIYLEHKN

SEQ ID NO: 173813 - protein, 134 aa, Glycine max
  unsure (1)..(134): unsure at all Xaa locations
  Clone ID: PAT_MRT3847_127972C.1.pep
NIKCIFTKVLTEKPLFPYKSILHQLDLITNLLKTPPPKTITEVLNNNTRKYLIKIQKKSPIPFKQKFPNTNPLTLRLLQRLLAFNPRNRPTTQETLXNPFFRNLTKVKREPSXQPISRLEFEFEKTRLTKDDIR

SEQ ID NO: 173814 - protein, 89 aa, Glycine max
  Clone ID: PAT_MRT3847_127973C.1.pep
MSTWHATRAELGLLALYSGKAASWYIIRRALQYGSKYTSIMKTCTAHNAELTTSLARRVFRLSKSLNDLHALISPTPQGTNLPLSLLVK

SEQ ID NO: 173815 - protein, 182 aa, Glycine max
  unsure (1)..(182): unsure at all Xaa locations
  Clone ID: PAT_MRT3847_127974C.1.pep
CNVEIAAQVSRLSSSKHGTXSSLSLEGLMESPSVDNDGDCFSPLQLNATSINIEVYYNKAVNYTLMVTFISFLQVLLLIRQMEHSNTQSGAAKVSILMIGQQAIVDAYLCLIHLTAGILVESLFNAFATAAFFKFVVFSIFEMRYLLAIWKASRPLSSGEGWETMRRELSVLYSRFCKCSFI

SEQ ID NO: 173816 - protein, 37 aa, Glycine max
  Clone ID: PAT_MRT3847_127975C.1.pep
TTEDIETHMGPGPQVWSTTTNGDVAQGKYVAMAKENC

SEQ ID NO: 173817 - protein, 62 aa, Glycine max
  Clone ID: PAT_MRT3847_127976C.1.pep
KLGGEKFSKCLIGGGARIIYLRLHLFFHTKDFNLVSAIKWVSLFLETIFLEFKFWILCFGLC

SEQ ID NO: 173818 - protein, 87 aa, Glycine max
  Clone ID: PAT_MRT3847_127977C.1.pep
QEPIPSPAAPKISLCLLFLLQEKQTSLTFTTSAHTDKDNLVRLQSKPIKPAFENLEIPGRVIKPKSRCIMDAGGPGVVVYNWWTPWL

SEQ ID NO: 173819 - protein, 46 aa, Glycine max
  Clone ID: PAT_MRT3847_127978C.1.pep
ELGMDRNSIFVVMIKKFGGNLTLFSLMSNYITLSSFLILKCFSCET

SEQ ID NO: 173820 - protein, 80 aa, Glycine max
  Clone ID: PAT_MRT3847_127979C.1.pep
TKCIDVFNFYCVVLLIICLLRVKLSAMLFLILFSYIFIFVQISVKEDKHKEEVMLFSGNPKHADYSFLKPEKRRMGKSEP

SEQ ID NO: 173821 - protein, 65 aa, Glycine max
  Clone ID: PAT_MRT3847_12797C.1.pep
MWSSEWANQTSWLIGFRIDNPKQSTVYDILVGISQGFENAGNTFMPAFCVPQATARSYENAESFA

SEQ ID NO: 173822 - protein, 179 aa, Glycine max
  Clone ID: PAT_MRT3847_127980C.1.pep
MGSKTNASGYRARRPLSIFAVLGLCCFFYLLGAWQRSGSGKADKLALKVNNLMTGCTVLPNLSFESHHSDVEIVRPDVLKAKAFKPCDMKYTDYTPCQEQDQAMKFPRENMIYRERHCPAEKEKMHCLIPAPEGYTTPFPWPKSRDYAYYANVPYKNLTVGETVEKPTAFPGKGFKFPG

SEQ ID NO: 173823 - protein, 253 aa, Glycine max
  Clone ID: PAT_MRT3847_127981C.1.pep
IPWTSNEGMYLMEVDRVLRPGGYWSLSGPPRNWKTYYQTWKRSKEDLKAEQTKLEELAESLCWEKKYEKGDIAIWRKKINAKSCKRKSPNVCGLDNADDVWYQKMEVCKTPLPEVTSKNEVAGGELQKFPARLFAVPPRIAQGAIPGVTAESYQEDNKLWKKHVNAYKRMNKLIGTTRYRNVMDMNAGLGGFAAALESQKSWVMNVVPSIAENTLGVVYERGLIGIYHDWCEGFSTYPRTYDLIHANVLFSIY

SEQ ID NO: 173824 - protein, 198 aa, Glycine max
  Clone ID: PAT_MRT3847_127982C.1.pep
ERALVRVGGRVGGNEFQQLHAFLHQSPTNRPRTIGVSIPMKATFFMTYIMVDGWAGIVGEILRLKLLVIYHLKNMFLVITERDRGKAMDSGSVDFPETIPSLYLYHLLGIVYAVVTSILFPFFLVFFAIAYLVYRHQKFNVYNPQYESAACRIPPSHIIIIARLLISQLLLLGLLSTKKAAKSTPLLVILPILTFAFH

SEQ ID NO: 173825 - protein, 623 aa, Glycine max
  unsure (1)..(623): unsure at all Xaa locations
  Clone ID: PAT_MRT3847_127983C.1.pep
MGSKTNASGHRARRPLSIFAVLGLCCFFYLLGAWQRSGSGKGDNLALKVNNLMTDCTVLPNLSFESHHNDVEIVEPAEPKAKEFKPCDVKYTDYTPCQEQDRAMTFPRENMIYRERHCPAEKEKLRCLIPAPEGYTTPFPWPKSRDYAYYANVPYKSLTVEKAVQNWVQFQGNVFKFPGGGTMFPHGADAYIDELASVIPIADGSVRTALDTGCGVASWGAYLLKRNVLAMSFAPKDNHEAQVQFALERGVPAVIGVLGTIHLPYPSRAFDMAQCSRCLIPWTSNEGMYLMEVDRVLRPGGYXFSSGPPIIXKTYYQTWKRSKXDLKAEQTKLEVLAESLCWEIKYEKXGEFNYFKEENIRCSIPRRNIVCPMFRDFTLMPMIFWVTKKXRSSKTPLPEVNQQKXKFRDTESLESERYILLQSLLSEYLPRIPGVTFAESYQENKLWKKHVNAYKRMNKLIGTTRYRNVMDMNXLGQDDFAAALESQKSWVMNVVPSIAENTLGVVYERGLIGIYHDWCEGFSTYPENXSLGIHANGLFSIYQDKCNLEDILLEMDRILRPEGAIIIRDEVDVLNQVKKIVGGMRWDAKLVDHEDGPLVPEKILVALKVYWVGTSKNKTSNEE

SEQ ID NO: 173826 - protein, 64 aa, Glycine max
  Clone ID: PAT_MRT3847_127984C.1.pep
HLQVHYRLNLFLSTRKGSSIYLNIWGPHSLQGFFTPLQFGPDSHLRLNGFKKFPGKERMKNTIH

SEQ ID NO: 173827 - protein, 74 aa, Glycine max
  Clone ID: PAT_MRT3847_127985C.1.pep
PAPIRPHSRSIIYSQLTWIMLCYIRYTILSADPTRPKVAPLERRDGRIIAPLHYSFRSRSARTDRGISPSRGTQ

SEQ ID NO: 173828 - protein, 107 aa, Glycine max
  Clone ID: PAT_MRT3847_127986C.1.pep
EGGQALQQHEPEPENDHSSEATISGAVDCKKRRLETRSNEATHHGLVPTSAVAPFPRVDPSSPQHVVDSSIPILEIHEGQTIPVLPLDTSPPATPVWHLIDEKNDHI

SEQ ID NO: 173829 - protein, 58 aa, Glycine max
  Clone ID: PAT_MRT3847_127987C.1.pep
TNILKKKWSSFSFQPVPVFWACYGCVKPKAGSFFFFLKVGKWSPLDKLRVILSMNLWF

SEQ ID NO: 173830 - protein, 342 aa, Glycine max
  unsure (1)..(342): unsure at all Xaa locations
  Clone ID: PAT_MRT3847_127988C.1.pep
MRLNGEISSGEEEEEEKQTGTTTFSSQKVVVGYALTSKKKKSFLQPSFTGLARNRGINFVAIDLNKPLPEQGPFDIILHKLSGEVWREIIEDYREKHPEVTVLDPPDAIQHLHNRQSMLQDVLDLNLSDCHGKVXGVPRQLVITGEKDPSSIPYEVTKAGMKLPLVAKPLVVDGTAKSHELFLAYDEFSLSAVEPPLVLQEFVNHGGLLFKIYIVGETIKVVRRFSLPNISKRELSKVAGVFRFPRVSCAAASADDADLDPNIAEHPPRPLLERLARELRHRLGLHLFNIDMIREYGTKDVFYVIDINYFPGYGKMPGYEHVFTDFLLSLVESKCSNKKLAA

SEQ ID NO: 173831 - protein, 166 aa, Glycine max
  Clone ID: PAT_MRT3847_127989C.1.pep
MPLFLSDEEFAWCSGDGSAVAAKADAFIRGLFNELDTVRSKAHAADINAEQNCLLIEQKYLSLTAEFSKLESNIAELQSSLDQRLREIDEVQSQNHRIKLEAVEKDREIERLRTEVAELHKSKRQLLELNEQKDLELSEKNATMKSYLDKMVRLSENAAHTEARLS

SEQ ID NO: 173832 - protein, 37 aa, Glycine max
  Clone ID: PAT_MRT3847_12798C.1.pep
SCYTDVTHSCACVLDHTTRLTSNYYRYSHCLRSCLCI

SEQ ID NO: 173833 - protein, 183 aa, Glycine max
  Clone ID: PAT_MRT3847_127990C.1.pep
MRLNGEISSGEEEEKQTGTTTFSSQKVVVGYALTSKKKKSFLQPSFTGLARNRGINFVAIDLNKPLLEQGPFDIILHKLSGEEWCEIIEDYRQKHPEVTVLDPPDAIQHLHNRQSMLQDVVDLNLSDCHGKVGVPRQLVIPKEKDPSSIPYEITKAGMKLPLVAKPLVVDGTAKPHELFLAYD

SEQ ID NO: 173834 - protein, 77 aa, Glycine max
  Clone ID: PAT_MRT3847_127991C.1.pep
ALTLPNLLFPLFFLSSPNQNLTFPPSTFSPKSTTPTTAKSHYLLYLFVYIHTQRAGRMDSDHGKLFIGGISWDTTDD

SEQ ID NO: 173835 - protein, 317 aa, Glycine max
  unsure (1)..(317): unsure at all Xaa locations
  Clone ID: PAT_MRT3847_127992C.1.pep
HASGPEYRVIGELMNRLKVATELKDKFVLQNKLNRALRLVRWKEAYDPDNPANYGVIQREQPTADAKEEAEFEKEKQKQIEEGDNADDEEEQEFDDMKEKDNVLMAKLEAIDRKLEEKLAELELHLXRKGKALEEEIKDLAEERNELTDQRRKPLXRKGSDTRLIDMNRTCKVTKGGQVVKYTAMVACGNYNGVIGFAKAKGPAVPVALQKAYEKCFQNLHYVERHEEHTIAHAVQTSYKKTKXYLWPAPTTTGMKAGRSVEAILHLAGLKNVKSKVIGSRNPHNTVKAVFKALNAIETPRDVQEKFGRTVVEKYLL

SEQ ID NO: 173836 - protein, 71 aa, Glycine max
  unsure (1)..(71): unsure at all Xaa locations
  Clone ID: PAT_MRT3847_127993C.1.pep
AQVSLLIENTRNNFKKMKGPVFLGSKILGAWQIQCVXMFPPRNNTGYGARSPDVKFPSWTHAVEAHNIFGF

SEQ ID NO: 173837 - protein, 131 aa, Glycine max
  Clone ID: PAT_MRT3847_127994C.1.pep
MNGDRPDNSPSHEAMMGNRDETMYDSYAGPGVPPFASDIPPPPVLMPVPGAGPLGPFVPAPPEVAMQMLRDQGGSSYDASGRKMHSGPPMGGGSSIIAVPPTFRPDPRRMRSYQDLDAPEDEVTVIDYRSL

SEQ ID NO: 173838 - protein, 63 aa, Glycine max
  Clone ID: PAT_MRT3847_127995C.1.pep
NVSLDHCCYAVTAPTPDQILMRKLFTIHLSRVQVHALLLLSQVSFAFFKYSHCNLRPPFWFCL

SEQ ID NO: 173839 - protein, 113 aa, Glycine max
  Clone ID: PAT_MRT3847_127996C.1.pep
GRGLQKPERKNLFRKKINHYLHQMGLLYKNGGAWRETYGPSLTPFVRWFLPSEMWSTAKNGLCPIQLLQKRPLERNKLLKRRTMFSTPLKISHLRGGGKIGILKITMLRTPRA

SEQ ID NO: 173840 - protein, 167 aa, Glycine max
  Clone ID: PAT_MRT3847_127997C.1.pep
MGGGGGAATAQAEAQYSTAKTSVWWDIENCHVPKGCDPHAIAQNISSALVRTNYCSPVSISAYSDTTRITAVVQHALSSTGICLNHVPAGVKDASDKKILVDMLFWAEDNPAPANYLLISGDRDISNALHQLRLRKYNILLAQPQEASVPLVADAKSVWLWTSLLAG

SEQ ID NO: 173841 - protein, 75 aa, Glycine max
  unsure (1)..(75): unsure at all Xaa locations
  Clone ID: PAT_MRT3847_127998C.1.pep
TCVYFWEXXLVYTCISKGSWYLNIHIYVLGGIFAIYMHIQGFLVPKHAYICVGRDFWFILAYPRDLCYLNIQYLF

SEQ ID NO: 173842 - protein, 46 aa, Glycine max
  Clone ID: PAT_MRT3847_127999C.1.pep
CYKTLLAILLYLYCFVINDLKIKYKYLLIFSNVVKLNYKHYKGFTV

SEQ ID NO: 173843 - protein, 96 aa, Glycine max
  Clone ID: PAT_MRT3847_12799C.1.pep
GGAQKRPPPKFFFVGNKSSLGENFKMFLGLTFAPPNACPELGDCYAPPKGGPGLLTKGGENTKRRGTPYENIWGRPQWLGGPPFLGEKNLNRPFFP

SEQ ID NO: 173844 - protein, 49 aa, Glycine max
  Clone ID: PAT_MRT3847_1279C.1.pep
TCTFGPNSDRADIIECYGAPHGTEIAAAEHAAEGALLYLEVYKMYDGKP

SEQ ID NO: 173845 - protein, 66 aa, Glycine max
  Clone ID: PAT_MRT3847_127C.1.pep
ILSSKTILHLNRSMHLAYTCLTMLEPVHDRSQESNQVSQVYNLYRITINMDMKRVLTCNNFLMSKC

SEQ ID NO: 173846 - protein, 62 aa, Glycine max
  unsure (1)..(62): unsure at all Xaa locations
  Clone ID: PAT_MRT3847_128000C.1.pep
RPDLITCLASFHAKLIIPXREVDFECPDDFFIVNKAKEXGIELSYSCKDGSFDSCAGKIYKR

SEQ ID NO: 173847 - protein, 68 aa, Glycine max
  Clone ID: PAT_MRT3847_128001C.1.pep
CRSLILVKFKLKWLIEVINFIPFVQLRSPICYITPNPKEWHNIAKKGMPLPKKIKKDPTSICFKCQQN

SEQ ID NO: 173848 - protein, 189 aa, Glycine max
  unsure (1)..(189): unsure at all Xaa locations
  Clone ID: PAT_MRT3847_128002C.1.pep
MKFLKIFNSKPFKLRTFNSLSHSQTPPFSIPTTLTESTLLHSIESSQWHFIEQVAPHLTPSLLSSTLTTLRHNPQLVLHLLSHLQNHPHSLDLATSSLAICVLYRLPSPKPSINLIQRLILSPTCTNRTIFDELALARDRVDAKTTLIFDLLVRAYCELKXAHEALECFYLIKEKGFVPYIETCNQMLS

SEQ ID NO: 173849 - protein, 762 aa, Glycine max
  Clone ID: PAT_MRT3847_128003C.1.pep
MWRLKIADGGNDPYIFSTNNFVGRQTWEFDSEAGTAEERAQIEAARQNFYENRFMVKACGDRLWRFQILRENNFKQTISGVKIEDDEKITCEKIRSTMKRATHYLSSLQTSDGHWPAHLGGSLFFTPPLVICLYITGHIDSIFSEEYRKEILRYIYYHQNKDGGWGLHIEGHSIMFCTTLNYICMRILGEGPNGGHNNACAKARKWIHDHGGATHIPSWGKFWLSVLGIVDWCGSNPMPPEFWILPSFLPMHPGKMWCYCRLVYMPMSYLYGKKFTGPITPLVVNLREELFIQPYDENSWKKARHKCANEDLYYPHHWIQDLLWDSLYVFTEPLLNCWPFNKLVREKALQVTMKHIHYEDENSRYIAIGCVEKVLCMLACWVEDPNGDAFKKHLARIPDYLWVSEDGMTMQGIGTQSWDVGFIVQALLATNLIDDFGPTIAKAHDFIKKSQVRENPSGDFKSMYRHICKGSWTLADRDHAWQVSDTTAECLKCCLLLSVLPQDIVGEKMELEKLHDSINLILSLQSKNGGMTAWEPAGAYKWLELLNPTEFFADIVVEHEYLECTASAIQVLVLFKKLYPEHRKEEIENFIAKAVTFIEDTQLENGSWYGNWAVCFTYSSWFALGGLVAAGKTYTNCVTIRKAVKFLLKIQNKDGGWGESYLSCPRKMYVPLEGSRSNVVQTSWALMALIHAEQAERDPTPLHHAAKLLINSQLEDGDWPQQETLGVYLRNCLVHYSFYRNIFPMWALAEYRTNVLLPSFTI

SEQ ID NO: 173850 - protein, 125 aa, Glycine max
  Clone ID: PAT_MRT3847_128004C.1.pep
MWRLKIADGGNDPYIFSTNNFVGRQTWEFDSEAGTAEERAQIEAARQNFYENRFMVKACGDRLWRFQILRENNFKQTISGVKIEDDEKITCEKIRSTMKRATHYLSSLQTSDGHWPAHLWSSLFF

SEQ ID NO: 173851 - protein, 60 aa, Glycine max
  Clone ID: PAT_MRT3847_128005C.1.pep
ISSNTFLIFASVFLYCNKFMGSATEIMSLPSHVAPVTIGVASPLDSGLARLLELGHKQEL

SEQ ID NO: 173852 - protein, 70 aa, Glycine max
  Clone ID: PAT_MRT3847_128006C.1.pep
GGCIITVLKAFKDLCFAKKCPSRKFFRTLTVHTQATHTMVHIIQTWFSCTCLLLSLSVWPSRLTLFRSFT

SEQ ID NO: 173853 - protein, 95 aa, Glycine max
  Clone ID: PAT_MRT3847_128007C.1.pep
GGGSKEFFFFIKGEGPRTFFSSGKAPVRKISLLLTPGFGVLPKGTKKGGLVSLGGRTKVDLHPSFKDFFPYGQLPVLNKIACGGIWWAKKGAFWP

SEQ ID NO: 173854 - protein, 77 aa, Glycine max
  Clone ID: PAT_MRT3847_128008C.1.pep
KNQTFFFFPAFLVGRRVGKKERGVTLFWLGPSHQNLPKGEGFLFGNPFRSLTLIPPGVLPNSGNNSGPENLILSPQP

SEQ ID NO: 173855 - protein, 194 aa, Glycine max
  unsure (1)..(194): unsure at all Xaa locations
  Clone ID: PAT_MRT3847_128009C.1.pep
TISRFLLNPGREHWNVVRWILRYLHGTVDMRFCFGGDKPTLVGYSDSDMTRDIDSRKSTSGYLIKFAGGAVTWXSKLQKCVTLSTIKAXFIVIIEACKEFLWVKKFLXELGFVQDKYLLFVDSQSAIHFGKNSTFHSRSKHIDLRYHWIRDAFDAKLLELTKIHTDDNGADMITKALIRGKFEVSCEICRFGSH

SEQ ID NO: 173856 - protein, 133 aa, Glycine max
  unsure (1)..(133): unsure at all Xaa locations
  Clone ID: PAT_MRT3847_12800C.1.pep
VSSACAATCQPWRNMCXDIANSPQAXGALTCCCVLEATXPRDGIIRCVIXRDRCCLPYHLFLCLIPALLSAHGKLLLSAGRTRRTTHTDHVIAMDADNISRSSYSYSXELRSNCLATTFIICYTHTPYCCRHI

SEQ ID NO: 173857 - protein, 794 aa, Glycine max
  Clone ID: PAT_MRT3847_128010C.1.pep
QFSGSVPSRVWSLSALRSLDLSDNLLEGEIPKGIEAMKNLRSVSVARNRLTGNVPYGFGSCLLLRSIDLGDNSFSGSIPGDFKELTLCGYISLRGNAFSGGVPQWIGEMRGLETLDLSNNGFTGQVPSSIGNLQSLKMLNFSGNGLTGSLPESMANCTKLLVLDVSRNSMSGWLPLWVFKSDLDKGLMSENVQSGSKKSPLFALAELAFQSLQVLDLSHNAFSGEITSAVGGLSSLQVLNLANNSLGGPIPPAIGELKTCSSLDLSYNKLNGSIPWEIGGAVSLKELVLEKNFLNGKIPTSIENCSLLTTLILSQNKLSGPIPAAVAKLTNLQTVDVSFNSLTGALPKQLANLANLLTFNLSHNNLQGELPAGGFFNTITPSSVSGNPSLCGAAVNKSCPAVLPKPIVLNPNTSTDTGPGSLPPNLGHKRIILSISALIAIGAAAVIVIGVISITVLNLRVRSSTSRDAAALTFSAGDEFSRSPTTDANSGKLVMFSGEPDFSSGAHALLNKDCELGRGGFGAVYQTVLRDGHSVAIKKLTVSSLVKSQEDFEREVKKLGKIRHQNLVELEGYYWTTSLQLLIYEYLSGGSLYKHLHEGSGGNFLSWNERFNVILGTAKALAHLHHSNIIHYNIKSTNVLLDSYGEPKVGDFGLARLLPMLDRYVLSSKIQSALGYMAPEFACKTVKITEKCDVYGFGVLVLEIVTGKRPVEYMEDDVVVLCDMVRGALEEGRVEECIDERLQGKFPAEEAIPVMKRHGLICTSQVPSNRPDMGEVVNILELIRCPSEGQEELA

SEQ ID NO: 173858 - protein, 90 aa, Glycine max
  unsure (1)..(90): unsure at all Xaa locations
  Clone ID: PAT_MRT3847_128011C.1.pep
SFSTLFRAVLHNLALRSLFTNAIARKQSQSQYVFPPQNMNLNSYQRDQLCSLPLFRSDQALPITSLPSLPLKHSRPCLLXSYLPQVLILR

SEQ ID NO: 173859 - protein, 65 aa, Glycine max
  Clone ID: PAT_MRT3847_128012C.1.pep
AKRITNDKDLMSCDHLAEGVGTNDDVPRLSLEGVEVESGFRNRFSYCRSRKPALETINEEPIWLR

SEQ ID NO: 173860 - protein, 171 aa, Glycine max
  Clone ID: PAT_MRT3847_128013C.1.pep
MSFNQSKSDKSDAVYRKSGRPGSFNQQRGPSGGAYGKGGGGGAGPSPSLSSNRSFNKKSNNNAQGGQSRVNPTPVNSTESNSTYAARTVPNGSHVQPHIHGGSDAPITNATAKPSESLAAQRSTRTVPKAPTSQPPAMSSYPAAPTTPAKDASKAFPFHFGSISPGFMNGM

SEQ ID NO: 173861 - protein, 193 aa, Glycine max
  Clone ID: PAT_MRT3847_128014C.1.pep
MADSGFTSNRRDPIKSSVGNAAASRRRQHAVTVGKERRESLMRAKRFCRVGIDGGDGGDGEVSVDSDMLIEEEQSILESQTSAAVENLKSAIAFQGKGAVKKRVGALQELRRLLSRSEFPPVESAINAGAVPLLVQCLSFGSPDEQLLEAAWCLTNIAAGNPEETKALLPALPLLIAHLGEKSYPPVAEQCAW

SEQ ID NO: 173862 - protein, 129 aa, Glycine max
  Clone ID: PAT_MRT3847_128015C.1.pep
FGSRAEPSLCSRVLQPHDKFLIFASDGLWEYMTNQQAAEIVQKNPRNGVARKLVKAALKEAANKRKMKYKELQKIEKGNRRIFHDDITVIVVFIDHELLGKKITVPELSIRGFIDSAGPSNFKSVQEFM

SEQ ID NO: 173863 - protein, 99 aa, Glycine max
  Clone ID: PAT_MRT3847_128016C.1.pep
PLLRTPTRAGRKGGRLNSAAATFHRKEGLNGRGGKNKSKRWLRLGGRLRKGKKKTLWAGHRLREALCLPLSENVQNTLLYDIGLRVRSKLIVGLSQFCA

SEQ ID NO: 173864 - protein, 333 aa, Glycine max
  Clone ID: PAT_MRT3847_128017C.1.pep
RIGDNQFSGKIPNFIQSLTSLQKLVIQGSGLSGPIPSGISFLENLTDLRISDLNGSEHSLFPQLNQMKNLKYLILRNCNINGTLPPYLGNMTTLKNLDLSFNKLTGPIPSTYDALRKVDYIYLTGNLLNGQVPAWTEKSDNVDISFNNFSVTSQGSTCQIGNRNLFASSMTHNDSGTVACLGSSVCQETLYSLHINCGGKIVTDNGSTYDDDSDTGGPARFHRSGTKNWAYINTGNFMDNDAGAYYIVQNKTLLSMDNVDLYMDARVSPISLTYYGFCLGNGNYTVNLHFAEIMFIDDQTFNSLGRRVFDIYIQVYIYSTFFYPCHGVFSYIK

SEQ ID NO: 173865 - protein, 66 aa, Glycine max
  Clone ID: PAT_MRT3847_128018C.1.pep
GGAPVIKASFGRFRECLKKLGPLIDERYVNAKLHNSFGAGIVAFELLIPFSEPGVTGLRVPCSISP

SEQ ID NO: 173866 - protein, 752 aa, Glycine max
  unsure (1)..(752): unsure at all Xaa locations
  Clone ID: PAT_MRT3847_128019C.1.pep
RIGDNQFSGKIPNFIQSLTSLQKLVIQGSGLSGPIPSGISFLENLTDLRISDLNGSEHSLFPQLNQMKKXEYLILRNSIIDLESGLLXLGNMTQIQKMVLSFNNLIGELPLTLVKPTTLQDIRIGDNQCSXESMTFYDKRTVACLGSNACQETLYSLHINCGGKIVTDNGSTYDDDSDTGGPARFHRSGTKNWAYINTGNFMDNDAGAYYIVQNKTLLSMDNVDLYMDARVSPISLTYYGFCLGNGNYTVNLHFAEIMFIDDQTFNSLGRRVFDIYIQGALVKKDFDIVEEAGGIGKAVITSFTAVVTSNTLEIRLYWVGKGTTSLPFRSVYGPLISAISVEPDFTPPSKNKSSISVGVVVGVVAAGAVVIILVLGILWWKGCFGKKSSLERELQGLDLRTGLFTLRQIKAATNNFDVANKIGEGGFGPVYKGCFSDGTLIAVKQLSSKSRQGNREFLNEIGMISALQHPHLVKLYGCCVEGDQLLLVYEYMENNSLARALFGAEEHQIKLDWTTRYKICVGIARGLAYLHEESRLKIVHRDIKATNVLLDQDLNPKISDFGLAKLDEEDNTHISTRIAGTFGYMAPEYAMHGYLTDKADVYSFGIVALEIINGRSNTIHRQKEESFSVLEWAHLLREKGDIMDLVDRRLGLEFNKEEALVMIKVALLCTNVTAALRPTMSSVVSMLEGKIVVDEEFSGETTEVLDEKKMEKMRLYYQELSNSKEEPWTASSTSVADLYPVGLDSSYLEKRD

SEQ ID NO: 173867 - protein, 110 aa, Glycine max
  unsure (1)..(110): unsure at all Xaa locations
  Clone ID: PAT_MRT3847_12801C.1.pep
RKNSNAWPFLLPTLLFTLLGTSHAGGIASYWGQNRNEGTLSEACATRKFPHMXISLLNKFFHGKTPXMTLDGHCNPKPNSCTKSNSEISDCQSKGLKVLLPIRGGIESLH

SEQ ID NO: 173868 - protein, 106 aa, Glycine max
  Clone ID: PAT_MRT3847_128020C.1.pep
RIVQVHIPNLENTHSREQGKTTAPPEKNLYNTQDSNRKQQYFQSIVLPAYDIQLLLRSGYLNHEQHKLSTIISNKIYHMLTGIDALILQPYITAANEIANRSEDKP

SEQ ID NO: 173869 - protein, 57 aa, Glycine max
  Clone ID: PAT_MRT3847_128021C.1.pep
MVKDGYQCKKYGQKKVTKDNPSPRAYYKCYLAPSCPVKKRVQRSLQDKSFLVATYEG

SEQ ID NO: 173870 - protein, 65 aa, Glycine max
  Clone ID: PAT_MRT3847_128022C.1.pep
SRRGQLKHLDSNSPCAIAHEQSILHPLHRIILETLFPYLLSHFLLKLKEFYYPYSLLLVGESGAL

SEQ ID NO: 173871 - protein, 190 aa, Glycine max
  Clone ID: PAT_MRT3847_128023C.1.pep
LVASSDPSGQMGRVINVDVLVDLENVQGKKLKNVNSKKLMKIRSISEGNCVIKGPWIGLVQRVVDRVTILFDDGTKCEVITLEKDKLLPLTHNFLEDLQCPYYPGQRVKVNTSTASKPARWLCGTWKDNHDEGTVCAVEAGLVYVNWLASVLLGSNSNVSVPPCWQDSKNLTLLCCFSHTNWQLGDWCML

SEQ ID NO: 173872 - protein, 45 aa, Glycine max
  Clone ID: PAT_MRT3847_128024C.1.pep
PRIRSIRENISFFLDSRLTRHLLWSLLLNYISPSFFYNLMANKTP

SEQ ID NO: 173873 - protein, 55 aa, Glycine max
  Clone ID: PAT_MRT3847_128025C.1.pep
ACTPASVTILTLTNSQHGVVKDLRLPLPLQDHSLFRHSHPRLWLLWQNPLKAEAW

SEQ ID NO: 173874 - protein, 54 aa, Glycine max
  unsure (1)..(54): unsure at all Xaa locations
  Clone ID: PAT_MRT3847_128026C.1.pep
MYCLEAVSQLCSEAVXLVSVTCGSGRGGLLTTAWMSSAVDDRSSDINSEIRTPL

SEQ ID NO: 173875 - protein, 96 aa, Glycine max
  unsure (1)..(96): unsure at all Xaa locations
  Clone ID: PAT_MRT3847_128027C.1.pep
LYLSILWRLRVPAVKTAFFPKKLWLSKACVGTPLLAALLRWPLYPFPPTQNPQYPPFPPATPPPPPPAXPASTLPPSPPPPPSPPPKPPLPPPPSP

SEQ ID NO: 173876 - protein, 89 aa, Glycine max
  Clone ID: PAT_MRT3847_128028C.1.pep
MALRRFYNEIKGKRVSEVPEHVKPMLSLSYIKKAIQRGFDNYHAKYIETSSPDPIFHVCYGGMIFSYLVALPHERRHLLHAQEHAQQHH

SEQ ID NO: 173877 - protein, 76 aa, Glycine max
  unsure (1)..(76): unsure at all Xaa locations
  Clone ID: PAT_MRT3847_128029C.1.pep
XDLHQNFRIPKMIRIKADLSLVEDHSGYACRGRGTSTCECCNVHGGEHNCNVQKKHKPKFCVSPPEKKNTSLKKNI

SEQ ID NO: 173878 - protein, 70 aa, Glycine max
  unsure (1)..(70): unsure at all Xaa locations
  Clone ID: PAT_MRT3847_12802C.1.pep
RIFEKVGENIKNALEACAGDPTIGKCIGALDEVEELTAGASHSKYKHKGKDFYSLXTYCKDNSETIDCKT

SEQ ID NO: 173879 - protein, 145 aa, Glycine max
  Clone ID: PAT_MRT3847_128030C.1.pep
MSTDLQLKSSCSGCGSTTDLYGSNCKHMTLCLGCGKTMAAKRAKCVDCGATLTRLIREYNVRASSPNDKNYFIGRFINGLPDFSKKKSAENKWSLQKDGLHGRQITDTLREKYKNKPWLLEDETGQSQFQGHLEGSQSATYYLLM

SEQ ID NO: 173880 - protein, 74 aa, Glycine max
  Clone ID: PAT_MRT3847_128031C.1.pep
RTQNNCLLTSLAFFLILFANEFMCPEIACMPKEQIRTFRAYFVVSRYPFGMFHGKVSLKLNGWPDVQAVDPKKA

SEQ ID NO: 173881 - protein, 449 aa, Glycine max
  Clone ID: PAT_MRT3847_128032C.1.pep
MLSKFALPSLSLPRLQPKPSLSLSPRNQKPNKTKKKQTNPNPSLMASSLFQPSPSSAMTLSSSSTSSSSSLFTGTLRTLGFVDHSRARISAPNTKCDMSESSIFVNGKPIIPVLNERTLPKFMESAREAKTVSRNSNRLKLFSGRANPTLSQEIARYMGLELGKISIKRFADGEIYVQLQESVRGCNVYLIQPTCPPANENLMELKIMIDACRRASAKNITAVIPYFGYARADRKTQGRESIAAKLVANLITKAGADRVLACDLHSGQSMGYFDIPVDHVHCQPVILDYLASKTISSSDLVVVSPDVGGVARARAFAKKLSDAPLAIVDKRRHGHNVAEVMNLIGDVKGKVAVMVDDMIDTAGTIAKGAALLHEEGAREVYACCTHAVFSPPAIERLSGGLFHEVIITNTIPVAEKNYFPQLTILTVANLLGETIWRVHDDSSVSSIFQ

SEQ ID NO: 173882 - protein, 102 aa, Glycine max
  Clone ID: PAT_MRT3847_128033C.1.pep
MEELELQHMDQNESRRDESQSLKLKPRDSQQNHSVSPFPRQENNIDGHGKMDKKLIDLNTRPLRLNGSAPNNQEQCMDILRGNNHESASVPPVESFKQESEK

SEQ ID NO: 173883 - protein, 215 aa, Glycine max
  unsure (1)..(215): unsure at all Xaa locations
  Clone ID: PAT_MRT3847_128034C.1.pep
MRTLCDVCESAAAIVFCAADEAALCSACDHKIHMCNKLASRHVRVGLADPTDVPRCDICENAPGTXAFFYCEIDGSSLCLQCDMIVHVGGKRTHGRYLLLRQRAQFPCDKPAQMEELGLQPMDQNESRRDESQSLKLKIRDSQQNHSVSPVPRQENNIDGHGKMDKKLIDLNTRPLRLNGAAPNNQERGMDILRGNNHKSASVPPVESFKQESEK

SEQ ID NO: 173884 - protein, 90 aa, Glycine max
  Clone ID: PAT_MRT3847_128035C.1.pep
ILVLDEATASIDNATDLILQKTIRGSSADCTVITVAHRIPTVMDCTKVLAIREGELVEYDEPMNLMKREGSLFGQLVKEYWSHLQSAESH

SEQ ID NO: 173885 - protein, 90 aa, Glycine max
  Clone ID: PAT_MRT3847_128036C.1.pep
RGALRFSLYRACVLSCESDRARFRYCDIYSACVTSAITELVLDLSRTPLANGVPYSIESALSSIFVILDLIDRADVSDLCSAVAAGSESR

SEQ ID NO: 173886 - protein, 118 aa, Glycine max
  Clone ID: PAT_MRT3847_128037C.1.pep
CLRERLSEENIITFPWLILTQLIVLLLLSALLFSLTLLLLGSVDHQHNILVTDDTHHPMTTSFRVSLVENFHMQTTDYTFTNHDSSPTHAPSTLAGWAEPIIKRQNCNRSRFELETGR

SEQ ID NO: 173887 - protein, 153 aa, Glycine max
  Clone ID: PAT_MRT3847_128038C.1.pep
MESELLDDILRTMQKSEDTSIYDKVLNAIFDEEMLSTKHIRQNSSSIQYTDFETEVRDYVVDANREIFRQHCAKHLEIPTMRLLDDCPQFNRNAVKLLTHGGDMLELCHELRLPFVNWIISNQKSSFKRYEISCVFRRAIGHSSPNHYLQGDF

SEQ ID NO: 173888 - protein, 62 aa, Glycine max
  Clone ID: PAT_MRT3847_128039C.1.pep
ELITVIAIWGSHKDRVSNSSIISPSVVLDRMYKLSVMLAVVIRLLQFPWKLALEYMIWGGAV

SEQ ID NO: 173889 - protein, 78 aa, Glycine max
  Clone ID: PAT_MRT3847_12803C.1.pep
IPGFLKVTQNFGLKYFFPNWKRGKGWFFFSQKRGGGKTFFFFFFLQGFYFRDFFLNEGPTFPALYKKKDFFVFFYPPF

SEQ ID NO: 173890 - protein, 228 aa, Glycine max
  Clone ID: PAT_MRT3847_128040C.1.pep
GFSEHVRQSALKIVEVVLRQGLVHPITCVPYLIALETDPLESNSKLAHHLLMNMLFRYPAFFESRLGDGLQMSFMFMQSICGSSENVDHKIQSKIPTSGKGKPEAGSLAQAKLGVSRIYKLIRGNRVSRNKFLSSIVRKFDNPRWNKLVIAFLIYCTEVLALLPFISPDEPLYLIYAINRVVQVRAGPLEANFKAWSSSISRHNSPYGNGMYQQGPDEPTVTSQVMSL

SEQ ID NO: 173891 - protein, 70 aa, Glycine max
  Clone ID: PAT_MRT3847_128041C.1.pep
MITYPTLTTLYALILLTPEKHRFKLILEICMTLVHNKSYHLNILLNFLKATTSYKQQSFTCIKKQARSSP

SEQ ID NO: 173892 - protein, 79 aa, Glycine max
  Clone ID: PAT_MRT3847_128042C.1.pep
GQVSLLIQITRNTVRKKKVLGFLGARILVARQCHAYDMFPLGMNTGDGARTPEVKCASLRLAVESHNIIGHETLPEESV

SEQ ID NO: 173893 - protein, 258 aa, Glycine max
  Clone ID: PAT_MRT3847_128043C.1.pep
MSGQTQRLNVVPTVTMLGVVKARLVGATRGHALLKKKSDALTVQFRQILKKIVSTKESMGDIMKTSSFALTEAKYVAGDNIKHVVLENVKEASLRVRSRQENVAGVKLPKFDYTADADATKNDLTGLARGGQQVQQCRAAYIKAIEVLVELASLQTSFLTLDEAIKTTNRRVNALENVVKPRLENTISYIKGELDELEREDFFRLKKIQGYKKREIERQMLQQNNSKLETNLPLRKGLSYNSAHNLLSVGDKDEDIIF

SEQ ID NO: 173894 - protein, 38 aa, Glycine max
  Clone ID: PAT_MRT3847_128044C.1.pep
AHHTPRITPHKFSIIPMSTCANVELEPVIELWHISDEW

SEQ ID NO: 173895 - protein, 258 aa, Glycine max
  unsure (1)..(258): unsure at all Xaa locations
  Clone ID: PAT_MRT3847_128045C.1.pep
MSGQTQRLNVVPTVTMLGVVKARLVGATRGHALLKKKSDALTVQFRQILKKIVSTKESMGDIMKTSSFALTEAKYVAGDNIKHVVLENVKEASLRVRSRQENVXGVKLPKFDYTADADATKNDLTGLARGGQQVQQCRAAYIKAIEVLVELASLQTSFLTLDEAIKTTNRRVNALENVVKPRLENTISYIKGELDELEREDFFRLKKIQGYKKREIERQMLLQNNSNVETNLPLRKGVSYNSAHNLLSVGDKDEDIIF

SEQ ID NO: 173896 - protein, 92 aa, Glycine max
  Clone ID: PAT_MRT3847_128046C.1.pep
FFVGHRRFYIVECFLLKAVPVTIGYTGTKKNFFVPEQKLSLQFFRENFKKSPLFVQKVRNPVGQAKSPVLFGLFVANHFTQTWVYFWPTPRL

SEQ ID NO: 173897 - protein, 67 aa, Glycine max
  Clone ID: PAT_MRT3847_128047C.1.pep
LEHFLTFFSIPLCMEISLPKPTLWTILSCVRLFIMKLILIKHSAMDSIYILSFHSTTDHSVHCCCCN

SEQ ID NO: 173898 - protein, 89 aa, Glycine max
  Clone ID: PAT_MRT3847_128048C.1.pep
NLARALALSLCLSTHFRLSSKTPHDYTNFGGERLIFFGSTDTNSPRLFIIKNYSHMTLHFHTTQYCFSPRGHNFFKEALHYNCAILHPP

SEQ ID NO: 173899 - protein, 34 aa, Glycine max
  Clone ID: PAT_MRT3847_128049C.1.pep
VSYHPHPQVWCLLRFFVFECISLNHIYLFIYFWC

SEQ ID NO: 173900 - protein, 34 aa, Glycine max
  Clone ID: PAT_MRT3847_12804C.1.pep
PRVRLDVLILLVIAGAEVPELLTYMHPCVEDWQW

SEQ ID NO: 173901 - protein, 54 aa, Glycine max
  Clone ID: PAT_MRT3847_128050C.1.pep
FEKSVRAPEGRDSFHSLPGTHTVWYLPPPNQEPCVVVRDSHLAEVYNSMSNQLS

SEQ ID NO: 173902 - protein, 65 aa, Glycine max
  Clone ID: PAT_MRT3847_128051C.1.pep
RPTRKMRNLDVEDLCRRDYRVEATTIGCGSYEEWCPQLVYLKLRRLGHQLVPMTCRRTRRCRSKR

SEQ ID NO: 173903 - protein, 161 aa, Glycine max
  unsure (1)..(161): unsure at all Xaa locations
  Clone ID: PAT_MRT3847_128052C.1.pep
VNIEEQADXLLEAXXXWYSEQRDICWXXPIEEDXAMWLFVSTTSDLDSCHNHVSTSSSXDIHTARSWRLALLMKNSIIFGSPLDLRTSGNGVSCGYGIISTSDGVVYMWELSKGSKLDTLHHFQDGNVTCVATDDSRGALGVAGGRGELLLYLHDPELDSN

SEQ ID NO: 173904 - protein, 82 aa, Glycine max
  Clone ID: PAT_MRT3847_128053C.1.pep
GGGPPPQNVCINRCRNRRGVPQLEFVAFPPDKKRTYFGWGGRPPPPEKKKGKKKLLFYWKKHDLDIDWKSFALGKFTPPIQL

SEQ ID NO: 173905 - protein, 133 aa, Glycine max
  Clone ID: PAT_MRT3847_128054C.1.pep
MSLYNIGIPMFIDYTQQNEQNINFSIPFLQYFISHNIIEVTTGKTIGSTLINSHNKLSHSIITIMAISKLAPQIFSTSVLNCVHNIVICLNHGCCLCHTLCSLLCCIQSCVHCLLSPFSHILQHLCCLHCPLC

SEQ ID NO: 173906 - protein, 55 aa, Glycine max
  Clone ID: PAT_MRT3847_128055C.1.pep
LYKDRSILITEHPFPRRHSMSTLFIENHEGNANILQRYKSNSFMRRPSCILKTRT

SEQ ID NO: 173907 - protein, 101 aa, Glycine max
  unsure (1)..(101): unsure at all Xaa locations
  Clone ID: PAT_MRT3847_128056C.1.pep
PDPLRPCLPNGASSEKTQHLPPQQRSFQRGSPXPPXYPPKPPLPPAPTPRPPPPSLPPPLPPPSRRLPPPFFPPAPPFFSPPPPSRPPPSFSPHLPPPTPS

SEQ ID NO: 173908 - protein, 83 aa, Glycine max
  unsure (1)..(83): unsure at all Xaa locations
  Clone ID: PAT_MRT3847_128057C.1.pep
KQEVICFTPQHFHYGNQKQFPFCDQHVFASVKKPKMWAGXQRDFDLVGGLAYLXSLYFGTEADRKQCDFPSDGIILGNSHVRV

SEQ ID NO: 173909 - protein, 182 aa, Glycine max
  Clone ID: PAT_MRT3847_128058C.1.pep
MRMKKLILILIAAFTFVSVARSAADHFFENDGVSLAVAATPGPPPLMVPLTLIQGAASKGAVCLDGTLPGYHFHPGFGSGANSWLIQLEGGGWCNTIRSCVFRKTTRRGSSKYMEKQLAFTGILSNKAEENPDFFNWNRVIVRYCDGASFSGDSQNEAAQLQFRGTKIWQAAMQELLFKGNA

SEQ ID NO: 173910 - protein, 116 aa, Glycine max
  Clone ID: PAT_MRT3847_128059C.1.pep
GKRKYSLSLFHFISSNIKYESRKHGIQSFDMSRRIPTKQFKQFIATALILSLNKNIHYGLLNQCFKNGISGPPRPKIGIKVHTHKVFGLKATASATISLRGMVLNILLFTLQSNIR

SEQ ID NO: 173911 - protein, 65 aa, Glycine max
  Clone ID: PAT_MRT3847_12805C.1.pep
AGTLKLELAQFAALEALSLFASDLAKATHNQLTRGQRLHELLILSQSTPLTVEEQLITISTGTNG

SEQ ID NO: 173912 - protein, 153 aa, Glycine max
  Clone ID: PAT_MRT3847_128060C.1.pep
GGGASMEGGAGGLHVDFGVGNSAWGSHHNLGFGDFGGLLGIMGQDGFGVGYLGVQCPQDPHRRFWGGNILLGLLLLLGGPRVFKVFYLGGPLIFFPTNGVGQKSKSLPPGAGWGAFIPLVFGVPFFSFFFVEKKKRYFMFLFFLCLCLGVKLK

SEQ ID NO: 173913 - protein, 163 aa, Glycine max
  Clone ID: PAT_MRT3847_128061C.1.pep
ASAQTRIYLVAGEAYGRGSMKYGEDAFPNIFSHSSLWPEEELNPFKNHQNMLAGIDYIVALQSDVFLYTYDGNMAKAVQGHRHFENFKKTINPDKVNFVKLVDKLDEGKISWKKFSSKVKRLHEDRIGAPYPRERGEFPKLEESFYANPLPGCICERKLDTSQ

SEQ ID NO: 173914 - protein, 52 aa, Glycine max
  Clone ID: PAT_MRT3847_128062C.1.pep
GASNGGGNGNGSGQGPSVAPYPRSSFSNLPGSRPDKKHELIKRILNISSPSK

SEQ ID NO: 173915 - protein, 49 aa, Glycine max
  Clone ID: PAT_MRT3847_128063C.1.pep
THSLIPCLPLPRVGLLGGIYLYPVKDNAPRLVDGLALCYAPTPMLESCL

SEQ ID NO: 173916 - protein, 221 aa, Glycine max
  Clone ID: PAT_MRT3847_128064C.1.pep
MSNVFEGYERQYCELSANLAKKCTAAGALNGEQKKQKVSEVKAGIDEAEALIRKMDLEARSLQPNIKGVLLAKLREYKSDLNNLKSEVKKIVSGNLNPSARDELLESGMADAMTASADQRTRLMVSTERLNKTSDRVKDSRRTMLETEELGVSILQDLHSQRQSLLHAHNTLHGVDDNIGKSKKILTNMSRRMNKNKWVIGGIVLVLVIAIIVILYFKFSK

SEQ ID NO: 173917 - protein, 82 aa, Glycine max
  Clone ID: PAT_MRT3847_128065C.1.pep
PISRPILVKYSSLSLLLVSTHDFCQQRLSQLIRNELISLKDVDLILVVDMKTLLVGNLYVPYKRSLSLEPCLDLGESRIQLT

SEQ ID NO: 173918 - protein, 93 aa, Glycine max
  Clone ID: PAT_MRT3847_128066C.1.pep
LFMIVVISSHHYSCPCFVPLIFPIKALFSKVRDAIVFTTIHHISFISNILKFYSIFFITIPFHFLSQTKSSIMSLKIGAKRILRNEFFIQFFI

SEQ ID NO: 173919 - protein, 159 aa, Glycine max
  Clone ID: PAT_MRT3847_128067C.1.pep
LEEDAYKSPLSVIILDDIERLLEYVPIGPRFSNLISQTLLVLLKRLPPKGKKLMVIGTASELDFLESIGFCDTFSVTYHIPTLNTTDAKKVLEQLNVFTDEDIDSAAEALNDMPIRKLYMLIEMAAQGEHGGSAEAIFSGKEKISIAHFYDCLQDVVRL

SEQ ID NO: 173920 - protein, 529 aa, Glycine max
  unsure (1)..(529): unsure at all Xaa locations
  Clone ID: PAT_MRT3847_128068C.1.pep
MASRFGLSSSSSSASSMRVTNTPASDLALTNLAFCSPSDLRNFAVPGHNNLYLAAVADSFVLSLSAHDTIGSGQIALNAVQRRCAKVSSGDSVQVSRFVPPEDFNLALLTLELEFVKKGSKSEQIDAVLLAKQLRKRFMNQVMTLXNNYSFTVSNAAVEGQEKSNSLERGMIFDDDTYIVFETSRDSGIKIVYQREGATSNIFKQKEFNLQSLGIGGLSAQFADILXRAFVSRVFPPHVTSKXKHVKGMLLYGPPGTGKTLMARQIGKILNGKEPKIVNGPEVLSKFVGETEKNVRDLFADAEQDQRTRGDESDLHVIIFDEIDAICKSRGSTRDGTGVHDSIVNQLLTKIDGVESLNNVLLIGMTNRKDMLDEALLRPGRLEVQVEISLPDENGRLQILQIHTNKMKENSFLAADVNLQELAARTKNYSGAELEGVVKSAVSYALNRQLSLEDLTKPVEEENIKVTMDDFLNALHEVTSAFGASTDDLERCRLHGMVXCGDRHKHIYQRAMLLVEQVKVSKGSPLVTC

SEQ ID NO: 173921 - protein, 87 aa, Glycine max
  Clone ID: PAT_MRT3847_128069C.1.pep
EEHKSNCSNKSTEIKRFPPASENCDEAYKRKTPENTWKPPRSEIVLNQEDHLHDPWRVLVTCMLLNRTAGGQTKNVVSNFFKLCPYA

SEQ ID NO: 173922 - protein, 204 aa, Glycine max
  Clone ID: PAT_MRT3847_12806C.1.pep
DVGSQPKDVTLALNNPEFAIVAIESGVVLLNGSKIVSTINLCFIVTAAAMSPDGSEAIVGGQDEKLHMYSVSGDTVTEQAVLEKHRGAITVIRYSPDFSMFASADLNREAVVWDRASKEVKLNNMLFNTARINCLAWSPDSTLVATGSLDTCVIIYEVGKPASSRRTIKGAHIGGVYGLVFIDQERVVSSGEDGCVRVWNLISE

SEQ ID NO: 173923 - protein, 731 aa, Glycine max
  unsure (1)..(731): unsure at all Xaa locations
  Clone ID: PAT_MRT3847_128070C.1.pep
MFGLSSSSSSASNMRVTNTPASDLALTNLAFCSPSDLRNFAVPGHNNLYLAAVADSFVLSLSAHDNIGSGQIALNVVQRRCVKVSSGDSVQVSRFVPPEDFNLALLTLDLEFVKKGSKSEQIDAVLLAKQLRKRFMNQVMTVGQKVLFEYHGNTSLSATNGIASDFPXVKMISDESMIELHESTKCAQIIRLVEDAYKSPLSVIILDDIERLLEYVPIGPRFSNLISQTLLVLLKRLPPKGKKLMVIGTTSELDFLESIGFCDTFSVTYHIPTLNTTDAKKVLEQLNVFTDEDIDSAAEALNDMPIRKLYMLIERQRMGAWWICRSQLNRDGTGVHDSIVNQLLTKIDGVESLNNVLLIGMTNRKDMLDEALLRPGRLEVQVEISLPDENGRLQILQIHTNKMKENSFLAADVNLQELAARTKNYSGAELEGVVKSAVSYALNRQLSLEDLTKPVEEENIKVTMDDFLNALHEVTSAFGASTDDLERCRLHGIVECGDRHKHIYQRTMLLVEQVKVSKGSPLVTCLLEGSRGSGKTALSATVGVDSDFPYVKIVSAESMIGLHESTKCAQIIKVFEDAYKSPLSVIILDDIERLLEYVPIGSRFSNFISQTLLVLLKRLPPKGKKLMVIGTTSELDFLESIGFCDTFSVTYHIPTLNTKDAKKVLEQLNVFSDEDIDSAAEALNDMPIRKLYMLIEMAAQGEQGGSAEAIFSGKEKINIAHFYDCLQDVVR

SEQ ID NO: 173924 - protein, 135 aa, Glycine max
  Clone ID: PAT_MRT3847_128071C.1.pep
MKFLKTGRVAIISRGRYAGKKVVLLMPVDNGSKGHPFPHAIVAGIERYPSTVTKRMSKARQAKRSKVKPFIKVVNYNHLMPTRYTLELEGLKNTVTSDTFKEVSQREEAKKTVKKTFDERYQSGKNRWFFTPLRF

SEQ ID NO: 173925 - protein, 74 aa, Glycine max
  Clone ID: PAT_MRT3847_128072C.1.pep
SLFFFFFFFFFFFFFFFFFFFCFFVKKLKRKYNKIPRNHQNKREKKGKGKQKGGKKNGLGLKEKRNQKKKKGRG

SEQ ID NO: 173926 - protein, 75 aa, Glycine max
  Clone ID: PAT_MRT3847_128073C.1.pep
HSFITNIFLLYLKNNAALTLLLRGTTVPLQSHPSTLFNLNKNINPLLYSYQPLLHTTCYTFNNTTFNLYITFLPQ

SEQ ID NO: 173927 - protein, 96 aa, Glycine max
  unsure (1)..(96): unsure at all Xaa locations
  Clone ID: PAT_MRT3847_128074C.1.pep
YTITCDLDKCGAANKVHFISDYKNTISGEHAEHHLMCATFRPXDKLTHVFTVILDPEKDMYIXMEGEENKKANFLYSXDFESXLYPLLTFPEPDDK

SEQ ID NO: 173928 - protein, 218 aa, Glycine max
  Clone ID: PAT_MRT3847_128075C.1.pep
MDPTPSFHRRSSSSSSDRLLGPYPFSPSPSSAASSSAEELNEAELFWATDSSESEPQRPTPPPKSRLRNFDRPVDSGILVVLRETESRGGLFRGKSPVPTSSRMTIPSLPRPPAASPSADYLAQSAPSRKFQQSAPVKVPILLSASASRRKNADDFARVVDDDDDDEEMLPPHEIVARGSGVSPKTTFSVLEGVGRTLKGRDLRQVKNAVLRQTGFID

SEQ ID NO: 173929 - protein, 182 aa, Glycine max
  Clone ID: PAT_MRT3847_128076C.1.pep
MMGGRLTARRGSRSDEVLDAEEQLRIANEIRAQFDALEPKRPIKPNRSEPDAVLQYPVAAASVNNIPELHKFQSLQSPSHAIISSAGFVDAQDEFVETQYYKELASIDKQHHTTGSGFIKAAREGGEGEYEIQLPNNHVNAAETQPRSYKSNPATNDWVPNSDEHQLVQAFVSSKPNRSEST

SEQ ID NO: 173930 - protein, 73 aa, Glycine max
  Clone ID: PAT_MRT3847_128077C.1.pep
VYLNTNKPLFFYVNLAKRYMQQHDEVELSSLGMAIATVLTVAEILKNNRLSVEKRIRTLTVDIKDDSRGRLLL

SEQ ID NO: 173931 - protein, 53 aa, Glycine max
  Clone ID: PAT_MRT3847_128078C.1.pep
NTILQSVSPKKYLKLQMNVLRVQRHFTINRPAKPFDLMHMILHSIWLRRLNLK

SEQ ID NO: 173932 - protein, 67 aa, Glycine max
  Clone ID: PAT_MRT3847_128079C.1.pep
GAITYLKTNSGKRNCERKGVLGCPAGTFSGCLAPGRGNDRAGVTLTPLASGPMDLEGGNKNTRAIGT

SEQ ID NO: 173933 - protein, 154 aa, Glycine max
  unsure (1)..(154): unsure at all Xaa locations
  Clone ID: PAT_MRT3847_12807C.1.pep
AAFVSVLIFSVVAAAIAAPPXVVTALAGALAVPIGSVGKWCNSLFKRYETALKGQRELISSMQVGSYITLVDLKNIRLRIDQLEIKIESMLQSSDFALRNEDAVKFAIDEIKKNIDIFAETIEALSKQADECSRQIRMARTVVVKKIINYTNTS

SEQ ID NO: 173934 - protein, 58 aa, Glycine max
  Clone ID: PAT_MRT3847_128080C.1.pep
ISFFFFFFFFFFFFFFFFFFFFFFKKEKKFFFYPLKVPLVKREPPLWGGGGGGKKKTC

SEQ ID NO: 173935 - protein, 56 aa, Glycine max
  Clone ID: PAT_MRT3847_128081C.1.pep
VPAGIAKTVSASFLRSYHVGGGLPRLVVLSQLFFVAFDGFGVPWFFFEMLLSFTST

SEQ ID NO: 173936 - protein, 63 aa, Glycine max
  Clone ID: PAT_MRT3847_128082C.1.pep
MLFISFIFIFMFFLIFDFFFMFFIIYFIFFLFYFYIYFFLYFFIVFLFYFFCFFFLFFLFIFF

SEQ ID NO: 173937 - protein, 135 aa, Glycine max
  Clone ID: PAT_MRT3847_128083C.1.pep
MTFTRFNSVGRVVLINYGPDAGKIATIIDVVDENKALVDGPFSVTGVNRHVINFKRLSLTDLFVDIPLQAREKTLKKALAKADTLAKWESSTWAKKLQNKKTRAELNDFDRFKAMIARKQKSALVKKAVAAARKN

SEQ ID NO: 173938 - protein, 137 aa, Glycine max
  Clone ID: PAT_MRT3847_128084C.1.pep
KGGFKKHKNLFSPPLIPGEKKNYHPGGGKNEKPPPPGGFGRFFLSGGRRFFPPESRRVWPPPFRGGPPLFAPPGVSLFGPRVFFLWVLAGEFLFPPGRLFAIINPRLFAPSKKGLWLRFGLWINIAGSPSLEPPSAQ

SEQ ID NO: 173939 - protein, 159 aa, Glycine max
  Clone ID: PAT_MRT3847_128085C.1.pep
VYAKQKLGFLSIRGYMSPEYAMEGIVSVKSDVYSFGVLVLEIISGRRNTSFNDDRPMNLIGHAWELWNQGVPLQLMDPSLNDLFDLNEVTRCIHIGLICVEKYANDRPTMSQIISMLTNESVVVPLPRKPAFYVEREILLRKASSKELCTNSTDEITIT

SEQ ID NO: 173940 - protein, 196 aa, Glycine max
  Clone ID: PAT_MRT3847_128086C.1.pep
MARPGPCSLHPALLLGSPSFPNAIAWSDDNLIAVASGHLVTILRPDLPIGAPRGVIKVSPSEPLPIGFVERKDLLSGCLLPMALYRDDKPVVRSISWSPLGMAANSGCLIAVCNSEGHVKIYRPPFCDYCAEWIEVVDITKSLYDYFQCTEFRGTRFASLDVSDKNSSDQTDSMYEENGKLLSADQYASRSAMLCS

SEQ ID NO: 173941 - protein, 66 aa, Glycine max
  unsure (1)..(66): unsure at all Xaa locations
  Clone ID: PAT_MRT3847_128087C.1.pep
HLVKDLLFSMTPTEKIGQVTQIERTVVTFSVIXDLSIGSLLSNGGSAPFENALAFVWADMGDGFQK

SEQ ID NO: 173942 - protein, 75 aa, Glycine max
  Clone ID: PAT_MRT3847_128088C.1.pep
NSPPRRRSLTDRTPKIDGKEYISEARSGLSYEQVSACLANIKESNAHKHTQEETRRKADEISGSENKDLYIYIQG

SEQ ID NO: 173943 - protein, 76 aa, Glycine max
  Clone ID: PAT_MRT3847_128089C.1.pep
LQSRVAPTYSSQLLSLRKIEYAAAPCVQLEDLTSRVHQQLGVFITTRNTFGRMDRPRYPTLGREEIKYRDGHHSAS

SEQ ID NO: 173944 - protein, 82 aa, Glycine max
  Clone ID: PAT_MRT3847_12808C.1.pep
SSPKKLGNKAYMSNTGKKGRLQTVSSSTSVNDNRVNKPPCHAPRTVTSVITNQNLTKMVQPEDSGSALHGPTLHAVNTPDPR

SEQ ID NO: 173945 - protein, 78 aa, Glycine max
  Clone ID: PAT_MRT3847_128090C.1.pep
QQYIRAQKPCMDSLQNLDFPIRKCRITKQFPIYCTAMSNLPKKKNMQVKFCINLALSLASIWCSDSRRCICHCTNCHF

SEQ ID NO: 173946 - protein, 74 aa, Glycine max
  Clone ID: PAT_MRT3847_128091C.1.pep
FITYYLKKLANNECPKPPQIPTGYFCIDAAPFPFLFLTIPCLFKNKKVFFQLTHLQKPLVPCNKGFFAPCPLGL

SEQ ID NO: 173947 - protein, 108 aa, Glycine max
  unsure (1)..(108): unsure at all Xaa locations
  Clone ID: PAT_MRT3847_128092C.1.pep
NSLITVPLSHVLATMLGDSPTEXKKNGTCARLRPNRKTQVTAEYYNDNGAMXPGRVLTVLNSTRRDHTVSKDQXAGDLKEHVIKPGIPEKHMDEMTIFHLNRGGRFVG

SEQ ID NO: 173948 - protein, 76 aa, Glycine max
  Clone ID: PAT_MRT3847_128093C.1.pep
GQGGLLLGVPAPGGPPLGEGSGLVGFPLFVARPVFSHFLWRFFIPCLVMLGVACFCSPWAATATIFEGSKISKRAT

SEQ ID NO: 173949 - protein, 118 aa, Glycine max
  unsure (1)..(118): unsure at all Xaa locations
  Clone ID: PAT_MRT3847_128094C.1.pep
CKXXEVXTSETGKHGHAKCHFVGIDIFISSXLEDIVPFWGSCDVPHVNRTDYQRIDIAEDGFLSLLTENGNTKDDLKLXTDESVXTKIKDGFGEGKDLVVCEMSXMGEEQIWALKDIE

SEQ ID NO: 173950 - protein, 151 aa, Glycine max
  unsure (1)..(151): unsure at all Xaa locations
  Clone ID: PAT_MRT3847_128095C.1.pep
FDAARGDXXXCCDITXXXYAHMTNMLNXXXGXKLLVILEGGYNLRSISSSATAVIKVLLGESPGCELENSFPSKAGLQTVLEVLKIQMNFWPALGPIFVTLESQWRVYCFGRKRKQIKKRRRVLVPMWRWGRKSLLFHFLNGHLNVKSKLC

SEQ ID NO: 173951 - protein, 86 aa, Glycine max
  unsure (1)..(86): unsure at all Xaa locations
  Clone ID: PAT_MRT3847_128096C.1.pep
ALGCLFPDLLTRNGVKFGXSEWIKAGSHIFFEGGLHYLGNPSLIHAQSILTIXATQIILVGAVKGYRFAGSHLGEVTGPIYPCCSF

SEQ ID NO: 173952 - protein, 115 aa, Glycine max
  Clone ID: PAT_MRT3847_128097C.1.pep
LLVYSNKMQNNFKKCYISLRNLCLFINTTCNLRILNKSNPLFPNFLLRLQSVFEEKRDETLKVENNISLVQDQVFVCGDVAAVIGAMAKYNTTRKEVARKKPEEMCTLGKSDAWL

SEQ ID NO: 173953 - protein, 148 aa, Glycine max
  Clone ID: PAT_MRT3847_128098C.1.pep
MCGERQRVSACAACTNNCLLFHKTKQTSPTSFFKLITKREHLTTLYIPPAFSSTVSDLVNKKIALNDSSERQWNVKVSGFNGSFAFMEGWSTFSLNHGVKVGYLLVFNYVKDLHFDVKIYDPSACEKLNFPKTRNQKKRSRGKKWLSS

SEQ ID NO: 173954 - protein, 229 aa, Glycine max
  unsure (1)..(229): unsure at all Xaa locations
  Clone ID: PAT_MRT3847_128099C.1.pep
QFIIQLGLFTALPMIVENSLEHGFLQAIWDFLTRQLQLSSVFYTFSMGTRSHFFGRTVLHGGAKYRATGRGFVVEHKRFAEIYRLFARSHFVKAIELGLILVIYASHSPVATDTFVYIALTITSWFLVASWIMAPFVFNPSGFDWLKTVYDFDDFMNWIWYSGSVFAKAEQSWERWWYEEQDHLKVTGLWGKLLEIILDLRFFFFQXGIAYQVGISDHNTQICGYLGIP

SEQ ID NO: 173955 - protein, 90 aa, Glycine max
  unsure (1)..(90): unsure at all Xaa locations
  Clone ID: PAT_MRT3847_12809C.1.pep
ATLIAPNNHSPQXESEALRKAFERXGTDENTVIVNLGHTTVYRRQEIKKVYEEVYQEDLVKRLESEIKGDFERAVYRWILEPADRNAGLA

SEQ ID NO: 173956 - protein, 62 aa, Glycine max
  unsure (1)..(62): unsure at all Xaa locations
  Clone ID: PAT_MRT3847_1280C.1.pep
XSKXXXDXXTXRIRXRXKAFXXXXLXXQDXYXXXISLXLKKXCXRGXXXXLXIXXRSXXLGX

SEQ ID NO: 173957 - protein, 43 aa, Glycine max
  Clone ID: PAT_MRT3847_128100C.1.pep
GTLPLTLPHNLTHPLLSSCSISRSPDKSCGRTHIPCTALLRQQ

SEQ ID NO: 173958 - protein, 95 aa, Glycine max
  Clone ID: PAT_MRT3847_128101C.1.pep
QPKPLKFQVPLVPPFPLSLDCHSLLLTEVASGATSSHHDSQTAGTGVCQLWSVDTGSTLGSNPVAMLLHKPFSLSAVMSWCSHLWAGGWTHHESP

SEQ ID NO: 173959 - protein, 49 aa, Glycine max
  Clone ID: PAT_MRT3847_128102C.1.pep
VPWVFPGGWALRAALPVGLWSLCCSACVSSGSCVVCAVLCSGLCGLAPL

SEQ ID NO: 173960 - protein, 313 aa, Glycine max
  unsure (1)..(313): unsure at all Xaa locations
  Clone ID: PAT_MRT3847_128103C.1.pep
KKQDLKTMTIKQLMGSLQAYEEKQKRKIKQKEATEQLLQLNVKEANYANYKSQRGRGRDQDRGRGRGHGGEGRGGXKNHSNKFNNGERSWNPQVTRGRGRGNSWSRYDKSQIKCFNCNKIGHYASECRFSKKVEEKANFVEEKGGEEETSLFACQNKFEEKRNKWYLDTGASNHMCGDKSMFVEINEAATGDVSFGDDSKIPVKGKGKILIRLKNGSHQFISNVYYVPNMKNNILSLGQLLEKGYDIHLKEHSLFLRDCRHNLIAKVPMSKNRMFLLNIXNDVTKCLKACYTDSSWLWHLWFGHLNEDGLEST

SEQ ID NO: 173961 - protein, 61 aa, Glycine max
  Clone ID: PAT_MRT3847_128104C.1.pep
IGVSIFFHTEIKDDIALNGSFWTLLASELPVSYVIHCEKAHYDRIILNSFHAFKFMKVIGQ

SEQ ID NO: 173962 - protein, 87 aa, Glycine max
  unsure (1)..(87): unsure at all Xaa locations
  Clone ID: PAT_MRT3847_128105C.1.pep
HVHVLATFPIGFAVFMVKLDPIPVTGAGITHARSFDQVVILKSDKAWADQXFFWVGPFVGDMVDAINQQKIVRGFPIKAPGSLRSEV

SEQ ID NO: 173963 - protein, 56 aa, Glycine max
  Clone ID: PAT_MRT3847_128106C.1.pep
KKLGLWGLFTGGPPPPIFFFGPLSGAPWGIFYAFKVFVGFPPPGGPAPPVAPAPGF

SEQ ID NO: 173964 - protein, 62 aa, Glycine max
  Clone ID: PAT_MRT3847_128107C.1.pep
LKKFLFQLISDHSCDLNGFHNIFHVPICLPYLSMCVNGLFFVHIFIGSIILNGVICSSAILI

SEQ ID NO: 173965 - protein, 109 aa, Glycine max
  unsure (1)..(109): unsure at all Xaa locations
  Clone ID: PAT_MRT3847_128108C.1.pep
MAESGGGNRRREPLLVSPEEEAAKASWRLNVKEFRLPSQTNDHQNQRSFTFHGLLRKPRKQRKVAEYYKNQERLLEGFNEMETMTEEGGFPGSLTEDEMKQLAKSERXG

SEQ ID NO: 173966 - protein, 77 aa, Glycine max
  Clone ID: PAT_MRT3847_128109C.1.pep
SSSANPACVLGSPPERSPSRTCLVRLAYRLFWEDRILPASMFQVNDGNVNMVMVMSTHGLGRCNKNVVIAGVFGSES

SEQ ID NO: 173967 - protein, 59 aa, Glycine max
  Clone ID: PAT_MRT3847_12810C.1.pep
SSEKVISINGSRSIISINPFKNIFKKFVVVYESCISKVLTTFCLKCSCQNGFECLCAIS

SEQ ID NO: 173968 - protein, 55 aa, Glycine max
  Clone ID: PAT_MRT3847_128110C.1.pep
MDKSVPNPPAATPIAKKPVSLTNLVLGAAIQTFEVSTLGQPFEVIKTHMAGGLMR

SEQ ID NO: 173969 - protein, 107 aa, Glycine max
  Clone ID: PAT_MRT3847_128111C.1.pep
RIQNTNRKPYHNFVLKEMISPVNETLVPFISYTCGNQESLFPKGDKGVLAESTSSKSIFLAVGLHVLGLDFLLFDFADALPVSFPPELLWYLPLHRFANLLFSSSTS

SEQ ID NO: 173970 - protein, 72 aa, Glycine max
  Clone ID: PAT_MRT3847_128112C.1.pep
SLSIPLGTPVTPKKYKAYRQIVNIFLWGLKDKGPFKKKRHIKSITCKQYGLPWLGKEIIFPEFSKKKKKSAL

SEQ ID NO: 173971 - protein, 85 aa, Glycine max
  unsure (1)..(85): unsure at all Xaa locations
  Clone ID: PAT_MRT3847_128113C.1.pep
MFGGGMGSPILRDLTRIAETADTSSQDGLTYLLADTIQSLVRHLRYCIAGXTFMNLKRSKEDGEKYYNRVSNEERNTPDEETLVN

SEQ ID NO: 173972 - protein, 149 aa, Glycine max
  unsure (1)..(149): unsure at all Xaa locations
  Clone ID: PAT_MRT3847_128114C.1.pep
MAGSSSKPVICPRSQGQTWLSHGPTSNYHSFNHLVSRGGIGRLSRCCCTFNFRLRKSKTAAFSVMRNFGVTTEEDHEFVKALRESQPYVSVHRGRLFVLLISAELXYLLICAELVASPYFNRILKDIAXLNHLGIRFVLVAETHVQIDK

SEQ ID NO: 173973 - protein, 360 aa, Glycine max
  unsure (1)..(360): unsure at all Xaa locations
  Clone ID: PAT_MRT3847_128115C.1.pep
MEEKILMRVIVITVFLFIGAATAEDAAAEAYESPKLKKLITDCTGHVGETCSTTTSSSGSEALMQKQDGLALCLLDSMERCLLDHQTNVGTLGDLITLPPFPPRPPVDPNIIPFPRPPNIVPFIKRRRSKLDNHQTDAGTLGKVIPLPPIRPGPPLKIIPFPGTNIVPFPRPPNIVPFPRRRRSKLDNHQTDAGTLGDLIILPPFPPRPPVDPNIIPFPRPPNIVPFSPRGRRSKLDNHQTDAGTLGRVIPLPPIRPGPPLKIIPFPGTNIVPFPKPYIPHSYNTITNLLGARRDQVQDLPLLIQTTQLRTVXLGVCSHVTARTCLTAPNVATSDLEACLTPSMNQCVYPPGAESGSPPI

SEQ ID NO: 173974 - protein, 55 aa, Glycine max
  Clone ID: PAT_MRT3847_128116C.1.pep
LNEFTTQSLCNLEAPCHSQLTMNTITGEQELHSYDTIHGRSKIENYNCLTWLYTD

SEQ ID NO: 173975 - protein, 107 aa, Glycine max
  unsure (1)..(107): unsure at all Xaa locations
  Clone ID: PAT_MRT3847_128117C.1.pep
DTSGLDISGMVEHTHKAASSFRAMPLSLPFQNGHRQAASLTQRDMNLXRRPAKLTKPTGKDPPENKNKSGLKDLPEDKSKSWDADAXFSXXQXNLXIXXXXTPSXKD

SEQ ID NO: 173976 - protein, 152 aa, Glycine max
  Clone ID: PAT_MRT3847_128118C.1.pep
NARATSFILLAYAKYLTKAHVVVNCGGTIVTPKRLRAIAQKQVDYLLGDNPLKMSYMVGYGPRYPQRIHHRGSSLPSVAVHPGKIQCSAGFSVMNSQSPNPNILMGAVVGGPDLHDGFPDERSDYEQSEPATYINAPLVGALAYLAHSFGQL

SEQ ID NO: 173977 - protein, 44 aa, Glycine max
  Clone ID: PAT_MRT3847_128119C.1.pep
VILALSSLNIGNPLTVSVPLHKETHANYEPGALCALLCSHLECQ

SEQ ID NO: 173978 - protein, 83 aa, Glycine max
  Clone ID: PAT_MRT3847_12811C.1.pep
MLVWSFNLVGQFVKFFDSVGFTILPLHHLLEGSPSFEICASTQKIDINMIRVIIFDSSYGNFCNIFSMNNFYFFLRTFYGGRA

SEQ ID NO: 173979 - protein, 50 aa, Glycine max
  Clone ID: PAT_MRT3847_128120C.1.pep
NLKLRLSPFFIDKCSLLVFVSEGIQTWDSPHLSPLDQPYISTQAMYQLDL

SEQ ID NO: 173980 - protein, 143 aa, Glycine max
  Clone ID: PAT_MRT3847_128121C.1.pep
AHIFWSEETAMPRSPSRSTRSCYRAIWCAAWARVWNYLPGGIIILASACPLKVVLQSTTSLIYYTSSVYSVLSNIRTRSTVLTIIHPVQHYKRYTTRCSHCRYLLYIISILFGTRTYIYIYIHSQLTGSVYISVRLKIGPVMK

SEQ ID NO: 173981 - protein, 39 aa, Glycine max
  Clone ID: PAT_MRT3847_128122C.1.pep
LSYLSSLHYDVMMIVFRVTALSHFLVIFCSLPHSFHLWR

SEQ ID NO: 173982 - protein, 90 aa, Glycine max
  Clone ID: PAT_MRT3847_128123C.1.pep
PIFSITVTLPQPRSTSLSALRTSSTSRQTVGSSTPSPNSQEFRGRGFPQQKMWSFCIGMVFPFSTFDHKLAKGKGCPSWMCYLDFFQQNK

SEQ ID NO: 173983 - protein, 107 aa, Glycine max
  unsure (1)..(107): unsure at all Xaa locations
  Clone ID: PAT_MRT3847_128124C.1.pep
APSPVLAASLVGVPPLLVRPDHPAVSLVAPQVFSPPPRLPGHLFVFTRLRXPPPRLEGFLNPSCFFPMDVFPTSLLFFFRRSLRLTVFIFFKTKKKKKKKKEKKPFP

SEQ ID NO: 173984 - protein, 66 aa, Glycine max
  Clone ID: PAT_MRT3847_128125C.1.pep
MLSWCLGWLRSSLWLQFKPHHIAAGAAYLAAKFLNMDLAAYQNIWQEFQTTPSILQDVSQQLMELF

SEQ ID NO: 173985 - protein, 80 aa, Glycine max
  Clone ID: PAT_MRT3847_128126C.1.pep
WLWLLDLGCFPDLVLVPFLGAGELRAAVLTGCRNAPVETWGFIAGSSVRFMVWECSGGLCGRGSCGSRVAGPICEKDPLE

SEQ ID NO: 173986 - protein, 65 aa, Glycine max
  Clone ID: PAT_MRT3847_128127C.1.pep
CRKLFCRLRSSLWLQFKPHHIAAGAAYLAAKFLNMDLAAYQNIWQEFQTTPSILQAVSQQLMELF

SEQ ID NO: 173987 - protein, 177 aa, Glycine max
  Clone ID: PAT_MRT3847_128128C.1.pep
MGAAKGENVCASPSPEISKEVDPSHASETLRIVNVMGAATPIPANCNARGFYDAFLRSFIKVDHIQRGRISCTVVAKPPICNRYGTLHGGSVGSLVEILSNACARTVVAKDKELFLGEISISYLSATPANEEVLANASVVKTGRNLTVVAVEFKLKKAGNLLYITHSTFYNMPVASL

SEQ ID NO: 173988 - protein, 55 aa, Glycine max
  unsure (1)..(55): unsure at all Xaa locations
  Clone ID: PAT_MRT3847_128129C.1.pep
HDPFKRKSSSHVMPPSLLGLTLPVTTSAGIRATELFVLSKVETGRVGRXPGIXGP

SEQ ID NO: 173989 - protein, 57 aa, Glycine max
  Clone ID: PAT_MRT3847_12812C.1.pep
RICHPRIEFLKRIVEVTRLLYLAALLGRISYHGMLASSVGWLTWIKPLGLSLLAPHV

SEQ ID NO: 173990 - protein, 57 aa, Glycine max
  Clone ID: PAT_MRT3847_128130C.1.pep
IHYEKEHVSVIEFFFLKNQLFIFATEHMYRTLSLDQACNNPEEDTILDVQEIELCTC

SEQ ID NO: 173991 - protein, 43 aa, Glycine max
  Clone ID: PAT_MRT3847_128131C.1.pep
GDDKNAKTLQFIEDMTRNTDSVQERVLAEILSQNAQTEYLKRF

SEQ ID NO: 173992 - protein, 70 aa, Glycine max
  Clone ID: PAT_MRT3847_128132C.1.pep
KIPCSSLQRVPDFQKGLSLNLEVRLGYFSFVLSQSVIIRHGGYPEYNNGGFKAFASYPSPGCRMLVFFFF

SEQ ID NO: 173993 - protein, 32 aa, Glycine max
  Clone ID: PAT_MRT3847_128133C.1.pep
FIYEGTHSNDGYVSPHETLVLKETLLHQKLAF

SEQ ID NO: 173994 - protein, 59 aa, Glycine max
  Clone ID: PAT_MRT3847_128134C.1.pep
SLGDELLVIGAPSMPHIVHALSMYTCCPDPDDEKLRWRQIGCGSIQLNHFIRNCAVMGT

SEQ ID NO: 173995 - protein, 44 aa, Glycine max
  Clone ID: PAT_MRT3847_128135C.1.pep
KLEGVLAFLHWSYSQLTQAEPRRPGSYRVLFIETCRASLHSGDS

SEQ ID NO: 173996 - protein, 129 aa, Glycine max
  unsure (1)..(129): unsure at all Xaa locations
  Clone ID: PAT_MRT3847_128136C.1.pep
LSTRSGGVGINLVGADTVIFYDSDWNPAMDQQAQDRCHRIGQTREVHIYRLISESTIEENILKKANQKRALDNLVIQSGGYNTEFXKKLDPMELFSGHRTLSIKNIVKEKDQNNGEGSVTNDDGEAALK

SEQ ID NO: 173997 - protein, 102 aa, Glycine max
  Clone ID: PAT_MRT3847_128137C.1.pep
VEGIITRNPNYPGEEGGFPCPDCPPQPISWGKLIKKSWRGLYGPPPEQFLRDLFLFFWGKIGCVRETQINILYCSEASSLLTNGQLRKKRRFYYCPTTTWKD

SEQ ID NO: 173998 - protein, 48 aa, Glycine max
  Clone ID: PAT_MRT3847_128138C.1.pep
MSIHCEVCETAPGAVICCADEAALCAKCDVEVHGSNKLDRKHETPLLQ

SEQ ID NO: 173999 - protein, 251 aa, Glycine max
  Clone ID: PAT_MRT3847_128139C.1.pep
MAQEAISSPEIEDLGFQVTESQQRNNDSDNNSIVTQFMGCIEALKKEKEKVIFTIFKHAEEYLKASLVQTPVLQLHCDDNLVVDSLPSVIINDLRECVRLMVTAGLKEECIDVYITWRREFLGEMLSWLIKLKIARFYIKALCVADRILLPNERRLCECVFEGSIPHEDKYPALPGIHMFGFRKKLDSYPGLPETIHGRKFGELLSLTYGVKEKAIVPGGRVHQITLDVLDYAGIIDEQLTDLLELQAMQP

SEQ ID NO: 174000 - protein, 63 aa, Glycine max
  Clone ID: PAT_MRT3847_12813C.1.pep
TYVALRSNQIHRHQEDPFCLISFTALFNSVADKVQPILCSLCHFPKDGKCNGCGKLRRITQVI

SEQ ID NO: 174001 - protein, 264 aa, Glycine max
  Clone ID: PAT_MRT3847_128140C.1.pep
GNENKGGDVILDVERGAFESTTSHTADNIPAEDAIITELQTQVQNGEQPRDEVGEPQGWEILKSIVYGGLIESITSLGIVSSAVSSGATPLNIIALGFANIIGGLFILGDNLIDLKKDNSGEDQTQTNVQDRCTRSLGRRENFLLHVVVAVLSFLIFGAFPLVIYGLLINKNYYTEVKLATVAATSIVCIILLAIGKVYTSKAPKSYIKTVLYYVTLAISASGVSYIAGNLIKDFLEKLNQPESGFAITMPISDTSVGSAWMSY

SEQ ID NO: 174002 - protein, 43 aa, Glycine max
  Clone ID: PAT_MRT3847_128141C.1.pep
KTVFFNQPCPFFFYFPSFTFTIFFSRVFLMELKILVFIRNREY

SEQ ID NO: 174003 - protein, 116 aa, Glycine max
  Clone ID: PAT_MRT3847_128142C.1.pep
FQNNPSFALPRLHLFDLFCTPIPRPFFPPSIFDPLFLTRALPWVLCLILLPRAGGSAKFCSLAPTRSGFSLWLLQSQHQSYHNRFCSSKLFLFIYFLSLCYQFLTFSSCLGNNLLL

SEQ ID NO: 174004 - protein, 104 aa, Glycine max
  Clone ID: PAT_MRT3847_128143C.1.pep
GHASNCFCGVISAPCIRRLLMHPRFPSLPRRISQSSRLIHQGMLVTINVGFSGELLEYPFLGSLLIGQRLKSPPSSRICYSQLWVLDRRCQNCFYFSISNLLRF

SEQ ID NO: 174005 - protein, 106 aa, Glycine max
  Clone ID: PAT_MRT3847_128144C.1.pep
SLITCFEFYRGDDFHIGVAVVRRIIGPILDPIAKRSEFLGDIQVHIFVSSRGLCAQYWEAITRDLMMPIQKTTEVRSRVLGEQQLHIVMMSGGMHVDDRVEVIGWL

SEQ ID NO: 174006 - protein, 70 aa, Glycine max
  Clone ID: PAT_MRT3847_128145C.1.pep
KKNLYFFREIYPKSSCNKIIKFLFHCLRIFIFIRQSIFKPLITKILQKKIHNNLVKQINILKVNMSTPYF

SEQ ID NO: 174007 - protein, 62 aa, Glycine max
  Clone ID: PAT_MRT3847_128146C.1.pep
NLAFFCFLVPHPLSPPMFYLSPPLLSSHFLSRKRYIIHDQHIMVPTNFRAIQLRFLNSQDRE

SEQ ID NO: 174008 - protein, 140 aa, Glycine max
  unsure (1)..(140): unsure at all Xaa locations
  Clone ID: PAT_MRT3847_128147C.1.pep
GRYPMEQQKSSSVPVFSFYYIAIDTEAGVTPEQFEHFVRHKGVHIPSYPGWSWTLLRGLRGERAGQYLMLFEIDSAAQRDCYMAADGNKTELAHQFWREHPEALDILGEWKRYATFSELPTXYTDYRLLAENSKSTVPHG

SEQ ID NO: 174009 - protein, 197 aa, Glycine max
  Clone ID: PAT_MRT3847_128148C.1.pep
MASATRLVHCELRSARPAVRPREPAGPVQVTIPKPKPKAAEAEGANIVLQPRLCTLRSYGSDRAGVLIKTRKEGDHDDVSPFFAALSDYIESSKKSQDFEIISGRLAMMVFAATVTMEVVTGNSVFRKMDIEGITEAGGVCLGAVTCAALFAWFCSARNRVGRIFTVSCNAFIDSVIDQIIDGLFYEGDPTDWPDEP

SEQ ID NO: 174010 - protein, 42 aa, Glycine max
  Clone ID: PAT_MRT3847_128149C.1.pep
MGGFEQQMKDRAKELKVLLKKGVKIVGDSCKKGWNKVKHIKR

SEQ ID NO: 174011 - protein, 256 aa, Glycine max
  unsure (1)..(256): unsure at all Xaa locations
  Clone ID: PAT_MRT3847_12814C.1.pep
TQKSQSWFSEASDGSGKKIRKPYTITKSRESWAEEXLQLFDRDWKKIEDFVGSKTVIQIRSHAQKYFLKVQKSGTVAHVPPPRPKRKASHPYPQKASKNVLVPMPASMGYVSSTSTLAPGYXHADIGSKGITRIDHSSLSGVGNSTRNLPATEMPKQGKQAQVIHGLPDFADVYSFIGSVFDPDTEGHVQKLKEMDPINFETVLLLMKNLTVNLSSPDFEPVREVMSSYDVHTKTVGVTAGIDVKKQTNDLSCQTA

SEQ ID NO: 174012 - protein, 196 aa, Glycine max
  Clone ID: PAT_MRT3847_128150C.1.pep
MASATRLVHCELRSARPAVRAREPAGPVQVTIPKPKAAEAEGANIVLQPRLCTLRSYGSDRAGVLIKARKEGDDDDVSPFFAALSDYIESSKKSHDFEIISGRLAMMVFAATVTMEMVTGNSMFRKMDIEGITEAGGVCLGAVTCAALFAWFSSARNRVGRIFTVSCNAFIDSVIDQIVDGLFYEGDDPTDWPDEP

SEQ ID NO: 174013 - protein, 685 aa, Glycine max
  unsure (1)..(685): unsure at all Xaa locations
  Clone ID: PAT_MRT3847_128151C.1.pep
APTRPYGCEKTTEGGLNKEVPNIVSEFVGGTSLEIQERYKTIKEKNIGRLDQPSQNSGEYESTIGICVEKTLSAALDSFDNLFCRRCLIFDCRLHGCSQPLIYHSEKQTVWSDPEGDRKPCSDQCYLQLKVVKNVTEDSTSGSDQNKRTTITEEADVILAPSIIEEPSNQSIVPFPTEVDCLGSLNLNVPISGTREKWKVPNQSDTALRDSSLPPDDSQHSYKKLKTISDDVVTANSDSSKNINFGACDESIHTITSGLLDKSVKDNSNKLIDSSSTCCSDEQDKSIGDGPKDPTNKTEFKKLSNSMEGKVDGMLRXSDWKPLEKELYLRGVEMFGRNSCLIARNLLSGLKTCMEISSYMHSGGVSMPHGSTVAPSSIMEEKGKFDAECTDQEMPSRSRLLRKRGKTRKFKYSWKSAGHPSIWKRIADGKNQSCKQYTPCGCQSMCGKECTCINGGTCCEKYCGCSKSCKNRLRGCHCAKSQCRSRQCPCFAAGRECDPDVCRNCWVSCGDGSLGEPPRRGEGQCGNMRLLLRQQQRILLAKSDVAGWGAFLKNPVNKNDYLGEYTGELISHREADKRGKIYDRANSSFLFDLNDQYVLDAYRKGDKLKFANHSSNPNCYAKVMLVAGDHRVGIFAKEHIDASEELFYDYRYGPDQAPPWARKPEGSKRDESTAPQGRAKKHQSH

SEQ ID NO: 174014 - protein, 42 aa, Glycine max
  Clone ID: PAT_MRT3847_128152C.1.pep
SRSKNGRLAMFAMLGFYFQAYVTGEGPVENLEKHISEQFGNN

SEQ ID NO: 174015 - protein, 64 aa, Glycine max
  Clone ID: PAT_MRT3847_128153C.1.pep
KKLVITYWYNTKSQLIKTVGAICNIPDGSNWYITYGKLYFSFTNPPLTSKKKITKRWSRHKNVG

SEQ ID NO: 174016 - protein, 73 aa, Glycine max
  Clone ID: PAT_MRT3847_128154C.1.pep
HAFARFPWRAVISATKTIWNDNYLPPSNSTLPNSGLACRKICNLPRLHWRYSLKCLYTFETTQRLHLVNTLPM

SEQ ID NO: 174017 - protein, 42 aa, Glycine max
  Clone ID: PAT_MRT3847_128155C.1.pep
DTDAEEELKEAFKVFDKDQNGYISASEVYILFFFSVALVFFL

SEQ ID NO: 174018 - protein, 174 aa, Glycine max
  Clone ID: PAT_MRT3847_128156C.1.pep
HQDALSNDSNSSTNYSSKYSPDYTDNIDNQSGIDRRSEDDVARHTAITPILKKNITKFYEPLVDNNTVYNYEDDPVEYKKARKRIQNRESASRVRSKKRNYVGDLEVEMNMIKKENADLKVKNAALKAENNLLKQQTCFLEKMIMKTGPQSITNTPANNVEQNQECLLPLVNKA

SEQ ID NO: 174019 - protein, 215 aa, Glycine max
  Clone ID: PAT_MRT3847_128157C.1.pep
MEKMRVVLITLLLFIGAAVAEKAGNGKAANNPAEDASDGEAINLVEEAGGIGDAITPAEGKATNLQAYESARFKKFVTHCSSHVAQTCSGNDPLHHQEGGHGINVPLGLSFCLFDSMEKCLGDHEAKLIDPNPGPMSAIPNSIQSQQLLIETVKFRTVLKTCTRVSAQFCLTAPNVDTSVLPACLGPSLNQCVYPAADAFTPGPPLELPPIIIYN

SEQ ID NO: 174020 - protein, 77 aa, Glycine max
  Clone ID: PAT_MRT3847_128158C.1.pep
INFVQFFRVVFIEFEVIVYIDSEEKECRKSRKGQKRERHAEHIQPPLISFFFLFSLHLSLYEFQVSIPPFFLLSVLQ

SEQ ID NO: 174021 - protein, 100 aa, Glycine max
  unsure (1)..(100): unsure at all Xaa locations
  Clone ID: PAT_MRT3847_128159C.1.pep
MGGSVQNLNLVASDSPGVGTAYYMCSQNGAGPNRDELDXEFLGNKTRKPYLIHTNVYXNETGGREMKHMLWFDPTHDYHTHLILWNNHQIEFFVDRFTVR

SEQ ID NO: 174022 - protein, 62 aa, Glycine max
  Clone ID: PAT_MRT3847_12815C.1.pep
QNPKPQEHHLLCSLGLQPQSFCFRKKVLLEKLDLALFSTRSSRRNQNSDECRILGGFEEIEI

SEQ ID NO: 174023 - protein, 28 aa, Glycine max
  Clone ID: PAT_MRT3847_128160C.1.pep
SIDTIDNATAHIQDTEGIPPDQQRYIFA

SEQ ID NO: 174024 - protein, 82 aa, Glycine max
  Clone ID: PAT_MRT3847_128161C.1.pep
KALKHFQLKEVKNVRLPMLAILGYFVQALVTGFGPSQPFVDQLVFCVHITMLTSRAFHCMYCMLFFILGKVKNPQTGVLLSF

SEQ ID NO: 174025 - protein, 69 aa, Glycine max
  Clone ID: PAT_MRT3847_128162C.1.pep
DDLKVDLDSMKKKLQEERVRHKEAIKLVRDAANNSFQAGLIPIFKTLESFTSEVVKAHEQVRLQSAGDS

SEQ ID NO: 174026 - protein, 76 aa, Glycine max
  Clone ID: PAT_MRT3847_128163C.1.pep
VLQGLLLHLLLFYPCAMGNGGDFFFPPKVNKKSGDFNVEEVLEVTPPRSLVVINRLLQLCLSQNNPPCVAFVFGAC

SEQ ID NO: 174027 - protein, 68 aa, Glycine max
  unsure (1)..(68): unsure at all Xaa locations
  Clone ID: PAT_MRT3847_128164C.1.pep
RSKEETFARACMTYTIDAMRGYXKALQARTIHKLGQNFDRAFGTQFTDDYGLREYAWPTSWAISTRFG

SEQ ID NO: 174028 - protein, 75 aa, Glycine max
  Clone ID: PAT_MRT3847_128165C.1.pep
DMADTSPIHSIHVKKTATEYLIKQEQCAKAYYLDAAQNSRAMTVDHLQKTHPDLLQSLRAPSNARTKAIEAINTT

SEQ ID NO: 174029 - protein, 174 aa, Glycine max
  unsure (1)..(174): unsure at all Xaa locations
  Clone ID: PAT_MRT3847_128166C.1.pep
MNEDGVTSANPNPSLPKPPSSPPTPAASSAGASSPAFPANTGNGDARRRRDILSADSHAVLGPLLRGASVPSCRPWERGDLLRRLSTFKLAGKLHKVAGSLACAKRGWVNVGVAKIECEICAAQLDFTLPSAPSFEADASGEEFSEQLDRGHKATCPWKGNSCXGKLGASSLLL

SEQ ID NO: 174030 - protein, 49 aa, Glycine max
  Clone ID: PAT_MRT3847_128167C.1.pep
IALSQINKTVSGNILSRSFEGLWFSPISFYSPHTITFHIYIILCRYSSH

SEQ ID NO: 174031 - protein, 33 aa, Glycine max
  Clone ID: PAT_MRT3847_128168C.1.pep
FAAEGAGMSEMKQWNDLYGEGGSRKQQQLSYFL

SEQ ID NO: 174032 - protein, 49 aa, Glycine max
  Clone ID: PAT_MRT3847_128169C.1.pep
RLACISTRVLGFLIPHHIRAVNVILSMVKDIGECLAKAIINSFIYRTCG

SEQ ID NO: 174033 - protein, 97 aa, Glycine max
  Clone ID: PAT_MRT3847_12816C.1.pep
MNSTTNTSNSQSMAAAAPSDGSGKKVRKPYTITKSRESWTEEEHDKFLEALQLFDRDWKKIEDFVGSKTVIQIRSHAQKYFLKVQKNGTVAHVPPPR

SEQ ID NO: 174034 - protein, 72 aa, Glycine max
  Clone ID: PAT_MRT3847_128171C.1.pep
YFRKFDVPFSRGNIESKNLINAVKNRWPNYLVFYGVIMSNRVFKCLPVLGFLCLVKKYELYTCHSIISLCSR

SEQ ID NO: 174035 - protein, 355 aa, Glycine max
  unsure (1)..(355): unsure at all Xaa locations
  Clone ID: PAT_MRT3847_128172C.1.pep
RPTRPLGFVKGVVDSDDLPLNISREMLQQNKILKVIRKIXQVLRNFIEHLNAIAENKEDYNKFYDAFSMNLKLGIHEDSQNRSKLADLLRYHSTKSGDEMTSLKDYVTRMKEGQKDIYYITGESKKAVENSPFLERLKKKXYEVLFMVDAIDEYAVGQLKEYDGKKLVSATKEGLKLDDEXEEEKKKKEEKKKSFDELCKVIKDILGDKVEKXYVVSDRIVDSPCCLVTGEYGWSANMERIMKAQALRDSSMSGYMSSKKTMEINPDNGIMEELRKRAEADKNDKSVKDLVLLLFETALLTSGFSLDDPNTFASRIHRMLKLGLSIDEDDNGGDDVDMPPLEEDGAEESKMEEVD

SEQ ID NO: 174036 - protein, 65 aa, Glycine max
  Clone ID: PAT_MRT3847_128173C.1.pep
CGIFKNGLIKLIKSKSFPKFIRDLFAYVSFPSILYAQTTPLWFFQDVLKPICDVFTSVTTISFLF

SEQ ID NO: 174037 - protein, 54 aa, Glycine max
  unsure (1)..(54): unsure at all Xaa locations
  Clone ID: PAT_MRT3847_128174C.1.pep
HLEDNLWQFDLATSRLGXGSLLYGSLTKCASFNLTSAVKKKGVSKISGISFTHS

SEQ ID NO: 174038 - protein, 193 aa, Glycine max
  Clone ID: PAT_MRT3847_128175C.1.pep
MFLVDWFYGILATLGLWQKEAKILFLGLDNSGKTTLLHMLKDERLVQHQPTQYPTSEELSIGKIKFKAFDLGGHQIARRVWKDYYAQVDAVVYLVDAFDKERFSESKKELDALLSDESLANVPFLILGNKIDIPYAASEDELRYHMGLTNFTTGKGKVNLVDSNVRPLEVFMCSIVRKMGYGEGFQWLSQYIK

SEQ ID NO: 174039 - protein, 318 aa, Glycine max
  Clone ID: PAT_MRT3847_128176C.1.pep
MEKFPVVDMGNLNNEERSATMEIIKDACENWGFFELVNHGISIELMDTVERMTKEHYKKCMEQRFKEMVASKGLESAQSEINDLDWESTFFLRHLPASNISEIPDLDEDYRKVMKDFAVELEKLAELVLELLCENLGLEKGYLKKVFYGSKGPNFGTKVSNYPPCPKPELIKGLRAHTDAGGIILLFQDHKVSGLQLLKDAHWIDVPPMRHSIVINLGDQLEVITNGKYKSVMHRVITQTDGNRMSIASFYNPGNDALIAPAPALVKEDETSQVYPKFVFDDYMKLYAGLKFQDKEPRFEAMKATESSNINLGPIATV

SEQ ID NO: 174040 - protein, 371 aa, Glycine max
  Clone ID: PAT_MRT3847_128177C.1.pep
MERDFMGLNLKEPLAVVKEEMNNDGCKNSGFKKGRIAQWPFSNKVSALPHLMSFKASQDDKTKNTVSDTLSSSGFMSILSQEAFDTSQKRSAGEPQKSFNHDGQGDLHFSLTSYPVQHDVNHPHDVKMFSVPNQAISVSLGNPFLKNHFAAAGQKPLLGGIPVTTSHSVLPSAVAVAGMTESCNSVKPSAQLTIFYAGTVNIFDDISTEKAQAIMLLAGNSLSAASNMAQPNVQVPISKLGAGAGVPVSQPANTLPGFGLSSPLSVSSHTGVQSGSGLTSTDEFLAAKTTGVPNTPICNVEPPKVVSATTMLTSAVPQARKASLARFLEKRKERVMSAAPYNLNKKSEECATAEYAGVNFSATNTVLAKQG

SEQ ID NO: 174041 - protein, 67 aa, Glycine max
  Clone ID: PAT_MRT3847_128178C.1.pep
FFLVRRELNYPVPFKTLVKKPIRSGVGGLINTPWLIKALDYQFFMGKKIFYLHWLGPFILNWTLFTF

SEQ ID NO: 174042 - protein, 369 aa, Glycine max
  Clone ID: PAT_MRT3847_128179C.1.pep
MERDFMGLNSKEPLAVVKEEMHVYGFEDSGFTKGRIAQWPFSNKVSALPHLMSFKASQDDKTKKIVSDPLTSAGFMSILSQEAFDSSQKRCAGEPQKSFNHDGQGRLHFSLTPYPVQHDVNSVNRPHDVKMLSVPNQAISLSLGNPFLKNDFATAGQKLLLGGIPVTTPHSVLPSAVAVAGMTESCNTVKPSAPSAQLTIFYAGTVNVFDDISAEKAQAIMLLAGNSLSAGSNMAQPKVQVLVSKLAVGDGVPVSQPANTSPGSGLSSPLSVSSHTGIQSGSGSTSTDKTTGVPTTPVCNVEPPKIVSATTMLTSAVPQARKASLARFLEKRKERLVWMQYFSGWVLSDTIYISPKKEGVVVIIHWLTT

SEQ ID NO: 174043 - protein, 267 aa, Glycine max
  unsure (1)..(267): unsure at all Xaa locations
  Clone ID: PAT_MRT3847_12817C.1.pep
MNSSTNTSNSQSMAAAASDGSGKKVRKPYTITKSRESWTEEEHDKFLEALQLFDRDWKKIEDFVGSKTVIQIRSHAQKYFLKVQKNGTVAHVPPPRPKRKAAHPYPQKASKNVLVPLPASVGYASSRNTLAPGFASWDETSLLMNAGADKPMTXYDCQDELNVQFGSRADIGSKGITQITNSSLSGVGNSTRTLLTSEIPKQGKQAPVLHGLPDFAEVYGFIGSVFDPETNDHVQKLKEMDPINFETVLLLMRNLTVNLSSPDFEPI

SEQ ID NO: 174044 - protein, 233 aa, Glycine max
  unsure (1)..(233): unsure at all Xaa locations
  Clone ID: PAT_MRT3847_128180C.1.pep
MGMLLLLSYSLLFLVLFLTLKSLFQSRKLRNLPPGPPPLPIIGNLNLLEQPIHRFFQRMSKEYGNIVSLWFGSRLAVVISSPTAYQECFTKHDVALANRLPSLSGKYIFYNNTTVGSCSHGQHWRNLRRITALDVLSTQRVHSFSGIRSDETKRLVQRLLAKNSKEGFARVEISSMFNDLTYNNIMRMISGKXFYGEESELKNVEKAREFRETVTEMLELMGVANKGRSLTFP

SEQ ID NO: 174045 - protein, 250 aa, Glycine max
  Clone ID: PAT_MRT3847_128181C.1.pep
EVNFLGRLSHPNLVNLLGYCWDEDKLLLVYEFMPKGSLDYHLFRGNITPLSWNTRLKIAIGAAWGLAFLHASENNVIFSDFKASNILLDGNYNAKISDFGFARWGPFEGESHVSTRVIGTYDYAPPEYIATGHLYVKSDIYGFGVVLLEILTGMRALDTNRPQTMQNLVEWTKPCLSSKKKLKAIMDAKIEGQYSLEAAWQAAKLTLKCLKSVPEERPSMKDVVEALEAIEAIQNPQFAAYISSTPSAGS

SEQ ID NO: 174046 - protein, 70 aa, Glycine max
  unsure (1)..(70): unsure at all Xaa locations
  Clone ID: PAT_MRT3847_128182C.1.pep
XKPQIXXTXNTQSYIXXFXXLLXEQIKXXXXSXNTIXXIRIXNXIVIIXIXTLXXKTXXXXTTFRXXNMH

SEQ ID NO: 174047 - protein, 76 aa, Glycine max
  Clone ID: PAT_MRT3847_128183C.1.pep
ILTHNYIQLSSKMSAYHYKRSFYLYTINYKFHASIGSTFHINTSPKPHQQFFTANHSLQKLHWTSTCHVEVACWLV

SEQ ID NO: 174048 - protein, 133 aa, Glycine max
  Clone ID: PAT_MRT3847_128184C.1.pep
FGKTHGAAPSENTGPDPNSEDLATQGFGWMNKHGRGNGPDTITSGLEVTWTGTPTKWSNKYLEYLYKYEWELEKSPAGANQWVAKTDDKIIPDAYDQGKKHKPRMLTTDLSMRMDPAYEKITRRWLDHPEELH

SEQ ID NO: 174049 - protein, 60 aa, Glycine max
  Clone ID: PAT_MRT3847_128185C.1.pep
QLHQNSGMKYMNKTVHPCSQIPIIRVLALIRCFTSFGLHFSRALHSTGQCLNWTLRSYIK

SEQ ID NO: 174050 - protein, 37 aa, Glycine max
  Clone ID: PAT_MRT3847_128186C.1.pep
LLFFFAQDHWIPYTELFVQNNCVTTLNLANLNQSFST

SEQ ID NO: 174051 - protein, 166 aa, Glycine max
  Clone ID: PAT_MRT3847_128187C.1.pep
MSLTVPNDQNKNFLPNHRGAPMAAIDLALAHASSHLRVYRTARSTDKPAASSDGDEDFMSLTVPNDQNTSFFPNQRGTSNASIDNDMGYTSSNLWVNSSSSARGARIQANSRDLDELSPQEILSSQHTGKLSEGSNYIQTRIFNKDQNPSLEFTLGRSNWHNSEHA

SEQ ID NO: 174052 - protein, 115 aa, Glycine max
  Clone ID: PAT_MRT3847_128188C.1.pep
TCARAARAGLKQFDCIETTWLRSVLFWDNIDIATPVEILLERQPQSFKYLKRKSDYVKKPISKEGWEGIWNKMIELEKAIMYFNPYGGRMAEIPSTETAFPHRAGNLWKDQYQAN

SEQ ID NO: 174053 - protein, 62 aa, Glycine max
  Clone ID: PAT_MRT3847_12818C.1.pep
KTPKTPKGPSSVEDIKAKMQASIEKGGSLPKVEAKFINYVKNCFRMTDQEAIQDLWQWRKSL

SEQ ID NO: 174054 - protein, 145 aa, Glycine max
  unsure (1)..(145): unsure at all Xaa locations
  Clone ID: PAT_MRT3847_128190C.1.pep
MTNRNVNNTLVELAMSISNTSALPRATVPGIMALLGGVLGLPHKKLLMKTLEDGSVNKGGNKVINTWIDSMRASSPTRCQIHTKXQNQDPTSPWTLYHPSALSMFDHIVCESKGKQIVTFLDYDGTLSPIVADPDKAYMSKKMRP

SEQ ID NO: 174055 - protein, 52 aa, Glycine max
  Clone ID: PAT_MRT3847_128191C.1.pep
SLSAPLTAAQVLVVSWIKDTVDALTLTTEPTNNGLLKRPRAATGANLITKPV

SEQ ID NO: 174056 - protein, 72 aa, Glycine max
  unsure (1)..(72): unsure at all Xaa locations
  Clone ID: PAT_MRT3847_128192C.1.pep
EVKFAWKIQRNMAKHKHILESINAIIKTKNPNFKSYINPQKQYAYAVIXYXPTQLIPDHNGNKMLRLTSIXK

SEQ ID NO: 174057 - protein, 71 aa, Glycine max
  Clone ID: PAT_MRT3847_128193C.1.pep
GHRPTRIAMADRPRAVDMHRGTRCSTSWKDSGALDAPRNLHAHDGSLWSPMYQYLRPTAEYCCNALSWFRL

SEQ ID NO: 174058 - protein, 77 aa, Glycine max
  Clone ID: PAT_MRT3847_128194C.1.pep
LLALLSPTCSIFCFTYGYAAAWCHQYLIVSSKWLRVYIIYFCFLLPYKKYAIFLVSIPKQINVCIGCRKKKKKKKKK

SEQ ID NO: 174059 - protein, 93 aa, Glycine max
  unsure (1)..(93): unsure at all Xaa locations
  Clone ID: PAT_MRT3847_128195C.1.pep
RLQLLVPNWSETQRNNPSKVCSRSSLVNARESAPAEGVSASPEDDAEMDEELQHLRGVQRLDDTADGVXAMPTSKRATKAVCTIGTYTNTRGM

SEQ ID NO: 174060 - protein, 115 aa, Glycine max
  Clone ID: PAT_MRT3847_128196C.1.pep
MYHHHQHQGKNIHSSSRMPIPSERHMFLQTGNGSGDSGLVLSTDAKPRLKWTPDLHARFIEAVNQLGGADKATPKTVMKLMGIPGLTLYHLKSHLQKYRLSKNLHGQNNNVTYKN

SEQ ID NO: 174061 - protein, 33 aa, Glycine max
  Clone ID: PAT_MRT3847_128197C.1.pep
LEFPFDFDYDVIPNQLQQIYYYWLVQSDLEPLE

SEQ ID NO: 174062 - protein, 69 aa, Glycine max
  Clone ID: PAT_MRT3847_128198C.1.pep
PFSPPFLLLSLRRFLVQHNLVLDVWFYIRWELFCSWFKDPFPPFFPFCFRGGCSFFCYLIFPSGVFSGY

SEQ ID NO: 174063 - protein, 276 aa, Glycine max
  Clone ID: PAT_MRT3847_128199C.1.pep
MRTNFLSWSALDSNKPMIGSSASISFLVRTLQSLDDKSSSQAKQDALRALYNLSIFPGNVAFILETDLVVFLVNSIGDMEVTERSLATLSNIVSTREGRKAISTVPDSIPILVDVLNWTDSPECQEKASYILMVMAHKSYGDKQAMIEAGVASSLLELSLLGSTLAQKRASRILEILRVDKGKQVSGSYGLGAAVSAPICGSSSARPDGGGGGRECFEEDEEMMSEEKKAVKQLVQQSLQNNMRKIVKRANLPHDIAPSDHFMSLTSSSTSKSLPF

SEQ ID NO: 174064 - protein, 38 aa, Glycine max
  Clone ID: PAT_MRT3847_12819C.1.pep
KPTTRTLKKLKLLTFYVHVRSELEIGGALVPIQSTSIL

SEQ ID NO: 174065 - protein, 114 aa, Glycine max
  Clone ID: PAT_MRT3847_1281C.1.pep
QSEMLSAQVNNSNNFKNTSSAKLSNFSYFSSTSIMKVCIYHTQNSKLTPQEITTEQQLNNFAHGLHAFNDALKLFQIILKHSYADYHKSFAFFEQSFELISFFFKHAWICKHNN

SEQ ID NO: 174066 - protein, 82 aa, Glycine max
  Clone ID: PAT_MRT3847_128200C.1.pep
EFGTRVFLARWTLDQSNHPWNPSFQHYASCGESDLKTTVLALQDLQLNTDGCPLTAVRTKYRQDKFKCVAALSSPKLLETLF

SEQ ID NO: 174067 - protein, 133 aa, Glycine max
  Clone ID: PAT_MRT3847_128201C.1.pep
KQAMIEAGIASSLLELSLLGSTLAQKRASRILEILRVDKGKQVSGSYGLGAAVSAPICGSLSGKPDGGGGRECFEEDEEMMSEEKKAVKQLVQQSLQNNMRKIVKRANLPHDIVPSDHFKSLTLSSTSKSLPF

SEQ ID NO: 174068 - protein, 84 aa, Glycine max
  Clone ID: PAT_MRT3847_128202C.1.pep
ELVIERRFCSFSCSAALFCSLETILCALSFSLSSYDPSSGFLSLWCFSFAINSAEFCGHFKERDELSNPYDLMCFLPPLLSSSR

SEQ ID NO: 174069 - protein, 333 aa, Glycine max
  unsure (1)..(333): unsure at all Xaa locations
  Clone ID: PAT_MRT3847_128203C.1.pep
MANYHRNNVENVVLGRHHHHSHRSKSASVAGHTFRLWNAASFRRIIFDAVSCGASSRYAARSNISDEKQHLQQKQQHHKTTSMKNNAKSEKLSDLLSIAEAETDVETKKKEEKLEDLKRLVKELQQHEEDSTKNKKSEAAAKVRLLAKEELEVRGTLAMLGAIPPLVAMLDETEQNDVNSLVSSLYALLNLGIGNDANKAAIVKVGSVEKMLKLIESPDGLDSSVSEAIVANFLGLSALDSNKPIIGSSASIYFLVRTLQSLDDESSPQAKQDALRALYNLSIFPGNVAFILETGFXXFLVNSIGDMXEVTERTLATLXHIVSTREGRKAISA

SEQ ID NO: 174070 - protein, 173 aa, Glycine max
  Clone ID: PAT_MRT3847_128204C.1.pep
MANYHRNNVENVVLGHHHRSKSASVAGHTFRLCTAASFRRLIFDAVSCGASSRYAARSNTSSDGEKQQKQKPKTSSRKPNNAKSEKLSDLLSIAEAEADVETKKKEEKLEELKLLVKELQQHEEVDDSTKKKREAAAKVRLLAKEDLEVRRTLAMLGAIPPLVAMLDETELND

SEQ ID NO: 174071 - protein, 43 aa, Glycine max
  Clone ID: PAT_MRT3847_128205C.1.pep
THALGLCTDVGVTHEKFWGQLILLILNYDNGWTYMKAFVFFLY

SEQ ID NO: 174072 - protein, 147 aa, Glycine max
  unsure (1)..(147): unsure at all Xaa locations
  Clone ID: PAT_MRT3847_128206C.1.pep
MSNITGCARFRPSNSKEKQNGNDSGCIRNIDSETFIFKDEKDEEFVFSFDRVFYEKSEQSDVXLILAQPIKNDWSXLTYSMENDNYXKQGPGILECEEQNKGLLPRVVEGLFDSINSLDEEKTYSIKLSMVHSYMEKRRNLVEIIKL

SEQ ID NO: 174073 - protein, 133 aa, Glycine max
  unsure (1)..(133): unsure at all Xaa locations
  Clone ID: PAT_MRT3847_128207C.1.pep
MSSHSHKGTSFYGDAAPYRSREGLSTRPVASSDEIQLHIDPGIDFDDEITGLRGQVKXLKNVAEEIGSEVKFQRDFLEQVQMVMIQAQAGVKNNLRRLNKSIVKNGSNNIVHVIAFALVCFFIVYFWSKMSRK

SEQ ID NO: 174074 - protein, 98 aa, Glycine max
  unsure (1)..(98): unsure at all Xaa locations
  Clone ID: PAT_MRT3847_128208C.1.pep
VIGDKLTTINKMXAYGLNTGIAGSGLLRTIPDSIXQQTVSNQTAPARTPKNCDSSMQSFXQFSIDLLDGGILXDKTVDWITLIQLSTIYNLLRDADWK

SEQ ID NO: 174075 - protein, 100 aa, Glycine max
  Clone ID: PAT_MRT3847_128209C.1.pep
MPPLIDPGLFVFYSLFPFLLFNSISCVNCREGLSTRPVASSDEIQLHIDPGIDFDDEITGLRGQVKKLKNVAEEIGSEVKFQRDFLEQVVRNFLDHLYFA

SEQ ID NO: 174076 - protein, 87 aa, Glycine max
  Clone ID: PAT_MRT3847_12820C.1.pep
MRIDSVILVVPCLSANERKELASYGGGLGDKLKTQLVGKSGVTPNVATSFIGTLEGNELLRIKIHRTCAIELSDVVRGLRQAAGSVS

SEQ ID NO: 174077 - protein, 58 aa, Glycine max
  Clone ID: PAT_MRT3847_128210C.1.pep
GCWGILLVSGFHVEGQSTLDVLMASALLFFHALSYNGSPLSNKRGSPRREPPTRSSRP

SEQ ID NO: 174078 - protein, 36 aa, Glycine max
  Clone ID: PAT_MRT3847_128211C.1.pep
HSLSCLLNLLGDSHGTSQDSFEESHHAFHIGLKNQA

SEQ ID NO: 174079 - protein, 180 aa, Glycine max
  Clone ID: PAT_MRT3847_128212C.1.pep
GISPKLQHYGCMIDLLARSGKFDEAKVLMGNMEMEPDGAIWGSLLNACRIHGQVEFGEYVAERLFELEPENSGAYVLLSNIYAGAGRWDDVAKIRTKLNDKGMKKVPGCTSIEIDGVVHEFLVGDKFHPQSENIFRMLDEVDRLLEETGFVPDTSEVLYDMDEEWKEGALTQHSEELAIA

SEQ ID NO: 174080 - protein, 81 aa, Glycine max
  Clone ID: PAT_MRT3847_128213C.1.pep
GKQQEPCLFTTGNRTAGCITEYLNHYQRGMNLTLGWGIYYEGETERQALTETSTLSSLGVKEKLEHTPSTKIVVRAKWRIF

SEQ ID NO: 174081 - protein, 124 aa, Glycine max
  Clone ID: PAT_MRT3847_128214C.1.pep
DAAALNTQLRVGTDKSCSPLLRWVSASTDTREKGSTDKLSSSGQDQEKRKGMIGCHHRQSSKPSKQLHRDWGLQGNNRSYTQLHLWCLPQLGTAAQSLSEEEKIKLICLTWQRKGQYYINYFGT

SEQ ID NO: 174082 - protein, 110 aa, Glycine max
  Clone ID: PAT_MRT3847_128215C.1.pep
TVCSASPSLHRLALHLYQRSDPGAHKVYISPEVLYRIGQCSATCANSGEDIYSQSLCSSQRVIFFPFRSRLAPSMKDLKHSCNRVTIALVSGFKSRQPVFAVYQSLPTQT

SEQ ID NO: 174083 - protein, 94 aa, Glycine max
  Clone ID: PAT_MRT3847_128216C.1.pep
LVQISFFLIFSCQGKKTWSQKQNREYPQSFFWAKAGMGFFKGKNFFYGGGSNIRPNFSNRVTQTSTNTNVKLEGAQRCFFSAIASTTFFSKLPF

SEQ ID NO: 174084 - protein, 37 aa, Glycine max
  Clone ID: PAT_MRT3847_128217C.1.pep
ITILLIYINLISSLTLNNYNINFYPTFYKSHIFIFII

SEQ ID NO: 174085 - protein, 36 aa, Glycine max
  Clone ID: PAT_MRT3847_128218C.1.pep
GSMLTHLVSCQVLAASMSCKTILAIHRSEPIPPKMA

SEQ ID NO: 174086 - protein, 65 aa, Glycine max
  Clone ID: PAT_MRT3847_128219C.1.pep
SFCTLPIVVVAPRFYILPFSTRPPMLFHNYEYMPLITLEQCKLMTLLVALFSCLLAFDFFFFLVE

SEQ ID NO: 174087 - protein, 52 aa, Glycine max
  unsure (1)..(52): unsure at all Xaa locations
  Clone ID: PAT_MRT3847_12821C.1.pep
NPPQAKLSLMICDTALLVVKXRGTFQKVKSNFLFPLVSLSIMPHVAYHMFGC

SEQ ID NO: 174088 - protein, 140 aa, Glycine max
  Clone ID: PAT_MRT3847_128220C.1.pep
ESRCPPYTKKRLIPDSTVISTRHASLRSAKKLIETRGTSVDVAQMKKASEDENPVANHSVQMEEHNAFEAQFIPFEQEHLEEDIEASNSGESSDKNNDKSISMVGHPSFCLNLLNLLIWGTMRLILLDKDHGLTRLKDTK

SEQ ID NO: 174089 - protein, 68 aa, Glycine max
  Clone ID: PAT_MRT3847_128221C.1.pep
LQAQEEQLHFVRDQRIPSLSQTIVYPLCSALTLSTTHVHNTSHSISSDQIMNMVDDRYFIIPLSHQHS

SEQ ID NO: 174090 - protein, 184 aa, Glycine max
  Clone ID: PAT_MRT3847_128222C.1.pep
MVTYRNIKELKEAGIVLKSSKTRRPRDVSFSYGWIRSELKLPEIVVDDTTAATVLNLIAYEMCPDFENDYGICSYVSFLDSLIDHPDDVKALRSEQILLNSLGSDEEVANLFNTISTDLVPDMVKYADVRNEIEKHYSDKSRTWLALGYHTYFSNPWAIIAFHAAVVGLALTFVQTWYTIHPPK

SEQ ID NO: 174091 - protein, 65 aa, Glycine max
  Clone ID: PAT_MRT3847_128223C.1.pep
MWDLHHKLSDAIHSVLRSHFLTFVKSLKHYNSPSDLPNAAVSTADDRSFGFRFVKDFRPVAFNNN

SEQ ID NO: 174092 - protein, 150 aa, Glycine max
  Clone ID: PAT_MRT3847_128224C.1.pep
MPFPPFSSLGLLQLLQEEASAMERDGVVSQPVAVIACIAVAVFYVAILYAPTVLLRLPPPPSFKTYMIRRFLCAVVSSVLSLFISALILPVQTKELRHILVVFGIRRDHIWQAVVLPLCLTSLMYAGSIFLKCLLLLAFGGNTQVLRPFP

SEQ ID NO: 174093 - protein, 74 aa, Glycine max
  Clone ID: PAT_MRT3847_128225C.1.pep
PPISIFYSSNYIGVASRAWRTFSLEWGVLEKVRSESLASFFTGICKNLGFRLGVIDRNKASSCFPFFGWVTCWF

SEQ ID NO: 174094 - protein, 44 aa, Glycine max
  Clone ID: PAT_MRT3847_128226C.1.pep
NMPTAYNNEGITIELKHHGHSSSEPHRFTRVIIPSVIDKCCRIP

SEQ ID NO: 174095 - protein, 59 aa, Glycine max
  Clone ID: PAT_MRT3847_128227C.1.pep
FFFFFFFFFFFFFFFFFFFFFFFSANKQTIICKPTGTNIQNRQMNDPQNVLFGPNTKQS

SEQ ID NO: 174096 - protein, 210 aa, Glycine max
  Clone ID: PAT_MRT3847_128228C.1.pep
MAGQSNHDLSLFSAEELEFIAEDEIVDIVPNLKMSALNFISGDFGPFTPQIVTQVPLWLATALKKRGKCSICPPQWMSVEKLSQVLEAERDSQEMSDQLPFHYVEISRLLFDHARDNIPDVYMVRSLIEDIRNVRFHKVETDLEAFNGRTIAVKIKNLSAMEVNIVRPFIGRALQAFYKHDSPELIPDPERVSDRRPQVINNAPRRQLRR

SEQ ID NO: 174097 - protein, 84 aa, Glycine max
  Clone ID: PAT_MRT3847_128229C.1.pep
SSFFHTYTQALHSYCFGFSGTKNQSGSIIPKTFPGHSFTFSKTSASSPHVSKPRTWHRTGNNPPASLPRIKPSLGTVPPKKPIL

SEQ ID NO: 174098 - protein, 314 aa, Glycine max
  Clone ID: PAT_MRT3847_12822C.1.pep
MAEAPPSLLSVCIDALTQQLLRPCDDDLLPCIYDLPSHLLDTLITRLPPLALRTFHHHLPFDEEGFSHDDSTKKRKRARDWNLNSAWQRLFQLRWPDRVKQIHRTDWEQLYWETHLQDCLDEAVEVALIPSFTGYIGDIQISDSILKYIGFVGNTNHSTCDHSKLSYHCLQFGSHVSCLGLQNVLCTAETSVLLRECKLQSLVLRCIRSKEQIDGLCKLLAQHCRTLTSLEFVHCTLSTDFINAIFGSLVIERVQKHGIQHLSIIATSFLEPCAVSLPSGLMSFLSSGRYMSVNSPFYIFVFLLAILFTLCSIL

SEQ ID NO: 174099 - protein, 334 aa, Glycine max
  unsure (1)..(334): unsure at all Xaa locations
  Clone ID: PAT_MRT3847_128230C.1.pep
HSSLSFLLVSKEREGCLGTVLKGVLADGREIAVKRLLFTNRKSPADFSNEDNIHTLVDIGCKERPSGXQLTICKYNTRFSTIDNSHSSHNLYKFYALISQGXQKRYEIIIGTAEGLVYLHENSKTRIIHRDIKASNILLDAKLRAKIADFGLARSFQEDKSHISTAIAGTLGYMAPEYLAHGQLTEKADVYSFGVLLLEIVTARQNNRSKASEYSDSLVTVAWKHFQAGTAEQLFDPNLDLQEDHNSNVNVKDEILRVVHIGLLCTQEVSSLRPSMSKALQMLTKKEEDLVAPSNPPFLDESTMELHDTSGDPFYPLTAPDSIATMSHSSFYPR

SEQ ID NO: 174100 - protein, 133 aa, Glycine max
  Clone ID: PAT_MRT3847_128231C.1.pep
REPLPVRNALVPCQPGDTFVNYPTRPVDTTTDFEGTANMQPSQPVSSGAAVSGNMPGGHVSNRSVPRPMNVGGMQRIPHQAMQGYNLSSQAGMGAGMNPGGIPMQRGVPQQQLRRKDQMGMPGYPPQQKSRRI

SEQ ID NO: 174101 - protein, 139 aa, Glycine max
  unsure (1)..(139): unsure at all Xaa locations
  Clone ID: PAT_MRT3847_128232C.1.pep
GPVRIPGSPRVLIIHLSSLNSTLPFRKSNKLPQHAVLKQILKLRSSLVNLNGFVKRWHPLDIQKGHFAVYVGENVTKGHVAVYVGEHRHRXIVPISFLAHPEFQSLLRQAEEEFGYDHEMGLTIPCDEDVFRSLTSSLR

SEQ ID NO: 174102 - protein, 49 aa, Glycine max
  unsure (1)..(49): unsure at all Xaa locations
  Clone ID: PAT_MRT3847_128233C.1.pep
LPXXRXXXXXLXXRXXXPRXEXWEEVYFXWPKILMXLFPSXLLLLLSLV

SEQ ID NO: 174103 - protein, 122 aa, Glycine max
  Clone ID: PAT_MRT3847_128234C.1.pep
GFGLSASGLGACAVLLGMWLASVSPASARCCACRIVVVLGPVSGSVLALAACLVPTVSVASIVLPCVVPVASLSGPLSSLCGSVGRCRGVLRVPSGAFAVASRGLLFRMYVSLLFGLRLGSS

SEQ ID NO: 174104 - protein, 191 aa, Glycine max
  Clone ID: PAT_MRT3847_128235C.1.pep
EDGRPSFFFIIFYLFFIFFSFFFFFFFFFFFFYFFLFVFFLGGKKKKKKRKKKKKKGKEKKKKKKKKKKQRKGEKKKNKNKKKKKKGNNWKTGKNQKKKKKKKKKNRAQGKKKKGKRGQKKKKGAHPNQGEREQKNKGPTHQKGKGGPKKKKNLGHEKWGAPGEEPEKDGGNQQEIQDRHRGGDKLQKRKE

SEQ ID NO: 174105 - protein, 159 aa, Glycine max
  Clone ID: PAT_MRT3847_128236C.1.pep
MQVMYRLAHFCVISTSQIAFASNVSETMNLKVKRVQKYVETLDVLKVKNSMPSSNGGHAPVQPQQKHSNGQRQGPVQEKKQQKHSNGHHRLALAPIQEQEQQQPSRNSTSGVVVTTNWELFDSVPPLIPVPSTSPSPHPPVTNNSGPHKFNWEFVNQLP

SEQ ID NO: 174106 - protein, 264 aa, Glycine max
  unsure (1)..(264): unsure at all Xaa locations
  Clone ID: PAT_MRT3847_128237C.1.pep
MLSGPTGLHHEDQKLLYFLXERDSKAFLDMVGVKDKSKIVLVEDPISQEKRLLERRKNAKMEKAAKSISEISLEVDRLAGRVSAFESIISKGGKVVETDVHNLIELLMNQLLKLDGIMADGDVKLQRKMQVKRVQKYVETLDVLKVKNSMPSSNGDHAPVQPQQKHSNGQQQKYSNGHHRLALVPIQEQQQEQPRNPSVVFSQPYFEXNNNPXRNSTSGVVVTTNWELFDSVPPLIXVPSTSPSPHPSETNKSGPPKFNWEFFN

SEQ ID NO: 174107 - protein, 69 aa, Glycine max
  Clone ID: PAT_MRT3847_128238C.1.pep
SKYRRTHNNNRLFTTKFNQYTSILIFLLSKYLKSILSFISIIPFILISSVTGTSSGVSSSSSSGASSAT

SEQ ID NO: 174108 - protein, 195 aa, Glycine max
  Clone ID: PAT_MRT3847_128239C.1.pep
GSRVDRLAGRVSAFESIISKGGKVVETDVLNLIELLMNQLLKLDGIMADGDVKLQRKMQVRRVQKYVETLDVLKVKNSMPSSNGDQAPVKPHQKHSNGQRKGPIQEQQQKHSNGPLVPIQEQQQEQPRNSNENSLELYQEQQHQPSRNSPSGVVVTPNWELFDSVPPLIPVQSTSPPSSVTNNSGPPKFNWEFFD

SEQ ID NO: 174109 - protein, 194 aa, Glycine max
  Clone ID: PAT_MRT3847_12823C.1.pep
MAEEEEDDESFGEFTFASFPSQPTSNDTNPLDDDDWGDFMNHSNRINGPFDSFGLPTDPTNKHVNDDKGVAVQAEAAKNPKGAIPLSIFGEEEGEEEEKPASANVFSNGGGGAVKRGSGSNGSVGISDLISSLYNQQRPQVDSHNNGSVSVSNVAAPNPTYSNGSKLNSDEDEDGWEFKSAEWETGTKSQDVKG

SEQ ID NO: 174110 - protein, 53 aa, Glycine max
  Clone ID: PAT_MRT3847_128240C.1.pep
LREREYYIYDLNITTSSSSSTCSGSKNIVLVEEERHKRPTKENLLKTRTCYKS

SEQ ID NO: 174111 - protein, 132 aa, Glycine max
  unsure (1)..(132): unsure at all Xaa locations
  Clone ID: PAT_MRT3847_128241C.1.pep
LDVLKVKNSMLSSXGGXXPVKPHQKHSIGQRKGPIQERQQKHSNGRHRLALAPIQEQHQEQPRNSSENSLALYQEQQEQPSRNSTSGVVVTTNWELFDSVPPLIPVQATSPPPPSSVTNNSGPPKFNWEFFD

SEQ ID NO: 174112 - protein, 92 aa, Glycine max
  Clone ID: PAT_MRT3847_128242C.1.pep
HASAPSDFEFGSRENQFLIAAILLSLSSFSSFFLPTSSLLYPSEKKLKNVASDYSSSSFFHVQYYAVNFSNSLFQPHFGLKIRALTLGRFSF

SEQ ID NO: 174113 - protein, 50 aa, Glycine max
  Clone ID: PAT_MRT3847_128243C.1.pep
LQVLLTHLKLHVLHDKSWLFSPLWVHFESRGGDRYKPYTESAAWSLTHRT

SEQ ID NO: 174114 - protein, 62 aa, Glycine max
  Clone ID: PAT_MRT3847_128244C.1.pep
DCHRQVAFRRQRFLFRSCRWYLSSGRASLNSEFVSPVICFLMSVFVAQDPFKQLVLALFHEM

SEQ ID NO: 174115 - protein, 278 aa, Glycine max
  unsure (1)..(278): unsure at all Xaa locations
  Clone ID: PAT_MRT3847_128245C.1.pep
FPSYIWGVEENAVRATGLHHEDQKLLYKDKERDSKAFLDMVGVKDKSKIVLVEDPISQEKRLLERRKNAKMEKAAKSISEISLPISPEQHAIFESIISGSGGEVETDVLNLIYLIVILKNQLLKLDGIMADGVVKLQGKMQVRRVQKYVETLDVLKVKNSMPSSNGDQAPVKPHQKQPDEQRKAHISDQHRTALIGTXAPIPEQQLQQPSRDSTSGLXELYQEQQHQPSRNSXSGVVVTTNWELFDSVPPLIPVQSTSPPPSVTNNSGPPKFNWEFFD

SEQ ID NO: 174116 - protein, 110 aa, Glycine max
  Clone ID: PAT_MRT3847_128246C.1.pep
FVALIEFHHLCIYAFEEPFTGVEPWTFIQNLGEAVFIPAGCPHQVRNLKSCIKVALDFVSPENIQECIRLTEEFRSLPKNHKAKEDKLGVKKMCLYALRKAADDLEKLEG

SEQ ID NO: 174117 - protein, 87 aa, Glycine max
  unsure (1)..(87): unsure at all Xaa locations
  Clone ID: PAT_MRT3847_128247C.1.pep
MWSSFMYSSGEPLIFIEVALLKDVAQTIQEVLWDSPPIPEXEATCALFYSISSTQPGLQGXNSGKFLIKRVVTQVKREMPHISTFAP

SEQ ID NO: 174118 - protein, 371 aa, Glycine max
  Clone ID: PAT_MRT3847_128248C.1.pep
DSQENFAALDKKLKEHEGGRTSNRLFYLSIPPNIFIDAVKCASLSASSGNGWTRVIVEKPFGRDSESSAALTKSLKQYLTEDQIFRIDHYLGKELVENLSVLRFSNLIFEPLWSRQYIRNVQLIFSEDFGTEGRGGYFDHYGIIRDIMQNHLLQILALFAMETPVSLDAEDIRNEKVKVLRSMRPLRLEDVVIAALFIDNARWDGVPFLMKAGKALHNKRAEIRVQFRHVPGNLYNRNFGTDLDRATNELVIRVQPDEAIYLKINNKVPGLGMKLDRSNLNLHYAARYSKEIPDAYERLLLDAIEGERRLFIRSDELDAAWSLFTPVLKELEEKKIIPEYYPYGSRGPVGAHYLAARHNVRWGDLGTDVDQ

SEQ ID NO: 174119 - protein, 75 aa, Glycine max
  Clone ID: PAT_MRT3847_128249C.1.pep
LTIYSWTLLKLPSYLCLIEGITFTKWRTVMKETCLATHTLLPLLNLLPLQYTGFRMSNLIPQHYDCMIQCMPYAQ

SEQ ID NO: 174120 - protein, 336 aa, Glycine max
  unsure (1)..(336): unsure at all Xaa locations
  Clone ID: PAT_MRT3847_12824C.1.pep
MAEAPPSLISLCIDALAQQFLRPSDDLPSIYDLPSHLLHTLITRLPPFALRTFHRHHLPFDEEGFSRDDSTKKRKRARDWNLSSAWQRLFLLRWPDRVKQIQPTDWEQHYWEIHLQDCLDEAAEVALIPSFSGYIGDIQISDSILKYIGFVGNTSHSSCDHSKLSYHCLXFGSHVSCLMLXNVLCTAETSVLLRECKLQSLVLRCIRSKEQIDGLCKLLAQHCRTLTSLEFVHCALSTDFINAILGSLVIERVQKHGIQHLSIIATSFLEPCTGSLPSGLVSFLSSGRSLCSLKLSENHHGWTFAKDLFVTLFNLSCGISGLDLSRIELQDIRMAF

SEQ ID NO: 174121 - protein, 605 aa, Glycine max
  unsure (1)..(605): unsure at all Xaa locations
  Clone ID: PAT_MRT3847_128250C.1.pep
MATALYSTHCRSLATSSSSSSLQPSPLSSNLAYLQRLTFSQRFLPSKVSLKSQPQTYQIPVLTQQQEGTVAAAVTPVENGTSHKQLKPDLLSVKSPEESRAEDGFEKDENESSVSITVVGASGDLAKKKIFPALFALYYXGLICFSKHFTINGYGPSQMTDAELRNMVSKTLTCRIDKRENCNEKMDQFLKRCFYHSGQYDSQENFAALDKKLKEHEXGGRTSNRLFYLSIPPNIFIDAVKCASLSASSGNGWTRVIVEKPFGRDSESSAALTKSLKQYLTEDQIFRIDHYLGKELVENLSVLRFSNLIFEPLWSRQYIRNVQLIFSEDFGTEGLCGYFDHYGIIRDIMQNHLLQILALFAMETPVSLDAEDIRNEKVKVLRSMRPLRLEDVVIGQYKSHTRGGVTYPAYVDDKTVPSGSLTPTFAAAALFIDNARWDGVPFLMKAGKALHNKRAEIRVQFRHVPGNLYNRNFGTDLDRATNELVIRVQPDEAIYLKINNKVPGLGMKLDRSNLNLHYAARYSKEIPDAYERLLLDAIEGERRLFIRSDELDAAWSLFTPVLKELEEKKIIPEYYPYGSRGPVGAHYLAARHNVRWGDLGTDVDH

SEQ ID NO: 174122 - protein, 51 aa, Glycine max
  Clone ID: PAT_MRT3847_128251C.1.pep
GCERRQKGPCLLVAASHNLFCTSWTQPLKSHGIFTLSHSIRGKLRTWKQHN

SEQ ID NO: 174123 - protein, 58 aa, Glycine max
  Clone ID: PAT_MRT3847_128252C.1.pep
LSFTHFDSKPITVSTNPLTPFHKFRNFFAATPTFRDNIISLSLFPINRVPLFRTKPHG

SEQ ID NO: 174124 - protein, 97 aa, Glycine max
  Clone ID: PAT_MRT3847_128253C.1.pep
LYKASASLDLPSTPLTQNDGHRHLSVYAHSVIDKTKAKLEQARPRPVSCSCLIVIATTDMELVVMVLFSLRALLDLHLLSSSCYSLLERHRAAPAAP

SEQ ID NO: 174125 - protein, 54 aa, Glycine max
  Clone ID: PAT_MRT3847_128254C.1.pep
VPLPQYHRMGQHRQLGTITFKNNMVVLNVSLLLLFLLGVTSPHIDLTFFKPHHS

SEQ ID NO: 174126 - protein, 111 aa, Glycine max
  Clone ID: PAT_MRT3847_128255C.1.pep
CFNFQALSYPSLFTRKKQSLNCTLYPQLLFFKELCLSLYKKMLEAFAQSIFRSCSLYNILLIIDYLHTTLLKQEWMFILSFSQSCLVKENKKKDNYAFGWLDQSIYTCCCC

SEQ ID NO: 174127 - protein, 53 aa, Glycine max
  Clone ID: PAT_MRT3847_128256C.1.pep
LARSHGNVFEMPETLQVNRTMMKDGHYRIAVGDPSLGHLIARGPSSNQMRKLE

SEQ ID NO: 174128 - protein, 38 aa, Glycine max
  Clone ID: PAT_MRT3847_128257C.1.pep
MRTVAAVDMEFSGTAKTGVAATDLNVAKLKMILDEYQL

SEQ ID NO: 174129 - protein, 57 aa, Glycine max
  Clone ID: PAT_MRT3847_128258C.1.pep
WVVLHAMSLSVFHSCQTIFHSRKLRESSIRKDGFLSKIKYTYQVFLKKKKKKKKKKK

SEQ ID NO: 174130 - protein, 58 aa, Glycine max
  Clone ID: PAT_MRT3847_128259C.1.pep
SFFRCHAVVHCAGPTLCIGVGQVPSPCFLGGSALCLVCLCERPLYPIKPSPVLFLAGG

SEQ ID NO: 174131 - protein, 33 aa, Glycine max
  Clone ID: PAT_MRT3847_12825C.1.pep
LIRVFFAYNMSLLDTNRRLMLGSCRGTNSQTKQ

SEQ ID NO: 174132 - protein, 97 aa, Glycine max
  unsure (1)..(97): unsure at all Xaa locations
  Clone ID: PAT_MRT3847_128260C.1.pep
LTKGKCRARVEGNSLHNPFXDIKTQSRMKRQVNNARTHHRXCQRVQXXXXDRPMPLPHNFVNPASDISKKKKKTQNTXXSYXXTPPXSVVLXAXXSP

SEQ ID NO: 174133 - protein, 72 aa, Glycine max
  Clone ID: PAT_MRT3847_128261C.1.pep
ALSSPTKKSLLLIFIKKKMSHMLTKKITFFSKNAYYITLLFKEKNFLLKFLLNLTPGWTGLIIRIYKTVNYR

SEQ ID NO: 174134 - protein, 52 aa, Glycine max
  unsure (1)..(52): unsure at all Xaa locations
  Clone ID: PAT_MRT3847_128262C.1.pep
SYNVTCSILLFGWLLGGSSXXHGIIGNQASIIVSSLLDGLIKLHVLENSEGL

SEQ ID NO: 174135 - protein, 84 aa, Glycine max
  Clone ID: PAT_MRT3847_128263C.1.pep
ILYLLLQGPLPCPVLIITAVVKKIKKIYESTNNRSVSATNSGKPTSAHKIDSKPPSTLKGNRPLPSILVPSRRNSTPNITSRPL

SEQ ID NO: 174136 - protein, 338 aa, Glycine max
  Clone ID: PAT_MRT3847_128264C.1.pep
VTLREWLKHGNFKANKVESLNIFRKIVDLVGNSHSQGVALHNLCPSYIKLTPSNQVMYLGLPVQKQMVDSVVNSEVVHLDNSFIRKRLSEQVTLPSLDMGSKKQKFNENVRVTGGDLCLETASDRKLHSHTVGSQDYYNEYEEGTQFSKYNIGRMSSIPRVSNAGQRPLTSCEKFENKWYTSPEGGYTTSSNIYCLGVLLFELLGHFDSERTHIAAMSDLRHRILPPIFLSENPKEAGFCLWLLHPEPSSRPSTREILQSELINGLQELFSEELSSSIDQEDAESELLLHFLVLLKEQKQNNAFKLVEEIKCLESDIEEVERRHDSRKSLVSSGLQND

SEQ ID NO: 174137 - protein, 57 aa, Glycine max
  Clone ID: PAT_MRT3847_128265C.1.pep
CEKCVWELRSKFRVTGGDIKLRLFSKWGHLETCGDFVCLCRYVARITSPSVVKGFFS

SEQ ID NO: 174138 - protein, 50 aa, Glycine max
  Clone ID: PAT_MRT3847_128266C.1.pep
YGRANTTDRNPHTDTSKHPSRRLIYHGETQRLSLSPSKITITITTYDQPL

SEQ ID NO: 174139 - protein, 266 aa, Glycine max
  Clone ID: PAT_MRT3847_128267C.1.pep
MIENILLNLQLLAPFFLLFIFPVLLFFFFSSSGSKKKEASITTIPKPYPLIGHYLDLKGVGNRRIQWLSDIVKISPAATFTLHRPLGSRQVITGNPATVEHILKTRFSNYIKGSIFINNLSDFLGTGIFNADGNTWKFQRQVASHEFNTKSLRKFVEHVVDVELSDRLVPVLASAAQQDQTLDFQDILQRFAFDNICKIAFGYDAEYLTPSTEQSKFAVAYEEATEISSKRFREPLPLVWKIKRLLNIGSEKRLRIAVKEVRADAW

SEQ ID NO: 174140 - protein, 73 aa, Glycine max
  Clone ID: PAT_MRT3847_128268C.1.pep
LLTCDNDEDKLLQSGSEMSTLPFPQPQGMMKFKSMKGWKSIVPLHLKGKSATRFSLFRKVNLAGDLNFNPCVI

SEQ ID NO: 174141 - protein, 59 aa, Glycine max
  Clone ID: PAT_MRT3847_128269C.1.pep
EQAYMCIHLCLPPTIFIKRLDELAFFYFECNQKNICVLTSNTNKFQLILFYLIALVRNI

SEQ ID NO: 174142 - protein, 106 aa, Glycine max
  unsure (1)..(106): unsure at all Xaa locations
  Clone ID: PAT_MRT3847_12826C.1.pep
EGILYCYDYXGKIKGFNVGRGVWEELKGLEKGLPRFLCGATMADLGGKLCVVWECQGNENEMEIWCAEIGVKKNSDGELWGQLVWFGKVLSVPKGSSIVNCSSVSL

SEQ ID NO: 174143 - protein, 182 aa, Glycine max
  unsure (1)..(182): unsure at all Xaa locations
  Clone ID: PAT_MRT3847_128270C.1.pep
LEPNRLEYRCQDALDTYLKLPQKHYNTGWVLSQVGKAYFELVDYLEADRAFSHARQITPYSLEGMDIHSTVLYHLKEDMKLSYLAQELISTDRLAPQSWCAMGNCYSLQKDHETALKNFQRAVQLNPRFAYAHTLCGHEYVALEDFENGIKCYHSALRVXDSRHYNGMXYGLGMLYLRQKKV

SEQ ID NO: 174144 - protein, 114 aa, Glycine max
  unsure (1)..(114): unsure at all Xaa locations
  Clone ID: PAT_MRT3847_128271C.1.pep
RLIPHQMGGVQTAPLGFGFHGVKSAIVGFNPFKFXFHFTGGLDEALKRHCKVNLSGPVFPMREELARQILSRFQRPPGPIPFXMLGLGTVPGSVDHLGFGDCLNAPLGEETFRP

SEQ ID NO: 174145 - protein, 362 aa, Glycine max
  unsure (1)..(362): unsure at all Xaa locations
  Clone ID: PAT_MRT3847_128272C.1.pep
ITGASEILTLLRVLGELEPNRLEYRCQDALDTYLKLPQKHYNTGWVLSQVGKAYFELVDYLEADRAFSHARQITPYSLEGMDIHSTVLYHLKEDMKLSYLAQELISTDRLAHXSWCAMGNCYSLQKDHAAGLAPQPRGAQGNRRSAQADPETALKNFQRAVQLNPRFAYAHTLCGHEYVALEDFENGIKCYQSALTVDARHYNAWYGLGMVYLRQEKFEFSEHHFRMAFHINPRSSVIMSYLGTALHALKRSEEALMVMEKAILADKKNPLPMYQKANILMSLEKFDEALDVLEELKEXHPRESSVYALMGNIYRRRHMHERAMFHYGVALDLKPSVTDAATIKAAVEKLIIPDEFQDEDDS

SEQ ID NO: 174146 - protein, 61 aa, Glycine max
  Clone ID: PAT_MRT3847_128273C.1.pep
LIMATESQTPIDNNYLTNATEQELHCLNAIHDRLPITSLMKAQCCYSALHNVTVMRCAQYY

SEQ ID NO: 174147 - protein, 99 aa, Glycine max
  Clone ID: PAT_MRT3847_128274C.1.pep
FPGSIDSLAIVNEVPHFFLGYLNLQAVNDNDIHNIVLSYLIHNCYKESVESFIACTGATQPADYLEDMDKRKSRFVVIFGHTRLIQVLVPDHILSACSA

SEQ ID NO: 174148 - protein, 68 aa, Glycine max
  Clone ID: PAT_MRT3847_128275C.1.pep
YKIVSQTKVVKKEKSITVRPYEYLKSEKGYAMGRLTNYSSFLSSLKFQYKACQIAFSDSIGSRIRWLD

SEQ ID NO: 174149 - protein, 64 aa, Glycine max
  Clone ID: PAT_MRT3847_128276C.1.pep
FVLIDNSSSKSRAVCRSYKICVPKQSLNSFLLSSYHSLPFPFFKHYLLLLIINYSTFITTISKY

SEQ ID NO: 174150 - protein, 40 aa, Glycine max
  Clone ID: PAT_MRT3847_128277C.1.pep
IDRCCVCLSVFVIHYPSFLFLKVIFCFFMILHSINQTIVC

SEQ ID NO: 174151 - protein, 81 aa, Glycine max
  Clone ID: PAT_MRT3847_128278C.1.pep
LPHSQSSPGLCGNQTWPECMLSDRTGYINIPYHPVILALDDQTVALLETLMKVLLSLPFMYVYTMGTMMQAMILGTMTIEG

SEQ ID NO: 174152 - protein, 279 aa, Glycine max
  Clone ID: PAT_MRT3847_128279C.1.pep
KIMEQSLRLFFEHQNLLEVKTYLHRQWKRILSGRICLKDFIFAKEVRLGTYSARISSLPPAAIVATKAMTVDPRAEPRYAERIPYVVIHGEPGARLVDMVVDPLEVLAIDSPFRINDLYYINKQIIPALQRVFGLVGADLNHWFSEMPRPTREASAKHTLTTNFHQTRIDYYYLSKHCVLCDRLVQASARLCNQCSENEVAAATAVISKTSKLEQEMPHLVAVCPHCGGGDRLLENGVKCTSLSCLVFYERRKVQKKLLAAPHVAADKDLYPRCPVEWF

SEQ ID NO: 174153 - protein, 129 aa, Glycine max
  unsure (1)..(129): unsure at all Xaa locations
  Clone ID: PAT_MRT3847_12827C.1.pep
MDNDRVSRRTEVLTNHLLRRTPPPYALFHPHPCLSYSPPELSNTISFDTREMRKLMDGDSLEERDWIFSRIQNGLPHNRRHRAXDTVDKQDYRQPMEHQRQGTMKRIGYLLQTGVFRGWLTXNGPEQEL

SEQ ID NO: 174154 - protein, 50 aa, Glycine max
  Clone ID: PAT_MRT3847_128280C.1.pep
PVPVPFLLKVPGPRKTIGIEKEDTKLLNYYSLLHFVITHSIFCVFIHTNT

SEQ ID NO: 174155 - protein, 41 aa, Glycine max
  Clone ID: PAT_MRT3847_128281C.1.pep
LVSLCETIIMFTGARWYTTMYQTGTFFVWTSTVLVSFIASM

SEQ ID NO: 174156 - protein, 125 aa, Glycine max
  unsure (1)..(125): unsure at all Xaa locations
  Clone ID: PAT_MRT3847_128282C.1.pep
MKTGKGKNNGLLPNSLRIVSLCLKTVSTNATTVASTVRSAGASLAASISSSSEDHKDQVTWAGXDTLELDSSNLKRVLLLGYLNGFQVLDVEDASGFSELVSKRDGPVSFVQMQRYAGGCDGQEG

SEQ ID NO: 174157 - protein, 373 aa, Glycine max
  Clone ID: PAT_MRT3847_128283C.1.pep
MLSNFGGNIETHGTLDSISLRPVDARVKANSTMAGVVMCMEGIQHNPIVYELMSEMAFRDKKVKVSASIKSYCHRRYGKVIHQVESAWEILYHTIYNCTDGIADHNHDFIVMFPDWNPSTNSVTGTSNNQKIYLLPPGNRRYLFQETLSDMPQAHLWYPSDDVIKALQLFLAGGKNLAGSLTYRYDLVDLTRQVLSKLANQVYHKAVTSYQKKNIEALQFHSNKFLQLIKDIDVLLASDDNFLLGTWLESAKKLAVNPSEIKQYEWNARTQVTMWFDTNETTQSKLHDYANKFWSGLLESYYLPRASTYFSHLTESLRQNDKFKLIEWRKQWISQSNKWQEGNELYPVKAKGDALTISQALYEKYFQNKLINH

SEQ ID NO: 174158 - protein, 48 aa, Glycine max
  unsure (1)..(48): unsure at all Xaa locations
  Clone ID: PAT_MRT3847_128284C.1.pep
RKFNIQPTRLNTTSXNHSLYSTIPHQGPTYLIQTSFFDLSIVINLPTL

SEQ ID NO: 174159 - protein, 90 aa, Glycine max
  Clone ID: PAT_MRT3847_128285C.1.pep
GIMLSSSSAFFDFRLFNSLSDDHRFRFSFSFFLPTFYFSFFAFHFRSSADRLRFCSTTLIVSLFFILFFFPSVTSVFFLEIYIFLIHLFC

SEQ ID NO: 174160 - protein, 62 aa, Glycine max
  Clone ID: PAT_MRT3847_128286C.1.pep
FGSRIFWLFAKLGTTAVGFIKVRLVVQDRISVLPCTDVWAVDCLPDRCGVVGYESACSPVPC

SEQ ID NO: 174161 - protein, 55 aa, Glycine max
  Clone ID: PAT_MRT3847_128287C.1.pep
PIGLLVEQIMSGSKMYMNPMNLSTIMMFVAPTDELSSICLVHSARKFHYVPFLLL

SEQ ID NO: 174162 - protein, 190 aa, Glycine max
  Clone ID: PAT_MRT3847_128288C.1.pep
QPTNLAHDSPPSPMLGVLCATRSKPWLFSLVHASLPRLSHAPLSPSASPPPRRRHSTACKLFLSAGGAASIWHAIMPRVNDDDGFRRGVVAFHDMKGEGSWNVAWDARPARWLHRPDSAWLLFGVCACLAPPSSCVDADTNTDAIAVDESCRLLDKEREEYEVSADYRVTAVPAECRLFCLSGALMACVY

SEQ ID NO: 174163 - protein, 204 aa, Glycine max
  Clone ID: PAT_MRT3847_128289C.1.pep
RKEEHRLENQIHLQQIWFKPKATDAPISAILGPNNWLWLCAIISSSFIIFLILIGIITRFIIFPIDHNSNKIFSQPLRSFLNIFAICVSISMAASAAVLWNKKYNDREAKQIQNLEGSSSAESPKLNTDEGDKELESLPQQSLVQATKVHYGARPDLRRLLLELEGSRVGVFVSGPKKMRQEVAAICSSDLGENLHFESFSFNW

SEQ ID NO: 174164 - protein, 100 aa, Glycine max
  Clone ID: PAT_MRT3847_12828C.1.pep
FAKVNPEDILLKDELDSLAAKDPKFNVHYVLNNPPKNWTGGTGFVTADMIKEKLPAPANDVKILICGPPPMVPAMKKATESLGYAKARPVSKLEDQVFCF

SEQ ID NO: 174165 - protein, 65 aa, Glycine max
  Clone ID: PAT_MRT3847_128290C.1.pep
ARNAKKKRAQRAERRCAHRALFRVLAHRDSVLGRSGAASGISSHTGADTGIHTDTGEHTREHVSP

SEQ ID NO: 174166 - protein, 59 aa, Glycine max
  Clone ID: PAT_MRT3847_128291C.1.pep
IMWFTYIELAFLDIESHRDFKFTNIILACTYICTMGLSETTFFIPYIHDDTQPLLPAVD

SEQ ID NO: 174167 - protein, 100 aa, Glycine max
  Clone ID: PAT_MRT3847_128292C.1.pep
VSLPKLLPPPQNTPFSPWNSHLFRVALPFAKKFPLTPYWLSAVFFPPLLFLNPLCPALLYQRPLMPPFAYTPIYWGPPPPPPPPPPPPPPPPPPPPPPPK

SEQ ID NO: 174168 - protein, 81 aa, Glycine max
  Clone ID: PAT_MRT3847_128293C.1.pep
HRCMFVCTVTCDTAHSMEAAQADENHVGHVCRRVECKVELALYVTGVDYAVLDLVFLIISDADLNCNPVHSNVHVSVHDTY

SEQ ID NO: 174169 - protein, 122 aa, Glycine max
  Clone ID: PAT_MRT3847_128294C.1.pep
NFKTLWKYKKKKKGPLNGGFFFLKQDIILGRKQNEGIQPKKFNISSELEGQMGLKRKTPPYGGKKKIGSPNLPFYGINKGKKILFRGNPPPPPKKFSKKPLKPTLGLKTRFPGQKITGIKWT

SEQ ID NO: 174170 - protein, 114 aa, Glycine max
  unsure (1)..(114): unsure at all Xaa locations
  Clone ID: PAT_MRT3847_128295C.1.pep
LFKLFHNSNTLSKGKLCFSKVYFFCKSVEVSKSWLSNYCFYSAILLSKAKSFLMXSFLFFFSLDSQKKDTMDNKSVTRPYIFQNRWFLDITRISQLIADGNSQNLHISCRISIL

SEQ ID NO: 174171 - protein, 315 aa, Glycine max
  unsure (1)..(315): unsure at all Xaa locations
  Clone ID: PAT_MRT3847_128296C.1.pep
SVAHTSNPQIILHSVKDFLATLCTLSYPYAMIGLALCALSSSLLAVEKLSDISLSFFXGVLQAAVPQLFFAIYSNALNQVSDLEIDKINKPHLPLASGQLSLKTVVIIAASFLTLSFWLSWIVGSXPLIWNLVLITSIWTAYSVNVPFLRWKKNPILAAMCMVSSWAFVLPITFFLHMQTFVLKRPIVFPRSLILAIVIMNFFFVGMALAKDIPDVEGDKIYGIDTFAIRIGQKQVFWICIFLFEMAFGVSLVAGATSSSLLVKIITGVGNAVLASVLWFQANSIDLSSKTSGGSFYMLIWKLMYASYFLVALIR

SEQ ID NO: 174172 - protein, 38 aa, Glycine max
  Clone ID: PAT_MRT3847_128297C.1.pep
LPVKFETSKTLLTIKTKNRAHHQPAALIIDPRRSRTYF

SEQ ID NO: 174173 - protein, 96 aa, Glycine max
  Clone ID: PAT_MRT3847_128298C.1.pep
GIRVDPRVRNYVTLDRVDLCHYISIYINKCSYYKKKKKKKKKKKKKKKKKKKKKKKKKKKKEKKKKKKKGGPFKGTKVNDPGKARKKFFYGAPKIK

SEQ ID NO: 174174 - protein, 51 aa, Glycine max
  Clone ID: PAT_MRT3847_128299C.1.pep
VFGNGNHPNGPSSSERRVIITRNCIIRFGIIRDHPSALPQKCNRHFVRSFE

SEQ ID NO: 174175 - protein, 197 aa, Glycine max
  Clone ID: PAT_MRT3847_12829C.1.pep
MAQAQSAANFDYQDFDPFFEWSEDEGSATLIVMLPGFTKEQLRVQVTSTPVLRINGERQIVENKRRRFSREFSIPPYCDTNDVSAKFEGGVLSIKFPKLITPAARSQPQPQEAPTMPQKEKEPSQQQDQVHKQESLQKEKEPITSDEKEENKTEESSPQKENEPISDDDKEKDNKTEEVVAEKKVRTNGVPETAKEL

SEQ ID NO: 174176 - protein, 52 aa, Glycine max
  Clone ID: PAT_MRT3847_1282C.1.pep
SLNVHFFVLLFYFCIKMLYALICRNHRVFFFRCMLYAKSSVSISFLKNLNVL

SEQ ID NO: 174177 - protein, 65 aa, Glycine max
  Clone ID: PAT_MRT3847_128300C.1.pep
SSTLTRTFPPNPTLTLTLTLIPILILITMLTLIRNPETSSVCSPPIASVPTDVDAAASSTPPCSS

SEQ ID NO: 174178 - protein, 84 aa, Glycine max
  Clone ID: PAT_MRT3847_128301C.1.pep
EFGTRWIESFMRQFKRLYNNHNNKMGMFLRSAQLKLVMVVVELRDHSFLLDMEADQEVLYYLRPLIFLFNKMYFSSHIFAKNSS

SEQ ID NO: 174179 - protein, 154 aa, Glycine max
  unsure (1)..(154): unsure at all Xaa locations
  Clone ID: PAT_MRT3847_128302C.1.pep
FSFTPTRTPTRSSTRPSEWAPINCRVHXQPIDISEGIYVREQDVNIEYDACTITNDSGTLVAAKVGNHKQIAGFDAAGSKGRLGYASLIPYVEPVVQAQCAEVYCDFYPVEVDRQEGVAHTGELKSGVYVPLATNTNLAETPKGWPLVLPCDKI

SEQ ID NO: 174180 - protein, 109 aa, Glycine max
  Clone ID: PAT_MRT3847_128303C.1.pep
PTLPSSYVPGRAIGLPFVLDIMPVRELLTIVSPTTTHSRPSKNLLPTSLPLLVIPPLFTSFSPFTISFLSSLITVFVTFLYSSLLLCVSFPPPPPPPPSRRHSNDVERQ

SEQ ID NO: 174181 - protein, 67 aa, Glycine max
  Clone ID: PAT_MRT3847_128304C.1.pep
AEKKGLSNLPLGKKKHLPEIFFFFQRLSKYPPLTQIFNPGLTKEKAYLHGWRWANSPNSIPPPGGAN

SEQ ID NO: 174182 - protein, 677 aa, Glycine max
  unsure (1)..(677): unsure at all Xaa locations
  Clone ID: PAT_MRT3847_128305C.1.pep
PWSKLYTPKCSPLRNYVTNLQVPPHGAFYSAPDCSLSNPSXKPILGFWLRXVLNSAFLAGKPYPEINFVGSGHCSSPGSGHNSGHNSMGGDMSGPLLWQPSRGSPEYSPVPSPRMTSPGPSSRIQSGAVTPIHPKAGGTPTESQTHRLPLPPLSVSNSSLFSHSNSAATSPSMPRSPARADNPNSGSRWKKGKLLGSGSFGHVYLGFNSERGEMCAVKEVTLFSDDPKSMESAKQFMQEIHLLSRLQHPNIVQYYGSETVDNKLYIYLEYVSGGSIHKLLREYGQFGELVIRSYTQQILSGLAYLHAKNTLHRDIKGANILVDPTGRVKLADFGMAKHITGQSCPLSFKGTPYWMAPEVIKNSNGCNLAVDIWSLGCTVLEMATTKPPWFQYEGVAAMFKIGNSKELPTIPDHLSNEGKDFVRKCLQRNPHDRPSASELLDHPFVKNAAPLERPIPAPEALDPVSGITQGAKALAIGQGRNLSSLDSDRLSVHSSRFLKTNPHESEIHIPRNISCPVSPIGSPLLRSRSPQHRNGKMSPSPISSPRTASGASTPLAGGSGAIPFGNHSKQSIYFQEGFGSIPKSSNGVYINGHSHHDSNVDIFRGMQMGSHISPELVSSENDVLVKQFARHPHAEPYDFQSVLADRVGRQLLGEHVKINPSIDLSPNSSLLSRPNGL

SEQ ID NO: 174183 - protein, 71 aa, Glycine max
  Clone ID: PAT_MRT3847_128306C.1.pep
SPSKNNSQNTLVPSVGVPHIFAEVSYGMFCQGLLFLNIIKYKTCYSFGKYSFSQWSFLLLSFIFYQIDPPC

SEQ ID NO: 174184 - protein, 242 aa, Glycine max
  Clone ID: PAT_MRT3847_128307C.1.pep
DLPPGFRFYPTEEELVFFYLHNQLEGQIHDTSRVIPVIDINGVEPWNLPSLAGELCRGDTEQWFFFSPRQEREARGGRPNRTTASGYWKATGSPGHVYSSDNKVIGMKKTMVFYKGKAPTGRKTKWKMHEYKAIEHSDQSNTAPPKLRHEFSLCRVYVISGSFRSFDRRPLDMPRVELRVVDGDRGAASTSAQAQQRSSSHTSHSGGDAHVTDAGAGSSGTNWNASNRVEEPLWEWEQLDWP

SEQ ID NO: 174185 - protein, 62 aa, Glycine max
  Clone ID: PAT_MRT3847_128308C.1.pep
GIFQRTIAAPPSRPTSFSSVQQSRFANFIASSMHFLHNMRCAACSSAIASYSAPPPPQSTRR

SEQ ID NO: 174186 - protein, 244 aa, Glycine max
  Clone ID: PAT_MRT3847_128309C.1.pep
MDDLPPGFRFYPTEEELVFFYLHNQLEGQIHDTSRVIPVIDINGVEPWNLPSLAGELCRGDTEQWFFFSPRQEREARGGRPNRTTASGYWKATGSPGHVYSSDNKVIGMKKTMVFYKGKAPTGRKTKWKMHEYKAIEHSDQSNTAPPKLRHEFSLCRVYVISGSFRSFDRRPLDMPRVELRVVDGDRGAASTSAQAQQRSSSHTSHSGGDAHVTDAGAGSSGTNWNASNRVEEPLWEWEQLDWP

SEQ ID NO: 174187 - protein, 32 aa, Glycine max
  Clone ID: PAT_MRT3847_12830C.1.pep
TGSHLNPNHVLLSRSISILREFSHYSPPINLT

SEQ ID NO: 174188 - protein, 253 aa, Glycine max
  Clone ID: PAT_MRT3847_128310C.1.pep
MEFLPPGFRFYPTEEELVVFYLHNQLEGQIHDTSRVIPVTDINGVEPWNLPTLAGEFCRGDTEQWFFFSPRQEREARGGRPNRTTASGYWKATGSPGHVYSSDNKVIGMKKTMVFYKGKAPTGRKTKWKMHQYKAIEHSHQSNTAPPKLRHEFSLCRVYVISGSFRSFDRRPLEMPRIELRVDGDRGAASTSTQQRAAVVDGLSSSDTSSHSGGGRGGSHISEAGAGSSGTNWNASNSRVEEPLWEWEQLNWP

SEQ ID NO: 174189 - protein, 68 aa, Glycine max
  Clone ID: PAT_MRT3847_128311C.1.pep
MSIRSHILILTMIVSHPNFQFLFETIPFHTSFNKLDGTHPTPSQILQQIPQFIPFIINHPQTYCFLID

SEQ ID NO: 174190 - protein, 37 aa, Glycine max
  Clone ID: PAT_MRT3847_128312C.1.pep
LKCQDLHITCHKLAPVTRALFLQCRNSREDQRTIIVN

SEQ ID NO: 174191 - protein, 61 aa, Glycine max
  Clone ID: PAT_MRT3847_128313C.1.pep
SILMIGTLTHVTASGGIIIFWQSLARPDQQQLIALGRIYLHTQTSHSVFIYLTFVYRFFTL

SEQ ID NO: 174192 - protein, 117 aa, Glycine max
  unsure (1)..(117): unsure at all Xaa locations
  Clone ID: PAT_MRT3847_128314C.1.pep
SLFWRXGSGSLGPFSLRGGFLAPGFVFCLGGAGVFLGGCXVPPLLFVLPXGLVPAQAAELVSPPFPVFPAXGPPFGXGLSFGGWXSVGWXSSPSPGFLGLCSLLVAVPXXXPPPGPP

SEQ ID NO: 174193 - protein, 143 aa, Glycine max
  unsure (1)..(143): unsure at all Xaa locations
  Clone ID: PAT_MRT3847_128315C.1.pep
PIRPEIKVIAHLPKGDNTPSANMXYLNGPYLALAMKTGIITGILCLTEGMAIXRTFAXLKNYQVDGNKEKMAIALMNIAGCCSSCYDTTGSFLRSAVNYNARAQTAGANIYMAATVLETLMLVMPLFYYTPKAVLAAIISTGG

SEQ ID NO: 174194 - protein, 84 aa, Glycine max
  Clone ID: PAT_MRT3847_128316C.1.pep
CLLYKMSHTAVAANSTTAVISVFENSSHVWDSVGSVPRRVQYFCHIPHKSSDARIAELHCRAIFQLSDLGHGPIRWLRPARTVR

SEQ ID NO: 174195 - protein, 70 aa, Glycine max
  Clone ID: PAT_MRT3847_128317C.1.pep
TCRNMLLHKTSLLCVHPVICSDVANIKITYHGNHVPKISLYNDPDTCFLQHPIGADGCQLKPGFWPFLDI

SEQ ID NO: 174196 - protein, 391 aa, Glycine max
  unsure (1)..(391): unsure at all Xaa locations
  Clone ID: PAT_MRT3847_128318C.1.pep
VSSQTISRVPVQVDSFDKLPTSLDKNPLTNQTEXQSLQLQKVQLSNLVSGDTEHQEESAMADASPRTDISTDVDTDDKNPRFDRSQSLVAVASDSSDRSKDKSDQKTLRRLAQNREAARKSRLRKKAYVQQLESSRLKLTQLEQELQRARQQGIFISNSGDQAHSMSGNGAMAFDVEYARWLEEQNRQINELRAAVNSHAGDTELRMIIDGIMAHYDEIFRLKANAAKADVFHLLSGMWKTPAERCFLWLGGFRSSELLKLLVNQLEPLTEQQLVGITNLQHGIXQAEDALSQGMEALQQSLSETLSTGSPGSSGSSGNVANYMGQMAMAMGKLGTLEGFIKQADNLRQQTLHQIHRILTTRQSARALLAIHDYFSRLRALSSLWLARPRD

SEQ ID NO: 174197 - protein, 128 aa, Glycine max
  Clone ID: PAT_MRT3847_128319C.1.pep
SQLEPLTEQQLMGITNLQQSSQQAEDALSQGMEALQQSLAETLSTGAPASSGSSGNVASYMGQMAMAMGKLGTLEGFIQQADNLRQQTLQQMHRILTTRQSARALLAIHDYISRLRALSSLWLARPRD

SEQ ID NO: 174198 - protein, 66 aa, Glycine max
  Clone ID: PAT_MRT3847_12831C.1.pep
KILRPYNSKRKHVTFCFLQTVSNHSKFSIEKIYLKTKYKFNLIMLLTVTTYCRRYRIIFFNRFSHP

SEQ ID NO: 174199 - protein, 228 aa, Glycine max
  unsure (1)..(228): unsure at all Xaa locations
  Clone ID: PAT_MRT3847_128320C.1.pep
WCVWSRAGVCVEDEKGTARGMPSFDSQLPNSNACYTEGSAIDSFCVFDFDQSVGYRIEDCVALRGNSVFDSLKVSSQTISRGPVEVDSFDKLPTSLNKNPLTSQTERQRLQLQKVQLSNLVSGDTEHQEESAMADASPRTDISTDVDTDDKNPRFDRSQSLVAVVSDSSDRSKDKSDQKTLRRLAQNREAARKSRLRKKXYVQQLESSRLKLTQLEQELQRARQQGNH

SEQ ID NO: 174200 - protein, 216 aa, Glycine max
  Clone ID: PAT_MRT3847_128321C.1.pep
MDCSINFHKLQTKKTTKPRKHHPQLRKIANMLRYAELCVVLVLVSRLSINLPYTTECFRNFMGSPRFVFLLGNVIIITLFAQSGHFSSSAKRAPEPADLYLEFLQNTTIHQKLQVHVSKPKPSARVLESVIIKGTKTAETGLEVKKDYRRSKSDIVVKRVESEKVPPRVLQRCETEKVLVNNNSYPEDGMSNDDFRRKVEAFIARQQRLRTTELCN

SEQ ID NO: 174201 - protein, 96 aa, Glycine max
  Clone ID: PAT_MRT3847_128322C.1.pep
PPSQKKWPSQGTFLRPPTKFHAPRCFFLRLEKKTQNMPLMPLPSPQSSPFKGLGIMEVNLVMAPPPFPLSFVIPGSKRGGVFFFRPQWKRPFFEDV

SEQ ID NO: 174202 - protein, 57 aa, Glycine max
  Clone ID: PAT_MRT3847_128323C.1.pep
KLSITCKEETLKVGSSTLTMTFVTVLALSDLCYFMVLSGKLRLAMYSQSHAGQPLEF

SEQ ID NO: 174203 - protein, 101 aa, Glycine max
  unsure (1)..(101): unsure at all Xaa locations
  Clone ID: PAT_MRT3847_128324C.1.pep
LLFSEEPIVGVKIGTRSIPPSCPHRKWSNFLKHPKNNPIRLYEPKTDILRALSGTHIHVTISVPNNQLLAIASSNTNATSWIRRNVXXYHPSTRIDAVSLG

SEQ ID NO: 174204 - protein, 111 aa, Glycine max
  Clone ID: PAT_MRT3847_128325C.1.pep
FSFPFCLKTVSVGRRKFSADFQLVFRLIKGLIFLTFISILVTMIALPHMTIQDIIVCILAFMLTGWGMLQNFRPVCCSTKHSVEVCKFPVFLEVKGRGALLAIRNNLSTFP

SEQ ID NO: 174205 - protein, 363 aa, Glycine max
  unsure (1)..(363): unsure at all Xaa locations
  Clone ID: PAT_MRT3847_128326C.1.pep
MTSLPLIQPESMEAEPSIPSDSLRAQISKFSTMLTEAHKRKPIHYWILLVLSILAMLVAFPASSILSRVYYDNGGQSKWIISWVAVAGWPLTALILFPVYFISKTFPTPLNLKLSLSYIVLGFLSAADNLMYAYAYAYLPASTASLVASSSLVFSALFGYFLVKNKVNASIVNSVFIITIALTIIALDSSSDRYPSISDSEYIMGFVWDVXGSAFHGLIFALSELVFVKLLGRRSFIVVLEQQVMVSLFAFLFTTVGMIVSGDFQGMAHEATTFEGGRSAYYLVIIWGAITFQLGVLGGTAIIFLGSTVLAGVLNAVRTPITSIAAVILLKDPMSGFKILSLVITFWGFGSYIYGSSMGEKSS

SEQ ID NO: 174206 - protein, 355 aa, Glycine max
  Clone ID: PAT_MRT3847_128327C.1.pep
MKIEIMEAEPSIPSDSLRSQISKFSTMLTKAYKRKSIHYWILLALSILAMLVAFPASSILSRVYYDNGGQSKWIISWVAVAGWPLTALILFPVYFISKTFPTSLNLKLSLSYIVLGFLSAADNLMYAYAYAYLPASTASLVASSSLVFSALFGYFLVKNKVNASIVNSVFIITIALTIIALDSSSDRYANISDSEYIMGFVWDVLGSALHGLIFALSELVFVKLLERRSFIVVLEQQVMVSLFAFLFTTVGMIMSGDFQGMAHEATTFKGGRSAYYLVIIWGAITFQLGVLGGTAVIFLGSTVLAGVLNAVRTPITSIAAVILLKDPMSGFKILSLVITFWGFGSYIYGSSKIWP

SEQ ID NO: 174207 - protein, 153 aa, Glycine max
  Clone ID: PAT_MRT3847_128328C.1.pep
KKIKRHRRSSLKLAVRHILKNQRSESALRRCNTIWIWRALSPHSVARLRWRGDGHMERSFSNWCQRRRSFWIPTAPLTVTYKSDENADVRIIGPPHHRSCGWTSETYFTATMGTAMSALRLNVGVFPRRTVDEMVDQRRWRDGGNSDLKADAG

SEQ ID NO: 174208 - protein, 42 aa, Glycine max
  Clone ID: PAT_MRT3847_128329C.1.pep
LLPTEYLSQQFQSFMASNVEVPNLTTQHSRPRYEIQTELNFL

SEQ ID NO: 174209 - protein, 84 aa, Glycine max
  Clone ID: PAT_MRT3847_12832C.1.pep
SIPTQHKVPSTLFPIIFHYHSFPLALSSTLFLLIAHVLHDVVFSLSRCCSLLLQHKAWSFISQPPLSLPPKTHFPEAPPIAFLQ

SEQ ID NO: 174210 - protein, 56 aa, Glycine max
  Clone ID: PAT_MRT3847_128330C.1.pep
STHKTSNAGDYIPTSSKQKIKGGRPLIGWGTRGLISERGLLGLPLFLFSSPFYLRG

SEQ ID NO: 174211 - protein, 98 aa, Glycine max
  Clone ID: PAT_MRT3847_128331C.1.pep
MTNEGVQVHPPSKKRMNVCPNPTFSDLMGTNHGHSPSMTTDAVSCMKPMQETMFPYIIRLDLKTDSSDTILIVTDMYQWKTYLHFVTINNPYPRAYLM

SEQ ID NO: 174212 - protein, 414 aa, Glycine max
  Clone ID: PAT_MRT3847_128332C.1.pep
AEGVFSNTGWYATNQFAVDVIFGNRMKQYECLTNDSSIAAAVFVPFYAGFDIARYLWGYNISTRDAASLDLVDWLMKRPEWSTMNGRDHFLVAGRITWDFRRLSEEESDWGNKLLFLPAAKNMSMLVVESSPWNANDFGIPYPTYFHPAKDADVFMWQDRMRQLDRKWLFSFAGAPRPGNPKSIRGQLIDQCRRSNVCKLLECDFGESKCHSPSSIMQMFQSSLFCLQPQGDSYTRRSAFDSMLAGCIPVFFHPGSAYTQYTWHLPKNFTKYSVFIPEDDIRKRNISIEERLSQIPPEQVKIMREEVISLIPRLVYADPRSKLETLKDAFDVAVQAVIDKVTNLRKDIIEGRTDDNFIEENSWKYALLPEGEHEVGPHEWDPFFSKPKDGNGDSNDSSAEVAKNSWKNERRNQS

SEQ ID NO: 174213 - protein, 54 aa, Glycine max
  Clone ID: PAT_MRT3847_128333C.1.pep
FGSDLKEIQVKISGSNANSSLRNRNGPAQMPYTGLIPTSGKGLTFRGIANSLSI

SEQ ID NO: 174214 - protein, 76 aa, Glycine max
  Clone ID: PAT_MRT3847_128334C.1.pep
KEERGSTCGTKLSHLINKCKMVGTQLSNTLLNFITMPILPHRTDDIEISNPSVSGIAPHLMMMTTIKGNPAYIFLN

SEQ ID NO: 174215 - protein, 75 aa, Glycine max
  Clone ID: PAT_MRT3847_128335C.1.pep
WHLRVSCFSTSNVICVSLTIETLLQIGMICWMNARLYYGKQVPTPRSKNCTLISLLIMDTLRRKISNIYLDLQSL

SEQ ID NO: 174216 - protein, 43 aa, Glycine max
  Clone ID: PAT_MRT3847_128336C.1.pep
NFFSEMQYANHGQGPQLQLAQLFYFQLIHIGVLGKQLTEVLIQ

SEQ ID NO: 174217 - protein, 121 aa, Glycine max
  Clone ID: PAT_MRT3847_128337C.1.pep
FYPSHSPLILLLLVAIFFFFFFYLGTYLYLSLSLLLVLLLTFRLQPYTDTINPNMAQPPGISQFYNISFLLSVLPSSQRLSQFFSSNLVLYRPHGNFPKLLYLLWFQLLPSIPSNFNSHFT

SEQ ID NO: 174218 - protein, 73 aa, Glycine max
  Clone ID: PAT_MRT3847_128338C.1.pep
LFMFRRKRVCQREKAQKTEIGINQFVMRIEIRFSLEQSKKKCNPTLSLSLSLSLSLFNFFYQCFLIIFSSHTP

SEQ ID NO: 174219 - protein, 52 aa, Glycine max
  Clone ID: PAT_MRT3847_128339C.1.pep
TPLFFSVPNIHAKHFSIESVLLELEILNKSQMRATNCYCHSLPHYMRVGLIV

SEQ ID NO: 174220 - protein, 96 aa, Glycine max
  Clone ID: PAT_MRT3847_12833C.1.pep
RNPNIWGNEKNSDQKFRNCSRKEKRRRKFRIISGAYYIHAKQKIGAEHAKITKTHSKIYGSRNGQWHLFFSTREINSSSPFTFSLTPIFQYSFVIF

SEQ ID NO: 174221 - protein, 71 aa, Glycine max
  Clone ID: PAT_MRT3847_128340C.1.pep
SNPRYHITTLHFGRVSSSSPRKSHSTVHFHFLFSALGNDAIVVPRKAKLHHQTQSNLACLFHPFGHVRILR

SEQ ID NO: 174222 - protein, 74 aa, Glycine max
  Clone ID: PAT_MRT3847_128341C.1.pep
GSNVLLHVLAADLCAYFYLCTCPYLLPILKNGEPKGLQNEPLMGALLLRLPLHDCFGYRWEASMLLDDARIFIE

SEQ ID NO: 174223 - protein, 54 aa, Glycine max
  Clone ID: PAT_MRT3847_128342C.1.pep
ELVLSELDNLQCKDSLSLCRTSHYSVTEIKITCEGISKVPKMYKLGNSRSRTFE

SEQ ID NO: 174224 - protein, 72 aa, Glycine max
  Clone ID: PAT_MRT3847_128343C.1.pep
AREPPRSPGMPDGGSWAMWKWFMVGCPPPSQVRKEILKVKTPSPSGLFWILGLVTVRRAQCFWFIAPQPSGF

SEQ ID NO: 174225 - protein, 82 aa, Glycine max
  unsure (1)..(82): unsure at all Xaa locations
  Clone ID: PAT_MRT3847_128344C.1.pep
XXXTYSHSPLLHADCPLVGXRADVANRSTVQEAGQQIDTAPSCQSKHRRTHCMRSHRRRRCMLPVSLPGLWHRXCRRAXQFM

SEQ ID NO: 174226 - protein, 68 aa, Glycine max
  Clone ID: PAT_MRT3847_128345C.1.pep
GGKPSKGFGGNNQPLPYFFFLDKEKFLGLGPKGPPGAGQAPRVNGPFQKSFQKPQRGGCLCLKKFLGP

SEQ ID NO: 174227 - protein, 249 aa, Glycine max
  Clone ID: PAT_MRT3847_128346C.1.pep
MNTIVLTMLPFFLFLLVWLPRVTCGWTAAHATFYGGADASGTMGGACGYGNLYQQGYGTSTAALSAALFNNGQTCGACFQLVCYNSPFCIRGAGPITITATNFCPRNGSFSANGIGWCNPPLMHFDMSQPAFTKIALYRAGVVPVLFRRVVCLKRGGIRFTINGNPYFNLVLVYNVGGLGDVKAVSIKGSSTGWQPMTRNWGQNWQSKTYFVGQSLSFIVTTSDGRSVVSSNVVPAGWKFGQTFQGGQF

SEQ ID NO: 174228 - protein, 52 aa, Glycine max
  Clone ID: PAT_MRT3847_128347C.1.pep
ARACRWSSSFGFLGMLHLNGHHDTACFAACLLRTNFVKHIKRTGAASFSSTY

SEQ ID NO: 174229 - protein, 168 aa, Glycine max
  Clone ID: PAT_MRT3847_128348C.1.pep
NNKNVKCSTKGWKASDGLRPVEGQIGRDRRLEEQEGKRVNRVAAGPAGLDSWRWERTDGTQARRSFLSIIFLPLSIITGVFGMNVGGVPWTGQNAPELKDGFRNVILLCVAMLFLVLLCFIFPALYTRIAASWRNKRAMGRSWSLNRKSLLRRSLRIGEQERGGYLRI

SEQ ID NO: 174230 - protein, 35 aa, Glycine max
  Clone ID: PAT_MRT3847_128349C.1.pep
SDILGIYDSLCHPVWILIRQATKANVNRFASFFKR

SEQ ID NO: 174231 - protein, 86 aa, Glycine max
  unsure (1)..(86): unsure at all Xaa locations
  Clone ID: PAT_MRT3847_12834C.1.pep
XNGKPLHXKGSSFQXVIPSFMCHGGXFXXGNGTGAESIYGXKFAXENFXXKHTXXXIFSIXXXGXXXXGSXFLXLHGEXESLXGKH

SEQ ID NO: 174232 - protein, 76 aa, Glycine max
  unsure (1)..(76): unsure at all Xaa locations
  Clone ID: PAT_MRT3847_128350C.1.pep
SATXYLXLSLSTQLQLIKSLTFFKMSSALNSILENHNQIQLKIHNKHLTQHQHFISTFPLSQQLKRKEKPILHLQQ

SEQ ID NO: 174233 - protein, 124 aa, Glycine max
  Clone ID: PAT_MRT3847_128351C.1.pep
KDKKNKKQAQKTKIKGEGGRKKEGGGGGRKEKKKRKEKKKKETTRRTGKKRKKQEGKKKKKRTWKKEKWSKKKGTRGGKKGKKGPKKPGKPPREKRNVSPNSKIPRGQNKEHRPKKRRPAKGGQ

SEQ ID NO: 174234 - protein, 135 aa, Glycine max
  Clone ID: PAT_MRT3847_128352C.1.pep
KIPDVLFNPSLVQSIPGMESFAEIAPSVRGLPQMVIESINKCDVDIRRELFNSILLAGGTASMQQLKERLEKDLLEESPQAARVKVLASGNATERRFSVWIGGSILASLGSFQQMWFSKSEYEEHGASYIQRKCP

SEQ ID NO: 174235 - protein, 446 aa, Glycine max
  Clone ID: PAT_MRT3847_128353C.1.pep
MYGGDEVSAIVIDLGSHTCKAGYAGEDAPKAVFPSVVGAIDQMDVDEADNGEKNPGSAPESNNNNVRNADSDKAKGKRKLYVGSQSLGYRRDHMEVLSPFKDGVVADWDIVDSIWDHAFRECLLIDPKEHPMLLAEPSSNSQQQRERTAELMFEKYKAPALFLAKNAVLTSFASGRATSLVVDGGGGSITVAPVHDGYVLQKAVATSPIGGEFLTDCLMKSLESKGITIKPRYSFRRKEIRPGEFQTVDLEFPNTTESYKLFSQRVIASDIKECVCRAPDTPYDESAYSNIPMTSYELPDGQTVEIGADRFKIPDVLFNPSLVQSIPGMESFAEIAPSVRGLPQMVIESINKCDVDIRRELFNSILLAGGTASMQQLKERLEKDLLEESPQAARVKVLASGNATERRFSVWIGGSILASLGSFQQMWFSKSEYEEHGASYIQRKCP

SEQ ID NO: 174236 - protein, 67 aa, Glycine max
  Clone ID: PAT_MRT3847_128354C.1.pep
RVLKRKKQKITQKGTDKQREGTKTRTITRPKNRDPKEKSLPISEGAQTKGLPHTGPHPHMKKQGTAA

SEQ ID NO: 174237 - protein, 85 aa, Glycine max
  Clone ID: PAT_MRT3847_128355C.1.pep
FSKWICFYHMCLSLVVSLFLLFVNHFVLLKFNDVFYILSQHLPCLLHLHLRDNSRTHLSLEQDSIKWHCMPCSTWEESAAEVSLI

SEQ ID NO: 174238 - protein, 49 aa, Glycine max
  Clone ID: PAT_MRT3847_128356C.1.pep
STTKCYDIMGITKKDYSTLENQNQRIIFIFVHFGLQTYTSPTENNNAQC

SEQ ID NO: 174239 - protein, 37 aa, Glycine max
  Clone ID: PAT_MRT3847_128357C.1.pep
DKRGLPSCMTSPACLGPTNDRRATHIHLSTLHQQPPR

SEQ ID NO: 174240 - protein, 46 aa, Glycine max
  Clone ID: PAT_MRT3847_128358C.1.pep
DHIPSGYCLPSSHLAHDYPFNPPKVASRTLVFHPNIHRDCTLCLDI

SEQ ID NO: 174241 - protein, 879 aa, Glycine max
  unsure (1)..(879): unsure at all Xaa locations
  Clone ID: PAT_MRT3847_128359C.1.pep
SKPWLYPAPTYRTIETFWVTDEDAPGPRCGHTLTAVAATKTQGPRLILFGGATAIEGGSSSAPGIRLAGVTNTVHSYDVQSRKWTSIKPAGEPPSPRAAHAAAAVGTMVVFQGGIGPAGHSTDDLYVLDLTNDKYKWHRVVVQGQGPGPRYGHVMDLVAQRYLVTVSGNDGKRVVSDAWAFDTAQKPYVWQKLNPEGDRPSARMYATASARSDGMFLLCGGRDSSGAPLADAYGLLMHRNGQWEWTLAPGVSPSPRYQHAAVFVGARLHVTGGVLRGGRSVEGEASIAVLDTAAGVWLDRNGIVSSSRSNKGHDYDPSLELMRRCRQAAAAVGVHIFIYGGLRGDILLDDFLVAENSPLQPDINSSERASPVTSSKQNQSNLTYNVTAPNLDGGPDTPSFGHSGMDKNSLEKLREASAAEAEAAGAVWQAVQSISSNPAEETSLSDENSQAAETVSDGSDTEGDVRLHPXAVVVSKEAVGNLGGMVRQLSLDQFENESRRMIPVNNDLPYPTKKFTRQKSPQGLHKKIISTLLRPRNWKAPANRRFFLDSYEVGELCYAAEQIFMHEPTVLQLKAPVKVFGDLHGQFGDLMRLFDEYGFPSTAGDITYIDYLFLGDYVDRGQHSLETITLLLALKIEYPENVHLIRGNHEAADINALFGFRIECIERMGENDGIWAWTRFNQLFNYLPLAALIEKKIICMHGGIGRSINSVEQIEKLERPITMDTGSITLMDLLWSDPTENDSVEGLRPNARGPGLVTFGPDRVTEFCKKNKLQLIIRAHECVMDGFERFAQGQLITLFSATNYCGTANNAGAILVVGRGLVVVPKLIHPIPPPLQSPETSPERVMDETWMQELNIQRPPTPTRGRPQPDLDRGSLAYI

SEQ ID NO: 174242 - protein, 66 aa, Glycine max
  Clone ID: PAT_MRT3847_12835C.1.pep
NNYYKGKAPFLFIIYFPFFISFKPKNFIYFFSHLSDFTHLFLWLVSYLRGPFSSRHLSHFVVVPLL

SEQ ID NO: 174243 - protein, 79 aa, Glycine max
  Clone ID: PAT_MRT3847_128360C.1.pep
HASDLVTTSRQGWKIQILIEPTLPRVPIAIGGPGLAPGVRFRNDVPTGGLANVAATVMNLHGFEAPSDYETTLVEVVDN

SEQ ID NO: 174244 - protein, 92 aa, Glycine max
  Clone ID: PAT_MRT3847_128361C.1.pep
KQTKRSGFIDLSYFNIIQTHIYIHWQINLLEDKLALPFGFFFFTTLNQRGQSPASSFSLPLVGLPKNIMERAKVPQNLKQPLGEIGGTKEAH

SEQ ID NO: 174245 - protein, 109 aa, Glycine max
  Clone ID: PAT_MRT3847_128362C.1.pep
DAWVSGDLDVAKDALVQALTRLRANLFDKERAVSGFLPVLPYLPASVDGSDGLNYDSRDGKRHGRGGYGGGRGGYGGGRGGYGGGRGGGRGGYGPNEHNEAGVDANPHN

SEQ ID NO: 174246 - protein, 83 aa, Glycine max
  Clone ID: PAT_MRT3847_128363C.1.pep
NTQIPRSLNRLYQIFVIGSNTSISGRVNFARLSFRLRVLFRDIVVVFENFSFFDIIVVDYAKIRARITGRSRKWNRRRNFATA

SEQ ID NO: 174247 - protein, 120 aa, Glycine max
  unsure (1)..(120): unsure at all Xaa locations
  Clone ID: PAT_MRT3847_128364C.1.pep
TQYLFLVKNSALVDILVAKTRVWEEAPDMSFTYDGVPLLAMLDEYAMLRHVWEEEEXRMQDHKKYQEQQNTDQEPGFGSRPSPTRPLGNKKVVGPCPNGGTNGTPRRLSLNAHQNGNRSS

SEQ ID NO: 174248 - protein, 63 aa, Glycine max
  Clone ID: PAT_MRT3847_128365C.1.pep
RHIFFIHYIIWETEKNLPHLFFNQEYKKKMVTTLFLMGNEKTWIFPNHSKETKNPFLLYFGNT

SEQ ID NO: 174249 - protein, 56 aa, Glycine max
  unsure (1)..(56): unsure at all Xaa locations
  Clone ID: PAT_MRT3847_128366C.1.pep
GPPPGLKKSEVGAPPVXXIYKMVVFPFFLLFLLFFFFFFFLGGIKLTKNLTYNEHH

SEQ ID NO: 174250 - protein, 68 aa, Glycine max
  unsure (1)..(68): unsure at all Xaa locations
  Clone ID: PAT_MRT3847_128367C.1.pep
SQLGVRCGTLAAILEIGATMDQNFLQFDPAPSQIGXNATRTFSDYFLYLQPISLFVVYAFALNSKLCL

SEQ ID NO: 174251 - protein, 47 aa, Glycine max
  Clone ID: PAT_MRT3847_128368C.1.pep
KVLEGAISHVGIQLDGDEAATLTADGHVGGCLRDSHRPRVESLGLHS

SEQ ID NO: 174252 - protein, 274 aa, Glycine max
  Clone ID: PAT_MRT3847_128369C.1.pep
MIGKKFLCVVVAVAFVMITKVPQNVSAQNCGCAEGLCCSQHGYCGNGEEYCGTGCKQGPCYSSTPSTNNVNVADIVTPQFFSGIIDQADSGCAGKNFYSRDAFLNALNSYNDFGRLGSQDDSKREIAAAFAHFTHETGHFCHIEEINGASQDYCDENTISQYPCLSNRGYYGRGPIQLTWNFNYGPAGQSNDFDGLNAPETVGNDPVISFKTALWYWMQHVRPVINQGFGATIRAINGQLECDGANPSTVQARVNYYTDYCRQFGVATGDNLTC

SEQ ID NO: 174253 - protein, 159 aa, Glycine max
  unsure (1)..(159): unsure at all Xaa locations
  Clone ID: PAT_MRT3847_12836C.1.pep
RFXXXPQIMAIGTLAFCXNNLGVFXXVVKIGRGLTAKXIGPTSALAEGXGAFLGLGFXLGAKVAKNVPNAIXALGRLEVFPKTCRKFGFLGKRNFSLFKDESGFGSTLIIGLVLRVSLLFFYWFASPQNNLSTSPAFLPFRTLNSCLVHGMQICPPAIF

SEQ ID NO: 174254 - protein, 55 aa, Glycine max
  Clone ID: PAT_MRT3847_128370C.1.pep
NLPTFPSFSGFSDFFRPTNALIHFPETPIVNENLFQYSINHNTVATHYVEMHLLK

SEQ ID NO: 174255 - protein, 126 aa, Glycine max
  unsure (1)..(126): unsure at all Xaa locations
  Clone ID: PAT_MRT3847_128371C.1.pep
RVYYYTITVLNAFPHDTQAFTEGLFYDETDTLLEXAGLYGEPSGRQDALATVKGENIHKMHDTILGEGLTVLKKRLIQLSCLQKDGCLYEPRNSTQLGTFKYDMKEGWGLATDGKALVGSDALFSW

SEQ ID NO: 174256 - protein, 119 aa, Glycine max
  Clone ID: PAT_MRT3847_128372C.1.pep
KHPRGFFFINPYFMAKKTKTGPPGGGKQGPWEKGAPSRPKNGPGQQKFKPPPIPCFGGKKAPQPGGSCPLTGGNPILSHKWGKKKKNCRKFKNHNQKFFAAPTQNLKRTKDGFGKSSCL

SEQ ID NO: 174257 - protein, 47 aa, Glycine max
  Clone ID: PAT_MRT3847_128373C.1.pep
SGTTSSNPTRHDRYISFRTSILLSPNVSTPSLKNLLFFQTPHNNDTE

SEQ ID NO: 174258 - protein, 83 aa, Glycine max
  Clone ID: PAT_MRT3847_128374C.1.pep
IRDGLHATDLFLVVLSLSSLYSRSQVSYLVLQRTSFCLQMVRTLSLFQYFRLVLRYMVICAFFRTDALIIDGVYHEFANQCLK

SEQ ID NO: 174259 - protein, 46 aa, Glycine max
  unsure (1)..(46): unsure at all Xaa locations
  Clone ID: PAT_MRT3847_128375C.1.pep
XXSLYXNXYTXXYXXXINSHXXXXTXXXXLXXXXXXNSXLXYXXXQ

SEQ ID NO: 174260 - protein, 47 aa, Glycine max
  Clone ID: PAT_MRT3847_128376C.1.pep
VGFHPLLLMRSEKVLLQKYRNLTMKEKRVRESGSVRTQEAQGKGLSV

SEQ ID NO: 174261 - protein, 82 aa, Glycine max
  unsure (1)..(82): unsure at all Xaa locations
  Clone ID: PAT_MRT3847_128377C.1.pep
ACSDSKVSPSHMLHLQPLXAFIIKNVSNIIPPYHHSKYSRTIPTVNYTISHLEISHMIIIKHNTYTDIEGLVSFPYDKTYST

SEQ ID NO: 174262 - protein, 52 aa, Glycine max
  Clone ID: PAT_MRT3847_128378C.1.pep
RAGFLRSFTGRSGCIVASEVKLGTLGCLILPEKAIYPIFSFWSCRIYVSAVR

SEQ ID NO: 174263 - protein, 97 aa, Glycine max
  Clone ID: PAT_MRT3847_128379C.1.pep
KQEAYAGPTKRGLPDGGILMSGCQTDQTSADASPAGSAASAYGAFSNAIQAIIEETDGAITNQELVQRAREKLKNSGFTQKPGLYCSDHHVDAPFVC

SEQ ID NO: 174264 - protein, 82 aa, Glycine max
  Clone ID: PAT_MRT3847_12837C.1.pep
CNKTSVLYTFSYIKKLYLLDKLRFRSKITVREYLKFQSQYIGNINTMYRTITVQKIMINYANKKMGTCNQAKYKAGKTVYIC

SEQ ID NO: 174265 - protein, 88 aa, Glycine max
  Clone ID: PAT_MRT3847_128380C.1.pep
LPKIGTTPPQGFRFSFTPWGFGRRVSPHRLSLIFGKWDPPFPPLFLNKKFPFLFPPFFFIGSTNQGFLLESRGDSFFDLKQKSTISRT

SEQ ID NO: 174266 - protein, 137 aa, Glycine max
  Clone ID: PAT_MRT3847_128381C.1.pep
LNVKFIAQGCEARVLLDDTITLKGEKNAATNIHSLKGLGIVDKIKNILESECPGIVSCADILTIAARDAVILVGGPYWDVPVGRKDSVTANFDLANTNLATPDESLLSIIAKFLYQGLSVTDMVALAGILMNKTLKV

SEQ ID NO: 174267 - protein, 63 aa, Glycine max
  Clone ID: PAT_MRT3847_128382C.1.pep
IIFLDFFISENQRPFQKTYNNSSNLIQSTELSPLKFFWFEIQSTELSPLKKFWFENTCNQSNN

SEQ ID NO: 174268 - protein, 97 aa, Glycine max
  Clone ID: PAT_MRT3847_128383C.1.pep
LTPLWFFAPGFEKLNKARREHPPFPGIFKVFKGPRAAIQAPSGIQYPEVGGFKFFQEPPPCLVPRLENKLCSQAINNFFFFSTKVPLPPQGRASFNV

SEQ ID NO: 174269 - protein, 69 aa, Glycine max
  unsure (1)..(69): unsure at all Xaa locations
  Clone ID: PAT_MRT3847_128384C.1.pep
SLLWKPTVLQRRSQLHCRAVVCEGPQLWPCVAPHSPGRTFSITLRSCPLAPRRSXDPWLYLPRVPSDPC

SEQ ID NO: 174270 - protein, 75 aa, Glycine max
  Clone ID: PAT_MRT3847_128385C.1.pep
PLKILGDGKLKVKLNLKARAFSASAKEKLEAAGCSLTVLLGRKNWVKLSVAKNLAQVEEYFAKKRAASSSDSTYA

SEQ ID NO: 174271 - protein, 113 aa, Glycine max
  unsure (1)..(113): unsure at all Xaa locations
  Clone ID: PAT_MRT3847_128386C.1.pep
HKHLRLHCSLSSSSLQGRRLSCMSPAKTSLMTATLRLSAYATVLTPSYPSSSPSSSFPSFIQDRPDLAVYSXIFTPTVIXDIAXENYQYIADLHKLLREKIELTDSTSDIDDQ

SEQ ID NO: 174272 - protein, 121 aa, Glycine max
  Clone ID: PAT_MRT3847_128387C.1.pep
KKNFFFDFYLQDVFFFFFQRRPPFFQIVLCGATIKVPGSAHVVLFFRETFFFFFMKKRETLFISLQECPRLNLIRFLKNFFIPLRGAWKLLFFNLNKLNKIIKQPLKFPINCNMSQILLYK

SEQ ID NO: 174273 - protein, 97 aa, Glycine max
  unsure (1)..(97): unsure at all Xaa locations
  Clone ID: PAT_MRT3847_128388C.1.pep
PFVPXVRRAVPSPXGLCPPVCAPSLVCLSWVACLASXRARVLSWPCCVRGLGRAGASGVCCGXXRPSFRXAPRVGLGAGFLXLPCCVFVWRRRQNLS

SEQ ID NO: 174274 - protein, 653 aa, Glycine max
  unsure (1)..(653): unsure at all Xaa locations
  Clone ID: PAT_MRT3847_128389C.1.pep
MSSSFLFPQTQSTVIPDPSTYFSPNLLSSPLPTNSFFQNFVIPNGTQPEYIHPYLIQSSNSSLSASYPLLLFTTALLYQAFVPDLTISASKTYSSYQQNRVISSYSDLGVTLDIPSSNLRFFLVRGSPYITASVTKPTPLSIKTVHTVVSLSSDDYNTKHTLKLNNTQAWIIYTSSPIYLNHVPSEVTSKPFSGIIRIAALPDSDSKYVETLDKFSSCYPVSGDAALKKPFSVEYKWQKERSGDLLMLAHPLHAKLLSYDRDVTVLNDFKYRSIDGDLVGVVGDSWVLETNPIPVTWNSNKGVEKESYGEIVTALVKDVQALNSSAIGTNSSYFYGKRVGRAARLALIAEEVSYPKVIPTIKKFLKESIEPWLDGTFKGNGFLYERKWRGLVTXQGSTDSTADFGFGIYNDHHYHLGYFLYGIAVLAKIDPQWGQKYKPQVYSLVTDFMNLGQKYNSLYPRLRCFDLYKLHSWAAGLTEFEDGRNQESTSEAVNAYYAAALVGLAYGDSSLVDTGSTLVALEILAAQTWWHVKAEDNLYEEEFAKDNRIVGVLWANKRDSKLWWAPATCRECRLGIQVLPLLPITETLFSDADYVKELVEWTVPFLSSQGWKGMTYALQGIYDKETALQNIRKLKGFDDGNSLSNLLWWIHSR

SEQ ID NO: 174275 - protein, 39 aa, Glycine max
  Clone ID: PAT_MRT3847_12838C.1.pep
LKGFNMSLRIGGLLVMHLVVYSDGAYTNTLHDANGAHDA

SEQ ID NO: 174276 - protein, 124 aa, Glycine max
  Clone ID: PAT_MRT3847_128390C.1.pep
LEVKAEDNLYEEEFAKDNRIVGILWANKRDSKLWWASAECRECRLGIQVLPLLPITETLFSDADYVKELVEWTVPFLSSQGWKGMTYALQGIYDRETALQNIRKLTGFDDGNSFTNLLWWIHSR

SEQ ID NO: 174277 - protein, 165 aa, Glycine max
  Clone ID: PAT_MRT3847_128391C.1.pep
PSEAVNAYYSAALVGLAYGDSSLVDTGSTLVALEILAAQTWWHVKVEDNLYEEEFAKDNKIVGVLWANKRDSKLWWASAECRECRLGIQVLPLLPITETLFSDADYVKELVEWTVPFLSSQGWKGMTYALQGIYDKETALENIRKLKGFDDGNSLSNLLWWIHSR

SEQ ID NO: 174278 - protein, 77 aa, Glycine max
  unsure (1)..(77): unsure at all Xaa locations
  Clone ID: PAT_MRT3847_128392C.1.pep
TLNFPYLFSPSFIVVLLLYCVLACLLNYNIVLSTTLXMHLRHTKCXNLKDLFTIDCGWITFGGIPFDIWNVVGKLVG

SEQ ID NO: 174279 - protein, 50 aa, Glycine max
  Clone ID: PAT_MRT3847_128393C.1.pep
ELIQGPIGFEDVEILFAADADSLARAGPLAFFLNQNPPFPGKPTAIFVTL

SEQ ID NO: 174280 - protein, 127 aa, Glycine max
  Clone ID: PAT_MRT3847_128394C.1.pep
RKEKLKEQQPTYSTDQQRGGGGLSIIISSLVGKGTSETGDPPRTEEEAEPAGGEAAIISGEGDWGTGTVLVENNKAKIILDDAKKGGGRSLPQAGGGPTTAEAGQIFFALDHKKSEVAAGVADNNRT

SEQ ID NO: 174281 - protein, 63 aa, Glycine max
  Clone ID: PAT_MRT3847_128395C.1.pep
ERARETNIGDTKSELMRRKHMKESGERIKGGTLLYVCPFMFCIFSLSHYFFFFFFLISRWNSF

SEQ ID NO: 174282 - protein, 43 aa, Glycine max
  Clone ID: PAT_MRT3847_128396C.1.pep
IVKIIKLLLNLFLFALTHDRTLSLFLERILALSFDVYHPPNIF

SEQ ID NO: 174283 - protein, 90 aa, Glycine max
  unsure (1)..(90): unsure at all Xaa locations
  Clone ID: PAT_MRT3847_128397C.1.pep
AAVAPLKPKRPLQFVDWCPPGFKCGINSHPPPVVPGGALPKVQRAVCIISNSPSVAXVFGPLDPKFDFMYAQRAFVPWYVGEGMEKGEFF

SEQ ID NO: 174284 - protein, 67 aa, Glycine max
  unsure (1)..(67): unsure at all Xaa locations
  Clone ID: PAT_MRT3847_128398C.1.pep
MFLIERALSSDPYVLELVXTLDDSFPFYPSTPLPLQNLRLSSFQSLLFTPWPFLLDEPFRFTYLCFI

SEQ ID NO: 174285 - protein, 80 aa, Glycine max
  Clone ID: PAT_MRT3847_128399C.1.pep
QKNLAGDQGTNHPEGGKKTPYLQNKSPKNQKAYNFGKTGNLSFPWVAVDSPARPKIRPPPQKCGNFFSNKPVFFLAKDFF

SEQ ID NO: 174286 - protein, 76 aa, Glycine max
  unsure (1)..(76): unsure at all Xaa locations
  Clone ID: PAT_MRT3847_12839C.1.pep
HKYFTHNHIHLITHPPHHFNSMSTFQHTIPILNYDIIPSSILFTIHHMXLSPMCSISQSXLLIITNISLLXYNXTP

SEQ ID NO: 174287 - protein, 60 aa, Glycine max
  Clone ID: PAT_MRT3847_1283C.1.pep
ETVCRNNCQCHVYLKEKIYMITCSLQITSKINNSLFSDDMTLNIRSHPFVEVVERICLFC

SEQ ID NO: 174288 - protein, 408 aa, Glycine max
  unsure (1)..(408): unsure at all Xaa locations
  Clone ID: PAT_MRT3847_128400C.1.pep
MGCFRCTGKSSKKTNNNNINHAEKHTNHNEKHTAADKVKVDLNVNGKQEDNNPKPDQLXLDVENLNLKEVSNEGKVNSYRAQTFSFAELAAATGNFRSDCFLGEGGFGKVYKGRIEKINQVVAIKQLDPHGLGGISDFVVEVVTLSLADHPHNVLAMVXLCPHGLYLFLSFILPDLPRGRKPIDWNTRMKIAAGAARGLEYLHNKMKPPVIYRDLKCSNILLGEGYHSKLSDFGLAKVGPSGDKTHVSTRVMGTYGYCAPDYAMTGQLTFKSDIYSFGVVLLEIITGRKAIDNTKPAKEQNLVAWAKPLFKNRKRFCEMVDPLLEGQYPIRGLYQALAIAAMCVQEQPNMRPETTDVVTALNYLASQKYDPQVHSIQSCRKGVASPRVRSDGHRHFVSNGSETDSSGD

SEQ ID NO: 174289 - protein, 90 aa, Glycine max
  Clone ID: PAT_MRT3847_128401C.1.pep
LAMVSFSNHRILLTQYSIDCSSILHVLAPFFLWCFGYIAGDLGGEVGIDWHLPVSIATCKNSNPLQLFLLFLANFLILSSMKKVAARLHC

SEQ ID NO: 174290 - protein, 74 aa, Glycine max
  Clone ID: PAT_MRT3847_128402C.1.pep
RGSTHFTVLEFELQDIGSIYAPLFIFSSSYFLLLFFLHLIFIFFSFFCLFSLTLHFPPYLNHGYVCDLVVLNLP

SEQ ID NO: 174291 - protein, 82 aa, Glycine max
  unsure (1)..(82): unsure at all Xaa locations
  Clone ID: PAT_MRT3847_128403C.1.pep
MSIIFGSDDXLVYYMAEGLKTSNLFWAVMTLVGSLELLFVGDSRYVGMDMIFISDKIRDFSFIPNIIYFPFIPQGATIAFYG

SEQ ID NO: 174292 - protein, 82 aa, Glycine max
  Clone ID: PAT_MRT3847_128404C.1.pep
MDPQKAQAEASKRPPGHGATEVLHQRKSLPFNFTTMTIAGLVITAAVGYTVLYVKKKPEASAKDVAKVTLGVANPEETHPKR

SEQ ID NO: 174293 - protein, 196 aa, Glycine max
  Clone ID: PAT_MRT3847_128405C.1.pep
RVHKSKPVNYFSPFDGNNLGMNNICPPQSTFGLEVSQSQKKPSSGFQFSPIGSSQLGSARSFRLNGTFEERGSPNATFQAPGGCSLHKNILHQDDEASRIWASLTSNSQGYDFPKKVVSSQHPSSSVDITSHQSGAFQKQNMKRDIDLNYMNLNAAGLEKLSRNTGSETFNRMNGEYSFPCKHSGMEPHQNLRGIS

SEQ ID NO: 174294 - protein, 118 aa, Glycine max
  unsure (1)..(118): unsure at all Xaa locations
  Clone ID: PAT_MRT3847_128406C.1.pep
VFXVGVRXSFSFGXAXFRXGFFFFXXGXGXCXXXXXXXXXXPPFPPFFSXFSPXRPRXFVPXFXSFPAPWXXXXXXVWXLXXSXCXVLCFAXGXGFALSSXLVPXRPSVWLXXWXASX

SEQ ID NO: 174295 - protein, 64 aa, Glycine max
  unsure (1)..(64): unsure at all Xaa locations
  Clone ID: PAT_MRT3847_128407C.1.pep
GKKNGQTRLGHLYRPPXPXDVQIFKISGFQIFKVNQGTRMSGPLFKDAAKGFFHLEVRDPNESG

SEQ ID NO: 174296 - protein, 255 aa, Glycine max
  unsure (1)..(255): unsure at all Xaa locations
  Clone ID: PAT_MRT3847_128408C.1.pep
SSPPPPPPPPPLPAEEARTVSGKKKRGSATKEFLISLRGKKKKQRQRSVENFDIILGSESLFSQPPPPPPLPPPKVFQNLFSLKKGKHKNRHIASVATTTTSVSNKRDHGSSSRLQDNVTMAGNESPLNPIPPPPPLPPFKLPGWKFRVQGDFVRVDSMGSSRSGSPDDLDEVSVDTPTTSTHDETSQVNSPFAKDSEDSASVSAPSLFCPSPDVDTKAHNFIESFRAGLRMAKMNFXRRIGRSNLAPSPNHEWN

SEQ ID NO: 174297 - protein, 119 aa, Glycine max
  Clone ID: PAT_MRT3847_128409C.1.pep
MVGFYDLSDTDNDSAVEEIISQAQDAVVLDQVSAINCSAFTDDSLLPSHLETRFRNLKSFPPTKPKPNTIAKARTFSSNLSSANPQSPNFSPPKQNPDSGYTSSHEKKSFREKTKDGSL

SEQ ID NO: 174298 - protein, 80 aa, Glycine max
  Clone ID: PAT_MRT3847_12840C.1.pep
NDLAGSYKNFGLRTFSPFFFQKSTFVFKPPRGFCRNPFGLLGLVLKNKPFLCPQNFFRPAVVKFFVWFFPKKKLIFFFWV

SEQ ID NO: 174299 - protein, 102 aa, Glycine max
  Clone ID: PAT_MRT3847_128410C.1.pep
PPPFGRKDTFNLMFLLTCKRNKRLLRHFLFLNQFLLRPQQIIMFRALLIQINLKIQPVKRATSPPNILKQLLIHMNIFLQLEEKAHSTSSSSSLVRATKGSC

SEQ ID NO: 174300 - protein, 70 aa, Glycine max
  Clone ID: PAT_MRT3847_128411C.1.pep
RRWTKNSPLWAMNTNPSHTPIDGHHTATMLMSSTLSDTNYPHWYDITADRSRQSWKAPQHYTFNILTALL

SEQ ID NO: 174301 - protein, 65 aa, Glycine max
  Clone ID: PAT_MRT3847_128412C.1.pep
GKIIFFFAKSFSFKGLTKINDFFFKLKSQTKRLPYSPGTFEGVKIKLLIPPWLCHFFKAPLKKHN

SEQ ID NO: 174302 - protein, 281 aa, Glycine max
  unsure (1)..(281): unsure at all Xaa locations
  Clone ID: PAT_MRT3847_128413C.1.pep
MATRPASGVLKLTLTGLNXVRGLAVSNRHTYMFSAGDDKQVKCWDLEQNKVIRSYHGHLSGVYCLALHPTIDVLLTGGRDSVCRVWDIRSKMQIHALSGHDNTVCSVFTRPTDPQVVTGSHDTTIKMWDLRYGKTMSTLTNHKKSVRAIQHPKEQAFASASADNKSXPKGEFLHNMLSQQKTIINAMAVNEEGVMVTGGDNGSMWFWDWKSGHNFQQSQTIVQPGSLDSEAGIYACTYDLTGSRLITCEADKTIKMWKEDESATPETHPLNFRPPKDIRRF

SEQ ID NO: 174303 - protein, 174 aa, Glycine max
  unsure (1)..(174): unsure at all Xaa locations
  Clone ID: PAT_MRT3847_128414C.1.pep
MEVEPVEPQSLKKLSFKSLKRALDLFSPIHGHLAPPDAESKKIRTSHKVSVEYGGIKSTANQPPHQVSSATQDPGPSNTLALPGPGDSKDSQKGGPQNALVVGPTMPSTTPNDTGFQSKXTAVVSASGSSERNLSTSALMERMPSKWPRPVWHAPWKNYRVISGHLGWLRTGCS

SEQ ID NO: 174304 - protein, 477 aa, Glycine max
  Clone ID: PAT_MRT3847_128415C.1.pep
MEVEPVEPQSLKKLSFKSLKRALDLFSPIHGHLATPDAESKKIRTSHKVSVEYGGIKSTANQPPPRQVSSATQDPGSSNTLALPGPGDSKDSQKGGPQNALVVGPTIPSTTPNDTGFQNKSTAVVSASGSSERNLSTSALMERMPSKWPRPVWHAPWKNYRVISGHLGWVRSVAVDPSNTWFCTGSADRTIKIWDLASGVLKLTLTGHIEQVRGLAVSNRHTYMFSAGDDKQVKCWDLEQNKVIRPYHGHLSGVYCLALHPTIDVLLNGGRDSVCRVWDIRSKMQIHALSGHDNTVCSVFTRPTDPQVVTGSHDTTIKMWDLRYGKTMSTLTNHKKSVRAMAQHPKEQAFASASADNIKKFTLPKGEFCHNMLSQQKTIINAMAVNEEGVMVTGGDNGSMWFWDWKSGHNFQQSQTIVQPGSLDSEAGIYACTYDLTGSRLITCEADKTIKMWKEDESATPETHPLNFRPPKDIRRF

SEQ ID NO: 174305 - protein, 73 aa, Glycine max
  Clone ID: PAT_MRT3847_128416C.1.pep
PLKKHETIKNHAGTSNTTHIKQKINNHDLFIYTNQITICLLSTDHDRVPINLIAIITNDFQPGSPTHTKNRFN

SEQ ID NO: 174306 - protein, 54 aa, Glycine max
  Clone ID: PAT_MRT3847_128417C.1.pep
SLPFFRFSSLACFWSQFLLIATNSYFLDCVCPISDFFASKGDCVLIRKGVKVLI

SEQ ID NO: 174307 - protein, 152 aa, Glycine max
  Clone ID: PAT_MRT3847_128418C.1.pep
GSSERVCAFTLDGHHDRREEACHLPNSYRTIGDQGDIAHNCSTLHTFFKYGVVPRGYCSDSGGGPIDDRIHPTLPPEPFLNRGGGNCRSRSRFWTIERGETDDTSLPKASPSPRPTIHLTSTISLVTTPSSTWTAKPPLTWQSPSSKMKFAF

SEQ ID NO: 174308 - protein, 85 aa, Glycine max
  Clone ID: PAT_MRT3847_128419C.1.pep
IIVGPKGTVTYAFGEISADQSNWWVVRDQFLASQCGLRIPRHQVLLVNVMCVFFFSFHFYFNYAPSILLGSPTYTTRNMYEKAMP

SEQ ID NO: 174309 - protein, 100 aa, Glycine max
  unsure (1)..(100): unsure at all Xaa locations
  Clone ID: PAT_MRT3847_12841C.1.pep
RTLSLTVQIVIKRIGASFVFLCSLRHGASDPGGVKSNIYSYKTLIAAEYVXVQVDYAPNFVMGVXSNXTPEFLKINPIGKVPVLKSIFGPFFDSNCHCYL

SEQ ID NO: 174310 - protein, 108 aa, Glycine max
  unsure (1)..(108): unsure at all Xaa locations
  Clone ID: PAT_MRT3847_128420C.1.pep
GCVGFVKLLYVSNKCGASLAVCSSIFGVDMFNGKKIVKFKSYFWHSNNEKFEMIKFRVTIVXKAVPCVRYLRCFHVLCISVYVRYIYIYIYIYIYCKIPEVLLAERRF

SEQ ID NO: 174311 - protein, 118 aa, Glycine max
  Clone ID: PAT_MRT3847_128421C.1.pep
IKGLVGWFMQTALLKVTLLSLGSGEAPLLDIIAYAGYTFPGLCLAVSGRIIWSYSYYFLMLWTCLCMAVYLVKTMKRVLFAEVRSYDSSKHHYLLLLIALAQFPLFTWLGNITVNWLI

SEQ ID NO: 174312 - protein, 264 aa, Glycine max
  unsure (1)..(264): unsure at all Xaa locations
  Clone ID: PAT_MRT3847_128422C.1.pep
MRTSYNLVLFRSRLRRSHHFQAYRSLSVAFLKPDHHPPAIIPSHSLFLLHGFNAHHRSFFTRAKPATNIEFNDRHSQRAVKTALWCNFLVFSLKFGVWLASSSHVMLAEVVGSVADFANQALLAYGLSSSRRAPDAIHPYGYSKERFVWSLISAVGIFCLGSGATVVNGVQNLWIAQPPENMQYAALVICGSFIIEGASLIVAIQAVKKGAAAEGMKLRDYIWRGHEPTSVAVMTEDGAXVTGLCICWASLVAVKRTGKXIYDP

SEQ ID NO: 174313 - protein, 239 aa, Glycine max
  unsure (1)..(239): unsure at all Xaa locations
  Clone ID: PAT_MRT3847_128423C.1.pep
HLHWRYQTAGMLXTVLXAXVFLGEDDTGEESPRXFKLPSRRPSVVCENCLYSLERDMRARAFHILEPKGTVDMLIPFLDDRCDGAPPLHVLLNDKQRRIIPFLSKWPFPLPAYVVDIGCFKINTPYSTQEVFVVDAVIGYQDVTSSSTFDGENVTTNVHWTGTVSDYLVTFDGGYQMILLPGGMYMGCPCDVAKSVAESKSFHLEFCWLETPDKRQRLVRTYDVQGLAVSSTYFLETKL

SEQ ID NO: 174314 - protein, 88 aa, Glycine max
  Clone ID: PAT_MRT3847_128424C.1.pep
PFLPLPWKQGRFMGTQLRYGRRLSPLRRGKNRRGICVFVSIKIVYKMGCGVLRMVCKIWWFTFLLYVCCLRCKCALIDALMNNASVLF

SEQ ID NO: 174315 - protein, 171 aa, Glycine max
  Clone ID: PAT_MRT3847_128425C.1.pep
TRPAVVARNAFAAGHSGYAFALKNTGAALSDYAHGETYDLHVPPLDPPSSSADPPPPPPPPIDDSLPPPPPPLPEFSPAPAPLARSVTMPAGVMHHHHRSPIPLSIAEEDEEEEATPKQAKKTAGSPPEMKTPPPPPPESKGMAWDYFFMVENMPGPSLSAEDDNDRHIHD

SEQ ID NO: 174316 - protein, 359 aa, Glycine max
  unsure (1)..(359): unsure at all Xaa locations
  Clone ID: PAT_MRT3847_128426C.1.pep
GVISVALTRLVAWFTKLFKTIQDKFGIPTVVCPALGGFGAGIIALKYPGILYWGFPNVEEILRTGKSASAPGIWLLAQLVAAKVIATALCKGSGLVGGLYAPSLMIGAAAGAVFGGFSAEVINSAIPGNTAVAQPPAYALVGMAATLASACSVPLTSVLLLFELTKDYRILLPLMGAVGLAIWVPSVTNQVKESETPDSSKSARGYSPHAHAGDDNDDNWRQANDXEGILTDGDVKRCLSQKSNDTSNGDSGIVDANTCLVSSVCTRGMSYRGRERGILTCYPNTSLAMAKELMEAKDIKQLPVVKRGVDHSREMKRRIVGLLHYDALWQCLRKDINHRQTAHQNRTDNNLAVKTTNGH

SEQ ID NO: 174317 - protein, 67 aa, Glycine max
  Clone ID: PAT_MRT3847_128427C.1.pep
EVWVPRREIFFRGHKGPVQLFRRERHAVHSVFNTVGWWLSFFAFCGWWGFGSVLKRWFYNKNCQADN

SEQ ID NO: 174318 - protein, 155 aa, Glycine max
  Clone ID: PAT_MRT3847_128428C.1.pep
PRVRPRVRQLPGGNDEQWKENDAQVRKEWESRRKELHSQLVAETKKGHQLDMHIRALTEQLAALQHQSGLAYYNQADPAALEYEPPVSTQDKRHSGNSNSLSNLNLSSPPGQFAIPEDSFPVSTGFTRAGFGPRLFMDMTADNPDDHQSESDFRS

SEQ ID NO: 174319 - protein, 101 aa, Glycine max
  Clone ID: PAT_MRT3847_128429C.1.pep
PSGFRTYGYGSHGLGNSGRKPISHGKQVWPNFAPVIIRPRIGKGGRPADTGPGLISGTTGPFFGGRSQFRTWVRVSLSFGFVMYFCSFFFFVFFFFFFFFF

SEQ ID NO: 174320 - protein, 185 aa, Glycine max
  Clone ID: PAT_MRT3847_12842C.1.pep
MGSLAKKGLNNYVKQLQQHPLRTKVITAGVLSAISDVVSQKLTGIQKIQLKRLLFKVIFGAAYLGPFGHFFHLILDKIFKGKRDSKTVAKKVLIEQLTSNPWNNLLFMIYYGLVVEGQPWVNVKAKVKKDYLSVQYTSWTVWPVVGWINHKFMPLHFRVVFQSLVAFFWGVFLNLRARSMALIKA

SEQ ID NO: 174321 - protein, 65 aa, Glycine max
  Clone ID: PAT_MRT3847_128430C.1.pep
FFFFFFFFFFFFFFFFFFFFFFFLTTYNRIKGSCYDHSSTTAPTMFGKMYCSSLKQKHEIAKNCK

SEQ ID NO: 174322 - protein, 80 aa, Glycine max
  Clone ID: PAT_MRT3847_128431C.1.pep
VFVKNPDGGSHAYAIHPLDFVLSLKQQIEDRQGLQSQEQQLEFQGRVLEDWFDFKSYGIQDSITIILSRKREGKAPSAPS

SEQ ID NO: 174323 - protein, 81 aa, Glycine max
  Clone ID: PAT_MRT3847_128432C.1.pep
VPRAGGFCLSLLQYVGVGGGPQSLCSLCSTRPWVPPWDYGLFFSLVPSSLFRLFVAIFRVESRTCHNHLFSFKLYVGRPHA

SEQ ID NO: 174324 - protein, 128 aa, Glycine max
  Clone ID: PAT_MRT3847_128433C.1.pep
RFPGGVSPKDGPILGGFLALFFFFSTLFFFGGVFFPPKIGPPPGIYSFPGKPIFFGCFKTIFGVGQGFFRPQDPHRAFGREPFLGGPPGPFQGAGVAWGPPEKKNGALLIWAPPPFVFFFSRPPPRFF

SEQ ID NO: 174325 - protein, 132 aa, Glycine max
  Clone ID: PAT_MRT3847_128434C.1.pep
LCIVGMEKEEEREEMSMFDETTIRAQRAARSGNWRLFKRILEEDTKRLLEPFDLFGNTAIHIATRSNNPWLLHELLEVLPAKDRWHALRMGNCVNNTLLHETIFCTRVEMAGVVFKFEKEAPPEDAPEEKKG

SEQ ID NO: 174326 - protein, 72 aa, Glycine max
  Clone ID: PAT_MRT3847_128435C.1.pep
CRVLVNKVKPFRKKKAEVKLKYQTGPPNRGGVFNEKLWLIVPKGKVQRLRWSLCLGTPNIFLHSRQGKIHSH

SEQ ID NO: 174327 - protein, 64 aa, Glycine max
  Clone ID: PAT_MRT3847_128436C.1.pep
LVLVQWLPHGSVLTCCQLLLKLLTLNLLNLRQVVGVTGLVLTKLDGSARSGCVVFSSFFFSLNE

SEQ ID NO: 174328 - protein, 100 aa, Glycine max
  unsure (1)..(100): unsure at all Xaa locations
  Clone ID: PAT_MRT3847_128437C.1.pep
KLFSRDPQDPPPPNPFFSKPAGKEKFISRGTPLFGILGPQXSFFLGGPKGESRPFKFPNPXAPFRGSFPFQQCRWPPSFXNVITGVQIGALAPPFYEGIL

SEQ ID NO: 174329 - protein, 61 aa, Glycine max
  Clone ID: PAT_MRT3847_128438C.1.pep
ATIRNIIVIFIFKWEHCFLNLELEGIITKTLFTNMTINKLTFIISGVDDHLCKNSCLVPLI

SEQ ID NO: 174330 - protein, 37 aa, Glycine max
  Clone ID: PAT_MRT3847_128439C.1.pep
KNNPFVLIKPRLAYLPLGTWDPKQTGPYIHNTHGILI

SEQ ID NO: 174331 - protein, 92 aa, Glycine max
  unsure (1)..(92): unsure at all Xaa locations
  Clone ID: PAT_MRT3847_12843C.1.pep
LALYEDTTSFRFAEYQYVGILILTLAILIFLFLDSVQRYTTNIHTYTYDNIMLYXPFLANKLYITVYFXFILLTSILSYLLYIKIATYTNTY

SEQ ID NO: 174332 - protein, 38 aa, Glycine max
  Clone ID: PAT_MRT3847_128440C.1.pep
RLWLISSGCRDWANINHSPCYLHKAAADHWGNNLSARV

SEQ ID NO: 174333 - protein, 45 aa, Glycine max
  Clone ID: PAT_MRT3847_128441C.1.pep
PSRSIHDPLCVFLAREHNTANQIIVRTENRSDCRIKLGIHNHYLL

SEQ ID NO: 174334 - protein, 61 aa, Glycine max
  Clone ID: PAT_MRT3847_128442C.1.pep
HIYHIPRIFFPSFNLLLQLNVPTSLTLSFYTTKFHSCIPTSFLLPFLVIFFIYIIFFSILF

SEQ ID NO: 174335 - protein, 59 aa, Glycine max
  unsure (1)..(59): unsure at all Xaa locations
  Clone ID: PAT_MRT3847_128443C.1.pep
QPLPKIEFSNCNNXPLTSSFSKQRAKYPLFKFACAKSYKNLFENSHNKNKYYCNKSKSF

SEQ ID NO: 174336 - protein, 68 aa, Glycine max
  Clone ID: PAT_MRT3847_128444C.1.pep
TVFSMKGIKLHDSIQSTGRSIPNWKMKSLDTPLMQPSSLFDDYIGGMSIGKEAVGSKMESLIVIRCKL

SEQ ID NO: 174337 - protein, 132 aa, Glycine max
  unsure (1)..(132): unsure at all Xaa locations
  Clone ID: PAT_MRT3847_128445C.1.pep
VECFTAGVFEWGLFNIEYASAXKNXRTELRSICCQICQVDMPMFRRLDGXNIGKFAVTVEYLHLNAEVMSIVDDLSEDDQDCVRLXDVEGCAFHGELWATQYCVVHILWAFGNLSHYKSXRVRDMVADQLDE

SEQ ID NO: 174338 - protein, 65 aa, Glycine max
  unsure (1)..(65): unsure at all Xaa locations
  Clone ID: PAT_MRT3847_128446C.1.pep
LAETFLLTSHSVNEGHRDGFCNYFSGAALKACLXQDRNEIVRLYTCTRASSVMVLREVPILASVH

SEQ ID NO: 174339 - protein, 35 aa, Glycine max
  Clone ID: PAT_MRT3847_128447C.1.pep
FGMIPGCSAPWQFSFQGNLVGVHGRSWLSHGNACE

SEQ ID NO: 174340 - protein, 91 aa, Glycine max
  unsure (1)..(91): unsure at all Xaa locations
  Clone ID: PAT_MRT3847_128448C.1.pep
FAFFPGPSDEEAYTMAISDLVXNASTLVEIAGSTDDKLARSKIFNIPMAHYFTILPMEITSAVRWTDVNIGRCIRKKRYTLLXQLGINPSC

SEQ ID NO: 174341 - protein, 166 aa, Glycine max
  Clone ID: PAT_MRT3847_128449C.1.pep
GFWVVGQTSFARFLFLNKNPPLDPNQNPPFPGVESLSISGANTVFPFSRGLGGSLHQMLFEFSLWQPRHLALRNKCQFVLSFCPPDFSPFAPPFFFFWPCFWIPLSHRKRLPPWSPSLFSGFLTGSSPAPGFQTKIPRKTQKKNPASPIKKKKKKKKKKKKKKKKD

SEQ ID NO: 174342 - protein, 35 aa, Glycine max
  Clone ID: PAT_MRT3847_12844C.1.pep
GWKRRSCMLCLLILTARNKFSSCFGFAGWIFMLTC

SEQ ID NO: 174343 - protein, 124 aa, Glycine max
  unsure (1)..(124): unsure at all Xaa locations
  Clone ID: PAT_MRT3847_128450C.1.pep
PRGYSFAKLLVFRQSVSGDLQLPTDGMLFEGKHIPESNISAGDXHVVQIPLMAHEEILSYSARDSTTALVSKNSKPQATAMHVAAIELIIDRFSCTDCNILGAMLLVVTIHTNPENAVRIFTVR

SEQ ID NO: 174344 - protein, 72 aa, Glycine max
  unsure (1)..(72): unsure at all Xaa locations
  Clone ID: PAT_MRT3847_128451C.1.pep
RDDAALAYLWNAITILACVHLSTYAIENLMEELSLYGACSRLATMTAIXWDMTAHLSMYNAMLIIPAIVILG

SEQ ID NO: 174345 - protein, 545 aa, Glycine max
  Clone ID: PAT_MRT3847_128452C.1.pep
MGVEKLSLLSTTNLAVLAQANNKCSSRKHVCWRSSTTPFHLQRKPISWSVLCGFMLFGLGLISLLTGHMVSDLEWYSHRRSLYSTMDGSYRAPIDVWKSQYSKYYYGCSVRGRAYAPAVPEWMSNGYLLIGTSGGLNQQRTGITDAVVVARILNATLVVPELDHHSYWKDDSDFIHIFDVDWFISYLAKDVTIVKRVPDKFMRSMEKPPYTMRVPRKSEPDYYLDQVLPILLRRQVVQLTKFDYRLANNLDNELQKLRCRVNFHALRFTKPIQELGQIIVMRMQKMARRFIAVHLRFEPDMLAFSGCYFGGGEKERRELGEIRKRWTTLPDLSPDGERKRGKCPLTPHEVGLMLQALGFSKDTYLYVASGEVYGGDETMQPLRDLFPNIYTKEMLAEEELKPFLPFSSRLAAIDYIVCDESARVRPRVRPRVRKILAGRRRYMGHKRTIRPNAKKLSTILAGRHQMDWDTFAKKVKSCQRGFMGEPDEMRPGRGEFHEFPSSCVCKRPYVDEELSKEVYRSPKLVAINLTAKAYSSSNGIRRGRT

SEQ ID NO: 174346 - protein, 101 aa, Glycine max
  unsure (1)..(101): unsure at all Xaa locations
  Clone ID: PAT_MRT3847_128453C.1.pep
YLTIPNPENAVRXSIFCCALSKGGRPQFGWLQFPNPIVXQIEPDXMNSRFKFLSPTTNGDFVQGKNLQWVKVNVPCAVVGLTSSYTPTPLLEFGLQKDRGL

SEQ ID NO: 174347 - protein, 232 aa, Glycine max
  Clone ID: PAT_MRT3847_128454C.1.pep
MAAIISRRLRLSTLASSLLKPSSYSITNFISNNPKPPIFKPSQFLPPIRFLSTNNKDSSSTLDSDETQKPSPGPSPSPYPSQNPNFKHQEIEGPTVERDLSPLANETRVVLETMMKNMYSLSRVVAALGLLQLTLGAWITYLTKSEPIAEVSLQSLLAFAFPFSLAFMLRRALKPMHFFKKMEELGRLQILTLALQVAKQLNVLFVRVRAVSVLSVVGVVVGVVVAVGSKWS

SEQ ID NO: 174348 - protein, 43 aa, Glycine max
  unsure (1)..(43): unsure at all Xaa locations
  Clone ID: PAT_MRT3847_128455C.1.pep
RPILLCQLSXXHRLLSDLLKXPNPLHELEFVFSFAVAFAQFNN

SEQ ID NO: 174349 - protein, 66 aa, Glycine max
  Clone ID: PAT_MRT3847_128456C.1.pep
TYIKVARENTNCCYYYTSYGRSVGNTILFKKPCLVNHFYKKALQIIVLVIFAVGFDHALPKPRVCF

SEQ ID NO: 174350 - protein, 62 aa, Glycine max
  Clone ID: PAT_MRT3847_128457C.1.pep
YLFFFLMLLKGQRLFLFILGPQERNMGHTFDYNTKGIHPLLLRKKAPPSHHHARNLCHCNTG

SEQ ID NO: 174351 - protein, 50 aa, Glycine max
  unsure (1)..(50): unsure at all Xaa locations
  Clone ID: PAT_MRT3847_128458C.1.pep
KKGGSPPKFSPRAKTPPTPEPQLKGQPLGRNPPRLXKPGFPMPPPKGPRP

SEQ ID NO: 174352 - protein, 114 aa, Glycine max
  unsure (1)..(114): unsure at all Xaa locations
  Clone ID: PAT_MRT3847_128459C.1.pep
KRLAMQVGAKEITIDKTRSPDCNIVGATALVDTYHTNPENAARSISEAPITGGRPIQADTSPNTIVQTEPDTNPRFQLLXSTTTNGDTDQGKDPAKAKANATRAAAGQTKSHTP

SEQ ID NO: 174353 - protein, 46 aa, Glycine max
  Clone ID: PAT_MRT3847_12845C.1.pep
FLSLEFGLSASKPWYISYKTRLLFLFLRITMVPPTTTSIGSGEGGN

SEQ ID NO: 174354 - protein, 62 aa, Glycine max
  Clone ID: PAT_MRT3847_128460C.1.pep
EISQTNSIKTKAGTLWKGRGKTNNGTNPHRSTRGSIKQLVHPPEKLKGQSKKKPYAAKVLWL

SEQ ID NO: 174355 - protein, 78 aa, Glycine max
  Clone ID: PAT_MRT3847_128461C.1.pep
VETKGWDGTLFTLRNKSIRMMMESVKIWAPHMLNLKKDVEVKKDSKRLSLDTTRVTIHITNKWTKYTSIDSRCYPQQK

SEQ ID NO: 174356 - protein, 225 aa, Glycine max
  unsure (1)..(225): unsure at all Xaa locations
  Clone ID: PAT_MRT3847_128462C.1.pep
FKEEAAMPDGDIALLNPEEEWPSDDPEDDDYNPERKEDNHNFDTEGADENASNDSTSCSSLLSLNGECPPVDEGICHEYYSVNSCLDSDESGEIACGPRQRKAVDYKKLYDEMYGKDAPPCEQMSEDEDWGPGKRKRREKESDAVNTLMTLHESENKHSDNEKNDRTREGSSGIQIRRSCFRIPLDAVEKLRQVVAENELPPRSVKDSLSKELGLDPEMVXKWFK

SEQ ID NO: 174357 - protein, 83 aa, Glycine max
  Clone ID: PAT_MRT3847_128463C.1.pep
ENCYYKRDMSESLLCREFVSRSMAISNQRTTVNSKRNWMKLPARLLTPWASTKNTIKRPPTLPQPMRTPLMNRVEAPLITRRP

SEQ ID NO: 174358 - protein, 46 aa, Glycine max
  Clone ID: PAT_MRT3847_128464C.1.pep
SDGAEFHIELSILMDGLTTDPNRCHQMKDRIVRVSKETTTRVKRLY

SEQ ID NO: 174359 - protein, 102 aa, Glycine max
  Clone ID: PAT_MRT3847_128465C.1.pep
KLKLFQVYYTRTNTSLQDVWIPPKIGGDPKKSRGIREFFKASTSNFKNNGILKSNLIDPTAIPNIPLISSKLIFLANLHNFKGTGQKSGESCLYKSFQVRIN

SEQ ID NO: 174360 - protein, 53 aa, Glycine max
  Clone ID: PAT_MRT3847_128466C.1.pep
SLHRREVTTYIHGATYILFRDTGRKQNLLRYIYTSLKERVRLGTSTGRGRIYR

SEQ ID NO: 174361 - protein, 52 aa, Glycine max
  Clone ID: PAT_MRT3847_128467C.1.pep
RFSKYTILRIISQTTPVLLPIGESSLDNLTFLRVLFFKKLNIILYKNIFNYF

SEQ ID NO: 174362 - protein, 41 aa, Glycine max
  Clone ID: PAT_MRT3847_128468C.1.pep
SSLSSVKVLTSSTVRPPSVLWANQLRGPSLSEYISTRPHFL

SEQ ID NO: 174363 - protein, 102 aa, Glycine max
  unsure (1)..(102): unsure at all Xaa locations
  Clone ID: PAT_MRT3847_128469C.1.pep
FDWASLVQVFLTDRNSTEHWGACKWTKSEPHSWEMIFPIEVCGPNNGFEMWSSEWAYQTXXHLSXLIDIPKQXTVFVIFLVISQDFXIAGNTLMPAYFFFTG

SEQ ID NO: 174364 - protein, 86 aa, Glycine max
  Clone ID: PAT_MRT3847_12846C.1.pep
IYVNQHLIISCYYGFSVNQIVLVYSTSFFYLHLSFNIAVLVSLHHIFRVRLVIVISSVPHPLLVLYAIPFVSWLVSFPPWRASVPR

SEQ ID NO: 174365 - protein, 323 aa, Glycine max
  Clone ID: PAT_MRT3847_128470C.1.pep
MTEPSSNAATRKNKTDSGWKYCHPLVKGDTNTIVCNYCGKITKGGITRAKEHLIGKSGNVAACKKTPPNVVEELKEYMANKKSGTTYSTSGSGNVPNIRDFEFGEPIGCDGSEEDEFADSCNAAASAKTKCGTKKGPMDKFCKNPENAINRRKMEMLRQMNIRESMDKNEVLKVHQHIARFWYQAGLSFNLIKLKSFENMVAAIGQYGPHLPIPSYHDIRVPLLKKEVEYTENLMKGHREQWVKYGCTIMSDAWTDRKQRCIINFLINSQAGTMFLKSVDGSDFVKTGEKLFELLDAIVEEVGEENVVQVVTDNGSNYVSDAW

SEQ ID NO: 174366 - protein, 130 aa, Glycine max
  unsure (1)..(130): unsure at all Xaa locations
  Clone ID: PAT_MRT3847_128471C.1.pep
DISPARWEGNHQARGLGDWTHSLLYTTLELDATIALPQLESTRRECDVIHVNXLTSRVITERDEAQAKCQKLMLEKLELQQKQQLEQHQFVQTHQRDSISQSEEEQQEGFSEKHSASSDCEENSSMPSPG

SEQ ID NO: 174367 - protein, 127 aa, Glycine max
  Clone ID: PAT_MRT3847_128472C.1.pep
GVVSRLESESSSVPTNPFFYSILFGTLRKAAPPPPPPSSTASCLRSFHFFYNWLRIIMAYRRCLLIRGSLVDRRCHLSFSYVLHSNEGKRERTNEKSSSGGVGDFTQTRSFGSSLNGQDGVLLAFPR

SEQ ID NO: 174368 - protein, 43 aa, Glycine max
  Clone ID: PAT_MRT3847_128473C.1.pep
HKPEKRVNNPALSVLCNILPLTWLKALLILSSLWGARLAPFFG

SEQ ID NO: 174369 - protein, 592 aa, Glycine max
  Clone ID: PAT_MRT3847_128474C.1.pep
MGRSTLALVLAILISLQGTPHVRSDASDHRYKDGDSVPLYANKVGPFHNPSETYRYFDLPFCVTGHEKDKTEALGEVLNGDRLVSAPYELSFKKEKDSKVVCKRKLTKEQVAQFREAVKKDYYFQMYYDDLPIWGFIGTVDKEGKTDPSEYKYFLYKHIQFDIHYNKDRVIEISARMDPHSVVDLTEDKDVDVEFVYTAKWKETDTSFEKRMDKYSQSSSLPHHLEIHWFSIINSCVTVLLLTGFLATILMRVLKNDFMKYAQDEEAADDQEETGWKYIHGDVFRFPKHKSFFSAALGSGTQLFTLTIFIFMLALVGVFYPYNRGALFTALVVIYALTSGIAGYTATSFYIQLEGTNWVRNLLLTGCLFCGPLFLMFCFLNTVAIAYSATAALPFGTIVVIVLIWTLVTSPLLVLGGIAGKNSKTEFQAPVRTTKYPREIPPLPWYRSTIPQMAMAGFLPFSAIYIELYYIFASVWGHRIYTIYSILFIVFIILLIVTAFITVALTYFQLAAEDHEWWWRSFLCGGSTGLFIYGYCLYYYYARSDMSGFMQTSFFFGYMACICYGFFLMLGSVGFRASLLFVRHIYRSIKCE

SEQ ID NO: 174370 - protein, 81 aa, Glycine max
  Clone ID: PAT_MRT3847_128475C.1.pep
CLTAIYINFVQFYTIIRMVKGYFPPEQEINPFQKNNCGYFLRKTNFRELRWCLLISRLNFSGEWAKPMLEKMDFTGPPTKW

SEQ ID NO: 174371 - protein, 290 aa, Glycine max
  unsure (1)..(290): unsure at all Xaa locations
  Clone ID: PAT_MRT3847_128476C.1.pep
CEHFFQVPNPSCGTSACTFNLTYGSSSIAANVVQDTVTLATDPIPDYTFGCVAKTTGASAPPQGLLGLGRGPLSLLSQTQNLYHHXKHAFPYCLPSFKSLNFFGSLRLGPVAQPIRIKYTPLLKNPRRSSLYYVNLVAIRVGRKVVDIPPEALAFNAATGAGTVFDSGINAFLPRHLRREKXQRLKCNLGYKISLXYNTLNNXNLKFESGTIFICFEQSYNFXVCVMRYGDRTTFIHSTXAGSVTCLAMAPAPDNVNSVLNVIANMQQQNHRVLFDVPNSRLGVARELCT

SEQ ID NO: 174372 - protein, 355 aa, Glycine max
  Clone ID: PAT_MRT3847_128477C.1.pep
EHFFVRLRSGIPVDPRVRKIGSPPQTLLLAMDTSNDAAWIPCTACDGCTSTLFAPEKSTTFKNVSCGSPQCNQVPNPSCGTSACTFNLTYGSSSIAANVVQDTVTLATDPIPDYTFGCVAKTTGASAPPQGLLGLGRGPGSRLSQTQNLYQSTFSYCLPSFKSLNFSGSLRLGPVAQPIRIKYTPLLKNPRRSSLYYVNLVAIRVGRKVVNIPPEALAFNAATGAGTVFDSGTVFTRLVAPAYTAVRDEFQRRVAIAAKANLTVTSLGGFDTCYTVPIVAPTITFMFSGMNVTLPEDNILIHSTAGSTTCLAMASAPDNVNSVLNVIANMQQQNHRVLYDVPNSRLGVARELCTK

SEQ ID NO: 174373 - protein, 80 aa, Glycine max
  Clone ID: PAT_MRT3847_128478C.1.pep
DLTPLPRLAPSVLLSREAMPGMPAEQWQCTTRLAELSYRWYKPLHVAVLHKLPRDPYDLREDSLVVSSVCRACVLQSPLA

SEQ ID NO: 174374 - protein, 56 aa, Glycine max
  Clone ID: PAT_MRT3847_128479C.1.pep
HLLLVSMESSYIDAHLFLCMIFLSSATPIRGCGHCGIFPNSVTLANYILWTYCTRC

SEQ ID NO: 174375 - protein, 42 aa, Glycine max
  Clone ID: PAT_MRT3847_12847C.1.pep
QSSSTREGYCQEKQTLFSAQHCMYLLASNMILSIGNLCKILH

SEQ ID NO: 174376 - protein, 59 aa, Glycine max
  Clone ID: PAT_MRT3847_128480C.1.pep
LHFNYEFSYRPEGVFVYLYRSRRLVSLNGFLENDKNANVQIVCLLDYWLTCQNPIENSL

SEQ ID NO: 174377 - protein, 104 aa, Glycine max
  Clone ID: PAT_MRT3847_128481C.1.pep
GEKITPPPIFFFLKKKRLWGWDPRAHPGWGKPQGLMNTYKRPCQTQKGGGAFGFETSFSPVGGHPKHWGGAIKIFQKLFFFFFFWKKRTFLNRPKGPPEGPPFL

SEQ ID NO: 174378 - protein, 709 aa, Glycine max
  Clone ID: PAT_MRT3847_128482C.1.pep
MRLVRMSLQQLSADSEGACMVCKGLPGQEERLLCVTCDTPWHVPCLFAPPPTLSATARWLCPDCSILDSDVPPVPAPARNQLVAAMLAVENDASLTQHDKARKRQELLTGKAPADDDDDDEQENKSSLSDILSRSLNCSICIQLPERPVTSPCGHSFCLKCFEKWVRQGKRNCAKCRQIIPAKMTSQPRINSALVFAIRMARQASNSSGSGRGGVRSVNHFLHNQDRPDEPFTTERAQRSGRANAASGKIFVTVPTDHFGPITAENDPLRNQGLLVGESWRDRLECRQWGAHFVPVGGIAGQSDRGAQSVVLSGGYVDDEDHGEWFLYTGSGGKDLSGNKRTNKSHSFDQKFEKYNRALQVSCLQGYPVRVVRSHKEKRSSYAPETGVRYDGIYRIEKCWQIAGLQGFKVCRYLFVRCDNEPAPWTSDDHGDRPRPLPVIRELKKATVIHERTESPSWDFDEEDSRWKWKKPPPPSRQKVQNVEPVEVARAKSNKEVKKFQLKSIKEQLQRGFSCMICKEVMVSPVTTPCAHNFCKSCLEGEFAGQAFVKERSKGGRTLRSQKNVMKCPSCSIDISDYLQNIQVDIDLKSAIESLKAKVEEIGESVESSEDADGLQDDGAGKDEDTDSRNKNSVQELNGLPEGSDVGELEDTTNKEPDPAMKCNGKRKKGDYGNQSPDDKMEKRGKNYKTTEEELHEENDSSSSPLHPQ

SEQ ID NO: 174379 - protein, 99 aa, Glycine max
  Clone ID: PAT_MRT3847_128483C.1.pep
LGSLHLLPRKPVKKKTVNFGQNQKYNQILEALFFSIGFKKQPPEKSGRKLEVIYMARHAAGCNFTLMRSQLALFSLHSGFDERVECHTTICIVCSNTSG

SEQ ID NO: 174380 - protein, 53 aa, Glycine max
  Clone ID: PAT_MRT3847_128484C.1.pep
IICLYASFFINYNYHLTKFTNHFSKHSTLLSSFFYHSFLFNNSSFFTFNQFAK

SEQ ID NO: 174381 - protein, 91 aa, Glycine max
  Clone ID: PAT_MRT3847_128485C.1.pep
ELQPELFRESKPKNYGGGNEKLFLTEDMIGHIADVVCLELGGLIATYSILGINRALKHWHMMLLALAVFPQYNAHWVFHGLLTLGHILVVF

SEQ ID NO: 174382 - protein, 111 aa, Glycine max
  unsure (1)..(111): unsure at all Xaa locations
  Clone ID: PAT_MRT3847_128486C.1.pep
ACKWTKSEXYSWXLILPIKVCGPXNNGFIMCSSDFIKLKCPYHXSGSSDATLLLSVCDIVVGICXDFGIDGNIFMPAFYVPLATASYSENAESSACCGICVFFRLFVCLIQ

SEQ ID NO: 174383 - protein, 98 aa, Glycine max
  Clone ID: PAT_MRT3847_128487C.1.pep
HTALTNQSDMACTKHTARKTNVGTEARQQLATKAGRMNKPETFGLKTAELLKLRTRQMRDMLMIQKITEHMIVRHTLQKLMTDMRHQSKTDLRLQNTA

SEQ ID NO: 174384 - protein, 312 aa, Glycine max
  Clone ID: PAT_MRT3847_128488C.1.pep
SASIFAYGQTSTGKTYTMSGITEYTVADIFNYIEKHKEREFMLKFWAMEIYNESVRDLLSPDCTPLRLLDDPERGTVVERLTEETLGDWNHFTELISFCEAQRQIGETALNEASSRSHQILRLTIESSAREFLGNDKSSSLSASVNFVDLAGSERASQTQDAGTRLKEGCHINRSLLTLGTVIRKLSKGRNGHIPFRDSKLTRILQSSLAGNAKTAIICTMSPARSHVEQTRNTLLFASCAKEVTTNAKVNVVVSDKLLVKQLQKELARLESELKNSGPTRLKFDSAALLKEKDLQIERLKKEVMDVSMQRD

SEQ ID NO: 174385 - protein, 63 aa, Glycine max
  Clone ID: PAT_MRT3847_128489C.1.pep
SKFHSRCAEDSLKGMFCQPSRKALFLCGVEHIFWRWIGSLIMPMNMISRVSDYLFFSPQVLDW

SEQ ID NO: 174386 - protein, 368 aa, Glycine max
  Clone ID: PAT_MRT3847_12848C.1.pep
MVLFMKLPFPPHLPSSLLHFTLLLLFFIVCKTRAVVKLPPNVSVPAVLVFGDSIVDTGNNNNNLGTTARCNYPPYGKDFEGGKPTGRFSNGKVPSDFIAEELGIKEYVPAYLDPHLQPGELATGVCFASGGAGYDPLTSQSASAISLSGQLDLFKEYLGKLRGVVGEDRTNFILANSLYVVVFGSNDISNTYFLSRVRQLQYDFPTYADFLLSSASNFFKELYGLGARRIAVFSAPPLGCLPSQRTLAGGLERKIVVNINNAVQLYNSKLSKELDSLNHNFQDSRIVYIDVYNPLFDIIINYKKYGYKVGDKGCCGTGTIEVVLLCNRFTPLCPNDLEYVFWDSFHPTESVYRRLIASLLGKYLDKFL

SEQ ID NO: 174387 - protein, 72 aa, Glycine max
  Clone ID: PAT_MRT3847_128490C.1.pep
RRTCPSLTSLPPFNPAVSTLTNPLRAQPPTGHVPQDAKGIAVGSRLVADCHTTKLHLPNLGRHLWLSPIYII

SEQ ID NO: 174388 - protein, 168 aa, Glycine max
  Clone ID: PAT_MRT3847_128491C.1.pep
MGGCVLKLVDSVLFLFFLLIAVVAPLIDAQTCLPLSYFPDILVQLKEQYTNDYGDYLVAEKPHFFVGLVWLELLFQWPLALLSLYAMLTSKPWFNTTCLIYGVSVTTSMVAILSEMMNSKRASEKLLTIYAPFLRLGVLALLRGLLTCSSKSSSALGKRSALATKKRA

SEQ ID NO: 174389 - protein, 59 aa, Glycine max
  Clone ID: PAT_MRT3847_128492C.1.pep
AGLLKTQRPSLKGGKEIKQHRYAFQTRSHVDILDDGYRWRKYGEKSVKNNKFPRFVLLH

SEQ ID NO: 174390 - protein, 47 aa, Glycine max
  unsure (1)..(47): unsure at all Xaa locations
  Clone ID: PAT_MRT3847_128493C.1.pep
MAKSSXXXEDXLVSXXSLXRXXXXXEXXXKDXXDQLRHFSYQHSLYC

SEQ ID NO: 174391 - protein, 70 aa, Glycine max
  unsure (1)..(70): unsure at all Xaa locations
  Clone ID: PAT_MRT3847_128494C.1.pep
SCLVACXACFVLFXWPXFLGLVCXXLXLVRGPRLLFWPPCGCFLXXFAXGCFLXPPSRSLLFPRLFPFLV

SEQ ID NO: 174392 - protein, 40 aa, Glycine max
  Clone ID: PAT_MRT3847_128495C.1.pep
YLFCFVVLFTIIPCFYHFSCNLEYLKLNGQFFFVSVFTPL

SEQ ID NO: 174393 - protein, 147 aa, Glycine max
  Clone ID: PAT_MRT3847_128496C.1.pep
TPLSLRVRRALDHTDMPWQLRYIGQPEYGDAKRPTIIRSSIDIGCSASVVEFLTELGCRMDFEYLARGYMFRKGRMKITVAKIVKTNPNKSQDSMQLISESYLVELSVLAPRGQDAIAEDMRSFAEQLRPLVNLDKVDYKRLAHGPP

SEQ ID NO: 174394 - protein, 67 aa, Glycine max
  unsure (1)..(67): unsure at all Xaa locations
  Clone ID: PAT_MRT3847_128497C.1.pep
VGFHGKSTPGFPHNTGPPLFLFILFYFIYFILFILFFIIFLYFFFIIFYYYFXXFFXFYIFLYTERR

SEQ ID NO: 174395 - protein, 152 aa, Glycine max
  Clone ID: PAT_MRT3847_128498C.1.pep
MATFPTLHGLHNPLPRSQFLGQDHPLTHQFPLKQQVHHKTAPTHEVLMPRAAKFNILEMMGGRGLCNGEKGLQQELKRQVVVPQSSISSQEEAPSGEKEEQEGEGGDDDEGSVKVPEDGFEKEMMGLTGGFPGGEKGLKKFIEKKQPSYKSN

SEQ ID NO: 174396 - protein, 367 aa, Glycine max
  Clone ID: PAT_MRT3847_128499C.1.pep
VRFFGSQVEDMLKRSFAEFHAQKKLPEMQQLLKRKLNQPTKAIECLKGEPTIEEYYDLYLEAETYSNQISEAILQSPSAQQFLNTGRVVIVKSESAQDHLLGVVVETPSPTNKMYIVFVIKPDMPSSVDNASSSGNMQNKSGAFDQGYFVMPKSRRVVVDEYSTSVSARKGKGVITIRLPYSGSACGMGYEVREVDSKEFLCICSSKIKIDRVGLLEDISSSVYSKTVQLLMDLKSDGNKYPPALDPVKDLKLRDVKLVATYHKWTRLLEKMSQNQCHGCIKLEEHLKLAKEIKKHKEEVYALQFQMSDEALKQMPDFQGRIDVLKQIGCIDEDLVVQMKGRVACEMNSGEELICTECLFENQMDEL

SEQ ID NO: 174397 - protein, 89 aa, Glycine max
  unsure (1)..(89): unsure at all Xaa locations
  Clone ID: PAT_MRT3847_12849C.1.pep
SPGASPFFFSSPAAAFFFSPAFCVPVCFSGLSSFSVWPPPXLWSPPSLSSPPLCLFRLRXVPPPLPASXFFRRCSRLWPPSVAFLPGCR

SEQ ID NO: 174398 - protein, 91 aa, Glycine max
  Clone ID: PAT_MRT3847_1284C.1.pep
ILSSILSFYFLAYVYLLHLFLSLFSSLSHIPRSIRNPVTVSLRFLSFIYHDHGLSRSHCLHAYVKPQTSRTPIGFWIFRPVCFPRLWIYSQ

SEQ ID NO: 174399 - protein, 40 aa, Glycine max
  Clone ID: PAT_MRT3847_128500C.1.pep
RFPPDNFKHSLTLLSKSFPSFPRANCSLSVYGRVFRPGRN

SEQ ID NO: 174400 - protein, 29 aa, Glycine max
  Clone ID: PAT_MRT3847_128501C.1.pep
TTSKIELENIRIKTRCYPLIHKQVSYPRL

SEQ ID NO: 174401 - protein, 82 aa, Glycine max
  Clone ID: PAT_MRT3847_128502C.1.pep
EYSEIKDRYRKVDPMSPMPDSRVGALIQNFSSLDLKLITELINKHEKFQSDTKSLYRIGECSANNLRVEKTIILQVCDQHRE

SEQ ID NO: 174402 - protein, 39 aa, Glycine max
  Clone ID: PAT_MRT3847_128503C.1.pep
LATKSCWNLPATSPVDALVYNAKTETASVSIRLPSTSMS

SEQ ID NO: 174403 - protein, 85 aa, Glycine max
  Clone ID: PAT_MRT3847_128504C.1.pep
PPLALTIPCLDDVVAHAPPYPQKPVSVAVLPLLLLLLFLCGAGADEDPGSDTVLSCSCLVFFPLNTCCLDLMLAIQIFPVPCQRV

SEQ ID NO: 174404 - protein, 162 aa, Glycine max
  Clone ID: PAT_MRT3847_128505C.1.pep
ECMIDGLSGVMDVRGISKFYDGKSKSFTSLVDAGSTPYIKDIAKSENAYTSRGRNLMAFNHTWEKSQSYLLRSNSGGISKKTTISSSRSTVALAFAINYESSSCCASEDSSLSSNPRSPPPLPPLHPPSTAPSSPMQHNFSSRRFFCLVDIQNCSTATTIKN

SEQ ID NO: 174405 - protein, 133 aa, Glycine max
  unsure (1)..(133): unsure at all Xaa locations
  Clone ID: PAT_MRT3847_128506C.1.pep
SESGLQNDRGLLVESCGRMSYVAHNVNQPQEKDLLEGNFSFDIKSRSRLQKASSTXAQSVSGKTFKYDIIGAGSHSXQDSPEKADQVKPKKTDAXIETXIDPQFNEVHAQMETNLLKLSLDDAETPKGCMLDL

SEQ ID NO: 174406 - protein, 63 aa, Glycine max
  Clone ID: PAT_MRT3847_128507C.1.pep
HLYMLIYIVLTLEHLQRSDDEYTYHQSSKFQNSELNIQQLLPFIDHGFKQNPIFRAPSGSSFS

SEQ ID NO: 174407 - protein, 70 aa, Glycine max
  unsure (1)..(70): unsure at all Xaa locations
  Clone ID: PAT_MRT3847_128508C.1.pep
YQPLYHYPQPVHYPTPSTLHPPANAHHAHXHYQHHHHSAPAPSPAHVAXPSHHNNTATPSPAKPTTHHHH

SEQ ID NO: 174408 - protein, 92 aa, Glycine max
  Clone ID: PAT_MRT3847_128509C.1.pep
EPHSWELIFPIEVCGPNNGFEMGSSDWANQTSWLLSFLIDNPQTVLQVFDISLWESLQNFENCWVITLYAKLFSCSTRYCQIFLENARNPLA

SEQ ID NO: 174409 - protein, 153 aa, Glycine max
  unsure (1)..(153): unsure at all Xaa locations
  Clone ID: PAT_MRT3847_12850C.1.pep
MAPIGLVVLCVSCLSLLPLIACDAEDNVLVINXLRLMRSRCKTSSKSLSXLLYKRPEISGFSCIIHICHDCTGHTXQALLSLDSTXRSLAANETYGSLELRNIKTIETTLETVCPECPACADCADIPALYGRDGLGWLRSPLIPLITGRRDGR

SEQ ID NO: 174410 - protein, 112 aa, Glycine max
  unsure (1)..(112): unsure at all Xaa locations
  Clone ID: PAT_MRT3847_128510C.1.pep
GVKLTTINXMCAFGXNAVNKGSXVFDTIFLSLPXPAWGKQMETYTTPLNIYSSKQILCYFIIDLLCGGIXVNITGNCITLIQTSPISNLLRVAARDIGCLPVKTAMTRNATL

SEQ ID NO: 174411 - protein, 60 aa, Glycine max
  Clone ID: PAT_MRT3847_128511C.1.pep
RCFRSQPKSLYFSSVHGTYHPFSFNDLVQSTCYHSVIMALIELAVGIYSVGFCSSDILSS

SEQ ID NO: 174412 - protein, 65 aa, Glycine max
  unsure (1)..(65): unsure at all Xaa locations
  Clone ID: PAT_MRT3847_128512C.1.pep
VPPLGPWVPFXVGPSLLAGVLVLWLCLCALCSGCSLRPLSFFVVCACLFASSVXXLFAGRPCFAA

SEQ ID NO: 174413 - protein, 451 aa, Glycine max
  Clone ID: PAT_MRT3847_128513C.1.pep
MEIGSPAFLTLEDYSSFFFPDMDPIPNSNVNKRRANNDQFDLNDSAFSHLLNSIMDPNHFQHQSKPIQFDSSPTKRARRDLLVLEDSHLNPASAPQQQRRLWVKDRSKDWWQRCNSPDFPEEEFRRHFRMSKATFDMICQHLDSAVTKKNTMLREAIPVRQRVAVCIWRLATGDPLREVSKRFGLGISTCHKLVLEVCSAIKSVLMPKFLHWPNEAEMKPITEKFESLSGIPNVGGSMYTTHIPIIAPKSNVNAYFNKRHTERNQKTCYSITVQGVVDPKGIFSDVCIGWPGSLSDDQVLEKSALYQRATMGNLKDVWVVGNSGHPLMEGVLVPYTHQNLTWTQHAFNQKVGEIQSIAKDAFARLKGRWSCLQKRTEVKLEDLPVLLGACCVLHNICEMRDEEMKPQWNFDIFDDQMLPQNNNVRSNAAEQARDQIAHYLLHHGRAGTNFF

SEQ ID NO: 174414 - protein, 53 aa, Glycine max
  unsure (1)..(53): unsure at all Xaa locations
  Clone ID: PAT_MRT3847_128514C.1.pep
LCNFDQVFASFIMRIVKTVKPKIEFYYRLVSMGMGCNMLKELXVVSSIPLLDK

SEQ ID NO: 174415 - protein, 71 aa, Glycine max
  unsure (1)..(71): unsure at all Xaa locations
  Clone ID: PAT_MRT3847_128515C.1.pep
AFTTLYLPXNMAYYRLDNERNPLENGRTYYISTDITTFDGMRTVQTGNARCPLTVVQSSNXLDKGIGTLIS

SEQ ID NO: 174416 - protein, 130 aa, Glycine max
  Clone ID: PAT_MRT3847_128516C.1.pep
MKKRGATPAAVRRANHPRKTPPFNREGPTAARGQKRRTTLGTKTTIRLYIKNGAGSPPGKTQRNRPPLGPPFTKGGQKNKNRGGPKRGSPAPPQTGGDTPAKNGGGKIYPPRGGPNRGYSPRGGKNKPFS

SEQ ID NO: 174417 - protein, 100 aa, Glycine max
  Clone ID: PAT_MRT3847_128517C.1.pep
SLVSQKSLSRQPNQGSSSSRNSISYALLDAAKQKSFLKAFDKTGYKSSNNLLIAYKPRRGKYSIFMGEMTIEEIENFISSVLSGDVPFREATRGKPVLEY

SEQ ID NO: 174418 - protein, 93 aa, Glycine max
  Clone ID: PAT_MRT3847_128518C.1.pep
LALGPSGMGGSPGFCDVPHNFFVAVALNKMSFGGVPGKIVPLVCSEFNFPVPADFFRFAGGQSGPDEPFSMGGPLFYLGGEVFFYPFPPYFPG

SEQ ID NO: 174419 - protein, 126 aa, Glycine max
  Clone ID: PAT_MRT3847_128519C.1.pep
DFSLHIYRRILQPFTKARSFYQRHAGLFKKILLGLLCLAYAAYLLAACILNFRRALALFVITCLVIFILACHFLKKFFAKKSIRCLKPLKNTRLRLWLKRVFMGAAVVGLILWLALDTAQRPEQLI

SEQ ID NO: 174420 - protein, 59 aa, Glycine max
  Clone ID: PAT_MRT3847_12851C.1.pep
NTHEKDFLLLMITGHEVRFMHSLNVPLWNLRYWLLCCIIYANGVYVTLFTRILIAIGVP

SEQ ID NO: 174421 - protein, 83 aa, Glycine max
  Clone ID: PAT_MRT3847_128520C.1.pep
SRCCRRIAGQISFGRLHIKKVANIYEMHIIVATCQWRTCPVMQLQLGRSTHIEECLWERYLWLTRIGISYGTMPLFCVACVLS

SEQ ID NO: 174422 - protein, 230 aa, Glycine max
  Clone ID: PAT_MRT3847_128521C.1.pep
MAVTLYDLSSASGLKKLDEYLLPRSYITGYQATKDDLTVYAALPTAPSDEYGNVSRWYKHIDALLRISGVSGEGSGVIVEGSLVAEPVATPPAADTKAAVAEDDDDDDVDLFGEETEEEKKAAEERAAAVKASAKKKESGKSSVLLDVKPWDDETDMKKLEESVRSVQMEGLLWGASKLVPVGYGIKKLQIMLTIVDDLVSVDTLIEEHLTVEPINEYVQSCDIVAFNKI

SEQ ID NO: 174423 - protein, 176 aa, Glycine max
  unsure (1)..(176): unsure at all Xaa locations
  Clone ID: PAT_MRT3847_128522C.1.pep
MAVTLYDLSSASGLKKLDEYLLPRSYITGYQATKDDLTVYAALPTAPSDEYGNVSRWYKHIDALLRISGVSGEGSGVIVEGSLVAEPDTKAAVAEDDDDDDVDLFGEETEEEKKXAXERAAAVKASAKKKESGKSSVLLDVKPWDDETDMKKLEESVRSVQMEGLLWGCIQNLFLL

SEQ ID NO: 174424 - protein, 271 aa, Glycine max
  Clone ID: PAT_MRT3847_128523C.1.pep
MAVTLYDLSSASGLKKLDEYLLSCCLRLRFYHRGINIYIASMAVTLYDLSSSSGLKKLDEYLLPRSYITGYQATKDDLTVYAALPTAPSDEYGNVSRWYKHIDALLRISGVTGEGSGVIVEGSLVAEPVATPPAADTKAAVAEDDDDDDVDLFGEETEEEKKAAEERAAAVKASTKKKESGKSSVLLDVKPWDDETDMKKLEEAVRSVQMEGLLWGASKLVPVGYGIKKLQIMLTIVDDLVSVDTLIEEHLTVEPINEYVQSCDIVAFNKI

SEQ ID NO: 174425 - protein, 45 aa, Glycine max
  Clone ID: PAT_MRT3847_128524C.1.pep
AYVLISEVHEWYLQFFPPELIGMVCCHESKQIYLDRICVSSLINL

SEQ ID NO: 174426 - protein, 57 aa, Glycine max
  unsure (1)..(57): unsure at all Xaa locations
  Clone ID: PAT_MRT3847_128525C.1.pep
MGVSDGGTGVLLGLDGGTTSTVCICMPMIPFSHSQLXSLPILARAVAGCSNHNSVGF

SEQ ID NO: 174427 - protein, 130 aa, Glycine max
  Clone ID: PAT_MRT3847_128526C.1.pep
NPHAVEALQHNLEANSVADRCIILEGDNRITAPKSVADRVCLGLIPSSELSWVTAVRALRREGGILHVHGNTRDSEESQWIDHVSKSIYDIARSEGYTWEVSIEHVERVKWYAPHIRHVVADVRCRQIQI

SEQ ID NO: 174428 - protein, 85 aa, Glycine max
  unsure (1)..(85): unsure at all Xaa locations
  Clone ID: PAT_MRT3847_128527C.1.pep
EPSVYESIRLLSGLRERYXIHLQLSYSDQGLVAAAQPWSQYISARFLTPXNPIDLIDVDGLRVRLQHAQLLXRAREIDKEVRQFW

SEQ ID NO: 174429 - protein, 303 aa, Glycine max
  unsure (1)..(303): unsure at all Xaa locations
  Clone ID: PAT_MRT3847_128528C.1.pep
MEVATAASSFALNKPMLALPSSSRTVTPIRCMNTSTSPVRTSLSTSFVAPYAGICSASSPFSGHKLRPSSLNPASFLGSNAKRGVVTMVIPFQRGSAWEQPPPDLASYLYKNRIVYLGMSLVPSVTELILAEFLYLQYEDDDKPIYLYINSTGTTKGGEKLGYETEAFAIYDVMRYVKPSIFTLCVGNAWGEAALLLAAGAKGNRSALPSSTIMIKQPIARFQGHSRSVNSAXLARREVNNVKTELVKAYAKHMEKTPEQIEGEKYRPPSEAVEYGIIDKVICNDRGTEDRGVVSDLKKARLI

SEQ ID NO: 174430 - protein, 113 aa, Glycine max
  Clone ID: PAT_MRT3847_128529C.1.pep
MQDSISMKIYHPDLMSAIFKGKLDISNVSSSTNAGASDLLIENRYLLMLLTICVVILIRCVIDCIQRRSSYCNGKPFEPSKLRCNKLPEIKIYDCTKNVTMLFRTQTRTVECF

SEQ ID NO: 174431 - protein, 62 aa, Glycine max
  Clone ID: PAT_MRT3847_12852C.1.pep
CMCRPRSETTPYREKWDARRDRAGIKSRGYESARGGAPPFFFFFERDIPWHLYCNPLTLGPL

SEQ ID NO: 174432 - protein, 130 aa, Glycine max
  unsure (1)..(130): unsure at all Xaa locations
  Clone ID: PAT_MRT3847_128530C.1.pep
MHICVKSMTGKTITLKVGSSXDSIDNXVKPECMTGECIPXDQRRLILRRDPLEDGGTVCGCCIHKESSLDLXLRLRGDIIEPCLMVLAHKYNLHMMISRKRYARVHPMAVNCRTNDCRYSNQLRPYMTIK

SEQ ID NO: 174433 - protein, 65 aa, Glycine max
  unsure (1)..(65): unsure at all Xaa locations
  Clone ID: PAT_MRT3847_128531C.1.pep
NSDKDKFRKIWKTFMLWHHLALQEXHNGNAFSLNGVKRSVWGIFQHQICYELXIVKNSSLFCFDD

SEQ ID NO: 174434 - protein, 119 aa, Glycine max
  unsure (1)..(119): unsure at all Xaa locations
  Clone ID: PAT_MRT3847_128532C.1.pep
MXXMLWTDPQTMXXRXXXKRGVGLQFGPDITKRFCEANGLKAIIRSHEVRMEGYEVEHAGHCITVFSAPRYCDSTENKGAFINFGPSYEPEYVKFDAVPHPDIKPMAYANNGMSGMMGM

SEQ ID NO: 174435 - protein, 77 aa, Glycine max
  Clone ID: PAT_MRT3847_128533C.1.pep
ARGETNPVRYAAHHPPPSLTSLRRDPNQYPTAPLWPSITDLDLGFLTKVLRICFMGLNGVRRRRRRQGKKDSKICDG

SEQ ID NO: 174436 - protein, 39 aa, Glycine max
  Clone ID: PAT_MRT3847_128534C.1.pep
HFPQTILTQRITKPHKRSHVTRINKEKGNLEPIRLERLE

SEQ ID NO: 174437 - protein, 49 aa, Glycine max
  Clone ID: PAT_MRT3847_128535C.1.pep
KKQGQPFTIFWTKNKEFYNCLYYKTDFLKKTAPLVHFSTTIFGVRVGPN

SEQ ID NO: 174438 - protein, 46 aa, Glycine max
  Clone ID: PAT_MRT3847_128536C.1.pep
RRMPAYLGLDPVEGTALFLFFYVRLVFHFLLFRWWSLQQSVGGPVK

SEQ ID NO: 174439 - protein, 109 aa, Glycine max
  unsure (1)..(109): unsure at all Xaa locations
  Clone ID: PAT_MRT3847_128537C.1.pep
EVIESPPFGTSQPPLREVVXRATEVLVVFVLLGSGPRVFVSPIKSLSRGIPCISFPFGLAPSGTVFAFSLETVFEVEVNTRLGSGQCRGGFRLKIGREDCRKYSDPPCY

SEQ ID NO: 174440 - protein, 59 aa, Glycine max
  unsure (1)..(59): unsure at all Xaa locations
  Clone ID: PAT_MRT3847_128538C.1.pep
PXFFFFFSFFLCFLLFFWFLSPNFNLCLFKRKKKTLANNSPPETRNSKAQPKSHKRPLF

SEQ ID NO: 174441 - protein, 37 aa, Glycine max
  Clone ID: PAT_MRT3847_128539C.1.pep
IKVIILPLLSELNISDSILKNKVILISKYFEIYLPLY

SEQ ID NO: 174442 - protein, 46 aa, Glycine max
  Clone ID: PAT_MRT3847_12853C.1.pep
LNSLTIIKNHFTNKQTSSILLHSQTFFTTPNTLIINIYPTLHIIKT

SEQ ID NO: 174443 - protein, 157 aa, Glycine max
  unsure (1)..(157): unsure at all Xaa locations
  Clone ID: PAT_MRT3847_128540C.1.pep
IRLELEPNRLERLEYGCEKTTEGSRTYGGNNGGSRWLKEEGSHGSNVSRTVGGNQEANPINCGAIIAEDKKWDEMVIRDANINFLATRTLVHTGALSIAEAEALALLAAINWTMDKGYNNIVFETNCKHVHDLILSTKRNISDLGLIXATCKNKLIN

SEQ ID NO: 174444 - protein, 99 aa, Glycine max
  Clone ID: PAT_MRT3847_128541C.1.pep
WKSSSVCKVLSQNVVSLEILVPGESLQRMSTRIAHVVVSRLSCMSPASCQYFHELGMPFHIPNLCFRYEQVLTSFMLFMSLRHVKIQPVPSSVSGSARR

SEQ ID NO: 174445 - protein, 185 aa, Glycine max
  Clone ID: PAT_MRT3847_128542C.1.pep
MAAIQLNFTLRTSANVKTVHLLGSWDNYNGQLPLSKDSSKTGGWKGTFRFQGSTLKQGQRYWYYYIIDGYHVSHDPARESVTEPTTGRKLNTLDIPSSGATAKTETSRKEARQSSRHNRTSSGVPKGRPLDKSQIVSPKPYKPQESLKVRTEQFAQPTLEQLTAKFAQQQLVESSDDSEDDSDSD

SEQ ID NO: 174446 - protein, 116 aa, Glycine max
  Clone ID: PAT_MRT3847_128543C.1.pep
MIWSLSYTSTPFFFDQLIELISAKFYLPTDDKEKPWIQGLSKAAKAEAKKETKENIMKSRRDRLDPDKPSATTLDLVKDSFGKEKVDDCVDEHGAAAPMTVVSGMKRDDGSVTYEE

SEQ ID NO: 174447 - protein, 60 aa, Glycine max
  Clone ID: PAT_MRT3847_128544C.1.pep
TDAKKSTKIVGTKRKVEIHVRERERLQIRQVSLSCVLINNNNNKMCHIHTHKRSLSLSTI

SEQ ID NO: 174448 - protein, 66 aa, Glycine max
  Clone ID: PAT_MRT3847_128545C.1.pep
GISTFVVCIPWSYLKVQNSSGCTPCLLCYRAPTAGFNLTSYWESQLCMNSKLSIYKMQLTVAHLIL

SEQ ID NO: 174449 - protein, 195 aa, Glycine max
  Clone ID: PAT_MRT3847_128546C.1.pep
MLLSKRQVIGRMSLKCFGLYRSSSSQRQYPTIIEELCHKFSLADLRKSTNDFDQNRVIDIRAFGIKIYKGCLQHNDGSDYAVAVKRFKVKDIQAWEVFKSEIELLCQLRHPNIISLVGFCNDEYEKIIVYEYMSNGSLYERLQGGELSWKKRVEICIGAARGLHYLHAGAKRTIIHRHIKPNNIVLDDNMKPKLT

SEQ ID NO: 174450 - protein, 70 aa, Glycine max
  Clone ID: PAT_MRT3847_128547C.1.pep
ESISTINEACPKPPWCSLQIGNGVNSLLYSSTIHHSLTFFNIYDHTTLYTITKPLTSSSAFISCHVMPTT

SEQ ID NO: 174451 - protein, 57 aa, Glycine max
  Clone ID: PAT_MRT3847_128548C.1.pep
IISSFKAFSRYWGKKKKNLNTRHVYNMTCHFTPHLVKFGLLHRHVISTCTSSSWLVN

SEQ ID NO: 174452 - protein, 102 aa, Glycine max
  unsure (1)..(102): unsure at all Xaa locations
  Clone ID: PAT_MRT3847_128549C.1.pep
ATGRAISLVGAMGMPDNLCLHSALXLTRKIPGAGRGSKVRQYCERMNLLETGQTMEAGXFYMIESAFGRTEAFIINMSGISVRGALCNCADCTAGDRSCCHD

SEQ ID NO: 174453 - protein, 173 aa, Glycine max
  unsure (1)..(173): unsure at all Xaa locations
  Clone ID: PAT_MRT3847_12854C.1.pep
XQXGAXXXSTXXGTAERXPXEGXKQRXQAXXXDKXXEXXXAXXEQEXXRXPXRGTGXTXGFFFPXXXXGXGXXAESPKAAERLPEREPGPRETXAXGXLPXGRAAXXTTPXEXXKTRKKTAQGRTGPKTKKGLSILKXEGPLGLFKGGVPRXFWIAPPKGYXNLQGYELAKKG

SEQ ID NO: 174454 - protein, 62 aa, Glycine max
  Clone ID: PAT_MRT3847_128550C.1.pep
ELPSILPLIIPRTICSIRSPRYQALRTRPPPTPNTKPNYNNYSPYIHPTARKLTKKTNTQTK

SEQ ID NO: 174455 - protein, 146 aa, Glycine max
  Clone ID: PAT_MRT3847_128551C.1.pep
NSGPMSLKKFLQFLQFFYCQSLELFPIQLTSKAFLPTHTSFNKGLPLLSTRFIDSPQTFSSSSSRVLYHTSTCMGLMVVVAFHSRAQRGAHDTTIDVNTKQPTTTQLTTTAGQPTARRYCDNVDMARGMFASRSFEVLSFAASCLV

SEQ ID NO: 174456 - protein, 47 aa, Glycine max
  Clone ID: PAT_MRT3847_128552C.1.pep
IRPPLVLYWERPPFFFFYSKKTHSCPQIGYCIASKKQERCGFMTKVQ

SEQ ID NO: 174457 - protein, 97 aa, Glycine max
  unsure (1)..(97): unsure at all Xaa locations
  Clone ID: PAT_MRT3847_128553C.1.pep
YEEGSVGSGRSYVVGSGEVSFPVYGPVEGVIFSDYGTDLGSGPTVPGDPAGARKKPGSGCGYGFGXRVESPLGPLRLEYAFSDKQDKRFHFGVGHRN

SEQ ID NO: 174458 - protein, 64 aa, Glycine max
  Clone ID: PAT_MRT3847_128554C.1.pep
NLKCIKIKATEATAPWVTRIPTQFLKRHEFKIKKKKKTKNKVSPKKIRGKLKISIQGTRCRAIK

SEQ ID NO: 174459 - protein, 87 aa, Glycine max
  Clone ID: PAT_MRT3847_128555C.1.pep
SHKGTIQWLVLSENEWNHVGCSTSWGPHPIKQIGIHVINQGSNLGDIQFPNPLLSKKDPDFCIPHDDSRKRKSQEWLFFPGDEVFSR

SEQ ID NO: 174460 - protein, 84 aa, Glycine max
  unsure (1)..(84): unsure at all Xaa locations
  Clone ID: PAT_MRT3847_128556C.1.pep
QPSEFTPLYSRAYKLSKEGYLRLQLTPAINSLQYDWNMKLIFSLXTVTKYHXAITLIPRDSYXLFHDPFTGKRYESKVRKMLKV

SEQ ID NO: 174461 - protein, 59 aa, Glycine max
  Clone ID: PAT_MRT3847_128557C.1.pep
LCNFFLGKHINKQANLITTSATINTTGPYVPKSLTTTYSMYISLYYYCISLFNKFPLPK

SEQ ID NO: 174462 - protein, 202 aa, Glycine max
  unsure (1)..(202): unsure at all Xaa locations
  Clone ID: PAT_MRT3847_128558C.1.pep
MSNEYDYLFKLLLIGDSSVGKSCLLLRFADDSYVDSYISTIGVDFKIRTVELEGKXTVKLQIWDTAGQERFRTITSSYYRGAHGIIIVYDVTEMESFNNVKQWLNEIDRYANDTVCKLLVGNKSDLVDNKVVDSLTAKAFADELGIPFLETSAKDSINVEQAFLTMAAEIKKKMGSQTTTGKSAESVQMKGQPIPQKSNCCG

SEQ ID NO: 174463 - protein, 201 aa, Glycine max
  unsure (1)..(201): unsure at all Xaa locations
  Clone ID: PAT_MRT3847_128559C.1.pep
MSNEYDYLFKLLLIGDSSVGKSCLLLRFADDSYVDSYISTIGVDFKIRTVELEGKTVKLQIWDTAGQERFRTITSSYYRGAHGIIIVYDVTEMESFNNVKQWLNEIDRYANDTVCKLLVGNKSDLVDNKVVDSLTAKAFADELGIPFLETSAKDSINVEXAFLTMTAEIKKKMGSQTTTGKSAESVQMKGQPIPQKSNCCG

SEQ ID NO: 174464 - protein, 74 aa, Glycine max
  Clone ID: PAT_MRT3847_12855C.1.pep
ILFGSHLHHSSGISGVNFHLMGDTLPRDKYPQAPVASVSSSINIDGLCKLCSPDVQSIHGHKHGPNEQDDGDRL

SEQ ID NO: 174465 - protein, 56 aa, Glycine max
  Clone ID: PAT_MRT3847_128560C.1.pep
LNMRNSALYRLLVNLERQSECIKDILFVSIWHKSVWVINDPPFQENFLKNVKKHHS

SEQ ID NO: 174466 - protein, 75 aa, Glycine max
  Clone ID: PAT_MRT3847_128561C.1.pep
WPPPLYQPKIILKKLFTYGNMFVQKQKNVKKAHLVAKYLNKAALGNANGDVFTRGPFFHFLIGGKTTLASKFFFS

SEQ ID NO: 174467 - protein, 118 aa, Glycine max
  Clone ID: PAT_MRT3847_128562C.1.pep
KADPSGNFLAKTVYQLLLTEKRGENEDWTFVNLWKLKIPSNAAVFAWRLIRDRLPTKINLRSRQVKLNDPRCLLCNTSDENTAHLFFNCNKTLPLWWESLQWVNIRGVFPKNPKDHFL

SEQ ID NO: 174468 - protein, 88 aa, Glycine max
  Clone ID: PAT_MRT3847_128563C.1.pep
LLQSWMWLPHPSKQMGVPPWEGFDCLVLMYGSEVTGGPGCQSSPLTVRTCACSGTLFLPHAMVPTPHPFVTLMGHPFPESGGKDPAKG

SEQ ID NO: 174469 - protein, 39 aa, Glycine max
  unsure (1)..(39): unsure at all Xaa locations
  Clone ID: PAT_MRT3847_128564C.1.pep
PYSQAITITYEDIENDIIVSKILIXFWGVXITDAILSAN

SEQ ID NO: 174470 - protein, 82 aa, Glycine max
  Clone ID: PAT_MRT3847_128565C.1.pep
HTPLTSDHCTICNYTIADQHFTPQNRFQKGVLVLSQAKVQLDQFVYQLQSKDKHRSAETVNTLIQETENTLFLSLTIDYTTI

SEQ ID NO: 174471 - protein, 157 aa, Glycine max
  Clone ID: PAT_MRT3847_128566C.1.pep
MQLDLESLSEATSGAIGSLVSTTVLYPLDTCKTKYQAEVQAQHQRKYKRISDVLWEAISTRQVLSLYQGLGTKNVQSFISSFIYFYGYSYFRKMYLKKTGNKSIGTTANLIVATAAGVCTIVITQPLHTASSRMQTSEFGKSKGLWKTPSEGHGVKL

SEQ ID NO: 174472 - protein, 57 aa, Glycine max
  Clone ID: PAT_MRT3847_128567C.1.pep
TNHLVLNRLHSFRNQFMYEESLSFNHHTPLLVNIGTCYYYVSVLVLKNLSFSSYTPL

SEQ ID NO: 174473 - protein, 87 aa, Glycine max
  Clone ID: PAT_MRT3847_128568C.1.pep
RKGEIEEAEEILRQSKTLEAQIEDFANQNKYLSLNVSMDEQSVLSNHQSSRKGLGVWELLLKLIMLQPHLWFGQVRIVLNQHWFRKN

SEQ ID NO: 174474 - protein, 112 aa, Glycine max
  Clone ID: PAT_MRT3847_128569C.1.pep
KAKKRGEGSPPPGKGPRSGAAGKGRAGGAKPPPNPLLVPFAGVILLNKEQPVFALARWKIPVSKSEPIIAIRSVRSYVSPPPPHTPFIAQPKSPGGKIGGAITVTPRWAVSP

SEQ ID NO: 174475 - protein, 37 aa, Glycine max
  Clone ID: PAT_MRT3847_12856C.1.pep
RRRHWRRLAWTLVPARLGTGAIGEIGFTDSVVRKENE

SEQ ID NO: 174476 - protein, 83 aa, Glycine max
  Clone ID: PAT_MRT3847_128570C.1.pep
FLAKLCHLSTLNLDLILNACPFNPKFGSQFHILYAYLVFYILHSCSVLDIRILQQTIMASKCINPSASTIKCVSLSPLIKIFI

SEQ ID NO: 174477 - protein, 52 aa, Glycine max
  Clone ID: PAT_MRT3847_128571C.1.pep
SLFFRRLMLYSYACMLNELAKYMCTFNDCAVILNAERIVQFIFSSSIYFSVS

SEQ ID NO: 174478 - protein, 69 aa, Glycine max
  Clone ID: PAT_MRT3847_128572C.1.pep
IVEKVQGFLFIFPEKNFSCSCDFQSHLQNNLPKVKSFYPKASATQLFSFQISRSLTLFPRSFSLPPYFC

SEQ ID NO: 174479 - protein, 80 aa, Glycine max
  unsure (1)..(80): unsure at all Xaa locations
  Clone ID: PAT_MRT3847_128573C.1.pep
AATTAMTTTAXKAVTLVLSYLIFTIRFSDYHGSGPLVIATGIILMTLHDCWLCFSATSTCCTPGTMNLDAATPECQWFAG

SEQ ID NO: 174480 - protein, 65 aa, Glycine max
  Clone ID: PAT_MRT3847_128574C.1.pep
AQDYEVLAILFSEGKASSFYSSSSGYASWQELDRTRIEWAPCTFVSGSHHRRGGTIFRTWSEAIR

SEQ ID NO: 174481 - protein, 42 aa, Glycine max
  Clone ID: PAT_MRT3847_128575C.1.pep
YPNWASELSWRFYQILIFFKGGWENGKPPQSEGLEAKSSQKV

SEQ ID NO: 174482 - protein, 85 aa, Glycine max
  Clone ID: PAT_MRT3847_128576C.1.pep
RSNDINILHRTLRKTMTREQVTCETKKHKLLLDYDLNKVFGTQGPKLGNVPHLTSLGLYKNCRSRNKSRGRTKSKHHIRLDLKDN

SEQ ID NO: 174483 - protein, 180 aa, Glycine max
  unsure (1)..(180): unsure at all Xaa locations
  Clone ID: PAT_MRT3847_128577C.1.pep
MAMARGIVRRMRNTVGAVLLLRSSTTTTHSHSFHFYKDSLSPLESHLCSFSSTFLRSFSHHFPDETTDEGASTDGWEEEDEVEPKIGDGGDGGXVALQNVPWGQRALSIAEEVLMQFSEDIKLFAFKTTPRGYVYVRLDKLTHEYGCPSMEELECYNQKYRXRVDEVGALGEIPDDMALE

SEQ ID NO: 174484 - protein, 34 aa, Glycine max
  Clone ID: PAT_MRT3847_128578C.1.pep
IHMGLLPSNLNIINIIIMSNALALIPPTEPNYYR

SEQ ID NO: 174485 - protein, 79 aa, Glycine max
  Clone ID: PAT_MRT3847_128579C.1.pep
VQQTHSQLHYTTPFNLLQNCLAVLLLELYLMETELHEDLQHPWLSSNDTHSDDARDHTDAHQNHDVLREEVGQILQAIA

SEQ ID NO: 174486 - protein, 77 aa, Glycine max
  Clone ID: PAT_MRT3847_12857C.1.pep
FIVCRFLFDVIKKKRTSSPSYPREGKKREGALDGMIRFHSIISYFKSKQLKLTSLHSILLNSFPFHQSKNSLTSKFG

SEQ ID NO: 174487 - protein, 368 aa, Glycine max
  Clone ID: PAT_MRT3847_128580C.1.pep
VGRELKGLESQTSLFTLRQIKAATNNFDKSLKIGEGGFGPVYKGVLSDGTVVAVKQLSARSRQGSREFVNEIGLISALQHPCLVKLYGCCMEEDQLLLIYEYMENNSLAHALFAKNDDSEKCQLRLDWQTRHRICVGIAKGLAYLHEESKLKIVHRDIKANNVLLDKDLNPKISDFGLAKLNDEDKTHLSTRIAGTYGYIAPEYAMHGYLTDKADVYSFGIVALEIVSGMSNTISQPTEECFSLIDRVHLLKENGNLMEIVDKRLGEHFNKTEAMMMINVALLCTKVSLALRPTMSLVVSMLEGRTRIQEVVLDKREVLDDDKFEIMQQYYQHRGENNIIESQNLSDPTGESSKLFADTSSSGEQIES

SEQ ID NO: 174488 - protein, 420 aa, Glycine max
  unsure (1)..(420): unsure at all Xaa locations
  Clone ID: PAT_MRT3847_128581C.1.pep
VGKAVIKNFTVVVTSNALEIRLYWAGKGTTSIPFRSVYGPLISAISVDPNFIPPSESGTSSISIIRVVVVVVVAGAIIILIFGILWWKRFLGWERSVGRELKGLESQTSLFTLRQIKAATNNFDKSLKIGEGGFGPVYKGVLSDGTVVAVKQLSARSRQGSREFVNEIGLISALQHPCLVKLYGCCMEEDQLLLIYEYMENNSLAHALFAKNDDSEKCQLRLDWQTRHRICVGIAKGLAYLHEESKLKIVHRDIKANNVLLDKDLNPKISDFGLAKLNDGDKTHLSTRIAGTYGXMEEDQLLLIYEYMENNSLAHALFAINDDSENCHLRCQPPAGRRFCVGIAHLLEENGNLMEIVDKRLGEHFNKTEAMMMINVALLCTKVSLALRPTMSLVVSMLEGRTHIQEVVLDKREVLDDVKF

SEQ ID NO: 174489 - protein, 62 aa, Glycine max
  unsure (1)..(62): unsure at all Xaa locations
  Clone ID: PAT_MRT3847_128582C.1.pep
VLEILGIYELAEYKVCVIDNLCPETVXEDIGMVPSTKSTGRVQYHXAIEKMLNDLSFINKCE

SEQ ID NO: 174490 - protein, 93 aa, Glycine max
  Clone ID: PAT_MRT3847_128583C.1.pep
YYNHSSTTILHLHRPIVTYFIPSLHTKNFHLINTPLPFSQILLKNKNPFQYAKTITIIFLKTHLPYIKSLSNCKSNYSYPQIKLKHSSRKLFF

SEQ ID NO: 174491 - protein, 91 aa, Glycine max
  unsure (1)..(91): unsure at all Xaa locations
  Clone ID: PAT_MRT3847_128584C.1.pep
VXXXXXRXXXRAKXAEXDGKVXEGSQQATVGARGQAIPSPGXPXCXTLTRFATKRXSSIMXRKTXWSXCXETLVXDSVXXLGSCXFXLYAR

SEQ ID NO: 174492 - protein, 373 aa, Glycine max
  Clone ID: PAT_MRT3847_128585C.1.pep
YILMVKSGDSVTCSRLAKYLASGDIMRKESLRHSSLPCDPLEEDRFDKETYRVASTEAFANLSSSISLIHLYCSRLPADGYFKPTLRWDKETGTLYLPKSCPLQPIRVEGDKKILKNIACLEACKQLHKIGALSDNLVPDIVMEEAEVEELGNEPYDENQPTFVPFGLVNSVSNNSQTVYHCYFMEFNNKFSYDVSVQDIFLLMRIELDPEIGCMQFDMGFDRGSLSVNFRYKGTINLSPDQVLLCKKFQVTILRILIDHDMNKLTAGLDRCYLEDDLEIDYLLLPAMGKGKYTAINWLAVNSVNPSEVSCKYHEPHIRTKSGLVCSCKLQNALVCTSHPIGKISFYIATGTMELDGNSPMELTGGLLRTRVL

SEQ ID NO: 174493 - protein, 55 aa, Glycine max
  Clone ID: PAT_MRT3847_128586C.1.pep
ISFYSRLFIELKGTYGIVHLLVDNILKGGLTSFWLLCRFRLTVYLFYSIPGFPLI

SEQ ID NO: 174494 - protein, 63 aa, Glycine max
  Clone ID: PAT_MRT3847_128587C.1.pep
VGLELNRIGFCCLRARVFRNSKHMLYNISSFIWSGIKSWKIGNGDRSLLIGTFLTFFSKSFLV

SEQ ID NO: 174495 - protein, 110 aa, Glycine max
  Clone ID: PAT_MRT3847_128588C.1.pep
GFPGRSRVAHASDFKWRKRWFEWETFLVTTINHMLANVRIQKQGRDSWWWLDDNTGIYSVKYGYRVLHNLLMGSQPTEAFSMIWKLKVPKKVICLVWREYSWIDCQLRTI

SEQ ID NO: 174496 - protein, 431 aa, Glycine max
  Clone ID: PAT_MRT3847_128589C.1.pep
MGSELIFRGHEAQPVDDAYSPKPHKPWLTVTRPIHYMLREQRLLFVLLGVIIATLFFTFVPSSSPSASSSSVSYESLPISYFERESKIPAYHHRVAAAVHSVGKVPLGIKRKGLRIVVTGGAGFVGSHLVDRLIARGDSVIVVDNFFTGRKENVMHHFGNPRFELIRHDVVEPLLLEVDQIYHLACPASPVHYKFNPVKTIKTNVVGTLNMLGLAKRVGARFLLTSTSEVYGDPLQHPQKETYWGNVNPIGVRSCYDEGKRTAETLTMDYHRGAGVEVRIARIFNTYGPRMCLDDGRVVSNFVAQALRKEPLTVYGDGKQTRSFQYVSDLVEGLIRLMEGEHVGPFNLGNPGEFTMLELAKVVQETIDPDARIEYRPNTEDDPHKRKPDISRAKDQLGWEPKVDLRKGLPLMVSDFRQRIFGDQKEKATVA

SEQ ID NO: 174497 - protein, 37 aa, Glycine max
  Clone ID: PAT_MRT3847_12858C.1.pep
WPTLPAMSSTQATPSSSSLCDNIGPANTSPLHNTSSR

SEQ ID NO: 174498 - protein, 62 aa, Glycine max
  Clone ID: PAT_MRT3847_128590C.1.pep
KIFLEKLYFPKNNTMLQRKSYPLQPLLHFQEFRNHSYHRIKSFSGERIIKHKHRTTKEEERV

SEQ ID NO: 174499 - protein, 97 aa, Glycine max
  Clone ID: PAT_MRT3847_128591C.1.pep
TLHQIRDILGPFNLGNPGEFTMLELAKVVQETIDPDARIEYRPNTEDDPHKRKPDISRAKDQLGWEPKVDLRKGLPLMVSDFRQRIFGDQKEKATVA

SEQ ID NO: 174500 - protein, 132 aa, Glycine max
  unsure (1)..(132): unsure at all Xaa locations
  Clone ID: PAT_MRT3847_128592C.1.pep
PTRPVGTLNMLGLAKRVGARFLLTSTSEVYGDPLQHPQKETYWGNVNPIGVRSCYDEGKRTAETXPLDYHRGAGVEVRIARIFNTYGPRMCLDDGRVVSNFVAQALRKEPLTVYGDGKQTRSFQYVSDLVSK

SEQ ID NO: 174501 - protein, 39 aa, Glycine max
  Clone ID: PAT_MRT3847_128593C.1.pep
HSNIFWSSLLPWWRGSLLLLLYFSTFKIVTNSTLFIYYY

SEQ ID NO: 174502 - protein, 148 aa, Glycine max
  unsure (1)..(148): unsure at all Xaa locations
  Clone ID: PAT_MRT3847_128594C.1.pep
MEKDQRDGDKMSRDKSEEEKDFISCPIVNILDSECVVWCAPWKGSLVVHVLRKTVGFKMLEYKLQQGWAQYGKIRIVDMPDYYYLVQFTSEKDYRHALFEGSWMVADHDVVVXRWRPAFLESIKTTKKIIVWVCLSRLPMELYHETFL

SEQ ID NO: 174503 - protein, 50 aa, Glycine max
  Clone ID: PAT_MRT3847_128595C.1.pep
NTKAVFGTILHLGKILNKIRVPHNIKTLLKIRTAYHRHLKNNTNNTDSAL

SEQ ID NO: 174504 - protein, 64 aa, Glycine max
  Clone ID: PAT_MRT3847_128596C.1.pep
GIIFVKLRLVVSIKVSFVSIKIVSAREVRMDSLEGAPFFSRWQFQYPKILEQPSQDIQSRLHEK

SEQ ID NO: 174505 - protein, 56 aa, Glycine max
  Clone ID: PAT_MRT3847_128597C.1.pep
LCTAQKRFLYRSLRLESPTRIRTLSHPSGQVVALITTLSPDGRTHRTLSTDYLDDP

SEQ ID NO: 174506 - protein, 173 aa, Glycine max
  Clone ID: PAT_MRT3847_128598C.1.pep
LGNSGSSAFVGSDDMLSLWKRKSSDSSPVKSSRDENNAIVVRSRNSSPTTVSNYGYTDGELVKLEKDEKVSIVREDDIGASLEDEEAAAVQEQVMQIKAQEEEFETFNLKIVHRKNRTGFEEDKNFHVVLNSVLAGRYHVTEYLGSAAFSKAIQAHDLHTGMDVCVKIIKNNK

SEQ ID NO: 174507 - protein, 86 aa, Glycine max
  unsure (1)..(86): unsure at all Xaa locations
  Clone ID: PAT_MRT3847_128599C.1.pep
LPGEDSPHLAGDLRRRHTEKTRPKNGAAKKRPRKRNTXTGQDHPEGAPRKGRXQGQPHHTTEGKEGRKQEDSHRKRSSAKHKQTGN

SEQ ID NO: 174508 - protein, 99 aa, Glycine max
  unsure (1)..(99): unsure at all Xaa locations
  Clone ID: PAT_MRT3847_12859C.1.pep
VRVKVPERCQQVRRVFVLMWSSILTNSHVDCSPHRSSVTCSRLVFLYAGASFLVKTYCMVSVVKQGEVGWIYSLSQNRKEVAVFXTVGCPPGSVVTLRG

SEQ ID NO: 174509 - protein, 77 aa, Glycine max
  unsure (1)..(77): unsure at all Xaa locations
  Clone ID: PAT_MRT3847_1285C.1.pep
QNRVLTIRENARLQGFPDCYKLCGPVKEXWYIQVGNAVAVPVALALGYTFGLACQGLSDDKPLTTLPFKYPSCLCLS

SEQ ID NO: 174510 - protein, 276 aa, Glycine max
  Clone ID: PAT_MRT3847_128600C.1.pep
MEPETNCIELKLISCKDISAFNFFQKLTLYALVFIESEDPKTDLTAEQRQMQRTLTDRDPDGDGSNPEWNHHARFDLWWLSHSSRDSDGSDLFLRFEFRHDGVVLGDKLVGECRVPLADLIRDAADGAARFVSYEVRSGEGRPNGIFHFSYSVKGIGAHRSQILEGRISGYPVLPPEDCAPNQVQQYPYPTCQIENTCCYPTVALPVGSPVYSAAVPPPVFTPSDGEYHCYYPPPPPPPPVVYPYPPPPPPVLHAYSPYGPEAHPYPPGPYCKRRW

SEQ ID NO: 174511 - protein, 58 aa, Glycine max
  Clone ID: PAT_MRT3847_128601C.1.pep
QINTTNGVSRGHHSLCNFSSTPFFVNPCQHQRKCNKNTPRKQPPSPSSILHMRGNTLL

SEQ ID NO: 174512 - protein, 53 aa, Glycine max
  unsure (1)..(53): unsure at all Xaa locations
  Clone ID: PAT_MRT3847_128602C.1.pep
DYNLRESTFKMQTDLTLRCPQRCAXCTHKECLPYDHLCHQHRSAACLTSLLCD

SEQ ID NO: 174513 - protein, 96 aa, Glycine max
  Clone ID: PAT_MRT3847_128603C.1.pep
GFINIFFSSLNLEVFSFINFSSKYIFTSFSSWLPWQFNFTWLCMMQIPPRMATSFSANSPNIAANKVLLYQLINKRIIFINNFYHHARYLSYSCKE

SEQ ID NO: 174514 - protein, 106 aa, Glycine max
  Clone ID: PAT_MRT3847_128604C.1.pep
TPSLVWPFFSFGILKKNIFKVISLSFFGPCSAPQFKARGNKRAIFFYGVWVGPSITHGIFFGFVKGRFVFIFFSLLCVEFSVPLFTLWVRVFFPIFLSLELVFRFF

SEQ ID NO: 174515 - protein, 40 aa, Glycine max
  Clone ID: PAT_MRT3847_128605C.1.pep
FRDIKSNSNVIDEAYKFIGWGDFLDFLITQIPDSNPIICA

SEQ ID NO: 174516 - protein, 47 aa, Glycine max
  unsure (1)..(47): unsure at all Xaa locations
  Clone ID: PAT_MRT3847_128606C.1.pep
WDRGLRDCRGEERPRALSSISSEQKCFYSPPFDTQPYHNIPXSASSR

SEQ ID NO: 174517 - protein, 247 aa, Glycine max
  unsure (1)..(247): unsure at all Xaa locations
  Clone ID: PAT_MRT3847_128607C.1.pep
LIHKSLQRSQLVMDAATGVGVCVFLLISYMAFLIKRATAGSARKPPAASGGWPLIGHLHLLGGSGQPLYETLGTLADMYGPIFSIRIGVHPAVVVSSWELAKECFTTLDVTVSSRPKFTAAKILTYNYASFAFAPYGDFWRDMHKITVSELLSTRQAEMLRGIRDSEVKSSLRELQRAWAEKRGVSSGDLLVEMKQWFGEMNLNVILRMISGKRYCVSVDXQAKRVRGVLRDFFHLMGSLVIGDAIP

SEQ ID NO: 174518 - protein, 56 aa, Glycine max
  Clone ID: PAT_MRT3847_128608C.1.pep
HASSRSKFNIYHYPFDYTPRGSQSSISFLTPKVFAQSLILKYCQKLKINYEQLVKK

SEQ ID NO: 174519 - protein, 117 aa, Glycine max
  unsure (1)..(117): unsure at all Xaa locations
  Clone ID: PAT_MRT3847_128609C.1.pep
SQDDRGVQSVRRGGPQYHKDILLYERAGGKGLEHRRTRTTKEIXKKKGQKPGQKVLDEERGTGGGDMYMAENFEEEDVGIDRYINIISVAIERAIGLRCCAEFECADCTNRTRAVKT

SEQ ID NO: 174520 - protein, 128 aa, Glycine max
  Clone ID: PAT_MRT3847_12860C.1.pep
GESPGGGRCHPFLPFVFKEILVFLVAHPPKVAPGVEPPLSPQTPPFLGEVPLPFFFKPFPWGWGWGFSPGFGAFLGPCFFGQPGGKLPLGFFPNLPPLFWVWLDLRKPNFFFFFKGPRFWGVFYSRFG

SEQ ID NO: 174521 - protein, 30 aa, Glycine max
  Clone ID: PAT_MRT3847_128610C.1.pep
ARTQHICQMITNSSLQLRDFFVGTRNLFKF

SEQ ID NO: 174522 - protein, 44 aa, Glycine max
  Clone ID: PAT_MRT3847_128611C.1.pep
ANLALKSRPSETLKKIGSSSSSQSRPWKNFVFKGNKKQYCVIWI

SEQ ID NO: 174523 - protein, 41 aa, Glycine max
  Clone ID: PAT_MRT3847_128612C.1.pep
MMQYTIIQELRGISTQLANLLQRIKVLIKIKVPDQLIIKIY

SEQ ID NO: 174524 - protein, 53 aa, Glycine max
  Clone ID: PAT_MRT3847_128613C.1.pep
VISASLKKALALTLTMSEYDYRDMRHSVSTVGAVHGAPLSLHRSGDGPSVRSS

SEQ ID NO: 174525 - protein, 177 aa, Glycine max
  Clone ID: PAT_MRT3847_128614C.1.pep
KCKGLSHFTVAKAGALVSYKLGTGLVVARRSDGSWSAPSAIFSLGLGWGAQIGGELMDFIVVLRDMKAVKTFCSHMHFSLGAGCSAAAGPVGRVLEADIRAGDRGSGMCYTYSCSKGAFVGVSLEGNIVATRMDANLRFYGDPYLTTSDILLGMVDRPKAAQPMYASLQELYSCLRF

SEQ ID NO: 174526 - protein, 64 aa, Glycine max
  Clone ID: PAT_MRT3847_128615C.1.pep
YISQFNTVAFEKRKSEQVVPTCILIQDVYDGITTSVRNPRGKSGLGYIYQGHMNMIGTWVLWGV

SEQ ID NO: 174527 - protein, 366 aa, Glycine max
  unsure (1)..(366): unsure at all Xaa locations
  Clone ID: PAT_MRT3847_128616C.1.pep
FGYSNETFIDSGKNGDXFLDSSVYTPSAPPLCLPNGIDYSSYKEVLEAEPPEWLPDSSTTVCMQCSAPFTAITRGRHHCRFCGGIFCRTCTKGRCLMPVGFRERNPQRVCDACYDRLDPLQGVLINTISNAVQGAKHDVTDWTCARGWINLPIGLSMEHEIYKASNTLRNYCQVAKSNPEKSIPLTVLKSAKGLAILTVAKAGALVSYKLGTGLVVARRSDGSWSAPSAIFSLGLGWGAQIGGELMDFIVVLRDMKAVKTFCSRMHFSLGAGCSAAAGPVGRVLEADIRAGDRGSGMCYTYSCSKGAFVGVSLEGNIVATRMDANLCFYGDPYLTTSDILLGMVDRPKAAQPLYGSLQELYSCLRF

SEQ ID NO: 174528 - protein, 76 aa, Glycine max
  Clone ID: PAT_MRT3847_128617C.1.pep
LHWSGGTDWANLISTISESTFVPPSNHDHFFVEERKLYRSVHLLQGQEKPLFKISAVKRLPHCMNPEAIRENILLS

SEQ ID NO: 174529 - protein, 294 aa, Glycine max
  Clone ID: PAT_MRT3847_128618C.1.pep
KRSGRDHPLCLVADDSVFLPLLVAQLSEASHVMSLLPGLKERGLQYLQAAAHANGLSRNCIEVLEKVKKQLTMHDIHQKKVDLLIAEPFYVGHDGMLPWQNLRFWKDRTTLNDILSEDALIIPSKGILRACAISLPDLWKSRCCLSNVEGFDHSVVNATLGACSNLPELEEGPCLPFFVWQCGEFDVLSETFDVMEFDFSKQICLCQGKSQVKFTKTGVCHGFVLWIDWVMDLQNSVVISTGPDRRYWKQGVKLLGTPRTVGPQRSRNVQACSAVLEACFNPLQGELKIILDFL

SEQ ID NO: 174530 - protein, 117 aa, Glycine max
  unsure (1)..(117): unsure at all Xaa locations
  Clone ID: PAT_MRT3847_128619C.1.pep
FLAGSGDFKTDLSPALLIDSXRESKNLNVVDFFLXGKNASIQLLELSAAIIFKWKFIQXKRLIGKYIEEIILDTWKYVLWAVDTLIAQNMGADETLIVLVNSYINMFVLNMRSTDTV

SEQ ID NO: 174531 - protein, 159 aa, Glycine max
  Clone ID: PAT_MRT3847_12861C.1.pep
MDEADRRLLRQCRLRLVEELQVDQLWDVLLSRELFRPHMIEDIQRAGSGSRRDQARQLIIDLETRGSQALPLFISCLEDTSQDMLASFLRTNRQAAKLSKPTLENLTPVVLRPEIRKPEVLRPETPRPVDIGSGGFGDVGASESLRGNAYLAYILSMEP

SEQ ID NO: 174532 - protein, 595 aa, Glycine max
  unsure (1)..(595): unsure at all Xaa locations
  Clone ID: PAT_MRT3847_128620C.1.pep
MAIATLKFACKPNFLLRPAPFQCIRKLVPKSLPTVEVEECRGSNPEQGKGTSEKLILENNNSKVRAWKKLNSKELGLRNSMIAVPTKKVLNVLKKKGHDVYLVGGCVRDLILKQTPKDFDIITSADLKEVRKTFSLCEIVGKRFPICHVHMDGTIVDVSSFNTARCKSSMHSHXDDIEAPNDCDKEDYLRWRNCLRRDFTINGFCTSSCHFQNRILFLFFSSSSGCRCVFYDMTSPLYIQCSYLCCXPNPCCSRKMFDPYARIVYDYVGGMEDIVRAKVRTVVPAATSFREDCARILRAIRIAARLGFSISRETAQSVKNLSYSVLRLDRSXLLMEINYMLAYGSGEASLRLLWRFGLLDILLPFQAAYFVCGGFRRRDKRTNLLLATILQSSFFSNVDKLLAPNRPCHSSLWVVILALHKALSDKPRDSSVVAAFSLALHNGGNLSEAISIARRINKTHDARFPELLDPSGLDEEDLEAEILDLAESVKGSLLQMKDRHFVSGAMADYPQAPHSDLVLIPIPMYLRALNFFDCVRVSASKNFLSKQGRQIDYESLARGDLLEVRHVFARIVFDTVYPLHPGKDQLKKSTGFSRG

SEQ ID NO: 174533 - protein, 115 aa, Glycine max
  unsure (1)..(115): unsure at all Xaa locations
  Clone ID: PAT_MRT3847_128621C.1.pep
LQYPFALPPLLFLRLLPFLFWSRRFGSFWHFPSLIVFLPIFHCPFLCYVVFASVRGFLFFLFALSFFPLVFLTFVCCPFSVILCAGSPGFAFIKTPFFLPFXCLXSPAWVNTNLP

SEQ ID NO: 174534 - protein, 70 aa, Glycine max
  Clone ID: PAT_MRT3847_128622C.1.pep
IRNECPSNFPSAQTIQGRSNPRKTGTKQIRVPYWMTSKFSCQPRIQYRWDFGTGLWLSRTKLWHLGEQFP

SEQ ID NO: 174535 - protein, 43 aa, Glycine max
  Clone ID: PAT_MRT3847_128623C.1.pep
QEEDLEINTHFLFYFLFEIPIQMKRQQAASKCKREVKRLKSKT

SEQ ID NO: 174536 - protein, 544 aa, Glycine max
  unsure (1)..(544): unsure at all Xaa locations
  Clone ID: PAT_MRT3847_128624C.1.pep
MEEDFDIPGGEEMDLGEDKVGEEREIGSRGLKKKLLKEGQGWETPEVGDEVQVHYTGTLLDGTKFDSSRDRDSPFSFTLGQGQVIKGWDEGIKTMKKGENAIFTIPPELAYGESGSPPTIPPNATLQFDVELLSWTSVKDICKDGGIFKKIVTEGDKWENPKDPDEVLVKYEVHLENGKLVAKSDGVEFTVREGHYCPALSKAVKTMKKGEKVLLTVKPQYGFGEKGKPEQGDEGAVPPNATLQITLELVSWKTVSEVTDDKKVIKKILKXGEGYERPNEGAIVKVKLIGKLQDGAAFLKKGHDEEEKLFEFKTDEEQVVDGLDRAVLTMKKGEVALLTIAPEYAFGSSESQQELAVVPPNSTVYFEVELVSFEKEKESWDLNTEEKLEAAGKKKEEGNVLFKAGKHARASKRYEKAVKYIEYDSSFGEEEKKQAKTLKVACNLNNAACKLKLKDYKEAEKLCTKVLDLESTNVKALYRRAQAYMQLTDLDLAELDIKKALEIDPNNRDVKLEYRTLKEKVKANNRKEAQFYGNMINKMTKIGS

SEQ ID NO: 174537 - protein, 85 aa, Glycine max
  unsure (1)..(85): unsure at all Xaa locations
  Clone ID: PAT_MRT3847_128625C.1.pep
MMTCDIDWPSSYAHFCVISILHSFISVTCSGLIMSHINDVHIFGHGLQGASKLXGCMPHYQLLSSTSASISGLLLVAISCLLFMV

SEQ ID NO: 174538 - protein, 233 aa, Glycine max
  Clone ID: PAT_MRT3847_128626C.1.pep
DRSLVSTYSCCQGPGVNSQHQIAIMIEEVLKKTSEMFPLPTATASSLPSVAPVPTVIPGSEPVYEVAGDAGQKTLWVVFVLMLIASAGFTVMSWKVPLNKRLYHVITTIITLTAALSYFAMATGHGVSLNKIVEREQHDHVPDTYTTTYRQVYWARYVDWSITTPLLLLDLGLLAGMSGGHMIMMIVADLIMVLTGLFAAFGTEDTPQKWGWYTIACIAFIFIYWHLGLNGGA

SEQ ID NO: 174539 - protein, 102 aa, Glycine max
  Clone ID: PAT_MRT3847_128627C.1.pep
ASVSTNNNHRIQNGVAGKNRNGEIESSRQRDALDSGIKHSNIDSKIKAKKFNLELNRTAEIVEVSRKESKKQPGGDKDQSEKSAEQRSEYFDREWRMAIRTV

SEQ ID NO: 174540 - protein, 53 aa, Glycine max
  Clone ID: PAT_MRT3847_128628C.1.pep
YNSRKYFLSFITSKSFFKIFLHKKSKTQHTFGIIMSPPSMYNVMICLISLCLK

SEQ ID NO: 174541 - protein, 121 aa, Glycine max
  Clone ID: PAT_MRT3847_128629C.1.pep
GWGDSAEKYNCESRCWEPLPRMNKKRKFCSGCFMDNKFYVLGGQDEHGKDLTCGEFFDGKANSWNLIPDMWKDIVSQSPPLLAVVNNELYTLDASSNELKVYVKGTNTWKTLGVVPCIAYS

SEQ ID NO: 174542 - protein, 100 aa, Glycine max
  unsure (1)..(100): unsure at all Xaa locations
  Clone ID: PAT_MRT3847_12862C.1.pep
RGNLPDGPVFDSSFERHNPIEFELGPGPVIKGWAPGLLGMCLGEQRKLKIPSNLGYGEQGSPPPIPGGAPLIFPPAPPGVNDLSLGEGKGXYAPPPNQNQ

SEQ ID NO: 174543 - protein, 77 aa, Glycine max
  Clone ID: PAT_MRT3847_128630C.1.pep
NSNLKDKNPYDLSNYFICYRTPLEKEEHGIHIPGEFFGKYISLKDNAESLSNKPRRLIRNILREFLASTTGKKPRAN

SEQ ID NO: 174544 - protein, 75 aa, Glycine max
  Clone ID: PAT_MRT3847_128631C.1.pep
PLIYWIISGGLCYRLFLGHDCKLIHLGIYPPKIILTPLHLPVPEFPTHQKFACFFGLPTHAQKYRFSPQFLHGPP

SEQ ID NO: 174545 - protein, 85 aa, Glycine max
  Clone ID: PAT_MRT3847_128632C.1.pep
MAMRRFYNEIKGKRVSEVPEHVKPMLSLNYIKKAIQRGFDNYHAKYIETSSPDPIFHVCYGGMIFSYLVALPHERRHLQHAQQHH

SEQ ID NO: 174546 - protein, 51 aa, Glycine max
  Clone ID: PAT_MRT3847_128633C.1.pep
FIIFLRKKYHKLLHNLHNVMRKKFQNTYIFINYNYSLHIFLFFKCRIFFHC

SEQ ID NO: 174547 - protein, 65 aa, Glycine max
  unsure (1)..(65): unsure at all Xaa locations
  Clone ID: PAT_MRT3847_128634C.1.pep
SXVVXXXXXVCXKEHXSCVCXXCWHTXHPNSTXNIKXLRXSXFLSNQVAHQFHWXXSXAVQNPXL

SEQ ID NO: 174548 - protein, 71 aa, Glycine max
  Clone ID: PAT_MRT3847_128635C.1.pep
RTQYNCLLTSLAFLLNLLASEFMCPDITCIQNEQIGPFRPIFVVSGYPFALFHFKVSLQFNGYPNVKNFDP

SEQ ID NO: 174549 - protein, 364 aa, Glycine max
  Clone ID: PAT_MRT3847_128636C.1.pep
MTTRIAPGVGANLLGQHAAERNQDATAYVGNLDPQICEELLWELFVQAGPVVNVYVPKDRVTNQHQGYGFVEFRSEEDADYAIKVLNMIKLYGKPIRVNKASQDKKSLDVGANLFIGNLDPDVDEKLLYDTFSAFGVIVTNPKIMRDPETGNSRGFGFISYDSFEASDSAIEAMNGQYLCNRQITVSYAYKKDTKGERHGTPAERVLAASNPTTQKSRPHTLFASGPPTLPSAPQANGVAPVPPRPFVNGVAPAAIPTLRPPPPQAAAFQPMPVPGQPAWHQQQPGQTMLSPAMPPPQIQQFRPPHPGMQQMPPPPQAPPRPLPPPSVMASQPPPVWRPPPPQQQGGRPLPYPQSAMLPPPPPQ

SEQ ID NO: 174550 - protein, 225 aa, Glycine max
  unsure (1)..(225): unsure at all Xaa locations
  Clone ID: PAT_MRT3847_128637C.1.pep
MTTRIAPGVGANLLGQHAAERNQDATVYVGNLDPQISEELLWELFVQAGPVVNVYVPKDRVTNEHQGYGFVEFRSEEDADCAIKVLNMIKLYGKPIRVNKASQDKNSLDVGANLFIGNLDPDVDEKLLYDTFSAFGVIVTNPKIMRDPDTGNSRGFGFISYDSFEASDXLEAMNAQYLCNRQITVSYAYXKTLRERHGTPAEFAAYPQPNSGLIHECHQIIPGVV

SEQ ID NO: 174551 - protein, 562 aa, Glycine max
  Clone ID: PAT_MRT3847_128638C.1.pep
VVNVVLSQGSASWTRGLRRLVLSRATGLGHVGLEMLIRACPMLEGVDVSHCWGYGDREAAALSCAARLRELNMDKGLGVTDIGLAKIAVGCGKLERLSLKWCLEISDLGIDLLCKKCLDLKFLDVSYLKVASESLRSIASLLKLEVFIMVGCSLVDDVGLRFLEKGCPLLKAIDVPRCDCVSSSGLISVISGHGGLEQLDAGYCLSELSAPLVKCLENLKQLRIIRIDGVRVSDFILQTIGTNCKSLVELGLSKCVGVTNKGIMQLVSGCGNLKILDLTCCQFISDTAISTIADSCPDLVCLKLESCDMVTENCLYQLGLNCSLLKELDLTDCSGIDDIALRYLSRCSELVRLKLGLCTNISDIGLAHIACNCPKMTELDLYRCVRIGDDGLAALTSGCKGLTKLNLSYCNRITDRGMEYISHLGELSDLELRGLSNITSIGIKAVAISCKRLADLDLKHCEKIDDSGFWALAFYSQNLRQINMSYCIVSDMVLCMLMGNLKRLQDAKLVCLSKVSVKGLEVALRACCGRIKKVKLQRSLRFSLSSEMLETMHARGCKIRWD

SEQ ID NO: 174552 - protein, 154 aa, Glycine max
  Clone ID: PAT_MRT3847_128639C.1.pep
YCNRITDRGMEYISHLGELSDLELRGLSNITSIGIKEVAISCKRLADLDLKHCEKIDDSGFWALAFYSQNLRQINMSYCIVSDMVLCMLMGNLKRLQDAKLVYLCKVSVKGLEVALRACCGRIKKVKLQRSLLFSLSSEMLETMHARGCKIRWD

SEQ ID NO: 174553 - protein, 188 aa, Glycine max
  Clone ID: PAT_MRT3847_12863C.1.pep
MDMTSNTSYQDMEKLYTDFSDQWESENEKARRRMKKKAASALPSKQESEVYSGSYISLSNASHAQKKNKVEKKEEGGGNNNKRSLTIQKGRKKESSSSSSSFMSMCMKEHRYCMVEQKLRELEMLDMNNVEYVLDIEEVLHYYSRLTCPAYLEIVDKFFLEMYSELFGPSMRHASPRSVNSRLKMRYQ

SEQ ID NO: 174554 - protein, 68 aa, Glycine max
  Clone ID: PAT_MRT3847_128640C.1.pep
IRPEFSDCTVITVAHRIPTVMDCTKVLAISDGKLVEYDEPMNLIKREGSLFGKLVKEYWSHFQSAESH

SEQ ID NO: 174555 - protein, 84 aa, Glycine max
  Clone ID: PAT_MRT3847_128641C.1.pep
RYPCTNRSRKTGAHQRARKFCAYVSANTSESRKNGGDHLKPPTDPYKQPHRETNETPKYKSPPGIETPKHREKTPKKKENWPKG

SEQ ID NO: 174556 - protein, 60 aa, Glycine max
  Clone ID: PAT_MRT3847_128642C.1.pep
HADERKSQEAGPQNGKPKHPLQEQKKLAIKNYSIAYYFLGDRKSLYRQATYLLNTDFVHY

SEQ ID NO: 174557 - protein, 69 aa, Glycine max
  Clone ID: PAT_MRT3847_128643C.1.pep
AVATYSRSMTMPQERHRDSKYKMLRTYSCPCPHPIHVHPKLPDYDHIAAKFTALKKERMENMDRSKDQN

SEQ ID NO: 174558 - protein, 266 aa, Glycine max
  Clone ID: PAT_MRT3847_128644C.1.pep
MISESLLLVFLIVFISASLLKLLFVRENKPKAHLKNPPSPPAIPIIGHLHLLKPLIHHSFRDLSLRYGPLLSLRIGSVKFIVASTPSLAQEFLKTNELTYSSRKMNMAINMVTYHNATFAFAPYDTYWKFMKKLSTTELLGNKTLGHFLPIRTREVHDIIQFLFHKSKAQESVNLTEALLSLSNNVISQMMLSIKSSGTDSQAEQARTLVREVTQIFGEFNVSDFLGFCKNLDLQGFRKRALDIHKRYDALLEKIISDREELRRKS

SEQ ID NO: 174559 - protein, 62 aa, Glycine max
  unsure (1)..(62): unsure at all Xaa locations
  Clone ID: PAT_MRT3847_128645C.1.pep
CQYSRAQEHKLGDCYYCSYNIICLIHMHHGERXSSRRNTSMRNNVYRTAKRVTYWLSLMDKT

SEQ ID NO: 174560 - protein, 86 aa, Glycine max
  unsure (1)..(86): unsure at all Xaa locations
  Clone ID: PAT_MRT3847_128646C.1.pep
VMRLDGGINGGIIFFPFCEYVXXGFSCIRFVMGFRYLRRGCCNVESFSRYVCVGIILVWWWSGSVLLIMRCAVVRKSAKLLGLRGR

SEQ ID NO: 174561 - protein, 220 aa, Glycine max
  unsure (1)..(220): unsure at all Xaa locations
  Clone ID: PAT_MRT3847_128647C.1.pep
MVVAQKVKEAEITEQDSLLLTRNLLRIAIFNISYIRGLFPEKYFNDKSVPALEMKIKKLMPVDAESRRLIDWMEKGVYDALQKKYLKTLLFCVCEAVDGPMIEEYAFSFSYSNSDNQEVSMNINRTGSKKNRGTFKYNSTTEITPQQMRSSACKMIRTLVQLTRTLEKMPEERTILMKLLYYDDVTPADYEPXFFXGCTDEEAYHXWEENPLKMEVGNVN

SEQ ID NO: 174562 - protein, 56 aa, Glycine max
  Clone ID: PAT_MRT3847_128648C.1.pep
FLGSGSRRIGRVADDGCSGGLGVTRNSRAGRVALQRTFPAGVAISYCYWLLSDDLL

SEQ ID NO: 174563 - protein, 512 aa, Glycine max
  Clone ID: PAT_MRT3847_128649C.1.pep
MYDQNSSKEVQLETTLPSPNRQAKFNLELEKLRIELRHAQGLHAVAQSEKIEASRKLNELSKRRSEETMKTKEIIAKEEKAKDLAKLEREKYQDASREAAYLKECAEREAAERKEMELKAILAAKEKEKLEDALSGSTPQYRKFTWDEIILATSSFSEDLKIGMGAYGIVYKCNLYHTTVAVKVLTLNTNVNSKRKQFQQELEILSRIRHPNLLLLLGACPDHGCLVYEYMENGNLEDRLLRKNNTSPIPWFERFRIAWEVASALAFLHSSKPEPIIHRDLKPANILLDRNLVSKIGDIGLSTVLHSDNLSTMYKDTAPVGTLSYIDPEYQRTGLISPKSDIYAFGMVILQLLTAKPAIALAHKVETAIDSGNLTDILDPEAGAWPYQETLDLALLGLSCAELRRRDRPDLQDHVLPTLERLKEVVDRAQCSASIVTIKSKPPNHFICPILQDVMDDPCVAADGYTYDRKAIEKWLEENHKSPMTNMALPHKHLIPNYTLLSAILEWKSRES

SEQ ID NO: 174564 - protein, 438 aa, Glycine max
  Clone ID: PAT_MRT3847_12864C.1.pep
MPTFTAIAFDRLIEPGASKPAYKSAPVPMPVPKKIERRTSEPTTVRKKPRPRPQLKPALYATPEVTPLPDAPSSFPPSPYIINHKRRGPRLLKSYSEANVQAKQENLDNENANVKSNDGVITSLDGDLQVNSTNTEPVKEEQVNGIHDTNLSSSGNNGGDLGEGHRESESSGILNGSSHLDKVVALNLEREGESEDFFDPHDSMSLKSCTDGEDNTGTDQALKFSAAGGEFFDAWEELSSDGGTQNSHRDIEAELREIRLSLLMEIEKRKQVEESLNSMQSHWERLGQRLSHIGIVLPSDLTAEGGQLSSDPMEDVCQQLYITRFISNTIGRGIARAEAEIEMEAQLESKNFEIARLLERLHCYETMNREMSQRNQEAVEMARRERQRRSRRQRWIWGSITTAIAVGTAAIAWSYLPVGRGSTSAVHDQVPEHDDAAN

SEQ ID NO: 174565 - protein, 43 aa, Glycine max
  Clone ID: PAT_MRT3847_128650C.1.pep
YFHHYLFITLQFFIFFIFYFLFSILKFDSYLNHLLFHYTSFFA

SEQ ID NO: 174566 - protein, 62 aa, Glycine max
  Clone ID: PAT_MRT3847_128651C.1.pep
TKSGKENYSLSLWTAQRVIFYPLRNRTQRSRNSLKNSCNQVTISFATGYKVRQPVIAVNHNY

SEQ ID NO: 174567 - protein, 66 aa, Glycine max
  Clone ID: PAT_MRT3847_128652C.1.pep
RELQTRYSFFLCKGVLRLLCLSFTHDYYLGYLIRFILIIIIIITISCILCSRCMHIWPRQYYVFRL

SEQ ID NO: 174568 - protein, 48 aa, Glycine max
  Clone ID: PAT_MRT3847_128653C.1.pep
VLEIRERETLNYCSMGTNTELCFSRGCMEGLINFNLIFQTSWHRDEQY

SEQ ID NO: 174569 - protein, 38 aa, Glycine max
  Clone ID: PAT_MRT3847_128654C.1.pep
LVSDQTVIRCRIRSLSNKYIKLIIVDTQPCVVISPPMS

SEQ ID NO: 174570 - protein, 143 aa, Glycine max
  Clone ID: PAT_MRT3847_128655C.1.pep
TSFKPHRRGNRTKTRKPKFVSLRLQLSDPKKKMKTTQPKPKPKPKPKPKAQQQEQQQQQPQLNLFPLHPDHHDMHEEQNVALLFSSDGGATLNGLLEEETTTTEEGSMSVLTCPAEDTGNWLVRKAMRRMESEEGSEKRWVCY

SEQ ID NO: 174571 - protein, 270 aa, Glycine max
  Clone ID: PAT_MRT3847_128656C.1.pep
MTESCIRSVVEAIHSSPFQAVLHLAGGASQVVGSLLSVPGASNTVLEVVVPYSKMSLIQLLGKIPSQFCGQQTAEDMALLAYNRALKLSKPGSPAVGVGFTGSLASSRPKLGEHRFYMSTRTADQLWISSVTLTKGLRTREEEDRVSSHLLIKAIGNACKVPGASVLLLSESDVSDECETQFNEDQQLEQLINGQICFKIYPFENEISAERKIIMPGSFNPLHDGHLKLMDVATRICGDGHPCFEISAVNADKPPLSVSQIKDRIKQLEK

SEQ ID NO: 174572 - protein, 44 aa, Glycine max
  Clone ID: PAT_MRT3847_128657C.1.pep
TIGPPVKINLHYVTKRKRKTAFKIKLYKPDLYYWKAEPLGKLKS

SEQ ID NO: 174573 - protein, 495 aa, Glycine max
  unsure (1)..(495): unsure at all Xaa locations
  Clone ID: PAT_MRT3847_128658C.1.pep
KSPSIDPKRRLSRSPGGSRSPHAPLWRSLSRSPNRRSIKRSPVRGRKGRSVSRSPVSTHNHGSISRSPVRSRDHRSGSASSVKSLSQGRRRSLPRAPSRRSISRSPVKSHGHRILSRSPVRSRGHRSVSASPVGSLSRSHRSSPRASSQRSISRSPVRTQNHRSVSRSPVRSCDHRIVSASPVRSLSRSCQRSSPREPSCRSISRSPVRTCSDKSVSRSPMGSHGNRNGSASPVRSLYLSHRRSSPRAPSGRSISRSPVRVSRKSISRNPVRSSARSLSRSSGRVPLRSISRSSVRAPSRVNRRSYSRSRSPVCRARTPRGRSLSRSVSPDVSPKRIRRGRGFNERYSYARRYRTPSQSPPMRSYRYSGYSGRWLRDRYSSYVRRSPRRNRSPLPCRRTPPRFRSRRSRTPFISRSPRYXARQYSRSRSLVCSRSPVDTYRPHVERSRSSSQSRSSSRSRAESQSPPKASRRSSSGSLDGKKGPVSYKDGSPDSS

SEQ ID NO: 174574 - protein, 87 aa, Glycine max
  Clone ID: PAT_MRT3847_128659C.1.pep
FPEQRVSKEKGDFFTREWDTCGQGVVASPVGDFFFPMAQNFRGGLFFFFFFIFLRGPNLVLVPFGNPPPPLSNRGWGKSFRFSKNGN

SEQ ID NO: 174575 - protein, 40 aa, Glycine max
  Clone ID: PAT_MRT3847_12865C.1.pep
FIEEDNVYELHDTGHMYVDQQIHLCTPLSAVLTAVRTRVR

SEQ ID NO: 174576 - protein, 72 aa, Glycine max
  Clone ID: PAT_MRT3847_128660C.1.pep
KYMVTSSSCSVSSLSVVSAWIFLLELEDAIEEFKITTRFSRNAYHHYQNPTIRSILRRDQNITTIPPPSVVS

SEQ ID NO: 174577 - protein, 93 aa, Glycine max
  Clone ID: PAT_MRT3847_128661C.1.pep
VVLGPGGRRVTVLCLLFFYLWYPFVWPYPPISQVFIFVFLLYLLYYASFYCILFNFQLTPLGNYCIVFIWVMLMHSPERLNLLIVGIFSFRLL

SEQ ID NO: 174578 - protein, 87 aa, Glycine max
  Clone ID: PAT_MRT3847_128662C.1.pep
YLSKKSLIANVEIDSSNLVLSTSPPLNNTVLINNYSQKPFVCFDMWSNCKKNKRRMREKNFLICLFCVFLKKKKNTYKACHLGKGNS

SEQ ID NO: 174579 - protein, 55 aa, Glycine max
  Clone ID: PAT_MRT3847_128663C.1.pep
VVNPSLKKKFSSSMREASSEALILRVTCLRSTSGLSIRSNPVPQCLVVNSHSIPK

SEQ ID NO: 174580 - protein, 193 aa, Glycine max
  Clone ID: PAT_MRT3847_128664C.1.pep
PNRDVSIPEVYLPSGKLGPPNMGQHPNNRTILAFFAGGAHGKIRKKLLKRWKNKDKEVQVHEYLPKGQDYTKLMGLSKFCLCPSGHEVASPRVVEAIYAGCVPVIICDNYSLPFIDVLNWRKFSMEIAVERMPEIKTILQSVSKDKYLELYSNVRRVRRHFVINRPAKPFDLIHMILHSLWLRRLNFKLTASH

SEQ ID NO: 174581 - protein, 56 aa, Glycine max
  Clone ID: PAT_MRT3847_128665C.1.pep
DYWKLSWYHFSSSVTNKGLGLPKGIRMILSSMNKKNSKLETSVPKRRRRNPARLIG

SEQ ID NO: 174582 - protein, 60 aa, Glycine max
  Clone ID: PAT_MRT3847_128666C.1.pep
PMHCSQLFVRYDVHGIVIALSGQDRACVIPAFCVDPYGCRLVIYTRSRHGFHIAQRVIYA

SEQ ID NO: 174583 - protein, 143 aa, Glycine max
  Clone ID: PAT_MRT3847_128667C.1.pep
MSPSLKIHPFLTHPSPLNLSLSYYLFLLSSLIGLFLLLPQHLFFLFITVVLDPNLWNHPLLKKPVHHLLPQSSILLRSTLTCPSPSTKYCEEIKQSGVQATKQIFMALINSYAASGKMEKAKQVVLDPIIPNKSLDEIKSVLV

SEQ ID NO: 174584 - protein, 313 aa, Glycine max
  unsure (1)..(313): unsure at all Xaa locations
  Clone ID: PAT_MRT3847_128668C.1.pep
SHEGQATRVALEDNQPSVSADDRSYSSGHYAKNKLKNETMVRESNASNPGSHTTLAQSAAIDSQAQPQPVSNSLGGTVMGVIRGSGRGVVKADTYSGSTSVASSMPSLSTANVDAQTVATPFRTDVSALGSYTQSVIVGSGRRRFSEMPHSASTHKEXPQTTYRDRAAERRSLYGSSSSVGNDLADVEIGDSNRDFASRKGDPMPFPPGVGGGRIVGDANLDTFEVITAEKAIDENNVGNRMLRNMGWQEGLGLGKDGSGMIEPVLAQATENRAGLGSQQKKLDPSLEVQAGDSYKMLIHKKALARFRGMSES

SEQ ID NO: 174585 - protein, 760 aa, Glycine max
  unsure (1)..(760): unsure at all Xaa locations
  Clone ID: PAT_MRT3847_128669C.1.pep
RHSYDSDYERGSRRDSNWRQRESRDRERDKRGHSRERDLSPHRRRERSRSHSRSRSRSHSHSHSRSQSRGHDDHPRSRSPRGRSHGRSYKADSYSDSRYDKSERRRDRDDKRQREHYSVAPSATVVVKGLSQKTTEEDLYQILAEWGPLRHVRVIKERNSGVSRGFAFIDFPSMGAAQGMMDKLGDDGLVVDGRKLFFEYSSKPTGGPGPDGAMKSGHNYKSMMVPSDWMCTICGYINFARRTSCYQCNEPRTDDAPAADISLSNSAAIGKKCCIARCQVYLQQMLMHKKLLLPLEQMYLSWVHIHNLXLLEVVEEGLEKCVILFELTWNDVKELNAPVAPRGTIHEKNGLNLRVAYAKSILGPGSGTSGTSQSSSLAAAAIEAATFAQQYDSVGWAPKEYNPDAKQSTGPEQTGAEVGAPQSGFVWDEASGYYYDAASGFYYDGNTGLYYDGNNGIWYSYDHQTQQYIPCTDQNQNKASNESEPSKVSDGSGSKKVISAPATAVAPVEKPASLADAVQAAATAALAAEKKEKEKSKEIKLASKSSILANKKKMNNVLTMWKQRSHEGQATRVALEDNQPSVSADDRSYSSGHSAKNKLKNETMVRESNASNPGSHTTLAQGAAIDSRAQPRPVSNSLGGTVMGVIRGSGRGVVKSDTYSGSTSVASSMPSLPSANADAQTFATPFRTDVSALGSYTPSATVGSGRRRFSEMPQSASTHKEQPQTTYRDRAAERRSLYGSSSSVGNDLADLEIGDSSKTT

SEQ ID NO: 174586 - protein, 59 aa, Glycine max
  unsure (1)..(59): unsure at all Xaa locations
  Clone ID: PAT_MRT3847_128670C.1.pep
KWVFPIGVCGLNKGFLMXSSEWAPLTSGHSSFVRVFPKGGKVFDIILGLSFVWVAPGDV

SEQ ID NO: 174587 - protein, 91 aa, Glycine max
  Clone ID: PAT_MRT3847_128671C.1.pep
FHLAAKECYWCQATKPKHIAIATLISLSLSLPHLIPVQFSIPTRLFYWQREEDGVVIRNWRTVEWRREVTFHDANALASGEYPFKLGERTE

SEQ ID NO: 174588 - protein, 83 aa, Glycine max
  Clone ID: PAT_MRT3847_128672C.1.pep
SWELLIRTPMVPSLQVEMIMCNIIQHKASVIGVIPLILQIYCVLIAFISNIGLEIFVLTNFFGTKTFTIILHAWGCIFFLIMI

SEQ ID NO: 174589 - protein, 86 aa, Glycine max
  Clone ID: PAT_MRT3847_128673C.1.pep
IGFLFLFTRMAKFLTCRQKFFKTKFFLMEMAIRQASYDFLPLLWTVGPKWTASIYILEGYGDLLSSNWPWLTGSSCNIGGQFFTKP

SEQ ID NO: 174590 - protein, 49 aa, Glycine max
  Clone ID: PAT_MRT3847_128674C.1.pep
NTHPTRNGLISLLSSLHIFTISLPPLNPRPNCQPLIQSMSLNHLLSVSH

SEQ ID NO: 174591 - protein, 41 aa, Glycine max
  Clone ID: PAT_MRT3847_128675C.1.pep
ICTQFCTVSIIASMNFDYLFSVIHWPCQSIPRRICCCQVCK

SEQ ID NO: 174592 - protein, 70 aa, Glycine max
  Clone ID: PAT_MRT3847_128676C.1.pep
LMLIPYPWAGIHGCPLPCEHIAIIALCPWLCRELLNSLMPPVLTSTPPVFTCHNYFPHNLINHICSSTTN

SEQ ID NO: 174593 - protein, 85 aa, Glycine max
  Clone ID: PAT_MRT3847_128677C.1.pep
PTLLSCDGSECVFTLSCSGSRSHSLSRWFTLALWFRVCSHSLSHGGSRSHSHGGALSRSSLLLTLVERRTLLYLAVSRAYPKVNR

SEQ ID NO: 174594 - protein, 58 aa, Glycine max
  Clone ID: PAT_MRT3847_128678C.1.pep
LHMANVGHATNAKQVCGHSLTCLRYLAFYGGSVPHAPPPPKDRRSVIHVMIGKPLLGT

SEQ ID NO: 174595 - protein, 48 aa, Glycine max
  Clone ID: PAT_MRT3847_128679C.1.pep
QKVYVSVYMQVYFPMVNVCMGLARLVVSKNKNIKCLLLKIYKHMWLHI

SEQ ID NO: 174596 - protein, 95 aa, Glycine max
  Clone ID: PAT_MRT3847_12867C.1.pep
SYYSINQIKPKFIENLKKKMNNSKWGPYEFYSDNDSHVSGRKLSMVTIHDGDDAAGDGVLCTIMLLSVLFFFSCSVYRCTFRGTCHVPVNLHLYV

SEQ ID NO: 174597 - protein, 187 aa, Glycine max
  unsure (1)..(187): unsure at all Xaa locations
  Clone ID: PAT_MRT3847_128680C.1.pep
GNEKVHINIVGLGHVDSGKSTTTGHLIYTLGGFDXRVIDRIDKEAVAMNKRSFRSAWVLYTLKADRERGITIDIALWKSYTTKYYCTAIDAPGRPDFIENMITGTSPADCAXLIIDSTTDGLEAGIYIDGPTREHAHLAIILCVMHMILCVDMMGATPLISLKACMIESCKEMSLYYTEGNTNQTRI

SEQ ID NO: 174598 - protein, 96 aa, Glycine max
  unsure (1)..(96): unsure at all Xaa locations
  Clone ID: PAT_MRT3847_128681C.1.pep
RSVFIAKNVLSLPSQYLLTCGTWYWGDRVHCIYETSIXLSSTSREFVPVCQTNLRHEAIKYVXEGAKSIQIYHVSMRAFKEAANKVCTIKNQSSGY

SEQ ID NO: 174599 - protein, 63 aa, Glycine max
  Clone ID: PAT_MRT3847_128682C.1.pep
NIWKLRNPLPNVKEFGTKSYNGSKKFQVRGKTNHNPGPPKEEDRVTPPTNKTLEPLPAVARSR

SEQ ID NO: 174600 - protein, 85 aa, Glycine max
  Clone ID: PAT_MRT3847_128683C.1.pep
NPGVIKNFAPVSNFTFFPVRVAPLIRFLFAPFYKVLPCISEFPPNQPITFGGGRGSSPLSSKQRLFSTLLKEPKAQMKTRVYQTF

SEQ ID NO: 174601 - protein, 24 aa, Glycine max
  unsure (1)..(24): unsure at all Xaa locations
  Clone ID: PAT_MRT3847_128684C.1.pep
GVRLRXYEXESFRGQKLDSLMRDF

SEQ ID NO: 174602 - protein, 37 aa, Glycine max
  Clone ID: PAT_MRT3847_128685C.1.pep
LYGPPRIASFNAEALESIFRRFTISCFLGRCRCPDAW

SEQ ID NO: 174603 - protein, 188 aa, Glycine max
  Clone ID: PAT_MRT3847_128686C.1.pep
VAISSMKCGLLKISQESAIIGDVSYHEFKGIVIDPDERESIARNLGPFNKVLFLRNHGVLTCGESIEEALHLMQNVVLACETQVKISSIGLDNIYQMTKESVDQVRSVVKSSVAKIHGTGKIDENEANKAKTPEDDGKEKLRKWKVWDLEFEAQMRMLDNAGFRTGYIYRQPLLRADQQRPKYDVEIP

SEQ ID NO: 174604 - protein, 60 aa, Glycine max
  Clone ID: PAT_MRT3847_128687C.1.pep
SGHAFLAKNGLLHLLAGASNGERHNFLVTITTWFNCNAHMWSVLLVERGPGLGLECHHPP

SEQ ID NO: 174605 - protein, 131 aa, Glycine max
  unsure (1)..(131): unsure at all Xaa locations
  Clone ID: PAT_MRT3847_128688C.1.pep
MEEESQITKGKYAADISSIKEAHARIKSLVHKTPLLSSSSLNAMSGRKLYFKCECLQKGXIGAFKFRGACNAVFSLNDEDAXKGVVTHQQWKTMAEALAFGCKTTXGSPFVYLLFPKKMPTLQKFKKCKRR

SEQ ID NO: 174606 - protein, 103 aa, Glycine max
  unsure (1)..(103): unsure at all Xaa locations
  Clone ID: PAT_MRT3847_128689C.1.pep
MPMIIVHSDIFALHHGLSGPGXMRPIGATKHLTPYLPLHRVIDTGDFSCPDSSEPLGTIDAAPCCSXTQXPTSDTYIAMMGSXKDSHDASKIAILNASYMSRP

SEQ ID NO: 174607 - protein, 40 aa, Glycine max
  Clone ID: PAT_MRT3847_12868C.1.pep
RLERITYRHSPHSSCIYVHNHMPHFAISKFSSFSLSFPQN

SEQ ID NO: 174608 - protein, 40 aa, Glycine max
  Clone ID: PAT_MRT3847_128690C.1.pep
LGGSFNLTGTSSTFTHIFIHHYSSNRKFFFKTTKNISYFP

SEQ ID NO: 174609 - protein, 50 aa, Glycine max
  Clone ID: PAT_MRT3847_128691C.1.pep
IFFFLRNNPTTFGPGVFGLEKKNLGRLAQIIGPRLDEAFPPGKMPKFYNP

SEQ ID NO: 174610 - protein, 114 aa, Glycine max
  unsure (1)..(114): unsure at all Xaa locations
  Clone ID: PAT_MRT3847_128692C.1.pep
RLSDPKKNKGGVFKXXARKYKRKRSNTQIPGXIYDGRYKFWTKHEKNLALTEEEKREVNRNKGNPADDPAKRAHEXEKHVAHESPKDQIPAGDKQNSTKGNKTAKIKNLRQSGV

SEQ ID NO: 174611 - protein, 46 aa, Glycine max
  Clone ID: PAT_MRT3847_128693C.1.pep
GSWLSAPTHQTRECHIVYEISDEREKRSHEQGLTLEPLGSIYTSQE

SEQ ID NO: 174612 - protein, 79 aa, Glycine max
  Clone ID: PAT_MRT3847_128694C.1.pep
DATKFKDLQWVLCSSINEITCIRNHRIQSSFIEREVEWREVGRAQTGREQRRGQCNEEVHGWGISSNSYWAKTERGKKE

SEQ ID NO: 174613 - protein, 111 aa, Glycine max
  unsure (1)..(111): unsure at all Xaa locations
  Clone ID: PAT_MRT3847_128695C.1.pep
MFLASHNITITDGFDKTSATLQFRKLADCDFLKRNFKQMSNVLWVAPEDKASLWSQLHYVSCNNLEMQEAYIVYFVNVLXELYLPSSEEXRPFRRIALSRYVWLLKSFFCL

SEQ ID NO: 174614 - protein, 83 aa, Glycine max
  unsure (1)..(83): unsure at all Xaa locations
  Clone ID: PAT_MRT3847_128696C.1.pep
EDPKVGRRTTAWCDRILSYGMGMRLLRYGRTELRFSDHRPVTAXYMAEVEVFSPRKLQKALTFTDAEIENEEVMATLGTLYEF

SEQ ID NO: 174615 - protein, 109 aa, Glycine max
  Clone ID: PAT_MRT3847_128697C.1.pep
PSINFYKHAQSFPLKTVIKFELRTLCKLIQTLTASPILMSSIYPIYRQALHLIHHILYKNHTTIFSKRFCKNKIIMKMKIPIRSCNSYHCCSFKYNKYFRVHTVALKLP

SEQ ID NO: 174616 - protein, 73 aa, Glycine max
  Clone ID: PAT_MRT3847_128698C.1.pep
IRLSAHSCQHCATGVHLVTVLVHFKSVDYSMGLGLHVISGESGEPYHGSRVHEWFLPVFNLEFVKVLIHSLNF

SEQ ID NO: 174617 - protein, 81 aa, Glycine max
  Clone ID: PAT_MRT3847_128699C.1.pep
RPPSLGGGGGGGGGGKNQTRNRVMPGERTVKDGIKSFHNNPLHHQPHIPSEYERSGRQYRLLWVKPKYPRPIVKLKTIAIT

SEQ ID NO: 174618 - protein, 69 aa, Glycine max
  Clone ID: PAT_MRT3847_12869C.1.pep
ASLGAWPVSWYMVVDVCSAMREVVVVYVCRWYNLHRYFTLCLCCCSGLFFSFYLSFSAVYLNIFSKFNL

SEQ ID NO: 174619 - protein, 54 aa, Glycine max
  Clone ID: PAT_MRT3847_1286C.1.pep
SGLTVRSLTTHKTTNNREKKHPGIPPASDVVVVVYASALSDCSQIVILIKCERM

SEQ ID NO: 174620 - protein, 90 aa, Glycine max
  Clone ID: PAT_MRT3847_128700C.1.pep
SSHVPMKQNKQFWLAQRSKAILLGSLLYLHLFHPIQLGHTSCNCSTRVPGQSKKIQSTVPSLIVKSHNYRVVQTTFVHNLWFVEIKKQLG

SEQ ID NO: 174621 - protein, 85 aa, Glycine max
  Clone ID: PAT_MRT3847_128701C.1.pep
ERKIIRLEWRRQACATGTLLSHFLIALPIFFNSSTKTPSSSSRTQTSIDCAGSIAQYQTAPFRVSLVLHFFPLRFLNSNFVQLVS

SEQ ID NO: 174622 - protein, 46 aa, Glycine max
  Clone ID: PAT_MRT3847_128702C.1.pep
ITPGRWGMGLIPKGIYYLTGNFCAYHQDSKGECSSFASVMQTLRAN

SEQ ID NO: 174623 - protein, 56 aa, Glycine max
  Clone ID: PAT_MRT3847_128703C.1.pep
EIYFIHAILMIFNKFRFHMYFSFISLFLCIYYFFLEKDISEAVSQELMVFYLFKLN

SEQ ID NO: 174624 - protein, 71 aa, Glycine max
  Clone ID: PAT_MRT3847_128704C.1.pep
LSCTTFLELSSLHVMSSSHFLMGRTGRMFRFNTNLVNSSQCHFCTVENTLARRLPFNQSTGRRLITMVLNL

SEQ ID NO: 174625 - protein, 107 aa, Glycine max
  unsure (1)..(107): unsure at all Xaa locations
  Clone ID: PAT_MRT3847_128705C.1.pep
LPSPARFVHWITYSKRHTFDVSSIQHWAVQTPXGGKLVLRTFNEIASGPNFPLXGNRIQGIPRFNPAQYKRCWLPSRRRSVIPAYEGVLSPGVVTERIIRPFRVFAP

SEQ ID NO: 174626 - protein, 71 aa, Glycine max
  Clone ID: PAT_MRT3847_128706C.1.pep
GYWINFVNENCEKEVIRSSSNNCSLAKFISEIKEVLKLGKPVPNSKFAAKFKPTITPVNSSSASGYDYSSK

SEQ ID NO: 174627 - protein, 61 aa, Glycine max
  unsure (1)..(61): unsure at all Xaa locations
  Clone ID: PAT_MRT3847_128707C.1.pep
HASAYCYXLDEYPKVYEECRLKCQNCPMGFHAMVVRSPPKDGSFGSFCRWGYFTCGFFLGF

SEQ ID NO: 174628 - protein, 95 aa, Glycine max
  Clone ID: PAT_MRT3847_128708C.1.pep
PASYSHYVHNHRQDASVYRQHANHHHANYHSRHSHHANICNDVPHMHHAYRLFCHKVYYGSSGATSEEIKTLVAMNISRIRNTLVLIFQNFVCER

SEQ ID NO: 174629 - protein, 44 aa, Glycine max
  Clone ID: PAT_MRT3847_128709C.1.pep
RLREDDRRATFYHSTTMPSSGIDSSTKSTPRCFFKHLMHYKMLV

SEQ ID NO: 174630 - protein, 70 aa, Glycine max
  Clone ID: PAT_MRT3847_12870C.1.pep
KMVLDKPLRNLNPDVPFGPGLSSTVGDVSFRSGLKPWQKLKPSIEILCNNQVNESTLSCLCGRITVYPFC

SEQ ID NO: 174631 - protein, 59 aa, Glycine max
  unsure (1)..(59): unsure at all Xaa locations
  Clone ID: PAT_MRT3847_128710C.1.pep
GHSSKQEETGCSKDKDQYLKNFXCSKLKINKYKIGPNYQEYCKVIKLRLYIYINQFFKI

SEQ ID NO: 174632 - protein, 39 aa, Glycine max
  Clone ID: PAT_MRT3847_128711C.1.pep
ELRRLRHWIFSNLYLLLLYKLFHIAFNSISTQANKRNHI

SEQ ID NO: 174633 - protein, 45 aa, Glycine max
  Clone ID: PAT_MRT3847_128712C.1.pep
KNNVGHERGMGPEKKINYKWEYRGHKRGPYMSEKFLKKIDFKMFF

SEQ ID NO: 174634 - protein, 113 aa, Glycine max
  Clone ID: PAT_MRT3847_128713C.1.pep
TRKGESREGKKKGGGKPLPPVKGYTTQKGNFWGGWPTRGSETEDNSLHKTKKLGKGPKKGKKKILDFPQTKKSGEKPARGDAAQQKKICVSSQKKKMGEKTPAVRGEAQQKKH

SEQ ID NO: 174635 - protein, 61 aa, Glycine max
  Clone ID: PAT_MRT3847_128714C.1.pep
AVNFALVALRAVVHGQCHNWWHHYGIYIDAPESCKLSETSWLIHNTVTIRSVRTRLASTLL

SEQ ID NO: 174636 - protein, 50 aa, Glycine max
  Clone ID: PAT_MRT3847_128715C.1.pep
YIQQNHVTNIVGGSIGWRRYLDHLISSLCHDKDISSMELLLLQLLDSSCS

SEQ ID NO: 174637 - protein, 140 aa, Glycine max
  Clone ID: PAT_MRT3847_128716C.1.pep
IEKKLWEKDQKKIMSCWKPPQSVAAAVSHSIQNQHNNINREKKSRERDPKKVLWRFSIVVCGRLLFPIICLCLSILVTHRCHHPFFMLLYFLHFSLRAIPLLHQRQPWSLLHHLRCVLSNLRPLMDFLLHFFDEEVQGAF

SEQ ID NO: 174638 - protein, 160 aa, Glycine max
  unsure (1)..(160): unsure at all Xaa locations
  Clone ID: PAT_MRT3847_128717C.1.pep
FVKYHERPLGSPYYQRGTRQQQKNERSNILSGFYPEFLKEAXFGVIIAHSXTLPSENDIEDTLSMATTKPSLRVTTPVLMKPQQEEDDGDXEXQTPCVETYKRCQLQSXTNITGLDETICSIILIHNITXNSSTDIYNTKAGSITTATNLEFPSFWTLKL

SEQ ID NO: 174639 - protein, 71 aa, Glycine max
  Clone ID: PAT_MRT3847_128718C.1.pep
KKKKGIMVKWGKEKKPGVFNFLNGKLKGGGIIPFQTMGNLEPFNFGPFFWGGTPHLGPYFFYGFKRTFYLF

SEQ ID NO: 174640 - protein, 87 aa, Glycine max
  Clone ID: PAT_MRT3847_128719C.1.pep
CIIQAKTCASSLLPFSCTDNSITITDGGISDMGKLDLLVPISANGRVPDSPRLTSPQPSLSHPIRWNQGHANRLRSIRRRFSTLRCR

SEQ ID NO: 174641 - protein, 200 aa, Glycine max
  unsure (1)..(200): unsure at all Xaa locations
  Clone ID: PAT_MRT3847_12871C.1.pep
MEEPTLLFPDTDLDLSFTSTTTDRTTTTTTTSARTSLARTSSLTLSFNDRLSTFSASETTTASLISRRPHRSGDPNWSAIQAAVNLSSDGRLHLRHLKLLRHLGSGNLGRVFLCRLRDYDGAHFALKVVDKDLLTPKKLSHAQTEAEILHALDHPFLPTLYARIDVSHYTCLLMDFCPGGDXHSLXRKQSQFRLPSRRGV

SEQ ID NO: 174642 - protein, 87 aa, Glycine max
  Clone ID: PAT_MRT3847_128720C.1.pep
LASALSFHTDPTPPQVREAANLAKEVCRSTIQSCRFVVPSHLHGHRHWSSALTFGTSRQSVTHIFFGSNFVTVTKCKEVEREFFKVS

SEQ ID NO: 174643 - protein, 135 aa, Glycine max
  unsure (1)..(135): unsure at all Xaa locations
  Clone ID: PAT_MRT3847_128721C.1.pep
SLDFVVLTIPLVSQVQGEWKLLWVRLXXFXFVYLHIVLRPQLFPHCFLSPLYHILSFPIVIFHLSSIRISIYQLLLIFFLSIFIPLEFFVHNLSPHNFLWNCFLYSYYPSFFLFLPHYCFPKFFPPIFFLTVLFS

SEQ ID NO: 174644 - protein, 59 aa, Glycine max
  Clone ID: PAT_MRT3847_128722C.1.pep
LLLPKIFFHIYNLGILLVMGSNRIIGLGFLNWQNVDDEMVRIFSYISKNFNIGIDNSQL

SEQ ID NO: 174645 - protein, 83 aa, Glycine max
  Clone ID: PAT_MRT3847_128723C.1.pep
MKILIKKKTKIIYIFLKNKMFVMLNIFNLVCICIHSVLYSSSFFSAKLPEAYAFLNPIVDIMPVIPLLFFLLAFVWQAAVSFR

SEQ ID NO: 174646 - protein, 105 aa, Glycine max
  Clone ID: PAT_MRT3847_128724C.1.pep
LLFLSPSPPSYLQVFHKPWSHTTNLFNKKIILTTVPTTSSPTRTSPISINSNSSPSKASTKTPISFFSSYSNSFTQPLLIPNLLNNIYSTKFSFIYHIFHYLFFT

SEQ ID NO: 174647 - protein, 59 aa, Glycine max
  unsure (1)..(59): unsure at all Xaa locations
  Clone ID: PAT_MRT3847_128725C.1.pep
KSGSKLIGTFGNLVQEYAKTGKXAEKVVVNPSGLQLVKLFTGSKALVHNQQLGQKCLNG

SEQ ID NO: 174648 - protein, 83 aa, Glycine max
  Clone ID: PAT_MRT3847_128726C.1.pep
MKSPVVKRSIVVAGHKTSVSLEEAFWNGMKEISGLRNMTLSELVGEIDGNRQQGNLSSAIRLFVLDYFKSRAMAVQPDKVPAQ

SEQ ID NO: 174649 - protein, 75 aa, Glycine max
  Clone ID: PAT_MRT3847_128727C.1.pep
KGGGFFFPTYWGGVIGWDEPGQKTLPLDPIELFQGGVLFHGGGEFLIKLGVKRNFFLQMPPFFWRITHAMGMQQF

SEQ ID NO: 174650 - protein, 106 aa, Glycine max
  Clone ID: PAT_MRT3847_128728C.1.pep
VHPALLLVHPTNFKKPKTAPACLQKLFYIFKNNGTMECLRSASLLPHSLSRFLSSVHSASSLFFVSLHLIRFGEGEGIDVQRCGGRRRHTKYAFVLGVHFGVPQVV

SEQ ID NO: 174651 - protein, 74 aa, Glycine max
  Clone ID: PAT_MRT3847_128729C.1.pep
IQIYTIQSLQSSISNHNLTIILTLYSSIIISTLISYSFINISNKSISHTYPFYYSFSFSIFNITIQFIYLSLLL

SEQ ID NO: 174652 - protein, 73 aa, Glycine max
  unsure (1)..(73): unsure at all Xaa locations
  Clone ID: PAT_MRT3847_12872C.1.pep
PPPWGTISKGGFPGFXRKDPWPFFSQGVSPLPGVXGFWKHLFTLSPRENPPFFXMFFGFKDPKLAEFGPPVFW

SEQ ID NO: 174653 - protein, 49 aa, Glycine max
  Clone ID: PAT_MRT3847_128730C.1.pep
IVPPLYLMETHDLVILILSPPCSHDDDTTHCFRSLIGTRLIILHFTNHL

SEQ ID NO: 174654 - protein, 185 aa, Glycine max
  unsure (1)..(185): unsure at all Xaa locations
  Clone ID: PAT_MRT3847_128731C.1.pep
MRMKRVFVVYSVLLLLVQFWLGEAETFSVDGKVLVLDESNFDSAIASFDHILVDFYAPWCGHCKRLSPELDAAAPVLATLKEPIIIAKVDADKHTRLAKKYDVDAYPTILLFNHGVPTEYRGPRKADLLVRYLKKFSASDVSILDSDSAVNMFVEEAGTFFPXYIGFGLNSSVLEKSGIKYKKNA

SEQ ID NO: 174655 - protein, 120 aa, Glycine max
  Clone ID: PAT_MRT3847_128732C.1.pep
NTFTGASLSERFLRLKLNQRLRYSSISSYGRRNVSFSSQPRSIRLTVSCAAKPETVEKVCKIVKNQLALSDDSKVNGESTFTALGADSLDTVEIVMGLEEEFGITVEEDSAQSILTVHEA

SEQ ID NO: 174656 - protein, 92 aa, Glycine max
  Clone ID: PAT_MRT3847_128733C.1.pep
LHLFSPSSINHGCEAHHHHHRGNFFHFNASLILSIICIANDPCACQQDDYECYITMITIYGRCSPLKTYLMLMGEHDHYHGLQGPRKSPVLV

SEQ ID NO: 174657 - protein, 144 aa, Glycine max
  Clone ID: PAT_MRT3847_128734C.1.pep
MATNTFTGASLSERFLRLKLNQRLAFNSIAGQRYSSISSYGRRNVSFSSQPRSIRLTVSCAAKPETVEKVCKIVKNQLALSDDSKVNGESTFTALGADSLDTVEIVMGLEEEFGITVEEDSAQSISTVQEAADLIEEIINKQSP

SEQ ID NO: 174658 - protein, 211 aa, Glycine max
  unsure (1)..(211): unsure at all Xaa locations
  Clone ID: PAT_MRT3847_128735C.1.pep
MDTDAVGSEGYSPLKELRLEIEVKEGTFSLCFWLYLTSSTTFPVTIIQQVFSDISESAPFXLVIDDNKRIHMLPVLLLHEEAPETGNINSWTEVPHATVDFEFLLEKWVHVGCEVCPDHIQLQINGEIVGEKSLCSLLNKESGSSHLKKLTLANVGGDGKSVQGYVHNFEIFPIITSIKDCHLKCPPLKLSIDESSVSEIEEESDGVWGIV

SEQ ID NO: 174659 - protein, 59 aa, Glycine max
  Clone ID: PAT_MRT3847_128736C.1.pep
IPIILVLGHTFLRVTLTRNKSNTSAYLFLIRSSNLKMLFFFFLIKLDIGAHMLLRPFND

SEQ ID NO: 174660 - protein, 178 aa, Glycine max
  Clone ID: PAT_MRT3847_128737C.1.pep
MDHYGSSGGSWTMIPTHNSQSQSNQDPNLFLQQQQQFLQSQPFQQALAPQSPFQQQQQQRLLQQQQQQQQPQNLHQSLASHYHLLHLVENLAEVIEHGTPDQPSDALINESSNHFEKCLQLLNSISGSISTKAMTVEGQKKKLEESEQLLNQRRDLIGNYRKSVEDLVRSEPVENVVL

SEQ ID NO: 174661 - protein, 47 aa, Glycine max
  unsure (1)..(47): unsure at all Xaa locations
  Clone ID: PAT_MRT3847_128738C.1.pep
FNFRWTRRTLVLVGILGIAIPVLVYKGIAREFHMQNXNNGRPYRKFI

SEQ ID NO: 174662 - protein, 67 aa, Glycine max
  Clone ID: PAT_MRT3847_128739C.1.pep
LNNCSCHLKYLDRIIPTDKGGNNGYPHVMKCRNWLNAQSHVHFSRAKPFVSHPTKILKGKTLLKSFT

SEQ ID NO: 174663 - protein, 94 aa, Glycine max
  Clone ID: PAT_MRT3847_12873C.1.pep
QCWWQNQKAYWCFVLRIEKTVFALPLSNSPSNLLSPKLLHHPWLLVVPLEVRGRDSSCLLTAYSNLFIAKNIFFPTIHCSVGQLFALFSIYIYI

SEQ ID NO: 174664 - protein, 77 aa, Glycine max
  Clone ID: PAT_MRT3847_128740C.1.pep
DLPFVMFSKAKGCLMVFKVALRFGAFMFFEINCGGSGQIKVCPSSRRRLRKACFNKANGSFHYNGVKKTPLLLFSKE

SEQ ID NO: 174665 - protein, 51 aa, Glycine max
  Clone ID: PAT_MRT3847_128741C.1.pep
HVDTVSMSACVSTPVSRVEHDPVSEVPHFSQKWIICYAFCLPKKKKKNDPS

SEQ ID NO: 174666 - protein, 70 aa, Glycine max
  Clone ID: PAT_MRT3847_128742C.1.pep
VYFFFFFLVQVNFYCYITEKIIHFIYKLPTKNAFLQTTIGTFFFFLDKLILLRVYHHNNHWLRLNIFPKG

SEQ ID NO: 174667 - protein, 100 aa, Glycine max
  Clone ID: PAT_MRT3847_128743C.1.pep
YFLIKKTPPPPSFILKKPLKKPLIPQNQLFHPYIPPHTPHTKPPYHLTNNSKPVIITSIPLFTTKQKLPYKNPQHPNTQTNNTTSFCPTFYPNYTIIFTS

SEQ ID NO: 174668 - protein, 80 aa, Glycine max
  Clone ID: PAT_MRT3847_128744C.1.pep
FLTQQQSPPQKKTKPQKRHLQRALNQKPLFLGGGGIYFFPMGGGDNHSRGRRFLPICCPHHRDYPPLRAGPLSPPVPPGR

SEQ ID NO: 174669 - protein, 70 aa, Glycine max
  unsure (1)..(70): unsure at all Xaa locations
  Clone ID: PAT_MRT3847_128745C.1.pep
SLSYNNXXIACPVIQDQXGKFARXGMKSGRILLCGMGILVGLISIQSSSSSSXKNPISFSFFHHNTKHKT

SEQ ID NO: 174670 - protein, 155 aa, Glycine max
  Clone ID: PAT_MRT3847_128746C.1.pep
MLSLSTITATILIFYLHHTTSLPPHATLSSCHVTSFNCGSITILSYPFTGGDRPSFCGPPQFLLNCRNGVVAELNISSVSYRVIDIDSEDHTLTLARLDLWNETCTDVYVNSTFDGPVFSYGSGNQNLTLFYECKPTSRIIETPENLFNCWSNGD

SEQ ID NO: 174671 - protein, 105 aa, Glycine max
  Clone ID: PAT_MRT3847_128747C.1.pep
INPGKSQKPPPTLQAKHITHAPNGKQKNPLREVSGTKVSTKPHRPPKKKSGSMEGYREKYPQKAPPPKTWKRRVQGRGGQGTQGPPGVFEGLPLMGGEPKTPRYS

SEQ ID NO: 174672 - protein, 79 aa, Glycine max
  Clone ID: PAT_MRT3847_128748C.1.pep
SCFNNNSLHLHTLKESNKFFLKNKKVLDLCCSLLERSIQSKAPAQHCIYDSMLLVTRKFGQGKKPWQKNFWPQSSLKIC

SEQ ID NO: 174673 - protein, 97 aa, Glycine max
  Clone ID: PAT_MRT3847_128749C.1.pep
AGSFRIGLSGFLVGVHPCFSPLQGCRSPLFCPGVVLFFFLARLSRLLRRCVSASAPVRPGGGFVCPLPVAPGPILTFFFFKVPRGGCKGNLQKNHPK

SEQ ID NO: 174674 - protein, 180 aa, Glycine max
  Clone ID: PAT_MRT3847_12874C.1.pep
FLKLKYPTILCQPHHSDHTPPPSSCDNSTIFPFTDTTTTTSCGSSTEPDFASIFASQRFFFSSPGTSNSIVESPDTRTFMIPTGGGVRVPKYSLNPYVDFLRSMQEMIRSRQVLDITKDSEYLHELLLCYLALNPTHTHKFILRAFTDLVLQLLSSTTPCRTTHNHNSHRRHRSLSGRLL

SEQ ID NO: 174675 - protein, 65 aa, Glycine max
  Clone ID: PAT_MRT3847_128750C.1.pep
KLDRHNSEYKQSLCGLDTQTSVLLYYSDKRVYLPMSNSVQNHRSQKMVTHAQLICMTNVNIKNFI

SEQ ID NO: 174676 - protein, 50 aa, Glycine max
  Clone ID: PAT_MRT3847_128751C.1.pep
ATTLFSSFLHKLGDGKTTYSSIFDSQKHSSYLSRTFTSKPRNGGSQGNST

SEQ ID NO: 174677 - protein, 62 aa, Glycine max
  Clone ID: PAT_MRT3847_128752C.1.pep
RLPTDLKHTSYYYVLPYMHGRARTLQNIWCLYTCIILMPKKGPSLGKCHCFCKTSVIRRQFV

SEQ ID NO: 174678 - protein, 60 aa, Glycine max
  Clone ID: PAT_MRT3847_128753C.1.pep
AFKSNLRAAGGNKTKTPGLGAQSAFRDIDRAGIKIGRIENVTPIPSDSPRRKSGTRGIRL

SEQ ID NO: 174679 - protein, 116 aa, Glycine max
  Clone ID: PAT_MRT3847_128754C.1.pep
VSDDKKPREVPTKPCFSYPKLARYTTTHQMLLHSEGFCSISRSVSPSVEQEQNMNNPRKDLSSTVYIYYTSICNRRNSDLNGGIEVRVRRPRFLMSSRIQSLEIRTSSQRAPPLIM

SEQ ID NO: 174680 - protein, 60 aa, Glycine max
  Clone ID: PAT_MRT3847_128755C.1.pep
FLQVIDIVAFLKKFKPTKFFFFPRKKKGKEITCLSFAFLKRKQLFSTPETIFHDRCFSPN

SEQ ID NO: 174681 - protein, 521 aa, Glycine max
  Clone ID: PAT_MRT3847_128756C.1.pep
EQAELKRLEDNHDANNESRIHSATNELSVENGTVANLETKIRNNKQQIDYESKRRQALLSEYHDFKEKEEEVRARQFQPSTDNVCSCCGQALPPEQVEEVNKKALAKFNKQQSEDLENLKQKTEKILSDGKEIKPLIERLESENNDLQIKVNEANERVQRIENRINKLKAGNVDITQTDEYKSILNDINVINQKRKDIKTTISDKVAKIDEQINELTQEKVAFENAKAIESSNEHLDKVIKDLRSEENQLLDKKEDYEHQLYILKEFTTTKVKMLTENINKKFKMANFKLFNHQVNGEIKETCVCTVEGVEYNGGLNNAARINVGLDVINTLSTHYGITAPIFIDNAERYSAENALKEAWLVISQNSKLANCTKESMAQALLGMVTQGLNPAKNQCYFIPYGNKMQIQRSYHGNIMMLKRDAGAKDVVAQIIYKGDSFKQELDGTGRIKDIKHEQDFFNIDKDNIVGAYCTIVFDDDRDNYIEIMTIDQIKQAWMQSSMIRDEQALGKSKTHNISKKKWLK

SEQ ID NO: 174682 - protein, 171 aa, Glycine max
  Clone ID: PAT_MRT3847_128757C.1.pep
FSDVLGDVVCGGFAMPIRENKAQEIYIVMSGEMMAMYAANNISKGILKYANSGGVRLGGLICNERQTDKELELAEALAKKLGTQLIYFVPRDNVVQHAELRRMTVLEYAPDSKQADHYRKLAAKVHNNGGKGIIPTPISMDELEDMLMEHGIIKAVDESIIGKTAAELAAS

SEQ ID NO: 174683 - protein, 48 aa, Glycine max
  unsure (1)..(48): unsure at all Xaa locations
  Clone ID: PAT_MRT3847_128758C.1.pep
GXPPKFIXHQTSIILPLYKIKLQXLXIKXNLKHTPTKSTQINPLNHFT

SEQ ID NO: 174684 - protein, 84 aa, Glycine max
  unsure (1)..(84): unsure at all Xaa locations
  Clone ID: PAT_MRT3847_128759C.1.pep
IHSRRHYHSHHSEFFKEDTDVIGDHPEAQRKSLDXLNTLVQETLYNHELTAPKPEPAKKKTELKALDKKEEEVSEQKKEVAVTE

SEQ ID NO: 174685 - protein, 59 aa, Glycine max
  Clone ID: PAT_MRT3847_12875C.1.pep
LGVFMFKFYQKFVFFAIYWENFKGFFLGLQKMAGGVLFLMGEKNLNFQKGKGEPLKKFF

SEQ ID NO: 174686 - protein, 286 aa, Glycine max
  unsure (1)..(286): unsure at all Xaa locations
  Clone ID: PAT_MRT3847_128760C.1.pep
VGPTKPNKPLGLGGVELLQTGPDAAPKAAAESGAGTPLENLLVKKTEMRGPEMYISEEISAEFRESLLTRVGLMGVVYLRTLPPKTAXDKETEFSFRIEGTEAVKRFVIQSSRVSSLGNGMFHVRTAASEEPIPIMKYSLGPSLTPLPLRVRLTKRHTGSLLSVMIQYASNPDLLVPLHDITFTLKLPVDPTLLKVSPKAVLNRTEREIKWVVPEIPLKGSPGRLRVRMPVDSNEDDEEIEVVGYVKFSERVTQSLSGVSIRPASDGKTDFYEVSHRLESGVYMCD

SEQ ID NO: 174687 - protein, 45 aa, Glycine max
  unsure (1)..(45): unsure at all Xaa locations
  Clone ID: PAT_MRT3847_128761C.1.pep
TVDCILLIQNYPTSNXIEVVLGKKAXTMLKIMMSANAIVNNCDCA

SEQ ID NO: 174688 - protein, 90 aa, Glycine max
  Clone ID: PAT_MRT3847_128762C.1.pep
VALFKEAMEKSPGKHLDIVVANAGIGESDPEMFLPQADLKLRKPNVKTIDIDLTGVIYTAHLAYWAFAQPAPKGDSLSSGSPRHHSLLLI

SEQ ID NO: 174689 - protein, 55 aa, Glycine max
  Clone ID: PAT_MRT3847_128764C.1.pep
FWIPVIMYTYSYPSLINIQGSNHRVLDFTGWAKSGAQFEKILYRNNFFPPMELGK

SEQ ID NO: 174690 - protein, 93 aa, Glycine max
  Clone ID: PAT_MRT3847_128765C.1.pep
AVSDTSCPLCKNEVEDARHLFFHCRKVTPLWWESMSWVSQFHVFPKDPKMHFLQHALTTTRGSSAQKMKVWGVSCNMNLLEPEKYDIFLQLGL

SEQ ID NO: 174691 - protein, 56 aa, Glycine max
  Clone ID: PAT_MRT3847_128766C.1.pep
VLALNCMMHSKMCWKKKDRKYIKDGRAYMDTCSPVHLCLSKLSFTTPGMESVAISF

SEQ ID NO: 174692 - protein, 273 aa, Glycine max
  unsure (1)..(273): unsure at all Xaa locations
  Clone ID: PAT_MRT3847_128767C.1.pep
REKTSNRWRICTVTQVEEFKSFIRVLPVWASTIALSVSYAQLSTFFLSQANIMDRTLGTHFKIPAGSVPVFSAITLILVPIYEKFIVPSLRNITGHHRGITSLQRMGVGLFVLIFAMASAALVERKRRDHKSLKMSVFWLLPQFFLMGAAEVFTYVGQLEFFYDETTDGTRSFSXMFLCEIGIGSWLSTALVKIIEGASGGQHKGWLRNDFNNSRLDCFYXILTAINDVNFLVYLVVAYCHRGKGALVMDEAMVEFTESNSANHEGELPSTFF

SEQ ID NO: 174693 - protein, 69 aa, Glycine max
  unsure (1)..(69): unsure at all Xaa locations
  Clone ID: PAT_MRT3847_128768C.1.pep
APRLRFFLFAFFCIGKRSVVGNVFFLVSPSGXRHISLYASHAIVIFKLGPPPPSCWSFPRYLYNHSLPG

SEQ ID NO: 174694 - protein, 67 aa, Glycine max
  Clone ID: PAT_MRT3847_128769C.1.pep
KKRGGKVFFPKGPRVNFQKKKKKRGPPPIKSWFGEIEPVLLGAKKKLEGTPPLSHELILGFSNFFSP

SEQ ID NO: 174695 - protein, 452 aa, Glycine max
  Clone ID: PAT_MRT3847_12876C.1.pep
MKKTPAPSLHKSNQRKKNVGFQDRGAANGTQSHHVESHSALTYFKSSFKKFFTLFLSGKRKTDSEAAESDDRKNTHKVRGVSSSTDVSSDSSKSSSKRVFSHCSASSGTASSKLGMGNFTFEEIYKATAKFSLENKIGEGAFGTVYKGKLNDGTLVAVKRAKKDLLNKNLAEFKNEINTLSKIEHINLVRWYGYLEHGHEKIIVVEYISNGTLREHLDGIRGDGLEIGERLDIAIDIAHAITYLHMYTDHPIIHRDVKASNILITDKLRAKVADFGFARLGPEDPGATHISTQIKGTAGYMDPDYMRTRHLSEKSDVYSFGVLLVEMMTGRYPVEPQRPPNERVTIKWAMQLLRQKEVVIAMDPRLRRNPASNKAVQKVLKLAFQCLAPVRRSRPSMKSCAEVLWEIRKDFKEKAFSHPPHHSADFPQRDARKNRHKTYGIEDSKGYKFVFA

SEQ ID NO: 174696 - protein, 94 aa, Glycine max
  Clone ID: PAT_MRT3847_128770C.1.pep
ACDTEVAGIRVIPAITVSSLIPDIMSLTVDCFGLSNKETQVRIKFTLTPHTSTFRVPLLGPHVLYWLIQFPVYVVQILSFFIASKCVCTVAVCY

SEQ ID NO: 174697 - protein, 278 aa, Glycine max
  Clone ID: PAT_MRT3847_128771C.1.pep
MSIGKYAVITYFRSCLTFDDGLFCLWKITFGCRDKLVIAPYGLDKSTWDPSTDYFLPENFNAENMNGKAFCKAALLQKLGLSEHSSTILVGCIFSEGRDLDRKRVKEVILNAKQYDVQFIFMGTSERLIMNQAPESLQTEFKDDNLKFVPTYDEALLHLVFAGSDIILCQSFLDPTDEIPLIALRYGAAPIALAPDASSNRSIPFDRSFINQDHEATKYSELINSSLVNMFISLAIDEIRTDPCQWKRKIMQAMGHDLSWDGECYDVHVEAYFAIKNM

SEQ ID NO: 174698 - protein, 258 aa, Glycine max
  Clone ID: PAT_MRT3847_128772C.1.pep
MVGDNTKKLKVAENLEDSIDGELVLSIEKLQEVQDELDKINEEASDKVLEVEQKYNEIRKPVYDKRNDVVKSIPDFWFTAFMSHPALCELLNVEDQKIFKYLGSLDVEDNKDVKSGYSITFNFNPNPYFENTKLTKTFTFLEEGTTKITATPIKWKEGKGLPNGLDHDKNGNKRARIDISFFSWFSDCEQKDDVDEIHDEVAELIKDDLWPNPLTYFNNELDEEDVDSEADDEENDEDDSEDDDQEENDAGSEDGNHS

SEQ ID NO: 174699 - protein, 60 aa, Glycine max
  Clone ID: PAT_MRT3847_128773C.1.pep
LSRKLAIGGMDRNHKLVSLSLGLTGRCTAVAAGEVRLCWGRACAWLFHLLKKLWEVGIDI

SEQ ID NO: 174700 - protein, 160 aa, Glycine max
  unsure (1)..(160): unsure at all Xaa locations
  Clone ID: PAT_MRT3847_128774C.1.pep
LISSEKPQIGRIPDDLGLISDLQILNLHSNQLEGPIPASIFVPGKLEVLVLTQNNFSGALPKEIGNCKALSSIRIGNNHLVGTIPKTIGNLSSLTYLEADNNNLSGEVVSEFAQCSNLTLLNLASNGFTGTIPQDFGQLMNLQELILSXNSLFGDIPTSI

SEQ ID NO: 174701 - protein, 418 aa, Glycine max
  Clone ID: PAT_MRT3847_128775C.1.pep
ECYKSKPDFIKAWEKWRSQITKLDCSRFWIQCDNQQTREGLRNLLQIMLGNTESLCMATCYWIELYISHFLYIRPFTMGIESMYNLAQKCIQLKPRSSTHRLSVLMIGILEENTEVVLAECSREFGPWLVAHAIELLTAGSEQAEILLHEERYNLGGISIVELHRLVYAQILSAHALTWQIAPIYLTSCMKQGMGLLENLLYRQSAQHNDVLLKNIEICRLYELDHISSNIMKIAGVHHWKHGHKGAGVFWLQQAQDASCLDKIAQQLFDSVGKSISDESFKQWEGMIELLGSESKPAGGLEFLHKYRDFKKSLQKVSSGKSTDAARQAVGSLILLMKNPSTPQRFWLPLLYDSLKLLNWQDCPLLSVSETNLLLNKLHELSLAKLRPHHTEPSLPPDALSSIRLALATNLGQAILDE

SEQ ID NO: 174702 - protein, 63 aa, Glycine max
  Clone ID: PAT_MRT3847_128776C.1.pep
KARAIVGAGGFLYAAHSSSCDIIDHCSAPGTRVEKSPIGFGAINFFEMVFTLLEPELKVQSLQ

SEQ ID NO: 174703 - protein, 77 aa, Glycine max
  Clone ID: PAT_MRT3847_128777C.1.pep
AGRIVAIFVSVELLVEWVGPVRRKGASCGVLGYEANLGWIGLVLLGECVHFTLLNPKICVSFSLFHPSKKIKKFLPL

SEQ ID NO: 174704 - protein, 134 aa, Glycine max
  unsure (1)..(134): unsure at all Xaa locations
  Clone ID: PAT_MRT3847_128778C.1.pep
MAGKGVGSVAKAVAEYQYPWREKLGKYKDEFAKGVWGYWELGAWKPLSIGARHRARIRKEVLLAGEDWPYDPERKEMKTRRKGHKCDRISAEKRANTAKLMEKMPQMLLXYKKRRWQKKMKGGRQGKTLILLLL

SEQ ID NO: 174705 - protein, 80 aa, Glycine max
  Clone ID: PAT_MRT3847_128779C.1.pep
KTRERAFHRSLSLCSFVPTETPAPFISCRCSCLARNRAGDTELPAPGMGFEPPPDNTVLNLAKLGFRLDFGFAGLSQLIN

SEQ ID NO: 174706 - protein, 67 aa, Glycine max
  unsure (1)..(67): unsure at all Xaa locations
  Clone ID: PAT_MRT3847_12877C.1.pep
LRTAVQFLDYSSGRSCTSGIVDAYTDPCICRXNHALRSLQHHVKNHVESLSHANKLSPSAVISTTLK

SEQ ID NO: 174707 - protein, 56 aa, Glycine max
  Clone ID: PAT_MRT3847_128780C.1.pep
HKFFKKQYSQSFNFTELGHFSQILDFTYKKKSKFSFVSLQHFKPKIAALCDKNYGH

SEQ ID NO: 174708 - protein, 719 aa, Glycine max
  unsure (1)..(719): unsure at all Xaa locations
  Clone ID: PAT_MRT3847_128781C.1.pep
MADVMVMKEIEDTALRLGVDLSTLDLDAIRLPPGEDCGIVSDDEVVYQEENLEFESGFGNIIVVDNLPVVPREKFEKLEGVVRKIYSQIGVIKEDGLWMPVDPETEKTLGYCFIEYNTPQEAELAKEKTHGYKLDRAHIFAVSMFDDFDRFMKVPNEWAPPETKPYAPGENLQHWLTDAKARDQFVIRAGSDTEVLWNDARHLKPDPVYKRAFWTESFVQWSPLGTYLATVHRQGAAVWGGAASFNRLMRYAHPQVKLIDFSPGEKYLVTYSSHEPSNPRDANRVVINIFDVRTGKVMRDFKGSADDFAVGGAGGVTGVSWPVFKWSGGRDDKYFARMGKNILSVYEAETFSLVDKKSLKVENIMDFCWSPTDPIIALFVPEMGGGNQPARVSLIQIPSKEELRQKNLFSVSDCKMYWQSNGDYLAVNVERYTKTKKSTYTGFELFRIKERDIPIEVLELENKNDKIIAFAWEPKGHRFAVIHGDNPKPDVSIYSMRTGQNSRVSKLTTLKGKQANALFWSPAGRYIVLAGLKGFNGQLEFYNVDELETMATAEHFMATDIEWDPTGRYVATAVTSVHEMENGFNIWSFNGKHLYRILKDHFFQFLWRPRPPSFLTPEKEEEIAKNLKKYSKKYEAEDQDVSLLLSEQEREKRRMLKEEWDXWVNEWKQIHEXEESLQRQKLRDGEASDEEEEYEAKDIEVEEVIDLTEEVLHLEYGQE

SEQ ID NO: 174709 - protein, 52 aa, Glycine max
  Clone ID: PAT_MRT3847_128782C.1.pep
MPKAMRSHIRKKRDTEGAALWGDPGLRPVWENPKVFLRGPQSKTPGPRFNTV

SEQ ID NO: 174710 - protein, 106 aa, Glycine max
  Clone ID: PAT_MRT3847_128783C.1.pep
IINGWGMQKDLHLWNDATCFKPERFDVEGEEKKLVAFGMGRRACPGEPMAMQSVSFTLGLLIQCFDWKRVSEEKLDMTENNWITLSRLIPLEAMCKARPLATKIGV

SEQ ID NO: 174711 - protein, 168 aa, Glycine max
  Clone ID: PAT_MRT3847_128784C.1.pep
WKYNPKISDFGLATLVSYEGQSHNYSPEISDFDLAKWGPSEGESHVTTRVMGTVGYAAPEYVATGHLYVKSDVYGFGVVLLEILTGMRALDTNRPTGQQNLVEWTKPLLSSKKKLKTIMDAKIVGQYSLQAAWQAAQLTMKCLQSIPEERPSMKDVVEALEAIEAIQN

SEQ ID NO: 174712 - protein, 119 aa, Glycine max
  Clone ID: PAT_MRT3847_128785C.1.pep
PGPPVFCDRGKAVGRSIWCFSAVVFVRSVAHRSARWLGAAHGPPPLFCAQCLIARSFLCICGSFVRFCFFVGACVLLLAPPSKFSLGGGWFKQESEPLSVALRDRFVFCPWALCFCRDY

SEQ ID NO: 174713 - protein, 137 aa, Glycine max
  Clone ID: PAT_MRT3847_128786C.1.pep
MRLELEPRQKGSYNCSGLKKMLKNLNPLDQRALDDCLKLFEDTNVELKATIDDLSKSTIGSKRHHDLQTMLSGAMTNLYTCLDGFAYSKGRVRDRIEKKLLEISHHVSNSMAMLNKVPGVKKLTTSESVVFPEYGNM

SEQ ID NO: 174714 - protein, 89 aa, Glycine max
  unsure (1)..(89): unsure at all Xaa locations
  Clone ID: PAT_MRT3847_128787C.1.pep
VDAESNKELEQWNEMLKSDAIKLCQENNFNPGFFXVRLEHILERIALISDAASTEKPSAVTSSLFIGGALAARSVYTLQYLGITNILCL

SEQ ID NO: 174715 - protein, 46 aa, Glycine max
  Clone ID: PAT_MRT3847_128788C.1.pep
LGFFHPLCLVLSFFFQVFCLKKQEFCLWTLTHMFPIKFDLINTLFL

SEQ ID NO: 174716 - protein, 62 aa, Glycine max
  Clone ID: PAT_MRT3847_128789C.1.pep
VWSHHAASSSSVALARDTATTAHHSSLPVSGVRDFPHQLGSPHAASAASSASGGAGSSGDLR

SEQ ID NO: 174717 - protein, 76 aa, Glycine max
  Clone ID: PAT_MRT3847_12878C.1.pep
GLSTNHSRTFATKAVYLTIYATRLPLTNKQGTSTKLATRHARVSTHGRRSAWELLLYVYSRLHKIPPTLTPPPPPR

SEQ ID NO: 174718 - protein, 69 aa, Glycine max
  Clone ID: PAT_MRT3847_128790C.1.pep
LGVNLLATLLSKGPIYISTCTCTTLSVVSYFWPSLVFKSNPAMFFFSLNWVVVGFPFLFKFVNRFFILM

SEQ ID NO: 174719 - protein, 79 aa, Glycine max
  Clone ID: PAT_MRT3847_128791C.1.pep
CILNFPLFVFCFKIQLGCFFFPIHQGPPFDGSFHKYCINFKNFRPAFFYTILYYKFVYDQVAGMYFQATPLPPGVCGRF

SEQ ID NO: 174720 - protein, 50 aa, Glycine max
  Clone ID: PAT_MRT3847_128792C.1.pep
MKLSFLLQSLLCDPNPNSPANSEAARIFSENKREYNRRVRDIVEQSWTAD

SEQ ID NO: 174721 - protein, 87 aa, Glycine max
  Clone ID: PAT_MRT3847_128793C.1.pep
RHWGGEKLLPYCSKMGNITRSRLTFYLRLQQGLCTLCCVKGATSSHGAMTSERSHHATSVLTGWLITCLTNRSQTSTLCWWLRMPMV

SEQ ID NO: 174722 - protein, 62 aa, Glycine max
  Clone ID: PAT_MRT3847_128794C.1.pep
RQVSRGIPLRKGPRGVPVPMGHRRFKLCRGKGRMEVGKKAGKASGSCWYPAKFLPSLLQSSP

SEQ ID NO: 174723 - protein, 161 aa, Glycine max
  Clone ID: PAT_MRT3847_128795C.1.pep
LFYGDDDTNGHIDNMCCFVRPGVVMLSWIDDETDPQYERSVEAYSLLSNETDANGRKFEIIKLHVPSPLYMTEDEAAGVSLDNEAKPRLPGTRLAASYVNFYIANKAIIAPQFGDKKWDDEAVRVLSKAFPHHEVVGIEGAREIVLAGGNIHCITQQQPAI

SEQ ID NO: 174724 - protein, 201 aa, Glycine max
  Clone ID: PAT_MRT3847_128796C.1.pep
QRYKVFMRFHSKKEHQDLLKNIIEEHRLVKRIQDLQEARIAGCVTAADAYRFIEQKRTKEAEPSACKESGQIGTSAKTLQRPNSLKGEVDSSPQGLQKGTAALFAGAKDSPPAIQVFTRSLEEWDISGFAGAELLSESEKKLCDEIRILPSHYLNMLQTLSLEISKGSVTKKSDAHALFKVEPSKVDRVYDMLVTKGVVQT

SEQ ID NO: 174725 - protein, 61 aa, Glycine max
  Clone ID: PAT_MRT3847_128797C.1.pep
LLASSAFEGVSVTLPHKPLISPCFSKSLSKVQSLRCLPPGLSLSSGGLELCWGQRYLRHVL

SEQ ID NO: 174726 - protein, 101 aa, Glycine max
  Clone ID: PAT_MRT3847_128798C.1.pep
HFLPSFLRILNSTPTHSNPDTKQNQILCSLLSQDFNAQLIPQIFLPFFSFERPLLSLLIIIIIIILSFIFHSKQTICFFFSIRFASASRSHSRFVSLLSDL

SEQ ID NO: 174727 - protein, 80 aa, Glycine max
  Clone ID: PAT_MRT3847_128799C.1.pep
GKSEKEQKRVKRFCFPQSSPLNKLHCLTPFANNYLYHYLFYFFLKLYYKISHFVIVSIIVYAAMNFWLGISNIKDFSCYA

SEQ ID NO: 174728 - protein, 95 aa, Glycine max
  Clone ID: PAT_MRT3847_12879C.1.pep
FQLWLRQAPFPKGRFSPEHLCCVHHALASSACRRYSNKSQLDTRLLVFPLLLLTHISHFLKDLKLKKRCLFVSPIVKGHPLPTKPQIRQTTSTIR

SEQ ID NO: 174729 - protein, 544 aa, Glycine max
  Clone ID: PAT_MRT3847_1287C.1.pep
MSMLSFLFILMLLPSFEAIPSDEEVFINPSEVQTQDMQALIAQACMDIENQNSCLTNIHNELTKIGPPSPTSVVSAALKHTLNEARVAIDNITKITTFSVSYREQQAIEDCRELLDFSVSELAWSMGEMRRIRSGDTNAQYEGNLEAWLSAALSNQDTCLEGFEGTDRRLESYISGSLTQVTQLISNVLSLYTQLHSLPFKPPRNTTTPLTSHETLEFPEWMSEGDQELLKAKPHGVRADAVVALDGSGHYRSITDAVNAAPSYSQRRYVIYVKKGLYKENVDMKRKMTNIMLVGDGIGQTIITSNRNFMQGWTTFRTATLAVSGKGFIAKDMSFRNTAGPVNHQAVALRVDSDQSAFYRCSVEGHQDTLYAHSLRQFYRECEIYGTIDFIFGNGAAVLQNCKIYTRVPLPLQKVTITAQGRKSPHQSTGFTIQDSYILATQPTYLGRPWKQYSRTVYINTYMSGLVQPRGWLEWFGNFALNTLWYGEYRNYGPGAALAARVRWPGYHVIKDASTASYFTVQRFINGGTWLPSTGVKFTAGLTN

SEQ ID NO: 174730 - protein, 36 aa, Glycine max
  Clone ID: PAT_MRT3847_128800C.1.pep
SYYHSFSNFTISLHLSYYITILRYYIKIRVHYNNIS

SEQ ID NO: 174731 - protein, 93 aa, Glycine max
  Clone ID: PAT_MRT3847_128801C.1.pep
KYPAILFKQQLTACVEKIFGLLRDNLKKDLSPLLGSCIQAPKTGRGVHGGKSSRFPGGIPQQSSSGQWSNIVKFLDSLMSKLRQNHEAQHYWL

SEQ ID NO: 174732 - protein, 53 aa, Glycine max
  Clone ID: PAT_MRT3847_128802C.1.pep
SLIKFKKAEKDDTSIYTGPGKLCIKTRPLSPKATWPPPSQFLNNNPKLDNFNN

SEQ ID NO: 174733 - protein, 114 aa, Glycine max
  unsure (1)..(114): unsure at all Xaa locations
  Clone ID: PAT_MRT3847_128803C.1.pep
VDLRVGTQYDRVEYQYLKFKSGYVEEYDNNVLQLVVQXGVHGYMKKNSYVEVDIGGDELDENVEVVNIVTLXVGGKITWKHGHIXDLELQIFAFLDHEGCNIVLVVNQDILKEL

SEQ ID NO: 174734 - protein, 218 aa, Glycine max
  unsure (1)..(218): unsure at all Xaa locations
  Clone ID: PAT_MRT3847_128804C.1.pep
RLFPISHGQWLAAVNCFGDIYVFNLEILSQHWFILRLDGASVTAGGFPSQNDNVLIXSTSSNQVYAFDIEAKQLGEWSTXHTHALPRRYLEFPGEVIGLSFPPSETSSSPSATSSSVVVYSSRAMCLIDFGLPVEQDESDMLNTKDSRARNLQNFNVKKRIEVMKEHNRRNFEVIPFENPVLFLGHTAKNSIFMVDKPWLQVVKSLEGRPVHRHIYGT

SEQ ID NO: 174735 - protein, 40 aa, Glycine max
  Clone ID: PAT_MRT3847_128805C.1.pep
KVLGKRVLPKKKAFVVKDKIILKIVEKKIKKAGGAVVLTV

SEQ ID NO: 174736 - protein, 844 aa, Glycine max
  unsure (1)..(844): unsure at all Xaa locations
  Clone ID: PAT_MRT3847_128806C.1.pep
VTGSSPSFSPLLVSTSSKSKFSLAPHCTISECGWLHQAELYRLSSVEWSPSPVIALATSFDGSRVAAARKDGSLEIWLVSPGSIGWHCQLTIHGNPNGRVTSLIWCPGGPDGSRLFSSNIDGSVTKWDLFHLTQKTVLPSDGVTIWQMAGTFPKGDEIDDKRKGERMGNGFHGFDEHESSESDDDSDSPGSPELSVGEYPRVAIALDNGCVKIYDISDTDEFIHVKSMPRVKGRVLSVTWSTDSNYVYSGSSDGLIRCWNATLGNEIYRITAGLGGLGSGHELCIWSLLSLRSGTLVSADSSGSVQFWDSQHGTLLQAHTLHKGHVHALAASPSHNRVFSAGSDGQVILYKLSSSQSTSSNDINPPSTMKRWIYVHYVRAHTHDIRRLCYSWWLSSPXNDNVLIVTTSSNQVYAFDIEAKQLGEWSTRHTHALPRRYLEFPGEVIGLSFPPSETSSSPSATSSSVVVYSSRAMCLIDFGLPVEQDESDMLNTKDSRARNLQNFNVKKRIEVMKEHNRRNFEVIPFENPVLFLGHTAKNSIFMVDKPWLQSTDIYMGHEAVHSMIFTHDSSKLXIIMGHDKRIYVVNVGGADEVKSELLHTFTPLRESQDQELPPTEPPITRLFTSSDGQWLAAVNCFGDIYVFNLEILSQHWFISRLDGASVTAGGFPPQNDNVLIVTTSSNQVYAFDIEAKQLGEWSKRHTYALPRRYLEFPGEVIGLSFPPSETSSSPSATSSSVVVYSSRAMCLIDFGLPVEQDESDMLNTKDSRAMNSQNFNVKKRIEVKKMIEVKKEHNRRNFEVIPFENPVLCLGHTSKNSIFMVDKPWLQVVKSLEGRPVHRHIYGT

SEQ ID NO: 174737 - protein, 55 aa, Glycine max
  unsure (1)..(55): unsure at all Xaa locations
  Clone ID: PAT_MRT3847_128807C.1.pep
QKXRHNKTXPXWINXGHENXEMSVLIWSSLKDVFPXAKGXKXKNQXFDXXMXXHX

SEQ ID NO: 174738 - protein, 160 aa, Glycine max
  Clone ID: PAT_MRT3847_128808C.1.pep
VSCPLLACLSACPATANIDTHMGDYQEFAEFTRHRIQQPDKELCAFEVQMEDARNEGLFFKNLRKTTPVDKAKAKEEAEKIKDVAREKAGSRTRKGIYLLFIGLLTFAIVDSVASSSTDWRKIAVLGAILVALVSQFIYEQTMSIETGKIRKIDTEEENN

SEQ ID NO: 174739 - protein, 602 aa, Glycine max
  Clone ID: PAT_MRT3847_128809C.1.pep
MQVPVGGRVPTWFSRRRLLEEKLCDLHKCTNLDSVNQIHAQVLKANLHQDLFVAPKLIAAFSLCRHLASAVNVFNHVPHPNVHLYNSIIRAHAHNSSHRSLPFNAFFQMQKNGLFPDNFTYPFLLKACSGPSSLPLVRMIHAHVEKIGFYGDIFVPNSLIDSYSRCGNAGLDGAMSLFLAMEERDVVTWNSMIGGLVRCGELQGACKLFDEMPDRDMVSWNTMLDGYAKAGEMDTAFELFERMPWRNIVSWSTMVCGYSKGGDMDMARMLFDRCPVKNVVLWTTIIAGYAEKGLAREATELYGKMEEAGMRPDDGFLLSILAACAESGMLGLGKRIHASMRRWRFRCGAKVLNAFIDMYAKCGCLDAAFDVFSGMMAKKDVVSWNSMIQGFAMHGHGEKALELFSWMVQEGFEPDTYTFVGLLCACTHAGLVNEGRKYFYSMEKVYGIVPQVEHYGCMMDLLGRGGHLKEAFMLLRSMPMEPNAIILGTLLNACRMHNDVDLARAVCEQLFKLEPSDPGNYSLLSNIYAQAGDWMNVANVRLQMKNTGGEKLSGASSIEVEEEVHEFTVFDQSHPKSDDIYQMIDRLVQDLRQVGYVPMIHQ

SEQ ID NO: 174740 - protein, 60 aa, Glycine max
  Clone ID: PAT_MRT3847_12880C.1.pep
RQIKYTMLDCHLLVKSKHLCLCELSHTNGTVPVSNSRHGELRCVFMKLLPLLHTRTRIPA

SEQ ID NO: 174741 - protein, 80 aa, Glycine max
  Clone ID: PAT_MRT3847_128810C.1.pep
AVLKGLRSSKGRLIIIANNCPPLRKSEIEYYAVWAKVGVHHYNGNDVDVGTAGGRYYRGCCLSVMGPGDSDIIKTLPGEQ

SEQ ID NO: 174742 - protein, 251 aa, Glycine max
  Clone ID: PAT_MRT3847_128811C.1.pep
RYAWADAWAKCGCLDAAFDVFSGMMAKKDVVSWNSMIQGFAMHGHGEKALELFSRMVPEGFEPDTYTFVGLLCACTHAGLVNEGRKYFYSMEKVYGIVPQVEHYGCMMDLLGRGGHLKEAFTLLRSMPMEPNAIILGTLLNACRMHNDVDFARAVCEQLFKVEPTDPGNYSLLSNIYAQAGDWMNVANVRLQMMNTGGQKPSGASSIEVEEEVHEFTVFDQSHPKSDDIYKMIDRLVQDLRQVGYVPMIHQ

SEQ ID NO: 174743 - protein, 46 aa, Glycine max
  Clone ID: PAT_MRT3847_128812C.1.pep
AYFSFGPPNPGALKPPFILNTLEQAYLGKRGHRISAPTCKIGILGP

SEQ ID NO: 174744 - protein, 37 aa, Glycine max
  Clone ID: PAT_MRT3847_128813C.1.pep
SWFVFFHQIEVSISTIHHKFHNIQIRDHSSNVLLELC

SEQ ID NO: 174745 - protein, 84 aa, Glycine max
  Clone ID: PAT_MRT3847_128814C.1.pep
RMNLNGALHIMSCALPVQGHSIPMSDIARAYNGRAVRTTIVTTQLIVATILATLLIETETDIQMMTVKLPSADADSPEVCENTQ

SEQ ID NO: 174746 - protein, 114 aa, Glycine max
  Clone ID: PAT_MRT3847_128815C.1.pep
KTLPRTSVTQTLSQTTTIAGGQTRSHMGTSFCLLYYSSITHLELYLFCPTNIFPQQPSGPSHHFPTLGPLLAQVKCYRLPLRMSTVLSLKRKYSRLLILVLDSCLGSYFLFLAH

SEQ ID NO: 174747 - protein, 145 aa, Glycine max
  Clone ID: PAT_MRT3847_128816C.1.pep
KMATNAASATRTPRSQQRPTQSPRTPWRRPTLTPTSFSNNPSTFYSGSTGYRLSFDTCISSFSSITSLRDTLPENPHIYYFSEICADTNNLLSKRHSYFTPCWRCTLRGADVIDLQRTFDGKLQTNQLQELLCVGCRSHHVSIIK

SEQ ID NO: 174748 - protein, 75 aa, Glycine max
  unsure (1)..(75): unsure at all Xaa locations
  Clone ID: PAT_MRT3847_128817C.1.pep
EQEPKIPTTNNTYXLLVCPFGPMEDRILEWSPXKRSGTFYRKEDFSPLVXSRKIIFIFHQLFITGAXFSIMELAT

SEQ ID NO: 174749 - protein, 196 aa, Glycine max
  Clone ID: PAT_MRT3847_128818C.1.pep
VGMSWTDDQTLLCVVQDGTGYRYDVHANLIEPNLSLGKECFEDNVADCAFWGHGLVCITEANQLFCIADFRNPSAVKLADPGIDEMPHCMAVIEPQYTVSGNVEVLLGVDDAVVLAVEEDGVQRLGEGLLRGPLQKMVVSRDGKWLASFTHDGRLLVTTSDLTGVIIERECESALPPQQIAWCGMDAVLLYWDDML

SEQ ID NO: 174750 - protein, 61 aa, Glycine max
  unsure (1)..(61): unsure at all Xaa locations
  Clone ID: PAT_MRT3847_128819C.1.pep
YTHFSQRVSMDILVCSSTLSQPGATAQHLAISVLGTRSRRRLVQLLIHGSKSTVGXXGHGL

SEQ ID NO: 174751 - protein, 45 aa, Glycine max
  Clone ID: PAT_MRT3847_12881C.1.pep
RFRFFFFFFFFFFILETPTPRAGGFNYPIKSNTLPMYNNPNFKVD

SEQ ID NO: 174752 - protein, 104 aa, Glycine max
  Clone ID: PAT_MRT3847_128820C.1.pep
IKAQFVSGKTLNCDIIGAGSHSSEDFPEKEDQETPKKIDARLRQRIDPQYNEVQAQMETNLFKQSLDDVETPKGSMWDLKISQSKMALAKNTLWEADLRQGMLV

SEQ ID NO: 174753 - protein, 126 aa, Glycine max
  Clone ID: PAT_MRT3847_128821C.1.pep
KPLEDHIFQTIFLNNKHKDTWQKDEIKKDKIIREDWWHQLMHSWTHYAFVVPFVWALNRNSKHTTYAAAWTLVNAHEVAVISGTAAAYKLGADYPKDLYENDFAKLCFRLYLLLAHGKLLKKNRTS

SEQ ID NO: 174754 - protein, 79 aa, Glycine max
  Clone ID: PAT_MRT3847_128822C.1.pep
FKTNKFQIGKKNFMKRGKFFYLAPKRVKTRPTSGGAPIGFFNPGKPPRGGFFFKYPTPGRGLPPLLLREPLQRPVPPPP

SEQ ID NO: 174755 - protein, 102 aa, Glycine max
  Clone ID: PAT_MRT3847_128823C.1.pep
NCEENSQNFHAKHIWRWLLYLYVPTFSFKYLMRKPENNVYMKLKGMQKFNASKYTTTAVFNLIIYSKLTELYVISSITEMKCKNDSTMNPWSIISICKLCIK

SEQ ID NO: 174756 - protein, 68 aa, Glycine max
  Clone ID: PAT_MRT3847_128824C.1.pep
FLLLSSMKLIDAREAMVVIREAGVVIDSRLCLMMILFLDMLVTLRINLFSLIFSKLNYLFGLYSCLSN

SEQ ID NO: 174757 - protein, 64 aa, Glycine max
  Clone ID: PAT_MRT3847_128825C.1.pep
SIKKSECPKELEPADRRTAVHVNLTRRDEDYPVFPFLFSSLLWFFFFFIYHPYLRFFTFSFSFC

SEQ ID NO: 174758 - protein, 91 aa, Glycine max
  Clone ID: PAT_MRT3847_128826C.1.pep
VVSCICWLVYVLKISHSAHSLTLVYESRNPRIHKTWFLPPPSAKHVACIDSYNQSIKFEPARLRSKVKLSLQPDQQRSTSNLRSFCAVLGF

SEQ ID NO: 174759 - protein, 173 aa, Glycine max
  unsure (1)..(173): unsure at all Xaa locations
  Clone ID: PAT_MRT3847_128827C.1.pep
DTNVVMIHSVLLCAVIYSLGLNSIIKCVLRCSIIVINNNDPSSSSVSNNKPSPRLANTGIKKKVLKTFPTVSYSTEMKLPGLDIXCVICLSEFANGDKVRILPKCNHGFHVRCIDKWLSSHSSCPKCRQCLIETCKKIVGSQIQPVPPVPESTIIRIQPLEPEGLERNYREVC

SEQ ID NO: 174760 - protein, 67 aa, Glycine max
  Clone ID: PAT_MRT3847_128828C.1.pep
LLFMIREIEARCSNKDHNTPTHVLGTPLSPTTGQVARISHCSIDQRRLQCIHNFYPKETLHMKDRHQ

SEQ ID NO: 174761 - protein, 72 aa, Glycine max
  Clone ID: PAT_MRT3847_128829C.1.pep
RKTWIGFAGIHFPSRLGQLAHLPHFLLIIRVILAKNLDRIGPLYFGRSNYMVWLPPVNRKVPYLLGSVIQVP

SEQ ID NO: 174762 - protein, 86 aa, Glycine max
  Clone ID: PAT_MRT3847_12882C.1.pep
PGWGKHSKVVGNGTLRKAVEALLNGIGAPFQISECNLGRLISEGPEVAAWLRQPSTLNVLLLHDCIVYSQPVERHQTFNIPSLGAL

SEQ ID NO: 174763 - protein, 137 aa, Glycine max
  Clone ID: PAT_MRT3847_128830C.1.pep
PLGASVFEVFGSCNASGRFRFRGNFAGFVPCFQRWQALKMFFSPFRGSPSFFGPVRSLCWWVSFLGASPFRSGPLRYPGLQRVRRLPGIRCWCLCLLRIGCRCCLGFSSWVHSAVNLLSDLHGSPFEKDKKNVPKPK

SEQ ID NO: 174764 - protein, 34 aa, Glycine max
  Clone ID: PAT_MRT3847_128831C.1.pep
QASDGILWEVKGKWVVKGAVNVAIGASVVKDNEF

SEQ ID NO: 174765 - protein, 45 aa, Glycine max
  Clone ID: PAT_MRT3847_128832C.1.pep
GSNHFIYKLLKLFYYVDSIIIIFLTQDIPRPKISNIDPFEILKFI

SEQ ID NO: 174766 - protein, 104 aa, Glycine max
  Clone ID: PAT_MRT3847_128833C.1.pep
MGHAVHVLRVPSAEIVYWNHSAETLYGWKDRVELGVRGCGRDRAGFERERGAWHASSVQDRIGSSSGNLSVSSREGSASASASAQYVSLGQLDDESTSTLLVTV

SEQ ID NO: 174767 - protein, 86 aa, Glycine max
  Clone ID: PAT_MRT3847_128834C.1.pep
TRPEECYGRAILASPGDGEVLAMYGGLVWEAYRDSERAGGYFQRAVESSPDDSYVLGSYAKFLWDAEEDEEVGSSVSSSPPLVKSF

SEQ ID NO: 174768 - protein, 387 aa, Glycine max
  Clone ID: PAT_MRT3847_128835C.1.pep
MATTRSSSEDIVDSTPLLANSAGSSDDLTSGRRFARRQRLRQAAQFLRQASGRRMMREPSMLVREAAAEQLEERQSDWAYSKPVVVLDIVWNLAFVVVAGTVLVLSASEAPGMPLRLWIVGYAMQCVLHMVFVCVEYRRRRRQQPAAASSVQDRVGSSSGNLSVSSREGSASASASAQNVLLGQLDDESTSVAKHLESANTMFSFVWWIIGFYWVSAGGQALAQDSPQLYWLCIIFLGFDVFFVVFCVALACIIGIAVCCCLPCIIALLYAVTDQEGASKEDIEQLSKFKFRRIESNEKLTGTIQGPVGGIMTECQADSPIEHALAEEDAECCICLSSYDDGVELRELPCGHHFHCVCVDKWLYINATCPLCKYNILKSSNLSQEEV

SEQ ID NO: 174769 - protein, 79 aa, Glycine max
  unsure (1)..(79): unsure at all Xaa locations
  Clone ID: PAT_MRT3847_128836C.1.pep
YGSVGQLGVXNAMLIIIQLLFSGIIGKXQNNLFKKGFGWGLEFSFSLEPIFGKTFFWKALIPPLFTSELEPNFKGPVMV

SEQ ID NO: 174770 - protein, 82 aa, Glycine max
  Clone ID: PAT_MRT3847_128837C.1.pep
FSSHGVLSFSPSATAARRPLLLLPHAAAAGTPFSSFLVSTVASWELSPSPMAQSNITMAHLIHFLKPARSSLLRDGEQQLHG

SEQ ID NO: 174771 - protein, 82 aa, Glycine max
  Clone ID: PAT_MRT3847_128838C.1.pep
PSTPISLCSTRNSLGYILSVHWPCLHPILVAPSQSSRIAHKSRTSLTGFPSSKLRLCLSLFLFFSSFFYLSLDPPSVVSRSR

SEQ ID NO: 174772 - protein, 745 aa, Glycine max
  unsure (1)..(745): unsure at all Xaa locations
  Clone ID: PAT_MRT3847_128839C.1.pep
MLQTRPGGSGGRTVLVGVKMDSPSKELLTWALVKVAHPGDTVVALHVLGNNETVNGDGKSSLLSLVKAFDSVLAAYKGFCNLKQVDLKLKICRGSSVKKTLVREANGYSATHVVVGTTHGLHKIRSSTVVAKHCAKKLSKDCCVLAVNNGKVVFKRDSSPPSVAELQGVDRHNRNGLLGSIHWTLGKNRKVLSDDSSGMDADEKKTGPISDHSLAKFFSGIXETVRNPSCSICGTTLALPDPSFYQSAEGVSGDEGRENSLAMVPVQPTVAAKTELKPGWPLLDGRILSDRQSAGRSLFHLQISVVQWAMRLPSRNLSYAVDRDEKSKICDQGQDQPAALDSESGALVLVDAELGTASSPENNSGNIPKELEGLHEKYSSTCRLFEYQELVSATSNFLHENLIGKGGSSQVYRGCLPDGKELAVKILNPSDDVLSEFLLEIEIITTLHHKNIISLLGFCFENGKLLLVYDFLSRGSLEENLHEXGNKKNSLVFGWSERYKVAVGVAEALDYLHSKDDQPVIHRDVKSSNVLLSENFEPQLSDFGLAKWASTLSSHITCTDVAGTFGYLAPEYFMYGKVNDKIDVYAFGVVLLELLSGRKPISRDYPKGQESLVMWASPILNSGKVLQLLDPSLGDNYDHEEMEKIVLAATLCIKRAPRARPQMNLISKLLQGDAEAIKWARLQVNALDPPEMLDDEACPPSNLQSHINLALLDVEDDLLSMCSVEQGLTLEDYLRGRWSRASSFD

SEQ ID NO: 174773 - protein, 53 aa, Glycine max
  Clone ID: PAT_MRT3847_12883C.1.pep
IFGELCLQEIGRHVYILHQNFSTLVESSLRIWCKPLIAWTLFATYKVKSFGSC

SEQ ID NO: 174774 - protein, 176 aa, Glycine max
  Clone ID: PAT_MRT3847_128840C.1.pep
MLQTDPAGEPARGGGSGGRTVVVGVKMDSPCKELLTWALVKVAHPRDTVVALHVLGSHETVNGVGKSSLLSLVKAFDSVLAVYKGFCNLKQVDLKLKICRGSSVKKSLVREANGYSATHIVVGTTHGLHKIRSSTVVAKYCAKKLSKDCCVLAVNNGKVVFKRDSSPPSVAELQGD

SEQ ID NO: 174775 - protein, 51 aa, Glycine max
  Clone ID: PAT_MRT3847_128841C.1.pep
RAFSLRIRDLTVLCRCYYKCFDYVEITQSCFCHFENIHFSLIFIFSFISSF

SEQ ID NO: 174776 - protein, 135 aa, Glycine max
  unsure (1)..(135): unsure at all Xaa locations
  Clone ID: PAT_MRT3847_128842C.1.pep
RFEGAHSLATGELASLREQPLEDCDHFCDPXQYGAXTSSCYAGLINNAFSCILHAGAVHKDTDYPYTGRDGSCKCXRTKGADPGSKNRGRSLXIDVLLDTYLXNVPNACAMHAXFIETYCGGDSCTYICGHHLDH

SEQ ID NO: 174777 - protein, 43 aa, Glycine max
  Clone ID: PAT_MRT3847_128843C.1.pep
VLELVLNLYKIHRLGSTVYGLKDQVSTRYPMNISTCIILCIVV

SEQ ID NO: 174778 - protein, 60 aa, Glycine max
  Clone ID: PAT_MRT3847_128844C.1.pep
YLILPRALPCDIIWPYIIPTITIFLIMIYIRQTPIIPLHTTLYKLPTYQPILSSIALTVV

SEQ ID NO: 174779 - protein, 61 aa, Glycine max
  Clone ID: PAT_MRT3847_128845C.1.pep
DGCTRVISVMIKCEDLKRIPTGYPSLNAHVSQLVITNILCKYANVLACVCITIFPCTMDRF

SEQ ID NO: 174780 - protein, 72 aa, Glycine max
  Clone ID: PAT_MRT3847_128846C.1.pep
VLELAGNPPKNNKKTRIVPPPPQLAVRNPQKFSQLLGDVPLANGGVMPNIPNLFFSKKGGGSSKGAAAAHDF

SEQ ID NO: 174781 - protein, 97 aa, Glycine max
  Clone ID: PAT_MRT3847_128847C.1.pep
VDFNWKTGVPPKDWFNVVKKGPVYVMGLKLKKLREPVSPLHGERFYFCEKKKKMQELPRTPPTKKFWGRWPSPFVGLPGAGRQLWPLKPFFEKKKLI

SEQ ID NO: 174782 - protein, 76 aa, Glycine max
  Clone ID: PAT_MRT3847_128848C.1.pep
HKSKENTGKKQGTFYKSTNSIFHSQPSRLFLPSPKPFPPIPFYFLSPNQFTSFTYPCHVCKVVITFYNTKRFCFMF

SEQ ID NO: 174783 - protein, 90 aa, Glycine max
  unsure (1)..(90): unsure at all Xaa locations
  Clone ID: PAT_MRT3847_128849C.1.pep
KAGMEKTKATVQEKAERMTARDPVQXDWQPKERXKLTRRXGQQXAXXHNTAXKHSHTLGHGHGTNTDRNAFTRDSGPACCMTAPGTRCGH

SEQ ID NO: 174784 - protein, 39 aa, Glycine max
  Clone ID: PAT_MRT3847_12884C.1.pep
GLYINFCTHVFTGEFNTFTGFCAGFLYGETYYSLAQVWT

SEQ ID NO: 174785 - protein, 86 aa, Glycine max
  unsure (1)..(86): unsure at all Xaa locations
  Clone ID: PAT_MRT3847_128850C.1.pep
TTRLVVHNEKSNETSTWFGELIEVHATTRGGHHRGKVXRSTVAPDVXPPMDAEEYAECEAWVQDFPALREAMKKRGIVDMDLVMVD

SEQ ID NO: 174786 - protein, 79 aa, Glycine max
  Clone ID: PAT_MRT3847_128851C.1.pep
VFVRGTGGEIGTGSSLAPKIVPLGLSPKMIVEDIAKETVNDWKGLRFSVKLTVHNCEAKVTVVRSAAALVIEALNEPER

SEQ ID NO: 174787 - protein, 86 aa, Glycine max
  Clone ID: PAT_MRT3847_128852C.1.pep
EASGHAIQSSGVQEVSWFSLVKIYNKGSYNDQVYQQLKSINKTLLMLFSRDWSGIIKENNYPAFFSSPYNIRVFCAKHILSINDTI

SEQ ID NO: 174788 - protein, 65 aa, Glycine max
  Clone ID: PAT_MRT3847_128853C.1.pep
YINSHTYLNISLLLSQFFSTHHCACSNYSPGRSTIQSFSLIVHPPLLNVVLTSIHSTFTSSPTSP

SEQ ID NO: 174789 - protein, 63 aa, Glycine max
  Clone ID: PAT_MRT3847_128854C.1.pep
RLDMQLSITRAQIFYIFLRKDCFTRSIAICMAQGLKVSLLWQLIGQLIRVGPLILICLIHQPI

SEQ ID NO: 174790 - protein, 59 aa, Glycine max
  Clone ID: PAT_MRT3847_128855C.1.pep
SLSFSRGLVPVLPVLLLFRFARWLSFGLRAPVACPSPAGVRGFVSPCAPPSVVFARVLL

SEQ ID NO: 174791 - protein, 51 aa, Glycine max
  Clone ID: PAT_MRT3847_128856C.1.pep
VTIQWHIKVFGVSSFWAFRDSMKLGALWPTPHRIACLSLVSILSVWPLCNY

SEQ ID NO: 174792 - protein, 50 aa, Glycine max
  Clone ID: PAT_MRT3847_128857C.1.pep
SSSLLYLFIFIRGNCRHYRGLTILTAQSTKLDLEISTCIKIKLCELTIIF

SEQ ID NO: 174793 - protein, 46 aa, Glycine max
  unsure (1)..(46): unsure at all Xaa locations
  Clone ID: PAT_MRT3847_128858C.1.pep
LKSKMYEFIYSCILGESWFWRAHIYLXFPKMWAKKIILENCGGFSA

SEQ ID NO: 174794 - protein, 57 aa, Glycine max
  Clone ID: PAT_MRT3847_128859C.1.pep
WVVLCLIRGLVFFVGFGRQNGDIGFGCLLVQGVCGFDLVFIFWVLLILSWVFAHLLR

SEQ ID NO: 174795 - protein, 126 aa, Glycine max
  unsure (1)..(126): unsure at all Xaa locations
  Clone ID: PAT_MRT3847_12885C.1.pep
RPPFFCFCNCPVRVTIXHPLAKAFGGVLALHDELGEAFGVXSARALCRAECSPGSAQLRTLSXISLITLFVGPGEYSXENTHDTXRHDTALYIQMLTVEEXTQSISVSMETEGDLKSDFVLFSICT

SEQ ID NO: 174796 - protein, 153 aa, Glycine max
  unsure (1)..(153): unsure at all Xaa locations
  Clone ID: PAT_MRT3847_128860C.1.pep
CPWGCRFESPKRLVFRLCTLEVVHLTDEITWXHVVSFLLKNIVVADPYPDVLCNTRIKFGAFLDAIGGMGFDYVASGHYANVIHPXSDRRDEXSVLELSQDMVXDQTYFLSHLSQSQLKQLLFXLXCIPKXEVRKLATXFDLPNXDRKGFPRN

SEQ ID NO: 174797 - protein, 213 aa, Glycine max
  Clone ID: PAT_MRT3847_128861C.1.pep
TRLDACGFSTIIGLRVLKDKALIIEAKGSGISIVSMHDLIQEMGWEIVREECIEDPGKRTRLWDPNDIHLVLKNNTGTKAIKSITFNVSKFDEVCLSPQIFERMQQLKFLNFTQHYGDEQILYLPKGLESLPNDLRLFHWVSYPLKSLPLSFCAENLVELKLPWSRVEKLWDGIQNLEHLKKIDLSYSKNLLELPDFSKASNLEEVELYSCKN

SEQ ID NO: 174798 - protein, 62 aa, Glycine max
  Clone ID: PAT_MRT3847_128862C.1.pep
TLSNIYLFIIYMTNVFLFFFKYKSAKQFINLKKKNEMSTSREHSITTEHTKVLISCSNPSGV

SEQ ID NO: 174799 - protein, 44 aa, Glycine max
  Clone ID: PAT_MRT3847_128863C.1.pep
ALAPSKQLLHRYRKNRRFVSIENPVHCISGGPFAKNHKFGWVDR

SEQ ID NO: 174800 - protein, 46 aa, Glycine max
  Clone ID: PAT_MRT3847_128864C.1.pep
NNTHWTRDYDDEKRRGNFQIGSAFSTGGLRLISFMELIKLPFYRKH

SEQ ID NO: 174801 - protein, 94 aa, Glycine max
  Clone ID: PAT_MRT3847_128865C.1.pep
SPYLLVKLDSLASLIFCFQGDYLRVKEFDVVAPSISLLVCYYFPMIAVFFNESFPSHVFCLFFLFGLFDHSCESQDGQMIMLVSFRGIGLVAAV

SEQ ID NO: 174802 - protein, 61 aa, Glycine max
  Clone ID: PAT_MRT3847_128866C.1.pep
KLNLNKEIQPSFHSTVRKEFDCKTVSFVIFTVIDSFCNFYTNNYVFTNTCGGKKNVNTNHP

SEQ ID NO: 174803 - protein, 233 aa, Glycine max
  Clone ID: PAT_MRT3847_128867C.1.pep
KTPTLRKCSRHWSLFLYQIPSRIFFHFFDSLNSFCTAIQPFSTASRFVFFFTVLSLTLKLLKGKNGMANPLQLKSLNHISIVCASVEKSVDFYVNVLGFSPIKRPSSLDFNGAWLFNYGIGIHLLQSEDPEGMPKPVPINPKDNHISFQCESIAAVEKRLQQMKIEYVKNRVEESGIFVDQLFFHDPDGMMIEICNCDNIPVVPLPEDKVWSCSRFNCNIQNRQQQIKQMIPM

SEQ ID NO: 174804 - protein, 124 aa, Glycine max
  unsure (1)..(124): unsure at all Xaa locations
  Clone ID: PAT_MRT3847_128868C.1.pep
MANPLQLKSLNHISIVCASVEKSVDFYVNVLGFSPIKRPSSLDFNGAWLFNYGIGIHLLQSEDPEGMPKLVPINPKDNHISFQCESIAAVEKRLQQMKIEYVKNRVEXESGIFVDQPHASADAW

SEQ ID NO: 174805 - protein, 178 aa, Glycine max
  Clone ID: PAT_MRT3847_128869C.1.pep
TPEETTAEKTSNLDLIRQHLFGENIISDSSSFVSNLHHHPVKLEPPSSPEFECTSYILDNNTSSNFFTFLEGYDLPTMKKSEHYDEAKRYRGVRRRPWGKFAAEIRDPTRKGTRVWLGTFDSEIDAAKAYDCAAFKMRGQKAILNFPLEAGESDPKPNNSCGRKRRRDQNHDHEFELP

SEQ ID NO: 174806 - protein, 118 aa, Glycine max
  unsure (1)..(118): unsure at all Xaa locations
  Clone ID: PAT_MRT3847_12886C.1.pep
FNPSGLTSNLLKHLVGPSPSNPGDTLYVTGLSSRVTERDLEEHFSKEGKVSSCFLVVEPRXRISRGFAFVTMESAEDAERCIKYLNQSVLXEGRYITIERNALHQLCWQRSKMISTSM

SEQ ID NO: 174807 - protein, 42 aa, Glycine max
  Clone ID: PAT_MRT3847_128870C.1.pep
FERALYLLGYFIIIRARIDKFMDNYTILGNINPHMSLFFEYT

SEQ ID NO: 174808 - protein, 83 aa, Glycine max
  unsure (1)..(83): unsure at all Xaa locations
  Clone ID: PAT_MRT3847_128871C.1.pep
CFGNFSYKTLRWWCIAELCESEKERVCVCAEDVAIQQKRASGFSSSSTAEQVTETTRVLSLRGVHVIMGVRNXLAAKDVKETL

SEQ ID NO: 174809 - protein, 88 aa, Glycine max
  Clone ID: PAT_MRT3847_128872C.1.pep
NLDWSIIQHQKLAEGIRIVSHKFFVNILVNVASPTCYPLIIYLLIFAIFPLQQSMLTNNVSLLSALTYHNFLDAYAYYFKNGSLSVLG

SEQ ID NO: 174810 - protein, 313 aa, Glycine max
  unsure (1)..(313): unsure at all Xaa locations
  Clone ID: PAT_MRT3847_128873C.1.pep
MWPFSRKGASGFSSSSTAEQVTEGIDGTGLTAIVTGASSGIGTETTRVLSLRGVHVIMGVRNMLAAKDVKETLLKEIPSAKVDAMELDLSSLESVKKFASEFKSSGLPLNMLINNAGIMACPFKLSKDKIELQFATNHLGHFLLTNLLLDTMKKTSRETKKEGRIVNVSSEAHRFTYSEGIRFDKINDESSYSNWRAYGQSKLANILHANELTRRLKEDGVGISANSLHPGVIATNLSRHISPVNGLTKAIARLVLKNVQQGAATTCYVALHPQVKGTSGKYFSASNVAKTTSQGTDADLAKKXWDFSMDLTK

SEQ ID NO: 174811 - protein, 313 aa, Glycine max
  Clone ID: PAT_MRT3847_128874C.1.pep
MWLFGRKGASGFSSSSTAEQVTEGIDGTGFTAIVTGASSGIGTETTRVLALRGVHVIMGVRNMLAAKDVKETILKEIPSAKVDAMELDLSSMKSVRKFASEFKSSGLPLNILINNAGIMACPFSLSKDKIELQFATNHIGHFLLTNLLLDTIKKTSRESKKEGRIVNVSSEAHRFAYSEGICFDKINDESSYNNWRAYGQSKLANILHANELTRRLKEDGVDISANSLHPGTITTNLFRHNSAVNGLINVIGRLVLKNVQQGAATTCYVALHPQVKGISGKYFSDSNLAKTTAQGTDSDLAKKLWDFSMNLTK

SEQ ID NO: 174812 - protein, 45 aa, Glycine max
  Clone ID: PAT_MRT3847_128875C.1.pep
KSFLVKNGYILIASYVLVRYFLIYKLILETYFLQITSSNLFSKAT

SEQ ID NO: 174813 - protein, 150 aa, Glycine max
  Clone ID: PAT_MRT3847_128876C.1.pep
MGCRFGKRIYIPLPDFKARQHMFKVHLGDTPHNLTESDFEYLASRTEGFSGSDISVCVKDVLFEPVRKTQDAMFFLKNPEGMWIPCGPKQQGAVQTSMQELAAKGLASKILPPPITRTDFEKVLARQRPTVSKADLDVHERFTKEFGEEG

SEQ ID NO: 174814 - protein, 593 aa, Glycine max
  Clone ID: PAT_MRT3847_128877C.1.pep
EKELLEEEERKQREEVSRLVEERRKLRDEKVEAEKDHSRSSNLSKEKDRQKEAEKKRQEKRKEKDKGSSKSNSDVEELERRAGKESERKRDFDKKSEMDRREHQKSGLESGKGQNTNNAQNKNVTANNYNRGGTGTRYLDRMRGTILSSSKAFGFGRGINVPSTVVKENKFNSSVDHVHSRREICPPERPAAKSNVNGDDRNINHPVLPEPQPWTAAPKKSWQQLFTRSSPAPQSSNSNVICRPNSKIQAEVKSPQLSAQSPVTQSFTNPIQFGLPSPFNISTHASGPTSSSLGFSPAIEPFFPPVGNTSHDFRQDEQELFEDPCYVPDPVSLLGPVSESLDNFQLDLGIGFGTDNEMTKPHSLKSISAGSDVNKPSLIESPSSREKHSCSNWFPSTPNGQDKHGFPLDDAAANEKGTWQMWSTSPLGQEGLGLVGGAGSWLLSAQRNIPNKDDFVLSSSQKTMASLFNKEDNIISSTHSPQNVFLPNGQSGENFSPVTGSSGYDPWLQSALFPPLSGGPSAQEGATQNETIYGSPSGSASSHGLDGSPANCWSKKEWPVHGSVESIGKSAVSRPYSGGLHPTSDVQSFWSFD

SEQ ID NO: 174815 - protein, 78 aa, Glycine max
  Clone ID: PAT_MRT3847_128878C.1.pep
MGQTINPLGFRLGSTQSHDTIGLAQPTHYSETIHEDIEVRHCIKNHLQKNIRLSSGVEGIGQLLIQRRIDPIQGIIYM

SEQ ID NO: 174816 - protein, 58 aa, Glycine max
  unsure (1)..(58): unsure at all Xaa locations
  Clone ID: PAT_MRT3847_128879C.1.pep
RCMKIEKFPKLYTVQNPIPILLFLKFNFLKSLPYNHRLCFXQSLFDPNGLHGRRRKVP

SEQ ID NO: 174817 - protein, 97 aa, Glycine max
  unsure (1)..(97): unsure at all Xaa locations
  Clone ID: PAT_MRT3847_12887C.1.pep
XXYKILHGQTXQSKXPXHXXXFISIGPITXANKTASTEARSXXSNXIHRRKSXISSTXPKRXTXXXKESFFGXHXESGAQXIRAERPDQSRNNPRFC

SEQ ID NO: 174818 - protein, 139 aa, Glycine max
  unsure (1)..(139): unsure at all Xaa locations
  Clone ID: PAT_MRT3847_128880C.1.pep
LSSIYDSLAIVYWHKXNLTHNKCLQNCNSETDSCRNQTCHARCNLLKAEKEECEECEIPRPRPRPQHSEREPQQPGEKEEDXDEQPRTIPFPRPQPRHEEQHEQIEEQEWPRKEEKRVQHVSDEEDEDDDDEQDERQFP

SEQ ID NO: 174819 - protein, 119 aa, Glycine max
  unsure (1)..(119): unsure at all Xaa locations
  Clone ID: PAT_MRT3847_128881C.1.pep
SVANPSSPLVTAASLSTQLXSFNSHSPFTESPSISQSLPSHLSYRLKLPRVTLWRRADWLMGYLQWSSNAYWQRELPSIXGDDQFHFSSTTPIXPRQAGLSGSKRIVCAALNWVVDFYN

SEQ ID NO: 174820 - protein, 61 aa, Glycine max
  Clone ID: PAT_MRT3847_128882C.1.pep
TSISAFFFQLMRDGTHTFYTLFIGSLLLRCSLMDESVEFSVLDSMGITFIGVNYQGGVANA

SEQ ID NO: 174821 - protein, 46 aa, Glycine max
  Clone ID: PAT_MRT3847_128883C.1.pep
CYFQRFNKWYLKAMMPSLPFLVQKWPSHLYEQAMGEIYFITSCFRN

SEQ ID NO: 174822 - protein, 86 aa, Glycine max
  Clone ID: PAT_MRT3847_128884C.1.pep
AHRMYLLKPCHVIRSSMMQLAYSLSNSSLADTEARVHNITLMSISSLQNVILNGLFLGRGSARSVLCPYTFVFVELCLNDPFSVII

SEQ ID NO: 174823 - protein, 220 aa, Glycine max
  Clone ID: PAT_MRT3847_128885C.1.pep
KQCLSWLDQQPSRSVVYLCFGSRGSFSVSQLREIANGLEKSGHSFLWVVKRPTQDEKTKQIHDTTTTTTTMDFDLSSVLPSGFIERTKDRGLVVSSWAPQVEVLSRGSVAAFVSHCGWNSVLEGVVAGVPMVAWPLYAEQHVNMHVMVGEMKVAVAVEQREEDGFVSGEEVEKRVREVMESEEIRERSLKLKEMALAAVGEFGSSKTALANLVQSWTTHV

SEQ ID NO: 174824 - protein, 100 aa, Glycine max
  Clone ID: PAT_MRT3847_128886C.1.pep
MEHQQQQLRNLRDFLLVYNRMTELCFQRCVPSLHHRALDAEEEACLHSCAGKLIHSNHRLMAAYVHLMPALVQRRMADYEAASAVPGVPAEQPRDSPSGS

SEQ ID NO: 174825 - protein, 74 aa, Glycine max
  Clone ID: PAT_MRT3847_128887C.1.pep
ATPPIPMEIQVPMFSACGLRVRFLKASALRVGTRPLQWVRNITASGSEGIEGQTEFVISGWTMTQNPGLASRAG

SEQ ID NO: 174826 - protein, 608 aa, Glycine max
  Clone ID: PAT_MRT3847_128888C.1.pep
MKEEVKKREVETQNTNTNMFDGVPDQFHQFITPRTSLPLHLPFPLHTSGGTPNTTTFPSNFDPYNHPHQLPLQPNNLLHPLHHKDEDKEENTTVPMNLEIQRDQRQQLPELIDPWNNDEVLALLRIRSSMESWFPELTWEHVSRKLAELGYKRSAEKCKEKFEEESRYFNNINYGKNNNNNNNSSNYRFLSELEQLYHQGGSGDHHLENTTQPPLQKQDKMGHHALELEVEGDSRNVVDALVTKQNEQSDEALAVEKITKDRKRKRPDRFEMFKCFCESIVHKIMAQQEEMHNKLLEDMMKRDDEKFTREEAWKKQEIEKMNKELEMMAREQAIAGDRQANIIQILNKFSATSSPASHTLKKVNNDSNLNIHITQNPNPSQTENPTLSVAQDTLQVIPSTSSTSTPALPQNPSSYSLNIQNNNNNIPVETNSVLNKGNEKDDVGRRWPKDEVLTLINLRCTSVNNNNNEEKEGNNKVPLWERISQGMLELGYKRSAKRCKEKWENINKYFRKTKDVNKKRSLDSRTCPYFHQLSSLYNQGKPVLQSESHLNSPPNQNPEQVTPDQTTQAHESSSQVGSGGGFSVQQQQVDHGGEKTLMQVPSLDFDQF

SEQ ID NO: 174827 - protein, 47 aa, Glycine max
  Clone ID: PAT_MRT3847_128889C.1.pep
LHQMGFRSQWAWFNPPPLHFCYVPFRMPPPCNAFCTQLSIELNWPVY

SEQ ID NO: 174828 - protein, 56 aa, Glycine max
  unsure (1)..(56): unsure at all Xaa locations
  Clone ID: PAT_MRT3847_12888C.1.pep
MKMXXHVFFXAXILXXXXXXAXXXXPXXMXXXXXGXNSEVKCXXWKXXVGXHHILA

SEQ ID NO: 174829 - protein, 68 aa, Glycine max
  Clone ID: PAT_MRT3847_128890C.1.pep
SQEFLNFFLLLCVRFLKGKKITLCAGHRLRESNFFPLLVYLLNTLLFDLGLRVRFKLLLCFYQLSVQF

SEQ ID NO: 174830 - protein, 164 aa, Glycine max
  Clone ID: PAT_MRT3847_128891C.1.pep
GKQKPLPPNRVNLQGKTIPRGPKTPGATTLQDNGLFFQPHLKGKKKRRNLIKHEKPPRGRKPPGIKIRQQALANGLKKGKAWGTPLWTSSSSMAEKIRSQAGGPPLGKPLNQLGKFPKQNPGITNQGAPKGAQANFMKRRIHLTKHPGTSPLGKGLHTPLPLEE

SEQ ID NO: 174831 - protein, 107 aa, Glycine max
  unsure (1)..(107): unsure at all Xaa locations
  Clone ID: PAT_MRT3847_128892C.1.pep
MIKDTSIRDQVRPLVLCMVIICFEVSLISHCWVVISRLLMRYLEVGINRGGNRMISTAAGRPRIVGAMNEANRFSFILVLRVCYNFXFLWALVREVGGSLCLIFLVG

SEQ ID NO: 174832 - protein, 75 aa, Glycine max
  Clone ID: PAT_MRT3847_128893C.1.pep
SAYRNTNMRNSALVIVALVFAQAVALNLPSIYYYSYTLVNKDSNAPFGPRGFGEEDGVNSHYVYQDGTDYQESWS

SEQ ID NO: 174833 - protein, 1233 aa, Glycine max
  Clone ID: PAT_MRT3847_128894C.1.pep
MGSKDGFFRYADGFDKLLLLFGTLGCIGGGLQTPMTMLVLGSLIDDYAGGSGHAVSNHVIDKYALRLLGVAIGVALSSFIAVKLCLGDLLVMGSNPKTASLHMQGTAERQTSRMRTEYLKSVLRQEVGFFDKQTDSSSTFQVIATITSDAQTIQDTMADKVPNCLGHLSAFFSSFVVALFLSWRLALAAFPFSIIMIMPAIIFGKTMKELGNKMKDAYGVAGSIAEQTISSIRTVYSYVGEKQTLEAFNSGLQKSMEIGIKLGQTKGVIIGSFGLLYATWAFQSWVGSVLVRTKGESGGPVFCAEICIIWGGLSLMSALPNLGFILEATTATTRIFEMIDRVPTINSYKEKGKLLTHTRGEITFNEVEFSYPSRPDAPVLQGLNLKVQAGKTVGLVGGSGSGKSTIISLLERFYDPVYGEILLDGYDIQTLHIKWLRSQMGLVNQEPILFATSIRENILFGKEGASMEAVISAAKAANAHDFIVKLPNGYETQVGQFGAQLSGGQKQRIAIARALIREPKILLLDEATSALDSQSERLVQDALDKASRGRTTIIIAHRLSTIRKADSIVVIQSGRVVESGSHDELLQLNNGQGGTYSKMLQLQQAISQDENALHQINKSPLAMVNQTSPIFSRQSSPIHHAFSSTQPFSPIYSISIPGSSFDDYSSENWEKSSNASFSQWRLLKMNAPEWKHALLGCLGAIGSGICQPIYSYCLGIVASVYFIKDNSLIKSEIRLYSSIFCCIAVVNFLSGLIQHYNFTIMAERLLKRVRENLLEKVLTFEMGWFDQEDNSSAAICARLATEANLVRSLVAERMSLLVNVSVMAFLAFVLSLIVTWRVALVMTAMQPLIIVCFYSKNILMKSMAGKARKAQREGSQLAMEATTNHRTIAAFSSEKRILNLFRMAMEGPKKESIKQSWISGSILSASYFVTTASITLTFWYGGRLLNQGLVESKPLLQAFLILMGTGRQIAETASTTSDIAKSGRAISSVFAILDRKSEIEPEDPRHRKFKNTMKGHIKLRDVFFSYPARPDQMILKGLSLDIEAGKTVALVGQSGSGKSTIIGLIERFYDPMKGSISIDNCDIREFNLRSLRSHIALVSQEPTLFAGTIRDNIVYGKKDASEDEIRKAARLSNAHEFISSMKDGYDTYCGERGVQLSGGQKQRIAIARAVLKDPSVLLLDEATSALDSVSENRVQEALEKMMVVEQGSHSELLSMGSNEAYYSLIRLQHGHST

SEQ ID NO: 174834 - protein, 1288 aa, Glycine max
  Clone ID: PAT_MRT3847_128895C.1.pep
MAPVASTTGKEMETVEGNCSNGEKELWNKVFKRSRILRHRNPTWDMGSKDGFFRYADGFDKLLLLFGTLGCIGGGLQTPMTMLVLGSLIDDYAGGSGHAVSNHVIDKYALRLLGVAIGVALSSFIEGVCWTRTAERQTSRMRTEYLKSVLRQEVGFFDKQTDSSSTFQVIATITSDAQTIQDTMADKVPNCLGHLSAFFSSFVVALFLSWRLALAAFPFSIIMIMPAIIFGKTMKELGNKMKDAYGVAGSIAEQTISSIRTVYSYVGEKQTLEAFNSGLQKSMEIGIKLGQTKGVIIGSFGLLYATWAFQSWVGSVLVRTKGESGGPVFCAEICIIWGGLSLMSALPNLGFILEATTATTRIFEMIDRVPTINSYKEKGKLLTHTRGEITFNEVEFSYPSRPDAPVLQGLNLKVQAGKTVGLVGGSGSGKSTIISLLERFYDPVYGEILLDGYDIQTLHIKWLRSQMGLVNQEPILFATSIRENILFGKEGASMEAVISAAKAANAHDFIVKLPNGYETQVGQFGAQLSGGQKQRIAIARALIREPKILLLDEATSALDSQSERLVQDALDKASRGRTTIIIAHRLSTIRKADSIVVIQSGRVVESGSHDELLQLNNGQGGTYSKMLQLQQAISQDENALHQINKSPLAMVNQTSPIFSRQSSPIHHAFSSTQPFSPIYSISIPGSSFDDYSSENWEKSSNASFSQWRLLKMNAPEWKHALLGCLGAIGSGICQPIYSYCLGIVASVYFIKDNSLIKSEIRLYSSIFCCIAVVNFLSGLIQHYNFTIMAERLLKRVRENLLEKVLTFEMGWFDQEDNSSAAICARLATEANLVRSLVAERMSLLVNVSVMAFLAFVLSLIVTWRVALVMTAMQPLIIVCFYSKNILMKSMAGKARKAQREGSQLAMEATTNHRTIAAFSSEKRILNLFRMAMEGPKKESIKQSWISGSILSASYFVTTASITLTFWYGGRLLNQGLVESKPLLQAFLILMGTGRQIAETASTTSDIAKSGRAISSVFAILDRKSEIEPEDPRHRKFKNTMKGHIKLRDVFFSYPARPDQMILKGLSLDIEAGKTVALVGQSGSGKSTIIGLIERFYDPMKGSISIDNCDIREFNLRSLRSHIALVSQEPTLFAGTIRDNIVYGKKDASEDEIRKAARLSNAHEFISSMKDGYDTYCGERGVQLSGGQKQRIAIARAVLKDPSVLLLDEATSALDSVSENRVQEALEKMMVGRTCIVIAHRLSTIQSVDSIAVIKNGKVVEQGSHSELLSMGSNEAYYSLIRLQHGHST

SEQ ID NO: 174835 - protein, 249 aa, Glycine max
  Clone ID: PAT_MRT3847_128896C.1.pep
LADLYNKIGKFKESKSYCENALRIFGKIKPGVPSEEIASGLIDVAAIYQSMNDLEKGLKLLKKALKIYGNAPGQQSTVAGIEAQMGVMYYMLGNYSDSYNIFKSAIAKFRASGEKKTALFGIALNQMGLACVQCYAINEAADLFEEARTILEKEYGPYHPDTLGVYSNLAGTYEVFCRVDDAIEILEYVVGMREEKLGTANPDVDDEKRRLEELLKESGRARNRRSRRSLETLLDTHSQLVKNNGIKVL

SEQ ID NO: 174836 - protein, 61 aa, Glycine max
  Clone ID: PAT_MRT3847_128897C.1.pep
IPGSIGGIHFPLPYNRAPLKGVVFGPSFFGVKCFFLKKARAPPLWRSSSFSAYSFSRRCTL

SEQ ID NO: 174837 - protein, 36 aa, Glycine max
  Clone ID: PAT_MRT3847_128898C.1.pep
DLVLILHGSKLSGEHYLNTQEFIDAEAADLSAMLSA

SEQ ID NO: 174838 - protein, 58 aa, Glycine max
  unsure (1)..(58): unsure at all Xaa locations
  Clone ID: PAT_MRT3847_128899C.1.pep
IXTVTRLNRYSSWGQHXHPPHHFFNKNSXXPXKIKSPKHSXPQIXPLLTTSSKGSMGT

SEQ ID NO: 174839 - protein, 58 aa, Glycine max
  unsure (1)..(58): unsure at all Xaa locations
  Clone ID: PAT_MRT3847_12889C.1.pep
SCPPRIAEFKPVPDVDHLQDLLAFQHQGPXXLAFFGTRNLGFXHQELIEILSFAMVTT

SEQ ID NO: 174840 - protein, 65 aa, Glycine max
  Clone ID: PAT_MRT3847_1288C.1.pep
RNIICLAGCGAVCVSYLEPANPRGHISNPAGCTQTAPSAPLVNIAAVQSPASVAHLCEKRRVNSD

SEQ ID NO: 174841 - protein, 86 aa, Glycine max
  Clone ID: PAT_MRT3847_128900C.1.pep
LWSFRRLALLFRLVTLDNDRSLMHIVIHATDPSPTPYASLTYSLTPSSSLSLAVPAILALGAHHADSFTRTLARSAHELHYRLHTY

SEQ ID NO: 174842 - protein, 100 aa, Glycine max
  Clone ID: PAT_MRT3847_128901C.1.pep
AGFVFKGLWLGLLAARASCVFTMLVVLARASWGGQVLRAGGPASSSVSSEEGGDQGQCGLFSSGAAKECSRSGSLVWSIVIAVASRWFFYVFAFKLGFIA

SEQ ID NO: 174843 - protein, 218 aa, Glycine max
  Clone ID: PAT_MRT3847_128902C.1.pep
MKLISSINPKNLKLSPKRFFRKKERSLVSRSDPPSFGSGSSSDDSTTNHKPSAGNQTPTSVLPGVSGDWSDVAAVDVRWDLAQAFRLIDRDNDGVVTRQDLEALLTCLGASPCPDDVAVMLGEVDGDGITVERLMSYVGSGLKPGSDPDELKEAFEVFDTDRDGRISAEELLRVFKAIGDERCTLEECRRMIEGVDRNGDGFVCFEDFSRMMELQQQR

SEQ ID NO: 174844 - protein, 57 aa, Glycine max
  Clone ID: PAT_MRT3847_128903C.1.pep
RSNLLRQQVIKNAIDNHTNSSPVPTKNPPFRKIKPLKLERIHRPTRILQEKFFPLKI

SEQ ID NO: 174845 - protein, 65 aa, Glycine max
  Clone ID: PAT_MRT3847_128904C.1.pep
KRRDEEWRRSTKVKDDSYLVPLRSWRAEFSDVHDRLGEGSVSDSGLPSSKRQHLQSKASASRMRR

SEQ ID NO: 174846 - protein, 48 aa, Glycine max
  unsure (1)..(48): unsure at all Xaa locations
  Clone ID: PAT_MRT3847_128905C.1.pep
XLPVVIXVXLILVGKISRAGLMAVYHDIIEFCNMNYRVSTRIILFMGL

SEQ ID NO: 174847 - protein, 53 aa, Glycine max
  Clone ID: PAT_MRT3847_128906C.1.pep
YFRLPEPKGRTYGELDILFEDRIPARKFATTKVDEFAAAERDAAQGGGGGLVH

SEQ ID NO: 174848 - protein, 51 aa, Glycine max
  Clone ID: PAT_MRT3847_128907C.1.pep
RYRGGLFWPPPRFRRRNQVFFIATEFLCLFSIVSLKFYEFCFPVNGFYEQI

SEQ ID NO: 174849 - protein, 49 aa, Glycine max
  Clone ID: PAT_MRT3847_128908C.1.pep
TWLCEVTTYLCVSYIPLLGDMTSYCVSCSYICTQITLIQLLIYIEGFSI

SEQ ID NO: 174850 - protein, 85 aa, Glycine max
  unsure (1)..(85): unsure at all Xaa locations
  Clone ID: PAT_MRT3847_128909C.1.pep
KSHEVFIPVEKGSIGGLGFHVAQFRALEALIKGKLKWGPIVFRDGXMDKGSPVAQLSLAGFTPFXMEEKVFYILGQPKKALRVMF

SEQ ID NO: 174851 - protein, 67 aa, Glycine max
  Clone ID: PAT_MRT3847_12890C.1.pep
KLQNYQHSVWKTHAINNNLQKSTRCSKLYQHERTQKHHDAAPIKFIWNQADKLYFFYPIIPIVFYIL

SEQ ID NO: 174852 - protein, 272 aa, Glycine max
  unsure (1)..(272): unsure at all Xaa locations
  Clone ID: PAT_MRT3847_128910C.1.pep
MLTWWGKSSSKKTKKKANKESFIDAFHRKFKIPSEGKPNSRSGGSRRHCNDSISEKGAQSPPESRSPSPSKVGRCQSFVDRPHAQPLPLPGLHPSNISRADSEISIPSSRRRHGKGSKPSLFLPLPKPVCIRGRLNPAELDGDLVTASVSSESSADSDEPVDSHNRSPLATDCETGTRTAAGSPSSLMQKDQSSTVSQINSREAKKPANILGNHMSSTSPKRRPLSNHVTNLQIPPHGAFFSAPDSSRSSPSRSPLRAFGTEQGVNSXFWAG

SEQ ID NO: 174853 - protein, 38 aa, Glycine max
  Clone ID: PAT_MRT3847_128911C.1.pep
QANFNVNIHGQRNFRPKFREAGKPLPKLKGFTYPLATD

SEQ ID NO: 174854 - protein, 48 aa, Glycine max
  unsure (1)..(48): unsure at all Xaa locations
  Clone ID: PAT_MRT3847_128912C.1.pep
NFKYPITLNTQTKIFVFHSNSIQLREIVFPKECSRFLPXNSIYFFIHD

SEQ ID NO: 174855 - protein, 49 aa, Glycine max
  Clone ID: PAT_MRT3847_128913C.1.pep
GTNQPGGVYLHQISKGPHSLSTQQNFFLVIQIVETWGRTNNKKIWAGLG

SEQ ID NO: 174856 - protein, 81 aa, Glycine max
  Clone ID: PAT_MRT3847_128914C.1.pep
LSKCPINRIGGSLTSITLHTLTPLSSTMHYRSLHQRQCKKGHRITATRARTQKTLSILPTRKHKEDHRTYITTRDQATPQF

SEQ ID NO: 174857 - protein, 42 aa, Glycine max
  Clone ID: PAT_MRT3847_128915C.1.pep
LAPKRGFQFYKIGISSCSLKNFWGENETPRLKVPKNLLNKFD

SEQ ID NO: 174858 - protein, 60 aa, Glycine max
  Clone ID: PAT_MRT3847_128916C.1.pep
SSFIEEEPSIALSVTLGAGKNKPDQLPYVDGRAKFTEGFFLEGITGVFWANLRLYVLNLP

SEQ ID NO: 174859 - protein, 116 aa, Glycine max
  unsure (1)..(116): unsure at all Xaa locations
  Clone ID: PAT_MRT3847_128917C.1.pep
PSTACHSTLKRSGSGCATLIIVHTYNGLCVQLLESEILVDGPYDIDRCAYVTDTVLAACCNASEXHHVLLHGTLLNSNMETPXTYSNMGTTDGIAQYSDRTLHRTGYDTVLATVFL

SEQ ID NO: 174860 - protein, 440 aa, Glycine max
  unsure (1)..(440): unsure at all Xaa locations
  Clone ID: PAT_MRT3847_128918C.1.pep
RAAKVHKVPRLLKGSFYQHVLVNQSSCSTLVMAYVKHRLVEDALKVLNDKKWQDPRYEDNLYHLLICSCKEAGLLEDAVKIYSRMPKSDDNPNMHIACTMIDIYSVMGLFKDAEVLYLKLKSSGVALDMIAFSIVVRMYVKAGALKDACAVLDAIDMRPDIVPDKFLLCDMLRIYQRCNMATKLADLYYKISKSREDWDQELYNCVLNCCAQALPVDELSRLFDEMVQHGFAPSTITFNVMLDVFGKAKLFNKVWRLYCMAKKQGLVDVITYNTIIAAYGKNKDFNNMSSTVQKMEFDGFSVSLEAYNSMLDAYGKDGQMETFRSVLQKMKDSNCASDHYTYNTLINIYGEQGWINEVANVLTELKECGLRPDLCSYNTLXKAYGIAGMVAEAVGLIKEMRKNGIEPDKKSYTNLITALRRNDKFLEAVKWSLWMKQMKI

SEQ ID NO: 174861 - protein, 42 aa, Glycine max
  Clone ID: PAT_MRT3847_128919C.1.pep
VYIFSSLNLLYLLLLYIHIQIVLFELIFKKIFIKGIHNLNKK

SEQ ID NO: 174862 - protein, 72 aa, Glycine max
  Clone ID: PAT_MRT3847_12891C.1.pep
CVCVCVRARARTSARSSAHSLTRARALSRSRSLAQSLALALSRARARARSRARARARARARARARARTHAHT

SEQ ID NO: 174863 - protein, 147 aa, Glycine max
  Clone ID: PAT_MRT3847_128920C.1.pep
GRKRLAGHNERRRKPQMGIHPGKSGTLLQPCGDSRFQGSMLTSSFIRPEMLPSGVMCSEKYGMSDFWRPIKAEHGTGFRNLSSMAATNGHPLPRSLFSSYNGKQFPFLHENSSTSTTGSIFCESNSHYPSALGAQNSGLRPLFQDTV

SEQ ID NO: 174864 - protein, 213 aa, Glycine max
  Clone ID: PAT_MRT3847_128921C.1.pep
MGSRTTWRVVGVEDDKGAERGMPSFNSELPNSNSCYTEGNTIDSFRVSDFGAFDQSYHIEDAVDLSGNPVYNSLKVNSQTISPGSVHISSLGQLPISLEKSPLNNQTEPPHRLRLQKVQSSNPGTILVGNTDNWEESTMADASPRTDISTDGDTDDKNHPFDRNQALTAVSDSSDRSKDKSDQKTLRRLAQNREAARKSRLRKKAYVPQLESS

SEQ ID NO: 174865 - protein, 46 aa, Glycine max
  Clone ID: PAT_MRT3847_128922C.1.pep
IEKIMQLNCAVKYLHQKSSTAMGGTKLNLWPLNYILLSLCTKRKGL

SEQ ID NO: 174866 - protein, 120 aa, Glycine max
  Clone ID: PAT_MRT3847_128923C.1.pep
GPQARGGRKRAPGKKAPESGQKGTHESRSPPEGRPGRGPRAGARHPHEPEGKGGKEKAPPHHKPKDPKKKAARPKHGPDRTRGRVPHVFLPFFCFSSFFFFFFFFFRPPLFRADTSYDAA

SEQ ID NO: 174867 - protein, 46 aa, Glycine max
  unsure (1)..(46): unsure at all Xaa locations
  Clone ID: PAT_MRT3847_128924C.1.pep
FDFSPRVFWVLDTPQRLMWLSVILDKIATFNLRTKREKKIGLGFXA

SEQ ID NO: 174868 - protein, 61 aa, Glycine max
  Clone ID: PAT_MRT3847_128925C.1.pep
LFFSFFFLKPTLFVINEQYYGSNLRSKTASPTDIEKPYLVNDNETKDKNRGFGGQWGFLLP

SEQ ID NO: 174869 - protein, 60 aa, Glycine max
  Clone ID: PAT_MRT3847_128926C.1.pep
LQVFIENVSNSSTQVIHTCGFIQFQLMTSYFSQVFSQSRTIVKLKQGLFSPLIPTSPDAW

SEQ ID NO: 174870 - protein, 257 aa, Glycine max
  unsure (1)..(257): unsure at all Xaa locations
  Clone ID: PAT_MRT3847_128927C.1.pep
MMRARFPLLLLGLVFLASVSVSFGIAYWEKENPKHNKCLQSCNSERDSYRNQACHARCNLLKVEKEECEEGEIPRPRPRPQHPEREPQQPGEKEEDEDEQPRPIPFPRPQPRQEEEHEQREEQEWPRKEEKRGEKGSEEEDEDEDEEQDERQFPFPRPPHQKEEXRKQEEDEDEEQQXRESEESEDSELRRHKNKNPFLFGSNRFETLFKNQYGXRIRVLQRFNXQRFPQLQNLXRDYRIFGVSTSKPNTLLLPNHA

SEQ ID NO: 174871 - protein, 302 aa, Glycine max
  Clone ID: PAT_MRT3847_128928C.1.pep
HASVGTRRKKREEAPLSLSEDDDGDENENSQNEGSKRVKNEGYEQAREQRIKENMERMQKLGLFDLSHKLKPLKKQKKRTHQPNHSPQRRSFRIMSRAPINYAERDFRESASKKNDEVEIVIPEGTNPEVYTEEQEKLLGDCESTWELYVDGYDEDGNRIYDPIKGETCHQCRQKTLGQHTHCNKCELLQGQFCGDCLYMRYGENVVEANHNTKWTCPPCRDICNCSRCRRGKGWMPTGNIYSKVSKLGFKSVAHYLIKNRRSKLEGSDAENIVPEEISEAEASADTTPNRPTRTRASKKRA

SEQ ID NO: 174872 - protein, 70 aa, Glycine max
  Clone ID: PAT_MRT3847_128929C.1.pep
FRSLFLGPMMFDGEHLLGCSNGRAFMPNNLWKSYYAEGHDYFCLPTKSIGPPGMHTLFYSLTIEGYLPLG

SEQ ID NO: 174873 - protein, 111 aa, Glycine max
  unsure (1)..(111): unsure at all Xaa locations
  Clone ID: PAT_MRT3847_12892C.1.pep
XPXWHXAXVXXRXLILXAXPXTXSKXXXCXSLRTXTSXXXXXXSTXEXFDSXSXXSXXPXXXXXMXNVXXXXXRRRXXXXGXXXXHXRRXSXXXRXRXAXXXXXAXDXXXX

SEQ ID NO: 174874 - protein, 61 aa, Glycine max
  unsure (1)..(61): unsure at all Xaa locations
  Clone ID: PAT_MRT3847_128930C.1.pep
NASRISGQAYYSPALQLAXRGTKTGYPDKGTFAGGGVFPPSTVSYRWSSRRRLLVCDRPLL

SEQ ID NO: 174875 - protein, 49 aa, Glycine max
  Clone ID: PAT_MRT3847_128931C.1.pep
KHSIGGHHLNQPSQVASGPSGCILGLVIVSYSSCHLISHWVYSRFWPSL

SEQ ID NO: 174876 - protein, 131 aa, Glycine max
  unsure (1)..(131): unsure at all Xaa locations
  Clone ID: PAT_MRT3847_128932C.1.pep
MTFSPRETEGRVPFACDPMNGLTRRFMYCHTRVPIHERVHDLIARLTLPEKPTLVANNAVGKPTLDNHGYDWWSXALHCEYKECPGTQFGGAFPGSTMFPKVYKPMMIQSVTVTRNWTVGALRQRIHVQRR

SEQ ID NO: 174877 - protein, 265 aa, Glycine max
  unsure (1)..(265): unsure at all Xaa locations
  Clone ID: PAT_MRT3847_128933C.1.pep
MAIPYPHFIATEKAAMDAGLLHPSSPSSVILTQDDLKKIAAYKAVEYVESGMVLGLGTGSTAKHAVDRIGELLRQGKLKDIVGIPTSTKTHDQALSLGIPLSDLDSHPTVDLAIDGADEVDPFLNLVKGRGGSLLREXMVEGACKKFIVIVDESKLVNYLGGSGLAMPVEVIQFCWRFTAARLQKLFQEAGCVAKLRTFAEKDEPYVTDNGNFIVDLYFERSIGDLKAASDAILQLAGVVEHGMFLDMATTVIVAGELGLTVKNK

SEQ ID NO: 174878 - protein, 266 aa, Glycine max
  Clone ID: PAT_MRT3847_128934C.1.pep
MAIPYPHFIATEKAAMDAGLLHPSSPSVILTQDDLKKIAAYKAVEYVESGMVLGLGTGSTAKHAVDRIGELLRQGKLKDIVGIPTSTKTHEQALSLGIPLSDLDAHPAIDLAIDGADEVDPFLNLVKGRGGSLLREKMVEGACKKFIVIVDESKLVNYLGGSGLAMPVEVIKFCWRFTAARLQKLFEEAGCVARLRTFGEKEKEEPYVTDNGNFIVDLYFERSIGDLKAASDAILQLAGVVEHGMFLDMATTVIVAGELGLTVKNK

SEQ ID NO: 174879 - protein, 39 aa, Glycine max
  Clone ID: PAT_MRT3847_128935C.1.pep
VCVRESARDAPLVVSLSLGLVCVVYVRSTIFASSVEDGG

SEQ ID NO: 174880 - protein, 64 aa, Glycine max
  Clone ID: PAT_MRT3847_128936C.1.pep
ASMWLTCKLSIPRPSQFSGFLGMCIISISSHSLGFKLVHISGRVRSLVVEMVILYPFLWNWGVK

SEQ ID NO: 174881 - protein, 69 aa, Glycine max
  Clone ID: PAT_MRT3847_128937C.1.pep
EMRTQCFMDTTGTIHTTPSRPGYSLSTPVIPKSNCILHVTHMPLIANLIPPWHMCNFTFAYIQPIDCSI

SEQ ID NO: 174882 - protein, 127 aa, Glycine max
  Clone ID: PAT_MRT3847_128938C.1.pep
KFTIERPEPPEDHTGASASIEKSIRYQFKVGGKGSVPADEFTITCEGSIKAGVSEVAFAKDSEKYPPTGFVNKQPPRDYLVVMPALTRGTSSEETTSNRTSARGKRPATITYIRAMAPLEGRETSSD

SEQ ID NO: 174883 - protein, 107 aa, Glycine max
  unsure (1)..(107): unsure at all Xaa locations
  Clone ID: PAT_MRT3847_128939C.1.pep
SXAKXXXSSXDFEFRRNRPXGRFLTPXNRVSXAXXAXGSTTAXVALPRXILIXIXKSYYXXXLXXXXGXXXXDXTXXFKPQFLILFLFHIFFFSSSSRIPSLRTRXW

SEQ ID NO: 174884 - protein, 506 aa, Glycine max
  unsure (1)..(506): unsure at all Xaa locations
  Clone ID: PAT_MRT3847_12893C.1.pep
MGSLDLKWNSSGCMVLKKVESTKTKGEDMSSLCGSSAYLYKRRGRRIRCREQRVNIVATGPAIDHAPVIAKPLTKDDLIDYFVSGCKPKHNWRIGTEHEKFGFELKTLRPINYKQISALLNRIATRFDWEKIMEGDNIIGLKNGKQSISLEPGGQFELSGMPLKTLHQTCDEINSHLYQAKTVAEEMGIGFLGLGFQPKWRLEDIPGVPKVRYNIMQNHLGKFGSPTIESLFMTCSVQVNLDFSSEADMIKKMRASIALQPLAAALFANSPFKEGVPNGYLTIRSHRVGQMDKSRAGILPFVFYDTFGFEKYVDYALDVPMLFVYRKNKYIDCRGMSFRDFMAGKLPVIPGQVPTLGDWGNHLTTIFPEVRLKRYMEMRGADDGPLEMLCALPAFWVGXLYDEVSLQNXLDMIADWTPEDIQNLRNKVPITGLRTPVQGRLLQHIAEDTLKWAKDGLDRRCLNESVFLDPLKEVIGTGLTQADKLLEMYNNKWGNNIDPVFRERCY

SEQ ID NO: 174885 - protein, 53 aa, Glycine max
  Clone ID: PAT_MRT3847_128940C.1.pep
RYPVEKDGGLGSRSRFQAFYQFMRMVVVNLRARELYRAMHYDVSEKITIVGGA

SEQ ID NO: 174886 - protein, 55 aa, Glycine max
  Clone ID: PAT_MRT3847_128941C.1.pep
KPLEKTWVELWPKYYGKFIGILPSNLMFTCPCSHQSHAMMTNCLFGLSRTKVEKK

SEQ ID NO: 174887 - protein, 86 aa, Glycine max
  Clone ID: PAT_MRT3847_128942C.1.pep
IVSTPSTTAITCFNKPSLTTLPPRSTIFTTPILQPLGHNGLPTPPPTYHNVHLYALYFHKISYLWYSLSLAAAFPGSAILFLILRL

SEQ ID NO: 174888 - protein, 52 aa, Glycine max
  Clone ID: PAT_MRT3847_128943C.1.pep
MTLRYPFQNEFSTQNKESFMNQADLDNHSFHYHITAVKQFITTSVHIGHCHH

SEQ ID NO: 174889 - protein, 93 aa, Glycine max
  unsure (1)..(93): unsure at all Xaa locations
  Clone ID: PAT_MRT3847_128944C.1.pep
MWSLFNKKKKKKKKKKKKKKKGRTIKKEKKLTYTCMRRHSFNVGPPKXNTLATLLQRGKXENPXATKHNNGAGHTPFARXKNSEDAPKERPSQ

SEQ ID NO: 174890 - protein, 68 aa, Glycine max
  Clone ID: PAT_MRT3847_128945C.1.pep
PARSRQKGTAARTPQKGPAARRRQKGPAARRRQKGTAARSRQKGTAARRRQKGPAARSPQKGTHVPPI

SEQ ID NO: 174891 - protein, 63 aa, Glycine max
  unsure (1)..(63): unsure at all Xaa locations
  Clone ID: PAT_MRT3847_128946C.1.pep
VILSSTLILINILHHLFLSHSRGGVLYISGAWPPINXSIYPLTTSSHQALFTNIKTISESFAD

SEQ ID NO: 174892 - protein, 137 aa, Glycine max
  unsure (1)..(137): unsure at all Xaa locations
  Clone ID: PAT_MRT3847_128947C.1.pep
LPTAADTTQRHFLHVLYHRVRGGHPIPEAALGIDLKAGGKXKKTKGPAPKPKDIYLKLLIKLYRFIARRSDRKFNAVILKRLLMSMVNRPTLALPRLIQYSKEKEDKIAVGVDMIPMDILCYEIPALXVTALMFTET

SEQ ID NO: 174893 - protein, 155 aa, Glycine max
  unsure (1)..(155): unsure at all Xaa locations
  Clone ID: PAT_MRT3847_128948C.1.pep
QKKMSALVXALFDGIDKGFAKEADKKKNSFSSSVAXEGSPLLLLHAIEKFFCQSPSHALKEVALVLKTFFDFFLLGEKPLVPWFPKGFKGHTKNFKFWKNAPPFFFWVQRAESKTREKKFSPLPRFLCLLAFVKPFFSQKRVFLAPPVVGPLNLF

SEQ ID NO: 174894 - protein, 163 aa, Glycine max
  Clone ID: PAT_MRT3847_128949C.1.pep
TRSGPCDPSDFGMWNNTQHSSLKEKIQYSSSINDLKTVPVCSELDSQILSGQGINPTKHVMDPLKPLIPEFLPKASKNNLEEMPPMPPLPPMQWRTGKVQHASLFTQREDIEVNLASLQPIQPNKLDDISQFGLPTSEKETLPYQNLFLPVMAVESNMHQYSS

SEQ ID NO: 174895 - protein, 111 aa, Glycine max
  Clone ID: PAT_MRT3847_12894C.1.pep
MKSVNDDASTQDLDPQSDHSSDYLAHPQPHPQPRRPRGFAAAAAAATTNSAGKGKKEREKEKERTKLRERHRRAITSRMLAGLRHYGNFPLPARADMNDVLAALAREAGWV

SEQ ID NO: 174896 - protein, 81 aa, Glycine max
  Clone ID: PAT_MRT3847_128950C.1.pep
MMANTKISSSEWRKLSPSVTTALASAFLEWLLILFLFIDAVFSYVITKFAGYCKLQIPCLLCSKLDHVLGKEKGGYYWDLI

SEQ ID NO: 174897 - protein, 44 aa, Glycine max
  Clone ID: PAT_MRT3847_128951C.1.pep
LPMLVSQHAIWKLVYLFGFSSDAADLDGDRTLDSSIEIARRCSV

SEQ ID NO: 174898 - protein, 90 aa, Glycine max
  Clone ID: PAT_MRT3847_128952C.1.pep
MLGYHDLLTGDELLSDSFRYKEFDNGMLWEVEGKRVVKGAIDVYIGANPSADGGRQDDGFDDATVKVVDIGYTFRLQEQPAFYYKQIVTF

SEQ ID NO: 174899 - protein, 58 aa, Glycine max
  unsure (1)..(58): unsure at all Xaa locations
  Clone ID: PAT_MRT3847_128953C.1.pep
GKGTGSVGKRRNKTHTLYIRDIHHIFHLHNNHYTTYTFPTTHTRKYNXSIRAIHRNTT

SEQ ID NO: 174900 - protein, 618 aa, Glycine max
  Clone ID: PAT_MRT3847_128954C.1.pep
EVPYNKQDTSSGQKQPTSGDEITTRKIEVPNNKVGVLIGKAGDTIRYLQYNSGAKIQITRDADADPLCATRSVELIGSLESIDKAEKLMNAVIAEADAGGSPSLVARGLSPAQATVGSEQIQIQVPNEKVGLIIGRGGETIKSLQTKSGARIQLIPQHLPEGDDSKERTVQVTGDKRQIEIAQELIKEVMNQPVKPSSGGFGQQAYRPPRGSGGPPQWGQRGSHFGQPTAYDYQHRGPYPSHNQPYAPPPYGNYPQHMAPRSSFGSGWEQRPHHSFQGPPPHNGGYEYYGGQGGHLSEAPPSTQLPSSAPPHGAGPSPVPSMVPTPAQVNYNYGQPQGQDYGHQTAYSQAGLPQQGYGQGYDESKYENRAPTQHSYGGHVNSQSTYPQAVAQPNYPAPQQYGKPPLYGMPSQGQPPQSYGPPRATQPGDMPYQGSTPAQSYGTNMPTQQPYPYAVSGPSQTAYPSYGSAPAADGYSHPPPASGPPYTQPGAQPTYGQPAAQPAASYAQVGPTGYGSYPSSQPSYPEQPAPNNAVYGYQAPQDPGYSTGAAPAYSTAQPSGQPGYVQPTPTQTGYEQSNTQPAGYAAVPASASAVYGKTLSPQPAAYQYDSTQVYGAPR

SEQ ID NO: 174901 - protein, 795 aa, Glycine max
  Clone ID: PAT_MRT3847_128955C.1.pep
MAEEEVAAPAASPVPPDNKRKLEDLQPENAESNANSISDAVNADDAAVSAETENKRLRLDDHQDGLANTNGHQDEQVAEPGKETEERSALENVTPEHDQTISEYPSLEATANEQTSAEISEPADSKEPPVEDSGQENAEEPSKETQQQSKDSTEQDASSGDKQPNSVDTALHNVEVPYNKQDTSSGQKQPTSGDEITTRKIEVPNNKVGVLIGKAGDTIRYLQYNSGAKIQITRDADADPLCATRSVELIGSLESIDKAEKLMNAVIAEADAGGSPSLVARGLSPAQATVGSEQIQIQVPNEKVGLIIGRSGETIKSLQTKSGARIQVLIPQHLPEGDDSKERTVQVTGDKRQIQIAQELIKEVMNQPVRPSSGGFGQQAHHPPRGGSGGPPQWGQRGSHFGHPTAYDYQHRGPFPAHNQPYAPAPYGNYPQHMTPRSSFGSGWEQRPHHSFQGPPPHNGGYEYYGGHGGHLSDAPPSTQLPSSAPPYGAGPSPVPSMGPTPAQVNYNYGQPQGQDYGHQTTYSQAGLPQQGYGQGYDESKYENRAPTQHSYGGHVNSQSTYPQAGAQPNYPAPQQFGKPPLYGMPSGQPPQSYGPPRATQPGDMPYQGSTPAQSYGTNMPTQQPYPYAVSGPSQTAYPSYGSAPATDGYSHPPPASFPPYTQPAAQPTYGQPAAQPAASYTQVGPTGYGSSYPSLQPSYPEQPAPNNAVYGYQAPQDPGYSTGAAPAYSTAQPSGQPGYVQPTPTQTGYEQSNTQPAGYAAVPASAPAAYGKTLSPQPAAYPQYDSTQVYGAPR

SEQ ID NO: 174902 - protein, 38 aa, Glycine max
  Clone ID: PAT_MRT3847_128956C.1.pep
LYVLDLEYQSPKSSELTSGKRNRDTLFMVRTRCCRTGP

SEQ ID NO: 174903 - protein, 42 aa, Glycine max
  unsure (1)..(42): unsure at all Xaa locations
  Clone ID: PAT_MRT3847_128957C.1.pep
NFHNPVNKKQIFCNXKFESFFHPNDKVGYINIVNLLSSHFVK

SEQ ID NO: 174904 - protein, 409 aa, Glycine max
  unsure (1)..(409): unsure at all Xaa locations
  Clone ID: PAT_MRT3847_128958C.1.pep
ESFYDLQLDVKGCRDVYASFDKYVEVESLEGDNKYHAEQYGLQDAKKGVLFIDFPPVLQLQLKRFEYDFMRDTMVKINDRYEFPLQLDLDRENGKYLSPDADRNVRNLYTLHSVLVHSGGVHGGHYYAFIRPTLSEQWYKFDDERVTKEDTKRALEEQYGGEEELPQTNPGFNNTPFKFTKYSNAYMLVYIREADKDKVICNVDEKDIAEHLRERLKKEQEEKEHKKKEKAEAHLYTIIKVARDEDLAEQIGKDIYFDLVDHDKVRSFRVQKQTSFNLFKEEVAKEFGIPVQFQRFWLWAKRQNHTYRPNRPLTHMEEAQSVGQLREVSNKVHNAELKLFLEVELGLDLCPIAPPDKTKDDILLFFXLYDTEKEELRYAGRLFVKSTGKPSKILTRLNKMGGYXYDPEE

SEQ ID NO: 174905 - protein, 75 aa, Glycine max
  Clone ID: PAT_MRT3847_128959C.1.pep
FDLGFYKQVVKRRGLFQSDAEFLTSPITRSIIDRQLQSTQGFFEEFAKSIEKMGRINVKLGTEGEIRKHCARVNN

SEQ ID NO: 174906 - protein, 214 aa, Glycine max
  Clone ID: PAT_MRT3847_12895C.1.pep
MTCCHIPFSFFKICSSFEPLKVKPASMARLLRNTSLLTRSLFFPKVFKLGMIGTSQILSFSSKGRRRSKSDGSDSGEENMSKKELALQQALDQITSAFGKGSIMWLGRSVSPKNVPVESTGSFALDVALGIGGLPKGRVVEIYGPEASGKTTLALHVIAEAQKQGGYCVFVDAEHALDKTLAESIGVNTTNLLLSQPDCGEQALSLVDTLIRSG

SEQ ID NO: 174907 - protein, 138 aa, Glycine max
  Clone ID: PAT_MRT3847_128960C.1.pep
FLPGVSPLLFVIHSLPIQVPRLTIGWIAPTTRISSCDLSNSSCLAFIGSPSLISRPIFLYGCVVRFSGNCALYPLFVCVPLFPCWPLNLLPLSPTSAWCRLVPCIAVQWFWATLPCVCFAPSPLEITPFHPCSFFLFQ

SEQ ID NO: 174908 - protein, 216 aa, Glycine max
  unsure (1)..(216): unsure at all Xaa locations
  Clone ID: PAT_MRT3847_128961C.1.pep
MQQAEEHLDVLTKTGLKTGVSKPRGDVHRDGDYHRAVHVWIFAESTRELLLQRRASCKDSWPDLWDISSAGHISAGDSSLTSARRELEEELGITLPKDAFELIFVFLQECVINDGKYINNEYNDVYLVTTLDPIPLEAFVLQETEVSAVKYISYEEYKRLLAKEDSGYVPYDVNGQYGQLFDIIEKMXRTNTVARSLTLQKQISRYAPISLSAELT

SEQ ID NO: 174909 - protein, 136 aa, Glycine max
  unsure (1)..(136): unsure at all Xaa locations
  Clone ID: PAT_MRT3847_128962C.1.pep
VLVYFLFLLSQWDAVLVNQLDLKARQHMFKVHLGDTPHNLAESDFEHLARKTEGFSGSDISVCESXDMWILCGPKXQSAVQTTIQDLAAKGLASKILPPPISRTDFDKVLARQRPTVSKSDLDVHEXFTKEFGEEG

SEQ ID NO: 174910 - protein, 434 aa, Glycine max
  Clone ID: PAT_MRT3847_128963C.1.pep
MYSNFKEQAIEYVKQAVDEDNKGNYAKAFQLYMNALEYFKTHLKYEKNPKIKEAITQKFTEYLRRAEEIRAVLDDGPSGPASSGDAAVATRPKTKPKDGGKDGDGEDPEQAKLRAGLNSAIVREKPNVKWNDVAGLESAKQALQEAVILPVKFPQFFTGKRRPWRAFLLYGPPGTGKSYLAKAVATEADSTFFSVSSSDLVSKWMGESEKLVSNLFQMARESAPSIIFVDEIDSLCGQRGEGNESEASRRIKTELLVQMQGVGHNDQKVLVLAATNTPYALDQAIRRRFDKRIYIPLPDLKARQHMFKVHLGDTPHNLAESDFEHLARKTEGFSGSDISVCVKDVLFEPVRKTQDAMFFFRNPEGMWIPCGPKQQGSVQTTMQDIAAKGLASKILPPPISRTDFDKVLARQRPTVSKSDLDVHERFTKEFGEEG

SEQ ID NO: 174911 - protein, 87 aa, Glycine max
  unsure (1)..(87): unsure at all Xaa locations
  Clone ID: PAT_MRT3847_128964C.1.pep
NKKRSQSKQSGPNLXNVLLLLSVSESTNRSLNQSHSLILQRELISPNPHAIGSTSSRLSNSNFPGDPIDLSLSLAVSSDQHCTIVSR

SEQ ID NO: 174912 - protein, 217 aa, Glycine max
  unsure (1)..(217): unsure at all Xaa locations
  Clone ID: PAT_MRT3847_128965C.1.pep
MYSNFKEQAIEYVKQAVDEDNKGNYAKAFQLYMNALEYFKTHLKYEKNPKIKEAITQKFTEYLRRAEEIREVLDDGPSGPASSGDAAVATRPKTKPKDGGKDGDCEDPEQAKLRAGLNSAIVREKPNVKWNDVAGLESAKQALQEAVILPVKFPQFFTGKRRPWRAFLLYGPPGTXKSYLAKAVATEADSTFFSVSSSDLVSKWMGESEKLVSNLFQ

SEQ ID NO: 174913 - protein, 137 aa, Glycine max
  unsure (1)..(137): unsure at all Xaa locations
  Clone ID: PAT_MRT3847_128966C.1.pep
AXVFPVPFSPCLPPSFRLWPLFLPLAVPXGPLVPLAWVPLSVRARGCRSVVSALFFAWLGFCSLCAXXLLPLSLWPXAXLPXSXXXFLVXLSCPGSRGSGPXVCXRRSXPAFAPSXSLVLLPXALXRXAWVXPGGXR

SEQ ID NO: 174914 - protein, 79 aa, Glycine max
  Clone ID: PAT_MRT3847_128967C.1.pep
PSCRHIFNMNVDIVCNICNTLGDVSTHNLVNESLVGILVACDSLRYTWTRLLHKNNHLLKDVTCSFCTNPVITLQSDQY

SEQ ID NO: 174915 - protein, 74 aa, Glycine max
  Clone ID: PAT_MRT3847_128968C.1.pep
MFVIFYIVLFINGTKLLTPKNVKDQNAGTSINKGGVTHTDTGTICQSNSLGGGVTDTATGPPRRKSFMRPMGAS

SEQ ID NO: 174916 - protein, 40 aa, Glycine max
  unsure (1)..(40): unsure at all Xaa locations
  Clone ID: PAT_MRT3847_128969C.1.pep
AELMTKIDRRSVEQXETEPKFLKNGDAGSAXMIPTKPVVC

SEQ ID NO: 174917 - protein, 91 aa, Glycine max
  unsure (1)..(91): unsure at all Xaa locations
  Clone ID: PAT_MRT3847_12896C.1.pep
CKCRRLASICIKPEFRASKCEEGCCMDSGVLHSEGLKLXKGIASIAEVVQLNQTMASDXSSQNSQINEQFIRMAEEGIPKFKPKKVXLPTL

SEQ ID NO: 174918 - protein, 86 aa, Glycine max
  Clone ID: PAT_MRT3847_128970C.1.pep
AGGAPATPPPPVEVEAKPKPPPFGPKRGVKVKFFRKESFWFKGPGSGVAVDQGPPPRSPVGVGFTKVTFAKVSPTHFALDEFVEVE

SEQ ID NO: 174919 - protein, 69 aa, Glycine max
  Clone ID: PAT_MRT3847_128971C.1.pep
FITLKKKSRRFIRFFPLLQIFWLFIKKRKNFPRSPNSYFSFSKPNPIKKSSKGQFKKKNKKRKENRTRG

SEQ ID NO: 174920 - protein, 28 aa, Glycine max
  Clone ID: PAT_MRT3847_128972C.1.pep
KCPEISNRSTDNILGDKSIYITHLRTRG

SEQ ID NO: 174921 - protein, 52 aa, Glycine max
  Clone ID: PAT_MRT3847_128973C.1.pep
MGRMEYFGPNAQSRMITSTKIPPKYLIVSWRDQPFCRLRAAVPFCRLLAAAQ

SEQ ID NO: 174922 - protein, 66 aa, Glycine max
  unsure (1)..(66): unsure at all Xaa locations
  Clone ID: PAT_MRT3847_128974C.1.pep
MRACISIHIGQAGIQVGNACWELXVPEHGIGPDGQMPSDKTVGGGDHAFNHVLQREWCWKDVPVQC

SEQ ID NO: 174923 - protein, 90 aa, Glycine max
  Clone ID: PAT_MRT3847_128975C.1.pep
KPTIESSFHIHHNFLCLPHPQPYPFLMDPTQPIIILVMIQLFSVREELKVKCLGMGGFGNLFTITVVPMSMELKLESSSDDPNAYDLGPL

SEQ ID NO: 174924 - protein, 97 aa, Glycine max
  Clone ID: PAT_MRT3847_128976C.1.pep
GSSTHSFAEITQNDTEKASKVLLLGSLACAPVPITTTGLELGQFPPELNSPAVFRCVKVSAMDAPDERYAYQTAVDLGGHVFKGIPYDQGIDGPYAG

SEQ ID NO: 174925 - protein, 123 aa, Glycine max
  Clone ID: PAT_MRT3847_128977C.1.pep
QAEELPAPIKSIEAKGAKIVGSFDAPGGMRGYAAQFQNRGMALYLTADGKNVVAGNLYDANGNDLSQAPLHKLVYGPMAKQVWGQMEKSNWIEDGKPDAPRTVYLFSDPNCPYCNMFWEQARP

SEQ ID NO: 174926 - protein, 601 aa, Glycine max
  unsure (1)..(601): unsure at all Xaa locations
  Clone ID: PAT_MRT3847_128978C.1.pep
MQSTLFNPTHSLIPTSPHSIRSNSGHASLSVRASIAVETPTETVKLNKYSSRITEPKSQGASQAVLYGVGLSEDDMAKPQVGVSSVWYEGNTCNMHLLHLSEAVRDGVAAAGMVPFRFNTVGVSDAISMGTRGMCYSLQSRDLIADSIETVMAAQWYDGNISIPGCDKNMPGTIIAMGRLNRPSIMVYGGTIKPGHFEGNTFDIVSAFQCYGEYVSGSINDDQRQNVIRNSCPGAGACGGMYTANTMASAIEAMGMSLPYSSSTPAEDPLKLDECRLTGKYLLELLKMDLKPPDIITRKSLRNAMVIVMALGGSTNAVLHLIAIAKSVGIDLTLDDFQKVSDEVPFIADLKPSGKYVMEDVHKIGGTPAVIRYLLEXGFLDGDCMTVTGKTLAENAELVPPLSNGQEIIRPVENPIKKTAHIQILYGNLAPQGSVAKITGKEGLYFSGPALVFEGEEAMIAAISEDPSSFKGKVVVIRGEGPKGGPGMPEMLTPTSAIMGAGLGKEVALLTDGRFSGGSHGFVVGHICPEAQEGGPIGLIQNGDVINVDIKNRRIDVLVSDEEMEARRKKWTAPPYKANRGALYKYIKNVTPASSGCVTDE

SEQ ID NO: 174927 - protein, 89 aa, Glycine max
  Clone ID: PAT_MRT3847_128979C.1.pep
IPHPRGVKLFDFRVFDRGPPALFFYPVFKAVEFSPKKFSFPTQLVLSRAPPDSLFMARLFPRGMIFLPCPKGAPLTLKGFPPLKIFPMG

SEQ ID NO: 174928 - protein, 29 aa, Glycine max
  unsure (1)..(29): unsure at all Xaa locations
  Clone ID: PAT_MRT3847_12897C.1.pep
HGIIVVLNIYXRCVKXLXVNVKIMXIISF

SEQ ID NO: 174929 - protein, 65 aa, Glycine max
  unsure (1)..(65): unsure at all Xaa locations
  Clone ID: PAT_MRT3847_128980C.1.pep
SDTISSAFCTCRVRYPGXPLLRIHVTTAPAFPPLSSYRSRAHGGLLPMADLHDDQACLEEIGPPS

SEQ ID NO: 174930 - protein, 96 aa, Glycine max
  Clone ID: PAT_MRT3847_128981C.1.pep
PTRPPTRQYRRQRATKRQGLGDGQFYSGDPDVLRSSAMAWGPGRYSEIRMRATDGLFTDYHSDDEVHHHQLLTYWSGYYSSQEPREVTCVWLMSAP

SEQ ID NO: 174931 - protein, 115 aa, Glycine max
  unsure (1)..(115): unsure at all Xaa locations
  Clone ID: PAT_MRT3847_128982C.1.pep
MAWLVLGFICEMMWVWVNSIYEIXRYMIMAIXRLEAYFVILDRLSMVHVVSVDKPMSCPSLSIIVVPHDAQEFEVTPVRFDVTEDRGDHTNMTPEGEEVYRELLRDLELSSEEED

SEQ ID NO: 174932 - protein, 62 aa, Glycine max
  Clone ID: PAT_MRT3847_128983C.1.pep
TQVGGPPRICLFSMTFKSGVDIFSIACLFQFLFSFIFVFFFLCIFLFVPPLFFLLIHLNTLN

SEQ ID NO: 174933 - protein, 107 aa, Glycine max
  Clone ID: PAT_MRT3847_128984C.1.pep
MWRLVAALTRKLQNTKKGSRVADENMFEAANGVELAMFRHDRGRRDHGWSGISLIYGILHAPISILSCVSHPQANGSDGVWVSGEFVQISEMNHLMVNDSMRYAILM

SEQ ID NO: 174934 - protein, 124 aa, Glycine max
  unsure (1)..(124): unsure at all Xaa locations
  Clone ID: PAT_MRT3847_128985C.1.pep
LFSFHKKGCVSRIINDTQAFNKKXKSVAANLQKQLPGLKIVVFDIFKPLYDLVQSPSKFGFAEARKGCCGTGIVETTSLLCNPKSLGTCSNATQYVFWDSVHPSQAANQVLADALIVQGIALIT

SEQ ID NO: 174935 - protein, 165 aa, Glycine max
  unsure (1)..(165): unsure at all Xaa locations
  Clone ID: PAT_MRT3847_128986C.1.pep
MGKPGEDHLSLPSAEDPRRNAAAASGCAVGLRCLVVLLFSVAVFLSALFWLPPFAHFADPKDLYLNSKYKDHDIVASFYVQKPVSLLEDNILQLSNDIFEEIGAPSTKVIILSLDPLPRSNTTKVVFAVDPDGKYSEMSAAAISLIRASFKYLVIRQSYXQLTTF

SEQ ID NO: 174936 - protein, 131 aa, Glycine max
  Clone ID: PAT_MRT3847_128987C.1.pep
MGKPGEDHLSLPSAEDPRRNAAAASGCAVGLRCLVVLLFSVAVFLSALFWLPPFAHFADPKDLYLNSKYKGKGIQTNPEFGWEKPVSLLEDNILQLSNDIFEEIGAPSTKVIILSLDSLPRSNTTKVVFAV

SEQ ID NO: 174937 - protein, 71 aa, Glycine max
  Clone ID: PAT_MRT3847_128988C.1.pep
MAILARPHFPVCKARWTAQRFPIRSLGLSIKIHISCRGSQLVAGLSPSPASPGLSSATGVQNSAPADLFAL

SEQ ID NO: 174938 - protein, 116 aa, Glycine max
  unsure (1)..(116): unsure at all Xaa locations
  Clone ID: PAT_MRT3847_128989C.1.pep
FYSFFHAYFSHLQKEKKNLPLQHVYHGFRXEHLSPLTSSFPCPPSPFYSFFHAFXSRLLKQKKNLPLHHFHHGFRFEHLSPLTSSSPCPPSPFYSFFHASFSHLLKQKKNLPLHHF

SEQ ID NO: 174939 - protein, 136 aa, Glycine max
  Clone ID: PAT_MRT3847_12898C.1.pep
PTPAKLTQTSLFLSAQYLSHPFLANYHDDMRIPLDMIIHKLVKAYICSSSLRKSALRALAKTLTVAQLTYLRDQYTLLGPNKSGLISMQNFKTVSTYLKLEVIVRFSNFFKALTVILAGWFEELHRCLKGFTGLRI

SEQ ID NO: 174940 - protein, 125 aa, Glycine max
  Clone ID: PAT_MRT3847_128990C.1.pep
TSADNLIVGSHDSASWQDNINNNNNSSRFDDSSLRCVFPCETNERPSQGLSLSLSSTNPSSIGLQSFELRQTGQHLDFVSSSSRDGFFGKPVSLQQQQMVSQDGYVSSNSKVASVYQQGHFLVKN

SEQ ID NO: 174941 - protein, 97 aa, Glycine max
  Clone ID: PAT_MRT3847_128991C.1.pep
IQLKGMCHSPFQLGAMVSQQHFGSSSQWQAILDKGRCQMFLEQYLGAGQQHQLVRIFRSSFFKNGGPFLSRVKGCSVPLFGSEGGIQQKFQLGLSQM

SEQ ID NO: 174942 - protein, 61 aa, Glycine max
  unsure (1)..(61): unsure at all Xaa locations
  Clone ID: PAT_MRT3847_128992C.1.pep
XXXXAXXXXLXXLXGXRRXXXSSXXRXARXXFXREXGXCGCVDXXXXWXXXCXXXWXGXCS

SEQ ID NO: 174943 - protein, 91 aa, Glycine max
  unsure (1)..(91): unsure at all Xaa locations
  Clone ID: PAT_MRT3847_128993C.1.pep
XXXXXXXXXLTXXLXXXSXPXXXXLFLXXXXXXCXXXXTXXXXXXXXXVAXXLYSXXXYIXXNXXQLXXSKIIMMMDVXSSRIPSLRTRAT

SEQ ID NO: 174944 - protein, 307 aa, Glycine max
  unsure (1)..(307): unsure at all Xaa locations
  Clone ID: PAT_MRT3847_128994C.1.pep
KLVFVGKDENAVRQLISMISSDNCHVVEQACSALSSLASDDSVALHLMKADIMQPIGTVLKSAGLEEVISVLQVVVQLAFTSDTVAEKMLTKDILKSLKNLCAHKDPEVQRLALLAVGNLAFSLENRRILVSSESLRELLLRLAVATEPRVYKAAARALAILGENENLRRAIKGRQVGKQGLRILSMDGGGMKGLATVQMLKEIEKGTGKRIHELFDLICGTSTGGMLAVALGIKLMTLEECEDIYKNLGKLVFADPVPXDNEAATWREXLDQXYKSSSQSXRXVVGHGSKHSAETVERLLRKMCAD

SEQ ID NO: 174945 - protein, 77 aa, Glycine max
  Clone ID: PAT_MRT3847_128995C.1.pep
QISSSIISSPAVTTVNRACAGMVAPFTVLKSMACFPTIKTNNDITSIASNGGRVQCMHVCPPLCKKNFDTLSYLSDL

SEQ ID NO: 174946 - protein, 64 aa, Glycine max
  unsure (1)..(64): unsure at all Xaa locations
  Clone ID: PAT_MRT3847_128996C.1.pep
XARXRXLXIRLEXAXFLVXPXXXLHVCVVXFFXXDVLFHLKXECXKXGXKXXXXAXRXXXGGGG

SEQ ID NO: 174947 - protein, 63 aa, Glycine max
  Clone ID: PAT_MRT3847_128997C.1.pep
VITFVRRSSARMLFTINMSYIDASSIVSQPAPFYDTLQHWVSRSYDTLHQSSTKSGCNVRIQA

SEQ ID NO: 174948 - protein, 133 aa, Glycine max
  unsure (1)..(133): unsure at all Xaa locations
  Clone ID: PAT_MRT3847_128998C.1.pep
MQLYIESIQKGTMEGFYKEFTYFQTQSXPSFTNKTAWGMKLNALNRPPKMESTRXWLDEYMVDCCEPVETLTLAGITXGKLERXPHCAAAKVDALHPTHINMDETGKSLKKRSMYQDXHLFSYYHRTGLIQTE

SEQ ID NO: 174949 - protein, 37 aa, Glycine max
  Clone ID: PAT_MRT3847_128999C.1.pep
VVETFIAHNTHPYFPLSMSYVVIFWFIPNLYGSRFSS

SEQ ID NO: 174950 - protein, 146 aa, Glycine max
  unsure (1)..(146): unsure at all Xaa locations
  Clone ID: PAT_MRT3847_12899C.1.pep
ICXXXGXVXXSTYSVKNVINDTIFGAHSDFMVGLKYAIILAILLFSFLFHTFSIGFLNQVNILICTPQDVKSLVTLEYLTQLLDKAILLNTVGNRLFYSALPLLLWIFGPVLTFFSSMAMVLILYNLDFLAGNSNSKIEVFIPNGI

SEQ ID NO: 174951 - protein, 69 aa, Glycine max
  Clone ID: PAT_MRT3847_1289C.1.pep
RADAETFVFQAEINQLLSLIINTFYSTREIFLRELISNASDAWDKIRFGSLPDRSRLDAQPKLFIRLGP

SEQ ID NO: 174952 - protein, 70 aa, Glycine max
  Clone ID: PAT_MRT3847_128C.1.pep
YKFSGPTRLPLPLPLLTRWGHCYRGRRRNYIFVRDDSGRDDVGRRFLLPVKKLVEDDQALGEHVIVPGVT

SEQ ID NO: 174953 - protein, 125 aa, Glycine max
  Clone ID: PAT_MRT3847_129000C.1.pep
LIAARRRQKGGGELEGLSPKNPQKQEQQHESALKHTRPRKNQLTHETIPEPHKKEKALQEQNNTLAKKTKEKEKALAQQAQPERIGDEGDQTSSAQEPQPPVTTNIRTPTQTRGEGDNQRTPTPT

SEQ ID NO: 174954 - protein, 96 aa, Glycine max
  Clone ID: PAT_MRT3847_129001C.1.pep
VALRSYGFANQPLVNLVLTIFKLNLSCSLYATTPPPPAFTNTVGLMCAMPTPTQFGVLTEPPVNPAPTTPATRPPFHATCILYPTQVGLVFHFALF

SEQ ID NO: 174955 - protein, 501 aa, Glycine max
  Clone ID: PAT_MRT3847_129002C.1.pep
EGPLFWALFSNWSSSRSARGWFCCQGKSSKKSVAEEDYRDSLDQKPTNFTATDSVKVDFKVNGNKEDGSKGDQLALDVKSLNLKEEASQDRKDNGNRAQTFSFNELEAATGSFRLDCFLGEGGFGKVYKGHLERINQVVAIKQLDPNGLQGIREFVVEVLTLSLADHPNLVKLIGFCAEGEQRLLVYEYMPLGSLEDHLLDIRPGRKPLDWNTRMKIAAGAARGLEYLHDKMKPPVIYRDLKCSNILLGEGYHPKLSDFGLAKVGPIGDENPCLTRVMGTYGYCAPDYAMTGQLTFKSDIYSFGVVLLEIITGRKAIDNTKPAKEQNLVSWAKSLFKNRKRFCEMVDPLLEGQYPMRGLYQALAIAAMCVQEQPSMRPETTDVVTALDYLASQKYDPQIHPVQNCRKGLSFPRERSSGHRRTVSNDSDPRARSDGHRRTVCNGSETRARSNCHKRTVSISNGHSSSSETESSRKGLSSPRVRSDGHRHFVSNGSETDSSGD

SEQ ID NO: 174956 - protein, 100 aa, Glycine max
  Clone ID: PAT_MRT3847_129003C.1.pep
PSAPLSLILYVLLRCHVPITTVKVATTCNVVPFSPAITNSVLCGIHLTYVYLAYCLQRLPAYYFGLINVVMVAYPHSLAPFITTPPRPPPQRRRTSYSDD

SEQ ID NO: 174957 - protein, 99 aa, Glycine max
  unsure (1)..(99): unsure at all Xaa locations
  Clone ID: PAT_MRT3847_129004C.1.pep
FLRYGKKFVQEQENVKRVQWVHKYLNKAALGNPNKDAINRGTFFXFELEPKQIWQVKISVPKGCADPSAKSLYGIWGKHFKNSQCFRGKEKMPSLKGFP

SEQ ID NO: 174958 - protein, 219 aa, Glycine max
  unsure (1)..(219): unsure at all Xaa locations
  Clone ID: PAT_MRT3847_129005C.1.pep
MAASHILYNPPPLSKTFINHPLNQNPSPQNLILPLKATIKPRVLRAVHPQKITANSSLHNSDTRTRFQHCFTKSEDGLLYCEGLKVHEIMDSVERRPFYLYSKPQITRNVEAYKDALEGLRSIIGYAIKANNNLKILEHLRQLGXCGAVLVSGNELRLALRAGFDPTRCIFNGMGKVLDDXLVLAAKKVVFVNIDSEFDLENIIAAAKIAQKRXNVLLR

SEQ ID NO: 174959 - protein, 65 aa, Glycine max
  Clone ID: PAT_MRT3847_129006C.1.pep
FISSKTYGRVKNQISFSEPINYGFRHFFEMDGPSMQPDFVATICSCCKGLCIIYICNQPPQPIYI

SEQ ID NO: 174960 - protein, 132 aa, Glycine max
  unsure (1)..(132): unsure at all Xaa locations
  Clone ID: PAT_MRT3847_129007C.1.pep
LKLGLAPFPELEAFAPFASGLDKASPNPLARGPRLRGLVXQSPSAPLSVGGPIIPFFSGTNGFFVSFEIGPVREFLVGFRAFFNPDNPPFQEIFFFSQPFPGEAEVLFKGAFPEPMGPFFLPGPVEKNFLKK

SEQ ID NO: 174961 - protein, 92 aa, Glycine max
  Clone ID: PAT_MRT3847_129008C.1.pep
HKKNSAPLQKTHAFENPIMELKTLSPPIIAPLPLFVVIAPLFFPMTFFFPPFGPRPPPPLQRDPSGSFFGFLGIYFLFPARFLFCFFYKKTP

SEQ ID NO: 174962 - protein, 198 aa, Glycine max
  Clone ID: PAT_MRT3847_129009C.1.pep
LKNQMTIRKFLANRVLKEAGVPVKVNNMLRSQHQQVSKTNSSLKDLINTFLVVATLMVTVTFAAAFTVPGGVYSSDDTNPKNRGMAVLAHKRFFWVFTTFNMTAMCRPVRPCGLMLMALIFDHKLATRTTILAMSCLILAFVTVPVAFMAAVRLVVANNSALSLLITVIGATYTFLIVSLLFGFFPAGNRLFSISSSW

SEQ ID NO: 174963 - protein, 50 aa, Glycine max
  Clone ID: PAT_MRT3847_12900C.1.pep
LKSVRGYRVRGVVEERRWGKGKEGLGERSERGNRYMMIELILGECCCRVV

SEQ ID NO: 174964 - protein, 119 aa, Glycine max
  Clone ID: PAT_MRT3847_129010C.1.pep
VNVKVKCVVGAKMLAVGVLLKIPVPKQTLKTYFTVTSDRTKYNAFIDCLLLKIRKFLLHTESTLFAEVELIFTTTYNKSWTIPPIQMEFHVCYCFTNSIKMVKCHTISALYFSFCMLYS

SEQ ID NO: 174965 - protein, 109 aa, Glycine max
  Clone ID: PAT_MRT3847_129011C.1.pep
EQGSGLWVRYIWAETQQHICHLIIISQLQIIYNSAGAGQNFFFLTSKLYIKELVVIILAEEYKGPASSRTYNALSALTKRVSMNQPSHFLFPQPKSRGPYATIKSEDMM

SEQ ID NO: 174966 - protein, 179 aa, Glycine max
  Clone ID: PAT_MRT3847_129012C.1.pep
SLRKRLRNLGHNLKDKASVIAASLSLKRHVSSVRIHVLHATTHRLSAPPSTSQIAAVLSAGKGSYLLSRTCIDTIMDRLHRTRSATVALKCLFTLHNIVSERKGPLTLKDNLSHYPSNGGRNALNVSTFRDDTDVETMELSAWVRWYANVLEHVLTVSRVLGYYLINSNDGTREVFSSV

SEQ ID NO: 174967 - protein, 147 aa, Glycine max
  Clone ID: PAT_MRT3847_129013C.1.pep
AYCYDLQRFPFNLAFLFSVFKFQIQQTPFAGSTPVGFENHYQRSVTWNNEATTTDHVNRLGFLFNSQPYASAYAQSGGTLQSSFSFPMTSSSELHRPQPVNQPSSIFGSRFVSDGLAGFCIPDRIQGVEENHGVASNRPSSSPSSIH

SEQ ID NO: 174968 - protein, 59 aa, Glycine max
  Clone ID: PAT_MRT3847_129014C.1.pep
NGNDKIKGRLRGDNNCVGFFFYILKERVFSPRRIDSIGYLWTIEEKLRFDSLDKMGSFV

SEQ ID NO: 174969 - protein, 359 aa, Glycine max
  Clone ID: PAT_MRT3847_129015C.1.pep
MSPPSMLGNRKDGSEIAVAENYADINWDELGFSLVPTDYMYVMKCAKGDKFSQGSIVPFGNIEISPSAGILNYGQGLFEGLKAHRTEDGHVLLFRPDENAQRMKRGADRLCMPSPSPGQFVNAVKQIVIANKRWVPPPGKGSLYIQPLLIGTGALKGVAPAPEYTFLIYCSPVGSYQKGALNLKVEDKLYRAISGCGGTGGIKSVTNYAPVYTAMADAKANGFSDVLFLDSATGKHIEEASACNVFVLKDNAISTPAIDGTILPGITRKSIIDIAIDLGYQVMERSVSVEEMLGADEMFCTGTAVVVNSVASVTYKETRVDYKTGPATLSSKLRKTLVGIQTGCLEDKKSWTVRVDSTI

SEQ ID NO: 174970 - protein, 46 aa, Glycine max
  Clone ID: PAT_MRT3847_129016C.1.pep
SIIEELFVIEWRIVCDWFGYIEGEKKFQSMILSYGFVFGDHFLQLL

SEQ ID NO: 174971 - protein, 96 aa, Glycine max
  Clone ID: PAT_MRT3847_129017C.1.pep
MVFEFVDKSLNPNNYDVEDVKKVIGIALMCTQASAAMRPAMSDVVVLLNGNDLLEHMRPSMPILIQSNLRSDKDISASIGSFTSDTTTSNSIVPTQ

SEQ ID NO: 174972 - protein, 53 aa, Glycine max
  Clone ID: PAT_MRT3847_129018C.1.pep
WTCWGAICKFLSQTALFASAVFFVLAASFGAPLLLLIATRISIIVTGRGQSIT

SEQ ID NO: 174973 - protein, 110 aa, Glycine max
  unsure (1)..(110): unsure at all Xaa locations
  Clone ID: PAT_MRT3847_129019C.1.pep
IDWIGSRFKSNIIGCTCGRTCRPMARQEARNIAQLITPTFTASLERMMEKQAIXHHLGEYHANYRTIVRRTFMRAVMQNIVPDIEPIVQDSVKDWEGRLNSSLIEMKTVT

SEQ ID NO: 174974 - protein, 113 aa, Glycine max
  Clone ID: PAT_MRT3847_12901C.1.pep
RIKKIIIPIKMKPYLRAMFLLFLILLDQFISASAGGINSELFKFIGLPFKAIRKIPNKKENLERLNKLTERFEKVMNAWDSLQLKCPPPPPNAPPKQIYIEGMSVVKDYLSYY

SEQ ID NO: 174975 - protein, 98 aa, Glycine max
  unsure (1)..(98): unsure at all Xaa locations
  Clone ID: PAT_MRT3847_129020C.1.pep
MLKALNEMMLWNFENADRPFPFAAXMNLLRPLDSSRWPSPALNEPLALRNQTISERAXKCVIKLTKVIRSTIYDVALDRILHRIHLYLQHWGMEDKNV

SEQ ID NO: 174976 - protein, 52 aa, Glycine max
  Clone ID: PAT_MRT3847_129021C.1.pep
ALLAYGLSSSRRAPDAIHPYGYSKERFVWSLISAVGIFCLGSGATVVNGVQN

SEQ ID NO: 174977 - protein, 79 aa, Glycine max
  unsure (1)..(79): unsure at all Xaa locations
  Clone ID: PAT_MRT3847_129022C.1.pep
KCRSVFETKKKKKKKKKKKKKKKKKKKKKKKKKKKKKKKKKKITNKXKKNKLNKMKKKXKKKKDWKKKRWGAGLIGVEV

SEQ ID NO: 174978 - protein, 47 aa, Glycine max
  Clone ID: PAT_MRT3847_129023C.1.pep
TLRHLRLHFDTSTLTNVAALREQAAYTLLDGTCILRLIVAPSMINIC

SEQ ID NO: 174979 - protein, 85 aa, Glycine max
  unsure (1)..(85): unsure at all Xaa locations
  Clone ID: PAT_MRT3847_129024C.1.pep
MRKSGLNSGAVLKLTRGGVYVNVVARVRDAFKTXECEKLDCVHMXLSVCKQIGVKLKDLAPCVPILLKDYHLILWRGNCYEEQPS

SEQ ID NO: 174980 - protein, 53 aa, Glycine max
  unsure (1)..(53): unsure at all Xaa locations
  Clone ID: PAT_MRT3847_129025C.1.pep
GCIRGIIAATVRAYLYTALNGYDPTASXSHYFEVASXTSTGELITSMFGEPNS

SEQ ID NO: 174981 - protein, 509 aa, Glycine max
  Clone ID: PAT_MRT3847_129026C.1.pep
MALLFFYFLVLISFAFTTIIVQKIRKKPKKTDDTTCKIPHGPRKLPIIGNIYNLLCSQPHRKLRDLAIKYGPVMHLQLGQVSTIVISSPECAREVMKTHDINFATRPKVLAIEIMSYNSTSIAFAGYGNYWRQLRKICTLELLSLKRVNSFQPIREDELFNLVKWIDSKKGSPINLTEAVLTSIYTIASRAAFGKNCKDQEKFISVVKKTSKLAAGFGIEDLFPSVTWLQHVTGLRAKLERLHQQADQIMENIINEHKEANSKAKDDQSEAEEDLVDVLIQYEDGSKKDFSLTRNKIKAIILDIFAAGGETTATTIDWAMAEMVKNPTVMKKAQSEVREVCNMKARVDENCINELQYLKLIVKETLRLHPPAPLLLPRECGQTCEIHGYHIPAKTKVIVNAWAIGRDPNYWTESERFYPERFIDSTIDYKGSNFEFIPFGAGRRICAGSTFALRAAELALAMLLYHFDWKLPSGMRSGELDMSEDFGVTTIRKDNLFLVPFPYHPLPVS

SEQ ID NO: 174982 - protein, 80 aa, Glycine max
  Clone ID: PAT_MRT3847_129027C.1.pep
HTASLVVPSFVSVSLFGHKATLSMSMSLSLLRIFSCAPPLPPALLLFQLPTLVLPSDPFFALSKLTKLSPSPLHMLLMPQ

SEQ ID NO: 174983 - protein, 239 aa, Glycine max
  unsure (1)..(239): unsure at all Xaa locations
  Clone ID: PAT_MRT3847_129028C.1.pep
DLVDVPPVFVLGVIGGILGSLFNLILSKVLRIYNFINEKGTIFKILLACLISIFTSCLLFGLPWLTSCRPCPPDPSEPCPTIGRSGIYKKFQCPPNHYNDLASLIFNTNDDAIRNLFSKNTDDEFEFKSVFIFFITCFSLSIFSYGVVAPAGLFVPVIVTGASYGRIVGMLLGKKDSLSHGLYAVLGAASFLGGSMRTTVSLCVIXLELTNNLLLLPLIMMVLFISKTVADAFNAXIYD

SEQ ID NO: 174984 - protein, 95 aa, Glycine max
  Clone ID: PAT_MRT3847_129029C.1.pep
NKAGKSGPRSPEFINAFLTIWCSRLALMASKSNSEKLEDAIAKLTIHQLSLSENLQTMTHKLDTLISTLTTKSPAPSPSSPPHVSPTSPSSPHPR

SEQ ID NO: 174985 - protein, 32 aa, Glycine max
  unsure (1)..(32): unsure at all Xaa locations
  Clone ID: PAT_MRT3847_12902C.1.pep
TLXITKXXXLTYXNNQISFSVSXKIXNXXCQT

SEQ ID NO: 174986 - protein, 73 aa, Glycine max
  Clone ID: PAT_MRT3847_129030C.1.pep
QAIQGVASNQLAKADGFEAQMKELESICNPIIAKMFQGGAGPPMGGAGAGAPQDDYAAPSGGSGAGPQIEEVD

SEQ ID NO: 174987 - protein, 76 aa, Glycine max
  Clone ID: PAT_MRT3847_129031C.1.pep
AEPRIRSAHPIGSTFFFLLGANDYGGRVQSTILAFLHHNLRHAFYSDEVKALINLKRSRLILNISVQGGEIWSPYC

SEQ ID NO: 174988 - protein, 66 aa, Glycine max
  Clone ID: PAT_MRT3847_129032C.1.pep
MGLKCLVSTYNGVRRRISWPISRDEVWISNVLHTRLVEDRGGRDWLSVKRAEFGFPGGGTQCIHGA

SEQ ID NO: 174989 - protein, 133 aa, Glycine max
  Clone ID: PAT_MRT3847_129033C.1.pep
VCVVVSFSAAVGFSTISTVPIVPGCLVTVFLVSVSRCSQSAKVCICVCGVFARLPIVLFLAAAAVSVCQCLSFGHSTFACASVVILVFCSPFGVVLVVALAGALVGASGVASAVVCMCPLTSNSQLAASSVGK

SEQ ID NO: 174990 - protein, 115 aa, Glycine max
  Clone ID: PAT_MRT3847_129034C.1.pep
LYGYSSTWALLPFLCKLSAFYTHPFVILTCHILNYLFRSTRYKSPPPVLSAILSYLVVGRAHFNLPAPLTTLLLTISYYHIQLCRYANYCVIATNTKSRFPWLYGLLSSYQTLFS

SEQ ID NO: 174991 - protein, 134 aa, Glycine max
  unsure (1)..(134): unsure at all Xaa locations
  Clone ID: PAT_MRT3847_129035C.1.pep
GKKKGAPGGKPHGKTRIKAPKKEGKKQKQRAKRLGKGKRXGGFKKKNPPGKRECYRARKKXAKRGGNLKERVKKTGPFGKNGGTKKRKRAPRRKRGEXXRVKKSPPLEKGPPEEKNKGPKKKKNYSPTHVNINF

SEQ ID NO: 174992 - protein, 56 aa, Glycine max
  unsure (1)..(56): unsure at all Xaa locations
  Clone ID: PAT_MRT3847_129036C.1.pep
ALDXXKDKIFCYHGLFQYPVCGIIRCLSMLCEQLILPQPLPPYFSPLLYSVMNVVA

SEQ ID NO: 174993 - protein, 94 aa, Glycine max
  unsure (1)..(94): unsure at all Xaa locations
  Clone ID: PAT_MRT3847_129037C.1.pep
GGEAHCQGGIFFPFLSQKGCNPVFLKGSGKFFLSTWLGNPFGVPGPSPVWKISPLVFYFXFSPPGSREIFNFHGFFSFPIKCLSLWVFFSNKSG

SEQ ID NO: 174994 - protein, 110 aa, Glycine max
  unsure (1)..(110): unsure at all Xaa locations
  Clone ID: PAT_MRT3847_129038C.1.pep
VRARKVYDLRKSCCCGNXRCGSSCKCGNGYXGCKMYLNLNYTESTTNETLFMGMAPVKAQLESAKKGETIENDGCKCGPYCCXNVCTCNGGVGRASFKQRVPLITIMMNY

SEQ ID NO: 174995 - protein, 65 aa, Glycine max
  Clone ID: PAT_MRT3847_129039C.1.pep
HELHPPLVLLSPIPNNIKFMGNSLWFIINHRMQQDYTNLISATFPLYPYCHLVKHSLLVSTSCNI

SEQ ID NO: 174996 - protein, 68 aa, Glycine max
  Clone ID: PAT_MRT3847_12903C.1.pep
VAPYAKISVGIKLHKIKGWGFCFNPMPILIFFSKIPPPSSLYPPPPLGGVVDLTQTVTNKKTRFFRLF

SEQ ID NO: 174997 - protein, 50 aa, Glycine max
  Clone ID: PAT_MRT3847_129040C.1.pep
NVCCGGNCSCISACKFGNGCGGCKIYPDLSYTELTTIETLFMVVAPVKVQ

SEQ ID NO: 174998 - protein, 53 aa, Glycine max
  Clone ID: PAT_MRT3847_129041C.1.pep
ILSSGIVAIKVAVIVGAAQCFPFLSFMLKSDKILTRKLLYEYLIQLYIYISKI

SEQ ID NO: 174999 - protein, 55 aa, Glycine max
  unsure (1)..(55): unsure at all Xaa locations
  Clone ID: PAT_MRT3847_129042C.1.pep
EXXPCLFHHXCXACRXRSXXRLVIPVVSXTXXDSEEXXXPXSTCWKFXRXXXRVG

SEQ ID NO: 175000 - protein, 33 aa, Glycine max
  Clone ID: PAT_MRT3847_129043C.1.pep
IIMAIMKLAASSALRSLIASSSTFTINLHASCD

SEQ ID NO: 175001 - protein, 25 aa, Glycine max
  Clone ID: PAT_MRT3847_129044C.1.pep
KHSHRLYIRWMRLMSHLSLVTYYTQ

SEQ ID NO: 175002 - protein, 89 aa, Glycine max
  Clone ID: PAT_MRT3847_129045C.1.pep
WKLKIQKIRPINVQAVEKGITSRNRMEIKDKPQFKRKRAKGPNPLSCKKKKSEKQNIGPLKETNEDNTVKRSRKRKRSHKQKMATETSS

SEQ ID NO: 175003 - protein, 95 aa, Glycine max
  unsure (1)..(95): unsure at all Xaa locations
  Clone ID: PAT_MRT3847_129046C.1.pep
GFSXSVPSWALGSSAVFSPWCPGGPXGGVSSSSSXWRWRSPPRRRDXRXPXRRSKRQKEAPAQRXXWXXXXPCXXXWLPXGFPAAALPXLRVRXX

SEQ ID NO: 175004 - protein, 268 aa, Glycine max
  Clone ID: PAT_MRT3847_129047C.1.pep
MKVKKQKRHRKILTFYTACFGFRKPYKVLCDGTFVHHLLVNRITPADTAIGNVLSATIKLYTTRCVLAELKRLGSSYSEALEAAHKLIVARCEHEKCKSADACIMEVVGEKNSEHFFVASQDTDLRKQLQEVPGAPVIFGLRNALFLESPSALIDRKIFKDRVMNRLTGEEANNSITEIMEIEDSEDQTINVQAVEKGIKTRNPMEIKDKRQCRRQRGKDPNPLSCKKKKSEKQNIGPLKETNEDNTVKRSRKRKRSHKQKMATETSS

SEQ ID NO: 175005 - protein, 32 aa, Glycine max
  Clone ID: PAT_MRT3847_129048C.1.pep
PANCYLCTSKRWRLYLEDIMLDPNINFFFGLI

SEQ ID NO: 175006 - protein, 48 aa, Glycine max
  Clone ID: PAT_MRT3847_129049C.1.pep
KKLFLEQVCKDDQQCHNQYTICLFSTKKTKVKGHEKLATPMWGTPVGG

SEQ ID NO: 175007 - protein, 82 aa, Glycine max
  Clone ID: PAT_MRT3847_12904C.1.pep
YYHGLILDKGSEPSSHIGAVSCFLAAEELLAESKKACLSFCLAPPVTRAPPVWGAMKFLHQKIPEVASRKSQMYGYLWEKEK

SEQ ID NO: 175008 - protein, 50 aa, Glycine max
  Clone ID: PAT_MRT3847_129050C.1.pep
EILKQSTLIYADNSRWVLVCQVKYKQMWFMCEARRRIAYCPYVSQWQLKC

SEQ ID NO: 175009 - protein, 61 aa, Glycine max
  Clone ID: PAT_MRT3847_129051C.1.pep
MMYVPLAYVGLGVSFCCLALVIKYKGRSFVSQKKGCYHSAAYMDAGNQCVLYLFKKKKKGR

SEQ ID NO: 175010 - protein, 52 aa, Glycine max
  Clone ID: PAT_MRT3847_129052C.1.pep
IKATFPPYSFILYYIFHVFCPCPFLFLSTTPPPKTLLKLLYYNFCFKQLKNF

SEQ ID NO: 175011 - protein, 193 aa, Glycine max
  Clone ID: PAT_MRT3847_129053C.1.pep
VTRRYKQYHQQMQMVVQSFESVVGLSSATPYVSLALKSISKHFRCLKNAISDQLKLTCEVLGEDYSIPTTSTGSKFDNNVARLRCMDQNFQKNKSGGANINFLEPQQHVWRPQRGLPERSVAILKAWLFEHFLHPYPTDTDKHMLASQTGLSRHQVSHWCINARVRVWKPMVEEIHMLETKGATEAHQHQTSS

SEQ ID NO: 175012 - protein, 58 aa, Glycine max
  Clone ID: PAT_MRT3847_129054C.1.pep
FTSNININKYIAKSIYIKLAHIILNHEFQNKLSMHQFQYIYTYVTNMKQGIRVNNSNI

SEQ ID NO: 175013 - protein, 221 aa, Glycine max
  unsure (1)..(221): unsure at all Xaa locations
  Clone ID: PAT_MRT3847_129055C.1.pep
SCLHFFALPPFLVVVPPKMANATPNGSVPHNHVGAVLPTIPTIKIDEKQTLATSEDHTSIDYLQRAQWLRAAVLGANDGLVSVTSLMMGVGAVKKDAKAMLVAGFAGLVAGACGMAIGEFVAVCTQYEVELGQMKREMNMSEGGERDLETEKRTLPNPLQATWASALSFSIGALVPLLSAAFVADYRTRVIXVVVAMASLALVVFGSVGVQLGKTPKLNLV

SEQ ID NO: 175014 - protein, 84 aa, Glycine max
  Clone ID: PAT_MRT3847_129056C.1.pep
LEKGIQGGQLPFLERDVRNFVQNRKKVVQENEALLSEKRENDVLELLEACKAMKEADDDFVYDFTVDANDKVENVAWSYSDSVN

SEQ ID NO: 175015 - protein, 42 aa, Glycine max
  Clone ID: PAT_MRT3847_129057C.1.pep
ITEGLKGLPGYDYNKDGGGRIPNYGQHVLKFRTCGRTLRRTR

SEQ ID NO: 175016 - protein, 49 aa, Glycine max
  Clone ID: PAT_MRT3847_129058C.1.pep
ASSVDDLTPGTWSLFTGNNAVTLMDSKTSSFVMLPLTLPVTTAVSKMFF

SEQ ID NO: 175017 - protein, 50 aa, Glycine max
  Clone ID: PAT_MRT3847_129059C.1.pep
AIWRNVMFPIAYVKMVGPLHCIWVIYLSCVESKFGDIECIMSFITLTQIV

SEQ ID NO: 175018 - protein, 141 aa, Glycine max
  Clone ID: PAT_MRT3847_12905C.1.pep
MGSASRVESSNYDYSFKVLLIGDSGVGKSSLLLSFISNSNSINDLSPTIGVDFKIKLFTVGGKRLKLTIWDTAGQERFGTVISSYYRGAHGIILVYDVTRRETFTNLIDIWAKEVERYSTNHGSIKIPVGNKVDRLYNFSG

SEQ ID NO: 175019 - protein, 61 aa, Glycine max
  Clone ID: PAT_MRT3847_129060C.1.pep
NSEGCPLCEFPNSQSQHWLEKMMIKISDVLLEMIAQTRSRYWYSSWTVTPKRKEVEFEMMS

SEQ ID NO: 175020 - protein, 59 aa, Glycine max
  Clone ID: PAT_MRT3847_129061C.1.pep
DYYGSHRMLFGGFSRGTISNNERAEETDKKLYAWAGTVGPPVGMNPISRQNSIVKSRPE

SEQ ID NO: 175021 - protein, 55 aa, Glycine max
  Clone ID: PAT_MRT3847_129062C.1.pep
LVNLEEDTIQRQLSQLEEQKRNQLQEDLWTAAQAHESMLRQKSRSRWIKEGDCNS

SEQ ID NO: 175022 - protein, 118 aa, Glycine max
  Clone ID: PAT_MRT3847_129063C.1.pep
LPDYITWDRVYLGDLHSTISCLRLKRKSMGVLRNNGIPGVVYDGRAKEWTKHEENESFERTRKRWRRLESYACLLVCLHSELMTWRSMWLKTAYWSKFVLGTSMYSANDNKAGGNHDL

SEQ ID NO: 175023 - protein, 126 aa, Glycine max
  unsure (1)..(126): unsure at all Xaa locations
  Clone ID: PAT_MRT3847_129064C.1.pep
SNNADFHIELSIIHAMAMTTDPKRCHNMKDRIVRVSKKTTTGVKRLYQMQANGSILLPAINVYDSVPKTKFDGWCGCRRSLPHGLMRATDVMIAGQVPAECGYXDIGMGXLSAMKQACARVIVTNI

SEQ ID NO: 175024 - protein, 81 aa, Glycine max
  Clone ID: PAT_MRT3847_129065C.1.pep
KSLVAMGMGCSRCSISALLFPLFFFVLSFIFFFPWKKQNHLSHHFAYAPPLVLSTIKNSDNHTNIRTSLSPSPQPPPPRFE

SEQ ID NO: 175025 - protein, 93 aa, Glycine max
  unsure (1)..(93): unsure at all Xaa locations
  Clone ID: PAT_MRT3847_129066C.1.pep
ENKMRRSIVVHSVPEVLLIGILSIVHGQFTDTPTTNAHVTNSSRVSALYVLGDSSVDCGDNTLFYPLLHGRLSLYPCNGSDATLLPQLLXTSX

SEQ ID NO: 175026 - protein, 76 aa, Glycine max
  Clone ID: PAT_MRT3847_129067C.1.pep
AFFRPLPLRQPKRTLFTTKAMSNSTPQINASKKEKAIAGLTAPSVTASMVVTDEAHAAGYEFLLYVKNYLLNIFSG

SEQ ID NO: 175027 - protein, 98 aa, Glycine max
  unsure (1)..(98): unsure at all Xaa locations
  Clone ID: PAT_MRT3847_129068C.1.pep
XHXLXRKLGIXLEQHSMXSLFLLLPHRSSLEVVFILSARVPPRXXXXXXXSXXPXRXPXRXGXXXXXXGXIXXXSVXXPMIXXXXFXXXVXXRXLXXN

SEQ ID NO: 175028 - protein, 44 aa, Glycine max
  Clone ID: PAT_MRT3847_129069C.1.pep
NIITSLVNITFQVSPRSKSLSRNHITEIESITPSLIYNNLSSLF

SEQ ID NO: 175029 - protein, 106 aa, Glycine max
  Clone ID: PAT_MRT3847_12906C.1.pep
KRGGGAPREKTFFWPKPFLKKKFNKKPRESNQKKIGRQHSLGIGGAPDLCTPKKRGFKVPPIPREKKKPFCPRAQNVFSNSPKKKKKGVQQETPFKKTKNAQSGEF

SEQ ID NO: 175030 - protein, 98 aa, Glycine max
  Clone ID: PAT_MRT3847_129070C.1.pep
KVKVKATKAFNCPPQPKKTNPFKPRGPIFETQRWGYQHFLQSKGRFKGFFLKTRFWTSFQKQPSKRGLYPIRGPKGDFLNIILKTYFFFLKRGFWKKF

SEQ ID NO: 175031 - protein, 70 aa, Glycine max
  Clone ID: PAT_MRT3847_129071C.1.pep
CAYERIYDMIFIMTIICTQLSIHINYTTFSNPLRSKHLSYHSKYHSNYVCRMVSSMDPSIDLCGQFLRAS

SEQ ID NO: 175032 - protein, 133 aa, Glycine max
  Clone ID: PAT_MRT3847_129072C.1.pep
MQGIGIGCCSNDVVGQLELSPTMSNSSSSLSMELDESPESRIQRLISEHPVIIFTRSSCCMCHVMKKLLATIGVHPTVIELDDHEIASLPLPDTTAPAAFIGGTCIGGLESLVALHVSGHLIPKLVQVGALWV

SEQ ID NO: 175033 - protein, 228 aa, Glycine max
  Clone ID: PAT_MRT3847_129073C.1.pep
MPRPKRKAAPPITSSDVDSSLRTEPKKSTTKQFDRIDNLFESYANKSLGLIDPDGIEALCKDVHVDHTDVRMLILAWKLKAEKQGYFSKDEWRKGLKCLGADTLPKLRKAINGLKKEVTVPECFEDFYSYAFQYCLTEEKQRSIDIETICELLNVVLRSEFPTQVNLLTEYLKIQNDYRALNIDHWRNFYRFFKEVSLIDLRSYDSSQAWPVILDNFVDWLKEKEEKI

SEQ ID NO: 175034 - protein, 356 aa, Glycine max
  unsure (1)..(356): unsure at all Xaa locations
  Clone ID: PAT_MRT3847_129074C.1.pep
EARIRLDLYKLHRGMTSAVIQDICFSHYSQWVAIISSKGTCHIFVLAPFGGETVLKMHDQDTDGPALLPIFPLPWWFTPHFTVNQQQYCLTPPPLVVLSVVSRIKNSNAGWLNTVSNAASSAAGKVSIPSGAVSAVFHSSIPYNSHNAYSKIHAMEHLLVYTPSGHLIQYKLLPPLVAEPSETASRTAPVPSAQIQEEDLRVKVEPVQWWDVCRRYDWPEKEVGILGNTVGRLEAVEMILDSSDYEDNNSVGNNNSIKLNNGNVHISSGRIPIWQESEVSFFVISPLEAGELNLCELNTSGEIEIXEYSRYEIEIKQKDLLPIFDHFHRIQSTWGDQRFCYGEDTLTLSSGFTLEL

SEQ ID NO: 175035 - protein, 79 aa, Glycine max
  unsure (1)..(79): unsure at all Xaa locations
  Clone ID: PAT_MRT3847_129075C.1.pep
SFDNNXLQKKLRTDYSDQQYTIVYPLQTVFLFGVSSRLKLNLNLRNMRTIFSLLFLLTNQQNCRGSLAMPDWSHNFEDQ

SEQ ID NO: 175036 - protein, 112 aa, Glycine max
  Clone ID: PAT_MRT3847_129076C.1.pep
LQAHNLDDNLFLSFAEFLIVIISFHVFISEPKKSTTKQFDRIDKLFESYANKSLGLIDPDGIEALCKDVHVDHTDVRMLILAWKLKAEKQGYFSKDEWQKGLKCLGADTLPN

SEQ ID NO: 175037 - protein, 458 aa, Glycine max
  Clone ID: PAT_MRT3847_129077C.1.pep
DLVLRLELLRNLQKHRGCVNTVSFNADGDTLVSGSDDWGVILWDWETGRIKLSFHSGHSNNVFQAKFMPHSHDRTIVTCAADGQVRHAQILENGRVETKCLAKHQGRAHKLAVEPGSPHIFYTCGEDGLVQHFDLRTGAATELFTCQPIKDRWSYMPVIHLNAIAIDPRNPNLFAVAGSDEYARLYDIRRYKWDGSTDFGQPTDFFCPPHLIGDQQVGITGLAFSEQRELLVSYNDELIYLFTQDMGLGPNPPDPGSPKSMNSDASEIGFSHGSVSSQSNMDADDKITPQVFKGHRNCETVKGVNFFGPKCEYVVSGSDCGRIFIWKKKGGQLIRVMEADKHVVNCIESHPHTMVLASSGIENDIKIWTPKALEKATLPKNIEQKPKAKGWMYRIAYPEDLMQLISLPRRRVRTESNGENSSTDRDLLQLILTFNANSDSSNEDDDDGDTTSQDDLFS

SEQ ID NO: 175038 - protein, 99 aa, Glycine max
  unsure (1)..(99): unsure at all Xaa locations
  Clone ID: PAT_MRT3847_129078C.1.pep
GLSPQTPFGINRGMEKLCXPEGTYRWAKRMPFTIGGGAGAKNAILMNTPXAVNSMCGYSGGDQGSDVYKMGSPYNKCTGHFFIAHGNWADDTINLEAIP

SEQ ID NO: 175039 - protein, 64 aa, Glycine max
  Clone ID: PAT_MRT3847_129079C.1.pep
KILLKKNGLSQISFINHGRWLHYALTSYHGNTHHLELPISFKVQRIAGTTCNFYYRHPHYINYP

SEQ ID NO: 175040 - protein, 32 aa, Glycine max
  Clone ID: PAT_MRT3847_12907C.1.pep
WTYNPNKNYSIFLTKLFHINIIFSNFNFYFVK

SEQ ID NO: 175041 - protein, 105 aa, Glycine max
  Clone ID: PAT_MRT3847_129080C.1.pep
PTRPGIEPHFKFPSSMSTWEIVIANSICSSVISDYLWALSIVWTAPLVSTLGMSLTIPVAMIADMVIHGRKYSAMYILGCIQVFAGFTLANLSGKISRSDTELST

SEQ ID NO: 175042 - protein, 97 aa, Glycine max
  Clone ID: PAT_MRT3847_129081C.1.pep
HAYGELSSLTTCCAPTLNSARRYGWRASHPYQTKCRSTIMAAPFSSSNESPMGHTFLVTACSSLRAQLSCCFLQPLSLLTLQQRFFPRPVQEHMAIG

SEQ ID NO: 175043 - protein, 43 aa, Glycine max
  Clone ID: PAT_MRT3847_129082C.1.pep
RFLLTASSNFFFWSPSLHRTKNHAVYSFHWCFLGLPLNMSKLP

SEQ ID NO: 175044 - protein, 140 aa, Glycine max
  Clone ID: PAT_MRT3847_129083C.1.pep
MSFSFTDLLFTNNNNMNRDDDPFGLEFANNFKSASLPLSPSSIYPSYAEFPPGFAPTTQSLNSHHFFSSQNVPASYTTEPSSSMSFNMRNSSTMGQHGNKEEERNYSDHSFQTKANHVPLFQSPQAYFKCRSHGTGHDIQ

SEQ ID NO: 175045 - protein, 99 aa, Glycine max
  Clone ID: PAT_MRT3847_129084C.1.pep
MNQSVRPRTLAPRRCSHCGVQKTPQWRTGPLGPKTLCNACGVRFKSGRLLPEYRPACSPTFSSELHSNHHRKVLEMRQKKETVSVDETGFAPAHVVPSF

SEQ ID NO: 175046 - protein, 105 aa, Glycine max
  unsure (1)..(105): unsure at all Xaa locations
  Clone ID: PAT_MRT3847_129085C.1.pep
XPXXXXXXXFXPXXKXXRXVXFERXLSXIIIXXXMRXLXLXXDMKLXRXRXQYFCRKXXYEEKIXXLKLSXDSLEKERDFYFAKXXAIQLSXXXXXDXXTXRXLP

SEQ ID NO: 175047 - protein, 50 aa, Glycine max
  Clone ID: PAT_MRT3847_129086C.1.pep
RSNLGGPVPPTSKAPRLTGWKRWLWRSDMNKDNFGTSSISFGGLVYARIS

SEQ ID NO: 175048 - protein, 60 aa, Glycine max
  Clone ID: PAT_MRT3847_129087C.1.pep
RKREKRKGIKLGKVGGVGGGYFPSKFCSIQVAARRCGKFPKKILAVSSETLKGEAPSFYN

SEQ ID NO: 175049 - protein, 54 aa, Glycine max
  Clone ID: PAT_MRT3847_129088C.1.pep
ISTKPVCAVVCGEVSSNRSVGTLNEDALNGKSVFERVYLVVSLDDHHVFNVYTR

SEQ ID NO: 175050 - protein, 107 aa, Glycine max
  unsure (1)..(107): unsure at all Xaa locations
  Clone ID: PAT_MRT3847_129089C.1.pep
VYPPGFTQGLVSYPVFFPLVNGAPPPLFFLCLGNNRSHKAIFXTLFRPVFCPSFPPAPKFFSSPVGWNPPKAQFFFYNAFDVVKLLQGPFFFSHPKPRPFVPFPVFF

SEQ ID NO: 175051 - protein, 113 aa, Glycine max
  unsure (1)..(113): unsure at all Xaa locations
  Clone ID: PAT_MRT3847_12908C.1.pep
XXXXFYFFFFFFFFFFFFFFCFFFFFGQKTANPTEAPLLVFSPLLTISGPPYFLNNKGRCLPKFAKCMTPVPSIYLGTRLLMLEAESQMGKTVPTLPKKTTFLGAPTFLQNLG

SEQ ID NO: 175052 - protein, 146 aa, Glycine max
  Clone ID: PAT_MRT3847_129090C.1.pep
VLTNMVAYIQKEFPGNTLKFWRLQSPRYFYGGDWNQNGSCLFNKPLEEDELDLWFEPRNNGVNKEARVLNFVIEEALQAANIQLLDLTHLSELRADAHPAIWLGRKDAVAIWGQDCMHWCLPGVPDTWVDILSQLIHDGLGRTGRL

SEQ ID NO: 175053 - protein, 69 aa, Glycine max
  Clone ID: PAT_MRT3847_129091C.1.pep
LAPAKKGKKKKKAVNAPADDFKAPADSPDNPANVPPNNSNDPVKRNGGRSGGGVVPLVLSLVFGFPLKL

SEQ ID NO: 175054 - protein, 93 aa, Glycine max
  Clone ID: PAT_MRT3847_129092C.1.pep
KHTHTNCVESLRFKECVTVHYQWPHYTTTDCVLILIFHIQRCCINPLSFLGGMILLQPLLSILLPPTETPPFHCHKELIVFLFLFCCFSCVIL

SEQ ID NO: 175055 - protein, 54 aa, Glycine max
  Clone ID: PAT_MRT3847_129093C.1.pep
VTKHQILFTIYVYIYIYNHSNIRAIKSNSIQNNHSYLTNMYKITIQNRVICHLP

SEQ ID NO: 175056 - protein, 39 aa, Glycine max
  unsure (1)..(39): unsure at all Xaa locations
  Clone ID: PAT_MRT3847_129094C.1.pep
RQETIXXRGSHGTLNILNERTAGGKIFKKETTGFFVKNH

SEQ ID NO: 175057 - protein, 84 aa, Glycine max
  unsure (1)..(84): unsure at all Xaa locations
  Clone ID: PAT_MRT3847_129095C.1.pep
SSNINKRIPTXLGKGKKMVFLPKVNPFPVPYRLVFLAVKMKILSLTPLNXMLTPLLENCESLKYLGDESAFAFVNSYVVFYSLK

SEQ ID NO: 175058 - protein, 110 aa, Glycine max
  Clone ID: PAT_MRT3847_129096C.1.pep
METPPPQQGVVKKKETRGRKPKPKDEHAKALKEGRKTQQQQHDQQQQQQQQHQPSVDEKYTQWKSLVPVLYDWLANHNLVWPSLSCRWGPQLEQATYKNRQRLYLSEQTD

SEQ ID NO: 175059 - protein, 118 aa, Glycine max
  Clone ID: PAT_MRT3847_129097C.1.pep
GPLCPSACPRTPSAPLLAPQRPLCPPFHCGAQLFTCQQNEDDSAIIPTWSTIDLQINLIIASHRTLLLLYVHVGVHILSLNEAHPKHSTFQIGCMLLSSTCVFLNIVITYYFPNKRTV

SEQ ID NO: 175060 - protein, 207 aa, Glycine max
  unsure (1)..(207): unsure at all Xaa locations
  Clone ID: PAT_MRT3847_129098C.1.pep
MGRGKIEIKRIENSSNRQVTYSKRKNGILKKAKEISVLCDAQVSLIIFGVSGKMHEYISPSTTLIDVLDRYQRASGKTLWDAKHENLSNEIDRIKKENDSMQIELRHLKGEDITSLNYKELMALEDALENGLSGVREKKMEVHRMFKRNDKILEEQNKELNFLLQQHLALEGVGNXMDNGFNEIKRVFNSHMQRAASLKQPNLKERI

SEQ ID NO: 175061 - protein, 216 aa, Glycine max
  Clone ID: PAT_MRT3847_129099C.1.pep
MNSMAVRLVKHLQLSAPTSSSFGGVPRSGASWYSTSLSGGEYQPSQDNVAPKNEALDGELDDFLGEKAELQLQGVDPKKGWGFRGVHKAIICGKVGQAPVQKILRNGRNLTIFTVGTGGMFDQRIQGPKDLPKPAQWHRIAVHNDILGAYAVQKLFKNSSVYVEGDIEIRVYNDSINGEVKSIPEICVRRDGRICLIKNGESIDKTSLDELREGLF

SEQ ID NO: 175062 - protein, 89 aa, Glycine max
  unsure (1)..(89): unsure at all Xaa locations
  Clone ID: PAT_MRT3847_12909C.1.pep
XRNSDXKIEXXXVVKSPXXXXIKNXXRXXQVXSLXXXDXXLXXXIVXXVQEXXXXKQXKKGAXEXXKXLXRXIXEXVXMAXDMXTLRFF

SEQ ID NO: 175063 - protein, 52 aa, Glycine max
  unsure (1)..(52): unsure at all Xaa locations
  Clone ID: PAT_MRT3847_1290C.1.pep
CQLHFMPHXIIXXFITETSXEXMIXIXXXXXXSIVCCVEKVNDIEKFVRLNN

SEQ ID NO: 175064 - protein, 37 aa, Glycine max
  Clone ID: PAT_MRT3847_129100C.1.pep
KQNKSNRSVFLTIFSSPKLKQHHFFHFYTIQTHIFLK

SEQ ID NO: 175065 - protein, 303 aa, Glycine max
  Clone ID: PAT_MRT3847_129101C.1.pep
TRPEEIEVEEELEEEVVEEIEVEEEEEEGEQGEEQQVEEMEEEEEEEVEEEEEEEEVEEEEEEEQEQQQQEAVEEKKEEQQQQHQAEAAMEEQEEVPMEEKEEDKPAVPGSPLDADKDRKDYGQHMEFEGQDKNLGPVSSVAENPEVMPPSSTHCMEENNVMLKKSDIPTLNSEELPLKYEISSHPKSRENLTSVEVCRSQGLDVEVENAGSLLQKKTFRGYCVPGCNSKANLCGDNNIDSRARATKSSSDTVQDMVIGPLPRDCLVEDSNGGQNSRNKIMLSEMESRDDVKQMTSRTRNLSA

SEQ ID NO: 175066 - protein, 125 aa, Glycine max
  Clone ID: PAT_MRT3847_129102C.1.pep
MAALLPCAPNVVSAPLGNRSTCHFPHRPYSHAFSGSTARHFLRGSLTVARFGFQPGFLPEPDEAEGVLRELFGRAEGLLYTIADVAVSSSDTVAASTTAKQSNDWLSGIANYMETVLKVLKDGLS

SEQ ID NO: 175067 - protein, 68 aa, Glycine max
  Clone ID: PAT_MRT3847_129103C.1.pep
TVTGSRKCGCLFKLRVKLVVRGEGWMMKLICESHNHALAKLLVGHPYANRTTKDEKIIIAYMTKSMVK

SEQ ID NO: 175068 - protein, 68 aa, Glycine max
  Clone ID: PAT_MRT3847_129104C.1.pep
ISLTLFTGTNSLNYMILLFILTALFHNVIPPTHQSHYTLLTFPSLHSSSYSIFSTYLKLFFNPNKISF

SEQ ID NO: 175069 - protein, 67 aa, Glycine max
  Clone ID: PAT_MRT3847_129105C.1.pep
SLAPSTFLIPSSSFSGCVTIRISEFPRLRASAVRPRMIFTEHRRRRRSTPVSRRVQYLEALTSRGAS

SEQ ID NO: 175070 - protein, 48 aa, Glycine max
  Clone ID: PAT_MRT3847_129106C.1.pep
ESPRLSLSTLSLPLVSSLSHGNSFRSFLRLRLISGVLVGTASWTTAYC

SEQ ID NO: 175071 - protein, 81 aa, Glycine max
  Clone ID: PAT_MRT3847_129107C.1.pep
NFGAPKGRAAKSPDSILGAPKGGPPKSPGYNFRIKFLLGWCLSQRKKWYNKRGGSFKVALFQKKKTCLKNVNQPFDVAKNN

SEQ ID NO: 175072 - protein, 43 aa, Glycine max
  Clone ID: PAT_MRT3847_129108C.1.pep
IGGYCQEAVEFSLYFCSSQLTSCVYYKVHNQCLIRDIRLYIRG

SEQ ID NO: 175073 - protein, 90 aa, Glycine max
  unsure (1)..(90): unsure at all Xaa locations
  Clone ID: PAT_MRT3847_129109C.1.pep
WQLQVASSPSPLLHYFTPTTTQCLLKHNYKDHDHVHVXXXXXXXXXXXXXXXXXXXXXXXFGITTTTTRVNNVPPRRFSCSASSSSSSST

SEQ ID NO: 175074 - protein, 113 aa, Glycine max
  Clone ID: PAT_MRT3847_12910C.1.pep
MSPAISGTVLFCPNCRRSLAFFPLLIVPLILLTFLSSDVHSSFVVPIEPDNVFLPPGVRSFRSLLVNQRLSSLYVGSRDHFFRLWLFNVNDTSSAVLFAHRSLNVRAEEREEC

SEQ ID NO: 175075 - protein, 77 aa, Glycine max
  Clone ID: PAT_MRT3847_129110C.1.pep
CSSSSLIRIGSVNSTCSLTFHNAHDTVFHHALGLGGSCVGVLFHYCCMLSRGLRLFLRSENLPPASLFCLASTPRFP

SEQ ID NO: 175076 - protein, 68 aa, Glycine max
  Clone ID: PAT_MRT3847_129111C.1.pep
FGPELLFFNSNQHKIEAGIYQWRLILIYLRPSFLSPHSIHLVYIYNSHYIKEISRMLHASYIIHDPES

SEQ ID NO: 175077 - protein, 66 aa, Glycine max
  Clone ID: PAT_MRT3847_129112C.1.pep
SFLTKGSFTFSSNENIFFKVVDYIRIRTQQSPSLQNHWQQKKWAFSLLLSWIVVMLIKEQGFLLIP

SEQ ID NO: 175078 - protein, 174 aa, Glycine max
  Clone ID: PAT_MRT3847_129113C.1.pep
MDPKRRGNDTAFNDLLNSLIHLDNKQTLMDPTQFQFDSSPPTKRPRRAIEDIHNVTVQQQQQQQRRLWVKDRSKDWWERCNQPDFPEEEFRRYFRMSKATFDMICQHLDSAVTKKNTMLRQAIPVRQRVAVCIWRLATGDPLREGSKRFGLGISTCHKLVLEVCSGIKTVLMPK

SEQ ID NO: 175079 - protein, 58 aa, Glycine max
  Clone ID: PAT_MRT3847_129114C.1.pep
YLLEKYWKFDKKNSIPYLNAKMGKNYFLQPVGICNIYLVNSKKMTKFINWLSAYFYRI

SEQ ID NO: 175080 - protein, 83 aa, Glycine max
  unsure (1)..(83): unsure at all Xaa locations
  Clone ID: PAT_MRT3847_129115C.1.pep
MVTGPRGQRVRLYVRAPILGYIRSKLNHHDXTFLIHTEGVNAEEHVAWSAWKKMDYIHNAKVLKNGSHYRCILGQATRPHINR

SEQ ID NO: 175081 - protein, 593 aa, Glycine max
  Clone ID: PAT_MRT3847_129116C.1.pep
MKKGRELFVGSYRSLHQTPISPIQFQQTMSHSDPSNRYSYTPTLNWNPQVHHYFLKAYGADHFSRISTALTRPSRYSCIRVNTLRSTGDAVIHKLRSLVPNADVPPPQSDSGDDVANPLKECSAAAAAPISKCEIPGLDYVVFVWGSGPRRIHYGDAPPKEVIVSRKCAEAVLRGAQVYVPGVMACSAHVEKGDTVAVSVAVEKQGADGGWGIAMTRGTVLQGSETDPYYFERNGLYIGQGTAMLSRAGMFRVSEGVGVDMKDRVYELHSFHNVLEGEIFLQNLPSIIAAHALDPQKGERILDMCAAPGGKTTAIAILMKDEGEIIATDRSHNKVLDIQKLAAEMGLSCIKTFKLDALKSVCRRDDIDTFTDPCCNNAKIDVTNQVLDSPNLQVERVSPLVTEDKGKKPNGGAYVSKADIRKNMRRARNGPGRNQCVGGRVDRSKGFSPDSFDRVLLDAPCSALGLRPRLFAGEETIQSLRNHAKYQRRMFDQAVQLVRPGGIIVYSTCTINPGENEALVRYALDKYKYLSLAPQHPRIGGPGLVGSCEFPDGYIEEWLRPGEEDLVQRFDPSSPLDTIGFFIAKFLVGSKDT

SEQ ID NO: 175082 - protein, 148 aa, Glycine max
  unsure (1)..(148): unsure at all Xaa locations
  Clone ID: PAT_MRT3847_129117C.1.pep
YASLPPLATMSVETMCSVLKKYFGFSDFRPYQREVIEKILDVQFDKLPLHGLGKNYPANWWKALGHQLISQGYLKEIVSDRYRTISVSSKGEQFLASSRPDYQPPLVLTLTAEMLGEEDNGNTXEAFKTLSTLESEGFSEAEGQLYQM

SEQ ID NO: 175083 - protein, 84 aa, Glycine max
  Clone ID: PAT_MRT3847_129118C.1.pep
TNPFTKKKEQTLTKLLKKGKGPPNGIQGIKKLKGPVFTTGPGVTPDPWDHPGNSERHLKGDQFFLIKNQIKLGRKKVKAVSRGK

SEQ ID NO: 175084 - protein, 99 aa, Glycine max
  Clone ID: PAT_MRT3847_129119C.1.pep
YEFWKKSKMVKAILQNYANLEFRKEGTNRFEALLSTWGLLRVRIYIYTYILTMRIRILYGRKFCLPLWAKQFSLRGFNTVAYPVSQHETTGYSETTRAV

SEQ ID NO: 175085 - protein, 60 aa, Glycine max
  Clone ID: PAT_MRT3847_12911C.1.pep
MDPTSIPLSTATNIPFTVQPSNHVTLVYNSNTNTNHPPYDEMMYTAIGAIKEKDGSSKRA

SEQ ID NO: 175086 - protein, 55 aa, Glycine max
  unsure (1)..(55): unsure at all Xaa locations
  Clone ID: PAT_MRT3847_129120C.1.pep
YFSIDGRNPGSLHVYYYFFHFSILIALIYNSISHMALSIXYPLLTATFLLMQTLV

SEQ ID NO: 175087 - protein, 219 aa, Glycine max
  Clone ID: PAT_MRT3847_129121C.1.pep
DGTIIRGQNEISHPTSGTMELIKKESFSAPALPSKIKRVFYMSSEGKNLLHEVFPSANAAVLEQLNNVDCIVYGMGSLFTSICPSLVLLGIGEIISSKSCLKVLVLNGTRDRETNGFSASCFVTAITDALNRTYGEPNNRLQNPPSHYINTLLVPRNGEIPVDVDCLAAQGIFDVIVVDSLRDPKVGIIYDPRSLIRSLVDLIDRYMKSQVNGLIDTRR

SEQ ID NO: 175088 - protein, 153 aa, Glycine max
  Clone ID: PAT_MRT3847_129122C.1.pep
SGASSRVAVVLAAGDPTGERCSSDMVHFFAEFRKFISHDYYASLDQEMSLERMNYETGVTSTAALASMTPAMEPCSDSYWTDRIIQSIPKELSLTKYQNERVVFLPETLTEANPLSFKLQPSAETTTDLCYKQQDTDRNLGSESSKLVEHLDW

SEQ ID NO: 175089 - protein, 60 aa, Glycine max
  Clone ID: PAT_MRT3847_129123C.1.pep
FIYRSFQTAGSVPGPFKACMCLRLRLRSCVVVEAAVCVKCVYGLICTLKTSYFVPFTIFC

SEQ ID NO: 175090 - protein, 346 aa, Glycine max
  Clone ID: PAT_MRT3847_129124C.1.pep
MGLLASSCFILIALLLLTPKGVMGATFTFFNKCDYTVWPGILANAGSPPLDSTGFELPKDTSRAFQAPTGWSGRFWGRTGCTFDGSGAGSCLTGDCGSGQVECNGAGAAPPATLAEFTLGTGGQDFYDVSLVDGYNLPMIVEGTGGSGLCASTGCTSDLNQQCPAELRASEGSACKSACEAFGSPEYCCSGAYGSPATCRPSIYSEMFKAACPRSYSYAYDDATSTFTCSGADYTVTFCPSSPSQKSSRDTTTNPMTSTTTSPGSGTVTGTGTGTGSEGAVVYTGADNGVAYNTVTDSGSSSGSGGETMLADGSYLAGLAMGDSPERTVSIAFVYSASFLLILFLL

SEQ ID NO: 175091 - protein, 99 aa, Glycine max
  unsure (1)..(99): unsure at all Xaa locations
  Clone ID: PAT_MRT3847_129125C.1.pep
FFRWPHPTPLHEGADEXMNDRIVRSDRNLVGAMNVQDAYHSHSENALRRPSVVPIIRTRPIHLVTFTKTMDQIEPNMNSMQHLQLTTAQEELCQGKELH

SEQ ID NO: 175092 - protein, 104 aa, Glycine max
  Clone ID: PAT_MRT3847_129126C.1.pep
MACENDKKGHREQAPGPALCPTQTNNPRETEGREPPASDPRNGHTRGNKHCNTHVPIHEREQDHTARLTMPEKNRHDENKANAEPRLGIQGHERRTEAPHGDTK

SEQ ID NO: 175093 - protein, 57 aa, Glycine max
  unsure (1)..(57): unsure at all Xaa locations
  Clone ID: PAT_MRT3847_129127C.1.pep
ISERAKAEATDALXKXNLLXXEQIEAXIKXKNSFXNAXRIQHERFAIMXLRTKSYSI

SEQ ID NO: 175094 - protein, 55 aa, Glycine max
  Clone ID: PAT_MRT3847_129128C.1.pep
SYTHFCSPWCLLALTPSLFGNHHRKGYGLLVLIDSGAGDFWQFPCVFKLTTIYLS

SEQ ID NO: 175095 - protein, 93 aa, Glycine max
  Clone ID: PAT_MRT3847_129129C.1.pep
SSTTNFLQFIYKKIGVIYFRFFSSDLCQEKYKIMVVQFVLTKNNNKTTIQDLLCELLGRACVFELIFEGKINFDSSLMYNDMKIYSKSILNVK

SEQ ID NO: 175096 - protein, 58 aa, Glycine max
  Clone ID: PAT_MRT3847_12912C.1.pep
MIREFLHESKKKKKKKKKKKKKKKKKKKKKKKKRKNTKKGSKQKNPSMQKKKIYYSSH

SEQ ID NO: 175097 - protein, 100 aa, Glycine max
  unsure (1)..(100): unsure at all Xaa locations
  Clone ID: PAT_MRT3847_129130C.1.pep
GISSRTHLHIVTVEASMRYSFDLTFNACRARLRLRRFFSHHHISWVIYCRSMRVLHQGSXMENTLLDGSPTAQLKIWEYAYPNCCDLHSQPKSTVDTRAY

SEQ ID NO: 175098 - protein, 176 aa, Glycine max
  Clone ID: PAT_MRT3847_129131C.1.pep
LNFHENVVRHAQSASLMPGSVFNDDKPFTDGSQMADIYQHNNSFGQKSSDLPEMSIKTQAGRSEEDFVTDLYDDSDLNAENNYHFGDARTNRQSSKVSSSHFITPTDDHNDNLDLDDWNTRNKAVEDPFVTDEVNTQRNNMETSSYNDTTVVFDDSGSEDDDHKFDVDKKYNGEGS

SEQ ID NO: 175099 - protein, 194 aa, Glycine max
  Clone ID: PAT_MRT3847_129132C.1.pep
MIEKVPLVIVAVLILVVQSSVAFHGRNRIMKVHPVPRKRNISIQFGGDGGNPMSEAQALLGIAGKKLRRLPHVFSCVLELPFRSDADVAVEEAPNFFRFVAETDGIGDVRAHTVEIHPGVTKIVVREGGSVELSLDQLELDMWRFRLPESTRPELASAVFVDGELIVTVPKGHEEENDGDGDRGMGGGRLVLVQ

SEQ ID NO: 175100 - protein, 128 aa, Glycine max
  Clone ID: PAT_MRT3847_129133C.1.pep
MIFARKRKGGRRKNRSFMIEKVPLVIIAVLILVVQSSAAFHGINRIMKVHPVPRKRNISIQFGGDGGNPMSEAQALLGIAGKKLRRLPHVFSCVLELPFRSDADVAVEEAPDCFRFVAETDGIGYVRA

SEQ ID NO: 175101 - protein, 78 aa, Glycine max
  Clone ID: PAT_MRT3847_129134C.1.pep
VKNIQLGHKLPYLFLFPQNILTPFFPYKLRTDTPLYLLYSPNNVFFKLPFLITSILFFKPSFPFFKNLSYFTIFFSFY

SEQ ID NO: 175102 - protein, 153 aa, Glycine max
  Clone ID: PAT_MRT3847_129135C.1.pep
ARASIIGDAVSYMHELQAQASMLKAEVEGLETSSLNSKNYQGLIENPMRVQLITNKKIIQMDMFQVDEKGFHVKIMCNKGEGVAASLYKSLESLTGFNVQNSNLTTISDRSFLLTFSLNAKGPEPEINLPNLKLWVTEAFVKQGFEFIPFFYA

SEQ ID NO: 175103 - protein, 54 aa, Glycine max
  Clone ID: PAT_MRT3847_129136C.1.pep
SGFGFFLCGPTTPSPFPLLRIIVQRFQCPNLVKRDTNSELLTLLDYSGGACVHV

SEQ ID NO: 175104 - protein, 112 aa, Glycine max
  Clone ID: PAT_MRT3847_129137C.1.pep
NPSPWEKKIGPGTIVWLVFKRKKNFWQERGLISYKLKKGGGNCYFRPREATWLGLHGLSGAINFFRNQKIWRLQKKKKTLAKFEMVPLVPKRKGWTPFFFPMGGENNGRISH

SEQ ID NO: 175105 - protein, 103 aa, Glycine max
  Clone ID: PAT_MRT3847_129138C.1.pep
HYSCLVDAYGRAGRLEEAYQIVQKVGSESAWRTLLSACRNHNNKEIGEKCAMKMIEFNPSDHVAYILLSNIYIGEGKWEEALKCRERMPEICVKKDPGSSWLI

SEQ ID NO: 175106 - protein, 37 aa, Glycine max
  Clone ID: PAT_MRT3847_129139C.1.pep
MLISLSRLKELLLSIRTITKCYTMTVELQIPIYVHIG

SEQ ID NO: 175107 - protein, 101 aa, Glycine max
  Clone ID: PAT_MRT3847_12913C.1.pep
MRSRDKRGIPGIIFVFEWYRIKQRCLEQGQPGGTYHECKAQQPLNGGFENWSRLSRDLFINHMTLLHRTKNIVVYKHAPADHNYAFKHASEHSQSLGVWGT

SEQ ID NO: 175108 - protein, 97 aa, Glycine max
  Clone ID: PAT_MRT3847_129140C.1.pep
GITVCGQSPISSLSLSTSFKMGPVSGLLPFMTYDPWAAKGLGTGGHCEVQCARNMVSAHNAGEGTIQRPAQLESAQRKNVTLSPPPCIQLSSDQVST

SEQ ID NO: 175109 - protein, 66 aa, Glycine max
  unsure (1)..(66): unsure at all Xaa locations
  Clone ID: PAT_MRT3847_129141C.1.pep
PYAILLNKLDFLYTILGTVDHFRVMEILPNLXVLESMYVIVDKXLELHSLCCKRLKRIMIELCYDY

SEQ ID NO: 175110 - protein, 75 aa, Glycine max
  Clone ID: PAT_MRT3847_129142C.1.pep
KETRFEKKGGKTSKKKAKKQNYSFNGQPKNLLARREEQSTFGHPTLKRKLGREKTLTGFGHNQSQQFQPLTWWDL

SEQ ID NO: 175111 - protein, 58 aa, Glycine max
  Clone ID: PAT_MRT3847_129143C.1.pep
RITYRKTSMKLYLANIPAIETGWSKSLTLTGDEDWGLHRCQNRRVRQGHHAQQILALA

SEQ ID NO: 175112 - protein, 147 aa, Glycine max
  Clone ID: PAT_MRT3847_129144C.1.pep
FAATTRFMFCCFHSSVQTSKSKSQLRNRNTNCDSAAPHRGDSGRDGRSFNPPRSRGHCRGKGPLRSGAILRFALASNECEFWARVGSPSRTVYSISFCPKPFRVNFVMYALISMSKSVSGNVGIVLWLNLMFKTNRICIILEHLLRG

SEQ ID NO: 175113 - protein, 49 aa, Glycine max
  Clone ID: PAT_MRT3847_129145C.1.pep
KRRDWKNPAVTKLNRLEENPPFASCRITKKARTIGPSKQLPTLIGNWNP

SEQ ID NO: 175114 - protein, 68 aa, Glycine max
  Clone ID: PAT_MRT3847_129146C.1.pep
ALFGFLCANKSLSPFSFDPINLDIPIPHCSLIYERQQLSAPRSFLLSTDFIRVVFTYAIRECGNVSQL

SEQ ID NO: 175115 - protein, 52 aa, Glycine max
  Clone ID: PAT_MRT3847_129147C.1.pep
KALVIISGNLWSHMQCASGPWNISVRRCMEDRTLEAATPKGICIRQKKKKRE

SEQ ID NO: 175116 - protein, 58 aa, Glycine max
  Clone ID: PAT_MRT3847_129148C.1.pep
YANRKGDYVKSTVQPIRKLIRNFCWHHLKGISEDIHTTKSITRIHRCCFNGTTGHTRR

SEQ ID NO: 175117 - protein, 75 aa, Glycine max
  unsure (1)..(75): unsure at all Xaa locations
  Clone ID: PAT_MRT3847_129149C.1.pep
ARXRELGIXLEGSXXFFFSRIFFAVIGGCFRXLYXSEVNCQXFHGFPWLMFGHDIYXYXXCXXFVXELLYXLFGL

SEQ ID NO: 175118 - protein, 76 aa, Glycine max
  Clone ID: PAT_MRT3847_12914C.1.pep
MLARLIRRKRLVSIDSVIDPLSEFVEDIVRLEKLFYIPDRREFSKVVIRTVIVFILKAFIVLFLRLMGISINIIMD

SEQ ID NO: 175119 - protein, 63 aa, Glycine max
  Clone ID: PAT_MRT3847_129150C.1.pep
CNTSPLIRQNTNHRTSLGCSFCTSGIASCTSHIASLMEENNCNNANDHVNSKYIPVKQKRPTQ

SEQ ID NO: 175120 - protein, 142 aa, Glycine max
  unsure (1)..(142): unsure at all Xaa locations
  Clone ID: PAT_MRT3847_129151C.1.pep
MASRRFVSSLIRSSLRRSQSKPSISASASRLTSSNRASPHGYLLNRVAEYATAAAAATAPPSAPPPGKKEVSGGGKITDEFTGKGSIGQVCQVIGAVVDVRFDEGLPPIMTALEVLDHSSRLVLEVAXHLGEGVVRTIAMDA

SEQ ID NO: 175121 - protein, 53 aa, Glycine max
  Clone ID: PAT_MRT3847_129152C.1.pep
SDFYNCIRYMAVTLTVYYHSMPCLKGAIVMISIPEYRTCGSHMAKVRSLRGSQ

SEQ ID NO: 175122 - protein, 321 aa, Glycine max
  Clone ID: PAT_MRT3847_129153C.1.pep
SSPLRCSGGLGLDLNQVDEASDVGNCLSSNHKIDVPIMQVKPSLGGPPNREVNVHRDFDLNNGPSVDEVTTESSLFSLHARSSVPSQPLVSGLRVSTAEPVNFSWLPSSGNTYSAVTISSIMPDRGDHPFSIVAPNGPQRLLTPAAGGNPFGPDIYRGPVLSSSPAVSYASAPFEYPVFPFNSSFPLPSASFSSGSTTYVYPTSGNQLCFPAVNSQLMGPAGAVSSHYPRPFVVGLAEGSNSGSAETSRKWARQGLDLNAGPGGSDVDGRDGNSPLPSRQLSVASSQALAEEQVRVQLAGSVRKRKEPDGGWDGHNQSSWQ

SEQ ID NO: 175123 - protein, 245 aa, Glycine max
  unsure (1)..(245): unsure at all Xaa locations
  Clone ID: PAT_MRT3847_129154C.1.pep
ILGQLSLLLVQARSSVPSETLATEFKQSNTKQNYCSLVPSSGNNYSAFSISSIMTDREDHPFTIVAPNGPQGLLTPAAGGNPFGPDIYRGPVXSSCPAVSYASAPFEYPVFPFNSSFPLPSASFSSGSTTYVYPTSGNQLCFPAVNSQLMGPAGAVSSHYPRPFVVGLAEGSNSGSAETSRKWARQGLDLNAGPGGSDVDGRDGNSPLPSRQLSVASSQALAEEQVRVQLAGSVRKRKEPDGGWD

SEQ ID NO: 175124 - protein, 132 aa, Glycine max
  Clone ID: PAT_MRT3847_129155C.1.pep
SLLRLLKYPRRLIKDGVKCRMVSTEAVKEDTLESISGQDFDKIEKQNTGSSFMQKVLEHKTEIFQNNNSTDPKINSKCNAFAISKRIKCDTMKCKVDQDTQKCETNQEGKVKSESKNESKGERSPGKVMTDS

SEQ ID NO: 175125 - protein, 48 aa, Glycine max
  Clone ID: PAT_MRT3847_129156C.1.pep
IHLIACRFQRLFHICILCYIYTGMQHTLQCIIVSDWNFSKYLLTKRSR

SEQ ID NO: 175126 - protein, 102 aa, Glycine max
  Clone ID: PAT_MRT3847_129157C.1.pep
PMRGLHTVTPNERSGNNMGLMSDLDDSDVTTLATGPDETSLLVPLTMIIQFGLHSPDDNCKASAASLLISRLGRIIHQSTQGLWINNTTHLLLTLDIHTCYR

SEQ ID NO: 175127 - protein, 56 aa, Glycine max
  Clone ID: PAT_MRT3847_129158C.1.pep
SSQSQIRTLAMAAFQKIKVANPIVEMDGDEMTRVIWKSIKDKLILPFLELDIKYYD

SEQ ID NO: 175128 - protein, 52 aa, Glycine max
  Clone ID: PAT_MRT3847_129159C.1.pep
HGPLSILNELGRTIFIILKEYYQIFFHFIKITFLTYKLCLYIICKYICKLSF

SEQ ID NO: 175129 - protein, 57 aa, Glycine max
  Clone ID: PAT_MRT3847_12915C.1.pep
HSHEAQVTLFGFPLLSGKCCGDIPHFLTSGHFTLRILSQFARWSSRWRYSIHPSALP

SEQ ID NO: 175130 - protein, 51 aa, Glycine max
  Clone ID: PAT_MRT3847_129160C.1.pep
LNNLNISFNKNSFNQYFCDIIYLKVILKKKYFLLRMRTITIIITNIINNIM

SEQ ID NO: 175131 - protein, 57 aa, Glycine max
  Clone ID: PAT_MRT3847_129161C.1.pep
SCLSTSTTLDNPNLEENFFKKHRFYILCFVILYLLSQLTLSRPCVSILTRELFKLKI

SEQ ID NO: 175132 - protein, 57 aa, Glycine max
  Clone ID: PAT_MRT3847_129162C.1.pep
MMRLRWSVLVTVTFAVSLFWLGPLQVKASNSVSAFVQNAIYSNRIAVFSKSYCPYCL

SEQ ID NO: 175133 - protein, 164 aa, Glycine max
  Clone ID: PAT_MRT3847_129163C.1.pep
MMRLRWSLVVTVTFAVLLFWIGSLQVQASNSVSAFVQNAIYSNRIAVFSKSYCPYCLRAKRLLAELNEKPFVVELDLRDDGYQIQSVLLDLIGRRTVPQVFVNGKHIGGSDDLSAAVQSGEWRNLSVQVDGVLEIYGTGMLGGVWTWGSFGTVVWGGALGGGGG

SEQ ID NO: 175134 - protein, 129 aa, Glycine max
  Clone ID: PAT_MRT3847_129164C.1.pep
MMRLRWSVLVMVTFAVSLFWLGPLQVKASNSVSAFVQNAIYSNRIAVFSKSYCPYCLRAKRLLAELNEKPFVVELDLRDDGFQIQSVLLDLIGRRTVPQVFVNGKHIGGSDDLSAAVQSGELQKLLSAS

SEQ ID NO: 175135 - protein, 39 aa, Glycine max
  unsure (1)..(39): unsure at all Xaa locations
  Clone ID: PAT_MRT3847_129165C.1.pep
ENNLSELKGKHKEREMQTFLKXTLRYQNXFWIQIHEYIT

SEQ ID NO: 175136 - protein, 45 aa, Glycine max
  Clone ID: PAT_MRT3847_129166C.1.pep
GLPDHKWTTAYRLAFNSTVQVVSQDLGVIAPERHPVHLHGFNSML

SEQ ID NO: 175137 - protein, 40 aa, Glycine max
  Clone ID: PAT_MRT3847_129167C.1.pep
DTKKGPPNNKLETKSSRKSRKPPYKKYILNPYFRVNIYNN

SEQ ID NO: 175138 - protein, 38 aa, Glycine max
  unsure (1)..(38): unsure at all Xaa locations
  Clone ID: PAT_MRT3847_129168C.1.pep
PTRPGTLTPLVIELSKPHPEGELYGAVSQNYIPXIXLV

SEQ ID NO: 175139 - protein, 92 aa, Glycine max
  Clone ID: PAT_MRT3847_129169C.1.pep
KKIKWHWIGKEANIEKKNLRTRNKTLTTKGFGKSLEKKRRIPRTRSRISKKSTRGNKGKRILMWWRNKTHWADNYNGREGEKPGDNQPKQTC

SEQ ID NO: 175140 - protein, 83 aa, Glycine max
  Clone ID: PAT_MRT3847_12916C.1.pep
EILTGFQIHTGVICDFERPIFNSLPYRKKEYCLQAPVQNLFPGRQDHKSEPAPFVFYFLLYPCFLNHPLFIDICSWSKILFFL

SEQ ID NO: 175141 - protein, 122 aa, Glycine max
  unsure (1)..(122): unsure at all Xaa locations
  Clone ID: PAT_MRT3847_129170C.1.pep
SKIAELLMEKLPGTCSKMFIRERVVHAWDQLMXTGNSTNISTHASSAEKDNDSISRASSRSRRHRRRRENSNPDGNPLDDLKTPVAVNAGSPPNSEDMPTVNSSIRLSDSTAPKAFKDKCFT

SEQ ID NO: 175142 - protein, 53 aa, Glycine max
  Clone ID: PAT_MRT3847_129171C.1.pep
TVPSASEMLVVDTDPNDVILNGDPPPSFSCVCSHNATQHAVSLCLCPCRSVPR

SEQ ID NO: 175143 - protein, 124 aa, Glycine max
  unsure (1)..(124): unsure at all Xaa locations
  Clone ID: PAT_MRT3847_129172C.1.pep
YSLFKSSLDDVETTNGSMXDHLKLVKSNXVLSKNTVGGTILRSELXGTFFDIRQFLRHVADMEHTCHXEGMSQTSGLRVVVPDNTGXVASACAMNSSFRGRASCDIYTTCSEDXGLWYPDWTKA

SEQ ID NO: 175144 - protein, 145 aa, Glycine max
  Clone ID: PAT_MRT3847_129173C.1.pep
VLAGLMKGGDEDLARDFPDRAYKGAHFVPKRRKSRNASFGLSIASVQGAGPALGASVLSAPYALPRWLPDHVPPLARFSGGPSPVKSPVPKPVAGFRRPPADPWNVPKEFFSEGPLGILADPPPPSPYFAGGKKFPRYCWGRVGS

SEQ ID NO: 175145 - protein, 93 aa, Glycine max
  unsure (1)..(93): unsure at all Xaa locations
  Clone ID: PAT_MRT3847_129174C.1.pep
WREYVHFFRFLFFKLVGYHLIRIQLRFPGFLIWWWWRRCFFLGKIWFWATVNVLGYNLGKEDQQEIXCAYLRFKVSIPSTXSWXKMTPNXYAA

SEQ ID NO: 175146 - protein, 124 aa, Glycine max
  unsure (1)..(124): unsure at all Xaa locations
  Clone ID: PAT_MRT3847_129175C.1.pep
QIFRKTLSSKTITLEIKSSDTIYDMKTNIEDEKDVPANQQRLIFGRKHLGNGHTLTNYNIHKESTAYLVLRLQNGTKKHKKKTYTKPKNINHKRERSNLGILQVYGMRDSVRVXELHKECPSAE

SEQ ID NO: 175147 - protein, 91 aa, Glycine max
  unsure (1)..(91): unsure at all Xaa locations
  Clone ID: PAT_MRT3847_129176C.1.pep
ERLTNAQKLELLLTAGIGSDGVDLKAAAAAGLTVAKVTASNATSAAVDELMRILILIKNFLPVCHPAQXGEWNVTGIAHRAYDHDGKTIRT

SEQ ID NO: 175148 - protein, 99 aa, Glycine max
  unsure (1)..(99): unsure at all Xaa locations
  Clone ID: PAT_MRT3847_129177C.1.pep
MPLQALVTALANAPPEHQGVLLGEAFYPLVVQLEHDFFPKVPGMLLEMAPPEVFPLIGSPNAFKAKVFXPMVVFKNVAPQQTNPVVQLASLFFNDNFVF

SEQ ID NO: 175149 - protein, 187 aa, Glycine max
  unsure (1)..(187): unsure at all Xaa locations
  Clone ID: PAT_MRT3847_129178C.1.pep
VPFQVEVPPPQPFFKSLKYSLKETFFPDDPLRXSRTSQLPRSSCLALQFFFLVFECFFPIFEWAPKYTFQFFKADLIAGITIASLAIPQGISYAKLANLPPILGLYSSFIPPLIYAMMGSSRDLAVGTVAVGSLLMGSMLSNAVDPNEDAMLYLHLAFTATLFAGVFQAALXLFXVGLIVDFLSHAT

SEQ ID NO: 175150 - protein, 156 aa, Glycine max
  Clone ID: PAT_MRT3847_129179C.1.pep
MGSVDYEYPLGMNNFERVHQVEVPPPQPFFKSLKYSLKETFFPDDPLRQFKNKPASKKFMLGLQFFFPIFEWAPKYTFQFLKADLIAGITIASLAIPQGISYAKLANLPPILGLYSSFIPPLIYAMMGSSRDLAVGTVAVGSLLMGVDVSNAVDPN

SEQ ID NO: 175151 - protein, 81 aa, Glycine max
  unsure (1)..(81): unsure at all Xaa locations
  Clone ID: PAT_MRT3847_12917C.1.pep
MMPNPHRKPYTLYGKEASLLKSELDHCFWYREHNMSPXYYDGHYWTMWKLPMFGCTDASQVLKELKRLIXAYPNGFIRIIG

SEQ ID NO: 175152 - protein, 59 aa, Glycine max
  Clone ID: PAT_MRT3847_129180C.1.pep
NKGWFLAPSQTLYLYKYFVFKEGRLIYFPMRMRIGYLRDLREKARVIPLSLAQLATLRF

SEQ ID NO: 175153 - protein, 76 aa, Glycine max
  Clone ID: PAT_MRT3847_129181C.1.pep
ITVTVNIKNGLRDSWQDAPTTNVGKGSKKEATSKAVPGVDRRGSLKRPLNNITQEADSTGAKKLVARHGKRATHKS

SEQ ID NO: 175154 - protein, 65 aa, Glycine max
  Clone ID: PAT_MRT3847_129182C.1.pep
SKGVFPGCGGLGLLGFGWQSTPLGGLETQVFVDFKVGFWTPYFFLGGVLLILTGCVVCFGHSFFF

SEQ ID NO: 175155 - protein, 50 aa, Glycine max
  unsure (1)..(50): unsure at all Xaa locations
  Clone ID: PAT_MRT3847_129183C.1.pep
NIYHCREXQSKIHMHXLYVLIYLMLNLLPLQFPIYNILIEIKLYPVVYLP

SEQ ID NO: 175156 - protein, 79 aa, Glycine max
  unsure (1)..(79): unsure at all Xaa locations
  Clone ID: PAT_MRT3847_129184C.1.pep
SLRMRRNHPRNSLASSSGKXAIWKKKXKLRAAQKQRRCMXXXXXXXPPPRXAWFKVKEIREXMCERCATIXQTPCWLIF

SEQ ID NO: 175157 - protein, 69 aa, Glycine max
  unsure (1)..(69): unsure at all Xaa locations
  Clone ID: PAT_MRT3847_129185C.1.pep
AATSSGTLKTTPFLGQGKGANANALRDVLSMGTGNHTTGNAPCFVLYRVKYLGPFSALTPXSYSKGEFP

SEQ ID NO: 175158 - protein, 50 aa, Glycine max
  Clone ID: PAT_MRT3847_129186C.1.pep
SEVHLSYFCDHGSLKHNYDLNIIFFICESLSFFSPFLMGGQEDNIAEYYQ

SEQ ID NO: 175159 - protein, 142 aa, Glycine max
  unsure (1)..(142): unsure at all Xaa locations
  Clone ID: PAT_MRT3847_129187C.1.pep
MAANTLMSSAISAFPSLLSSSKSRWAMLAVPGILVPEALGLGNWVKAQEWAAVPGGQATYLGNPVPWGTLPTILAIEFLAISFVEHQRSMEKDPEKKKYPGGAFDPLGYSKDPKTFHEYKVKEIKNGRLALLAXVGFCVQQS

SEQ ID NO: 175160 - protein, 36 aa, Glycine max
  unsure (1)..(36): unsure at all Xaa locations
  Clone ID: PAT_MRT3847_129188C.1.pep
NGVKIHTKTSXQXKDFLXSLPIXHGSSKXTXPYLIY

SEQ ID NO: 175161 - protein, 152 aa, Glycine max
  Clone ID: PAT_MRT3847_129189C.1.pep
WAMLAVPGILVPEALGLGNWVKAQEWAPVSGGQATYLGNPVPWGPLPPILAIEFPAISFVEPQRSMEKAPKKKKNPGGAFDPLGYFKGPKPFPEYKVKELKNGRLALLAFVGFCVQQSAYPGPGPLENLAAPLGDPWPNTIGNILFPPSILP

SEQ ID NO: 175162 - protein, 72 aa, Glycine max
  Clone ID: PAT_MRT3847_12918C.1.pep
KIPSRCRWILLPIHKPLVQSLSCAKICMYLIRNFLVKMPLVIVQNSIQISKPNKFEMNIAVGAVAWFLRQAR

SEQ ID NO: 175163 - protein, 155 aa, Glycine max
  Clone ID: PAT_MRT3847_129190C.1.pep
YAEISYILQPGILVPEALGLGNWVKAQEWAAVPGGQATYLGNPVPWGTLPTILAIEFLAISFVEPQRSMEKDPEKKKYPGGAFDPLGYSKDPKTFHEYKVKELKNGRLALLAFVGFCVQQSAYPGTGPLENLAAHLADPWPNNIGNIIIPQSILP

SEQ ID NO: 175164 - protein, 246 aa, Glycine max
  Clone ID: PAT_MRT3847_129191C.1.pep
MAANTLMSSAISAFPSLLSSSKSRFAAAVPLSSFVVTNASSSRFSMSADWMPGQPRPPYLDGSAPGDFGFDPLRLGEVPENLERFKESELIHCRWAMLAVPGILVPEALGLGNWVKAQEWAAVPGGQATYLGNPVPWGTLPTILAIEFLAISFVEHQRSMEKDPEKKKYPGGAFDPLGYSKDPKTFHEYKVKEIKNGRLALLAFVGFCVQQSAYPGTGPLENLAAHLADPWHNNIGNVIIPQSILP

SEQ ID NO: 175165 - protein, 79 aa, Glycine max
  Clone ID: PAT_MRT3847_129192C.1.pep
ASAKSGPLKSSLTFAPSLVLQLINLLFQAIVYMKIAFFRNPGQGRVLHFFHPGLKSWGFWKTPRFWGLYVRQPCFGGAL

SEQ ID NO: 175166 - protein, 246 aa, Glycine max
  Clone ID: PAT_MRT3847_129193C.1.pep
MAANTLMSTAISAFPSLLSSSKSRFATAVPLSSFGVTNASSSRFSMSADWMPGQPRPPYLDGSAPGDFGFDPLRLGEVPENLERFKESELIHCRWAMLAVPGILVPEALGLGNWVKAQEWAAVPGGQATYLGNPVPWGTLPTILAIEFLAISFVEHQRSMEKDPEKKKYPGGAFDPLGYSKDPKTFHEYKVKELKNGRLALLAFVGFCVQQSAYPGTGPLENLAAHLADPWHNNIGNIIIPQSILP

SEQ ID NO: 175167 - protein, 76 aa, Glycine max
  Clone ID: PAT_MRT3847_129194C.1.pep
ISNFKIKRSKHEPFHFKKNHLYKTSETHTKERTDVLLLYSCCIKDLKYIEPQVKKSNTLLTFKPLLWCCDSIAAPS

SEQ ID NO: 175168 - protein, 65 aa, Glycine max
  Clone ID: PAT_MRT3847_129195C.1.pep
IPHICSPKPIFSVVFNAGMGRAAGLKSGDTCDPGVPVVVTCTTIVVHHRAFSVEIQACVVLFYPF

SEQ ID NO: 175169 - protein, 160 aa, Glycine max
  unsure (1)..(160): unsure at all Xaa locations
  Clone ID: PAT_MRT3847_129196C.1.pep
FGIYVLHALLQSSVLSSFQHLILHTLLLQLEKWHKKTFLFTSDSVNEGLPDKLCDXQISDAXLDACLEQDPDSKVACEICPKTYLVLVFGDVTXKANVDXEEDWSVNTCREIGFFSEXVGLEADXCKVLVNFEQHNPXDYSPHGVHRSTSTKRPKEVGAW

SEQ ID NO: 175170 - protein, 77 aa, Glycine max
  Clone ID: PAT_MRT3847_129197C.1.pep
YLLQSSHIFLFKAKHYDAYTLTIMRFNKLCALSSFPIFANKTLTRKDLKADFFSRIINPPNLPSKCLWTQTHPRSPE

SEQ ID NO: 175171 - protein, 49 aa, Glycine max
  Clone ID: PAT_MRT3847_129198C.1.pep
TLPRIISIVLFYHQLALQPLQITKILHITLPMTINNSSLILAPQAYMEI

SEQ ID NO: 175172 - protein, 133 aa, Glycine max
  Clone ID: PAT_MRT3847_129199C.1.pep
AEELYKIETVPARNSMSVSVLGREEPTVTDLETTEREWRYYGDSYVLTHKTEGLSHRVDEPLLKRNLGDLEGAHLERSDGLACRIAFGTYKMFAVEDSEDYFHRRRAPSPEADKEAQRKRLDEVTARLMARVV

SEQ ID NO: 175173 - protein, 59 aa, Glycine max
  unsure (1)..(59): unsure at all Xaa locations
  Clone ID: PAT_MRT3847_12919C.1.pep
MEKYFGEAYRGNPGVPHSDRGRFGKIWVGSGAFXGRAYGSPYMWDVSNRGGGYGRPDAI

SEQ ID NO: 175174 - protein, 73 aa, Glycine max
  Clone ID: PAT_MRT3847_1291C.1.pep
DNIAAQLLVQFEDKSINLHHYQSSHVLRQLSQLGMVLTCQIHRSSGGPSTSLAGRRPDQTYIVSKRVQTFMWP

SEQ ID NO: 175175 - protein, 133 aa, Glycine max
  Clone ID: PAT_MRT3847_129200C.1.pep
FLEGTAFCMAGDAAFPSYTSTCMMTFFFSLLLALHFAMAVPERSFSSLASIKEGAKKRNTMVAASTAREEGSTQNLKTEEATPKDNHVSDHLLKGTNKEGSSRSPRPPLERQNKIFNASEHEVPSGPNPISNR

SEQ ID NO: 175176 - protein, 159 aa, Glycine max
  Clone ID: PAT_MRT3847_129201C.1.pep
DLCHRCLVCMGDLARYKQQCENPDTKNHNWSVAATHYLEATRIWPDSGNPQNQLAVLATYIGDEFLALYHCVRSLAVKEPFPDAWNNLILLFEKNRSSPLEYVSSKICLDFLKPFRRIGEETKAQWEDDSSNCNKFEGKSNHFAKLWSLVVRTISFLFI

SEQ ID NO: 175177 - protein, 141 aa, Glycine max
  Clone ID: PAT_MRT3847_129202C.1.pep
MTSFTSVLHFSNYDTTNRTEISSTLPANEILVAMGYLLQIEYEVIGEDLVNLWLLMLSCSAINCNLVNVPDQCPLPSTIPALGCQTIYLYSQLRQVEIAILALCKAIRLVISHEGNTEGSSRFLVFLSNEFHSEAVERLLS

SEQ ID NO: 175178 - protein, 66 aa, Glycine max
  Clone ID: PAT_MRT3847_129203C.1.pep
LEVNIWLLVINTLSNILSLDGRIICHNAFGCFAPIYAYYIHINTQTFTISYNYKVQSLHPSFIKLN

SEQ ID NO: 175179 - protein, 153 aa, Glycine max
  unsure (1)..(153): unsure at all Xaa locations
  Clone ID: PAT_MRT3847_129204C.1.pep
MIIARGNRLQISPFPFQDGVCLAMNXFFMTERPKMEVPNIHGIHLLHRSLHQDHPKKTAGRMHYLCLLTQNGLQFLMTXLGLPYGIDPVSLMKQAKXGPMTLYGPAAHRGMAPPXSTDXRRSGADRDGYLGGPLGPDCHLWDGAGATAYYQPS

SEQ ID NO: 175180 - protein, 34 aa, Glycine max
  Clone ID: PAT_MRT3847_129205C.1.pep
HQISYILSKFYNQQSKTVQHLLIISLNSTHFEYF

SEQ ID NO: 175181 - protein, 262 aa, Glycine max
  Clone ID: PAT_MRT3847_129206C.1.pep
MSRRPVNPSRRLGDGGSIPFAASIRSKSQNSPLLSIGLVIVGAILLIGYCYSNSGGASGGIKDVSKLEGGASCSSEVLQALPVLKKSYGDSLHKVLHVGPDSCSVLSSLLEEEDTEAWGIEPYELDDVGAKCKSLVRKGIVRVADLKFSLPYRAKSFSLVIVSDALDYLSPRYLNKTLPELVRVSADGVVIFAGYPGQQRTRGEEVAKFGRPAKLRSSSWWIRFFVQSSLDENETAGKKFEQASAKKAYKPACQIFHLKSYP

SEQ ID NO: 175182 - protein, 261 aa, Glycine max
  Clone ID: PAT_MRT3847_129207C.1.pep
MSRRPVNPSRRLGDGGSIPFVASIQSKSQNSPLLSIGLVIVGAILLIGYCYSNSGGASGGIKDVKLEGGASCSLEVLQALPILKKAYGDSMHKVLHVGPDSCSVVSSLLEEGDTEAWGIEPYELDDVGAKCKNLVRKGIVRVADIKFSLPYRAKSFSLVIVSDALDYLSPRYLNKTLPELVRVSADGVVIFTGYQGQQKTRGEEVAKFGRPAKLRSSSWWIRFFVQTSLDENDTAGKKYEQASTKKAYKPACQVFHLKSYP

SEQ ID NO: 175183 - protein, 81 aa, Glycine max
  Clone ID: PAT_MRT3847_129208C.1.pep
VPPVQLWSMNEYNVHLAKRIWPRLLERLILVLPLEIHLGRVCKYQYHCKCHTKLVHTLSLECGTPFLSSILYAPEKENKKQ

SEQ ID NO: 175184 - protein, 102 aa, Glycine max
  Clone ID: PAT_MRT3847_129209C.1.pep
LLLGIDHNQHMDRAMVIHMPKTLLILPTSLPIIIIIIIIIHQHIATFGDFFHKNALGWVAFPSSHTCVVKLVRLIIKLRFPYTRQTYYTLSSFMYTLMSYCH

SEQ ID NO: 175185 - protein, 89 aa, Glycine max
  Clone ID: PAT_MRT3847_12920C.1.pep
LFPSDYNPFYAGFGNRDTDELSYRKIGIPKGKIFIINPKGEVAISHRIDAKSYTSLHTLVNDMFPPTSLVEQEDFNSWNYWRMPFSDVD

SEQ ID NO: 175186 - protein, 202 aa, Glycine max
  unsure (1)..(202): unsure at all Xaa locations
  Clone ID: PAT_MRT3847_129211C.1.pep
MQEQLDKRNIIKFDSSRFNRSIEDFTLSISKYRDKPGNTLLNCHVEDELNEDASQPKKLFDHVTFTSACKHRPSQKNHEESSEIQRSYSLGKFDEVCSNSRRYSLQDLSELTERRISELHYSEVLGKCDEEYTVDIASIYESLISSSGATYASLKDVILDELLIAISTSKEERKIRASVSILAAIKSRNXSNIQKXFRAAAD

SEQ ID NO: 175187 - protein, 39 aa, Glycine max
  Clone ID: PAT_MRT3847_129212C.1.pep
MAFQMLRNYDNYVLLYWQIISYKSPCLTISYFLCNANNI

SEQ ID NO: 175188 - protein, 58 aa, Glycine max
  unsure (1)..(58): unsure at all Xaa locations
  Clone ID: PAT_MRT3847_129213C.1.pep
FLFFFFFFFGGNLSFFFXATCFHLEAKTIGSLFFLNKGLIDPPRPPQNQFFTPSACLF

SEQ ID NO: 175189 - protein, 46 aa, Glycine max
  Clone ID: PAT_MRT3847_129214C.1.pep
FNKGKRFTLSLSYLSLLLLTSACSAISSSMLIECQLNILNASKPYL

SEQ ID NO: 175190 - protein, 79 aa, Glycine max
  Clone ID: PAT_MRT3847_129215C.1.pep
PRTRSSTGRLNFLYKNQGILAFLHFTFGTQKRTFYKTLLAKGVKNFLFFWGIKIKSFCWTPRVGKLLATFLTETQGGDS

SEQ ID NO: 175191 - protein, 257 aa, Glycine max
  Clone ID: PAT_MRT3847_129216C.1.pep
SITSESHNQIVGNGLILGTGLIPYCATFFVFTDYMRGAIRLSALSEAGVIYVMTHDSIGLGEDGPTHQPIEHLASFRAMPNILMLRPADGNETAGAYKVAVLNRKRPSILALSRQKLTQLPGTSIEGVEKGGYIISDNSSGNKPDVILIGTGSELEIAAAAAEDLRKEGKAVRVVSFVSWELFDEQSDEYKESVLPASVTVRVSIEAGSTFGWQKIVGSKGKAIGIDRFGASAPAGKIYKEFGITKEAVIAAAKELS

SEQ ID NO: 175192 - protein, 45 aa, Glycine max
  Clone ID: PAT_MRT3847_129217C.1.pep
MMSSSLMWWIVVHRCKSIRCLLPSNSPINFQSHLARRKCLHLLVG

SEQ ID NO: 175193 - protein, 147 aa, Glycine max
  unsure (1)..(147): unsure at all Xaa locations
  Clone ID: PAT_MRT3847_129218C.1.pep
MSTVSLLKCYRPFFSMLFPHSAPPRPHASIFRRKNFPSFCATSSPPPLTAEKGCGKFDSEGLALPEVWLHNTMSKTKELFKPKVDSKVGMYVCGVTAYDLSHIGXHPRVYVNFDLLXGRYFKHLGFQVCYVRNFTDVDDKDLSLHFS

SEQ ID NO: 175194 - protein, 62 aa, Glycine max
  Clone ID: PAT_MRT3847_129219C.1.pep
GPFWLGPKKFYCQGTQRTLGLESEKNNGGGWPFLFYDTHLPIRVVASVNKKIKTQSNSKFIF

SEQ ID NO: 175195 - protein, 128 aa, Glycine max
  Clone ID: PAT_MRT3847_12921C.1.pep
MSVSLEQEGYVGLSEVPAMEGCSERTGGGLNLKATELRLGLPGSESPEREEGVEDKNVHPLGMVKCLVSGAKRGFSDTIDGGSGKWLLSGNSGSEVGLGKDGGFFSPGVLVLVLVLPRLSVPTNKLVL

SEQ ID NO: 175196 - protein, 206 aa, Glycine max
  unsure (1)..(206): unsure at all Xaa locations
  Clone ID: PAT_MRT3847_129220C.1.pep
MAKSKNNAKKLSYISVPSQIINSISSSSLQSLLESPKKCARHSKFFTFVKCIRPRLFLFTLFFLAFFAMLKFGLNLYTPFPPFPCATSVDPSKSNLGQQGGDVGVSEALISSVQLHGTEVPSGVGEKSEFWEQPDGSGYKPCLNFSKEYRRESEGVVKNRRRYLMVXVVSGGMNQQRNQIVDAXVIARILGASLVXPILQVNVILG

SEQ ID NO: 175197 - protein, 63 aa, Glycine max
  Clone ID: PAT_MRT3847_129221C.1.pep
SNIILFFVQIINGVMDNILCERFLFDSFESLDVLFCLLTKKNKTPIPPFGRENQATRLSCQTL

SEQ ID NO: 175198 - protein, 51 aa, Glycine max
  Clone ID: PAT_MRT3847_129222C.1.pep
MYLFYASGRYVWFCCGIKALLDVNHMLIIHSSRNARSLKMRFGMLRLTTLF

SEQ ID NO: 175199 - protein, 59 aa, Glycine max
  unsure (1)..(59): unsure at all Xaa locations
  Clone ID: PAT_MRT3847_129223C.1.pep
YIIYSSLLRHNSSIISPKINKLAAVLQQRDYXKNAVTKLNNLVAHHPFFSWCNNKKEAT

SEQ ID NO: 175200 - protein, 108 aa, Glycine max
  Clone ID: PAT_MRT3847_129224C.1.pep
LFQFARKIEDLILNNVAPEEIPFQVGLSKADLRKTLKSSLSGVDKSIAAMYKKLHKNLTSEELLPSLWNKCKNDFLDKYETFVQLVARIYPAESVPSVAELRDLLASM

SEQ ID NO: 175201 - protein, 118 aa, Glycine max
  unsure (1)..(118): unsure at all Xaa locations
  Clone ID: PAT_MRT3847_129225C.1.pep
SVIRYIAYSLSNIGCAMCNHMCGSVHYEGLLAEDTYGXADDAVEEALVEPWKPDERDAYRATRRESRCAYTTSVETLAVVILEPMTMLXNMDDPMEYSYPCDVEDNTDDPYMRPAYAA

SEQ ID NO: 175202 - protein, 515 aa, Glycine max
  unsure (1)..(515): unsure at all Xaa locations
  Clone ID: PAT_MRT3847_129226C.1.pep
GSRPNGYLVVGVVAFALLCSFRVSLTDSVPLFSPVHDAASLTRNSFPAGFIFGAGSSAYQFEGAAKEGGRGPSIWDTFTHNHPEKIRDGANGDVAVDQYHRYKEDVKIMKDMNLDSYRFSISWPRILPKGKLSGGVNQEGINYYNNLINELLANGVLPYVTLFHWDLPQALEDEYGGFLSSHIVDDFQDYADLCFKEFGDRVKFWTTLNEPWLFSQGGYATGATAPGRCTGPQCLGGDAGTEPYIVTHNQILAHAAAVHVYKTKYQAHQKGKIGITLVSNWFIPLAENSTSDIKAARRAIDFQYGWYMEPLTKGEYPKNMRALVGSRLPKFTKWQAKLVNGSFDFIGLNYYSSGYINGVPPSNDKPNFLTDSRTNTSFERNGRPLGLRAASVWIYFYPRGLXIFCYIPRKNTITLXIYITENGMNEFNDPTLSVEEALMDIYRIDYYYRHFFYLRSAIKAGANVKGFFAWSFLDCNEWFAGFTVRFGLNFVDYKDGLKRYPKLSAQWYKNFLKRN

SEQ ID NO: 175203 - protein, 95 aa, Glycine max
  unsure (1)..(95): unsure at all Xaa locations
  Clone ID: PAT_MRT3847_129227C.1.pep
NTLPFVKYLRVRVETLSRNTSFTLGFNLLILRFSQEGRGCVLDKFXVTERVIFCVXNFQKADPXRVTPMLTFRMTLXLGSVDSVEIAMALEEEIG

SEQ ID NO: 175204 - protein, 112 aa, Glycine max
  Clone ID: PAT_MRT3847_129228C.1.pep
GCFFVFVFVVSFFFLFFFFLTKNHSRFFPLPFTLWLTDMGGYIRLPPLRGTCNGPYKNLRLGGGNLNGKTGGGWEIILGHIKRRGKKPMRGSFIFHRHQGGGWFKPYGDCPP

SEQ ID NO: 175205 - protein, 110 aa, Glycine max
  unsure (1)..(110): unsure at all Xaa locations
  Clone ID: PAT_MRT3847_129229C.1.pep
MVQRLTYRKRHSYATKSNQHRVVKTPGGKLVYQTTKKRASGPKCPVTGKRIQGIPHLRPAEYKRSRLPRNRRTVNRAYGGVLSEDYPSFXKIVKKVLKIQKAKEKQASKA

SEQ ID NO: 175206 - protein, 66 aa, Glycine max
  Clone ID: PAT_MRT3847_12922C.1.pep
PKYFENVVFMAQKFFMNDPMNVKAVLDNLSKEVGSSVRVVDFPRMEVGEGIARQKTNTFETVAQVA

SEQ ID NO: 175207 - protein, 123 aa, Glycine max
  unsure (1)..(123): unsure at all Xaa locations
  Clone ID: PAT_MRT3847_129230C.1.pep
RRLVQRLTYRKRHSYATKSNQHRVVKTPGGKLVYQTTKKRASGPKCPVTGKRIQGIPHLRPAEYKRSRLPRNRRTXVNRAYGGVLSGSAVRERIIRAFLVEEQKIVKKVLKIQKAKEKQASKA

SEQ ID NO: 175208 - protein, 120 aa, Glycine max
  Clone ID: PAT_MRT3847_129231C.1.pep
MVQRLTYRKRHSYATKSNQHRVVKTPGGKLVYQTTKKRASGPKCPVTGKRIQGIPHLRPAEYKRSRLPRNRRTVNRAYGGVLSGSAVRERIIRAFLVEEQKIVKKVLKIQKAKEKQASKA

SEQ ID NO: 175209 - protein, 193 aa, Glycine max
  Clone ID: PAT_MRT3847_129232C.1.pep
MFFFDWFYGILASLGLWQKEAKILFLGLDNAGKTTLLHMLKDERLVQHQPTQHPTSEELSIGKIKFKAFDLGGHQVARRVWKDYYAKVDAVVYLVDAFDKERFAESKKELDALLSDESLANVPFLVLGNKIDIPYAASEEELRYHLGLTNFTTGKGKVNITESNLRPLEVFMCSIVRKMGYGDGFQWVSQYIK

SEQ ID NO: 175210 - protein, 191 aa, Glycine max
  Clone ID: PAT_MRT3847_129233C.1.pep
MFFFDWFYGILASLGLWQKEAKILFLGLDNAGKTTLLHMLKDERLVQHQPTQHPTSEELSIGKIKFKAFDLGGHQVARRVWKDYYAKVDAVVYLVDAFDKERFAESKKELDALLSDESLANVPFLVLGNKIDIPYAASEEELRYHLGLTNFTTGKGKVNLTESNLRPLEVFMCSIVRKMGYGDGFQWVSQY

SEQ ID NO: 175211 - protein, 103 aa, Glycine max
  Clone ID: PAT_MRT3847_129234C.1.pep
FHYSLYYFLSRQPITHFGSTCDQLTMALRRAYYCLLMLLVLANICFVPLLGDTNAQILMRFKASLSNNNALNNWVNESSLCSWRGLLCNHTDQTFYEFETGRV

SEQ ID NO: 175212 - protein, 101 aa, Glycine max
  Clone ID: PAT_MRT3847_129235C.1.pep
MSAAGGAFGGNRGLRPVPPEKGIFPLDHMHLCDLEKIEYLNCLKTAGHQSEKCRQFSKKYLQCRMEKNLMAKQDLGELGFKESNVETPGGNITDRVDNQEQ

SEQ ID NO: 175213 - protein, 122 aa, Glycine max
  unsure (1)..(122): unsure at all Xaa locations
  Clone ID: PAT_MRT3847_129236C.1.pep
MDLYALKSSRLSWQAYVDDHLMCEMRSILITHAALLXNTESFXTKSAIYHQMTHDVITAINNDLNDAESIDTPVLYIXATNTWISIARPGAIMRGXTGPGGDTGXTTGADIIRGIYDKRITH

SEQ ID NO: 175214 - protein, 135 aa, Glycine max
  Clone ID: PAT_MRT3847_129237C.1.pep
RLSIENNNTIPWLILTHLIVLLLLFALLFSFTLLPLGPDDHHHNILVTDDTPPPTTTSSNVFFFDDFQIQNIDYPFTNHDSSPTHAPTTLQGGQNLLLKGKITTGPSPSLRREQEIMEEDEDEAPSMKFHTCHYL

SEQ ID NO: 175215 - protein, 309 aa, Glycine max
  unsure (1)..(309): unsure at all Xaa locations
  Clone ID: PAT_MRT3847_129238C.1.pep
GGSARGGNFKTISEALAAIPPKYDGRYVVYVKEGVYDETVTVTKKMLNVTMYGDGQQKSIITGNKNFVDGVRTFQTASFVVLGGGFLAKDMGFRNTAGAEKHQAVAARVQADQAIFFNCAFEGYQDTLYAQTHRQFYRDCYIXGTIDFIFGDASAVFQNCTMVVRKPLENQQNIVTAQGRLDKQENTGFVLQKCVIKADTDLVPLKDTIKNYLGRPWKEYSRTIIMETQIDDLIHPDGFLPWEGNFALSTLYYGEYNNNGAGSSTTARVNWPGRKVINRDEATRYTVEAFLQGTWINGTGVPAQLGLYS

SEQ ID NO: 175216 - protein, 42 aa, Glycine max
  Clone ID: PAT_MRT3847_129239C.1.pep
RIGALESPSVVSPFSLPSLVRDRNAMFNLWWRLSAMRPCSTL

SEQ ID NO: 175217 - protein, 349 aa, Glycine max
  Clone ID: PAT_MRT3847_12923C.1.pep
MAFYGGAKRVCVSIRHYCSNSASEKVNLIKQLRERTSAAMKDVKAALVDSNWDIEEAQKELRKRGKVLASKKSSRTASQGLLALAQSPTKLALIELNCETDFVARNDIFQHLALRLANQALSLSLDSSSSSSSSSFHLGPQSLQDMPFNLDHPKFNGQTTVHNAITELAAMMGENVRLRRGYVIPASPNGFISTYLHTSPQPGLGRIAGILSLQVDDGQTQLQALQRVGSELAMHVVAAKPLFLTKELVPSDALENEREILKSQAEASGKPKMAIEKMVEGRLRKYFEDVVFMDQKFIMNDTMNVKAVLDNLSKEVGSSVRVVDFLRMEVGEGIARQETDTSETVAQVA

SEQ ID NO: 175218 - protein, 88 aa, Glycine max
  unsure (1)..(88): unsure at all Xaa locations
  Clone ID: PAT_MRT3847_129240C.1.pep
EILSRHASDELYLXQRDGXDSSSCDAGPLGAFXDRIWRCIAFKXKPIQKSNDETLKSRYGPVKKPYSLLVPSTQXGIAFRGIPNSLCI

SEQ ID NO: 175219 - protein, 74 aa, Glycine max
  Clone ID: PAT_MRT3847_129241C.1.pep
FKQRAPRWCSLGTLSVNSLRMDFTTMGWPPFSKKEIFFETATSKRIGDRYSLEIAINRAFPSLHDLFVGEECFP

SEQ ID NO: 175220 - protein, 49 aa, Glycine max
  Clone ID: PAT_MRT3847_129242C.1.pep
FVTVAREIVFSVTTGQVYVPLSVSLFWKTNCIGIDRTQYMTCSCCSIIP

SEQ ID NO: 175221 - protein, 36 aa, Glycine max
  unsure (1)..(36): unsure at all Xaa locations
  Clone ID: PAT_MRT3847_129243C.1.pep
FRLLGVLFRLRPRVRCFCVWLAMKRXRGSXPGFPVR

SEQ ID NO: 175222 - protein, 250 aa, Glycine max
  unsure (1)..(250): unsure at all Xaa locations
  Clone ID: PAT_MRT3847_129244C.1.pep
YIWLRRNSDIVGMKKDGISVFRELALFQDYHGLPALKNELVDFMAKIRENGIKFASEKLVLTAGATPANEILMFCLADPGEAFILPTPYYPGFDRDLKWRTGVEIVPMHCSSSNGFRITSSALEQAYQQAQKLNLKIKGVLVTNPSNPLGITMTKTELNHLVDFAIDKNIHIISDEIYSGTVFDSPKFVSIXEVVNERITTVNNNSITSIWNRIHIVXGFSKDLGIPGFSCXEXXLQHETVVAAATKMSS

SEQ ID NO: 175223 - protein, 54 aa, Glycine max
  Clone ID: PAT_MRT3847_129245C.1.pep
LSGFHSREVQKFYPKLNNYYHHNCPNTSIKPHSPLLNQTTTIYPHIHTLLYKPQ

SEQ ID NO: 175224 - protein, 56 aa, Glycine max
  Clone ID: PAT_MRT3847_129246C.1.pep
LTYLNTITTFNIHSLTLYIIPRQSLRHIAIPHLHQSYYTHSFTRNISNQLMHKCPY

SEQ ID NO: 175225 - protein, 41 aa, Glycine max
  Clone ID: PAT_MRT3847_129247C.1.pep
EWALLLSQLLSFDRYTRLQAPDLNMLQDLSITLASHSRIRV

SEQ ID NO: 175226 - protein, 61 aa, Glycine max
  Clone ID: PAT_MRT3847_129248C.1.pep
FRNMPLLATILGRPHIQGLHRLSFISSHNSNFITSVFKNNYSLRFITHPLFKASIVGVLSC

SEQ ID NO: 175227 - protein, 71 aa, Glycine max
  Clone ID: PAT_MRT3847_129249C.1.pep
KLVIRVVPCRSFPLNRRGTSKGGGLLKKRGVPNNNKVNKSTHHAADRTVLVLTRPRHTNENGHTDSKSINK

SEQ ID NO: 175228 - protein, 91 aa, Glycine max
  Clone ID: PAT_MRT3847_12924C.1.pep
STPLVSGNEWWSKPTLHMFGIDETPERGHQYKLVYLSVELPWKCMISCGPSTSGFMGLHRQIIFQTAVDARDPLHAVAALLNDNPGHAAES

SEQ ID NO: 175229 - protein, 45 aa, Glycine max
  Clone ID: PAT_MRT3847_129250C.1.pep
GSGKALTTRSHFISPLFNLPTHSSCVGQGITCYGVAIWQSLLVQE

SEQ ID NO: 175230 - protein, 53 aa, Glycine max
  Clone ID: PAT_MRT3847_129251C.1.pep
VITSYKVLIRDINLSSCISFMSLLGGNGMLTVIKILLGILQYFITFSLGRRVQ

SEQ ID NO: 175231 - protein, 80 aa, Glycine max
  unsure (1)..(80): unsure at all Xaa locations
  Clone ID: PAT_MRT3847_129252C.1.pep
LSWFVLFPLWLLVVPAAADXXSVXSLGSSASSFTSSXFSSDFSSAGFSSSVSFATTSSVSTGNXXRLXWGYFXXCXFYCF

SEQ ID NO: 175232 - protein, 353 aa, Glycine max
  Clone ID: PAT_MRT3847_129253C.1.pep
MGHHSCCNKQKVKRGLWSPEEDEKLINYITTYGHGCWSSVPKLAGLQRCGKSCRLRWINYLRPDLKRGSFTPQEAALIIELHSILGNRWAQIAKHLPGRTDNEVKNFWNSSIKKKLLSHDVVPSLATFSDHIHGPPNGSMESFFPLTDNPILNSHHHLDQLFLPIIPSPILQAFDHHHHNNDIKIDINKFFNNNANFLQYFQNPMPETVPPISNTTIPSLYEEDAWSSLGCVPIHLNPNQENQIMITKSDHTTPHLIVEKFINPSTWQQQQHSVEVEPPILPKVCESIEDYVCSIPYSSSVNSQDQHVEAVACFTPVICPQDQVEYIDALIMSSLPSSTTTSSSVVSFFQADK

SEQ ID NO: 175233 - protein, 61 aa, Glycine max
  unsure (1)..(61): unsure at all Xaa locations
  Clone ID: PAT_MRT3847_129254C.1.pep
NXHXKXXMFRTEHKTYAEVTAYXXPMXVGTEXATPDQHTXDTHSXXXRYXXHXGXXKXXWL

SEQ ID NO: 175234 - protein, 79 aa, Glycine max
  Clone ID: PAT_MRT3847_129255C.1.pep
FLDVGWICCPVLYVLFNILCNYGKNLTLKINCFIEIDRKLNFLILSFDSYFTFICHSHCYFFNQIFILEQYFYTLITYN

SEQ ID NO: 175235 - protein, 171 aa, Glycine max
  Clone ID: PAT_MRT3847_129256C.1.pep
SCKTLVVLKLIGGLNRNPFPLDFKSVDLPLLTTLHLQSFILERRDMAELLRGSPNLEYLFVGHMYFSGPEARFERLPKLLRATIAFGHVPLEVVNNVQFLRIDWMEHKEEANLIPEFQNLTHLELGYSECTRDWVDVLEVIQRCPNLQILDIDMGSIDMTTRDDEGADWPF

SEQ ID NO: 175236 - protein, 43 aa, Glycine max
  Clone ID: PAT_MRT3847_129257C.1.pep
AALFFFLVGLIYFLGEKVFKMVFRRKMERFPGKRGSAVNPWNQ

SEQ ID NO: 175237 - protein, 45 aa, Glycine max
  Clone ID: PAT_MRT3847_129258C.1.pep
SVIFDKDFYIFNDEKKSHHFMARACMLLTQARNHAGCLRLLERKM

SEQ ID NO: 175238 - protein, 32 aa, Glycine max
  Clone ID: PAT_MRT3847_129259C.1.pep
IKPEHKEGFLDKVKDKIHGEGGDAEGEQKKKD

SEQ ID NO: 175239 - protein, 71 aa, Glycine max
  Clone ID: PAT_MRT3847_12925C.1.pep
QKKNAGLVVLGLDKYTKELKWELVTIETSTSIYALVVIKVASLFIKRHYHCLKYGNGKECKDYSSKELSHC

SEQ ID NO: 175240 - protein, 52 aa, Glycine max
  unsure (1)..(52): unsure at all Xaa locations
  Clone ID: PAT_MRT3847_129260C.1.pep
KFGLTTAQILRVVKNLDLAGMLDWLRLTHFHTGSQIPSTALLXDGVGTRCAD

SEQ ID NO: 175241 - protein, 198 aa, Glycine max
  unsure (1)..(198): unsure at all Xaa locations
  Clone ID: PAT_MRT3847_129261C.1.pep
FKHEGEFIEREVGEAKLRVRIFHFSAESIAKLRARGNSECKSKTSEISSCQSLSAHVWGAVTRAGGRPNEEITRCELGISNRARVGPPLPHEDFGNAGDVGSDWXVTAGELREKELGGAXWKVHVGVANQNDKAGRQKLKEWGRRPVGCQRGVRFEPCAVTMXSSPRCNMCGNEFGMGKAVAXXSGYANKNEGNVTAY

SEQ ID NO: 175242 - protein, 87 aa, Glycine max
  Clone ID: PAT_MRT3847_129262C.1.pep
WVEIYFTHHLNLFPDRTFLFHYDNQHSYTKSQQTCILLKNLNTKLVFYPHKKISPKKNHIMDATFSKNSLGRRGPETVLGTALVNKT

SEQ ID NO: 175243 - protein, 64 aa, Glycine max
  unsure (1)..(64): unsure at all Xaa locations
  Clone ID: PAT_MRT3847_129263C.1.pep
FSGRCKRRLDMPIDVYRKSKLPLKAFIRIGYLFFTYHILLVFILXGYMCLICVERGHLFSFVKI

SEQ ID NO: 175244 - protein, 63 aa, Glycine max
  Clone ID: PAT_MRT3847_129264C.1.pep
VRPVPLSLSDSPSPNPSTNLRERFRDRYAAPVLAPLLLQAFCQALPRSMSHTRSRSLVERRTH

SEQ ID NO: 175245 - protein, 108 aa, Glycine max
  Clone ID: PAT_MRT3847_129265C.1.pep
GLTRIFGNQLLFLIGLSYTNPTYAAAIQPSIPVFTFLLAVMMGIIGGSFIITGLYMVTWASSRERQATVGVTPHSSWVSEPLIHDRSAHQRGLVFSVSTSVSPKSSSD

SEQ ID NO: 175246 - protein, 300 aa, Glycine max
  unsure (1)..(300): unsure at all Xaa locations
  Clone ID: PAT_MRT3847_129266C.1.pep
FRVCGNQLVFLIGXSFINPTLAAAIQPSIPVFTFPSAVMTRTYSVIDGLAKVGGTIICVSGAIFMVLYRGPALIGYAELGHVTQNEISARGQPEPSGWLIGGLQNLGFDNFHLGVLCLIGNCICMAAFLAIQASVLKKYPANLSVTACSYFFGALLMVTVSLFMTTESTDWSLTSSEILAVIYAGSIASALNYGLITWCNKIIGPAMVALYNPLQPAFSAILSQIFLGSPIYLGSIIGGSFIIAGLYMVTWASSRERQATVGVTPHSSWVSEPLIHERSAHQRGLVFSVSASVSPKSSSD

SEQ ID NO: 175247 - protein, 169 aa, Glycine max
  Clone ID: PAT_MRT3847_129267C.1.pep
HASAPLLKKYPANLSVTAYSYFFGAVLMVTTSFFATNESTDWRLTQSETIAVIYAGFIASALNYGLITWCNKILGPAMVALYNPLQPGASALLSRIFLGSPIYMGSIIGGSLIIIGLYAVTWASYRERHAAAGVVSHGSWVSESLVHDKSSFRVNIFSGPPSLSTKPSD

SEQ ID NO: 175248 - protein, 69 aa, Glycine max
  Clone ID: PAT_MRT3847_129268C.1.pep
LILRWQWKISESTKSPTLPLHHHGDNHYRSLSLCTTLWSSGSGPLTGSSSIPSDAQQSETSFVYANVIP

SEQ ID NO: 175249 - protein, 68 aa, Glycine max
  Clone ID: PAT_MRT3847_129269C.1.pep
VVVVENECLEEFSHVRFKGVMMSRIIWFMVEYDCDGFVIWTVFLIMVIVYKGRKIADMFGRTRGWSPG

SEQ ID NO: 175250 - protein, 132 aa, Glycine max
  Clone ID: PAT_MRT3847_12926C.1.pep
MVAACVATPSVTVTATAATYFNNQTGFAGTLGGGGGSKKGMEANSNPSKASKGVTMTTAEVDQLRQQLQSVVENGDLTASNVCVEQLESAVLSKDTLEATRIGRFVNDVRKQTGQQWPDFFKRCRALIKQWQ

SEQ ID NO: 175251 - protein, 67 aa, Glycine max
  Clone ID: PAT_MRT3847_129270C.1.pep
NPSVSSVDPLVGGETVFYGQRNKTVAEVAPTEGTALLHLHGDKCLLHEARNVTKGVKYVFRSDVVFA

SEQ ID NO: 175252 - protein, 195 aa, Glycine max
  unsure (1)..(195): unsure at all Xaa locations
  Clone ID: PAT_MRT3847_129271C.1.pep
MGSSTEMGIPEEEKEEELLKKIERLEAGHAHLKQEMSNFKLFQNNKSRSRFGAATCNKPSSSLHQNGNKYLNILQSMGHAVHVLDLQCRIMYWNPSAESMYGYAAEEVLGQDGIEMLVDPSDFGLANDVFNHVKRGESWRGQLPVKNKRGDRFYAVTTNTPFYDDDDGSLVGVIFVSXDSGPFLETRIPLSGVEN

SEQ ID NO: 175253 - protein, 342 aa, Glycine max
  Clone ID: PAT_MRT3847_129272C.1.pep
HASAHASAHASDLINILYLLIFLISLKLLFFRKRLKNPAPSPPSLPIIGNLHQLKKQPLHRALYDLSQKYGPNNILSLRFGSQPVLVVSSASAAEECFTKNDIIFANRFRSSLTKYIGFNHTIITASSYGDHWRNLRRISSLEILSNHRLNSFLGVRKDETMKLLRKLAKGSDKDFRRVELRPMFSELTFNIIIKMVCGKRYYGEEYDGTNAEEAKRFREIMNEISQFGLGSNLADFVPLFRLFSSRKKLRKVGEKLDAFFQGLIDEHRNKKESSNTMIGHLLSSQESQPEYYTDQTIKGLIMALYVAGTETSAVALEWAMSNLLNSPEVLEKARVELDTQV

SEQ ID NO: 175254 - protein, 41 aa, Glycine max
  Clone ID: PAT_MRT3847_129273C.1.pep
SIILCYYKFHLSSMVQCKISVYFIFMIIKLPKQTCKYICFF

SEQ ID NO: 175255 - protein, 121 aa, Glycine max
  unsure (1)..(121): unsure at all Xaa locations
  Clone ID: PAT_MRT3847_129274C.1.pep
LCVLSSYTPTPLLEFGLQKDRGLIVEYSGRMSFVGHNVNQAQETDLLGGNFSFDTXNLRSRLGRVSSTKAQXVCGKTFKYDVLGAGLHCSEDSPDEGDQDXPGKIDAXVRHMIDPHYNEVH

SEQ ID NO: 175256 - protein, 58 aa, Glycine max
  Clone ID: PAT_MRT3847_129275C.1.pep
SSLNNFVKQTHTAKLQPQIPFLELHSWFRTITSPLNLEAEFIHVSNGGRCPTKLNNFW

SEQ ID NO: 175257 - protein, 46 aa, Glycine max
  Clone ID: PAT_MRT3847_129276C.1.pep
HLKAIIWVIFLQCLFNCTILYFISFGAYYPQAAGDCVIAPTISSAT

SEQ ID NO: 175258 - protein, 57 aa, Glycine max
  Clone ID: PAT_MRT3847_129277C.1.pep
RFDYVFSPYHLHMSFVCTYSQRSYLRLHFKFVISKSTGVKLCVVDNAKETCFSSFKV

SEQ ID NO: 175259 - protein, 37 aa, Glycine max
  Clone ID: PAT_MRT3847_129278C.1.pep
MPFEHEVEKGSAFALGLLTVKEYTVPWKMLSVLTTEI

SEQ ID NO: 175260 - protein, 34 aa, Glycine max
  Clone ID: PAT_MRT3847_129279C.1.pep
NTPKLRRKRETRELFHSSRISFNSHSCFLDFSSL

SEQ ID NO: 175261 - protein, 74 aa, Glycine max
  unsure (1)..(74): unsure at all Xaa locations
  Clone ID: PAT_MRT3847_12927C.1.pep
EINDEGERSPLVGRNEEEEGVRREIGERGIKLGLGDFVFYSVLVGRASMYDLXMTVYAYTLPITAGPSLPRPVL

SEQ ID NO: 175262 - protein, 216 aa, Glycine max
  Clone ID: PAT_MRT3847_129280C.1.pep
ENSGLKGNLQHSERFSKGALNGVESSPDRVNTSLNFEESEIRHLRRLIRNGELEEGSRFLEYMTNKGKSPDVIACTALIREFCKIGRTKNASQIMGILEESGAVIDVTSYNVLISGYCKSGEIEEALRVLDRMGVSPNAATYDAVLCSLCDRGKLKQAMQVLGRQLQSKCYPDVVTCTVLIDATCKESGVGQAMKLFNEMRDKGCKPDVGTYNVLI

SEQ ID NO: 175263 - protein, 45 aa, Glycine max
  Clone ID: PAT_MRT3847_129281C.1.pep
RKLEFSSISDVNQYQGAQFHVTRSSLLVMSESERQIVMTLVYIRY

SEQ ID NO: 175264 - protein, 49 aa, Glycine max
  Clone ID: PAT_MRT3847_129282C.1.pep
DQGLAIAVGGLVREGFLYRMQFCLKEWLSMGLSIATRCLLRMTLTLACQ

SEQ ID NO: 175265 - protein, 216 aa, Glycine max
  Clone ID: PAT_MRT3847_129283C.1.pep
KKEGLADYRYFPEPDLPAVILSQEYVDGIKNSLPELPEIKRRRYEQMGLSMQDVLFLANDKNIAEFFDATLAKGADSKLVANWIMSDIAAFMKNEKLTINEIKLTPEELSELIASIKGGTISGKIGKEILFELLAKGGTVKELIQKKDLVQIADPVEIEKMVDKVIVENPKQVEQYRGGKTKLQGFFAGQVMKLSKGKANPGLLNKILLEKLNSKS

SEQ ID NO: 175266 - protein, 88 aa, Glycine max
  Clone ID: PAT_MRT3847_129284C.1.pep
KNNALGLEEFLKFWGYYIHADRKERPKFSLPGQPLIFQKGKKKNLFPWGGGILGPLNIWTQTSKNNPLGTIFLLLLFFLFSTKKLVFF

SEQ ID NO: 175267 - protein, 112 aa, Glycine max
  Clone ID: PAT_MRT3847_129285C.1.pep
GEDKRPIMGRRCQGFPPKGICFFFFFSLPGGKNLNQIWWVLTKVIFFLKPFERPKGAQRVWIKKDPLGRAVDRPEKIHLWFGFIFRHNNNCSFCLWWITHNGIFHLCRQKRH

SEQ ID NO: 175268 - protein, 146 aa, Glycine max
  Clone ID: PAT_MRT3847_129286C.1.pep
MGFLRRLFGAKKPSDCKSGKKRWTFLKHTVRNKSLPPPPIPPALNTHFDSSTPLDANKHAIAVAAATAAVAEAALAAAHAAAEVVRLTSGGVAATSTSSRTAVTAARVGNLETAAVRIQSAFRGYLARRALRALKALVKLQALVRG

SEQ ID NO: 175269 - protein, 121 aa, Glycine max
  Clone ID: PAT_MRT3847_129287C.1.pep
LSRNHQGEQATQREGKRMCQNSHMDMQTKGSSIWFSTLFIYFFFLRCFLSMVWDIILSIRQIEENTHARTQRQRLFRLSLVFSTEEISVRMNGGRENGEEGSQSLNLISSSLPLLSSSRSR

SEQ ID NO: 175270 - protein, 51 aa, Glycine max
  Clone ID: PAT_MRT3847_129288C.1.pep
LMIKIIVPILQKLYPMEMYYILKPKDKENLSAIIYAFVSFHKKAYQSLNSF

SEQ ID NO: 175271 - protein, 114 aa, Glycine max
  unsure (1)..(114): unsure at all Xaa locations
  Clone ID: PAT_MRT3847_129289C.1.pep
FRWGKKIVGGEGSLVGKGRGPVFGIDWGPTYFCVGGGHHDRVEIIANDQGTRTTPSYGVLTAPNRLIGDAAKNQVRLNPTNTGFDANRWMGRRFSDAXVQGAMKCGPSKGIPGP

SEQ ID NO: 175272 - protein, 60 aa, Glycine max
  Clone ID: PAT_MRT3847_12928C.1.pep
ASIEASIVPMDVFISDLFIIATGNVTHCDQLPTCDLFCKWYKVYITITCIVGSNSDRLGA

SEQ ID NO: 175273 - protein, 91 aa, Glycine max
  Clone ID: PAT_MRT3847_129290C.1.pep
MGFIMEFAENLVLKLMEDPKERDRRFREHVYRVKDRCEKTKEMWSYPMRPYGFWTFERHNSQLAWDAQISQVAGRRDPYDDLLQHFSTPPK

SEQ ID NO: 175274 - protein, 91 aa, Glycine max
  Clone ID: PAT_MRT3847_129291C.1.pep
MGFIMEFAENLVLKLMEDPKERDRRFREHVYRVKDRCEKTKEMWSYPMRPYGFWTFERHNSQLAWDAQISQVAGRRDPYDDILQHFSTPPK

SEQ ID NO: 175275 - protein, 104 aa, Glycine max
  Clone ID: PAT_MRT3847_129292C.1.pep
PQPLAQVHHIPQPHLTPISLSHLTHSIIPGHPATFLASHPIHIIPASAIHPGPFTFHPVPHAALYPTLLAPRPAAAAATALHLHPLLHPIFSGQDLQHPPSHGT

SEQ ID NO: 175276 - protein, 51 aa, Glycine max
  Clone ID: PAT_MRT3847_129293C.1.pep
SAGDATPPAKTSIPAKAYCLACNQSHRCDCPGACYPTSLLLNSNVGPSACL

SEQ ID NO: 175277 - protein, 81 aa, Glycine max
  Clone ID: PAT_MRT3847_129294C.1.pep
LFTGLRYLYLYSVNYSTVLCMLHDHTSRLEWLIHPPIPTLLFLMLRFLYETVVGIFLGLEGTSSKQNLLNAMMYLRLFANV

SEQ ID NO: 175278 - protein, 84 aa, Glycine max
  unsure (1)..(84): unsure at all Xaa locations
  Clone ID: PAT_MRT3847_129295C.1.pep
LEIIMHPTLLVIKIMGAPICSLLATVPLCSLLAAVPFCGFGAEVPFWRSSHRRPPSVFSQPYHHVVFYKPYERVGEXVGPPRNL

SEQ ID NO: 175279 - protein, 182 aa, Glycine max
  unsure (1)..(182): unsure at all Xaa locations
  Clone ID: PAT_MRT3847_129296C.1.pep
TQTHPEIHLDDHRRCSDLSTPHATRGTSHLLRREYASEPEPERNIAALXGAAGVIRHPLSLHVKLNPLVSSLSLYYIXATPGVAAHINHISTRYDVWPYQGDEELGQALQSVNGAIIPAGEDRLPVMTQDDSFSIYGGSDRTLRTASANYCPHARVNMVXYPENSTVPIAAEAFTKARTYDE

SEQ ID NO: 175280 - protein, 332 aa, Glycine max
  unsure (1)..(332): unsure at all Xaa locations
  Clone ID: PAT_MRT3847_129297C.1.pep
EAARNPQKYQIHVEMERLKDEIKSKKEQIDLLERKIADSFIAKNKLDKSGVSLSLTELMTQLNEKSFELEVKTADNHIIQQQLSQKIHECESLQETIGSLKHQLADALELRNLSPQPFSVTKDYHGEPHHDKESAMITNTNEKILLQEQLLCLLFPTIXAGEIEGMNQKLAELTESKEQLELLNQKLAEESSYAKGLASAAAVELKALSEEVAKLMNQNERLSAELAAPKNSPAQLRNSGTGTVRNARRESHVRRNDHQGGSNSDIKRELASSKERELSYESALLDRDHKEAELQRRIEESKQREAYLENELANMWVLVAKLKKSQGADTDV

SEQ ID NO: 175281 - protein, 66 aa, Glycine max
  Clone ID: PAT_MRT3847_129298C.1.pep
PRVRLFLYLNFKTLSISTGMTNYQTRPDLTYLSDMCSHLRQQKYSTIFSQNNDAVPASLTEPPPLM

SEQ ID NO: 175282 - protein, 291 aa, Glycine max
  Clone ID: PAT_MRT3847_129299C.1.pep
NSARARAENPGKPQVLMVYSNLAQAFVNPHTAEVSEQLGQRIWGILQKQIFKAKDYPRGDGVQLSNLESLLEKSLKLASKPFKRQKSASNLSKQSAAWNRQKMISSLAQTSTFWILKIIDSRNFAESELERIVLIFREVLVGYFDKKSQIKSGFLKEIIRRRPWIGHAIFGFILERCGSAKSDFRRVEALELVMEILKSLSTGNSDEQNASKKILKNSLDKLSHLLKELVTNMPSKPARRTEVQKFCVKALEILSKLNLTKNFVKTLAPDTQAALEAQLGEQFISLKKLEK

SEQ ID NO: 175283 - protein, 35 aa, Glycine max
  Clone ID: PAT_MRT3847_12929C.1.pep
DMILRDASYVRRVDQSITKKLGSEPLSGTLNVARI

SEQ ID NO: 175284 - protein, 84 aa, Glycine max
  Clone ID: PAT_MRT3847_1292C.1.pep
HLLGRCPSLPNNIFLLLFELHLDSTTQNLSPLPLFLQQNFSLLLVLLKFRIPIIVVEYLLFFLPDIVRCLLCLEFGRDRYMSGT

SEQ ID NO: 175285 - protein, 65 aa, Glycine max
  Clone ID: PAT_MRT3847_129300C.1.pep
IMGAYPARVLRSHCVLSSIARMISPTFSTTPFLERETSPPHKPHHNSRLFFLSPHASAHASAHAN

SEQ ID NO: 175286 - protein, 72 aa, Glycine max
  Clone ID: PAT_MRT3847_129301C.1.pep
KYGQKMAMGNPCPTAYYRCTMGVGCPIGKPDQPGADDRTILVTTYEGAHNHPLPPAGVVDAVDIPSRGCGWI

SEQ ID NO: 175287 - protein, 42 aa, Glycine max
  Clone ID: PAT_MRT3847_129302C.1.pep
NKKFWQQIKMSRSRSDSHRSLSEKMKNLKMTFQQKWFHSVIP

SEQ ID NO: 175288 - protein, 102 aa, Glycine max
  Clone ID: PAT_MRT3847_129303C.1.pep
AFNRTVWIMLHKFRETKSQTYSHFTPLDLPLDLYKLTVEIHIKPNNYACKLCSIYITVSLRRILWKSIIVVATSDWVEVLLIVRLISMSNPMVNNAGGTKKE

SEQ ID NO: 175289 - protein, 47 aa, Glycine max
  Clone ID: PAT_MRT3847_129304C.1.pep
MDPWPKMPSSNLFLKEPIRMCSILEPSKPSFFFAMTKIVGTLGPKFK

SEQ ID NO: 175290 - protein, 53 aa, Glycine max
  Clone ID: PAT_MRT3847_129305C.1.pep
RREKTTEGVLRFMHASDLKERIGLGDKIELKIGYVSIVRKGVCKVIVSIFYIG

SEQ ID NO: 175291 - protein, 135 aa, Glycine max
  Clone ID: PAT_MRT3847_129306C.1.pep
MAQQEEGWPLGLRFLNSRIELMRNGSGSASFSTVLTASHTPSTDSSSDLDTESTGSFFHDDSITLGSLIGISSFFELSRRSTRGRMMEPSKDNKRIHKLKPWLFSLCSRLSTDAVIGNDAPSLGHYLEAESLPSS

SEQ ID NO: 175292 - protein, 93 aa, Glycine max
  unsure (1)..(93): unsure at all Xaa locations
  Clone ID: PAT_MRT3847_129307C.1.pep
WRGVLCXLXWVFGGCLAAWLGSFASRXSVAGPGRWFSFPSGVRPPVXWLVFWLPSFLWVAVPFVSGFEVPLSVLAPPRPEFLGQPVVPPGLRR

SEQ ID NO: 175293 - protein, 63 aa, Glycine max
  Clone ID: PAT_MRT3847_129308C.1.pep
FTWAGLNYKSLALKQDTAKSTALLIGWNYQNPRKGHTIKLQTSTLGRLTSRNPLTQDKHESTR

SEQ ID NO: 175294 - protein, 74 aa, Glycine max
  unsure (1)..(74): unsure at all Xaa locations
  Clone ID: PAT_MRT3847_129309C.1.pep
LAAQRQSQLDRVSEISACHIQLSHNVLDCRRWNVXRNLTSTQNMDXLEKNVTTYLMPPMQAHIMADIHHTQLQM

SEQ ID NO: 175295 - protein, 54 aa, Glycine max
  Clone ID: PAT_MRT3847_12930C.1.pep
IVSGKAPDVTSLAKSISLRFVSIPIYVGMNPSSLFREIRRLAKMFSCPISGGSS

SEQ ID NO: 175296 - protein, 120 aa, Glycine max
  unsure (1)..(120): unsure at all Xaa locations
  Clone ID: PAT_MRT3847_129310C.1.pep
PWSINCGANANSXLVIKADARVQEPKGXETARGAPRPSGEEQISSEDMKQVYTELPGAVSLLALARTADGSRAPNCRSCRTLATRDPSFKDSTGELKQAGALNDVRTCPLKVEKDLNLYV

SEQ ID NO: 175297 - protein, 254 aa, Glycine max
  unsure (1)..(254): unsure at all Xaa locations
  Clone ID: PAT_MRT3847_129311C.1.pep
MTITTHYSIPGSSGYLDIYPERKVSAFQNPYIMGFTAVASIGGLLFGYDTGVISGALLYIKDDFPEVRHSNFLQETIVSMAVAGAIVGAAAGGWINDVYGRKKATLIADVIFTLGALVMAVSPDPYILIMGRVLVGLGVGIASVTAPVYIAESSPSEIRGALVGINVLMITGGQFLSYLINLAFTQVPGTWRWMLGVSIVPAXVQFFLMLLLPITPACLLISRIQLLPSGRACVHCSTCDLNFITPPFAPISHD

SEQ ID NO: 175298 - protein, 71 aa, Glycine max
  Clone ID: PAT_MRT3847_129312C.1.pep
ESSLCPYLLEAFREADLPSSLPTCSTIESYDHVYKVVEGSFCGGACAASRSNIITSFSRRFCSTHMSYAVA

SEQ ID NO: 175299 - protein, 337 aa, Glycine max
  Clone ID: PAT_MRT3847_129313C.1.pep
MLTHLRRAAAACGGATSDHFLALRQFSSAVVAVSSVSDSDPTLPSSSDSQRKASRWLLFLPGAITFGLGTWQIGRREEKIKMLEYREKRLQMEPLKFSSAYSSDEELDSLEFRKVVCKGYFDDKKSVYVGPRSRSISGVTENGYYIITPLMPVPNCPDSVSIPILVNRGWVPRSWKDKFLEASQDEDLEDALPSPSHVDGSKSWWRFWSKKPVIEDQVASVTPIEVVGVVRGSEKPSIFVPANDPGSSQWFYVDVPGIARACGLPENTIYFEDTNENVNPSNPYPVPKDVNTLIRSSVMPRDHLNYTLTWYSLSAAVTFMAFKRLRQKNKRRWQSRR

SEQ ID NO: 175300 - protein, 124 aa, Glycine max
  unsure (1)..(124): unsure at all Xaa locations
  Clone ID: PAT_MRT3847_129314C.1.pep
XQXPTLFPPTWXSXTPAXXPLAAAQRNPVSXQXLPPCPXXAFRXAXAVSXXXXSXPHXVCFTXAXEHXPXXXAXKDXPXNXXXLXPAAACXSRNEMRXEXXIKKNVLVXXRRXGYXRXXXXQXX

SEQ ID NO: 175301 - protein, 82 aa, Glycine max
  Clone ID: PAT_MRT3847_129315C.1.pep
KLRGGKLYMPDCFYLMGTVDPTGHLKKNQVCIIHENSQIVGDVLVYRNPGLHFGDIHKMDATYVKELESYVGHSKYGIFFPR

SEQ ID NO: 175302 - protein, 67 aa, Glycine max
  Clone ID: PAT_MRT3847_129316C.1.pep
RRRGQPSKKRERGPARNTRSGRESPRHNIMGGRQGEGRTPYPGKRHIKGGVSTQSEVLVVRPQKGKG

SEQ ID NO: 175303 - protein, 99 aa, Glycine max
  Clone ID: PAT_MRT3847_129317C.1.pep
IVRSGRGGWSDSPRGFGGNSPSRHMTSILSNEAGVNSEEDNPTANGGISADDCVDGTIEQECDEIADSPSSEKSEMEYINQITTKLENLLVKPTRPERS

SEQ ID NO: 175304 - protein, 53 aa, Glycine max
  Clone ID: PAT_MRT3847_129318C.1.pep
ASETYKGCYKFYHDKISIGQIPPFVFFLLFAITPIPGRVGRGILNSYTDETDQ

SEQ ID NO: 175305 - protein, 209 aa, Glycine max
  Clone ID: PAT_MRT3847_129319C.1.pep
GRRPSKGNFRGRGGKTRGVDRSGGYVRGNRKGYDNRGNQTQAPKSIVRGRGPRRYEPTSKNNDSASLVQNKQSGKQPEKTSHASSGKTFAPVSNSEPDPVPAKKQVFASSLNYASPPFYPSSSSNKDLSVAPKGDVQTCGTGRNVCSGVVNDGFLVQQNSALLRGKNVVDHVSMEKLYIDGPGAPSAGKAFNNMHIPPPGSSGVNASQS

SEQ ID NO: 175306 - protein, 75 aa, Glycine max
  Clone ID: PAT_MRT3847_12931C.1.pep
DHYPKPTPYPLILTCTRRGAHSQQIQLPEPIKQWTCISQDSCGRLSIVHLHYFVGIDRAIEERSSLIYTYNSLKI

SEQ ID NO: 175307 - protein, 54 aa, Glycine max
  Clone ID: PAT_MRT3847_129320C.1.pep
LVYKKDITFQGKRTTRCLDRYGPPESQGQICYREKFALQLQRSGALKTHGCIKS

SEQ ID NO: 175308 - protein, 47 aa, Glycine max
  Clone ID: PAT_MRT3847_129321C.1.pep
EKLDLCLCPKVLDMTEPPLDNNCPHLAEWFIEAGPIIVDTGLRTIAR

SEQ ID NO: 175309 - protein, 156 aa, Glycine max
  Clone ID: PAT_MRT3847_129322C.1.pep
QSQIIFFPTLPLHCRQNHCFVSAMGIGNSKSNAAEGERLPPKIRPMLVSRFEEFRKRRNGETTLSKKNLLNEEDDNSQSSHRTEEENKVSSSKEIEPPKEETVERVITAEKLSRVVPVPNSECENVEETHPNKDNIEQVIKYMDPSQDVFNRAVEM

SEQ ID NO: 175310 - protein, 160 aa, Glycine max
  Clone ID: PAT_MRT3847_129323C.1.pep
MLRRLLSSHLKTLAATASSSTPRSASAAARFAALSRSSRYFSTQSEDATAIKKKVEDVMPIATGHEREELQAELEGRNILEIDHPEGPFGTKEAPAVVKSYYDKRIVGCPGGEGEDEHDVVWFWLEKDKPHECPVCAQYFVLEVVGPGGSPDGHGDDDHH

SEQ ID NO: 175311 - protein, 163 aa, Glycine max
  Clone ID: PAT_MRT3847_129324C.1.pep
MLRRLLSSHLKTLASSAAAAATATPRSASASARFAALSRSCLYFSTQSEDATAIKKKVEDIMPIATGHEREELQAELEGRNILEIDHPEGPFGTKEAPAVVKSYYDKRIVGCPGGEGEDEHDVVWFWLEKDKPHECPVCAQYFVLEVVGPGGPPDGHGDDDHH

SEQ ID NO: 175312 - protein, 124 aa, Glycine max
  Clone ID: PAT_MRT3847_129325C.1.pep
MLRRLLSSHLKTLAATASSSTPRSASAAARFAALSRSSRYFSTQSEDATAIKKKVEDVMPIATGHEREELQAELEGRNILEIDHPEGPFGTKEAPAVVKSYYDKRIVGCPGGEGGEYQNIPCFS

SEQ ID NO: 175313 - protein, 56 aa, Glycine max
  Clone ID: PAT_MRT3847_129326C.1.pep
HPHAEHTPILLIRSPQQPTHPMMRRMPSSWWLHPPACLLRKHDKRRGAIGQRSSGG

SEQ ID NO: 175314 - protein, 113 aa, Glycine max
  unsure (1)..(113): unsure at all Xaa locations
  Clone ID: PAT_MRT3847_129327C.1.pep
TVTPXGPFLPPNTSNLIPLLGRPGLIITRLCTSGGVNDFSIQTLDARISMNMLPHITPPTGRNRPMRPRSRPPPYLALKPFSQRYTAADNSWFLIIFWLAHVQYFISILFFHL

SEQ ID NO: 175315 - protein, 135 aa, Glycine max
  Clone ID: PAT_MRT3847_129328C.1.pep
GVPPHQQKGFFSPFFLFAGGGPPTFCGWINKIFGGSFFYRFLKFRLGEVPLSIPGFYRSLVCASPQLVVGDPSFLWWAHRSLIIIFVTGPPPWVNSFFFSRGGPFFNGFFLFFLNVAKQHFTWVFVELNKTKNHQ

SEQ ID NO: 175316 - protein, 77 aa, Glycine max
  Clone ID: PAT_MRT3847_129329C.1.pep
AQVMLVSRLVWWRWNYLVFHGLASISRSVLVETDWFRSYKHAFCSVKTFAFVNLGWISHNFKNPLFQKILLRGFFSF

SEQ ID NO: 175317 - protein, 121 aa, Glycine max
  Clone ID: PAT_MRT3847_12932C.1.pep
ARNLARALADSTRGRSLGHSLTSLTARDGQCTQSRFVVLIESIVKVESILAATRWRASWPRLGEVQFMRVTHMVGRPIDMEHGYQNRDMPYLKERFALQLRLDVIVIVSIHVADPTWWYRA

SEQ ID NO: 175318 - protein, 64 aa, Glycine max
  unsure (1)..(64): unsure at all Xaa locations
  Clone ID: PAT_MRT3847_129330C.1.pep
XXXXFPXXGXAAXTNXXXXXXGCXQXLGXGXXXCLXXXXXXXXSFSPSPXSRAXRTRAXLIFXX

SEQ ID NO: 175319 - protein, 88 aa, Glycine max
  Clone ID: PAT_MRT3847_129331C.1.pep
PNKKMETFVPIKTKLLQAPGTGFAPINRGPWEEEFLFEQQFVQPFPPPWKSPPPWKSSMGFNGRVFCPPPPHQITPPKWGRKKEAPAF

SEQ ID NO: 175320 - protein, 90 aa, Glycine max
  Clone ID: PAT_MRT3847_129332C.1.pep
GQMLKNGRVFHKGPTIFVELIFAHSDGRILVAGTGDWIQLIVILTFCDSLTILECTQGAQMVQIGASDNYPTHNEWEERTGSIPFHMQHD

SEQ ID NO: 175321 - protein, 109 aa, Glycine max
  unsure (1)..(109): unsure at all Xaa locations
  Clone ID: PAT_MRT3847_129333C.1.pep
TIFYDFIDISRHEFSGGAIGLVNSTEYLVGFWSSGNKFXFYLGKLSFGLRFKFLDLSRNWVFGKVPHRLVGLEKLNVSYNHLCGQLPKNKFPASAFVGNDCLSGSPLPP

SEQ ID NO: 175322 - protein, 132 aa, Glycine max
  Clone ID: PAT_MRT3847_129334C.1.pep
LHLQKCQLRDKKSVAALFSVCRVVREIVIQDCWGLDNSIFSFAMICRRVKLLYVEGCSLLTTEGLECVIHSWKELQSLRVVTCKNIKDSEISPALATLFTTLKELRWSPDTKSLLPSGVMGKKGDKFFKRAR

SEQ ID NO: 175323 - protein, 84 aa, Glycine max
  Clone ID: PAT_MRT3847_129335C.1.pep
PNISTQILQQKLCALLSPLPLSPRPRPLTILSAKGYEMKTHKASAKRFRVTGRGKIVRRRAGKQHLLVKKNTMRKSRLSNKKAD

SEQ ID NO: 175324 - protein, 181 aa, Glycine max
  Clone ID: PAT_MRT3847_129336C.1.pep
MAAKTSSETEKECSSSQSLKISKDLNFRRVSETLDLFRAMGTNIIAPENSNTHGFFDGFLRSFIKLDHIQRGRIACTLLVKGPICNGFGTLHGGAIGSFVVILSTACARTVTAENKELFLGEISMSYLSGTLINEEVLVNASVVKSGRKLTVVALEFKLKKTGNLLYTTHATFYNMPVASL

SEQ ID NO: 175325 - protein, 59 aa, Glycine max
  Clone ID: PAT_MRT3847_129337C.1.pep
ESHPGSIIRYRHWFCGTSNVSHLLFRDSLPHSSTCAGCITDSPKPPSQAVCSLCALKSL

SEQ ID NO: 175326 - protein, 70 aa, Glycine max
  Clone ID: PAT_MRT3847_129338C.1.pep
AHARQGGRMCFLGQQTIDVTEVLILPLKEPWDCGLWTGICLTLPKNLSDCYFCLKESTDCHLGKRTILSK

SEQ ID NO: 175327 - protein, 73 aa, Glycine max
  unsure (1)..(73): unsure at all Xaa locations
  Clone ID: PAT_MRT3847_129339C.1.pep
SGASLMMQVVSCNHVSVTLSPCLSYLTQGADVPESXCTRVMTIQGSVTISFDNHSVCKCLQQAVNNYGITDDY

SEQ ID NO: 175328 - protein, 57 aa, Glycine max
  Clone ID: PAT_MRT3847_12933C.1.pep
GLILIETRAMAMFDSIFNKGFKAAKWYCLFVYLFIYFLYKIIWGLIFLLAIVYFFML

SEQ ID NO: 175329 - protein, 71 aa, Glycine max
  Clone ID: PAT_MRT3847_129340C.1.pep
KGKRNKACVSCSPTPHRSVNLCCVISGIVEFSKWSCLLKSKTKAKKHILELNFELGYTCTCLIFSLSTQSG

SEQ ID NO: 175330 - protein, 116 aa, Glycine max
  unsure (1)..(116): unsure at all Xaa locations
  Clone ID: PAT_MRT3847_129341C.1.pep
LTKRTYRASLVGQCGSRFLTSXRKQIMNMEDRHHMKFFXMSFCRKSSIYRNALGIWCXIDCGHVNAVGAFTLYTASAETVRSTILSLRYAHCELLHVYHFLLVSKALFLKFYYTNF

SEQ ID NO: 175331 - protein, 108 aa, Glycine max
  unsure (1)..(108): unsure at all Xaa locations
  Clone ID: PAT_MRT3847_129342C.1.pep
FAKKNALWRSLHXKNELEMNFDPLLKTLIKKATHLSMDRGTLTHKRRKASHTCSYLKFRFKRKSAIFPLIRNFLNKNISNTHAIFTRKLKFLRDCRLQKPGNQHIQEP

SEQ ID NO: 175332 - protein, 56 aa, Glycine max
  Clone ID: PAT_MRT3847_129343C.1.pep
IYSNNMMYHTIMLSFFLLFLDSITKRKRQDSSETHLICIFFFLQHLLRQIYNICFK

SEQ ID NO: 175333 - protein, 111 aa, Glycine max
  Clone ID: PAT_MRT3847_129344C.1.pep
PGNSGPDPNGLQFFPIERRTKAGQKNGQKVLPGKNFSPLKSPKKIRPEKKKLKPWGNKRGTTQNLMAVAPLPNKKQKNPFRQVKKKNPQRGGKGFLTNGPKGFFSLKKETG

SEQ ID NO: 175334 - protein, 434 aa, Glycine max
  Clone ID: PAT_MRT3847_129345C.1.pep
WDFEPVTAPFFICPPPFFRSKRPRQPGMPDDELSDFDNIFKRTMPWLGDDMCMKDPQGLPGLSLAQWMNMQQNPALANSLQPNYAPSLSGSILQNIPGADISRQLGFSAPQISQSDNVALNTQRLLQTAQQLDHLQKLPSTSSTLGTVLLPQQQLGDITQQPRQNLANQTIPQGQVQSQLLHPQNMVQTNNILQQQQPSIQNHQLHRSLSQNPSQQQTTIGQNQPQNLIQSPMPDHVQQLQMSDNQIQLQLLQKLQQQKQTLLAQQTALQQPTQLTQIQDQQRQLLDKTHNLSRALTPGQVLEIPHIIQNSLPEANSISNQMTKANCQSNIQFSQQPKLQQQQQPGMVSEMPGHMALLPTATTNQLSAGGSSIVTGAGGAGQSVITDDVPSRSTSPSTNNCTNALPQLINSRFPRSTMVGDDMAHSAATILSSS

SEQ ID NO: 175335 - protein, 187 aa, Glycine max
  unsure (1)..(187): unsure at all Xaa locations
  Clone ID: PAT_MRT3847_129346C.1.pep
HGFYLLPKPNTCKLLNCPFVPAGNLNQEFQLKWGNGRAKILHNENLLTLPLEKAPCLGLPFQNRFLIWARITCRSSFVPGNXSLAIVTANNLSSKGSTWDEIXFEFLGNLNGDPSILNPNVFNQGKGNKKQQFFLWFDPTCNFPTYSILWNPQRIVFSVDGTPIREFKKFESIEVPFPXNQPMKIYS

SEQ ID NO: 175336 - protein, 80 aa, Glycine max
  Clone ID: PAT_MRT3847_129347C.1.pep
VRPAARSRQRGLPIPLKGWTFKMGLLFLGTLNNPGFKSSLGLCLDIIIFLVNQIWLVEGNQPQSSFKASYETENRFPTFL

SEQ ID NO: 175337 - protein, 40 aa, Glycine max
  unsure (1)..(40): unsure at all Xaa locations
  Clone ID: PAT_MRT3847_129348C.1.pep
NAGSQLPTGNQHCLLTXLLTLFHRRXEPEGXRGGVXXXSX

SEQ ID NO: 175338 - protein, 74 aa, Glycine max
  unsure (1)..(74): unsure at all Xaa locations
  Clone ID: PAT_MRT3847_129349C.1.pep
CLHEVQKNLPTXCLNQLDPTSCFFPQNLINHVETPLFLLNAAYDAWQVQESLAPHSADPHGSWNDCKSNHARCN

SEQ ID NO: 175339 - protein, 183 aa, Glycine max
  unsure (1)..(183): unsure at all Xaa locations
  Clone ID: PAT_MRT3847_12934C.1.pep
MLLSSTMILSNSPIASPSLPTSTGAKLETFSLKNDGVIRIRGATASSVAPRIRKTATCSVSKDGNASVETDVPFPADYSELLEQARVAADLAIKDNRQLMEIEFPTAGLGSXPVMGYVELEXLYEMTESMQLIREFCDRFISSEKATRTRIFFPEASEVDXARQSVXSGCSFKLDYLTXPSFF

SEQ ID NO: 175340 - protein, 56 aa, Glycine max
  Clone ID: PAT_MRT3847_129350C.1.pep
FLNHRSNNTTNHTYQNHLISQKHIHPHYKSQYHINNTINSYFQIIQSTLYTNNTKC

SEQ ID NO: 175341 - protein, 89 aa, Glycine max
  unsure (1)..(89): unsure at all Xaa locations
  Clone ID: PAT_MRT3847_129351C.1.pep
AFSHSQFTMPPFQNYFCETKQRINSNYKIELTSWYLTCTFRKVNRGDETWTTEELVDPIFELGKSKGFVKGPTMRMPTDDLVVTPMSXR

SEQ ID NO: 175342 - protein, 89 aa, Glycine max
  Clone ID: PAT_MRT3847_129352C.1.pep
ATSATATSPDQRRWKLWPEFRRGGQPLPSRTIYRQVQARRQCPQVDNSLPHRPDERQCNVSSRSARWPQVPHGHPTQKTDMPYVRECSS

SEQ ID NO: 175343 - protein, 164 aa, Glycine max
  Clone ID: PAT_MRT3847_129353C.1.pep
LEVNEIRLKEASKLRENEAYGSDQNRKKFKDVYGEGNRLQEAGDNKGIQKVMNQTPMQEQINGMLNEAQRKKVTEGTSSQTLAMEGSVYVSNENSHLEQSENMEQDVGGMEKDKGLNKAFVMERNEEEGNMKNAKATDETEEIESEEDLAAQSTSIHEEFIGKL

SEQ ID NO: 175344 - protein, 144 aa, Glycine max
  unsure (1)..(144): unsure at all Xaa locations
  Clone ID: PAT_MRT3847_129354C.1.pep
TLQKNFSYYCTNLILILQMFIEEILELVELHPVRHFIVGLPGISGLSTEQRKRLTIAVELVANPSIIFMDEPTTGLDAREFWGPKWEFSFRNGSEGIILTLEIHLDXQLLLMKRGGQVIYGGPLGRNSQNLIEYFEVNLKHYNV

SEQ ID NO: 175345 - protein, 54 aa, Glycine max
  Clone ID: PAT_MRT3847_129355C.1.pep
PFPRPLYSKPPFFFFFFFLYFFFKPITFYKNQGSFFKKTFIPTIYQKTQFNFSK

SEQ ID NO: 175346 - protein, 88 aa, Glycine max
  Clone ID: PAT_MRT3847_129356C.1.pep
GHPVGAEKNLFPKGSWVHALNNSPRGAGGFRNNNKHRQCFFAQCGLIRICRFFIPVVLHTPKKIFVCLNGGALIMNFWFTERAKSFKF

SEQ ID NO: 175347 - protein, 159 aa, Glycine max
  unsure (1)..(159): unsure at all Xaa locations
  Clone ID: PAT_MRT3847_129357C.1.pep
NRTRRYRQHRDAMKRGRDPCICYTALTACGAGGGPGIEIGTNXGLTTNRSYTPLSTEDPSNGSKGTYAITEQIPPACVDXDKKYXTKVQRARTKMADTANAHLKRLRCHHHGDELEDQRAIKTLAHEITDLIKKSENRLRRLSATGPSEDDNVMKNVQR

SEQ ID NO: 175348 - protein, 51 aa, Glycine max
  unsure (1)..(51): unsure at all Xaa locations
  Clone ID: PAT_MRT3847_129358C.1.pep
LLFCFFFFFSRASRQLFHISVTDFTPSLTLYKNDPLCXILKNPNSYWPDSL

SEQ ID NO: 175349 - protein, 45 aa, Glycine max
  Clone ID: PAT_MRT3847_129359C.1.pep
STVMVSYSSWNGVRMHANRDLVTGFLKNTLKFKVIGFFVFFSHTL

SEQ ID NO: 175350 - protein, 32 aa, Glycine max
  Clone ID: PAT_MRT3847_12935C.1.pep
KPRVHTKLSENWFCILTSLINQRNVHTPSSII

SEQ ID NO: 175351 - protein, 81 aa, Glycine max
  Clone ID: PAT_MRT3847_129360C.1.pep
AAYTWLSPNTCYTLLDLILELYYFVSGLYASSTEYRHNAASRDFERQTERLRYPVHIREVTVEELNVYDGSDPECPLLMAI

SEQ ID NO: 175352 - protein, 49 aa, Glycine max
  unsure (1)..(49): unsure at all Xaa locations
  Clone ID: PAT_MRT3847_129361C.1.pep
VYPFSLFLQVSLIXSRRKXHKXXSXXXXXXXXXXVXXLXRFTIFRMQFN

SEQ ID NO: 175353 - protein, 65 aa, Glycine max
  Clone ID: PAT_MRT3847_129362C.1.pep
LLPIPIYSVGPHAVVMYFSLHFIMTRACTCHEIRFKFGGGSTPKPNVLSIYRFNHPIALDQAHFV

SEQ ID NO: 175354 - protein, 114 aa, Glycine max
  Clone ID: PAT_MRT3847_129363C.1.pep
CVASTIEPYWLLSLGGLLAPLLSHPIPITPISAFPSPPSPTFPVESPSFSTIPLPTLLIHKKQITCKVKTSYSLQINGSSLSFTILLGLVTIPSYSGFHLIPLKNCVWILLLAS

SEQ ID NO: 175355 - protein, 88 aa, Glycine max
  unsure (1)..(88): unsure at all Xaa locations
  Clone ID: PAT_MRT3847_129364C.1.pep
RVFLLLFLLRPSVLLFFFRPCLPVFAVRLFPRAFVVGLSCSSFVLSSSSAFVLAPPGLXFAFCAGALSSWSGGCVPGAFFFLVPSRAG

SEQ ID NO: 175356 - protein, 567 aa, Glycine max
  Clone ID: PAT_MRT3847_129365C.1.pep
METDKGEAQAQDWRGRPSNPAKHGGMIPAAFVLGLQAFEIMAIAAVGNNLITYVTSEMHFPLSKAANLVTNFVGTIFLLALLGGYLSDSYLGSFWTMLIFGFVELSGFILLSVQAHVPQLKPPPCNINDLGEQCSEAKGMKTMIFFVALYLVALGSGCVKPNMVAYGGDQFDQDNPKQLKKLSTYFNAAYFAFSLGELVSLTILVWVQTHSGMDVGFGVSAAVMAMGLISLICGTLYYRNKPPQGSILTPIAQVLVAAIFKRNLLLPSNPQMLHGTQNNLIHTDKFRFLDKACIRVEQEGNQESAWRLCSVAQVEQVKILLSVIPIFSCTIVFNTILAQLQTFSVQQGRAMDTHLTKSFNIPPASLQSIPYILLIVLVPLYDTFFVPFARKFTGHESGIPPLRRIGFGLFLATFSMVAAALLEKKRRDEAVNHDKVLSIFWITPQYLIFGLSEMFTAIGLLEFFYKQSLKGMQAFLTAITYCSYSFGFYLSTLLVSLVNKITSTSSSAAGWLHNNNLNQDRLDLFYWLLAVLSFLNFLNYLFWSRRYSHAPSALPPPNTKEHHHNIP

SEQ ID NO: 175357 - protein, 45 aa, Glycine max
  Clone ID: PAT_MRT3847_129366C.1.pep
LLIRAKKTIPSYIIKFMLKPLAETNSMGIRPQLFIRHIFIMTVIA

SEQ ID NO: 175358 - protein, 45 aa, Glycine max
  Clone ID: PAT_MRT3847_129367C.1.pep
FHIFLSFHKINYTVNYITSVCILLPFHSSLPSFVNIIKLLIITTF

SEQ ID NO: 175359 - protein, 125 aa, Glycine max
  Clone ID: PAT_MRT3847_129368C.1.pep
MASATVSSTAGTAGNRAGAGMEATFTGLKCKGGFPTRKTNNDITYIGSNGGRGQCMQVWTPIGNKKCETISYLPDLDDAQLAQEVEYLLRKGWIPRLEFEMEHGFVYREHNRSPGYYDGHYWTMW

SEQ ID NO: 175360 - protein, 69 aa, Glycine max
  Clone ID: PAT_MRT3847_129369C.1.pep
PFHKPKCQIHLSTFPSVFTFSFPLFPFQHSKHTKNKPFSLPLQKPRILRQILTSGVWFKFSPETESLIF

SEQ ID NO: 175361 - protein, 58 aa, Glycine max
  Clone ID: PAT_MRT3847_12936C.1.pep
LVIFSLHLSGTGAPCSGFCVPNNNEVILILPLLLVYVMVQSDTYNLPSNFLYIYTVVG

SEQ ID NO: 175362 - protein, 47 aa, Glycine max
  Clone ID: PAT_MRT3847_129370C.1.pep
ENINIIAGHRQHRLVVDAVQRAVTFSGLQLEDYRTGDAYSIRSVITM

SEQ ID NO: 175363 - protein, 34 aa, Glycine max
  Clone ID: PAT_MRT3847_129371C.1.pep
ELTNHYGSMGIQHYTAHIKVGYENRWHNFDDSHI

SEQ ID NO: 175364 - protein, 89 aa, Glycine max
  Clone ID: PAT_MRT3847_129372C.1.pep
FSGIGRVSLVSYHLNPNQLRERSSTRWDTLSLETLVDHCSVSYRGYHATLYYILFNYVYNTYFTCPSLKNYLVLLGLQDTCEKIAVKPF

SEQ ID NO: 175365 - protein, 254 aa, Glycine max
  Clone ID: PAT_MRT3847_129373C.1.pep
MGRGRVELKRIENKINRQVTFAKRRNGLLKKAYELSVLCDAEVALIIFSNRGKLYEFCSSSSMLKTLERYQKCSYGAVEVSKPAKELESSYREYLKLKARFESLQRTQRNLLGEDLGPLNIKELEHLERQLDSSLKQVRSTKTQFMLDQLSDLQTKEQMLVEANRSLTVKLEEINSRNHYRQSWEAGDQSMPYGGGGPENSHSHSHSQGFFQPLECNPTLHIGPDYRYNAVASDQITATTQPQQVSGFIPGWML

SEQ ID NO: 175366 - protein, 112 aa, Glycine max
  Clone ID: PAT_MRT3847_129374C.1.pep
MGRGRVELKRIENKINRQVTFAKRRNGLLKKAYELSVLCDAEVALIIFSNRGKLYEFCSSSRYAVCVDPFFSVSSLCEILKITFSLLTYEIYLLHYFIFYFFGAFLWICLIC

SEQ ID NO: 175367 - protein, 59 aa, Glycine max
  unsure (1)..(59): unsure at all Xaa locations
  Clone ID: PAT_MRT3847_129375C.1.pep
AKLRIWPKKKRLHSSFEWAFLLFFHSFKQGNSFSPLSIKISLXCVLVALEKELIIFXIF

SEQ ID NO: 175368 - protein, 44 aa, Glycine max
  unsure (1)..(44): unsure at all Xaa locations
  Clone ID: PAT_MRT3847_129376C.1.pep
EKHGAWQPNWKKACVIGASGFMAALXIKHLLEKGYAVNASVRDA

SEQ ID NO: 175369 - protein, 107 aa, Glycine max
  Clone ID: PAT_MRT3847_129377C.1.pep
DFGLVCGSVVFGIGVTLIEPKYYSSFFSREMIYGYPDDFERFSYFCRASLDYIVKCGKQPDVLHLHNWGTAIVGPLFRDTFVKQGGVVYSNRVVIMSSHLSGARNCS

SEQ ID NO: 175370 - protein, 51 aa, Glycine max
  Clone ID: PAT_MRT3847_129378C.1.pep
KPFQGAFFGFLTFLGPFAKCFFPGFSPYFWKTGIPPFNLLLNPSFYPILPF

SEQ ID NO: 175371 - protein, 114 aa, Glycine max
  Clone ID: PAT_MRT3847_129379C.1.pep
VSADFPNLTQIGMVEGHEGNYGILEPNKMGSGRDFSLPSLESRSIESNSVPIDVKSHNNHFNYGSFKHTDKIQGSKVEDLIGFGNHGQGENLKMGEWDLENLMQDITSFPFLDF

SEQ ID NO: 175372 - protein, 58 aa, Glycine max
  Clone ID: PAT_MRT3847_12937C.1.pep
KDEEPLIIILNVDMHCKARAWNVAQALKGFEGVYEATAYSKASKVVLKGKASDPINVC

SEQ ID NO: 175373 - protein, 193 aa, Glycine max
  Clone ID: PAT_MRT3847_129380C.1.pep
MACTIDFRCLDEGFGGKTYKRKREQQSQPQHDAAADDVIDGASLMDTDDALPPPAKRSALPSSENPDKPAFGHPSYDGVIAGRVSGRKWKQVRQRRASAAQVSRKGTTFEQREREKVIKKAYKERMMELKEEIRLNKVEKRKKKEEREKKKQENIIRSGTKFQKITNPNTLKKIAKSKQRKQLRVVPDELVRK

SEQ ID NO: 175374 - protein, 283 aa, Glycine max
  unsure (1)..(283): unsure at all Xaa locations
  Clone ID: PAT_MRT3847_129381C.1.pep
SIYLIPISLYVSIEIVKVLQSVFINQDVHMYYEETDKPAHARTSNMNEELGQVDTILSDKTGTLTCNSMEFIKCSIAGVAYGQRVTEVERALSGRHESHPGQVLEKISESKSSIKGFNFMDERVMNGNWIKEPNANVIQNFLQLLAVCHTAIPEVDEETGKVSYEAESPDEAAFVIAARELGFEFYERTHTTISLHELDPISGQKINRSYKLLNILEFTSARKRMSVIVRDAEGKLLLLSKGADSVMFERIAKNGRDFEXENKQHISEYADSGLRTLILAYRE

SEQ ID NO: 175375 - protein, 427 aa, Glycine max
  unsure (1)..(427): unsure at all Xaa locations
  Clone ID: PAT_MRT3847_129382C.1.pep
MGELKDTEAYEEELIDYEEEEEKAPDSAKPVTESGKKGYVGIHSSGFRDFLLKPELLRAIVDSGFEHPSEVQHECIPQAILGMDVICQAKSGMGKTAVFVLSTLQQVDPVPGQVAALVLCHTXRELAYQICHEFERFSTYLPDIKAAVFYGGVNIKVHKELLKNECPHIVVGTPGRILALARDKDLGLKNVRHFILDECDKMLESLDMRRDVQEIFKLTPHDKQVMMFSATLSKEIRPVCKKFMQDPMEIYVDDEAKLTLHGLVQHYIKLQETEKNRKLNDLLDALDFNQVVIFVKSVSRAAELNKLLVECNFPSICIHSAMSQEERLKRYKGFKEGKQRILVATDLVGRGIDIERVNIVINYDMPDSADTYLHRVGRAGRFGTKGLAITFVSSTADSEVLNQVQSRFEVDIKELPEQIDTSTYMPN

SEQ ID NO: 175376 - protein, 48 aa, Glycine max
  Clone ID: PAT_MRT3847_129383C.1.pep
RILHKCVPYLQLVSVYNSSTEKVNRKLTKALLARFTIQNVHPGAHAVG

SEQ ID NO: 175377 - protein, 153 aa, Glycine max
  Clone ID: PAT_MRT3847_129384C.1.pep
GGIPPGILLIRGKQWNLQTHRYMGLLTTFVAYACYHASRKPTGIVKSVLCPEHKGTSQGWSPFNGHDGTSKLGEIDVAFLACYSIGMYVAGHLGDTLDLRLFLATGMVGSGIFVSLFGMGYFWNIHSFLFYLSMQMIAGMFQATGWPSVVAVI

SEQ ID NO: 175378 - protein, 83 aa, Glycine max
  Clone ID: PAT_MRT3847_129385C.1.pep
KKNYWFLGKKLGGLALQEGLIFWKKKPWADTKQKFYQNSFLSKNFTLPFTIWLTPLMPNIQNWGLVCLLKRGANHTGGPPSKG

SEQ ID NO: 175379 - protein, 232 aa, Glycine max
  Clone ID: PAT_MRT3847_129386C.1.pep
MSSFPNTVAEGRRSGKAPEKSTFSQTCSLLSQFLKEKRASADSTLGIGGKMEPKANTKALLGSLQNSDGALKLSASAMEFLPQLVENPCIKKSRSPGPESPQLTIFYAGKMLVFDAFPPEKATEVMEMATKLASNNSGTEESPPSLPVTTEKLAVSKMPQTNTSSETPKPGNQGVGSDMRYPRRASLLKFLEKRKERVNARGPYQMNNLKPEGSSSGGEPEDQCSKQFDLNF

SEQ ID NO: 175380 - protein, 79 aa, Glycine max
  Clone ID: PAT_MRT3847_129387C.1.pep
FPWVSEWFQNNPRFCWCLVDFGFYCIWLVRSKWWYIGCCYSYVRFCFVESPSSVTNASCFRRRFKRAHNGGMWVCPKNG

SEQ ID NO: 175381 - protein, 230 aa, Glycine max
  Clone ID: PAT_MRT3847_129388C.1.pep
MSSFPNTVAEGRRSSKAPEKSTFSQTCSLLSQFLKEKRASADSTFRIGGKMEPIASTKGLLGSLQNSDGALKLSASAMEFLPQLVENPCIKKSRSQGPETPQLTIFYAGKMLVFDAFSPEKATEVMEMATKLASDNSGTEESPPSAPVATEKLAVSKVPQTNTFSETPKAGNQGVGSDMRYPRRASLLKFLEKRKERVNARGPYQINNHKPEGSSSGGEPEDSQQFDLNL

SEQ ID NO: 175382 - protein, 72 aa, Glycine max
  Clone ID: PAT_MRT3847_129389C.1.pep
KLVAFGMEKRACPGEPMAMQSVSFTLGLLIQCFDWKRVSEEKLDMTENNWITLSRLIPLEAMCKARPLATKI

SEQ ID NO: 175383 - protein, 43 aa, Glycine max
  Clone ID: PAT_MRT3847_12938C.1.pep
MKTTTLSGHHHFSYRTFRVKSQIQVLCTFRVSHTNCKIKNQIR

SEQ ID NO: 175384 - protein, 55 aa, Glycine max
  Clone ID: PAT_MRT3847_129390C.1.pep
FHLSNWWENGTHRSQGPETPQLTIFYAGKMLVFDAFSPEKATEVMEMATKLASDN

SEQ ID NO: 175385 - protein, 57 aa, Glycine max
  Clone ID: PAT_MRT3847_129391C.1.pep
ERAPVQFMGETYIDMGHKVNHHHYSLFFRSGNIGHTLYFYLKNDHHLVGSALVICLT

SEQ ID NO: 175386 - protein, 160 aa, Glycine max
  Clone ID: PAT_MRT3847_129392C.1.pep
TEQQQQGHPYRPTSKEIIFITNFPISQRKFFVGISSKMSSFPNTVAEGRMSGKAPEKSTFSQTCSLLSQFLKEKRASADSTLGIGGKMEPKGITFYLFIYLFIYIISPCGILLLLALFTKFLLCDVFTIQFLLWVGFVSTIDGLVREIIFVLLAQLHRNI

SEQ ID NO: 175387 - protein, 58 aa, Glycine max
  Clone ID: PAT_MRT3847_129393C.1.pep
MKNGKKSCVFSSSPQSFFFLNHRNPHPLLLPSALSLCSHQKTTPTQFRAFSKVPNFTL

SEQ ID NO: 175388 - protein, 49 aa, Glycine max
  unsure (1)..(49): unsure at all Xaa locations
  Clone ID: PAT_MRT3847_129394C.1.pep
AMLYVSIDKQCSCNGIVDSPRGHTQLCSLQLSEGKSIYIANXISVERHP

SEQ ID NO: 175389 - protein, 114 aa, Glycine max
  unsure (1)..(114): unsure at all Xaa locations
  Clone ID: PAT_MRT3847_129395C.1.pep
APPXXXSXPXXXXXAXLXAXMPSLLXXXXXXLDXPRXXXXGXLSXXRXXPXAXAXXXXLXXIXXXXXXXRXXSXAGSXXXVSXPCYRVXCXXACAXXXXXRYXXWXXPXXSXRV

SEQ ID NO: 175390 - protein, 87 aa, Glycine max
  Clone ID: PAT_MRT3847_129396C.1.pep
KKAHVTFEYVSLLIMRATVPTKTVFYAIRKTSTMLYLFLGGALAPVFLEETVSEGYHTCGDKRAVSYCSELKSFQGSQLLLSSVSDN

SEQ ID NO: 175391 - protein, 99 aa, Glycine max
  unsure (1)..(99): unsure at all Xaa locations
  Clone ID: PAT_MRT3847_129397C.1.pep
MAEVHCEGKNYKGVRMRKWGKWGCLIRLPNRRQRIWTGSYNTAETAARGXHAVMLWSRGRSAQFNFPDYPPDMAGGTLMTPKQRQMAAEQFANTGPHQG

SEQ ID NO: 175392 - protein, 63 aa, Glycine max
  Clone ID: PAT_MRT3847_129398C.1.pep
YALDPPLTEKFFFLNKNFKARYILYFSFGQFVDVRFHFFSNPPLWSLWFGGRENKEKNKSFKF

SEQ ID NO: 175393 - protein, 49 aa, Glycine max
  unsure (1)..(49): unsure at all Xaa locations
  Clone ID: PAT_MRT3847_129399C.1.pep
PTFKPWNNDNPEKKLLYLKSDLACFTFILKRRGIQKSPEEGIKVXPGAG

SEQ ID NO: 175394 - protein, 53 aa, Glycine max
  Clone ID: PAT_MRT3847_12939C.1.pep
VIEAVVQSVLSHRGHLTPFIKLTIYPIAPTRVDVCACIACDNFIGKEVASIHD

SEQ ID NO: 175395 - protein, 126 aa, Glycine max
  unsure (1)..(126): unsure at all Xaa locations
  Clone ID: PAT_MRT3847_1293C.1.pep
MAPASTCMNFNLSTPFKGLSLSACSSFFGGQXGSIRTAPVSVEHLTQHYPLTIENTHKTGAGITKNGRDSQGKRLXFKTYGDHCRKPGYIIGLQRGTXSHAGKTVSLVIDYPMISLIDGLVNPEKY

SEQ ID NO: 175396 - protein, 50 aa, Glycine max
  Clone ID: PAT_MRT3847_129400C.1.pep
QPSVGLLFLSVVIGSKSLNIPRGCACVSHIKEYSSASVSLPRRCSIMGQD

SEQ ID NO: 175397 - protein, 72 aa, Glycine max
  unsure (1)..(72): unsure at all Xaa locations
  Clone ID: PAT_MRT3847_129401C.1.pep
MPIFIRTPSIFTQFDIIFPDGKYPSPCNSYIYNIFPPPYFYXFQFXKDFTXYSISQECISYFCEYITDLGPF

SEQ ID NO: 175398 - protein, 114 aa, Glycine max
  Clone ID: PAT_MRT3847_129402C.1.pep
TRVYPRARDDISQWRRARPTQFVSWKTLGIICRTIPLKKDQELYTAACGARRNTYAGNAARNREAYYNLRAGADDRCYPKRIRGGQRAWELPLLPRKPPFVYWPGTTTNTRHDR

SEQ ID NO: 175399 - protein, 47 aa, Glycine max
  unsure (1)..(47): unsure at all Xaa locations
  Clone ID: PAT_MRT3847_129403C.1.pep
SISFLSYSNLQDESFTRKERRSFXLPPHKLLKTPLLSPLSNYPFNDL

SEQ ID NO: 175400 - protein, 191 aa, Glycine max
  unsure (1)..(191): unsure at all Xaa locations
  Clone ID: PAT_MRT3847_129404C.1.pep
MAPTFLFTLESVNEGHPDKLCDQISDAALDARLEQDPDSKVACETCTKPNXTWSSRELTTKANVDYEKIVXDTCKNIRFXSNDVGLHADNCNVLDNIEQQSPDIAKGVHGQLTKKPDQIGAGDHGHMFCYATDETPELIPLSHVLATELGAYLTRRCKNSTCPWLSPDGKTLMTDEYYNDYGDRAAIPVHT

SEQ ID NO: 175401 - protein, 66 aa, Glycine max
  Clone ID: PAT_MRT3847_129405C.1.pep
IIVLACIVLVCLLYCSAHTSEQVLPYHLQPRSPLLVSNCNDLLFYNTPPKLPHLFHLNLRTHPTHP

SEQ ID NO: 175402 - protein, 36 aa, Glycine max
  Clone ID: PAT_MRT3847_129406C.1.pep
EMRERAVRLKIAIHRSMDEGGVSCMEIDCFMAHITK

SEQ ID NO: 175403 - protein, 125 aa, Glycine max
  Clone ID: PAT_MRT3847_129407C.1.pep
VFLDLKSEFFYFRSEICGAPCDSPSANYVLLHQTTTSSPTTATTTSSPAATAAAPSPPPRWRQLPPPPPPPLPGQQPPCATATLLLLSFFLSLFIAFFWVFYVQDLFFFCLCVFFLSMPSIIVIF

SEQ ID NO: 175404 - protein, 50 aa, Glycine max
  Clone ID: PAT_MRT3847_129408C.1.pep
QRFHGCSILNTFILRDGLAPESNSNGAFPFINLTGINDYPFLENSCGGKG

SEQ ID NO: 175405 - protein, 104 aa, Glycine max
  Clone ID: PAT_MRT3847_129409C.1.pep
KEHKRLLARKSIIEKRKEEQERQLREMEREEEWKRLRLLKITEEAEQRRLATEFEQRKNQRILREIEERENEEAQALLQEAEKRIKKKKKKKKKKKKKKKKKKK

SEQ ID NO: 175406 - protein, 54 aa, Glycine max
  Clone ID: PAT_MRT3847_12940C.1.pep
GKLVLDDGGKISDGTWEFCPNDVYRPPMDEGLCPQILSPKDLPVTSRMCKNSDM

SEQ ID NO: 175407 - protein, 62 aa, Glycine max
  Clone ID: PAT_MRT3847_129410C.1.pep
TRIEYIFKYILMELLLETFKGIEVYNVSQNMICYHNIHIGQIFKYLARVELDHSSVCSNTIF

SEQ ID NO: 175408 - protein, 105 aa, Glycine max
  Clone ID: PAT_MRT3847_129411C.1.pep
QKKTWQWRWQCLLIHHLIVSWTLTSIATVPTLTSLHRAAPNALATYSSVLPPAPLSDTALFPLPTPPKTSYNSDFRWSSPEAFPLRRGTISGRKEKSSHTSFHFS

SEQ ID NO: 175409 - protein, 51 aa, Glycine max
  Clone ID: PAT_MRT3847_129412C.1.pep
RVSSKGKATYAAPLGSPTRRSQVSVSPTALANPLQKQTPPKKVLKQPPFRN

SEQ ID NO: 175410 - protein, 413 aa, Glycine max
  Clone ID: PAT_MRT3847_129413C.1.pep
MAGLAPEGSQFDARQYDSKMSDLLSSDGQDFFTSYDEVYDSFDAMGLQENLLRGIYAYGFEKPSAIQQRGIVPFCKGLDVIQQAQSGTGKTATFCSGILQQLDYSLTQCQALVLAPTRELAQQIEKVMRALGDYLGVKVHACVGGTSVREDQRILSSGVHVVVGTPGRVFDMLRRQSLQPDHIKMFVLDEADEMLSRGFKDQIYDIFQLLPSKIQVGVFSATMPPEALEITRKFMNKPVRILVKRDELTLEGIKQFYVNVEKEEWKLDTLCDLYETLAITQSVIFVNTRRKVDWLTDKMRSRDHTVSATHGDMDQNTRDIIMREFRSGSSRVLITTDLLARGIDVQQVSLVINFDLPTQPENYLHRIGRSGRFGRKGVAINFVTKDDEKMLFDIQKFYNVQVEELPSNVAELL

SEQ ID NO: 175411 - protein, 322 aa, Glycine max
  Clone ID: PAT_MRT3847_129414C.1.pep
MEQENYKIKAVNLLRSRICDPKFIFINESPESNHSKLKFMISSSVTEACNNSILLLGPRGSGKNAVLELVIQDLLQEYPDSISVMRLNGLLHSDDISAFKEIARQLCMEHQLLFSKAASFDDNSQFMVAMLKECGLAHKTIIFVLDEFDLFAQGKQRLLYSLLDAMQSITSQAVVLGISCRLDADQLLEKRVRSRFSHRKLLFLPPSIEDSQKLLMHMLTLPIDSSFPHAYAVEFNRKVQNIIEDRRFKETLNKYLNVDSSVKHLLRFLFCAVSHMDLQTGFLSRENFEIAFTSIQRQPKLECLRNCSILELQILVCMKRLE

SEQ ID NO: 175412 - protein, 54 aa, Glycine max
  Clone ID: PAT_MRT3847_129415C.1.pep
GGCAFYERGAFQDSGSTPIFSRDKRGLKKTGLKNFLMGFPRGKIFFKIPPPWFF

SEQ ID NO: 175413 - protein, 100 aa, Glycine max
  Clone ID: PAT_MRT3847_129416C.1.pep
MNEFLQTPLTNKMNWGLSSTKTSTILRPNCPKKWKNVRASGNIYNLGLVNNLFFPKAKQGVHPPGEDIIDPIQSFFQKWFLANKKPVGPAIFKGDYPWFP

SEQ ID NO: 175414 - protein, 67 aa, Glycine max
  Clone ID: PAT_MRT3847_129417C.1.pep
FFFFFFFFFFFFFFFFFFFFFFFFFWEKAKSNPFSKNPFPLWGKKETVYEAWSINKAAYKISRFLGN

SEQ ID NO: 175415 - protein, 136 aa, Glycine max; identical to SEQ ID NO: 143601
  Clone ID: PAT_MRT3847_129418C.1.pep

SEQ ID NO: 175416 - protein, 66 aa, Glycine max
  Clone ID: PAT_MRT3847_129419C.1.pep
GGKPNLALTFIGWGFNIGYRTFVFYLEGVGALKLSLVKPLVLGQLFLPFKVFHLIQEIIFWVANIN

SEQ ID NO: 175417 - protein, 75 aa, Glycine max
  Clone ID: PAT_MRT3847_12941C.1.pep
PTPHAPYYYKCPPPPTAHPPPYHYRSPAPPSPSPAAPWHDTSPPAASPAPGPKYIYKSPPPAVYIYACPPAPIYK

SEQ ID NO: 175418 - protein, 136 aa, Glycine max; identical to SEQ ID NO: 143601
  Clone ID: PAT_MRT3847_129420C.1.pep

SEQ ID NO: 175419 - protein, 61 aa, Glycine max
  Clone ID: PAT_MRT3847_129421C.1.pep
MHEYMILMMPKKNQTRLLQRISIASKLMQGCFNKQSLASRLTQDQALPQNKVFPRHQGSGN

SEQ ID NO: 175420 - protein, 67 aa, Glycine max
  Clone ID: PAT_MRT3847_129422C.1.pep
DLYISIYTWLYHYTKNYIQEAAPHLLDFKPVMGLIFHSPYAPLTNVPHAGDTLLILTKLYVPTELML

SEQ ID NO: 175421 - protein, 110 aa, Glycine max
  Clone ID: PAT_MRT3847_129423C.1.pep
MEPTCGDTSLDLNVDASTMHMDGALVEELRRLSCENKRLTHLCENYMALQKQLSQLINTNFDQQLDYPIESSRKRKAAESDQCCTNKFVGVSNNNAECSSIITEDSFKKY

SEQ ID NO: 175422 - protein, 64 aa, Glycine max
  Clone ID: PAT_MRT3847_129424C.1.pep
DHFYLCWLCYLLFGLVSKTDKLGLFFSFEIQSLTLVALVLFLLPLPFFIIIIKYKIAIKILIVQ

SEQ ID NO: 175423 - protein, 108 aa, Glycine max
  Clone ID: PAT_MRT3847_129425C.1.pep
LWDDIKWELTLLPVRSHYRSDFFFHPLSLFVPPGLILWFQLVFEIQIMLSTTSVITGWSGLCQPTASSSAGKLESVGIFRFALLSWLWPPPFANVRPPFCCVWTVVTK

SEQ ID NO: 175424 - protein, 70 aa, Glycine max
  Clone ID: PAT_MRT3847_129426C.1.pep
SSFQGVIIIISFSIHMSHYIIMYNYYIILTFSRKRKKILKIHPNKNRKILEREYALSGTFFFPYVCTCVL

SEQ ID NO: 175425 - protein, 60 aa, Glycine max
  Clone ID: PAT_MRT3847_129427C.1.pep
SFKRFLFWIWSQGKRIEMWACLFFNGGKGLFKGLSKLNLTLSFFLGKVPGKLVLYKNGPV

SEQ ID NO: 175426 - protein, 110 aa, Glycine max
  Clone ID: PAT_MRT3847_129428C.1.pep
SMASCMAPSSRMLGQPEDLYSSQRSTYDVYTVRYKPSKCLHIEPKSRTWRALRVALAAHGQVPLTVHDTEEDDGYDGSNDSLADTRTNTTTEPKKGTVALPLKRDRTRSK

SEQ ID NO: 175427 - protein, 92 aa, Glycine max
  unsure (1)..(92): unsure at all Xaa locations
  Clone ID: PAT_MRT3847_129429C.1.pep
MKMNVLVFCVATLLVAWXCHAYEMCPLRMNTGYGDRTPDVXCASXMLAVEAYSIFGFETSPEEYVEAVHEYIHGEQYRSDSKIVHQQAYFYA

SEQ ID NO: 175428 - protein, 78 aa, Glycine max
  Clone ID: PAT_MRT3847_12942C.1.pep
RVFGCFFLGQTFWVLVYSRWPRRCGLWNCCDSGGKYGMLGLGVPDVWCDRLMCVFFFWVPRMVFLCLFSGNSAPSYFP

SEQ ID NO: 175429 - protein, 42 aa, Glycine max
  Clone ID: PAT_MRT3847_129430C.1.pep
LPFRFALFLILINQCMHLLSEFRLFNRNVHVPDSFFGLEFLL

SEQ ID NO: 175430 - protein, 40 aa, Glycine max
  Clone ID: PAT_MRT3847_129431C.1.pep
RISLWLVAMVSVVIWEQCQRHGTHCHCHYNDIVILVSTQH

SEQ ID NO: 175431 - protein, 73 aa, Glycine max
  Clone ID: PAT_MRT3847_129432C.1.pep
MAQEQEFRTSTPLPKCDAYFETTQSRKKLPLSLQETWTDACAKIPGSSIPAVPSGEVIEILADTPVGEAGKIL

SEQ ID NO: 175432 - protein, 65 aa, Glycine max
  Clone ID: PAT_MRT3847_129433C.1.pep
MLYIRNTENVFRSFLLRKIFIVYYLMRQYLYSTLMGIFNVMSEFDDILFFVWSSMVIWFFLKQVW

SEQ ID NO: 175433 - protein, 77 aa, Glycine max
  Clone ID: PAT_MRT3847_129434C.1.pep
SRSKRQTPTYINITLYVPKKINPQPIWPRDVHKTTHFKNPRRSKHTLFTNAGPSQNQRHFLDPEQIDCETGGPYSLY

SEQ ID NO: 175434 - protein, 109 aa, Glycine max
  unsure (1)..(109): unsure at all Xaa locations
  Clone ID: PAT_MRT3847_129435C.1.pep
MSSPSKRREMVSRKLPMSDYKAVMLNDGLXTLYVHFHGPIESPYHGRVRKERVELTNAYSYKLPSIGFINEIYHPNVHETARSVCVDAINPTWSPMXELDDVMEVFLPQ

SEQ ID NO: 175435 - protein, 54 aa, Glycine max
  Clone ID: PAT_MRT3847_129436C.1.pep
DSTTSVYLILYSSIHCHVALTVCGTAVDLFSPHLMLPLSSPDLYLSLSLSTYVL

SEQ ID NO: 175436 - protein, 38 aa, Glycine max
  Clone ID: PAT_MRT3847_129437C.1.pep
IIRRPIQRFLIKHNWKLDSTNITKKVCAQKLSFFLKKH

SEQ ID NO: 175437 - protein, 63 aa, Glycine max
  Clone ID: PAT_MRT3847_129438C.1.pep
SGSLLPYSFLILLHSLFNYSSSARDRFPIGNVGQSQSGASGWLCKPVSDFKNIPFVFYKKKKK

SEQ ID NO: 175438 - protein, 126 aa, Glycine max
  unsure (1)..(126): unsure at all Xaa locations
  Clone ID: PAT_MRT3847_129439C.1.pep
DTRVNGFPLGLLLTXLLDYXPLRVMGTNGARSFCVPWLSGSXXSSPEHPFSHILFIAXLPPXHVPYISIVDPRPSRGIPASDTPIPWSDPCFAPPSAPREPSSTRISRRPRHVCLTVPWILKVLRF

SEQ ID NO: 175439 - protein, 79 aa, Glycine max
  unsure (1)..(79): unsure at all Xaa locations
  Clone ID: PAT_MRT3847_12943C.1.pep
GCIFLLESHIPVSAQTERISTKLDSLNKIFDRVSHENYLPGWTSSTDTLSYXEECPPSRQIVPSVXXCVLKTPMAHFSK

SEQ ID NO: 175440 - protein, 96 aa, Glycine max
  Clone ID: PAT_MRT3847_129440C.1.pep
CRQQEVPRHILMLLIHTSRLRLLQGLSRQLPLPIFMHMAVMDMLWLPVISGAYYRYHGAPLRMVPLDVRSLIHLTFAMLFVIACRSAVAVLSVNYS

SEQ ID NO: 175441 - protein, 108 aa, Glycine max
  Clone ID: PAT_MRT3847_129441C.1.pep
GPVLYRLKIRTQGQNRARKQGLHLTGNSGRFSRKLSQRSGKTKKNGEAQNQQRSGMAKKTRTVTVGQKNAGNVASKGWVFVRKENNGCHFIKECLQLTEKEGFSVLIQ

SEQ ID NO: 175442 - protein, 63 aa, Glycine max
  Clone ID: PAT_MRT3847_129442C.1.pep
LPALESNLLILQIKTTKSYSYNVLTVYSFQIILRKYFFTVVLRIFLYPNNIEYPITFSILKNY

SEQ ID NO: 175443 - protein, 272 aa, Glycine max
  Clone ID: PAT_MRT3847_129443C.1.pep
FGSRQYIEDVKKCLNYIKDGESYELCLTTQIRKPIEELNSLGLYLHLRERNPAPYAAWLNFSKENLSICCSSPERFLQLDRKNILEDKPIKGTIARGATKEENELLKLKLQFSEKDQAENLMIVDLLRNDLGRVCDPGSVHVPRLMDVESYATVHTMVSTIRGKKRSDVSAVDCVKAAFPGGSMTGAPKLRSMELLDSIESCSRGIYSGCIGFFSYNQAFDLNIVIRTVIVHEGEASIGAGGAIVALSNPEDEYEEMVLKTKAPTRAVMHFA

SEQ ID NO: 175444 - protein, 47 aa, Glycine max
  Clone ID: PAT_MRT3847_129444C.1.pep
RIRMPLKFAGRVTVGSLLLCDAMSLGHITGAEDPYRFFSWNVTYGYI

SEQ ID NO: 175445 - protein, 90 aa, Glycine max
  Clone ID: PAT_MRT3847_129445C.1.pep
CRCPICLVLSHLHMLLLRPGKQKDQCQRVNWKCETSAECCDMVAWHCASWSATCSIATSQKYSKREQETEERSTLGYQFLLPPSVVFLQP

SEQ ID NO: 175446 - protein, 88 aa, Glycine max
  unsure (1)..(88): unsure at all Xaa locations
  Clone ID: PAT_MRT3847_129446C.1.pep
MAVQLWETLKEAICSYTGFDTYTFFTELALLVDGDYVMTDLFGSFDDHHHLDRHMXEEEEMSPVRLPVQXGEITMEELMAYDCTDPEK

SEQ ID NO: 175447 - protein, 119 aa, Glycine max
  Clone ID: PAT_MRT3847_129447C.1.pep
LDRHSPLFLPLALHGNPQNYSEDLMHLWYRVPLPTMLAPENKNLALVDVVSEAITKDPSLKAALFSAISSLTEDPDQKNNINNQSQLSKSSGGYDPCSKVPAIIPPIQPYTTVDLEVFF

SEQ ID NO: 175448 - protein, 74 aa, Glycine max
  Clone ID: PAT_MRT3847_129448C.1.pep
GWRDAVEEMLEWLSPVAQDTMRWQVERSMETGRFEAKTTALLLQTLHYSDLEKAEAAIVEVLVGLSCIYWCERR

SEQ ID NO: 175449 - protein, 392 aa, Glycine max
  Clone ID: PAT_MRT3847_129449C.1.pep
MPKNIRSAMATSSFFFTLLLLLLTVSDLFVQSRGLNFGINYGQIANNLPSPSRVAVLIKSLNVSRIKLYDADPNVLSAFSNSDVEFIIGLGNEYLQSMRDPSKAQSWVQQHVQPYISQTRITCITVGNEVFNYNDTQLTANLLPAMQSVYNALVNLGLAQQVTVTTAHSFNILANSFPPSSGAFRQDLIQYIQPLLSFHAQIKSPFLINAYPFFAYKDNPNQISLNYVLFQPNQGATDPNTNLHYDNMLYAQIDAVYAAIKALGHTDVEVRISETGWPSKGDPDEVGATPQNAEIYNSNLLKRIEQKQGTPANPSVPIDIFVFALFNENLKPGPVSERNYGLYYPDGTPVYNIGLEGYLPEMVIESKSNALSTNFLIYIFTCLLFIWELSRP

SEQ ID NO: 175450 - protein, 63 aa, Glycine max
  Clone ID: PAT_MRT3847_12944C.1.pep
DELEAELEELEGAELEEQLLQPATTAPAAPVHVPAGRQPTHPVSSKPTAEEDELAALQAEMAL

SEQ ID NO: 175451 - protein, 286 aa, Glycine max
  unsure (1)..(286): unsure at all Xaa locations
  Clone ID: PAT_MRT3847_129450C.1.pep
MQSNPFPDDFMSLPLEENIFEWQFAIRGPRDTEFEGGIYHGRIQLPSEYPFKPPSFMMXTPNGRLESQTKICVSIANHPPEHSQPSWSVRTALDTLIELMPMDVKGAXRLLNYGTPERHTLINEIHEYPVSKAPSXRHKLIDEIHEYMLSKAPPVPQPSATEASEENPRNEEAETQVNSPNPESLPAGEGITDQEVDGIVEEQEVILANPAGVEVSREVQPSVSRNEVLQKSDTRAQNPKPETRVQKHDDRLFTLAAIGLTIAIVVLLLKKFLKSTQHGALFSDGS

SEQ ID NO: 175452 - protein, 268 aa, Glycine max
  unsure (1)..(268): unsure at all Xaa locations
  Clone ID: PAT_MRT3847_129451C.1.pep
MEKSGKRVLLTSNGDDISQGIAFHLVKQGCRLVLLGDQNSLRSIANKIMDSLSLADRGTVQVVGLDMEDQSESTFHHSVDKACQILGKLDAFVNCYAYEGKMQDHLELAESEFKKIVKINFMAAWFLLKAVGXKMREFNTGGSIVFLTSIVGAERGLYPGAAASASALAGVQQLVRASALEIGKYQVRVNAISRGLHLHDEFPLSVGKERAEKFVKDAAPLERWLDVKNDLASTVIYLISDGSRYMTGTTIYVDGAQSITRPRMRSFM

SEQ ID NO: 175453 - protein, 67 aa, Glycine max
  unsure (1)..(67): unsure at all Xaa locations
  Clone ID: PAT_MRT3847_129452C.1.pep
TCNPTHLTPCVPAINSSSAPWSAXCHKLKDHKPCWCGYLKNPSLKQYVNSPNAKKSASTCGIAYPTC

SEQ ID NO: 175454 - protein, 252 aa, Glycine max
  unsure (1)..(252): unsure at all Xaa locations
  Clone ID: PAT_MRT3847_129453C.1.pep
MAKAHQIVLGSNWGIRNIFQSLVAILTTILVVAAIYLTQEGEQWSNERNKLHSLSKCNLFSGKWVFDNESYPLYKEHQCTFMSDQLACEKFGRKDLSYQNWRWKPHQCDLPRFNATALLERLXRNKRMVFVGDSLNRGQWVSMVCLVESSVPPTLKSMRTIANGSLNIFKAEEYNATIEFYWAPLLVESNSDDPVXHRVAERTVRVQAIEKHARYWTDADXLVFNTFLWWKRRAMNVLWGSFGDPMGKQKGR

SEQ ID NO: 175455 - protein, 57 aa, Glycine max
  Clone ID: PAT_MRT3847_129454C.1.pep
LTSKIYLPMTIDIIYIQCNHNLLFNIYRIIISNLINTNSYTASNHTSCYLLNLHMSD

SEQ ID NO: 175456 - protein, 106 aa, Glycine max
  Clone ID: PAT_MRT3847_129455C.1.pep
MALLKHLLLSFTMIIISFVACYSTLQEDPPSSIYVDHSPSIDDGGTVKNLIEQSTNVLSLNRFDKRNSLKKVSVNDYGAKGNGDTDDTEAFKKACDVVCSSGEAIL

SEQ ID NO: 175457 - protein, 70 aa, Glycine max
  Clone ID: PAT_MRT3847_129456C.1.pep
AHEMIEVLEIILHLIKRNPQLASTLLVSQGEHGPACLCSRSAWCTFARVIRSMLHIFIKKSIGEIRHREL

SEQ ID NO: 175458 - protein, 84 aa, Glycine max
  Clone ID: PAT_MRT3847_129457C.1.pep
WNYGIALKYKFSVTNDYPGSCDACERSHGVCGYGGAYNSFVCNCPNGINTTTDCFFISSYNKGFRNGVAWLIYPVAWFLVWFFL

SEQ ID NO: 175459 - protein, 104 aa, Glycine max
  Clone ID: PAT_MRT3847_129458C.1.pep
PTRPTCQVSQMEEGLEEKRLHVKELQKQSKKLEDAVINAKKNSSYRQMQLMKLHKCFLQVKDCTERLKTTEKELQALIVTAMSEIDGDELKDRQLTNGSLDGRL

SEQ ID NO: 175460 - protein, 104 aa, Glycine max
  unsure (1)..(104): unsure at all Xaa locations
  Clone ID: PAT_MRT3847_129459C.1.pep
RVDADNNVISWEXFAVPRPAHEGFEVKRKGDREFPAQIRLEMNYMLEKFMLSPALREVLGVQVDTRARIVSAIWHYVKARKLQIPNDPSFFHCDQALQRVFGED

SEQ ID NO: 175461 - protein, 52 aa, Glycine max
  Clone ID: PAT_MRT3847_12945C.1.pep
PKSRKGFIYDPICRRSLGNSRSLKMVSRVKSCSLEPTAGKYGSGRVTFKPVS

SEQ ID NO: 175462 - protein, 64 aa, Glycine max
  Clone ID: PAT_MRT3847_129460C.1.pep
AASDKKIRIGINGFGRIGRLVARVALQRNDVELVAVNDPFITTDYMTYMFKYDTVHGQWKHFDV

SEQ ID NO: 175463 - protein, 99 aa, Glycine max
  unsure (1)..(99): unsure at all Xaa locations
  Clone ID: PAT_MRT3847_129461C.1.pep
LXVXGXXVXXXXXXXCCXFWXXXXXVXFLXCXXXXXCVVXLXXVFXLXXXXXXCXXXGFXVXXXLFXXVLXFCXXXXVCXXXSXYLEPXXXXXXXCVXL

SEQ ID NO: 175464 - protein, 86 aa, Glycine max
  Clone ID: PAT_MRT3847_129462C.1.pep
GSRPQLPISGCQLPDVERSLSTAATAAMADGPTCTLKDIAYIELAIVADNLKVLFNERCSMKAMTVCCSRTALCITDSSLTSLNNG

SEQ ID NO: 175465 - protein, 99 aa, Glycine max
  Clone ID: PAT_MRT3847_129463C.1.pep
IVDPVTVTLYHAPRATSAVSILQCPVITRSTPFLVQCHDILHLGRDGRGGMSSKLPALPGSQGGQQALETRAQSARQESQKTHHVPSQTTEQRLPSTST

SEQ ID NO: 175466 - protein, 90 aa, Glycine max
  unsure (1)..(90): unsure at all Xaa locations
  Clone ID: PAT_MRT3847_129464C.1.pep
MASLAASTAAAYLGMTEMLGNPINLSGATRTTTYASSPDFFKTVALFCKKKAAPTKKAAXAAPANDELAKRHGPDRLIFLPEGLLDRAEI

SEQ ID NO: 175467 - protein, 38 aa, Glycine max
  unsure (1)..(38): unsure at all Xaa locations
  Clone ID: PAT_MRT3847_129465C.1.pep
YVPLGRPXEGCSTCKPFLYCALTLGSIIHARHDMHRMR

SEQ ID NO: 175468 - protein, 65 aa, Glycine max
  Clone ID: PAT_MRT3847_129466C.1.pep
KALGPFVHPETVQLDPEVLPSRSAEISVRHRSGVWSSITLTLAHLYSYGNISSFSNGIYHMHDKP

SEQ ID NO: 175469 - protein, 121 aa, Glycine max
  Clone ID: PAT_MRT3847_129467C.1.pep
SFSRSFIARNKLNGEIPKDIKFPPQLERLDMQSNSLKGVLTDYHFANMSKLDHLELSDNSLVTLAFSQNWVPPFQLRFIGLRSCKLGPVFPKWLETHNQFQGIDISNAGIADMVPKWFGLI

SEQ ID NO: 175470 - protein, 53 aa, Glycine max
  Clone ID: PAT_MRT3847_129468C.1.pep
FSPSHQLKAFPQFRVLITQEPGTSHALGLSPVALCHRECSSDHIPPKIRFALP

SEQ ID NO: 175471 - protein, 42 aa, Glycine max
  Clone ID: PAT_MRT3847_129469C.1.pep
LVSVNIIAKKTNSFCIIEGVGLYLVCSVALTCQYSDGTKLEM

SEQ ID NO: 175472 - protein, 95 aa, Glycine max
  Clone ID: PAT_MRT3847_12946C.1.pep
KGNNFLLRIKIMHTEQLSDYLLINHRRKGDPNYCCLLLTRSEAIYHRHGEHLQGINTATYSASGMRLITLGNRPCLQWPVMGTYTCRRDRPDHFW

SEQ ID NO: 175473 - protein, 109 aa, Glycine max
  unsure (1)..(109): unsure at all Xaa locations
  Clone ID: PAT_MRT3847_129470C.1.pep
MPIHIWRHGTLMDQLHERSANRCFNTPLCRFHNPSLRGPTIKSILYVRDDLDXSHIFMDRCARKIKRPTEALQRDSGMYSXSLSEHGGLAYTYYTRIGXDEAKYPTLSA

SEQ ID NO: 175474 - protein, 146 aa, Glycine max
  Clone ID: PAT_MRT3847_129471C.1.pep
LYSEKGDEKYRCSETGYRIPFKCLEIKDSTKDAKKTKSQKGRLSLEISDGIAESHKVSHVAGEINPSQSHRRLVDDSSSSDNSSQAYITYRSCITPVNEEKLSVLNFEGVVIFFLLISGSIIYLRKKKVASMSGYVAGRGQNNSRF

SEQ ID NO: 175475 - protein, 60 aa, Glycine max
  Clone ID: PAT_MRT3847_129472C.1.pep
WPSENNPSGIHPASSHTAHTSVGRQSKVLQTVMNLEILCTVSPLMFMAPVASPPPCGQTV

SEQ ID NO: 175476 - protein, 219 aa, Glycine max
  Clone ID: PAT_MRT3847_129473C.1.pep
MKFPNSQLFLPFLLLLFFAITPFRGSGQQTDWNSEETQHGNGVRRRVLLSFKEKPSGSNVTFECTPSGPCVPCLYSEKGDEKYRCSETGYRIPFKCLEIKDSTKDAKKTKSQKGRLSLEISDGIAESHKVSHVAGEINPSQSHRRLVDDSLSSDNSSQAYITYRSCITPVNEEKLSLLNFEGLVIFLLLISGSIIYLRKKKAASMSGYVAGRGQNNSRF

SEQ ID NO: 175477 - protein, 39 aa, Glycine max
  Clone ID: PAT_MRT3847_129474C.1.pep
LLLFFRHSDYLIFLHTHIYRKTFSFIKNNLRIIALWISS

SEQ ID NO: 175478 - protein, 61 aa, Glycine max
  Clone ID: PAT_MRT3847_129475C.1.pep
NSSDHTTGSNLTYAYLQHHRAGLPQPQCDSMSIIIQHRDSENPDVTQLNLLAEHTPLAIYL

SEQ ID NO: 175479 - protein, 85 aa, Glycine max
  Clone ID: PAT_MRT3847_129476C.1.pep
KKGQVFKLTGLSPPFWQLNFCKGQGVVRANPQLGSFGDSGAQVGGLGSSSLPRFLEPPPIKGRKFSYKFEGVGPFFFIFFWGGLL

SEQ ID NO: 175480 - protein, 100 aa, Glycine max
  Clone ID: PAT_MRT3847_129477C.1.pep
HCARITHFRSVRDSTLGIRDGSIDFLLCGLALCALSSCYEFHIYSVHVHTCDLSLTTLFARKHYPRQYHTEDPEHRRVILTANFYRFTSSGLPTHTLFRL

SEQ ID NO: 175481 - protein, 89 aa, Glycine max
  Clone ID: PAT_MRT3847_129478C.1.pep
VVFQDKDKIKLFFTCIKTGNYHMALEMAREWEELAYARDENKDTALHLLALNQNPLDSCCHCSTIKDPIQINPDMKKHVMFQLVNFLWK

SEQ ID NO: 175482 - protein, 119 aa, Glycine max
  Clone ID: PAT_MRT3847_129479C.1.pep
SLTGSSGKLNREVTMRPMGCPPSASFKVEAKKGEWLPGLASPTYLNGTLPGDNGFDPLGLAEDPENLRWYVQAELVNGRWAMLGFIVQHNVTGKGPFENLLQHLSDPWHNTIINTIRGY

SEQ ID NO: 175483 - protein, 108 aa, Glycine max
  Clone ID: PAT_MRT3847_12947C.1.pep
HGLSCTLNTSSFTVDVAAAKDDCDLILRNGLPIINKSIDCQPTREASSGSSLNLSSERLCFCISVFQQIPGTLLVKGSLQDRNSTLSGAFSMIFQKLEEALRDKFCTK

SEQ ID NO: 175484 - protein, 108 aa, Glycine max
  Clone ID: PAT_MRT3847_129480C.1.pep
DFYPNFAEEILTLFYSDSVRLIYNIERALMSNPPNFTKLDGYMLQFKGSCSSIGAKKVKNECTRFSEYCAAENFEGCFRTFQQINVEYTTLKKKLETYFQLVRGSCSN

SEQ ID NO: 175485 - protein, 112 aa, Glycine max
  unsure (1)..(112): unsure at all Xaa locations
  Clone ID: PAT_MRT3847_129481C.1.pep
RRDAFLANEAFKMWPXTNGVILEMVSTGSXLALLRANQAFKARLKRSLEENVAYNTKGAIRRLWVPLGGPFRFGGVGVTMPLAKFGAKRFNQRIAKKASTARALIRILSPGG

SEQ ID NO: 175486 - protein, 252 aa, Glycine max
  Clone ID: PAT_MRT3847_129482C.1.pep
MATVTTQASAAIFRPCTSKSRFLTGSSGKLNREVTMRPMGCPSPASFKVEAKKGEWLPGLASPTYLNGTLPGDNGFDPLGLAEDPENLRWYVQAELVNGRWAMLGVAGMLLPEVFTKFGIINAPQWYDAGKSEYFASSSTLFVIEFILFHYVEIRRWQDIKNPGCVNQDPIFKQYSLPPHECGYPGSVFNPLNFAPTLEAKEKELANGRLAMLAFLGFIVQHNVTGKGPFENLLQHLSDPWHNTIINTIRGY

SEQ ID NO: 175487 - protein, 59 aa, Glycine max
  Clone ID: PAT_MRT3847_129483C.1.pep
RSRAFPCLECRFCPSQIPLDRSLSYVQGCAFLYGLKHESKYGNWISWLRRFINLYALIV

SEQ ID NO: 175488 - protein, 62 aa, Glycine max
  Clone ID: PAT_MRT3847_129484C.1.pep
EVTLLNNERSRNLFSLPIPHQSGPLASLLASLFSLAWQLSHPGHSLDPQHRQQLVYYPIFCL

SEQ ID NO: 175489 - protein, 202 aa, Glycine max
  Clone ID: PAT_MRT3847_129485C.1.pep
MVSATVDSDFAFLESVQQYLLGHDSINLMSETHQAASHDPFSDPNKCDGDSGNIAFRSEDATAVVARDHAPPTWKHYRGVRRRPWGKFAAEIRDPKKNGARVWLGTYDTEEKAALAYDKAAFKMRGQKAKLNFPHLIDSDNSDELSEPVMMTTSKRSLLEISSPSSSCSDDSSESQGTKRRKSLAELLNKLAKNRSQVKVEC

SEQ ID NO: 175490 - protein, 70 aa, Glycine max
  Clone ID: PAT_MRT3847_129486C.1.pep
AFSPRDFVNHSIVSCWGAVQTALQTSVNEVNMPFSDNIPVITMTGEHRKAPHGDTSKERIIMHFGSHPSV

SEQ ID NO: 175491 - protein, 146 aa, Glycine max
  unsure (1)..(146): unsure at all Xaa locations
  Clone ID: PAT_MRT3847_129487C.1.pep
MAMDEYECHEMVHVAVGKSLKKAATLLQWCFTHFSKPQIFLLHVHQPSTMIPTLLGKLPASQASPEVVSAYRIEEKEDTKRLLEKYLSLCRAAKVKASSVIGEADQVQKGIVDLVTVHNVMKLVIGAIPXNCMIIKMNSSRADYAA

SEQ ID NO: 175492 - protein, 96 aa, Glycine max
  unsure (1)..(96): unsure at all Xaa locations
  Clone ID: PAT_MRT3847_129488C.1.pep
MIIDSEYVISHKAYARVVLLENXSDVYYGPTIAISVSNFLATVTLRPFDQIILQPNTLHHLIHFSSLTQLANKLSSQCYYGRMRLLMATCNVFYTY

SEQ ID NO: 175493 - protein, 73 aa, Glycine max
  unsure (1)..(73): unsure at all Xaa locations
  Clone ID: PAT_MRT3847_129489C.1.pep
ISINSGSVAHPNRCATCRQRVXLTGFKCSSGLTFFGARRFPEEHASGFNFKTVAREEIARAIPVIKSQKLRRI

SEQ ID NO: 175494 - protein, 63 aa, Glycine max
  Clone ID: PAT_MRT3847_12948C.1.pep
GRKMSLGASKIAIKYNLYPHPESEFYAETFCDYSIQLSTSQLSLEYNAYRPESTYIYDLVLSS

SEQ ID NO: 175495 - protein, 44 aa, Glycine max
  Clone ID: PAT_MRT3847_129490C.1.pep
VHQILFVKCCITNGRRELFGVGVSIYTFPNNLHFLIFSYHFHNI

SEQ ID NO: 175496 - protein, 55 aa, Glycine max
  Clone ID: PAT_MRT3847_129491C.1.pep
KTNQALETQNDYLWGGGLRFNLGGLERNHTKGYKGNSVEGEHKDQTCFWKKQSYS

SEQ ID NO: 175497 - protein, 98 aa, Glycine max
  Clone ID: PAT_MRT3847_129492C.1.pep
LDNIFLRSLFKWKRFTQLSPPLLPRLFSIFRYHSYVFGRNSKLAIYCLITFTLNLHEFAKPRLKKLSDLILLFLLFSGYLGSSLNVFSEFLILKLNCN

SEQ ID NO: 175498 - protein, 191 aa, Glycine max
  unsure (1)..(191): unsure at all Xaa locations
  Clone ID: PAT_MRT3847_129493C.1.pep
EREREREREREREREREREREREREREREREREREREREREREREREREREREISGSRLLGTIPQSISPQTVWNRMATVRTPLIFDSSQQSFCQFSIDLLGGGILVDKTVYWIALIRDSPISILLRVSAWKIGCLMLKIVMSVNAPIHMSDWASLVLVFLSIGICTAHFDACXWTKSEPHSWELIFPIDVC

SEQ ID NO: 175499 - protein, 140 aa, Glycine max
  Clone ID: PAT_MRT3847_129494C.1.pep
MKFQPHFRQKFFRHSALPNNKRNLSVRSYQSSPNAKKRFASGLVQVKVSRRSSSSSFSISSFSSPRSTDNKQKGFCVDNDVAGPSCSSHQNDKSTNSGKRASVSKKLRGHYFCFSKASVNKEQESYCYKDHDVFVNGLIG

SEQ ID NO: 175500 - protein, 60 aa, Glycine max
  unsure (1)..(60): unsure at all Xaa locations
  Clone ID: PAT_MRT3847_129495C.1.pep
VRQEGGPQGRGDLRDPRGPRRGIDRSLQIPRYRPLFIIAVSPXXXXLSFGIXRLVRSRRD

SEQ ID NO: 175501 - protein, 52 aa, Glycine max
  Clone ID: PAT_MRT3847_129496C.1.pep
KDYFNIKKSRRMLICLILPTLYIGKTLQCYTSPQLHCICSTTLKFVQGDKHV

SEQ ID NO: 175502 - protein, 142 aa, Glycine max
  unsure (1)..(142): unsure at all Xaa locations
  Clone ID: PAT_MRT3847_129497C.1.pep
MHQLCLTPKVLFDMTIGGQSAGRILMRLYADVTPRTCREXYAALGTGEKGVGRSGMPLHYKGSSFHRVSPSFMCQGGDFTAGNGTGGESIYGAQFADENFVKKRTGPGILYLANAGPRTNGSHVLIGPDKTEWLDGKHVLSG

SEQ ID NO: 175503 - protein, 75 aa, Glycine max
  Clone ID: PAT_MRT3847_129498C.1.pep
KHIETSFKGIKVSLPKTKYRMPRYNRRGRVFCARLQTEVIPDTHLLYTAYRDQSSFSLYRNIDTLSRDTRKDVLP

SEQ ID NO: 175504 - protein, 362 aa, Glycine max
  Clone ID: PAT_MRT3847_129499C.1.pep
MSIGTTLSTTPHHSFHSNTPTSFLNTVSPIQFLSFRNHTHNLRVLCFSSNPSQPPPVVVVGSANADIYVEIDRLPREGETLAAKSGQTLAGGKGANQATCSAMLSYPTYFVGQVGNDAYGTLLADALRGGGVRLDNLAVVASAPTGHAVVMLQSNGQNSIIIIGGSNMSGWPSTLPRQHLDLVAQAGIVLLQREIPDAVNVQVAQAARNAGVPVVFDAGGMDGPLPPQLLNFVDILSPNETELARLTGMPTESFEEIAQAALKCHELGVKQVLVKLGEKGSALFVEGEKPIQQPAILAKTVVDTTGAGDTFTAAFAVALVEGKSKKECLRFAAAAACLCVQVKGASPSMPDRKSVLDLLICQ

SEQ ID NO: 175505 - protein, 443 aa, Glycine max
  Clone ID: PAT_MRT3847_12949C.1.pep
VTLSLYIACSNPTIYTINPSLFIHSSIFSSHRLIYSTKNGHFIFCQLSQYCSKQEGDSSNREESVIMKRSSRAGEKKTGGAKVARLLLVNQALATLAFFGVGVNLVLFLTRVLGQDNVNAANNVSKWIGTVYMFSLIGAFLSDSYWGRYLTCTVFQLVFVLGLALSSLSSWRFLINPVGCGDGHTLCKPSSIGDEIFYLSIYLVAFGYGGHQPTLATFGADQYDEKNPKEKSSKVAFFCYFYFALNVGSLFSNTVLVYYEDTGMWTMGFLVSLVSAVIAFLAFLLGTPRYRYVKPCGNPVVRVAQVFTAVFRKWKVSPAKAEELYEVDGPQSAIKGSRKIRHTDDFEFMDKAATIKETARHSPKNPWRLCTVTQVEEAKCVLRMLPVWLCTIIYSFVFTQMASLFVEQGDVMNSYIGSFHLPAADKNLTTIISQSLKRKKNNF

SEQ ID NO: 175506 - protein, 71 aa, Glycine max
  Clone ID: PAT_MRT3847_1294C.1.pep
LRINFNNCVICFLYIVIYLSLAVNFLIISYNYFLGNGKYREKYDFKMFLFKFQIYFFSFSILLMYQRFGKT

SEQ ID NO: 175507 - protein, 90 aa, Glycine max
  Clone ID: PAT_MRT3847_129500C.1.pep
HLRYRSLSSHLPQCLYCEHKRTPLRIGFDQCSMDGPTWLRVRRCIELRARDSVDRCAVLPNQHERRCDSPRLPLPRLGPQGATPCSLRMP

SEQ ID NO: 175508 - protein, 41 aa, Glycine max
  Clone ID: PAT_MRT3847_129501C.1.pep
FAREVYEISFYCHSYLRGWCRLHSVKDLLLFKFLMTCYLAH

SEQ ID NO: 175509 - protein, 214 aa, Glycine max
  Clone ID: PAT_MRT3847_129502C.1.pep
MIINRCFHLGFKLTMVDAFKLCIFLLASICAFLVFSNPVLCSDKEDSVFKGINSYRQTRSLVPLSQVSKATCLADEVAEEIEKMPCENVNQYYPSSVPGSGNLKIPNLQKHINKCDINFNTTTDGVILPVCVSKLEPTIVLSNYTHSDRYAQFLNNSKYTGAGLGSEDDWMVLVLTTNTTTGSFSAAATSVRAYAASVDFLLFVSLFVLINYLD

SEQ ID NO: 175510 - protein, 44 aa, Glycine max
  Clone ID: PAT_MRT3847_129503C.1.pep
SSTTTKALSHYVMMRNDHHLQILRIHVKYYFFFNLLTYLGHIIS

SEQ ID NO: 175511 - protein, 116 aa, Glycine max
  unsure (1)..(116): unsure at all Xaa locations
  Clone ID: PAT_MRT3847_129504C.1.pep
FFVFALYVLLPLESFPAESLEKEFTLTLDHCNFYDTVNKHDFIDVQIYSAWSGHCVKLAPQYERADSILSSRDPSVVFTKKDANEEXNKDFAYEYDERGYPTMNILRNGGTNVQEY

SEQ ID NO: 175512 - protein, 34 aa, Glycine max
  Clone ID: PAT_MRT3847_129505C.1.pep
MMSRQLHFVDILEEYRCLMHAQLCLDLVVWQLYL

SEQ ID NO: 175513 - protein, 72 aa, Glycine max
  unsure (1)..(72): unsure at all Xaa locations
  Clone ID: PAT_MRT3847_129506C.1.pep
SSRAAAWVFSFFFFFNTKRLHYYYYINTTSVKHVHRTIYSATANICVRRKHPGASIKGLFHXVALAIQKANS

SEQ ID NO: 175514 - protein, 28 aa, Glycine max
  Clone ID: PAT_MRT3847_129507C.1.pep
MQDEYFEVDNSAIKHDGFFVNRGKLERM

SEQ ID NO: 175515 - protein, 83 aa, Glycine max
  unsure (1)..(83): unsure at all Xaa locations
  Clone ID: PAT_MRT3847_129508C.1.pep
MAGQACGDDHLLGDIEGDHLARAAIIGQDGSGWAXRTDFPQVKPGEITGIMNDCNEAGSLAPTGLDLGGTKYMGIQGEPGAVI

SEQ ID NO: 175516 - protein, 71 aa, Glycine max
  Clone ID: PAT_MRT3847_129509C.1.pep
GRLGSVSDYCVPHCVCPVVVVRYPQENDNGNGNGTGAGGLVVQVGEPVELPPVPEEEHKVYHNASDEPKDA

SEQ ID NO: 175517 - protein, 573 aa, Glycine max
  Clone ID: PAT_MRT3847_12950C.1.pep
VLALQCHLAFHHCIARCFCVPLVSFRVGKINKEGTRFSPIANRGNLTLVLLPSSDLRLSFIGDDGRTERLFTLTNKSQCSAVVVDEIPTDSSGRSFLVRTPDSRAFYFWCSEKSKLLGIELLGKMKDLLKRKPSIVELSGISKSRLDCFATQLRAFLVGTTGGSSHDSSVCASTSANSMSCSNVASESSHPSSSKFPRSRNIGGQTAKGDTTLYQSILSPRSSSFKEVPPRNLSSHRIAAREKIKRRGDNHQPTVDTLTNDSTHILDLSSTSDHDKASEVTKTLAFSPSFLGSLGKLGGVPSSLGLSGEVPPIVSPIFSPYYCWCPPGISTCPSIAAVTQSPNSSIETLPFPSGASLLANPLSVNLLDPVQPLGTSMDFPPFLPDPLVRMSLPTSQQIPTFTPLMCDPIVHVPVIDVCSSGQGYLVSAGPAMSPSIPPLHPNLVKPLIPESDAVVKGARETLRLLLSGSSQGNQQMMRDTLPAILTNPDENQNNILVAGSRGLYTGTRDINAIANSIAAMGLVSLSGVSKVDSGVYSELCENYGNLEAVKNSNDSGGGAFLDDEGGSSLDSKQ

SEQ ID NO: 175518 - protein, 239 aa, Glycine max
  Clone ID: PAT_MRT3847_129510C.1.pep
MNPQSPVRAELEPPVPTFSPRFALTSSSQRKIAIAVDLSDESAYAVRWAVQNYLRPGDAVILLHVRPTSVLYGADWGSVDLSAAEDADDGGGGDEESRRKLEDDFDNFTSTKASDLAQPLVEAQIPFKIYIVKDHDMKERLCLEVERLGLSTVIMGSCGFGASKRAAKGRLGSVSDYCVHHCVCPVVVVRYPEENDNGKGDGNGAGGLVVQVGEPVELPPVPEEEHEVYHDASDEHRDA

SEQ ID NO: 175519 - protein, 76 aa, Glycine max
  Clone ID: PAT_MRT3847_129511C.1.pep
SNVYFPTNFRNCSRQQGMYQMKKNVLELISIFVGQTIHCKVAVWLVSICMLLYKFVSTLFQYPVTGLNMLPFYFDD

SEQ ID NO: 175520 - protein, 75 aa, Glycine max
  Clone ID: PAT_MRT3847_129512C.1.pep
SFTIYYFINLSQGNFPTIHIHKNSETHYIKFHFFLQNNLHFYLKKHTLSPSFFLETTPVKPSRKFVYKFIPTFVP

SEQ ID NO: 175521 - protein, 90 aa, Glycine max
  Clone ID: PAT_MRT3847_129513C.1.pep
KRQNSFISYVQHSGHHIPKIILPLCIHALKPSFHSHPVKLHTSSPNFKKYFLYPPSTMALAQYKNESWKIFPVYICVICTNFQLLKSPPL

SEQ ID NO: 175522 - protein, 72 aa, Glycine max
  unsure (1)..(72): unsure at all Xaa locations
  Clone ID: PAT_MRT3847_129514C.1.pep
FNIWKPFTLSRASLCLLLLSNACFAISCQXKLIECELNNLNAFETDHRVESXSGLSRTWSSRHPELLCAGVT

SEQ ID NO: 175523 - protein, 47 aa, Glycine max
  unsure (1)..(47): unsure at all Xaa locations
  Clone ID: PAT_MRT3847_129515C.1.pep
RRXFAPSDGEXYINVXKGKIIPRLXDXXXSHLAXXGXRQPGXXXSQG

SEQ ID NO: 175524 - protein, 271 aa, Glycine max
  Clone ID: PAT_MRT3847_129516C.1.pep
MTVWENEQRSNYRKNEERDFRTSTRGEVSSRSSENQISSSSVMKAKFPESSGNIKKSDDISARKLDGVASDMLEIPLKPSAPKDATLIQKIEGLNAKARDNSSARIREEQRNKIHASNAPINHVENAVGADVVFPARTHATEIINPAHHEMGAAGAEKNSESLSFSGTATSRQAAHGMHGRGIHRNKGRSNNQDADGWRKKSVVEDSSASSGAQLEASNVLVGEHKIPVQTYNRSGSFNKARHIGESVQTRSDPLTARPACQNERVSQATD

SEQ ID NO: 175525 - protein, 46 aa, Glycine max
  Clone ID: PAT_MRT3847_129517C.1.pep
EHIKLICFRCHLQSLTCLVLQRSQHTQNTNANYSNSFHFPLIGYGS

SEQ ID NO: 175526 - protein, 200 aa, Glycine max
  unsure (1)..(200): unsure at all Xaa locations
  Clone ID: PAT_MRT3847_129518C.1.pep
HEEFWKNLGLMTIIDLSDNHLTGGIPQSITKLVALIGLNLSGNNLTGFIPNDIGHMKMLETFDLSRNHLHGRMPKSFSNLSFLSYMNLSFNNLSGKITVSTQLQSFTAASYAGNIGLCGPPLTNLCSEDVVPPYGIIDKSDSNEDEHELVDIGFYISLGLGFSAGXCGVCGTLIIKSSWRHAYFQFFNHINDWIYVTIII

SEQ ID NO: 175527 - protein, 161 aa, Glycine max
  unsure (1)..(161): unsure at all Xaa locations
  Clone ID: PAT_MRT3847_129519C.1.pep
LFKATKRPYYLDYIDKNIYNLKNFAEFGWDSKDAGINVLVSKLLINSSSNSKPFILNNADKFVCSVLPESPSVSVSYSPARLLWGGGGSNLQHATXISFLFLGYAGYLKKTNKEIDCGGKSFASPRRFKQIARGQVDFLLGSNPGIMPYWEGYGAKLSEKI

SEQ ID NO: 175528 - protein, 257 aa, Glycine max
  Clone ID: PAT_MRT3847_12951C.1.pep
MSPVFSPYYCWCPPGVSTCPSIAAVTQFPNSSIETLPFPSGASLLPNPLSANLLDPVHPLSTSMDFPPFFPDPLVRMSLPSQQIPTFTPLMCDPIVHVPVIDVCSSGQGYLVSAGPAMSPSIPPLHPNLVKPLIPESDAVVKGARETLRLLLSGSSQGNQQMMRDTLPAILTNPDEKQNNILVAGSRGLYTGTRDINAIANSIAAMGLVSLSGVARARAESARELCENYGNLEAVKNSNDSGGAILDDEGGSFDSKQ

SEQ ID NO: 175529 - protein, 46 aa, Glycine max
  Clone ID: PAT_MRT3847_129520C.1.pep
WIYHGMQLDGLTTTDSRFGAAKKAFGTFFSESRSGAHASSAGFRDL

SEQ ID NO: 175530 - protein, 66 aa, Glycine max
  Clone ID: PAT_MRT3847_129521C.1.pep
DFKTLFFFVGHLIFGFLGYQLGGPPWVVVYLSRGAFPQICGWSEKRGYFICLGGGYFWYFSLFWSP

SEQ ID NO: 175531 - protein, 86 aa, Glycine max
  Clone ID: PAT_MRT3847_129522C.1.pep
KILEFRPQLFELKHLKALSLFKCFESQHRHQATIPNANWEKLAGSLESLEFRSNRGLIGKIPSSFGALKNLQSLVLLENGLTGKIH

SEQ ID NO: 175532 - protein, 36 aa, Glycine max
  Clone ID: PAT_MRT3847_129523C.1.pep
IVASKCSHSVESKTHICKLYMASPLFPLSQKYVVLY

SEQ ID NO: 175533 - protein, 50 aa, Glycine max
  Clone ID: PAT_MRT3847_129524C.1.pep
LRNNRPVSPGVSCILKLSQPRNLIFATLSNVHNQCRGFPITSFNKQRNFI

SEQ ID NO: 175534 - protein, 205 aa, Glycine max
  unsure (1)..(205): unsure at all Xaa locations
  Clone ID: PAT_MRT3847_129525C.1.pep
MVNCQTCQLPLKLSWLMKTSGHCIEDMICDLGQDSFQQTHAPLYEKIENDSKKPLYSGCTTFTRLSSVLALVNLKARFGWSDKSFTEFLVLLKKMLPEDNTLPKNHYEVKXFLCPVGMEYXKIHACPNDSILYRNEFVEKCNCPTCGVLGYKVNDGECSVDVIANNSRLAKVCWYVPIIPKFKQLFINGHVAKNLTWHADASGRV

SEQ ID NO: 175535 - protein, 60 aa, Glycine max
  Clone ID: PAT_MRT3847_129526C.1.pep
NRIGSKIRKERRRRRSGDSSRSDDDAESRDLSSQERRRRDGHLGHHRLWRGRSRQDSDSS

SEQ ID NO: 175536 - protein, 141 aa, Glycine max
  Clone ID: PAT_MRT3847_129527C.1.pep
NSARGRTEGLDPVYAQAVQMKERDPVTGKMRIVNPQSSRLVWETYLTEFKSLGKVAVRLIFLHATSCGFKCNWSLWRWVCAQGHHSRTALNKVQKLIFIAAHSKLERRDFSSDQDKDAELFTLANGEDDVLNDVLVDTSSV

SEQ ID NO: 175537 - protein, 186 aa, Glycine max
  Clone ID: PAT_MRT3847_129528C.1.pep
MGVVSEGNGDVLPWLKSMPVAPEYRPSAAEFQDPISYIFKIEKEASKYGICKIIPPFPPSSRKTAIANLNRSLAEAGSTFTTRQQQIGFCPRRPRPVQRPVWQSGDRYTFTEFESKAKSFEKTYLKRHSKKGSGSGSGLGPLETETLFWKATLDKPFSVEYANDMPGSAFSPKCRRTGDPSSLADT

SEQ ID NO: 175538 - protein, 58 aa, Glycine max
  Clone ID: PAT_MRT3847_129529C.1.pep
FGIKRVTEKSHSHTSDKAQYVRFRAITYIPSSADVNTVISSQAFVFGHAPMQCEKSAA

SEQ ID NO: 175539 - protein, 205 aa, Glycine max
  unsure (1)..(205): unsure at all Xaa locations
  Clone ID: PAT_MRT3847_12952C.1.pep
MANWRERDLFHIDEIDPVDASNGEDFDDSSSVDSATSDGSRTQVGLTERLTDILVDERDGDLLIQQTNREDRLLWWLQALDMQVMGACRADERLKPLLKMNASCGVAEDPLLAQLTQHFEPSEVGILARCFCVPLVSFRVGKINKEGTRFCPTSNRGNLTLVLLPSSDLRLSFIXDDGRTERLFTLTNKSQCSAVVVDEIPLIVL

SEQ ID NO: 175540 - protein, 279 aa, Glycine max
  Clone ID: PAT_MRT3847_129530C.1.pep
MWLTAKPIRQLCFPLPISVPNKFCNCSLSITATTNTNTNAEITTTLTQTPKPKPNPKSTLKKRKRYRKLYPGETTGITEEMRFVAMRLRTNDTVSQQEHQSHSDAWQASMEGFLSYLVDSHLIFATLQRIVDESDNVSYAYMRKTGLERSEGLLKDLKWLEEEGNMIPTPGSPGLTYAKYLEELAEISAPLFLSHFYNIYFSHIAAGQVIGKKVSEELLEGKELEFYKWEGDVPDLLKDVRDKLNMLSEHWSRDEKNRCLKETTKAFRYMGQIVRLIVS

SEQ ID NO: 175541 - protein, 67 aa, Glycine max
  unsure (1)..(67): unsure at all Xaa locations
  Clone ID: PAT_MRT3847_129531C.1.pep
VPHFASXLWXHTIFLLTSXQYKRXXVSVXSPPYXXXLPAGXFXVSFNLALNXLLQTLXNCKXLDYXX

SEQ ID NO: 175542 - protein, 59 aa, Glycine max
  Clone ID: PAT_MRT3847_129532C.1.pep
ACAPGGDCQGSNLGWHSIRSGALTYTRISSELELRMDLIPWMRLSLYRLPHLSSISRWV

SEQ ID NO: 175543 - protein, 50 aa, Glycine max
  Clone ID: PAT_MRT3847_129533C.1.pep
CLRFLMGTKITLCSGHKLHDSSSHTLGGELSFTLLYYLKPTVRFKLHLRV

SEQ ID NO: 175544 - protein, 115 aa, Glycine max
  Clone ID: PAT_MRT3847_129534C.1.pep
MKRMHVQLCMDPLHKLLVSHYQPAHASPDFMHVLHSPNSLGSSGFCTHTDDIRKFFSFHFVFSKKYVCVRSKRVLFCYRITSEPLLYINSCFSVQIILCNRSLNDEKNICTASDV

SEQ ID NO: 175545 - protein, 180 aa, Glycine max
  Clone ID: PAT_MRT3847_129535C.1.pep
MSHETCPSVKNFLLLDSDGKRVAVKYFSEDWATNSAKENFEKVVFNKTQKTNARTEAEIAMFENNIVVYKFVQDLHFFVTGGDYENELILATVLQAFFDSVGLLLRLGNVDKKEALENLDLILLCIDEIVDGGIILETDPNVIAGKVASNSIDSGAPLSEQTLSQALATAREHLARSLLK

SEQ ID NO: 175546 - protein, 196 aa, Glycine max
  unsure (1)..(196): unsure at all Xaa locations
  Clone ID: PAT_MRT3847_129536C.1.pep
RSLGKILPKKIVNMSSPLIHEIKGQAFRFLKEKIKTARLALTDVTPVQLMTEEATNENPWPPDTRSTSIIARAAFEVDEYERIIEILHHRLLKFDKGYWRASYKALILLEHLLTHGPKRVSEEFQCDIDVIEEIGQFQFIDEKGFNWGLRVXKLSERILKLLRNKDFFTEERARARNLSHAIKGFGSFNQRSSAID

SEQ ID NO: 175547 - protein, 70 aa, Glycine max
  Clone ID: PAT_MRT3847_129537C.1.pep
SRRKSSEGNLVFAKKKKKKKKKKKKKNPKKKKKKKKKKKKKKKRGRPLKREPFFCPHACKRIFSFLGPLY

SEQ ID NO: 175548 - protein, 86 aa, Glycine max
  Clone ID: PAT_MRT3847_129538C.1.pep
KDKKDQEEGEKQDSKVEVSARDIDIPEINKEGEKEDPGKDGGKEPKRQKKKEDKDQKEKKKKVTGKDKTKDPSPLKPKLAKINGKI

SEQ ID NO: 175549 - protein, 165 aa, Glycine max
  Clone ID: PAT_MRT3847_129539C.1.pep
MGLGGENGKVVESWDVCKSKGGRKKKKKGDAEEVEEGAEAEAGCWVRLRFIGSCISSRSKVDTSVSASGISTHYAESKSTNDTSRDQPTAPAVSSTTTSNAESNSSTSKLEEELKIASRLRKFSFNDLKSATRNFRPESFLGERGFGCVFKAWIEENGTAPVKPG

SEQ ID NO: 175550 - protein, 230 aa, Glycine max
  unsure (1)..(230): unsure at all Xaa locations
  Clone ID: PAT_MRT3847_12953C.1.pep
MSTDLSVILPRVLIVSRRSVRKNKFVDFVGEYHLDLIVGYGAVPVIVPRVSGVHMLLDSFEPIHGVLLCEGEDIDPSCYEQDTAGLSEEEVEEIRRLHASDTAIDKEKDSIELSLAKLCLERNIPYLGICRGSQILNVACGGTLYQDIGKELSIKCPEGQRAMHINYDDYDGHRHDVEVVENTPLHHWFKDSLEEXKMDICVNSSHHIKVKRLAHRFVPMAFAPDGLIEG

SEQ ID NO: 175551 - protein, 45 aa, Glycine max
  Clone ID: PAT_MRT3847_129540C.1.pep
PRVIIIIFQGIVLIEIVNPVCVVYRIHLWSMKKLIFIMVKIRMYG

SEQ ID NO: 175552 - protein, 90 aa, Glycine max
  unsure (1)..(90): unsure at all Xaa locations
  Clone ID: PAT_MRT3847_129541C.1.pep
TGFVTKQGREIVLGSFSNFLCDLTPAADVTITGPVRKEMLIPKDSNAPIIIFRTLTWISPFRSFLXKIFFLKHQDYNFNGLAXLFLDVPT

SEQ ID NO: 175553 - protein, 88 aa, Glycine max
  Clone ID: PAT_MRT3847_129542C.1.pep
QREQYGGTVYLFIGTDISPDKITFMPFAFGSNSIVIHRGLNSLCIFKSVAGALPRRSCPVHIFGDVSTFVLLWSSRTVISTRLRRYLF

SEQ ID NO: 175554 - protein, 88 aa, Glycine max
  Clone ID: PAT_MRT3847_129543C.1.pep
QSPPRRQSGEAPGRGRTQIDPEQKRAPKTTTPGKSQQHTTTDGRRPNNGTPAATQTEGPAKAARAAKRPRDKNTAPQEKKAQDNKRST

SEQ ID NO: 175555 - protein, 251 aa, Glycine max
  Clone ID: PAT_MRT3847_129544C.1.pep
MPSGAKKRKAAKKKKEKETEINTNHPSTTNPQGNDEVKSQDEKGSDGGSPTHGEHDLAFNEEEEERDPSAAQPSHAAAASKDFEEVPGDANRIDETEGGKEGIVVIEWDMKSEGSESKDVSVGHVESAKESDNGNANGNSSSSSSSSSSSDEIGTLKNSKDESHNSVNETVAFDELVKSMDSLHAKMAEVSASVSQSPIPESIIGAEHVKDSDTPECSDNQPPLASVPPVVRKTSWLSCCGLFDVLSGSNR

SEQ ID NO: 175556 - protein, 45 aa, Glycine max
  Clone ID: PAT_MRT3847_129545C.1.pep
LEVKDSDTPECSDNQPPLASVPPVVRKTSWLSCCGLFDVLSGSNR

SEQ ID NO: 175557 - protein, 51 aa, Glycine max
  Clone ID: PAT_MRT3847_129546C.1.pep
TVYCSASFYQVASCQKKNSYYYGIMHQYADEAYIIAVLEKTGVIDYAQPEG

SEQ ID NO: 175558 - protein, 122 aa, Glycine max
  Clone ID: PAT_MRT3847_129547C.1.pep
TTTTHSVSVSSFLNQPLSTFLTLTSTSSSSSVFHKHDHSLLSVSDPNTLQDQRHTRVIKNRESAVRSRARKQAYRKGLEVEISRLTEENSRLKRQLKELQRCLCSSHTPRMAAPCRTSSSPF

SEQ ID NO: 175559 - protein, 57 aa, Glycine max
  Clone ID: PAT_MRT3847_129548C.1.pep
IFRFQYSQNKHIMILLLFKNINIYFSKYDLFSVFYLFITLDGRKFTTLTYKCFLLGC

SEQ ID NO: 175560 - protein, 136 aa, Glycine max
  Clone ID: PAT_MRT3847_129549C.1.pep
NSARGLATCTLISLFSMWNLTRIEVLLCNILSPEAPQLSLASYNWFKVFIAMLVGNFLYPISTIHSHFTQSINWSGIIYHLKDGKINKIHRIPRRQDVAPVFTDLGGKHLYGKKGMPTKGSFLSSLSKHLFQWHQP

SEQ ID NO: 175561 - protein, 56 aa, Glycine max
  Clone ID: PAT_MRT3847_12954C.1.pep
LSGEWGYEMGRAPAFDVYSIYGLNWSCYFPHACGMLYFVKPFYLSHLLVIDNLSFS

SEQ ID NO: 175562 - protein, 86 aa, Glycine max
  Clone ID: PAT_MRT3847_129550C.1.pep
GVEHIYALLAVVSSGQHIHSLNFVYLLLAFSSLQCFLALHSASGLAFYVNCEPSSEILKKWHIYQVLEIQIVKSKTCKWFSFLCKL

SEQ ID NO: 175563 - protein, 41 aa, Glycine max
  Clone ID: PAT_MRT3847_129551C.1.pep
RGTPIHWDPMKEKNLILAYKGNRFRPNRDINLNPKLGTQGF

SEQ ID NO: 175564 - protein, 92 aa, Glycine max
  unsure (1)..(92): unsure at all Xaa locations
  Clone ID: PAT_MRT3847_129552C.1.pep
KKKKYYKPISIWPNKGMFATHFRDFGLLKTHWSTGNLGGGNKNFCCNCGGSNNGNNKSPGCWIKEAPGWIENCSELQLVGGAAAASSXTFEI

SEQ ID NO: 175565 - protein, 45 aa, Glycine max
  Clone ID: PAT_MRT3847_129553C.1.pep
DLHEQRMAHQGLSISSARNQLVAIIWTIIQRCHASSDDPDLPGWR

SEQ ID NO: 175566 - protein, 73 aa, Glycine max
  Clone ID: PAT_MRT3847_129554C.1.pep
PGILSMANAGPHTNGSQFFICTAKTPWLDGKHVVFGKVVDGYSVVEEMEKVGSGSGRTSEPVVIEDCGQIVEK

SEQ ID NO: 175567 - protein, 65 aa, Glycine max
  Clone ID: PAT_MRT3847_129555C.1.pep
GQDYRGTNSRFCLQGPARLVPSGKAQQEWRGSMQEITTNRGAVSKRTQPTPEQIFKRIRTSLVAS

SEQ ID NO: 175568 - protein, 54 aa, Glycine max
  Clone ID: PAT_MRT3847_129556C.1.pep
LLHTTQNFSAKIHRNCSEVLQNVNIIYLPGVITSVTKGLSNLQVKSLKLIEAIC

SEQ ID NO: 175569 - protein, 123 aa, Glycine max
  unsure (1)..(123): unsure at all Xaa locations
  Clone ID: PAT_MRT3847_129557C.1.pep
LATRTDWGASDDANAGNDKQIVGFHVAGSKGRLGYATLIPYVEPVVQAQSAEVYFDFSTAEGDSEEGEDHIGEXEYGAYAALATTSNYTATPKEXYLDLPGDRITREYTTTSERLVGTEHEGY

SEQ ID NO: 175570 - protein, 105 aa, Glycine max
  unsure (1)..(105): unsure at all Xaa locations
  Clone ID: PAT_MRT3847_129558C.1.pep
LGLVVGKKDFRPDFWSALEELSPQSGPMMHNSSQVDLDYMXEKKFCKEQDLVFVCAHSEEGPSVXYTPPKWGHYVRYLTASLSVSFWWRQGESSDASQRYRFISS

SEQ ID NO: 175571 - protein, 156 aa, Glycine max
  Clone ID: PAT_MRT3847_129559C.1.pep
GRVGGRVGGRVGGLVLDSGDGVTHTVPIYEGYALPHAILRLDLAGRDLTDYLMKILTERGYSFVTTAEREIVRDIKEKLCYVALDFEQEMATAASSSSLEKSYELPDGQVITVGNERFRCPEALFQPSFIGMESAGIHEFTYNSIMKCDIDIRMDL

SEQ ID NO: 175572 - protein, 477 aa, Glycine max
  Clone ID: PAT_MRT3847_12955C.1.pep
MAQLLSSSCSLTVCSRNKPYLKPFDKCSTPFSMKVACNNSKSPFRRLFLQEQKPRKDSLVVHAAAVSTSQGTPVQTSSSDPFKQQRVMVIGGDGYCGWATALHLSNKGYEVAIVDSLVRRLFDHQLGLDSLTPISSIQNRLQCWKSLTGKTIELYIGDICDFEFLSETFKSFEPDAVVHFGEQRSAPYSMIDRSRAVYTQQNNVIGTLNVLFAIKEFREQCHLVKLGTMGEYGTPNIDIEEGYITITHNGRTDTLPYPKQASSFYHLSKVHDSHNIAFTCKAWGIRATDLNQGVVYGVRTDETAMHEELYNRFDYDGIFGTALNRFCVQAAVGHPLTVYGKGGQTRGFLDIRDTVQCVELAIANPAKPGEFRVFNQFTEQFSVNQLANLVTKAGEKLGIEVKTINVPNPRVEAEEHYYNCKNTKLVDLGLRPHFLSDSLLDSLLNFAVQYKDRVDTKQIMPSVSWKKIGVKTKTVTA

SEQ ID NO: 175573 - protein, 98 aa, Glycine max
  Clone ID: PAT_MRT3847_129560C.1.pep
FWKRKIFQHANRFSLVFARIQKPPYKGKFAPPKAPAPNYFRGWEVPKWGAPPIFYFFFFLFFIFVYFFFFFFFFFLFLFYFHSFFLFIYFFFILFFFF

SEQ ID NO: 175574 - protein, 106 aa, Glycine max
  unsure (1)..(106): unsure at all Xaa locations
  Clone ID: PAT_MRT3847_129561C.1.pep
PNVYEDKRVVSFLGHKXTLGAPGVKRPQHLGVFXSGPGIKAPPINKAKEALVNPPKKGWPGKIFSWKEISXIYGAPKMGPTFXAKIXSGQKTPPLVFKKLGPPKPL

SEQ ID NO: 175575 - protein, 113 aa, Glycine max
  unsure (1)..(113): unsure at all Xaa locations
  Clone ID: PAT_MRT3847_129562C.1.pep
HAYAHASIWITVYCPISSARHLSVYSEHGLHTYYVTLTTYIALXXIDIFNPTIVYHHLGEIYTALILGRSLLXIFSYIKDHTTPPSTNSRSSGHLIINLYCEIELYPHHCKTF

SEQ ID NO: 175576 - protein, 29 aa, Glycine max
  Clone ID: PAT_MRT3847_129563C.1.pep
PCLFQVNAKKRSGMLRYFQSFKEVLLKVC

SEQ ID NO: 175577 - protein, 49 aa, Glycine max
  Clone ID: PAT_MRT3847_129564C.1.pep
CGGVCYIACQIEMEIWRSCLSCLGVNFPRSFGLPVNNFLSPGSYILELV

SEQ ID NO: 175578 - protein, 156 aa, Glycine max
  Clone ID: PAT_MRT3847_129565C.1.pep
MNPKILFVFALLLNLVSNSFQNPNPKTPKSTPSQAHVELVNYGLPVGLLPATTVSGYAVNRTSGEFTVKLSGACKITLPPDNYVATYSDTITGKIVKGKIAELEGIRVRAFFKWWSITGIRSSGDDIVFEVGMVTAKYPSKNFDDSPACEGQHSSS

SEQ ID NO: 175579 - protein, 439 aa, Glycine max
  Clone ID: PAT_MRT3847_129566C.1.pep
MALQNIGAANSDDAFYRYKMPRMITKIEGRGNGIKTNVVNMVDIAKALARPASYTTKYFGCELGAQSKFDEKTGTSHVNGAHDTAKLAGLLENFIKKYVQCYGCGNPETEIIITKNQMIQLKCAACGFVSDVDMRDKLTTFIIKNPPEVKKGSKDKKAMRRAEKERLKEGELADEEQKKVKKEVKKKGSSSSKDGTKSTSSKKKASGSDEDRTSPTHSQIDEKEEALDEDDDDDVQWQTDTSLDAARQRIQEQLSAVTADMVMLSTDEPEKKKEASNGNDGSQNGNSMHCRTLVGEVKANLKKGVGANELLSQLAAHPVPAQEKMSALVEALFEGTEKGFAKEADKKKNYFSVAVADEGSQPLLLHAIEEFSCKSTSNALKEVALVLKALYDADVLEEEHIVQWYQKGLKGDNKNSRIWKNAQPFIDWLQNAESETEEE

SEQ ID NO: 175580 - protein, 441 aa, Glycine max
  Clone ID: PAT_MRT3847_129567C.1.pep
MALQNIGAANSDDAFYRYKMPKMITKIEGRGNGIKTNVVNMVDIAKALARPASYTTKYFGCELGAQSKFDEKTGTSHVNGAHDTTKLAGLLENFIKKYVQCYGCGNPETEIIITKNQMIQLKCAACGFMSDVDMRDKLTTFIIKNPPEVKKGSKDKKAMRRAEKERQKEGELADEEQKKVKKEVKKKGSSSSKDGTAKSTSSKKKASGSDEDRTSPTHSQIDEKEEAPDEDDDDDVQWLTDTSLDAARQRIQEQLSAVTADMVMLSTDEPEKKKKTVSNGNGGSHNGNSMHYGTLVGEVKANLKKGVGANELLSHLAALPAPAQEKMSALVEALFDGIDKGFAKEADKKKNYFAAAVAEEGSQLLLLHAIEEFSCKSTSNALKEVALVLKAFYDADVLEEEHIVQWYQKGLKGDNKNSKIWKNAQPFIDWLQSAESETEEE

SEQ ID NO: 175581 - protein, 42 aa, Glycine max
  Clone ID: PAT_MRT3847_129568C.1.pep
PIDPLIRLIVLILIDLHYCQINPILRVEHIIQHSYSILTHFT

SEQ ID NO: 175582 - protein, 443 aa, Glycine max
  unsure (1)..(443): unsure at all Xaa locations
  Clone ID: PAT_MRT3847_129569C.1.pep
MALQNIGAANSDDAFYRYKMPRMITKIEGRGNGIKTNGGNMXVDIAKALARPASYTTKYFGCELGAQSKFDEKTGTSHVNGAHDTVKLAGLLENFIKKYVQCYGCGNPETEIIITKNQMIQLKCAACGFVSDVDMRDKLTTFIIKNPPEVKKGSKDKKAMRRAEKERLKEGEMADEEQKKVKKEVKKKGSSSSKDGTAKSTSSKKKASGSDEDRTSPTHSQIDEKEEAPDEDDGDDDVQWLTDTSLDAARQRIQEQLSAVTADMVMLSTDEPEKKKKAASNGNGGSQNGNSMHYGTLVGEVKANLKKGIGANELLSHLSAHPAPAQEKMSALVEALFEGTEKGFAKEADKKKNYFAAAVAEEGSQLLLLHAIEEFSCKSTSNALKEVALVLKALYDADVLEEEHIVQWYQKGLKGDNKNSKILKNAQPFIDWLQSAESETEEE

SEQ ID NO: 175583 - protein, 61 aa, Glycine max
  Clone ID: PAT_MRT3847_12956C.1.pep
KFRSCFKDPTAPLNVRFWFCKDQTKKPDHHYKHHFFQMCSFSGSNHIFSLHIHFLSPPLFF

SEQ ID NO: 175584 - protein, 112 aa, Glycine max
  unsure (1)..(112): unsure at all Xaa locations
  Clone ID: PAT_MRT3847_129570C.1.pep
SPISGAGVPPPPXSNGRPHSQGGSPPPLPYSFMQGPLQSXSTPPPPVSVMPPRFFLCLPPPPFPCNLRLPLCIWCDPPPGYGLSPHVSLPMIFSCHKGQRKPPFGPNLASFL

SEQ ID NO: 175585 - protein, 56 aa, Glycine max
  Clone ID: PAT_MRT3847_129571C.1.pep
GRVGESVGERVGGRVGERVGERLGFIASTQESDKRPPKSPTKSPPKSQTTRPRKNG

SEQ ID NO: 175586 - protein, 105 aa, Glycine max
  unsure (1)..(105): unsure at all Xaa locations
  Clone ID: PAT_MRT3847_129572C.1.pep
IPILGYTGQHSITPTTTARGPRATLWHLWLGRRTLRLLVTMHVIRIGSXYTAHPITTTAHKPTLHATHGIPNRRLYSVQVATIIVLPNGNHGWAHQQASAAGADG

SEQ ID NO: 175587 - protein, 76 aa, Glycine max
  Clone ID: PAT_MRT3847_129573C.1.pep
ASARPQHPCSPVYSVAAYSTCWASPVRQMFIMRRTILGTATNALFGSSFRESPFPALFAELMSHHYVRVLYHECQP

SEQ ID NO: 175588 - protein, 49 aa, Glycine max
  Clone ID: PAT_MRT3847_129574C.1.pep
IKRFHTATCSPPFFFLDIVVSMFTSETRLKFVSKYLYHSHQHIYDKFTH

SEQ ID NO: 175589 - protein, 55 aa, Glycine max
  Clone ID: PAT_MRT3847_129575C.1.pep
AARRRQKGFLVHDRLYCKVNQKTYSYKLKRAYFLNFTKLVKISLKITNKSLHKQR

SEQ ID NO: 175590 - protein, 67 aa, Glycine max
  Clone ID: PAT_MRT3847_129576C.1.pep
NKSRCISLKITNQLKNNVRQSTTLATEFQFIQNISPGIIKVLKAQCYLIQLPGKVKDTKPPKRIQIT

SEQ ID NO: 175591 - protein, 46 aa, Glycine max
  Clone ID: PAT_MRT3847_129577C.1.pep
CVHLPLPYLFPTWHPLHFCVHSFWVLKASFTQSARKIPQLNGSRPT

SEQ ID NO: 175592 - protein, 62 aa, Glycine max
  Clone ID: PAT_MRT3847_129578C.1.pep
YYSILHTPCMVRYVKHEFKVSSDVVMNYYLFAGTIFSSCITSPIFIFNERNYAPLRTKKGKP

SEQ ID NO: 175593 - protein, 176 aa, Glycine max
  unsure (1)..(176): unsure at all Xaa locations
  Clone ID: PAT_MRT3847_129579C.1.pep
MRRLLGKISGFLSNRTMVGVDKTGNKYFTRNEEVDGIVKEKRWVIFKGEEDPTSIPVEWICWLNGQRKKAPTPEEMMELEARRERVRQNVALLKKEEEERITKEGSKGKRVSTGKVSGPDLKSFIQQFPVSSEGXCVEEPPSASGGLRSPQKXESESSEPTGSGASFRPGTWQPPT

SEQ ID NO: 175594 - protein, 36 aa, Glycine max
  Clone ID: PAT_MRT3847_12957C.1.pep
KTQDTLHAFRLQESIPFIWGSSPSPYFKTLKRYLGL

SEQ ID NO: 175595 - protein, 43 aa, Glycine max
  unsure (1)..(43): unsure at all Xaa locations
  Clone ID: PAT_MRT3847_129580C.1.pep
FTCAHAXVLLPYHWLTLEXSFNNNKKRLCDKMKCVHRHYYCCP

SEQ ID NO: 175596 - protein, 115 aa, Glycine max
  Clone ID: PAT_MRT3847_129581C.1.pep
PVWPLSWASFSKEQGIYAPPYKTTCFGVSVIKGRPLFNGGLNHPFVFYGLSGVFCGIKGVSAVVTIILGQSINYGDLGLGSSRGGQSQRREGVLSPVYALPRQPSSLFFGGDPFI

SEQ ID NO: 175597 - protein, 83 aa, Glycine max
  Clone ID: PAT_MRT3847_129582C.1.pep
GFHYVPPHMVHMHTYTTMVIKHQLMFNRRFSTSCSCTGRLVLQPMIEAHPPLFSYQRHVFLVFLTIRQLAQGNHQRGRVQDIG

SEQ ID NO: 175598 - protein, 52 aa, Glycine max
  Clone ID: PAT_MRT3847_129583C.1.pep
NRRFSIIGNKRTSTHVTLKWKIPFAVLIWKRYERYFTCPFIRNKSINLLIIN

SEQ ID NO: 175599 - protein, 69 aa, Glycine max
  unsure (1)..(69): unsure at all Xaa locations
  Clone ID: PAT_MRT3847_129584C.1.pep
NMRVDEFIGSIEKYKIGVXDRDEKKRKNMEXVXNDEGEEGEYEVDNDEGMANERESAAEGVEVSDVKNE

SEQ ID NO: 175600 - protein, 59 aa, Glycine max
  Clone ID: PAT_MRT3847_129585C.1.pep
TNLLRIKWSCPALQQVQVFWTFYGCVKLQEKSFFFFFLKFGNWSLLYKVRLILIMNLCL

SEQ ID NO: 175601 - protein, 91 aa, Glycine max
  Clone ID: PAT_MRT3847_129586C.1.pep
MPSSVSWGILLLAGLCCLVPVSLAEDPQGDAAQKTDTSHHDQDHPTFNKITPNLAEFAFSLYRQLAHQSNSTNIFFSPVSIATAFAMLSLG

SEQ ID NO: 175602 - protein, 211 aa, Glycine max
  unsure (1)..(211): unsure at all Xaa locations
  Clone ID: PAT_MRT3847_129587C.1.pep
KRIMEWLDXXXVXSVVXXCFGSMGSLXXXQVEEIATGLEMANVRFLWALREPPKAQLEDPRDYTNPKDVLPDGFLERTAEMGLVCGWVPQAVVLAHKAVGGFVSHCGWNSILESLWHGVPIATWPVYAEQQMNAFQMVRELGLAVEIRVDYRVGGDLVRAEEVLNGVRSLMKGADEIQKKVKEMSDICRSALMENRSSYNNLVFLIQQLTS

SEQ ID NO: 175603 - protein, 56 aa, Glycine max
  Clone ID: PAT_MRT3847_129588C.1.pep
VYRYSIGTCMEIKVATCTCVEQDACIFLKCEYGNRYYKTLPLPSLALLHAFLTIIL

SEQ ID NO: 175604 - protein, 178 aa, Glycine max
  unsure (1)..(178): unsure at all Xaa locations
  Clone ID: PAT_MRT3847_129589C.1.pep
NMKLFVFFVAAVVLVAWPCHGASYQRFPLRMKTGYGERSSEVKYTSFKLAIKAHNILSFKTIPKNYVEPTNNYINNQQFISDSKTLNQQSFFYTTKLXVHHNNIFIFYIYNTILSNIPYYQKHLYQIKXCNKTLYDQXVNINDSPAYAYTLTNYYNLFSLNFNIIFLSTIYLDAISVT

SEQ ID NO: 175605 - protein, 49 aa, Glycine max
  Clone ID: PAT_MRT3847_12958C.1.pep
PNLFPFRTQVILLQAESLDTGKTHTCATLNLTGSGPEPASLKACIFVSS

SEQ ID NO: 175606 - protein, 96 aa, Glycine max
  Clone ID: PAT_MRT3847_129590C.1.pep
AMYSLAQSKVNNRMWGSMKGGGNNDDNDDGLRTLNISQCTALTPSAVQAVCDSCPSLHTCSGRHSLIMSGCLNLTSVHCACAGQAHRAFTLPHAAH

SEQ ID NO: 175607 - protein, 56 aa, Glycine max
  Clone ID: PAT_MRT3847_129591C.1.pep
SEDKVPLLGCRLRRNNASIPVPLYIHLPCTTHLKLASAARDPQIYSPKRLRRLHRP

SEQ ID NO: 175608 - protein, 170 aa, Glycine max
  Clone ID: PAT_MRT3847_129592C.1.pep
MAKKAVLIGINYPGTKAELKGCINDVWRMHRCLIDRYGFSEDDITVLIDTDESYTEPTGKNIRSALTRLIRSARPGDVLFVHYSGHGTRLPAETGEDDDTGFDECIVPSDMNLITDDDFREFVDGVPRECKLTIVSDSCHSGGLIDGAKEQIGTSTKGEGQQHSGSGSGF

SEQ ID NO: 175609 - protein, 142 aa, Glycine max
  unsure (1)..(142): unsure at all Xaa locations
  Clone ID: PAT_MRT3847_129593C.1.pep
SAXPXGEHXXKSXPQNTVXYTLYTXIKRDLLAVXGITCLCGXHSEEXAPLYIYAXXHSVTPRHVSFSYARGLQSTVCITHHEHPEKVXNVLKCPLGRVIAKSLGHIVKYSVESEREKSKKRKCVKGYTYYNSWSVWRSQVFS

SEQ ID NO: 175610 - protein, 216 aa, Glycine max
  unsure (1)..(216): unsure at all Xaa locations
  Clone ID: PAT_MRT3847_129594C.1.pep
NPKLNPTQKQNPLLLPLASAPDSSPSMDALNFLKFWRNATMSTTSEPHLVVETDTESDEDDSFFDLELTPLDFDNKENNTNTTTTKNDDDPKQTTTSELKSLGSKDNLLSKTDNGVQRKTPLPLSPPSEPISKRKVLPIEPISKPQSPIALLRSAPSFRIFMFRKRNRTPPQQKTEHSVNEAKVFAVKLSVDDFSFLSRAQQGQQHEKLWEQGSXV

SEQ ID NO: 175611 - protein, 331 aa, Glycine max
  Clone ID: PAT_MRT3847_129595C.1.pep
MVSLHPHTLTLACPLSVSSSSSRFLRCSVNSAPKRRRSSFITASWQELAGVLLFSAIPFTAVKAIANSPLGESLQRKMEERKTFAVENSSTFKALAGKARKESFWYGEDRPRWLGPISYEYPSYLTGELPGDYGFDIAGLGQDPVALQKYFNFEILHARWAMLASVGALIPEILDLLGAFHFVEPVWWRVGYSKLKGDTLDYLGIQGLHFAGSQGVVVIAICQALLMVGPEYARYCGIEALEPLGIYLPGDINYPGGALFDPLNLSNDPEAFEELKVKEIKNGRLAMVAWLGFYVQAALTGKGPVQNLIDHISDPFHNNLLGSLNFIKVVM

SEQ ID NO: 175612 - protein, 176 aa, Glycine max
  Clone ID: PAT_MRT3847_129596C.1.pep
MIMLRLKQLAGVLLFSAIPFTAVKAIANSPLGESLQRKMEERKTFAVENSSTFKALAGKARKESFWYGEDRPRWLGPISYEYPSYLTGELPGDYGFDIAGLGQDPVALQKYFNFEILHARWAMLASVGALIPEILDLLGAFHFVEPVWWRVGYSKLKGDTLDYLGIQGLHFAGSQG

SEQ ID NO: 175613 - protein, 132 aa, Glycine max
  Clone ID: PAT_MRT3847_129597C.1.pep
GSRENVSGEVEFNHVDFVYPSRPDSVILNDFCLKIPAGKTVALVGGSGSGKSTVISLLQRFYDPIEGEIFLDGVAIHKLQLKWLRSQMGLVSQEPALFATSIKENILFGREDATQEEVVEAAKASNAHNFIS

SEQ ID NO: 175614 - protein, 55 aa, Glycine max
  Clone ID: PAT_MRT3847_129598C.1.pep
RSPFLRPQSWFCRLPNMGQSIPGMALGIHVVGASSSSKLHRPMFLHGLLPCAILS

SEQ ID NO: 175615 - protein, 405 aa, Glycine max
  Clone ID: PAT_MRT3847_129599C.1.pep
SRDTTSRRPARPGQVGARKSAQDGAWARGATARTGAAGRGAKAGATGRVNSGTRASTTTGKKGGAASSGKASKTDTAAAAVTNGDAEDGKSKKLQYEGPDPELAAMLERDVLETSPGVRWDDVAGLTEAKRLLEEAVVLPLWMPEYFQGIRRPWKGVLMFGPPGTGKTLLAKAVATECGTTFFNVSSATLASKWRGESERMVRCLFDLARAYAPSTIFIDEIDSLCNSRGASGEHESSRRVKSELLVQVDGVSNSATNEDGSRKIVMVLAATNFPWDIDEALRRRLEKRIYIPLPNFESRKELIRINLKTVEVAPDVNIDEVARRTEGYSGDDLTNVCRDASLNGMRRKIAGKTRDEIKNMSKDDISKDPVAKCDFEEALRKVQRSVSQADIERHEKWFTEFGSA

SEQ ID NO: 175616 - protein, 80 aa, Glycine max
  Clone ID: PAT_MRT3847_12959C.1.pep
MSQKLSCFLRCRLFLVAQNLGTNCSQIVVIECHQTCACMLRKKIFSFTHVRCRSCACDRNRYKNTTFHGNYRRCPLDRFV

SEQ ID NO: 175617 - protein, 108 aa, Glycine max
  Clone ID: PAT_MRT3847_1295C.1.pep
MFHPMEQSAKRSQYSLLHFSFLQLHHLKRSMLSLLFSLPTSFFALFLLLLLSYNAFTVFSVHVPKSPTTTTLSNSKFSSSLNSPLFKNPHLPLLQNSTESFSFQLFRG

SEQ ID NO: 175618 - protein, 38 aa, Glycine max
  Clone ID: PAT_MRT3847_129600C.1.pep
LEPVKMTSTEPQDIEKLQEQIHKGTELTKTYLALLKEK

SEQ ID NO: 175619 - protein, 75 aa, Glycine max
  unsure (1)..(75): unsure at all Xaa locations
  Clone ID: PAT_MRT3847_129601C.1.pep
DMKXYAAGARGSPPAAVFPIALATGSRRPLLRLLKTRMWGPFPVAWFAICVVGLLRRTWGGAWSAGCAASPRAQN

SEQ ID NO: 175620 - protein, 83 aa, Glycine max
  Clone ID: PAT_MRT3847_129602C.1.pep
NLCKTRDKIHYQKKIKQISTQHLIFLIYFPPLMFFFSFSFLLIYIKGLKGGGQDPCLRAWIRPYPFLFFVLKDVRNIMLILCL

SEQ ID NO: 175621 - protein, 66 aa, Glycine max
  Clone ID: PAT_MRT3847_129603C.1.pep
IPRRLISLSFGPPVIFFFSWSGGINRTFVTLWYGGCVRLFCSVVINLEQSFHFMHHSLLGLITEKV

SEQ ID NO: 175622 - protein, 109 aa, Glycine max
  Clone ID: PAT_MRT3847_129604C.1.pep
FFFFFFFFFFFFFFFFFFFKAKIKKIFKPKASLILEVKTTKIQALFGGKKDPKQKEGGFYPFWPRLTPKNIKKNLVLGGIGGEPKKKKPFRAIFWFPFKTRGGGEGFFF

SEQ ID NO: 175623 - protein, 102 aa, Glycine max
  Clone ID: PAT_MRT3847_129605C.1.pep
VALSALCSKPCMSASPGVRTVWIRHCLRSHWHSGASRGRLCRRRPNMRNDPGARDSLVRGTPCLSSGSLCEPYHQDDQSGRSVNSAMGIDAKRLWSKLSNRE

SEQ ID NO: 175624 - protein, 60 aa, Glycine max
  Clone ID: PAT_MRT3847_129606C.1.pep
LMLVCRSCLLRFCFSMSNVCGTRGFSEVVEYQSFLMQVKLVASVIHPSGNLLVMLSKRFH

SEQ ID NO: 175625 - protein, 61 aa, Glycine max
  Clone ID: PAT_MRT3847_129607C.1.pep
PCVSLSISSSKITHLYWQRPLYLSVSPTTKSLTLDPYTLALANRTNHFTLLTNSLATLLLL

SEQ ID NO: 175626 - protein, 228 aa, Glycine max
  unsure (1)..(228): unsure at all Xaa locations
  Clone ID: PAT_MRT3847_129608C.1.pep
MSSISTSPHSHLLLPQNQNHFLSESGTHASFTPSPRPFRPISIKCTSTPAQVQTHDPLPAQTRAQERVFNFAAGPATLPETVLRRAQSELHVWRGSGMSVMEMSHRGKEFKSIIEKAESDLRTLLQIPSEYSVLFLQGGATTQFAAVPLNLCSPADAVDYIITGSWSDKAFKEAQKFSKPTIIWSGKPXKNTKGPSFEALQQNPDAKYLHICANENIHGGLSIRTTQP

SEQ ID NO: 175627 - protein, 158 aa, Glycine max
  unsure (1)..(158): unsure at all Xaa locations
  Clone ID: PAT_MRT3847_129609C.1.pep
GSFAGARTKDIERIGDRGKTGAATRGPRRRKGTTDSTPASSMEPKGMGPGQPELLPRAQEGAHRRIGGAKGRDNXTEGSSARGTDTTGIGKEEEEGKGRPLGLKNKATRRQEQLEGGSLNPRGRGTGGSDKKFQGRAGTPPAAKGATGTGPTPSEATQ

SEQ ID NO: 175628 - protein, 78 aa, Glycine max
  unsure (1)..(78): unsure at all Xaa locations
  Clone ID: PAT_MRT3847_12960C.1.pep
SASSGLTRNKGHSLCVRCGRRTFHLHKSRCAVCAFPAARTRIYYLSVKAIMRKTTXTGTMRYLLYVPRRIKSGFKDCA

SEQ ID NO: 175629 - protein, 240 aa, Glycine max
  unsure (1)..(240): unsure at all Xaa locations
  Clone ID: PAT_MRT3847_129610C.1.pep
SLARQVFDGVAKKDVVLXNCLIGNYARNGMVGEALASFEQMSVRGMKPNSSTLSGLLSACPASGSVQVVRHVASFVEEQKVKLDAVLGTALVDVYAKCGFLDEAMDIFERMEDKDVKSWTAMISGLGVHGQPKNAIRLFNRMEKEGFKPNEVTFLAILTACSHGGLVVEGMEVFKLMVQEYGFSPQVEHYGCLIDLLGRAGMLHEAHKLIDSLPIKGDATAWRTLLSACRIYXRCKLGSV

SEQ ID NO: 175630 - protein, 106 aa, Glycine max
  unsure (1)..(106): unsure at all Xaa locations
  Clone ID: PAT_MRT3847_129611C.1.pep
RLGSLVPLFSVAXVLGCPSVSPSVRGASSSFLLLPGGSVFVPGWSSACLPGCVSVRFSGVLXALVVXVPSXXPLLLLLLLVVVVVVGAVGRFVRPLXXVVGGGVTP

SEQ ID NO: 175631 - protein, 57 aa, Glycine max
  Clone ID: PAT_MRT3847_129612C.1.pep
QVITHCWQVGHSDLDPGADHALNSVHNIKEAWPEIWEIEDGDQQVRIQPRAGGNHGA

SEQ ID NO: 175632 - protein, 80 aa, Glycine max
  Clone ID: PAT_MRT3847_129613C.1.pep
HGVVLFTVKNVLAGGSSLSLSTTFRARRSIWGAGRKKECICFSGRVGVAPVTSRTSCFEWWHTSHGRAVSCPCLMLFLFK

SEQ ID NO: 175633 - protein, 44 aa, Glycine max
  Clone ID: PAT_MRT3847_129614C.1.pep
RYSGKIPTEGETSRQAALPAALKDINLRRSAGDGIALPKSAGRY

SEQ ID NO: 175634 - protein, 67 aa, Glycine max
  unsure (1)..(67): unsure at all Xaa locations
  Clone ID: PAT_MRT3847_129615C.1.pep
HLYSKSRGDLLSDHVWRAISPTHTAGPAAGAARDRDIWATLRHAFKPCWTMIXGWFREFKDDPKSRM

SEQ ID NO: 175635 - protein, 69 aa, Glycine max
  Clone ID: PAT_MRT3847_129616C.1.pep
KNQNWTLSRMPISKLCTHNFIISNLNYMLFPGLLMPKLCTHNFTMGNPKLCLQSSRISNSGMGNLEVPN

SEQ ID NO: 175636 - protein, 57 aa, Glycine max
  Clone ID: PAT_MRT3847_129617C.1.pep
SLETRVIRLGSFKRDAPFYLFFLFYIIFCNLIFCSMIIILDFFICFFLFFFFFFNTL

SEQ ID NO: 175637 - protein, 32 aa, Glycine max
  Clone ID: PAT_MRT3847_129618C.1.pep
VCSYSHLGKPRDCYNLSCLNCSSISKLFIIPL

SEQ ID NO: 175638 - protein, 30 aa, Glycine max
  Clone ID: PAT_MRT3847_129619C.1.pep
LNGEWLWGFNFQRLTLLKLSTARDRIQEKC

SEQ ID NO: 175639 - protein, 77 aa, Glycine max
  Clone ID: PAT_MRT3847_12961C.1.pep
LTRIPVTRILDDAVLVSPQPIIASPPRTCRHHARPSDLESPAPATVFYELVHPIVPADTGREYRLRGRRKDTMIRLE

SEQ ID NO: 175640 - protein, 45 aa, Glycine max
  Clone ID: PAT_MRT3847_129620C.1.pep
IVCVMDSRLHIVTWPFLEHSAMQILICRNHLRRNGESSRKLVSRG

SEQ ID NO: 175641 - protein, 96 aa, Glycine max
  unsure (1)..(96): unsure at all Xaa locations
  Clone ID: PAT_MRT3847_129621C.1.pep
GEXIIRSEDEVFSDAVADFSDSGSIPEIKERLQDSLDSGADVERVDIKETKFSGSSEDKDFNGGKIGFTSHVLLLNCLVTFFTQYRLVCGKTFWPG

SEQ ID NO: 175642 - protein, 63 aa, Glycine max
  Clone ID: PAT_MRT3847_129622C.1.pep
EESDSCRPTAYSVVAESIVGSRKSQSSCVWYGSIGPTSLVKNVPCARGCSPRILHVVFRKTRH

SEQ ID NO: 175643 - protein, 253 aa, Glycine max
  unsure (1)..(253): unsure at all Xaa locations
  Clone ID: PAT_MRT3847_129623C.1.pep
MGLPPTIATCFLILVLPLVVLCLWKLLNWVWLRPKKLERALRAQGLQGNPYRLLVGDNREKFRILMNASKSQQSTSSLSDDKNVAPHIVTFNHHIGRXFGKNSFFWEGTKPKVVITDPEQIKEVFNKIQDFEKPKLSPIVKLLGSGLANLEGEKWRTHRKIINPAFHLEKLKVMLPIFLECCDDMVSKWERLLSSNDKSEIDVWPFLQNLTCDIISRTAFGSSYEDGKRIFELLKEQTGLMMKLQNAYSRMVV

SEQ ID NO: 175644 - protein, 61 aa, Glycine max
  Clone ID: PAT_MRT3847_129624C.1.pep
CFIASNQSDLTQYIFRASFTRPLMPIQRNEGMFKHSHSDDRSFPFHHQTLNSYNPIIQFIF

SEQ ID NO: 175645 - protein, 136 aa, Glycine max
  Clone ID: PAT_MRT3847_129625C.1.pep
MNHRFWMNLLCVALLTLILLHGASRGHDDVVKIGAIFTLKTINGRVSKIAIQAAEKDVNSDPRILGGRKLSITIHDSNFSGFLGFIGALKFLVTDTVAIIGPQSSVMAHVLSHLANELHVALLSSTGLDPTLTPLQ

SEQ ID NO: 175646 - protein, 160 aa, Glycine max
  Clone ID: PAT_MRT3847_129626C.1.pep
MGSNGSKATSSSFGSSSSSSSSSGSLRKGRSKGLKVFQSCCLGTTSGSHDSDNEDQVCDQNKVNGSDVTYADGNGTDSDEVKTESFRKVIAGEMTCVPSNIDLDGWGETSIPNTSSRTGSISVHSSSTHSLNPTSHCLSRFSLIPGNVSFRLSRTTSLGS

SEQ ID NO: 175647 - protein, 143 aa, Glycine max
  Clone ID: PAT_MRT3847_129627C.1.pep
MGFFKRIAGYLGFGNHKHDSKDEARDGQPRTTQPRKGFSVPAQVVVDRPHLAPVLTPSTSGDGGIQGLDWYVNHLKMDEDGDLADQFLDEVSSEKPEGVAVDHHKTQARFKLKNGTKSVRVKKPILLGGKIIPQIVESHQGRL

SEQ ID NO: 175648 - protein, 158 aa, Glycine max
  unsure (1)..(158): unsure at all Xaa locations
  Clone ID: PAT_MRT3847_129628C.1.pep
TPADDRRLNKFWTHHQKDLALTEXERWEVIRNKRHPADDLAKRAHESEGHVAHTSLRTHPAXDKSILPRLNRWGKLXTLDKVLMRDLKLLTDGKLYEGKHIPVSDINAWENHVLQIPLMAQEEILTSTASDYRTAMVQKNSMPQATAMHVGAIEIIID

SEQ ID NO: 175649 - protein, 68 aa, Glycine max
  Clone ID: PAT_MRT3847_129629C.1.pep
IVHVVSGKCCLFHFVGFKRVHTSAFSRLTLHVTIQRSTFCYLKKIKRKNKSTQEMYKDEEKEEEQEEL

SEQ ID NO: 175650 - protein, 129 aa, Glycine max
  Clone ID: PAT_MRT3847_12962C.1.pep
MTGVPQEAPVSLDQLKQILDEFAKERDWEQYHSPRNLLLALVGEVGELSEIFQWKGEVPKGLPDWKEEEKVHLGEELSDVLLYLVRLSDMCGVDLGKAALRKVQLNAVKYPKKVYEDPSSSTVSPNNTN

SEQ ID NO: 175651 - protein, 115 aa, Glycine max
  unsure (1)..(115): unsure at all Xaa locations
  Clone ID: PAT_MRT3847_129630C.1.pep
MRTSYNLVLLRSRFRRSHNFHAYRSLSVVILKPDHHPPAIIPSNSRFLLPGFNAHRHRSFFTRAKPATTNIEFNDHHSQRSVKTILWCNFLAFSLKFGVXLASSSHVTLAEVVHS

SEQ ID NO: 175652 - protein, 53 aa, Glycine max
  Clone ID: PAT_MRT3847_129631C.1.pep
MYASDTFNINSQLEHLQVKYVGTGHADLHRFEWAVNIQRDTYASYIGHYPLLG

SEQ ID NO: 175653 - protein, 59 aa, Glycine max
  unsure (1)..(59): unsure at all Xaa locations
  Clone ID: PAT_MRT3847_129632C.1.pep
PKRPLXLFFIFIFSPILVDHHTLLEHLILTLKKSNNYSSFVNHYYHQQTIPNNTRCIHN

SEQ ID NO: 175654 - protein, 140 aa, Glycine max
  unsure (1)..(140): unsure at all Xaa locations
  Clone ID: PAT_MRT3847_129633C.1.pep
MRLYPPVPVDTKXAGEDDVLPXGTQVRRGWRVAYHIYAMGRSEKIWGADWGEFRPERWLSRDEVEGRWKFEGVDAFTYPVFQAGPRVCLGREMAFLQMKRLVAGIIKSFKVLSEVAEPEFAAYLTSFMVGGFPVRIQNRT

SEQ ID NO: 175655 - protein, 101 aa, Glycine max
  Clone ID: PAT_MRT3847_129634C.1.pep
MSTSKSVSSSSEDDNELRRGPWTLEEDNLLSQYIFNHGEGRWNLLAKRSGLKRTGKSCRLRWLNYLKPDVKRGNLTPQEQLIILELHSKWGNRCLSCAFDS

SEQ ID NO: 175656 - protein, 46 aa, Glycine max
  unsure (1)..(46): unsure at all Xaa locations
  Clone ID: PAT_MRT3847_129635C.1.pep
NXXXLPPGTISNRXNSRXQXIXXXXPXTXLXXELEYIIDNVSIINL

SEQ ID NO: 175657 - protein, 312 aa, Glycine max
  Clone ID: PAT_MRT3847_129636C.1.pep
MSTSKSVSSSSEDDNELRRGPWTLEEDNLLSQYIFNHGEGRWNLLAKRSGLKRTGKSCRLRWLNYLKPDVKRGNLTPQEQLIILELHSKWGNRWSKIAQHLPGRTDNEIKNYWRTRIQKQARHLKIYTDSREFQELVRRFWMPRLLQKAKESSSSNMSIQNQAIPMPFDYVSQHLTVGTIPPWQGPCMNEAGPTYMDQHEQNSDSEHNNGSCISLSESANFPKVPQHFGRTTITQYHALNNNDFGTFTYDGYNVSNNVYEMDNFKTPTTRVAEDAQYPTGDCQMVGSNWVNSDFACNMWNMDELWQFSKLQK

SEQ ID NO: 175658 - protein, 55 aa, Glycine max
  Clone ID: PAT_MRT3847_129637C.1.pep
WLRASPEEGARIYIHYFLKAMTIPRLSRCLNITALVHSILYSTIVYWDNIMIHHI

SEQ ID NO: 175659 - protein, 188 aa, Glycine max
  Clone ID: PAT_MRT3847_129638C.1.pep
MCTSKSVSSSSEDDNELRRGPWTLEEDNSLSQYISSHGEGRWNLLAKRSGLKRTGKSCRLRWLNYLKPDVKRGNLTPQEQLIILELHSKWGNRWSKIAQNLPGRTDNEIKNYWRTRIQKQARHLKIDTDSREFQELVRRFWMPRLLQKAKESSSSAMSIQNQATPMPFDGVSQHSTVGTIPSHSHTPW

SEQ ID NO: 175660 - protein, 103 aa, Glycine max
  Clone ID: PAT_MRT3847_129639C.1.pep
GSCISLSESANIPKVPQHFGHTTITQFHALNTNDFGTFTYEGYNVNNNVYEMDNFKTTTTWVAEDAQYPIGDCQMVGSNWVNNDFACNMWNMDELWQFSKLQK

SEQ ID NO: 175661 - protein, 77 aa, Glycine max
  unsure (1)..(77): unsure at all Xaa locations
  Clone ID: PAT_MRT3847_12963C.1.pep
WKSPRGPSAXRSGLKDGTNPXXSFFFFFPLXXEXXFFXXXXGPPRGDXXLXXVFFFFXXPPLPXRKGXPYIPKXXGG

SEQ ID NO: 175662 - protein, 55 aa, Glycine max
  Clone ID: PAT_MRT3847_129640C.1.pep
LRPILLSIMQDRMSTHLANKNDGGTRYDHTPKMGCGSWQTATTLKLDLQRIKRGA

SEQ ID NO: 175663 - protein, 44 aa, Glycine max
  unsure (1)..(44): unsure at all Xaa locations
  Clone ID: PAT_MRT3847_129641C.1.pep
RVLKITRNXNHHLVAIHLPPGSTPNTDSGTAPSPRPTITLPSRP

SEQ ID NO: 175664 - protein, 77 aa, Glycine max
  Clone ID: PAT_MRT3847_129642C.1.pep
AYITLDNTHSYRDLYRTLLVTVPDIGEYIFGAIIFYETIYQSTINGRNIVDLLVDQNIDADINVDKGFVPLADSYDQ

SEQ ID NO: 175665 - protein, 154 aa, Glycine max
  unsure (1)..(154): unsure at all Xaa locations
  Clone ID: PAT_MRT3847_129643C.1.pep
FRDNAGARQRRIHGERSLWESKDDRKWGHDKFEEITLHEKHHEERGRPYKGNYRGQGKSRGTYRGGYVQGNRTGYNDSSNQNQVPKRVVKGRXPQKYERTNKSNGPSSAVQNKHSERTSTHASKVESGSVPVKNQVVASNLNSASPPFYPSGSS

SEQ ID NO: 175666 - protein, 51 aa, Glycine max
  unsure (1)..(51): unsure at all Xaa locations
  Clone ID: PAT_MRT3847_129644C.1.pep
MWILTQEDIDLMETLGVNSYRLSLSWARILPKGRFGEPNHAGXIEFYNRLI

SEQ ID NO: 175667 - protein, 31 aa, Glycine max
  Clone ID: PAT_MRT3847_129645C.1.pep
LTAFVIQHTALSIYHFENFPFGNFSSFPVVG

SEQ ID NO: 175668 - protein, 133 aa, Glycine max
  Clone ID: PAT_MRT3847_129646C.1.pep
SLSSARGTFSNFNIHILKNNKGSFSRRFQLSQKLDDDNFIDKIKRRELILESGELATIGAIFNFRGKKPDYLGVQKNQPALALCPATKNCISTSENVTNLTHYTPPWNYNPESRKDHVSREQAMEELIDVIES

SEQ ID NO: 175669 - protein, 53 aa, Glycine max
  Clone ID: PAT_MRT3847_129647C.1.pep
KKGPVYFKRKIGTLFLYQYFLKLFLLISNFHLSFSAMILYHLFQYHSHLLHYH

SEQ ID NO: 175670 - protein, 81 aa, Glycine max
  Clone ID: PAT_MRT3847_129648C.1.pep
FRLTICGWLIISDIERAIVYTTGVTENILELIPSTNANSSKVCTHYIKCQHMLCLLFRSFMITHAITLTTFHELITTILAV

SEQ ID NO: 175671 - protein, 72 aa, Glycine max
  Clone ID: PAT_MRT3847_129649C.1.pep
RRRLLPFYRNRTVMASYPSRTQLTESSENAPKGELLNTHPKEDNSQANISVGCTQAYPHDSCLKTGLNKNIS

SEQ ID NO: 175672 - protein, 289 aa, Glycine max
  Clone ID: PAT_MRT3847_12964C.1.pep
ENGETISDERKIRIKPLPKRIVSRPPEFPADHPVSDVGLQVSRTSSHLDTYLDPAFMSLIKDPDERRMEQWEKTAEAQRGWNCAKLIGYGDLGGPSLSAAEEYSLHSRYLSKANSLNLSEIAEMKIVYRGGVDSEGHPVMVVVGAHFLLRCLDLERFVLYVVKEFEPLIQKPFSIVYFHSAASLQMQPDLGWMRRLQQILGRKHQRNLHAIYVLHPTFGLKAAVFGLQMFVDNVVWKKVVYVDRLLQLFRYVPREQLTIPDFVFQHDLEVNGGTGLIVDPRTKYVYNRP

SEQ ID NO: 175673 - protein, 196 aa, Glycine max
  unsure (1)..(196): unsure at all Xaa locations
  Clone ID: PAT_MRT3847_129650C.1.pep
LDCSYDDDIHFHSKHRGLRERPNLQILVGKIRQQFQKFLTTDILWWRGLARILEVKGYIGEGDDKSCAAECAFLCDLISSFPPYNCXTHVQAKYLEPTELGLEFVKSMSEQDFYVYPEADMLLARKTNKPFSSFSEWGKGWADPEIRRERLERMRVNRKPGMLPSPKKQRKRKARKGWAGLRTSRGRLAAKLSKHK

SEQ ID NO: 175674 - protein, 101 aa, Glycine max
  Clone ID: PAT_MRT3847_129651C.1.pep
MENKRGQGPTTSLNPTIVFREGKKTLTLKPRALTLKVLVNWPNPWWGGSTLKHRFFSIHFQLLNLFLNPKTFLIHHNFFNKFGYLFFFTNSSFFGTPERHP

SEQ ID NO: 175675 - protein, 128 aa, Glycine max
  Clone ID: PAT_MRT3847_129652C.1.pep
LKHPSSATYVLFASVSIVHQRKKFERRHRKSPPSTAHSDPRQRKLLFLFFDFSFFSFSLHRLFVLFFVVCNVGILLVWQRLVVGDGSHMVIVMVHARKAWRLMRDLLCCFCCRGGCCSYELDCHAYNY

SEQ ID NO: 175676 - protein, 66 aa, Glycine max
  unsure (1)..(66): unsure at all Xaa locations
  Clone ID: PAT_MRT3847_129653C.1.pep
MATSAIQQSAFTGQTALKQLNEFDRXTVGAGKGRTDMRRTVKSARQSIXYGPDRPKYLGPISGQNP

SEQ ID NO: 175677 - protein, 43 aa, Glycine max
  unsure (1)..(43): unsure at all Xaa locations
  Clone ID: PAT_MRT3847_129654C.1.pep
RRKLYANFGVLVAYXPEELSVCQDLDQVPSFIEKFPPYQSIFA

SEQ ID NO: 175678 - protein, 150 aa, Glycine max
  unsure (1)..(150): unsure at all Xaa locations
  Clone ID: PAT_MRT3847_129655C.1.pep
HYTGFFWVQASRRNLYNASKAALVSMYETLRVEVGXDVGITIVTPGYXKGKVSRGPRFXEMLVSGCAKAIVNGTLRVDRXYLTVPAWFKVTYLLKLLCPELVEWSFRMMYMTESTRTTAREAPSKKILDTTGVKKFFYPSSIQSPDVKTE

SEQ ID NO: 175679 - protein, 98 aa, Glycine max
  Clone ID: PAT_MRT3847_129656C.1.pep
EFNKKQEVRDHEREVLSNMFVPPTANQSWRKVLSMGNLLNGHEPILREIIFSLRDRVSGNHYAARSGSVSQQEIETYRMYICGTSNDLRVALSVVSCD

SEQ ID NO: 175680 - protein, 96 aa, Glycine max
  Clone ID: PAT_MRT3847_129657C.1.pep
YIIYFHLTIITTLVRIIFYSSNPITTIKTPPFIPSILLLSLSFSNPSSYFYLSSFIPNLIPNLHHNLHSKYLITFLSFCSNLFYIHDLLFYPYHLT

SEQ ID NO: 175681 - protein, 97 aa, Glycine max
  Clone ID: PAT_MRT3847_129658C.1.pep
RCINTCVNTRMRLSVLLLVFLAVLAATRPSLVDCRVLPSPKNTEKAPHEPLKVIRFLINLVMAEKANTSEGNISNRVLTENKFQTMSSGPSRRGSGH

SEQ ID NO: 175682 - protein, 69 aa, Glycine max
  Clone ID: PAT_MRT3847_129659C.1.pep
MARRGETRNESLLTRAVAAVFAFVRHAEFEILFFLFFFIAYLLFKDITSRPDYNQMFVKKPGGPEFWPF

SEQ ID NO: 175683 - protein, 152 aa, Glycine max
  Clone ID: PAT_MRT3847_12965C.1.pep
MSASCGVVECVFVLGCARWLWKRCTYVGSYDSATWPSATADEFDPVPRVCRLILANYEPDLRTPNHRLNPDCIIKRVTYEDTLGHAPPYVIYLDHDHKEIVLAVRGLNLAKESDYKGLLDNRLGQQMFDGGYVHRGLLKSAVWLLNRESETL

SEQ ID NO: 175684 - protein, 79 aa, Glycine max
  unsure (1)..(79): unsure at all Xaa locations
  Clone ID: PAT_MRT3847_129660C.1.pep
NRRMIXYFSGXXDWXCGCXGXGEXXLHVHXXASGXMFDRXXXXTNXXSXFWNPGXXGXPLLHAQILKXXXXCTLXLSCX

SEQ ID NO: 175685 - protein, 60 aa, Glycine max
  Clone ID: PAT_MRT3847_129661C.1.pep
DKVEEQKKNLQLTLFNEQKKQKSIFVFRILVCSTCLMALNTMILQSWPFMSLVFVLLLPH

SEQ ID NO: 175686 - protein, 77 aa, Glycine max
  unsure (1)..(77): unsure at all Xaa locations
  Clone ID: PAT_MRT3847_129662C.1.pep
VSSCCPPCPVAGGLAVAVLGSAFPLFFSRRCACPVCGGAGFVGPPALPLGGVFARXGLALXVRPPCGGGGPLGPVGP

SEQ ID NO: 175687 - protein, 136 aa, Glycine max
  Clone ID: PAT_MRT3847_129663C.1.pep
SLSKFGKDHLAHLQPPSLISIKILPVVWHAYNALKDAHGACILFEWEAFNKLDYKKVFDSMLKPTFIFYGRNVVHVKKVRAIGFIVYANGRPLDPALKDSLRLGVDLREKKNLLVTMSYILVLLPAFLLLLLFYRS

SEQ ID NO: 175688 - protein, 70 aa, Glycine max
  Clone ID: PAT_MRT3847_129664C.1.pep
FSIISSSRADDHILSVIIKCEGWWANSLYDLIHAELDKTADTRKGIPVAIEGPYGPASLDFLRYIWQAPK

SEQ ID NO: 175689 - protein, 113 aa, Glycine max
  Clone ID: PAT_MRT3847_129665C.1.pep
SLQHSNHPPTFDNIFKVGRSMPLFGIDNYDTEIKAKEQALKQNIELHVQKASNLSDNHHASAVTKGQLGVECPCFPLMWPRDTNKFVGFSYTKAQAKGIEMKEYGGVQVALER

SEQ ID NO: 175690 - protein, 258 aa, Glycine max
  Clone ID: PAT_MRT3847_129666C.1.pep
MARDSQAPRVTQIQVRVDCKGCVQKIKKTLNGIHGIHDLRVDLLQQKLTIIGWADPEQVVKAIKKTKKNATICSSIELTSPSKPTEPEPKENAPVPDATQPPPARVPPPQASPPSKPPPQRPPPEATPPSHIPTQHKTSRQWQNNTGIEELEQVHVKQYYHLPNNVNRFSSGRNHVEHWHRYHNGPVFLQESSRPMYVTHSYNTHVPSSIVTEYEYVRSPSRQTHYNCIEHYSGDYQNDNVNITSMFSDDNPNACCIV

SEQ ID NO: 175691 - protein, 145 aa, Glycine max
  Clone ID: PAT_MRT3847_129667C.1.pep
MDPSIMKLLEDDEDETMHSGVDVEAFQAALNRDIGGAGSTSQFSGSDAVLSQGSNNISSQSLSQWPTSNHDTQTDCQKQESKTAQQQEQPSSEVELKQHGSLAEQLQHVASQDINTPHLSQKQSQDECHQAPAGQGSLPNSQAIG

SEQ ID NO: 175692 - protein, 41 aa, Glycine max
  unsure (1)..(41): unsure at all Xaa locations
  Clone ID: PAT_MRT3847_129668C.1.pep
FKRALTEGTYDDSVXGMTKXKGHXSKALYIPQKLYLQIVYL

SEQ ID NO: 175693 - protein, 85 aa, Glycine max
  unsure (1)..(85): unsure at all Xaa locations
  Clone ID: PAT_MRT3847_129669C.1.pep
LKSWVYYLVSLCAFFGMTNSLAYRSMGQTRFTTKIARXNMRPPFLAXGHPKTLSPWNRCLWTTIKNYAITLFSGLDDLPKEGFIN

SEQ ID NO: 175694 - protein, 122 aa, Glycine max
  Clone ID: PAT_MRT3847_12966C.1.pep
LIQKPFSIVYFHSVASLQMQPDLGCMRRLQQILGRKHQRNLHAIYVLHPTFGLKAAVFGLQMFVDSVVWKKVVYADRLLQLFRYIPREQLTIPDFVFQHDLEVNGGTGLIVDPRTKYVYNRP

SEQ ID NO: 175695 - protein, 79 aa, Glycine max
  Clone ID: PAT_MRT3847_129670C.1.pep
SPMADIVTPSTIVLAVCLQRPNSMALKVLGKLRTFSPNLWPIAFANLSVASVVNLLYHINGFGRITRLDPHPVGFGCKS

SEQ ID NO: 175696 - protein, 70 aa, Glycine max
  Clone ID: PAT_MRT3847_129671C.1.pep
AQVPRSQSLSLSNIPARRSRSRLLSHNISNPKFFFPLQNLISTLLPQTTGIRNISISLKSMQQTPESHNS

SEQ ID NO: 175697 - protein, 66 aa, Glycine max
  Clone ID: PAT_MRT3847_129672C.1.pep
FHCSLRGNQLLPCHVELSPLRLIDMIFFVFKNYDMFVVCPLIIIIQFIYLLLWLLGWIDMIVKLSF

SEQ ID NO: 175698 - protein, 112 aa, Glycine max
  Clone ID: PAT_MRT3847_129673C.1.pep
MLVRKLKLKAVSGVHLRWMSTVMCFGDGSQGAVGSPVGVGLDAYEPTPVTALPSDIVSVHAGHYHSLALTSHGHLWAWGRNNEAQLGRGPSSRESWHEPERVKGLLENVNVC

SEQ ID NO: 175699 - protein, 494 aa, Glycine max
  Clone ID: PAT_MRT3847_129674C.1.pep
AMEEMIRLLQTNEPLWMKGADGRDVLDLDSYERMFPKANSHLKNPNVHVEASRDSGVVIMNGLTLVDMFMDPNKWMELFPTIVTMARTIEVISSGMMGSHSGSLQLMYEELQVLSPLVSTREFYFLRYCQQIEQGLWAIVDVSYDFPQDNQFAPQYRSHRLPSGVFIQDMPNGYSKVTWIEHVEIEDKTPVHRLYRNLIYSGIAFGAQRWLTTLQRMCERIACLMVTGNSTRDLGGVIPSPEGKRSMMKLAQRMVTNFCASISASAGHRWTTLSGSGMNEIGVRVTVHKSSDPGQPNGVVLSAATTIWLPIPPQTVFNFFKDEKKRPQWDVLSNGNAVQEVAHIANGPHPGNCISVLRAFNSSQNNMLILQESCVDSSGSLVVYCPVDLPAINIAMSGEDPSYIPLLPSGFTISPDGQADQDGGGASTSTSTGSRVMGGGSGPGSGGSLITVAFQILVSSLPSAKLNMESVTTVNSLIGNTVQHIKAALNCPSS

SEQ ID NO: 175700 - protein, 94 aa, Glycine max
  Clone ID: PAT_MRT3847_129675C.1.pep
IQFSEDKSIYIWLVATCYLNAVHWFRNMQVNPFYSTFHRYQMQITHQDQLKEEQFFPCKLEKHNIGKEAFTFPSILSSRPTGSKNFRSTWIGPR

SEQ ID NO: 175701 - protein, 98 aa, Glycine max
  Clone ID: PAT_MRT3847_129676C.1.pep
HAFALACAKKKKKKKKKKKKKKKKKKIKKKKKKKKNKKKKKKKNKKKKGGAVLKNSGLASRGNASLSPFFGATKFYFWGPFLKPGGREKPGGTPKKPG

SEQ ID NO: 175702 - protein, 87 aa, Glycine max
  Clone ID: PAT_MRT3847_129677C.1.pep
RLDRLKSSQAQIRFQHGYTAPCFACFGGASVQSTLIARCRTGPFVPLGWLIPAWSISWPTYVCPSKGNVCIEMLPCSGPHLFHDLSV

SEQ ID NO: 175703 - protein, 93 aa, Glycine max
  unsure (1)..(93): unsure at all Xaa locations
  Clone ID: PAT_MRT3847_129678C.1.pep
NSMVVLNVCLVXLFLVGGTTIANLRLSKPVLLMKSAHHQYSIDDQSSNPCCDQCACTNSYPRQCRCSDITLTSCYSACLSCMCALSYPAQCFC

SEQ ID NO: 175704 - protein, 166 aa, Glycine max
  Clone ID: PAT_MRT3847_129679C.1.pep
MEDDPWELCNDDGFVFKRKRRRIHSPSPPSVPDQEPADTLLRERKKQTLLKLKSKYEKEILLWETLLNTLRSMQQRTTQQHPQPNLSLSLPSTSSSSDSAGSSLLHDLLLQVEAQEAIIRDVSNLCDIAETVCVKREEQLKQTLFDLPIWASPLELMQGLYDGVDD

SEQ ID NO: 175705 - protein, 102 aa, Glycine max
  Clone ID: PAT_MRT3847_12967C.1.pep
LTYNGIDSFQPVLQGRSKPNQTKPGRKKVGDYKTGGTDKYHGGFSDGPRKKGEGATKAFYLGRPPFLPIRTPGLFFMIPALILQPLKPRKGCRFNKTPWPGL

SEQ ID NO: 175706 - protein, 81 aa, Glycine max
  unsure (1)..(81): unsure at all Xaa locations
  Clone ID: PAT_MRT3847_129680C.1.pep
XRSYDQHQFPRGVKIGTWFDQERVLLLGAIRIGFQWIQCGLCAALKGVLNSSSIDSMLDRNSVPQEEQKQLLYVVAAATGI

SEQ ID NO: 175707 - protein, 147 aa, Glycine max
  Clone ID: PAT_MRT3847_129681C.1.pep
MNSTEEGMQGIGIGIGCFQNDVVGQLELSPTMSNSSSSLSMELDESPESRIQRLISEHPVIIFTRSSCCMCHVMKKLLATIGVHPTVIELDDQEIAALPDTSAPSAFIGGTCIGGLESLVGLHVTGHLIPKLVQVGALWPLWQNLGE

SEQ ID NO: 175708 - protein, 374 aa, Glycine max
  Clone ID: PAT_MRT3847_129682C.1.pep
MEALSFIPKDSCSLLLRPPSSSSVRTAPPLAFFKTTQQLIKVHWALADSISFSQNPICFFFMEALSFIIPKDSCSLLLRTPSSYSSSSVRTPPPPLAFFKTTQHSHSPHLLRLRVFALPNPDADEPTNDFALASHPQENLSHSETESSEDDQDAPPQMDMSWSTITAPAGSGSGGGTRAGLFRTPISRAVQSATWPECTLVGARSGLSNARVTLFGDVYPLPEDQQEWAHKQYIAKHQQGPSQQWGNFYYFRMQNISDIYFIGGFGTVAWVDVKEYETLQPDKIAVDGGEQYLKELNAIFSKPLKKLLSSETEVDDAALISIDSKGTDIRVRQGAQFNIQRISFDEGQSVETLEEAKAALRKLIHKGKVYNLQK

SEQ ID NO: 175709 - protein, 135 aa, Glycine max
  unsure (1)..(135): unsure at all Xaa locations
  Clone ID: PAT_MRT3847_129683C.1.pep
SLILLEDEFHSNGVIPXGANSSFITLIPKICGPHFLEELGPIFLIXFLYKIIAKLLSHKIKKVIPSIIYKFQSPFISLIHLFHILFITNLIVXSRKGKKLFMIFKMDFQKTYHFLSSKFLSYILRKTSFFNKMIL

SEQ ID NO: 175710 - protein, 371 aa, Glycine max
  Clone ID: PAT_MRT3847_129684C.1.pep
MVFDICAQVLRQLAPNLAYRSLVMLGIASIQALPVASFSKDDAERLLFFCTRQEKENCPKDHVFSGIPSWLKPPPPSRKRSEPCSSSKSINASGRGVEAIGSHRQKFIVASMRPIPHSNRHKILPFSGLSEGTRYDGDHGKSNLPLALIKHNVSGPTSVTNRKSVSNSFQAHQIISLNPLPMKKHGCDRAPIRACSEEEFLRDVMQFLILRGHNRLIPPGGLAEFPDAILNAKRLDLFNLYREVVSRGGFHVGNGINWKGQVFSKMRNHTMTNRMTGVGNTLKRHYETYLLEYELSHDDVDGECCLMCHSSAAGDWVNCGICGEWAHFGCDRRQGLGAFKDYAKTDGLEYVCPRCSALKFSKKSQKTANGF

SEQ ID NO: 175711 - protein, 42 aa, Glycine max
  Clone ID: PAT_MRT3847_129685C.1.pep
VNPTISKSTGLSRERFYGARAHSNPMSDSHFPVPISPSHVAY

SEQ ID NO: 175712 - protein, 56 aa, Glycine max
  Clone ID: PAT_MRT3847_129686C.1.pep
TPFHLSLQHMSSKCKLSFLKLILFITIFRIFLTLLYSSEVYNTNHLSNSCTLRILG

SEQ ID NO: 175713 - protein, 91 aa, Glycine max
  Clone ID: PAT_MRT3847_129687C.1.pep
SGQAPSPLFATLMWLSASLGLCSASALFDVMWYVLCSTIMRFELFSVGLGCFFFRFLLWLSLVFCALGFVWSSSCDYGVLVIFPIPTDESY

SEQ ID NO: 175714 - protein, 95 aa, Glycine max
  Clone ID: PAT_MRT3847_129688C.1.pep
FFSAHTCAYCGLPSSYGLLTPNIHSKSCVSLIGLPSNQTTSYFLDYFLVPIRGIPHTVFVCAVRFQDESLLVCSINNLIRALKPARNVLITSNVG

SEQ ID NO: 175715 - protein, 106 aa, Glycine max
  unsure (1)..(106): unsure at all Xaa locations
  Clone ID: PAT_MRT3847_129689C.1.pep
GFLNDXFSNGVVIHTGPKPLDNALYSQCVLAMCTLAKDPSPRIANLGRWVLSIIGIEQVVAKPLKFSGVRTAESTASPLARSSSWFDMNGGHLPLTFRTPPVSPPR

SEQ ID NO: 175716 - protein, 110 aa, Glycine max
  Clone ID: PAT_MRT3847_12968C.1.pep
YHNNYFVKEPTRNWELERHNFLNRLYRGTNKDCIEQLRLSKNAFFNLCRILQEKGGLVRTRNVPTTEAVAMFLHILAHNLKYRVVQFSYCRSKETISRKFNDVLRAVMKV

SEQ ID NO: 175717 - protein, 38 aa, Glycine max
  Clone ID: PAT_MRT3847_129690C.1.pep
ARAQTLLPFVYFLLAPQDKDCEVWRHPRHNKIGATTIL

SEQ ID NO: 175718 - protein, 125 aa, Glycine max
  Clone ID: PAT_MRT3847_129691C.1.pep
CALNPRSFMQVSMQFGQTCIDVYTLHVLMFATCGGGGTVLLPQWWGGGGSPPPHFGGGPFFFLLKKKFVVPFFPVLFARIKNSKWHACIPPSTPKRFFHQINKIQKTKKKKKKKKKKKKKKKKDN

SEQ ID NO: 175719 - protein, 69 aa, Glycine max
  unsure (1)..(69): unsure at all Xaa locations
  Clone ID: PAT_MRT3847_129692C.1.pep
LXXXLLQTLXXIXSXQISKCVXXFXSRVANTATRSAPXSGRWXRRARXXPYXXVRWGLGVQLEXXNVYX

SEQ ID NO: 175720 - protein, 296 aa, Glycine max
  Clone ID: PAT_MRT3847_129693C.1.pep
PAHGLLEGMDVCVKIIKNNKDFFDQSLDGLKLLKYVNKHDPSDKYHLLRLYDYFYYREHLLIVCELLKANLYEFHKFNRESGGEVYFTMPRLQSITIQCLEALQFLHSLGLIHCDLKPENILVKSYSRCEVKVIDLGSSCFETDHLCSYVQSRSYRAPEVILGLPYDKKIDIWSLGCILAELCTGNVLFQNDSPATLLARVIGIIGPIDQGLLAKGRDTYKYFTKNHMLYERNQESNRLEYLIPKKTSLRYRLPMGDQGFIDFVAHLLEVNSKKRPSASEALKHPWLSYPYEPISS

SEQ ID NO: 175721 - protein, 36 aa, Glycine max
  Clone ID: PAT_MRT3847_129694C.1.pep
VVTFILLANHTKWLFCRWQVMFKAITFVRKHEFSKL

SEQ ID NO: 175722 - protein, 113 aa, Glycine max
  Clone ID: PAT_MRT3847_129695C.1.pep
ERKRKGFAQHRRQHRVDVGGGSGSRSISGDTDAGAGNLAADSGGGIFAGERGANGGVVLERLFTVVLVGEQLLGESVGVSFRHRGVPAAVAEPVQPLRLVICFCFFFFTLFNY

SEQ ID NO: 175723 - protein, 63 aa, Glycine max
  Clone ID: PAT_MRT3847_129696C.1.pep
ASQTLYIRADLFHYQCLLSPSSYLSVILSFCASLLYLSRLLRRSPPLLCSHSISLALLVSGRV

SEQ ID NO: 175724 - protein, 79 aa, Glycine max
  Clone ID: PAT_MRT3847_129697C.1.pep
ILFVVVLGEEYPPCVWSQSSMKISHRFWWRLLHTNTMVSKKKINLKSGMVHLKHKFIYRIIEKSTKFGNVFFSKRKIPD

SEQ ID NO: 175725 - protein, 71 aa, Glycine max
  Clone ID: PAT_MRT3847_129698C.1.pep
CFKNYISIFVVGTFNFLGKIVFLIFHFVFNFEFCPPLKLLTNFIFVFHQITQCWSFNPQLDLLQMNVSRFY

SEQ ID NO: 175726 - protein, 103 aa, Glycine max
  Clone ID: PAT_MRT3847_129699C.1.pep
HEIIKHRIRYYFYSFYPLPYRGENQPPILWGENRMVKNLGGNYPTFLFFLHGTAKTSSANSFTPLKTRGSGSTGPWHHLWWGGPERGPFFGKQGGKSLPPKNN

SEQ ID NO: 175727 - protein, 56 aa, Glycine max
  Clone ID: PAT_MRT3847_12969C.1.pep
LYILYINYCIPSYQLRRLLFQFLKHEIGKKCYKCQKGKRIKTCICWNECILSLTNS

SEQ ID NO: 175728 - protein, 99 aa, Glycine max
  Clone ID: PAT_MRT3847_1296C.1.pep
VGGDARSSRPECGVCRPIGAPARAAPVISIRSGRARPISCRDLVFGRRAIGLSIPPYGRAPLEIVASPTVGEVAICAVQRVRHWRTWSPVWMLVGRGSN

SEQ ID NO: 175729 - protein, 84 aa, Glycine max
  unsure (1)..(84): unsure at all Xaa locations
  Clone ID: PAT_MRT3847_129700C.1.pep
EXVRXXXEEXXQNGEXXXXRRXLRIGKELLEAKRIEEENEXXRLLALKKVEXEXEKRAXEXIXKXLEEDXXDRRRRLGLPPEEP

SEQ ID NO: 175730 - protein, 90 aa, Glycine max
  unsure (1)..(90): unsure at all Xaa locations
  Clone ID: PAT_MRT3847_129701C.1.pep
LXXIAXXXXXKXGIXPVXGRPFXLKGFAFGPXPXXPLXXPGSSXRCSDHVGVEXLSRIRPARLXRXMVXXXXTLSFHGILVNSSXXSXNL

SEQ ID NO: 175731 - protein, 79 aa, Glycine max
  Clone ID: PAT_MRT3847_129702C.1.pep
MITAVLEPLLRCLYLVSDRLSIHNFQRQSVIDVMPKITVASMYTSQYFRNSSNHRTYYQQKVDFLLEIRTPPHSLIDFI

SEQ ID NO: 175732 - protein, 111 aa, Glycine max
  unsure (1)..(111): unsure at all Xaa locations
  Clone ID: PAT_MRT3847_129703C.1.pep
TRLAMTAYDTLWSAFLQGMXKYPIANEDGLYDTCYEFQSGIEEISIPKIDXEFADGITVELPLAGIFYVIRAQQAYKSFAANGNENDITIFANVQQKTLEIVYDVEGRRIW

SEQ ID NO: 175733 - protein, 113 aa, Glycine max
  unsure (1)..(113): unsure at all Xaa locations
  Clone ID: PAT_MRT3847_129704C.1.pep
RRGSIQNISSIRSGRFWNTSNAFSCLFYKFGDDQNNLVFQGDATFSSRGIELTKLDGGGKPLGGIVGRCLYSSPLHLWVSSTGVASFXTYFTFFISSYSTTSMYGLSFFHCTI

SEQ ID NO: 175734 - protein, 117 aa, Glycine max
  unsure (1)..(117): unsure at all Xaa locations
  Clone ID: PAT_MRT3847_129705C.1.pep
LHEEVRPHIIHRDIKASNGTTLIEDSPAPKFHDFGTCKDLFHQHLTHISTXRVAGTVGYLAPEYAIRNQVTRKSDVYSFGVLLLEIVSRRPNTNRRLPVEEQYLLTRAWDLYESGEA

SEQ ID NO: 175735 - protein, 64 aa, Glycine max
  Clone ID: PAT_MRT3847_129706C.1.pep
MLKVSPLKMRSRGILKLFPPPPSYPPPRPHPPPPPPPLPPPPPPPPQRRRTSYSDDGKPSWNGM

SEQ ID NO: 175736 - protein, 447 aa, Glycine max
  unsure (1)..(447): unsure at all Xaa locations
  Clone ID: PAT_MRT3847_129707C.1.pep
MSQHHGDEMEYAADDNEMAEVEEDMYFRGRAFGESDSDDDDDNEYDSLENRMSDTSAAEARKGKDIQGIPWDRLSISREKYRQTRLDQYKNYENIPQSGEQSEKECTATHKGGKYYDFWQNTRSVKSTILHFQLRNLVWATSKHDVYLVSSYSIIHWSSLNSKRSEILNVSGHVAPCEKHPGSLLEGFTQTQISTLAVRDKLLIAGGFQGELICKYVDRPGVSFCSRTTYDDNAITNAVEIYDHPSGAVHFMASNNDCGVRDFDMERFQLSKHFSFSWPVNHTSLSPDGKLVVIVGDNPEGILVDSQTGKTIKPLSXGHLDYSFASAWHPDGRIFATGNQDKTCRVWDVRNLSKSVAVLKGNLGAIRSIRFTSDGRFMAMAEPADFVHVYDAQSGFEKEQEIDFFGEISGVSFSPDTESLFIGVWDRTYGSLLQYNRRRNYMYLDCM

SEQ ID NO: 175737 - protein, 209 aa, Glycine max
  Clone ID: PAT_MRT3847_129708C.1.pep
MAQQQEDEMEYVADDNEMAEVEDDMYFRGRVFGDSESESDDDDEYDSMENRMTDTSAAEARKGKDIQGIPWDRLSISREKYRQTRLEQYKNYENIPQSGEQSEKECTPTHRGGKYYDFWQNTRSVKSTILHFQLRNLVWATSKHDAYLVSSYSIIHWSSLNSKRSEILNVSGHVAPCEKHPGSLLEGFTQTQISTLAVRNKVVIAGGFQ

SEQ ID NO: 175738 - protein, 99 aa, Glycine max
  Clone ID: PAT_MRT3847_129709C.1.pep
SVSDFINHRLKGVQLLLLLSTYFCKAASSVLLRRSDSGPYHQDPTTSQPQRVAISFDSRTQKIKELKKISSIKNGIWKTCLNTMVMKWSMRQTIMKWQR

SEQ ID NO: 175739 - protein, 44 aa, Glycine max
  unsure (1)..(44): unsure at all Xaa locations
  Clone ID: PAT_MRT3847_12970C.1.pep
SADLKEXAXLIEXXSYSKXVRRXAXXVXXXIELRRKLTHPLSLF

SEQ ID NO: 175740 - protein, 246 aa, Glycine max
  Clone ID: PAT_MRT3847_129710C.1.pep
MAAQWWRSAAGHLRTVAAGRGSLSGFQRSTYHTIQAIPRECSGSKVSARDRTQGRIPCVVFLQNLLEKNPDARSESKKHLLTVEKKQIKAILDSADAPFFCSTRFPLQIRAGSGSSHLLESGTVLPIKIHRDEESGKILNLVFVWAEDGMKLKVDVPVVFEGEDACPGVQKGGILNKIRPSLKFLCPSEHIPSKIVVDVSNLDIEDRIFMRDIEVHPSLKLLSKNESMPICKIVPTSLGNKEPIEA

SEQ ID NO: 175741 - protein, 56 aa, Glycine max
  Clone ID: PAT_MRT3847_129711C.1.pep
PFCQHFYHIPHMNIYSARMGSNHSIGIPHRNALELALASRLGILYNINSRLMSVHQ

SEQ ID NO: 175742 - protein, 107 aa, Glycine max
  Clone ID: PAT_MRT3847_129712C.1.pep
PPGERATPSLDPGGAIFPGYQPFFFWYEIPPPDPREGQSPQRVFKNGPGLNLRGAPLDFLGPPPKNFFFFSILGCQQAFLAPPDCGCYKKNACLFARPFVNLAFWKG

SEQ ID NO: 175743 - protein, 271 aa, Glycine max
  Clone ID: PAT_MRT3847_129713C.1.pep
LELYAAKLATINECDKNAVLQNQLQLLVKEKSALERELVAMDEVRKENALLKGSLDAFEKKSTALELELVNARKDHDKTIQKMREFEDKCSELGQNVKSLEEKLSILEDENHVLRQKALSVSPKSNHRGLTKSLSEKYSSAIAPRTEQKPTFESPTPTKLIPHITRGGLSDSHRSKLTADRHQDNYELLSRCTKEDSGLKNGKPPAASIIYKCLHHWHAFESERTAIFDYIVDGINDVTKAGDDDIVLPQWLPNTSALLCPLQRNLQSNGS

SEQ ID NO: 175744 - protein, 121 aa, Glycine max
  unsure (1)..(121): unsure at all Xaa locations
  Clone ID: PAT_MRT3847_129714C.1.pep
MTEQSAWGEPVNNGWIDIQKRTFTKWCNSHLAEKMLKIGVLDKDLEDGVLLCSLLEVISSKNVGMINKKAKIRAQKLENTGAALKFLKEEGIKLVAIGPEDITDGNLKLILGLIWTXXLAT

SEQ ID NO: 175745 - protein, 50 aa, Glycine max
  Clone ID: PAT_MRT3847_129715C.1.pep
SYISSFDLMKTRSDIIIGSKHKHHTWSKYITFLNMHRYSKAHIYNISITS

SEQ ID NO: 175746 - protein, 93 aa, Glycine max
  unsure (1)..(93): unsure at all Xaa locations
  Clone ID: PAT_MRT3847_129716C.1.pep
MFLYYWIYGLLAFLGLWHTEAKILFLGLDNARKTILLHMLKDERLDQYQPTQHXTSEELIIVKIKFKADDLKXHTVACRASKDYYAQVDAAFY

SEQ ID NO: 175747 - protein, 66 aa, Glycine max
  Clone ID: PAT_MRT3847_129717C.1.pep
HAIAMPKMKAGPTIDDVMIPNTHRPCCGGAENSRVLLIMSKCYSRLAFYISITSHTILVFKKKLII

SEQ ID NO: 175748 - protein, 157 aa, Glycine max
  Clone ID: PAT_MRT3847_129718C.1.pep
FLCNDQDKPMLLEFLNLASNNLSGEIPDCWMNWTSLVDVNLQSNHFVGNLPQSMGSLAELQSLQIRNNTLSGIFPTSLKKNNQLISLDLGENNLSGTIPTWVGENLLNVKILRLRSNSFAGHIPNEICQMSHLQVLDLAQNNLSGNIPSCFSNLSAM

SEQ ID NO: 175749 - protein, 262 aa, Glycine max
  Clone ID: PAT_MRT3847_129719C.1.pep
MVLTTEGATNSVEAVAFSFLTDDEIRRSSRVKITSPILVDFLLHPVPDGLYDAALGPFDDKSLCKSCGQTSKHCPGHFGHIELVSPVYNPLMFNILSNILQRTCFTCHHFRAPSKEVDIRTSQLELIMKGDIIRAKRLESIIPGKSVDSFNPDEFIHPGDGDESQCYSAEQLGENWTSLQFSEAMSVLRKLLTKKHKKCQKCGAKNPKISKPTFGWFHMNVLSADETRADTIRSVESETTNDDISLGGGDTTDVEDITSAGT

SEQ ID NO: 175750 - protein, 74 aa, Glycine max
  Clone ID: PAT_MRT3847_12971C.1.pep
ESWGIMKWCEGILTINALQSLLFLSTAASVSGLKTIERNFATSMDTGSDYGAFTKILPLPPYSAPAFSSYITFL

SEQ ID NO: 175751 - protein, 145 aa, Glycine max
  unsure (1)..(145): unsure at all Xaa locations
  Clone ID: PAT_MRT3847_129720C.1.pep
DLFIIGASNRPDLIDPALLRPGRFDKLLYVGVNSDASYRERVLKALTRKFKLHEDVSLYSIXKKCPPNFTGADMYALCADAWFHAAKRKVLRANPESSSQDNEADSVVVEYNDFIQVLEELSPSLSMAELNKYEQLRDQFEGTSK

SEQ ID NO: 175752 - protein, 52 aa, Glycine max
  Clone ID: PAT_MRT3847_129721C.1.pep
GNLTVTIEESPSLYSNLSHTYNYPQVLPITIEYIVSFHSILLYPDNIINENL

SEQ ID NO: 175753 - protein, 145 aa, Glycine max
  Clone ID: PAT_MRT3847_129722C.1.pep
IVVMCCSFCQALIHSIELLANVFSPAEVVPVALHLNHDNWAMSDGAYILCVVFLTIMSASVFLHSVSFGLLSFNIGPPLVFFSLIIGHASSMIKELECAGLTTGEDPQCYQRDIKGEESWDCKWTGRTIRVRVYHIYRKCGRTRG

SEQ ID NO: 175754 - protein, 99 aa, Glycine max
  Clone ID: PAT_MRT3847_129724C.1.pep
TRNSAQAKSLSSKLTIKPTQQLSLSFRPRFAFLALSKNVEQFVDKIGNPIFPGGTYYIRPQPWGAAGVELKLGRKGKPNGPFKVLQNKPQTSLGKQFKS

SEQ ID NO: 175755 - protein, 72 aa, Glycine max
  Clone ID: PAT_MRT3847_129725C.1.pep
TPFRQPFRCFPAFFSLQPISSPVRPKYSEGGLNPLNIHSKLIFNISNNTHLFFFKVKRTFPSNEIPIFYDTL

SEQ ID NO: 175756 - protein, 43 aa, Glycine max
  Clone ID: PAT_MRT3847_129726C.1.pep
RRTVDESKQMDSGAIAILADWCSSIIGFYDRRCNCLTIRLGNR

SEQ ID NO: 175757 - protein, 50 aa, Glycine max
  Clone ID: PAT_MRT3847_129727C.1.pep
IMMCLSIMLCYACCCYSHIKGFLHLPLINPTTSFFSHQNSVPFLSSSHSR

SEQ ID NO: 175758 - protein, 80 aa, Glycine max
  unsure (1)..(80): unsure at all Xaa locations
  Clone ID: PAT_MRT3847_129728C.1.pep
XIPXXPXXLLXHXRXXRNXQLINXCSXRXXFVPXFXPRIHCSSRXQFXXLEXXXXVSXSXFRXVFKLCXTAXXXXXXQFQ

SEQ ID NO: 175759 - protein, 38 aa, Glycine max
  Clone ID: PAT_MRT3847_129729C.1.pep
KVCSSHAEGVSSFPTTVHDQRPIMAREANREPARARAT

SEQ ID NO: 175760 - protein, 98 aa, Glycine max
  unsure (1)..(98): unsure at all Xaa locations
  Clone ID: PAT_MRT3847_12972C.1.pep
XFXXXKXXXXXIXXTPLXXLXGXFXXXXSAXXXXXXGVXXXXXXVXXAXXXXVXXXXLXQXKXSCXPXGXQDXALXXXVYXDXXSSRIXXXXNYVCMR

SEQ ID NO: 175761 - protein, 503 aa, Glycine max
  Clone ID: PAT_MRT3847_129730C.1.pep
TRPAIAIDMPMNVKSVVIYLAIVLASYVVVSIADSFAASEISTRLKISKAKVIFTQDLIMRGDKSIPLYSRVVDAQSPMAVVIPAKGSEFSMKLRNGDLSWHDFLEKVNNLKGKEFIATEQPIETFTNILFSSGTTGDPKAIPWTNITPLKAAADAWCHMDVRKGDVVCWPTNLGWMMGPWLVYASLLNGASVALYIGSPLGSAFAKFVQDAKVTMLGVIPSIVRSWRSTNSTSGYDWSSIRCFGSTGEASNVDEYLWLMGRALYKPIIEYCGGTEIGGGFVDMIHNRNCGSLLQAQSLAAFSTPAMCCSLFILDDEGLPIPQNVPGIGELALGPLMLGASNTLLNADHYGVYFKGMPLLNGKVLRRHGDVFERTAKGYYHAHGRSDDTMNLGGIKVSSVEIERICNGVDSSILETAAIGVPPSGGGPELLTIAVVFKDSNSTNQDLHQLRMSFNSALQKKLNPLFRVSQVVTLPSLPRTASNKVMRRVLRQQLSETNQNSKI

SEQ ID NO: 175762 - protein, 114 aa, Glycine max
  Clone ID: PAT_MRT3847_129731C.1.pep
PASGRPQQQTTLPFSLYFLSLKKDLNRTGRRRRSRRRNPRKEKQLNSAQFSSTQQLFIFFHTIQILFPFFLSLSTGFLFGFNSRHMRKVFEECTFRCLGLFWRHIKGLEEFGLK

SEQ ID NO: 175763 - protein, 53 aa, Glycine max
  Clone ID: PAT_MRT3847_129732C.1.pep
FKMCTISLIPLFSLLLKLQLWAILNIDEKKHNEVKCNKMIFAFIVWLLYSKMH

SEQ ID NO: 175764 - protein, 68 aa, Glycine max
  unsure (1)..(68): unsure at all Xaa locations
  Clone ID: PAT_MRT3847_129733C.1.pep
KRKSXXTQXXRGARXPXPAAXRPPGGXHPETPGKAKDAEDQXGARGGDRERDRNSGKTPERGRPEERG

SEQ ID NO: 175765 - protein, 81 aa, Glycine max
  unsure (1)..(81): unsure at all Xaa locations
  Clone ID: PAT_MRT3847_129734C.1.pep
MASASACLLKSSLVLDKSEWVKGQTLRQPSAXGGRCNPTTRXGLTIRAGSYADEVGKTGKTGAVPGRWIGARGWGECDLGE

SEQ ID NO: 175766 - protein, 94 aa, Glycine max
  Clone ID: PAT_MRT3847_129735C.1.pep
RETLNLIAYVRSVPFHKPRRCRLGPVCCIITHTLHFCGQQKQNLPLRMHRPSFRISFLQIGDYYSSGFISMQVADRLFMRLGKLESGKKRPYGP

SEQ ID NO: 175767 - protein, 72 aa, Glycine max
  unsure (1)..(72): unsure at all Xaa locations
  Clone ID: PAT_MRT3847_129736C.1.pep
CYCDTHYNVLSYTPITGGLKQCPEIVCVGCNGPFKPCCTNNSCPAFVINQIAXSIYSGGLSEDFIFLSQNKN

SEQ ID NO: 175768 - protein, 79 aa, Glycine max
  Clone ID: PAT_MRT3847_129737C.1.pep
WEKKQKQVPFRNSKLKSFFQQCFGGDSKILMFGNISLDPFSTGKSLCFFQFAAEVKPCKIGIPGGKKSTGSFYFCLSNG

SEQ ID NO: 175769 - protein, 54 aa, Glycine max
  Clone ID: PAT_MRT3847_129738C.1.pep
QPLTDEYDISTVTAVLIEKPPCWLTYGHYSTVMAIMYHLQISDRDFVMKKAMTG

SEQ ID NO: 175770 - protein, 115 aa, Glycine max
  Clone ID: PAT_MRT3847_129739C.1.pep
VATWKWGPVEEEFMDAAACPRTFVDGGDGAMYMCCGGDVVALQGDTWRNVAKVPGEIRNVACVGVWEGAMLVIGSSGFGEPHVGFVLDLKSWAWTKLVSPEEYTGHVQSGCLLEI

SEQ ID NO: 175771 - protein, 141 aa, Glycine max
  Clone ID: PAT_MRT3847_12973C.1.pep
MFCKSCLIAPMRFYVSRALLFLILPSTVCLSLSLLQCSIVYRLMSFLSILFFIIAFYCNVAAYENFRGPLGNVRKGVLVSMGFGTITAHALMSLEARGTLFVTPGMEAYDGMIVGEHSRDTDLDVNPVRAKELTNIRAATK

SEQ ID NO: 175772 - protein, 69 aa, Glycine max
  Clone ID: PAT_MRT3847_129740C.1.pep
YYNLMRGQIIIIKFRLWPPFVERSHRLTVWFFFLSPSEEKNSKKKEGSLHLEDHRINLILINLSSFHYG

SEQ ID NO: 175773 - protein, 61 aa, Glycine max
  unsure (1)..(61): unsure at all Xaa locations
  Clone ID: PAT_MRT3847_129741C.1.pep
RLREDDRRAVLSCSYILVVLCLVQLFILVIIILNVTCXVICNWLQVKTXFLHYQGINTLWV

SEQ ID NO: 175774 - protein, 78 aa, Glycine max
  unsure (1)..(78): unsure at all Xaa locations
  Clone ID: PAT_MRT3847_129742C.1.pep
GFPKTTSLFGGKVAQRGFVFPSRGKNIPGKGVLAHLPFXRGGPIKKKSPPGLFKVFFFFKRALKPGKGKFFKNKGGDN

SEQ ID NO: 175775 - protein, 122 aa, Glycine max
  unsure (1)..(122): unsure at all Xaa locations
  Clone ID: PAT_MRT3847_129743C.1.pep
GFGTPGLSVVVSKCRVLRELEPLQSEVEKDPQVDWIQCFPDSQPNLXFKELECVDVPINIEALEGLVASSPMLKXKLRLTRYVTMDELHRMMLRALXNTNHGTGSFTVPQAPPVGDQEPDYQ

SEQ ID NO: 175776 - protein, 91 aa, Glycine max
  unsure (1)..(91): unsure at all Xaa locations
  Clone ID: PAT_MRT3847_129744C.1.pep
AIEVLLGTDDGSLVFSPNSFSVAPGEKIVFKNNAGFPHKPXVFRPRTKIPSGVDAGKIXSMTEENFLNAVGKTYRFIFGVPRGTLRFFFVP

SEQ ID NO: 175777 - protein, 74 aa, Glycine max
  Clone ID: PAT_MRT3847_129745C.1.pep
GLCRFLLIPHHTFNIWKKYFLLLSPTYFISSFFTYEPIKQHTSSQNFLYSISSNLVYIYINLFLLCHGGWCFFM

SEQ ID NO: 175778 - protein, 68 aa, Glycine max
  Clone ID: PAT_MRT3847_129746C.1.pep
ATSLIISFSFSNRPPRFLQLIYPIETLGTIRLDTFFPQLTPSALKFPHLNFPKKKKNGSPPQKKKKTK

SEQ ID NO: 175779 - protein, 73 aa, Glycine max
  unsure (1)..(73): unsure at all Xaa locations
  Clone ID: PAT_MRT3847_129747C.1.pep
TISKGNMGGTMTSADPFAKRDWYDIKAPSLFDVKNIGKTLVSRTQXTIIASERLKHPVFEVTLADLQGDEDHS

SEQ ID NO: 175780 - protein, 40 aa, Glycine max
  Clone ID: PAT_MRT3847_129748C.1.pep
HTRIVLPGTVTIFSALLSTETCTTTTPESMHSVHDENLMS

SEQ ID NO: 175781 - protein, 71 aa, Glycine max
  unsure (1)..(71): unsure at all Xaa locations
  Clone ID: PAT_MRT3847_129749C.1.pep
MVNDCTLLXGWSLEECGRYLVTIXVYENKPADIFQGQMDTDYLXSRFTHSLTTDXHVNMTDVFTFGTIYGS

SEQ ID NO: 175782 - protein, 86 aa, Glycine max
  unsure (1)..(86): unsure at all Xaa locations
  Clone ID: PAT_MRT3847_12974C.1.pep
DGGVAWTSNTGPLEAFEWHGXTLGEILSGIIANTSHVALXHLYGPANMPLTVVYPCSDEGISIKRFPCCISIKGLYVCISTVSGFD

SEQ ID NO: 175783 - protein, 56 aa, Glycine max
  Clone ID: PAT_MRT3847_129750C.1.pep
KKIPLGGGDKIYQGVLPISWGEKKKTHFVRPTKKTFFSICPLTGPILNFLKKFRGP

SEQ ID NO: 175784 - protein, 112 aa, Glycine max
  unsure (1)..(112): unsure at all Xaa locations
  Clone ID: PAT_MRT3847_129751C.1.pep
RRGEPQAXEEPGPXXQGAGTPPPEXPXPPPETKDGHRGGGRXXARTKPXPTRGPGEXTKPRHGTEQKTPGTKTRTKKAPKGTPTTKAPRARSTEGRRTQTPRRPRKAAPRGT

SEQ ID NO: 175785 - protein, 58 aa, Glycine max
  unsure (1)..(58): unsure at all Xaa locations
  Clone ID: PAT_MRT3847_129752C.1.pep
TINLVLQIFFITNKYIYIYIYIYIYIYIYIYIYIISKIXIFINLVLTLMMFTGVQRLI

SEQ ID NO: 175786 - protein, 167 aa, Glycine max
  Clone ID: PAT_MRT3847_129753C.1.pep
SLAKSDSEVEEMLDRMLTRLALCDDSKLEPLLSKLLPLCISSLSSQSVAVRNKVLEILSHVNKRVKLQPQIGLPLSDLWKLYSESAAVPIIRNFCIVYIEMAFQRVNAKEKEDLAPDLLVNISKLPLQHQEIILRIIVKVIGECHSGQIGDEVSAKYGKVNNSQDRE

SEQ ID NO: 175787 - protein, 109 aa, Glycine max
  Clone ID: PAT_MRT3847_129754C.1.pep
KCRDCFPTLQGSGAHSDENALVASIKTKRTIQFVDWCPPGFKCGINSHPPPIVPAVDLAKVQRAVRIISDPTTVPQVFACIVPSLVPSIPSWLVSTRACVKANNDQFFL

SEQ ID NO: 175788 - protein, 69 aa, Glycine max
  Clone ID: PAT_MRT3847_129755C.1.pep
THSSPEGVEYVEMVCTRMGLISVGVPRVTRYLNVFEGSVCEYRLAPHTLVRYLECTLVRIELQHNCLAK

SEQ ID NO: 175789 - protein, 73 aa, Glycine max
  Clone ID: PAT_MRT3847_129756C.1.pep
IFSQETLPVQQMMVDNPNWWSMHQQPSLIPPQYVFPPSSIPFNSLTENQEPPQSWSQLFFTGLPGEEEKLGPK

SEQ ID NO: 175790 - protein, 69 aa, Glycine max
  unsure (1)..(69): unsure at all Xaa locations
  Clone ID: PAT_MRT3847_129757C.1.pep
XEENXFTIXKSPQSLXXPCXQXEXQXPLTHERXSTKYNXLTKVQPKPRMRWVFSSSILIHXXVLXIVIS

SEQ ID NO: 175791 - protein, 45 aa, Glycine max
  Clone ID: PAT_MRT3847_129758C.1.pep
SFSQSVSNQHMVALKWAAWGSKSHARVHLSSRHIYRRILWSLLHT

SEQ ID NO: 175792 - protein, 117 aa, Glycine max
  Clone ID: PAT_MRT3847_129759C.1.pep
YIYSFGVVLLELMSGKRALDDNRPSGEHSLVEWAKPLLTNKHKISQVMDARIEGQYSKREAKRIAHLAIQCLSTEQKLRPNINEVVRLLEHLHDSKDTSSSSNATPNPSLSPSPLRT

SEQ ID NO: 175793 - protein, 129 aa, Glycine max
  unsure (1)..(129): unsure at all Xaa locations
  Clone ID: PAT_MRT3847_12975C.1.pep
TSPRFGGKKTTREVRXQRINVQTKNSSYFVRWIPTNVKSPXCNIPPPGLKRAPTFMGNSTSIQKMFRRVSDQFTVMFRKKPFLHWNTGKGMDKMEFTKVESNMNALGSKYQQNQKATVDNKGYKNENKE

SEQ ID NO: 175794 - protein, 79 aa, Glycine max
  Clone ID: PAT_MRT3847_129760C.1.pep
KNYIFAYYASVTCNSFKALAISPLPNSHTHHILSVLSNLKISYNSKKDPSKHWREQGVVIQTSEEQKHNWNKICEVKCS

SEQ ID NO: 175795 - protein, 92 aa, Glycine max
  unsure (1)..(92): unsure at all Xaa locations
  Clone ID: PAT_MRT3847_129761C.1.pep
RDQXRXKAMGXCSGFFXIAEXEXVXSFRXVXAXLIXRXXSGXQKXDSSIRXMDXKXDEHLFRXTXGIXFLSKTMDLGRSDWGXLEMWETGGE

SEQ ID NO: 175796 - protein, 85 aa, Glycine max
  unsure (1)..(85): unsure at all Xaa locations
  Clone ID: PAT_MRT3847_129762C.1.pep
HCLISLHDWPSPLVLLPSAGFHVPLPAPRRLFLYDYXVYAVYTYRLVASHIVTSAKPHPYNRVRNTRASISLLCLVSAAAARCFS

SEQ ID NO: 175797 - protein, 42 aa, Glycine max
  unsure (1)..(42): unsure at all Xaa locations
  Clone ID: PAT_MRT3847_129763C.1.pep
SYDRRKAPPYVXARKFGLRGQWFRSKNVSIGDEFYCYQSPSF

SEQ ID NO: 175798 - protein, 61 aa, Glycine max
  unsure (1)..(61): unsure at all Xaa locations
  Clone ID: PAT_MRT3847_129764C.1.pep
PRGPSTSAACFADPXVVYHHXEQAIPAAPDAPAACTEPLVYHLVAIHRDYRHVHPMVTRRA

SEQ ID NO: 175799 - protein, 37 aa, Glycine max
  Clone ID: PAT_MRT3847_129765C.1.pep
REAISLHTRIFQSLINHSGHRALKEGGVQDLINLMPF

SEQ ID NO: 175800 - protein, 66 aa, Glycine max
  unsure (1)..(66): unsure at all Xaa locations
  Clone ID: PAT_MRT3847_129766C.1.pep
SLYRFRQVVGPLLFQNLQFTHCDLPNRYYLXKLFSKTTFDAFIHFSVFIAVAYSLSNPLHYLLFLI

SEQ ID NO: 175801 - protein, 43 aa, Glycine max
  Clone ID: PAT_MRT3847_129767C.1.pep
YTVLYLHNTLCKSYYTSHAENFEQPKIFCTDIDGQSFIKVRTI

SEQ ID NO: 175802 - protein, 93 aa, Glycine max
  Clone ID: PAT_MRT3847_129768C.1.pep
MSMVDSAGNKGTMSKKNNLAKRKKQYEFDLQREKQEKIKKEQKLHAKKNKMKVDGSGKKKKGGSGFQVGKRKVKTKLTALAKAKAAQAMELDK

SEQ ID NO: 175803 - protein, 147 aa, Glycine max
  Clone ID: PAT_MRT3847_129769C.1.pep
SSRSSRFGSRGDPLSPLLFNIVAEALSGIMSHAIAKGLYRGFLCGKNKVEISLLQYADDTIFFGEATMENVRAIKAMMRAFELVSGLKINFAKSGLGAVGVSEEWRIGATGYLNCSLLSFPFTYLGVPIGANPRAYQMWDPIIAKCE

SEQ ID NO: 175804 - protein, 92 aa, Glycine max
  Clone ID: PAT_MRT3847_12976C.1.pep
LRMGIFDGICQDKKLEAGFYGHENGSNGVGVKEKKVWFGCNKKNIKGGSKPKDLKTTKKFSGDQQKPQPQSEFVKEDPAETNQGKDKNIRRK

SEQ ID NO: 175805 - protein, 80 aa, Glycine max
  Clone ID: PAT_MRT3847_129770C.1.pep
GICSVFTYIPQPCSHFNPYLASGPYNNSGVLVKADRNKIQSLGYDNVSGYIPTQINVAGCDKSTVKVICPNAPLIIRCVI

SEQ ID NO: 175806 - protein, 128 aa, Glycine max
  Clone ID: PAT_MRT3847_129771C.1.pep
AGFGFAFPFNSNLTADFSRAILNVTESDLMKEIEEKYFGKNDDIGGEETSTEISSATLSLNFHSFAGLFLITGISTLLALLVSETVIWQRAILIAKAYSQKFLFSTPPSPQTRVHPTQDSTHGSIEAV

SEQ ID NO: 175807 - protein, 125 aa, Glycine max
  unsure (1)..(125): unsure at all Xaa locations
  Clone ID: PAT_MRT3847_129772C.1.pep
MMLQVVRAEKEIMCIERDREALLQFKAALVDDYGMLSSWTTADCCQREGIRCTILTEHVLRLDLDGQLNYYSYGMASRRYIIGEIHQLGMGLQHLNYLNHGSNYFQGXGIPEFFGYLSNLRHLEL

SEQ ID NO: 175808 - protein, 89 aa, Glycine max
  Clone ID: PAT_MRT3847_129773C.1.pep
VARRIQRKVSARGGGFPPVQTIAVVHEDSTEIACMLLDPKLVGADRVQNRVEMQAAEEGLDVEQGYFTDLSPEMFVEKYMKLINNANKS

SEQ ID NO: 175809 - protein, 82 aa, Glycine max
  unsure (1)..(82): unsure at all Xaa locations
  Clone ID: PAT_MRT3847_129774C.1.pep
LILTLLSITLFPHVTSDTLHNVSTIPPTFNPIQYPNYNVIHISNGYQIHHYNSPLSITNSPNQEISLVXTTRTHFKRLFYYI

SEQ ID NO: 175810 - protein, 56 aa, Glycine max
  Clone ID: PAT_MRT3847_129775C.1.pep
DVSTRVSAAAKITKGGSSSRNHESQFHTSRSAFLYYIRMESQVMHAIVGSLLGRSG

SEQ ID NO: 175811 - protein, 45 aa, Glycine max
  unsure (1)..(45): unsure at all Xaa locations
  Clone ID: PAT_MRT3847_129776C.1.pep
XFFSWGPTFPFFNNGKDLIQFFLLHKRRYPHENGVLHHGPVTGPN

SEQ ID NO: 175812 - protein, 193 aa, Glycine max
  Clone ID: PAT_MRT3847_129777C.1.pep
MKKLARKLHNEEDENLSLPVHDGDSRPLDPQEQEELVRSLERSQAQQSRLWRTVFAALFFCYIVFLLYSIFQQASSPWELRYHAYFMEEIYSWMIIFADWVAVLACSFAIIGLLDQSMHRRRWIHYSWYTAVILAIFWLYYMLRLPKFRWDVIWLPFGPLGASAICLYVDHLLTESSEEVRKLRGYMYTSKAS

SEQ ID NO: 175813 - protein, 193 aa, Glycine max
  Clone ID: PAT_MRT3847_129778C.1.pep
FGTRPRAEFGRGMFLLSIYYYIWSVDLIRVMKSQQTTIDSALESINLQSMISVQLQSMIMDNAQTTIRNTDIITSLNNDIQTLQQIQTLQNKFKDESGELPSKIQEIFANIDCNEVYSSKYLLSADITVSECITLAAGTDRIGLVNVISDQAFKLSTFLLKFQSSARDADTLGDLYREAVETFIQYFDVATTL

SEQ ID NO: 175814 - protein, 74 aa, Glycine max
  unsure (1)..(74): unsure at all Xaa locations
  Clone ID: PAT_MRT3847_129779C.1.pep
FLELHKLKTKXHLLLLLLCVFLVKSQGVNDNEEGFFSARSHRPLDKKREEAPSLRPAPPPISGGGYRARPAKAA

SEQ ID NO: 175815 - protein, 139 aa, Glycine max
  Clone ID: PAT_MRT3847_12977C.1.pep
SSASFSIDSYKPHKAYINENWYIITANITTPRKKKTWRKKGQEEQQVHKLDGQTHDLPLCKSYKYLYIRITPSTPMALLSNNINKSLIQLGDQWHYSHRKKNGCKLSKELPKASEDTAKCQHRISDLGRNRRKHAYTLY

SEQ ID NO: 175816 - protein, 234 aa, Glycine max
  Clone ID: PAT_MRT3847_129780C.1.pep
MWSPIVLLLCLIPPVFLLFFFQYRRTFKNSNLPPGPRGLPIIGNLHQLDSSNLHLQLWKLSKKYGPIFSLQLGLRPAIVISSSKVAKEALKTHDVEFSGRPKLLGQQKLSYNGKDISFSPNGSYWREMRKLCVVHVLSSRRVSSFSSIINCEVKQMIKKISRHASSLKVTNLNEVLISLTCAIICRIAFGRRYEDEGTERSRFQELLNECEAMLSIFFVSDYVPFLGWIDKLNG

SEQ ID NO: 175817 - protein, 135 aa, Glycine max
  unsure (1)..(135): unsure at all Xaa locations
  Clone ID: PAT_MRT3847_129781C.1.pep
WSGGPTLILTDVLANYAETQIDYILANIPGRMSYVVGVGYDYPKHVDHIGASLPKDRISTGAXGGSRWRCTCKAYPNTIAGAMVGGPHKHAGXHDATTNCTDTXPSLDGNAGSVAAVAELEGDKTASNDQDTLRS

SEQ ID NO: 175818 - protein, 53 aa, Glycine max
  Clone ID: PAT_MRT3847_129782C.1.pep
IRSHLQDLSQGYCASNQWGRTRLMSYNDGWLTFSQRYSHHFRIELSKLSCHVE

SEQ ID NO: 175819 - protein, 139 aa, Glycine max
  unsure (1)..(139): unsure at all Xaa locations
  Clone ID: PAT_MRT3847_129783C.1.pep
PLWKKVCWNFDMRKLLHSWSTDVRPATXLCVDDGCPYANAMVHDSSESTIPGDFVSDVKKTAINNVCAYGLNAGIIRXSGVLCTIPQSIXQQTVWNQMASVRTPLHFDYSTHSFSQYSIDLLGGGMLVHKSADXVTLIQ

SEQ ID NO: 175820 - protein, 382 aa, Glycine max
  unsure (1)..(382): unsure at all Xaa locations
  Clone ID: PAT_MRT3847_129784C.1.pep
MAVSDSPSGGSTPPHQEQQANSKYGFTKPLSLAGPTDADLQRNNDLDKFLLDSGLYESNEESAARKEVLHRLDQIVKSWVKQLTRQRGYTDQMVEDANAVIFTFGSYRLGVHGPGVDIDTLCIGPSYVNREEDFFIILHNILAEMEEVSELQPVPDAHVPVMKFKFQGISIDLLYASISLLVVPEDLDISHGSVLYDVDEPTVRSLNGCRVADQILKLVPNVEHFRTTLRCLKFWAKRRGVYSNVTGFLGGVNWAILVARICQLYPNAIPSMLVSRFFRVYTQWRWPNPVMLCSIEENELGFPIWDPRRNPRDRFHTMPIITPAYPCMNSSYXVSARTLRGMVDQFCYGNKIWDEIEVNKAQGNSMFPPYIFFEGYKKYLQV

SEQ ID NO: 175821 - protein, 208 aa, Glycine max
  Clone ID: PAT_MRT3847_129785C.1.pep
MAVSDSPSGGSTPPQQEQQPNKYAFTKPLSLAGPTDADLQRNNELDKFLLDSGLYESNEESAARKEVLHRLDQIVKNWVKQLTRQRGYTDQMVEDANAVIFTFGSYRLGVHGPGVDIDTLCIGPSYVNREEDFFVILHNILAEMEEVSELQPVPDAHVPVMKFKFQGISIDLLYASISLLVVPEVSLVIHSAGTLYVLRAHFCGGQFY

SEQ ID NO: 175822 - protein, 101 aa, Glycine max
  Clone ID: PAT_MRT3847_129786C.1.pep
EPDPIKPDPHLKPKSIGIRNLPTHRLLSAGCLGTSSTASKIGGNCGSDNQCDARLSCLTCPANANTRPRCLRTQPFSPTSNVRGLAFNQIAWLTTHKYYAL

SEQ ID NO: 175823 - protein, 28 aa, Glycine max
  Clone ID: PAT_MRT3847_129787C.1.pep
MSVKSALYVLRELREISEVGLYVYRLGS

SEQ ID NO: 175824 - protein, 47 aa, Glycine max
  Clone ID: PAT_MRT3847_129788C.1.pep
SGGEKRQRGIIYKPLIRPLVNLLGYLVIGRIMTKTMVCVYYTGLRVA

SEQ ID NO: 175825 - protein, 48 aa, Glycine max
  unsure (1)..(48): unsure at all Xaa locations
  Clone ID: PAT_MRT3847_129789C.1.pep
DITLRLPHFLFQVNFVFVLTQINFLNXALDSFNTGVVSSIYYVMFTTF

SEQ ID NO: 175826 - protein, 38 aa, Glycine max
  Clone ID: PAT_MRT3847_12978C.1.pep
HLSEQREFLITQICEACRHHVSSYPFCRLVLTRGSARE

SEQ ID NO: 175827 - protein, 71 aa, Glycine max
  unsure (1)..(71): unsure at all Xaa locations
  Clone ID: PAT_MRT3847_129790C.1.pep
PSRAERRTIDGDPTLDLRCQYLSNADLLAKNATNLDGFVGSGRXCIDSESLDLLESKLAVLCFHIKIFDEL

SEQ ID NO: 175828 - protein, 191 aa, Glycine max
  unsure (1)..(191): unsure at all Xaa locations
  Clone ID: PAT_MRT3847_129791C.1.pep
KIPVDIFHLTLRATEISFPQARKVFLSKVHKYIKDNLLDAKYACALIFNISGTKDSKPEEFAEDKQNLDDIIHMHYQARAWLLSGQSDANLLTTYPENILPYLVHALANISCPNIDECKDVEAYENIYRQLHLILSMLMXRVEDGKSKVALIKENEIISTITSIFWSVKQSADVVDSSESENSLALWDLWG

SEQ ID NO: 175829 - protein, 80 aa, Glycine max
  unsure (1)..(80): unsure at all Xaa locations
  Clone ID: PAT_MRT3847_129792C.1.pep
RHMMLXGFXEALXGXFPXKSGXLLPFSGKGXWDVXFXQXXQSWXNLXEXTXQXVAGLSEIFGSPALXLMGLGYSCSXLWF

SEQ ID NO: 175830 - protein, 68 aa, Glycine max
  unsure (1)..(68): unsure at all Xaa locations
  Clone ID: PAT_MRT3847_129793C.1.pep
MDCFLKMFLIYFQPLFSKQGXPTPPISMTHYKLISPFSMIKKQIPTYAIHEKQNERSQNWVASQEALL

SEQ ID NO: 175831 - protein, 64 aa, Glycine max
  Clone ID: PAT_MRT3847_129794C.1.pep
RGAGQKRNRWDRTKYLAKARHALECKAPNAVLNNNVQHTENSSVEFSPSQPDQVVHSRVRVFRY

SEQ ID NO: 175832 - protein, 148 aa, Glycine max
  Clone ID: PAT_MRT3847_129795C.1.pep
VRALGMILEMLDKGVDPDGITYNSLISCLCRDGMVDEPIELLVDMEMESSECKPSVVSYNIVLLGLCKVSRVSDAIEVLAAMVAKGCRPNETTYTFLIEGIGFGGCLNNARDLATTLVNMDAICEHSFERLYKTFCKLDVSRQLNLSD

SEQ ID NO: 175833 - protein, 243 aa, Glycine max
  unsure (1)..(243): unsure at all Xaa locations
  Clone ID: PAT_MRT3847_129796C.1.pep
MHHMALLLVALLALVTTLPSVTVGEVLSPILDVASLNRTSFPKGFIFGAGSASYQYEGGANEGGKGPSIWDTFTHKYPDKIVDRSNGDVANDQYHHYKEDVGIMKYMNLDAYRFSISWSRILPKGKLNGGINQEGVKYYNNLINELIANGLQPFVTLFHWDLPQALEDEYGGFLNPRIINDFQDYAELCFKEFGDRVKYWVTLNQPYTYSTGGYANGVKAPGRCSKWLNPKCTAGDSXTEPYL

SEQ ID NO: 175834 - protein, 56 aa, Glycine max
  Clone ID: PAT_MRT3847_129797C.1.pep
VLLTKDKKRTISVEKKRSWSPMLLDILRRRKTQIIPIRHASATKARKMVRQVYNLQ

SEQ ID NO: 175835 - protein, 73 aa, Glycine max
  Clone ID: PAT_MRT3847_129798C.1.pep
TDFFIIKINISCSTGPWQLQGQLGCYLRSTNHLRPQINFTLFKNILLFVINLNYYMILYIIIFISRTIVLKLY

SEQ ID NO: 175836 - protein, 67 aa, Glycine max
  Clone ID: PAT_MRT3847_129799C.1.pep
HYVINPLLQLPLGQNLSFVRSRNHCLTMENVRYLHTPVYNLVLQVIAKKPRLTSETFHYSTMEAFLL

SEQ ID NO: 175837 - protein, 139 aa, Glycine max
  Clone ID: PAT_MRT3847_12979C.1.pep
MSSSGVDPPRPSSHDSSGKGAVAKKRRYVVRLLPPRDSLPSSTSSPSSVSIPVRPPDLAPTPSPPPTEARPSSSHVNALGPSPIPTSTPSPSSIDARRSSPVPTSTPSPSPPMDNMPTDEDAINLAMEDPPLMIDLWLR

SEQ ID NO: 175838 - protein, 327 aa, Glycine max
  Clone ID: PAT_MRT3847_1297C.1.pep
MSTAGQVIKCRAAVAWEAGKPLSIETIEVAPPQKGEVRLKILFNSLCRTDVYWWDAKGQTPLFPRILGHEASGIVESVGKGVTHLKPGDHALPIFTGECGECTYCKSEESNLCELLRINTDRGVMLSDGKTRFSKNGQPIYHFVGTSTFSEYTVLHEGCVAKINPAAPLDKVAVVSCGFCTGFGATVYADFVNPKDHNKPVQEVIAEMTNGGVDRAIECTGSIQASISAFECTHDGWGTAVLVGVPKKDVEFKTNPMKFMEGRTLKGTFYGHYRPRTDIPGVVEKYLNKELELDKFITHSVPFSKINTAFDLMLKGEGIRCLICMEE

SEQ ID NO: 175839 - protein, 51 aa, Glycine max
  Clone ID: PAT_MRT3847_129800C.1.pep
VCRSCLVGKEREESGRSRGSKPTYACMPLHTSSVGSPTTHLLAVFIQRRDW

SEQ ID NO: 175840 - protein, 54 aa, Glycine max
  Clone ID: PAT_MRT3847_129801C.1.pep
PRVRPLVRSFTMPSQGVMRLRAELEILVHYLPFILFTMPYNPTYMGRLKVVDCK

SEQ ID NO: 175841 - protein, 76 aa, Glycine max
  unsure (1)..(76): unsure at all Xaa locations
  Clone ID: PAT_MRT3847_129802C.1.pep
FWPPNRFGGVESLGFXNLPFGPLPIKWVDLSPPPAPKIFWLTPFPPHVWEKVSPFMEGFAPQRLWNPPRPFPPEKI

SEQ ID NO: 175842 - protein, 73 aa, Glycine max
  Clone ID: PAT_MRT3847_129803C.1.pep
AGIDEITIFCFVSLAILREIKLSPDTRWGYQGYLDIALAFICVYCILWEVLDQNNSKEIILQLVTSIYDIVSP

SEQ ID NO: 175843 - protein, 71 aa, Glycine max
  Clone ID: PAT_MRT3847_129804C.1.pep
LVTTIIQSCTLHAETLATRLTLHHNLPVQKGYKVSVTIRNTQQRGICSKDSTNDSECSNCNTECNLCLCSF

SEQ ID NO: 175844 - protein, 105 aa, Glycine max
  unsure (1)..(105): unsure at all Xaa locations
  Clone ID: PAT_MRT3847_129805C.1.pep
MKMSVKNNMVVLKVWLSLLFLVGVTDAHMELNLIKSDLSSGYDDDEDSHPCCDLCLYTRSMSDQCRCEDIKLNSFQXDCKICMCTRLQPXQCPCIDSNDLCYELC

SEQ ID NO: 175845 - protein, 352 aa, Glycine max
  Clone ID: PAT_MRT3847_129806C.1.pep
MEKYELVKDIGSGNFGVARLMRHKDTKELVAMKYIERGHKIDENVAREIINHRSLRHPNIIRFKEVVLTPTHLGIVMEYAAGGELFERICSAGRFSEDEARYFFQQLISGVSYCHSMQICHRDLKLENTLLDGSPAPRLKICDFGYSKSSLLHSRPKSTVGTPAYIAPEVLSRREYDGKLADVWSCGVTLYVMLVGAYPFEDQEDPKNFRKTINRIMAVQYKIPDYVHISQDCRHLLSRIFVANPARRITIKEIKSHPWFVKNLPRELTEVAQAAYYRKENPTFSLQSIEDIMNIVEEAKAPPPASRSIGGFGWGGEEEEEDETKEAVAETEEDEYEKRVKEAQASGEFHVS

SEQ ID NO: 175846 - protein, 359 aa, Glycine max
  Clone ID: PAT_MRT3847_129807C.1.pep
MDKYELVKDIGSGNFGVARLMRHKDTKELVAMKYIERGHKIDENVAREIINHRSLRHPNIIRFKEVVLTPTHLGIVMEYAAGGELFERICSAGRFSEDEARYFFQQLISGVSYCHSMQICHRDLKLENTLLDGSPAPRLKICDFGYSKSSLLHSRPKSTVGTPAYIAPEVLSRREYDGKLADVWSCGVTLYVMLVGAYPFEDQDDPKNFRKTINRIMAVQYKIPDYVHISQDCRHLLSRIFVANPARRITIKEIKSHPWFLKNLPRELTEVAQAAYYRKENPTFSLQSIEGIMNIVEEAKTPPPASRSIGGFGWGGEEEEDETKEEEDETKEEAVTEAEEDEYEKRVKEAQASGEFHVS

SEQ ID NO: 175847 - protein, 92 aa, Glycine max
  Clone ID: PAT_MRT3847_129808C.1.pep
FLQIFSNSSAYTNQFIHFQSHSHINNFNHHQNFNNFPILLTIYFIHINFLLIIHCILIQSLSSQTSFITQLHPLQKSNLAIYTLTINQINLL

SEQ ID NO: 175848 - protein, 222 aa, Glycine max
  Clone ID: PAT_MRT3847_129809C.1.pep
LCQMFIINAGPGFRLLWNTVKSFLDPKTTSKIHVLGNKYQSKLFEIIDASELPEFLGGTCTCADQGGWLRSDKGPWKNPEILKMILSGEARRARPVVKVLNSEGKVIAYARPQYPMVKGSDTSTAESGSEAEDIASPKVTKSYSHLRLTPVREEAKVVGKLSSAGGGNLAGYDEYVPMVDKAVDAAWKNQASLQRSQTSKGKPPLPDTPNPPEGIRARIVEL

SEQ ID NO: 175849 - protein, 178 aa, Glycine max
  Clone ID: PAT_MRT3847_12980C.1.pep
MDHNHHHRHHNHNHALHTTPLSEPTTPTTPRPTLFLSTSGKALLLSNSNKRLDTPRKKYVKQVTGRHNDTELHLASQRGDVDSVRHVLAEIDSIMMGSLEFDAELADIRSAIFNEVNDLGETALFTVAEKGHLDVVRELLPYTTDDALSSKNRSGFDTLHIAASNGHLAIVQALLNHD

SEQ ID NO: 175850 - protein, 123 aa, Glycine max
  Clone ID: PAT_MRT3847_129810C.1.pep
FQRKEFDYCIDSAIRTKVLFPNGEVHQKHAGIISGTAGTLLFNSLLNTIAGYTILNMMRMYSFQDQFDFINKIEDPNWLGDDFAFFTYYDFDLELFSHLMFKYFNVVVKPEKTIRTQILGDRK

SEQ ID NO: 175851 - protein, 265 aa, Glycine max
  Clone ID: PAT_MRT3847_129811C.1.pep
MIGSPITPQGVIERKRGIGKVEVEVKNMQSDKDREEDMDRLSDLPDFVLLHIMKFMSMKHAVQTCVLSKRWKELWKRLTNLALHSSDFADLAHFSKFLSWVLSNRDSSISLHSLDLRRKGCIDHELLDMIMGYAVSHDVQQLAIEVNLNAKFGFKLHPSIFSCKSLTFLKLSIWAVPWMTELPSSLQLPALKSLHLEHVTLTAGEGDCAEAFSTCHVLNTLVIDRCNLHHGAKFLCICNSNLSTLTIGSTIQETPYKFILSTPKS

SEQ ID NO: 175852 - protein, 80 aa, Glycine max
  unsure (1)..(80): unsure at all Xaa locations
  Clone ID: PAT_MRT3847_129812C.1.pep
MPITNISVGXPYEATHPHTXKAGLAEFISTFIYAFAYSSSWIAFNKLTDIGSATPXAGFIFASIVHAFSLLVAVFVGTNI

SEQ ID NO: 175853 - protein, 111 aa, Glycine max
  Clone ID: PAT_MRT3847_129813C.1.pep
TVSKKPQKGSVSKKRQKGPVLKKPQKGLFSKKHQKGTVSKKPQKGMVSKKLQKGTVSKKPQKGTVSKKLQKGSVSKKPQKGSLQVRRGYPLSLSKPISGKKTKKKKKRKRL

SEQ ID NO: 175854 - protein, 220 aa, Glycine max
  unsure (1)..(220): unsure at all Xaa locations
  Clone ID: PAT_MRT3847_129814C.1.pep
ADVDAHANSECYANSSSFAEADWQQKTHLDEHGAEDGSVENADNVESASISAKSTSEDNTGAEDDVSSVAANIEQLNIQRDDQGTEQEHDNPSVVIPNHLLLHTPECMNLSFGSFGSGNPLSGSGSFTSRPLKSSLEDTSGATDVSTIENSDTRNPDYYGDEHLSTTATTTSDGNLVQGTGVSAGTYEHTSISQQEALKPDPXEIAQENQYSFTSQSHGF

SEQ ID NO: 175855 - protein, 61 aa, Glycine max
  Clone ID: PAT_MRT3847_129815C.1.pep
SSCKLSMLRYLEFLSLACLAYQKCCVSKRLNIFFVGFQILSFNNRRESPNFSFTDRESDCT

SEQ ID NO: 175856 - protein, 302 aa, Glycine max
  Clone ID: PAT_MRT3847_129816C.1.pep
FGSSKTTVTEDRDVLVDAAADKMERDLILLGATAVEDRLQKGVPECIEKLARAKIKLWVLTGDKMETAVNIGYACSLLRQDMKQIVITLDSPDILSLEKQGDKEALSKASLESIKKQIREGISQIKSAKESSNTNKGSSSGFGLIIDGKSLDYSLNKNLERSFFELAINCASVICCRSSPKQKARVTKLVKLGTGKTTLSIGDGANDVGMLQEADIGVGISGAEGMQAVMASDFAIAQFRFLELQPYALQLWCYRRISMMICYFFYKNIAFGFTLFWFEAYASFSGQAAYNDWYMSFYREIL

SEQ ID NO: 175857 - protein, 104 aa, Glycine max
  Clone ID: PAT_MRT3847_129817C.1.pep
DEIKSSLMTKCLMIRSCIKNCGTVEFQLSHEIFVVKPLEWSNQMVVPQPHLAFLRVAIAVFIEGHMTHGIAISKLTQKQGLHFHPCLASDQHQVRTVRTVRTVR

SEQ ID NO: 175858 - protein, 49 aa, Glycine max
  Clone ID: PAT_MRT3847_129818C.1.pep
YDTLYPSFFLSAKTSIWGRITFILLPLQPPSLSLNSKNASSKATILLQL

SEQ ID NO: 175859 - protein, 72 aa, Glycine max
  Clone ID: PAT_MRT3847_129819C.1.pep
FISDPKNYIRLMKNMYLMSQDDLRKQVLHLQSPVDIIMNDLNTLTTRFSMQSPLRSQHFDPDIHTMICTTPM

SEQ ID NO: 175860 - protein, 115 aa, Glycine max
  unsure (1)..(115): unsure at all Xaa locations
  Clone ID: PAT_MRT3847_12981C.1.pep
MDGFYIVPAFMDKXLVVYITKNFMTXPNIKVPFIXGIWGGKGQGKSFQCELVFAKMGINPIMMSAGQSESGNCXEPSKLIRHRYREAADLINKGKMCAPFINDLDARAGRXGGTT

SEQ ID NO: 175861 - protein, 33 aa, Glycine max
  unsure (1)..(33): unsure at all Xaa locations
  Clone ID: PAT_MRT3847_129820C.1.pep
LLYLTTLLFQLGVGMXIKGGGNRPISAFTPYVL

SEQ ID NO: 175862 - protein, 29 aa, Glycine max
  Clone ID: PAT_MRT3847_129821C.1.pep
KSPTFTKFFEILVDITGNCLKSQPNGQTH

SEQ ID NO: 175863 - protein, 39 aa, Glycine max
  Clone ID: PAT_MRT3847_129822C.1.pep
LRCNRSGPPVFSMTCAHCSLGISLILKCVVDIEELLECL

SEQ ID NO: 175864 - protein, 106 aa, Glycine max
  Clone ID: PAT_MRT3847_129823C.1.pep
MPKEVKQKSGLIVGLNAGHKVTPRTPAPRISRRKGFLSKRTAFVREITKEVAGLAPYEKRIIELLRNSKDKRARRLAKKRLGTFGRSKRKVDEMTKVIAESRRAGH

SEQ ID NO: 175865 - protein, 66 aa, Glycine max
  Clone ID: PAT_MRT3847_129824C.1.pep
DSSFHTFSFPVDVFSPIYYTHIIILKKKKKKKKKKKKKKKKKKKKKKKKKKNPKKKKKKKKKKGPF

SEQ ID NO: 175866 - protein, 37 aa, Glycine max
  Clone ID: PAT_MRT3847_129825C.1.pep
LFQRYGTIYSARLLVYADLLAVVFNESFFNISTICHS

SEQ ID NO: 175867 - protein, 210 aa, Glycine max
  unsure (1)..(210): unsure at all Xaa locations
  Clone ID: PAT_MRT3847_129826C.1.pep
ATSASVATPHALSDRVAQFGEGVGRFFRELREMARSDPRKVVFAXKAELSLALVSLFIYIKEEQLSKYSIWAILTVVVVFEFSVGATLNKGFNRSLGTISAGGLALGIAELAVLSGKFEELIIVLCIFIAGFCASYVKLLPAMKTYEYGFRVFLLTFCIVLVSGRTSREFFSTAFYRLILIAIGAGICLVVNIFIYPIWSGEDLHKLVVK

SEQ ID NO: 175868 - protein, 53 aa, Glycine max
  Clone ID: PAT_MRT3847_129827C.1.pep
CPSQPPSMSSSWHMHPRKPYQQVHCLEHTGRFSAAHPLSPASTHAYIRIEKIK

SEQ ID NO: 175869 - protein, 118 aa, Glycine max
  unsure (1)..(118): unsure at all Xaa locations
  Clone ID: PAT_MRT3847_129828C.1.pep
PLTEVCSSIYNEMLIRYSYEKLLRQAKAPSMCLQSCKNFVALCEYGDXTVISVHEYDKPYFKGSKMKSYLASYNITIADGIDKTSSTLXFRKLSHCYFLKRNFKQLFNVLCIAPEDKA

SEQ ID NO: 175870 - protein, 31 aa, Glycine max
  Clone ID: PAT_MRT3847_129829C.1.pep
EELATSQWGVLQRIQIQLAFTNAHQLVFFIL

SEQ ID NO: 175871 - protein, 165 aa, Glycine max
  unsure (1)..(165): unsure at all Xaa locations
  Clone ID: PAT_MRT3847_12982C.1.pep
PISDNARSIAKMASIIHHIRNRTNTLNTTNNTTATISKEFTIKSTTVXSLALFSTFISIARILTINILTPKVFIKLIVNTMLPYXFSTITMKSIESTSLKIMXKIRKRGNTIRQLMKSHTKPDYCTYMKISTNASIKEMMRCSTLIMRTPLMSXIVLESKNTMGV

SEQ ID NO: 175872 - protein, 214 aa, Glycine max
  unsure (1)..(214): unsure at all Xaa locations
  Clone ID: PAT_MRT3847_129830C.1.pep
LFPPSYICQCLSHLLTLRQHFSVIIAGNRHKTGQELAEEVLSLAQGLLHLGLTPGQVVAISAFNSDRYLEWLLAIAFVGGIAAPLNYRWSFEEARLAINAVNPLMLVTDESSYARYSKLQQNDVPSLKWHILLDSPSSDFTKWNVLTAEMLKRHPVKLLPFDYSWAPEGAVIICFTSGTTGKPKGVTXSHGALIIQSLAKIAIVGYNEDDVYLH

SEQ ID NO: 175873 - protein, 174 aa, Glycine max
  unsure (1)..(174): unsure at all Xaa locations
  Clone ID: PAT_MRT3847_129831C.1.pep
ENPQKGGPSPLFRVSRTPVSYAGVSVLGPPGPLGGGLGPXPPGEPPAPYCFVPGRQMPLPLIVLPVWPLPFDLXFLSPVGRVLXMLGQFLGAPFLVFAKSFIERCLYGLFEEGKYPPFDFFFLGWGIFSTREAVLYPLSLFVGQKAFQCPIVLFGSKKKKKKKKKKKKKKKKKK

SEQ ID NO: 175874 - protein, 167 aa, Glycine max
  unsure (1)..(167): unsure at all Xaa locations
  Clone ID: PAT_MRT3847_129832C.1.pep
RAPTRPPTRPPTRPSTRPPTRPPTRPVQYKNVVFTVWDVGGQEKFRAFLVALWLTILXGLIYVXDSLDRERMGKAKQEFQTIINDPFMLHSIILVFANKQDLKGAMSPREICEGLGLFDLKNRKWHIQGTCALRGDGLYEGLDWLSTTLKERRAAGYSSIGLGTSSF

SEQ ID NO: 175875 - protein, 195 aa, Glycine max
  Clone ID: PAT_MRT3847_129833C.1.pep
MGQAFRKLFDTFFGNTEMRVVMLGLDAAGKTTILYKLHIGEVLSTVPTIGFNVEKVQYKNVVFTVWDVGGQEKLRALWRHYFNNTDGLIYVVDSLDRERIGKAKQEFQTVINDPFMLHSIILVFANKQDLKGAMSPREICEGLGLFDLKNRPGHIQGTCALRGDGLYEGLDWLSTTLKERRAAGYSSIGLGTSSF

SEQ ID NO: 175876 - protein, 232 aa, Glycine max
  Clone ID: PAT_MRT3847_129834C.1.pep
MGLVKKIGKYQLGRTIGEGTFSKVKLAVNGNNGQKVAIKVIDKHMVLENNLKNQAKREIRTMKLLHHPNIVRIHEVIGTKTKIYIVMEYVSGGQLLDKISYGEKLNACEARKLFQQLIDALKYCHNKGVYHRDLKPENLLLDSKGNLKVSDFGLSALQKHNDVLNTRCGSPGYVAPELLLSKGYDGAAADVWSCGVILFELLAGYLPFNDRNLMNLYGKIWKAEYRCPPWFT

SEQ ID NO: 175877 - protein, 38 aa, Glycine max
  Clone ID: PAT_MRT3847_129835C.1.pep
AILVDCDYKVSLPTGQTLQEVEWSFSSLFSYIRICLQH

SEQ ID NO: 175878 - protein, 71 aa, Glycine max
  Clone ID: PAT_MRT3847_129836C.1.pep
LDCFSRPDCNIDGAMLLGGTDHTNPVNAVRSIFGAPFKGGRPIPVVTFPHTIVRIVPGMYLRVQLLSTTTN

SEQ ID NO: 175879 - protein, 94 aa, Glycine max
  Clone ID: PAT_MRT3847_129837C.1.pep
CARFVCLWWCWLDPGMFLIPLQRDLWIVSPLLQVSIGAAGRFSVCISACLGLHLHWCTHRSHALLIRAGGLCACHNSTPPFLDISASAMNKKVR

SEQ ID NO: 175880 - protein, 245 aa, Glycine max
  unsure (1)..(245): unsure at all Xaa locations
  Clone ID: PAT_MRT3847_129838C.1.pep
MKPTQVLIALAAVAYAAPVAEESKVAVVDDDFPLAELEAYFEHHLNGDDSEAAALQARQFTGNTYNQLTDGTPCRPVTLVYARGTTQDGNVGDPAAVGPIFFNNLASRIGLSNLAVQGVPYAANVLGYLQGGDPTGSRTMADLINRAASQCPNTKIVISGYRQGAQLVHNAAGMLSSSVTNRVTAAVTFGDPKRNQPFGTIPTARTRIFCRSGDNICDGGIIITPAHTQYQQDAPAAADXVAARV

SEQ ID NO: 175881 - protein, 47 aa, Glycine max
  Clone ID: PAT_MRT3847_129839C.1.pep
FQYCVLDVAYPPCYTNRVCELMLECMLSKAKFLFIDKSLILVFHACS

SEQ ID NO: 175882 - protein, 673 aa, Glycine max
  Clone ID: PAT_MRT3847_12983C.1.pep
MNSSHALALCTSLPFFNYNNPHLLTTITSIQYLLSSVPARLTLLALFSATTFYCLYKSRRLRHLKLSLNPNPNPNPNPKILFLSETGTAKTLARRLHRLLSSNDVAFDLVDAQHYEPEDLPKETLILLVASTWQDGAAPAASRFFATWLADAAADFRAGSLLLSRCRFAVFGVGSRAYGDDSFNAVAKGLAMHLRALGATEAVPLSEGDIDGGDDVDAVFDRWCEKVVAVLKGVGVVESCDNDGAEECGVVSSSEEESDVESSEIVDLEDIAGKAPSRRKVVANGEESNGKLNGSREMVTPVIRANLEKQGYKIIGSHSGVKLCRWTKAQLRGRGGCYKHSFYGIESHRCMEATPSLACANKCVFCWRHHTNPVGKSWQWQMDDPIEIVNSAIDLHTNMIKQMKGVPGVTLERLSEGLSPRHCALSLVGEPIMYPEINALVDELHKRRISTFLVTNAQFPEKIKSLKPITQLYVSVDAATKDSLKAIDRPLFGDFWERFIDSLTALKEKHQRTVYRLTLVKGWNTEEVDAYSKLFSLGEPDFVEIKGVTYCGSSTTSKLTMDNVPWHADVKAFSEALALKSQGEYEVACEHAHSCCVLLAKTNKFKIDGQWYTWIDYEKFHDLVASGRTFDSRDYMAATPSWSVYGSEEGGFDPGQLRYRKERHHKSTRNQAG

SEQ ID NO: 175883 - protein, 109 aa, Glycine max
  unsure (1)..(109): unsure at all Xaa locations
  Clone ID: PAT_MRT3847_129840C.1.pep
LEGKTRDLSFSSRPLFLGPIKLCYDCSDMAFAPFGLDWSDMYKLXLDHLLIAHRVWTFLSIADNEVAHMVRKLLEHESSGSAENLTETVMSITNSMICTIASAKSYGRR

SEQ ID NO: 175884 - protein, 82 aa, Glycine max
  Clone ID: PAT_MRT3847_129841C.1.pep
FPDRPTRPPTRQGCQKNNKREPNLIPPWLQLQHHRKAIQSAMGTNLKAGGNSKRTNLKAPNPMVINSNSSSNRYVFLVRRLG

SEQ ID NO: 175885 - protein, 89 aa, Glycine max
  Clone ID: PAT_MRT3847_129842C.1.pep
KKSTKDPKSQPSRDFVYLPRDESFGHLKSSDFLVYILKSASQNVIPKLQSALRLQFNQPEFNSFDDVRGLYDGGIKLPTDTLSQLSPIP

SEQ ID NO: 175886 - protein, 76 aa, Glycine max
  unsure (1)..(76): unsure at all Xaa locations
  Clone ID: PAT_MRT3847_129843C.1.pep
LHRTIKHQRKAHPQPSSIYISKIKLCRCYQSGNGKQKXEQIFTEKIXXXXXXXXXXXFKYRRNETFNIVTDRNFKK

SEQ ID NO: 175887 - protein, 78 aa, Glycine max
  Clone ID: PAT_MRT3847_129844C.1.pep
IWPIFNILTVIAIHILMKLKKLGGLKFGVGQDHDAIYHDLLGKRLQQVSSKLSVRKMSELEPFRVLCVSIPLSLGKCI

SEQ ID NO: 175888 - protein, 53 aa, Glycine max
  Clone ID: PAT_MRT3847_129845C.1.pep
GAAFSLFFLTHASLWGISSIELWVFPLYFGPRLKIRFWLLKRHMLLYFFSSSG

SEQ ID NO: 175889 - protein, 40 aa, Glycine max
  Clone ID: PAT_MRT3847_129846C.1.pep
RPSRPIISHSYSMSLNSMYLADMGVKYWVCEFSREKVCAL

SEQ ID NO: 175890 - protein, 73 aa, Glycine max
  unsure (1)..(73): unsure at all Xaa locations
  Clone ID: PAT_MRT3847_129847C.1.pep
NXFFIXRIIFFPAHKPRGRRNFWDKKGPFTPFKRQNPNSPILKPNIKVPDLKKSKITRLQLKEKKKKAGPGGH

SEQ ID NO: 175891 - protein, 170 aa, Glycine max
  Clone ID: PAT_MRT3847_129848C.1.pep
MGFPVGYAEVFFPNPFLHTLALLGLLRNLVFFLLHLLGFSDFLETEVAWPDHPHPSDEAAAARPPSASALLIRDLLPVAKFGDSDVGAQQNGLCAVCLFEFSEEEEVRCLRNCKHIFHRTCVDRWIDHDQKTCPLCRTPFVPDDMLDDYNQRLWAAFGVNEFYADYTFSF

SEQ ID NO: 175892 - protein, 90 aa, Glycine max
  Clone ID: PAT_MRT3847_129849C.1.pep
VDLLKDRPSSCRAGPVAEDVFHWQATIVGAADSPYAGGVLLVAVRCGTDDAVEPRKVACMTEVWHTDVDCSGRHCRCMLDEDGSPALAIS

SEQ ID NO: 175893 - protein, 98 aa, Glycine max
  unsure (1)..(98): unsure at all Xaa locations
  Clone ID: PAT_MRT3847_12984C.1.pep
APAKAEKKPAEKKPSAEKAPAEKKPNAEKKISNEGGSEKNKKRTKKSVETYKIYIFKVLKQVHPDIGISSKAMGIMNSFINDIFXKLAQQASRLASYY

SEQ ID NO: 175894 - protein, 56 aa, Glycine max
  Clone ID: PAT_MRT3847_129850C.1.pep
SNRNKTSTIVHVIKFKIALNIWILEPKGKNYIMTSSADLLDLQRKLQYRCNTISAF

SEQ ID NO: 175895 - protein, 82 aa, Glycine max
  Clone ID: PAT_MRT3847_129851C.1.pep
LIKKLDRILTNKITNSGSENIYIINKCVTEPQTCTFWKLTVFFLFFLCIFSFLKISLVLSSASQSATEHIQLGFCNKLSSKW

SEQ ID NO: 175896 - protein, 107 aa, Glycine max
  unsure (1)..(107): unsure at all Xaa locations
  Clone ID: PAT_MRT3847_129852C.1.pep
QSGPIAIGVNALFMQTYIGGVSRSLICTKIRMKHGVXRVGYGAKGFSIHTLGRKTHWIIKNSWGEKWGEDGYYRLCRWHGKCGTNTMVSAARVTHPHLTPTXNYASY

SEQ ID NO: 175897 - protein, 149 aa, Glycine max
  Clone ID: PAT_MRT3847_129853C.1.pep
MEVQQWWRLRFSFRNATMVVCFLNIITAIFLLHAFLTSAYTRNKFSNANSNSAQLNYIKESEEIRLAMLPVELIKRVREIEQEVYTEPETAQKKDTKLTAAVDLSKRLKDFRSLNDAASLKALEEWRKRKMERARQRELEKNGTTSSQA

SEQ ID NO: 175898 - protein, 36 aa, Glycine max
  Clone ID: PAT_MRT3847_129854C.1.pep
PRAVGRGDRYNPPFLIWIVYSSKAIHLSTPLSLGIP

SEQ ID NO: 175899 - protein, 126 aa, Glycine max
  Clone ID: PAT_MRT3847_129855C.1.pep
SFPGPRGSHLDSSLSVSICRHTEPPKPLKSCKQSLLSFSVDQQKRQTMADKTWREETAFRNPKRVHCAEQLRRSGNPAQITCVEVLHRLTSLTVTTSSAGGAGIAFTATRCGIFARTLNRSLGEEP

SEQ ID NO: 175900 - protein, 103 aa, Glycine max
  Clone ID: PAT_MRT3847_129856C.1.pep
PCPAGVWWVSSLWGPPPPGVFSAPPSGYPYNAPPHPYNAPPQSGSGYNALPQTALYGQGTGFGSAPQKEKKKSKFGGMGPGLAVGAVSGALGGIPLVEGAEFF

SEQ ID NO: 175901 - protein, 107 aa, Glycine max
  Clone ID: PAT_MRT3847_129857C.1.pep
GACTKHLLEYSLASDHLIECSYNFFNYCCYFYFTRGHYTDSDVAVDHCRPASTEIYDFTDPNAAYSECVLESATVNNVNANRNRYRQCDLDGNGVFIYDGPVLTPAT

SEQ ID NO: 175902 - protein, 62 aa, Glycine max
  unsure (1)..(62): unsure at all Xaa locations
  Clone ID: PAT_MRT3847_129858C.1.pep
MGISRDSMHNMRAXTGGKNSACMNKRKYELGRQPANNTLSSNQTVRTIRVTSGNVNCMALIL

SEQ ID NO: 175903 - protein, 74 aa, Glycine max
  unsure (1)..(74): unsure at all Xaa locations
  Clone ID: PAT_MRT3847_129859C.1.pep
PGIRKIWAQVEPMRAPPPPKMVKKISLGRQRSEKKRAPAEALKNXEAEKTVGPTEFLSPTGGLPSSQYHCWGGG

SEQ ID NO: 175904 - protein, 82 aa, Glycine max
  Clone ID: PAT_MRT3847_12985C.1.pep
ISAARMMIDSITSSSKCLSVDSAGSVHLVPESYSADGRAFLQVTYDGVDSVPSSKKCIVVDPLHSKPQFRSPKYEVSVHHTS

SEQ ID NO: 175905 - protein, 69 aa, Glycine max
  Clone ID: PAT_MRT3847_129860C.1.pep
GTLQMEGGLLITQGPPPPQSPETRWAKKKCNRGFPQPPPFKPRLNKGFFAPGDKKPILGNNSGERGGET

SEQ ID NO: 175906 - protein, 96 aa, Glycine max
  unsure (1)..(96): unsure at all Xaa locations
  Clone ID: PAT_MRT3847_129861C.1.pep
RGNNRTFIIASNWHPSTMDMIXTWANAIELNDGTAELTDIDDRHGDVRGELVQYPGTAGEDEDYGELVKKAHAHXVNVVMARDSLALTDMEPGGEF

SEQ ID NO: 175907 - protein, 128 aa, Glycine max
  Clone ID: PAT_MRT3847_129862C.1.pep
AVLLGFSSHQTLPITLASLMKHSTRVPLHDRFLMYNDKIFTSIKIQLTSTQNMLILLLRILLLPGLGSTKPMSTQHYHYELHNKMKTTTHVSRGHHHGNLNGHGLHQRHFWNQLLTMNQTSPLSPPQC

SEQ ID NO: 175908 - protein, 51 aa, Glycine max
  Clone ID: PAT_MRT3847_129863C.1.pep
DYLKDWYPTTQIIDCRDENLCSVQELETSNNDLISSVSSAFILQIDLIYIS

SEQ ID NO: 175909 - protein, 52 aa, Glycine max
  Clone ID: PAT_MRT3847_129864C.1.pep
GPIRHPGCTKVGKSDRSGPLSDHASWTKGDVMQDVLRWGKTGPPQGRPSKTT

SEQ ID NO: 175910 - protein, 41 aa, Glycine max
  unsure (1)..(41): unsure at all Xaa locations
  Clone ID: PAT_MRT3847_129865C.1.pep
ATNKVHXXFKXKXPKSGEYXEHXLKYXXXVPXDKXTXXYXA

SEQ ID NO: 175911 - protein, 49 aa, Glycine max
  Clone ID: PAT_MRT3847_129866C.1.pep
FYCFFTIYIGIEKELAVLNDPLAQCYKLKNLTLVLPALMILTNYILPYN

SEQ ID NO: 175912 - protein, 148 aa, Glycine max
  Clone ID: PAT_MRT3847_129867C.1.pep
MSIVPINQGDANGSNPFASWGQFVDFPLPPSISGFFPGLEFGFGFGSSVNTRVDWRETPRAHVWKLVLPGFSNEDVLVELQDERVLQVSVESGNFVTRFKVPDNGNLEQLKANMRHGVLVVTVPKFHQPTTTAPANRNVREVEIEGTD

SEQ ID NO: 175913 - protein, 52 aa, Glycine max
  Clone ID: PAT_MRT3847_129868C.1.pep
KLFSPFGANLLKNKIKFKNRKLIEKRVFLKNPVHFFFIFHHLLLLFFSPGFL

SEQ ID NO: 175914 - protein, 51 aa, Glycine max
  Clone ID: PAT_MRT3847_129869C.1.pep
LRNNLTPIVIVVICIEVVLFLCAGGHIETIAIAGNPRRVRGFKMQGKFIIP

SEQ ID NO: 175915 - protein, 169 aa, Glycine max
  Clone ID: PAT_MRT3847_12986C.1.pep
MSIWSNLPLDILANIFSFLSPDSLARARSVCKNWHKCSKAYPIATTTSSWFLALPIRNHRPYCYAHNPVIDKWHQLSLPIPSIRPIAPIGSLLLSRVTNSTTLQLGLCNPFTREFRHLPRLHVARTNPAVGVVTISESSNPNRDDDNVRFPSFKVYVAGGMSEAAQGGG

SEQ ID NO: 175916 - protein, 341 aa, Glycine max
  Clone ID: PAT_MRT3847_129870C.1.pep
MNIDLENRLEDLVSFGNSYLSENNDNISQPFQHDKDLGKCQEPFDVPDHVKDNATALWRRFELSTTKLSHELTEQLRLVMEPTVASKLQGDYRTGKRINMKKVIPYIASDYSKDRIWLRRTRPNKRDYQVVIAVDDSHSMSENGCGDVAIEALVTVCRAVSQLEMGSLAVASFGTKGNIKLLHDFDKPFTGESGVKMISNLTFKQENTIADEPVVDLLKYLTNKLDTAVAKARLPSGHNPLQQLVLIIADGRFVEKKKLKQCVRDVSTGNRMVAFLLLDNSQESIMDLKEASVEGGQTKIFKYMDSFPFPYYIVLRNIEALPRTLANLLRQWMELMQHSTG

SEQ ID NO: 175917 - protein, 82 aa, Glycine max
  unsure (1)..(82): unsure at all Xaa locations
  Clone ID: PAT_MRT3847_129871C.1.pep
TKTFAFQADINQLSXLIINTFYSNKEIFLQELINNTSYSLYNIQFYSLTYNNNLLSXPHLFIHIIPYKTNNTLTIVYSNIGI

SEQ ID NO: 175918 - protein, 161 aa, Glycine max
  unsure (1)..(161): unsure at all Xaa locations
  Clone ID: PAT_MRT3847_129872C.1.pep
STIHAGGGXFGASAIEKMTKVIQSLNELERHWAVMKKSPGMPPGANTINPAVIEGGRLSAFIADECRLWITVHYLPNESYESVVNEIEQYLNKVAEADVWLRENPLEFEWGGTSMIEDKGEIFPSFTVPTHHPGFKQLEEAHEHIHNKKLEHGMSTTVTDG

SEQ ID NO: 175919 - protein, 152 aa, Glycine max
  Clone ID: PAT_MRT3847_129873C.1.pep
PVSPTCGKVFPKGLSRYIDRGTLETCLHLIVLSLSVVMAGSGHLQTFRLLRFLRSRNCADGQSSYGIQMAVSLAIGFLFLGGGMRTFSTNNHSIAALLITLYPRLPTGPNDNRCHLQAFRHLYVLATEARWIQTVDVDTGLPVYAPLEVTVK

SEQ ID NO: 175920 - protein, 99 aa, Glycine max
  Clone ID: PAT_MRT3847_129874C.1.pep
MIFCLIELIEYFEAIAGVPKIKDGCNPATWMLEISSPVVESQLNVDFAELYTKSDLYQKNQEVMKVLCSWYWCAEFLNNFLVLFEDSLGQLFCTVPLLE

SEQ ID NO: 175921 - protein, 96 aa, Glycine max
  unsure (1)..(96): unsure at all Xaa locations
  Clone ID: PAT_MRT3847_129875C.1.pep
TFTRTKPHINVRTIEHMNHRKTTLTTTITKVLTDERKAKAIAFDEIDKAPKKKKRRITITTTHVECKTTKRHYTHIDCRXHADYMRYVITGPRQID

SEQ ID NO: 175922 - protein, 63 aa, Glycine max
  Clone ID: PAT_MRT3847_129876C.1.pep
SISISNIEQSNRLRLIKYMIRYSISIFSLANQLIKEGRKIFFLSPLELAFGVELGPKSLSYWT

SEQ ID NO: 175923 - protein, 99 aa, Glycine max
  Clone ID: PAT_MRT3847_129877C.1.pep
SFFFFFASKQGTQRHTWHSLYKGGSCSFFASSLRCLLKNYPLLQPKKKKWVGKCMIPFLGMNYFCLLLHERTNNTPGGSIIANNEEPPPDLFEKIRLPP

SEQ ID NO: 175924 - protein, 166 aa, Glycine max
  unsure (1)..(166): unsure at all Xaa locations
  Clone ID: PAT_MRT3847_129878C.1.pep
MEYLFKSSTSSSSSPSPATFIKETHHLIDKGFDPSHDQRYNAWTSLSKHAIITATITSTEENELEKENREFCXALRXPNPKDYAMDHEETNHMIQKMMSEFDSYKDDQAGIDNNITFGSWYFNPSQSHATTGPNALRSLRPTTTYVYCDCTRHCSLTTIEHGVSTY

SEQ ID NO: 175925 - protein, 73 aa, Glycine max
  Clone ID: PAT_MRT3847_129879C.1.pep
FLLPMTVSMPFLKPSQHRRVSIFQIERFRAHWIMNESCGPINLKCPNMIRPLKIWWGTFMLNSNPLKLIWYNC

SEQ ID NO: 175926 - protein, 131 aa, Glycine max
  Clone ID: PAT_MRT3847_12987C.1.pep
GPKGEKKPNPRTRVFNPKGHPQKKTTQLQSLSPRPGKNLQKLSKNWGNPQGRLKNPAPRIFERNIMGTGPLQQIPKSCLGFKKPKLKKLLGGPTVISEKGFFPRGKFLNKRGEPRVRQKSPFKRKLKEAFF

SEQ ID NO: 175927 - protein, 160 aa, Glycine max
  Clone ID: PAT_MRT3847_129880C.1.pep
IYTWEIGKKKGSLNWRQRYDIILGTARGLAYLHEEFHVSVIHRDIKSGNILLDEELQPKIADFGLAKLLPGDQSHLSTRFAGTLGYTAPEYALHGQLSEKADTYSYGIVVLEIISGRKSTNVNVVEDTLKDDYLLRQVRNFPYICTNYCLFSYNILLYEP

SEQ ID NO: 175928 - protein, 50 aa, Glycine max
  Clone ID: PAT_MRT3847_129881C.1.pep
PPILSPSIPLRFFFSFDLTILFYLNLVGIVISVFEFIEKIVHEYIIYHSS

SEQ ID NO: 175929 - protein, 76 aa, Glycine max
  Clone ID: PAT_MRT3847_129882C.1.pep
PPAYLFWLPLSFPPPRFPLFSSGLFVGWIFCPPPFSPREHLCPFFPPPLKRPPLGKNVTPKSTRREFQVKPPAPYG

SEQ ID NO: 175930 - protein, 58 aa, Glycine max
  Clone ID: PAT_MRT3847_129883C.1.pep
PRVSHIIRIMCKIIYVVGVCVTFILFLDIRRSLSCHGEQIRGGSKDFLDYQNVLLYVP

SEQ ID NO: 175931 - protein, 231 aa, Glycine max
  Clone ID: PAT_MRT3847_129884C.1.pep
MEAELDTEQQQQMTEGSYSQTMQIDPKRARFPCSVVWSPLPVISWFIPCIGHIGICREDGVILDFAGPNFVCVDSFAFGAATRYLQIPKEKCCVPLVQSVYNGEEHYMQGETRGDLRTWDDALRKSTQEFQHLSYNLFTCNCHSFVANNLNKLGFLTGGWNVVNLAIFILFNGRWVSKASMLRSILPFVVIFFLGVTFWGFTFLKFWFFFTSILIGWFLLVTYCFKNLIQL

SEQ ID NO: 175932 - protein, 52 aa, Glycine max
  Clone ID: PAT_MRT3847_129885C.1.pep
LCIRQLMWFNKLLRFSYKVCSLTCPYRPCETQISSDQHNQPSDLACAFWYGD

SEQ ID NO: 175933 - protein, 124 aa, Glycine max
  unsure (1)..(124): unsure at all Xaa locations
  Clone ID: PAT_MRT3847_129886C.1.pep
IGGGGGRLVPPAHFRTGRAGLPFYPPGARPNRGPTRKNGPPGGRRHPPPRATANKPGAKGGNPGGPKKKTNPQKXPPPTGRIKQRKPGGPKKENHPPTGGGAPPAYQAPKEAWPPPDKKENPPP

SEQ ID NO: 175934 - protein, 100 aa, Glycine max
  Clone ID: PAT_MRT3847_129887C.1.pep
PTRTTTHPLLHFKCENESRIRSPTDVADHETSGSDSDSSNTRLEDALYDTINFSDFNTVTKIEPLHIERKYHRSAFTMIKRWCQNRSRIGPCPCYYETTL

SEQ ID NO: 175935 - protein, 69 aa, Glycine max
  Clone ID: PAT_MRT3847_129888C.1.pep
IICTFFLSAVCIWQFFGSLLQATTHYLTLINLMLLTKLTNFLSPIELVIGPYKKDWREYLFLSFFIGFP

SEQ ID NO: 175936 - protein, 80 aa, Glycine max
  Clone ID: PAT_MRT3847_129889C.1.pep
KTVRRALQNLIKKITSRISAHSKPAVCYNPFRSIFIIERKHSIAGSPKFKSSTDGHRIHNTRKCVIIFSSLFFSQKCDRI

SEQ ID NO: 175937 - protein, 32 aa, Glycine max
  Clone ID: PAT_MRT3847_12988C.1.pep
MRDAEDRAVEGGVGKVNDIFRWVRAVRQANSI

SEQ ID NO: 175938 - protein, 47 aa, Glycine max
  Clone ID: PAT_MRT3847_129890C.1.pep
MIDDVNYPDFRSLLRQTGGSYDDRITDEQKPTEMTPSARANKAITTE

SEQ ID NO: 175939 - protein, 88 aa, Glycine max
  Clone ID: PAT_MRT3847_129891C.1.pep
VVVLLFDMVFSSTPFSFENNQEKQYPEKYDMVLDRNKCTQDLSVSSLYTEICMSYKVNSFFLFFGQKLIMGCSPYGSVIILIDLFILS

SEQ ID NO: 175940 - protein, 66 aa, Glycine max
  Clone ID: PAT_MRT3847_129892C.1.pep
KRVIRKLEQIGKPSFSQAKKFPYPNCFKASLSSFQPKTLLTQCFSLPPPSKCPFEFFGPNNQPFQE

SEQ ID NO: 175941 - protein, 725 aa, Glycine max
  unsure (1)..(725): unsure at all Xaa locations
  Clone ID: PAT_MRT3847_129893C.1.pep
MAGSGGKKVHQMIVGFGGSGLGQVVIAVAVSFLVRVFSAPGPALSPENEADDVPENDSDDAEAPTSGKVTPVTIQWRNINCSLSDKSSKSARFLLKNVSGEAKPGRLLAIMGPSGSGKTTLLNVLAGQLTASPRLHLSGVLEFNGKPGSKNAYKFAYVRQEDLFFSQLTVRETLSLATELQLPNISSAEERDEFVNNLLFKLGLVSCADTNVGDAKVRGISGGEKKRLSMACELLASPSVIFADEPTTGLDAFQAEKVMETLQQLAQDGHTVICSIHQPRGSVYSKFDDIILLTEGSLVYAGPARDEPLAYFSKFGYQCPDHINPAEFLADLISIDYSSADSVYTSQKRPTGLVESFSQRQSAVIYATPITINDLSNSRKKISQRAVVKKKGVWWKQFXLLLKRAWMQASRDAPTNKVRARMSIASAIIFGSVFWRMGNSQTSIQDRMGLLQVTAINTAMAALTKTVGVFPKERAIVDRERAKGSYSLGPYLFSKLLAEIPIGAAFPLMFGAVLYPMARLHPTMQRFGKFCGIVTMESFAASAMGLTVGAMVPTTEAAMAVGPSLMTVFIVFGGYYVNPENTPIIFRWIPNVSLIRWAFQGLSINEFSGLQFDHQHSFDIQTGEQALERISFGKSRIRDTVIAQNRILLFWYCTTYLLLEKNKPKYQQLESPIDHSKPHLKLEELNSEQVDQTIEAPPVSQLDSKQPLESPEVDLVGSFVLEGTK

SEQ ID NO: 175942 - protein, 127 aa, Glycine max
  unsure (1)..(127): unsure at all Xaa locations
  Clone ID: PAT_MRT3847_129894C.1.pep
AFQGLXINEFSGLQFDHQHSFXIQTGEQALERISFGKSRIRDTVIAQNRILLFWYCTTYLLLEKNKPKYQQLESPIDHSKPHLKLEELNSEQVDQTIEAPPVSQLDSKQPLESPEVDLVGSFVLEGL

SEQ ID NO: 175943 - protein, 79 aa, Glycine max
  unsure (1)..(79): unsure at all Xaa locations
  Clone ID: PAT_MRT3847_129895C.1.pep
XAXKYIXIFDXTDKXXLXEKFQLNXKVLSLTLSLGQSXXKXXQNNQRLRLRLRSLPXXXTXTFXSXFFXSIMLFSXXXX

SEQ ID NO: 175944 - protein, 130 aa, Glycine max
  Clone ID: PAT_MRT3847_129896C.1.pep
KGEYGTGFNPNMTDILLSWLTEEDLAYYVSKFEKTGFTGGLNYYRNIKFGSRLTTPWTRVQIKVPVKFIAGELDMVYTSLGIKEYIHGGGFKEDVPNLEQVIVQKGVAHFNNQEAAEDISNYIHDFINKF

SEQ ID NO: 175945 - protein, 112 aa, Glycine max
  unsure (1)..(112): unsure at all Xaa locations
  Clone ID: PAT_MRT3847_129897C.1.pep
SGIIHNIAETLHVGGLTMEEEHNGEHLAGEYKGEHRGEHSSEYTXEHHGEHKSGQFHGEHKPQHRXGFLDKVQDKIHGEGGAVQGDKTKKERKIHEHGHEHGHDSISSSDSD

SEQ ID NO: 175946 - protein, 43 aa, Glycine max
  unsure (1)..(43): unsure at all Xaa locations
  Clone ID: PAT_MRT3847_129898C.1.pep
MASSCASSAIAAXAISTPSSQKNGSLWGSXKAAFXXGRKXRXN

SEQ ID NO: 175947 - protein, 92 aa, Glycine max
  Clone ID: PAT_MRT3847_129899C.1.pep
MPEAPRDYNLFEQNKKTLEFIEDVTANADQVQKRVLSEILSNNANAEYLKRHDLHGQTDRETFKKLLPVITYEDIQPDINRIANGDTSPILC

SEQ ID NO: 175948 - protein, 50 aa, Glycine max
  Clone ID: PAT_MRT3847_12989C.1.pep
EVTLSFKHVVRGSIRSLIHKLCDNDDFDEGLHQINVKLERTINDQITLKK

SEQ ID NO: 175949 - protein, 229 aa, Glycine max
  Clone ID: PAT_MRT3847_129900C.1.pep
MASSSDSWMKEYNEAVKLADDITGMISERSSFPASGPETQRHASAIRRKITILGTRLDSLQSLLSKVPAKTEKEMNRRKDMLLNLRTKVNQMASTLNMSNFANRDSLFGPEIKSDAMSRTVGLDNSGLVGLQRQIMKEQDDGLEKLEETVISTKHIALAVNEELNLHTRLIDDLDQHVDVTDSRLRRVQKNLAVLNKRTKGGCSCLCMLLSVIGIVGLVVVIWLLVKYL

SEQ ID NO: 175950 - protein, 43 aa, Glycine max
  Clone ID: PAT_MRT3847_129901C.1.pep
SRYHLGCERIYTKEGNFIIFFNPLLSFAFVMISTKVLYFNLAV

SEQ ID NO: 175951 - protein, 92 aa, Glycine max
  unsure (1)..(92): unsure at all Xaa locations
  Clone ID: PAT_MRT3847_129902C.1.pep
MLRNEGRPEENRQKLTEGASGEVPRSTQEAIDXPPRVALADRPRPGEWENLRVKEHAHDEEEKQPAENLHFKEELVDGSPNGNLVLELDLGT

SEQ ID NO: 175952 - protein, 80 aa, Glycine max
  Clone ID: PAT_MRT3847_129903C.1.pep
PYVVLISSSPRFNMYGNEFGMGKTVAAKSGYANKFDGKVTSYPGREGGGSIDLEVGLLPHIMSALESDREFMNAVSVSNL

SEQ ID NO: 175953 - protein, 75 aa, Glycine max
  Clone ID: PAT_MRT3847_129904C.1.pep
LRGFSSVLGHKRRFPILGLRSLSPPGQKYHHLLFIHLTGYRFPPPRSVIFFSKHSKTLGGIPFPPSKMRFFCIKC

SEQ ID NO: 175954 - protein, 40 aa, Glycine max
  Clone ID: PAT_MRT3847_129905C.1.pep
GLSTCPWCSKYWLHTCDPWDLARLDIYGEKEWNFDTPRHR

SEQ ID NO: 175955 - protein, 261 aa, Glycine max
  Clone ID: PAT_MRT3847_129906C.1.pep
MALVVSSRKDSFVCCLLFIIVSEASAQYNTVFCDNNKGNHTVNSTYNNNLNTLLSTLSSHTEINYGFYNLSYGENEDKVNAIGLCRGDLKPDECRSCLNDARGNLTQRCPNQKEAIIYYDECLLRYSDRSIFGVMETSPDYVLFNIQNATNVGQFNQVLRNLMRMLTGIAASGDSRRKYAAASATATNIQAIYGLVQCTPDLSQPECKHCLIGAISEIPRCCNGKIGGRVLRPSCNIRYENYPFYDEPTAYAPAPSPSLSL

SEQ ID NO: 175956 - protein, 54 aa, Glycine max
  Clone ID: PAT_MRT3847_129907C.1.pep
MNEIETMISDQTSFQTPYFLSSITIESVFHKMIQIQQVKKANKPHKKSNLQTLS

SEQ ID NO: 175957 - protein, 59 aa, Glycine max
  Clone ID: PAT_MRT3847_129908C.1.pep
VVLGLDISHRALLWALVTLYTLTSKFSLFVIQVASLFISIHYHCLKYGNCIEFQDHSSK

SEQ ID NO: 175958 - protein, 66 aa, Glycine max
  Clone ID: PAT_MRT3847_129909C.1.pep
ILFIRYGLSVCTLEIESSGEIVEGYVLEIEDFEYPGYFKCYNMRDSVLFANLPLTLVVFLGLVCGV

SEQ ID NO: 175959 - protein, 102 aa, Glycine max
  Clone ID: PAT_MRT3847_12990C.1.pep
KRGGILKSYPFFHPHIYDKNYNTIGGKRRIHALFIKNTQTQEKRNPFQKLNKKGEKKENNGGADKKKRKGPRQKEQTNRGGTKGITREKKVGPPKANTPNAP

SEQ ID NO: 175960 - protein, 70 aa, Glycine max
  Clone ID: PAT_MRT3847_129910C.1.pep
SGIPGSTQTTAHASDPHSTLSYIIRRRSHPGSLCTTRRMLWTYQWELQEIRHRLLMKTNPVCGKELNELV

SEQ ID NO: 175961 - protein, 72 aa, Glycine max
  Clone ID: PAT_MRT3847_129911C.1.pep
HSGPLLLLLSYSTRHADPGALAKAVTTDILGGYTHIDCADAYINHTEIDFAVKKLFDHGVVKRQDLLITCKL

SEQ ID NO: 175962 - protein, 68 aa, Glycine max
  Clone ID: PAT_MRT3847_129912C.1.pep
LDGMIVIADCYAKSIYAHNFTQATSLLLKATSLKYATLTHTHTTGVILTGNFTLIQPDMPSCVNESGH

SEQ ID NO: 175963 - protein, 84 aa, Glycine max
  Clone ID: PAT_MRT3847_129913C.1.pep
GLLGVSECGRGGTIYFLYPILQLFPPRINDKKDGVNPTHGKLRDIIYSNFFLWAISAYIIANTTRNSLRAGVWLKKMDTICRKL

SEQ ID NO: 175964 - protein, 49 aa, Glycine max
  Clone ID: PAT_MRT3847_129914C.1.pep
WSGCVVLSLYMIVTTKLTYLNEKKKKKKTYLALFIKAENFDFNRINFGK

SEQ ID NO: 175965 - protein, 57 aa, Glycine max
  Clone ID: PAT_MRT3847_129915C.1.pep
KKTPAQFFPQRLPPPPGVYGFWKHVFNLSPRENPPFLKMFYAPKTPKLAEFGPPPVE

SEQ ID NO: 175966 - protein, 31 aa, Glycine max
  Clone ID: PAT_MRT3847_129916C.1.pep
LKPVGENDMISKEFCNISILCPQIPHCVYDD

SEQ ID NO: 175967 - protein, 57 aa, Glycine max
  Clone ID: PAT_MRT3847_129917C.1.pep
ELTIHDASQGVAHMSWSMAEIFGLDEKQVHVTSPYVCGGFGGKTLWRHQVLAAASSK

SEQ ID NO: 175968 - protein, 60 aa, Glycine max
  Clone ID: PAT_MRT3847_129918C.1.pep
MAETQPPTRFQGPISLLFPPPIGLGVYLNVPGEYLYIGAGVFTIIFCIIEIDKPDKPHHF

SEQ ID NO: 175969 - protein, 50 aa, Glycine max
  Clone ID: PAT_MRT3847_129919C.1.pep
QKSAPSGKGPPQGFLHQTGEKVKGPAQGFSKAVKQTPGLGGHVQAPPKNF

SEQ ID NO: 175970 - protein, 68 aa, Glycine max
  Clone ID: PAT_MRT3847_12991C.1.pep
EVYHLKYTNELIKFTLFMLVYILTYFYFSYRHETLIIEQKECSHYFIQILRSWHTHAHTYYSYQNLES

SEQ ID NO: 175971 - protein, 68 aa, Glycine max
  Clone ID: PAT_MRT3847_129920C.1.pep
FFLSSVHRKKKEKTENKGKRTLNFFNGKHIFAGKPIFPKLFTFFQLEVFKMMTSKLIRLIAVCFAKFW

SEQ ID NO: 175972 - protein, 71 aa, Glycine max
  Clone ID: PAT_MRT3847_129921C.1.pep
MSGRHEAKNIWSHLSKPPRRNEVIALSLILRAIWVWMQWYYCISASLERKNELICSYVRSFANLHANLRRP

SEQ ID NO: 175973 - protein, 173 aa, Glycine max
  Clone ID: PAT_MRT3847_129922C.1.pep
MLGVGEKELTIENNNTIPWLILTQLIVLLLLFALLFFFTLLPLGPDDHHHNNLVTADTPPPPTTSSSVFFFDDIQIQQIDSPFTNHDSSPTHPPTTLQGGQNLLLKGEIATGPSPSMRREEEIMEEEEEEAASLYFHPCHYFQLATVAFLKCFGLDSTSDSPSTRRHRKRKES

SEQ ID NO: 175974 - protein, 45 aa, Glycine max
  Clone ID: PAT_MRT3847_129923C.1.pep
TQLKRKRENNITLWNSCLIFKVNSLSPRIQIYKNLIVNENLSQFV

SEQ ID NO: 175975 - protein, 54 aa, Glycine max
  Clone ID: PAT_MRT3847_129924C.1.pep
NFLLCHLRLRRMILCLIPPAIANLSHDLAEPLRITFKTSFNNLWVKFGFQKRFL

SEQ ID NO: 175976 - protein, 90 aa, Glycine max
  unsure (1)..(90): unsure at all Xaa locations
  Clone ID: PAT_MRT3847_129925C.1.pep
KXYIVTXICWGPNIGFFDSHLSHQVXNLTFEIEFPTELLHGHGSSAXTNLSAALLHPLYLXLTFRYFSFXXLLFAIFGCRDRPEFSAXKI

SEQ ID NO: 175977 - protein, 69 aa, Glycine max
  Clone ID: PAT_MRT3847_129926C.1.pep
YIFTTNNYNFNLLLFPSSLSHLSPMIESHISYIPQHHFFHHQHQQQPQPQHSLTIFYDRNISFSYLTYL

SEQ ID NO: 175978 - protein, 190 aa, Glycine max
  Clone ID: PAT_MRT3847_129927C.1.pep
MVQWHRHVFPFLRHIHKRVLEPQATHSAPSLVISRLASSLSQGQLGRRTWTTTTLPCFSRPVFLTFQHQGISSSAQLLANSSEETPVLSPLAPVSLLSSSKGEDQKQKVVTKPEKVQAILKAIKQSPKKVNLVAALVRGMLVKDALMQLELTIKRAAKTVYQVVTLGIFIVTSLDKLAKSIVLIAFKVPL

SEQ ID NO: 175979 - protein, 277 aa, Glycine max
  Clone ID: PAT_MRT3847_129928C.1.pep
MVQWQRHVFPFLRHIHKRAVEPHATHSAPSLVISRLASSLSQGQLGRRTWTTTTLPCFSRPIFLGFQHQGISSSANLLANSSEETPVLSPLVPVSLLGSSKGEDQKQKVVTKQEKVQAVLKAIKQSPKKVNLVAALVRGMLVKDALMQLELTIKRAAKTVYQVIHSARANASHNHGLDPERLIVAEAFVGKGFYKKRLWPHAKGKSSLRVRPECRLTVVVREITAEEEAEIARLRVHNFKKRTKRQQRLVPHQLIVSNPIWGRKNKSSGKNLSATPA

SEQ ID NO: 175980 - protein, 78 aa, Glycine max
  Clone ID: PAT_MRT3847_129929C.1.pep
LVVNRGIWRSMSVTVTSDDPWLIRRSFCALCGLNMIMHGWFIFSWQLFSMDHDYGATFDFGLWCSCYQFVFLRLSNIF

SEQ ID NO: 175981 - protein, 121 aa, Glycine max
  unsure (1)..(121): unsure at all Xaa locations
  Clone ID: PAT_MRT3847_12992C.1.pep
SLWVGFSSSLCFSLAXLLPVVSLLGSLCPSCLPALFLLPRGLSLXPLPSLCRVLLLAPSLVPVPLRFRPALXPSCXVFLSFXXLGVXVXLXLPPPLFLCCCCCFGSCPXPFFRFVWLLLAR

SEQ ID NO: 175982 - protein, 50 aa, Glycine max
  Clone ID: PAT_MRT3847_129930C.1.pep
QAPARAGVPFMALSYGIVGGRMDKVQAIFDNLRGTVASDVMDLVLVAQHL

SEQ ID NO: 175983 - protein, 66 aa, Glycine max
  Clone ID: PAT_MRT3847_129931C.1.pep
TQLMHSPPLLISLDKKIAPLTNISFINFLYFREYLEEYLAQGIGARSTRNNIGSFMEETLYNKNVN

SEQ ID NO: 175984 - protein, 144 aa, Glycine max
  Clone ID: PAT_MRT3847_129932C.1.pep
QKLGPAGLALHYANIVLQIDTLVARSSSMPANTRDALYQSLPPNIKLALRSKLPSFHVVKELTISDIKQEMEKTLHWLVPIATNTAKAHLGFGWVGEWASTGFDLNKKTMKAYVLRIFSLRHADKDKVEDYILELLLWIRRLAV

SEQ ID NO: 175985 - protein, 54 aa, Glycine max
  Clone ID: PAT_MRT3847_129933C.1.pep
FIKTDGFLYLLIPWHYCSVVCDYEPQKMSCLFLFAHLRYYWILLDKHVCFYLLF

SEQ ID NO: 175986 - protein, 107 aa, Glycine max
  Clone ID: PAT_MRT3847_129934C.1.pep
IYGSVRVVIGDQLHATNGDFQDRTPLGTVQVLTPSNQANTPQFFEPLKSDTMNNDAVIRSEDAELGEADQEEQKYVDPLDKFLPPPPKAKCSEELQAFKKRKLSCLK

SEQ ID NO: 175987 - protein, 37 aa, Glycine max
  Clone ID: PAT_MRT3847_129935C.1.pep
ALFDVVLHSLISSPIRILANIRLSCAHYSPSVFYTFL

SEQ ID NO: 175988 - protein, 86 aa, Glycine max
  unsure (1)..(86): unsure at all Xaa locations
  Clone ID: PAT_MRT3847_129936C.1.pep
LINPRHGHRLSSHKDSKGSMRMVKDFLFSSQNCSRSQRHGRLISFFSYRGLMPTMTTYLLSSLNRYPNLRHDNYDFCXCIFSESIT

SEQ ID NO: 175989 - protein, 32 aa, Glycine max
  Clone ID: PAT_MRT3847_129937C.1.pep
FRYLLFLSLKAIECVSCFFKVYHLDRQLLSEN

SEQ ID NO: 175990 - protein, 122 aa, Glycine max
  Clone ID: PAT_MRT3847_129938C.1.pep
SCVRGRVGFGKLKKTHEATRVFEHLVSLGLKPNAKSYSLLVDAHLINRDVKSALAVIDDMRAAGYEPSKEVLKKVRRRCMREMDNESDARVQSLVNSLNYRLGSENRRDILFNLNYSSMGYA

SEQ ID NO: 175991 - protein, 177 aa, Glycine max
  Clone ID: PAT_MRT3847_129939C.1.pep
MAAVKAENVCASPSLKISKEVDPRHASETLHFVDVMGAATPLPGNCNARGFYDAFYRSFIKVDNIQRGRISCTVVAKPPICNGYGTLHGGSVGSLVEILSNACARTVVAEDKELFLGEISISYLSATPANEELLANASVVKTGRNLTVVAVEFKLKKTGNLLYITHATFYNMPVSSL

SEQ ID NO: 175992 - protein, 669 aa, Glycine max
  Clone ID: PAT_MRT3847_12993C.1.pep
MSIIMSTKSSLKSLLQKGENEHNPLTMSDEQILEQIYSTHVHSDTKFDVDSLFTLVENTLRRSTHIVDNLVQGSHASLEHIDDKIPQFNSPLCTLKQISFEMSCKPPSEEIGHRTTLAILNKLSNYEWDAKAVLTLAAFALEYSEFWLLAQYHPAAPPASAAASSRRVPLPAPPAPLRRHRQAILEVNNLVKATLQVIEVIFELEKLTTYDTKDVPALGLAIEQIPVDVYWAIITIVAVVTQIDCLTTDSEHKQELSHYGQKINIILSKLRKQITLCRQQIDEAQYYRKLRKFFQTPTEIMEVFKVLIFNKDAPQPRFDGATKTKVDITVLKKKNVYLFISSLDITEEEISVLRPVYDSIKTNDQYKIVWIPIVEEWTEQLHKKFEVLKSKMPWYVVQHSGTIAGYKYIKEEWHFKKKPMVVVLSPQGKVQHSNAFHLIQAHGTRAFPFTTLNEEKINSENDWVGSVLGSIHPSISTSIKEQKYIFFYGGNDKDWIQQFTKYVTALANDAAIKEAKISIELFCVDKEDKSLVRRFWSGIESLFVTKVHKQADAVTQEVQKMLSYKNETGWSLLSKGPSVVVSGHGTTILKTVAEFEKWKEVVIKKGFAVTFKEYHQKIVGTTHRCSHLEIPNVAGKLPETIKCSDCPRVMEIFISYKCCHNENTANAIH

SEQ ID NO: 175993 - protein, 163 aa, Glycine max
  unsure (1)..(163): unsure at all Xaa locations
  Clone ID: PAT_MRT3847_129940C.1.pep
IESNRFYLTRWLSDHTVLQFSSSFSSSSEILPAKVHPLDMLNICECYVRHPNQTDRVIGTILGSDLPDGTRNIRNYYADLHNQCIXQCPLDLEYHHNMLISHQKLKPKEIILIWYSTXHGVTDDNALIHXYYSGQVPNSIHLTDETGCTIGAGTSKAYGCNKL

SEQ ID NO: 175994 - protein, 74 aa, Glycine max
  Clone ID: PAT_MRT3847_129941C.1.pep
YTFLQNYPTRETEYYSIRFTSTQHKNQKNTYANGNISSQRHYFQHLYYFLLSHAPDGKPKPSGAADGVLVADGV

SEQ ID NO: 175995 - protein, 68 aa, Glycine max
  unsure (1)..(68): unsure at all Xaa locations
  Clone ID: PAT_MRT3847_129942C.1.pep
MSTTLDHPIRQKRLTYVAVVHLKKHGMRFEIAXYANTVLSWHSGVEKDRHEALHVHTAYTNVCKGDLG

SEQ ID NO: 175996 - protein, 50 aa, Glycine max
  Clone ID: PAT_MRT3847_129943C.1.pep
PGFSETPKKGSQPTFEMVRAPPPLEVPNPRFNFFPSFSISFKIGALSDRF

SEQ ID NO: 175997 - protein, 70 aa, Glycine max
  Clone ID: PAT_MRT3847_129944C.1.pep
LKFVTKIRQIVLISKRIGDPVVALTLMVHTHFNDFHISDMLTRYGLIVPASHDARKSRACDYARVVILWD

SEQ ID NO: 175998 - protein, 84 aa, Glycine max
  Clone ID: PAT_MRT3847_129945C.1.pep
KGAKWDPHFWELFFPKKGGGPKKGFKKGSFEGAKQTSGDLSFFIENPKKFKVFNIFLGIFQNFEMGGKIFKPAFFFPQGTARFF

SEQ ID NO: 175999 - protein, 145 aa, Glycine max
  unsure (1)..(145): unsure at all Xaa locations
  Clone ID: PAT_MRT3847_129946C.1.pep
QEKXAEEIKKGAXXXEGGEAKXRQARERFFFFXXGKKGETPNIDVPIITENELPEADGLLVGFPTRFGMMGGXLKDLMDANGGQWGKQELAGKNAGIFYRNGYQGGGKENNRLESITKVVHHGKIFGDIGXTFGAGKVERENGMG

SEQ ID NO: 176000 - protein, 103 aa, Glycine max
  Clone ID: PAT_MRT3847_129947C.1.pep
CDRPTDPKSNKVSIKKDKISLISLCRGLIHPRRRQGMPNKKTIRPNSPPSDPSAEEHVPNPIVSGTHINSIKANVKTYIPHCKANCKEPENNLCCNRKCSHTK

SEQ ID NO: 176001 - protein, 70 aa, Glycine max
  Clone ID: PAT_MRT3847_129948C.1.pep
SVRLGAFSNLHGTTFLCKLTSCMHACIKLKKGTPLVCVNQKTAISRKLPLSSCTLPWNFLDTASPHQNPN

SEQ ID NO: 176002 - protein, 56 aa, Glycine max
  Clone ID: PAT_MRT3847_129949C.1.pep
AIVWTGAAPPAAEIATSLGLRYDCELLERVCKVYRWRFTVSVTVFKLPCQFSIEND

SEQ ID NO: 176003 - protein, 113 aa, Glycine max
  Clone ID: PAT_MRT3847_12994C.1.pep
FSPCPLLLFFGCPQLASHPLGVYVSPLGAPPPPSQFVCFFVILPPPARLLFFYFLYPGSPPPQETIITKLQERPTLKTRGTLGVANPPVSKKNIKKTNTINIPQPKINLNIIP

SEQ ID NO: 176004 - protein, 58 aa, Glycine max
  Clone ID: PAT_MRT3847_129950C.1.pep
KVAKAYLKLWMRNNLEKIFIHSLAQHTLCAKRIILHALSESSLALSMSTSTHWLKGSR

SEQ ID NO: 176005 - protein, 89 aa, Glycine max
  Clone ID: PAT_MRT3847_129951C.1.pep
PLVLAGIWHIPPNCRTPRPNPCSHLDIAIGCFSLVTNVLLAFGATRSASDCFCHPKLDLSLPPLVSPSGSRRTRGRGRELRFGTGTARG

SEQ ID NO: 176006 - protein, 146 aa, Glycine max
  unsure (1)..(146): unsure at all Xaa locations
  Clone ID: PAT_MRT3847_129952C.1.pep
AAIDTNGVYVNGKLCTHANLTIPEDNFRHVEPGSTANQLSLGLSPANVAHXPGLNTLGVSMSRIDYAQKDLNPPHTHPRGTEMLMVMEGTLCVGLVCCNQDNDRLFSIELNKGDVSEVPIGLGDDANNVRQGNAGRITDLSSQNAG

SEQ ID NO: 176007 - protein, 62 aa, Glycine max
  Clone ID: PAT_MRT3847_129953C.1.pep
CKFSYIYSKSSFNLLACYQARRLTFLWFILHTRPISLSLIYFFPVALPLFDSPPPPPRRWHC

SEQ ID NO: 176008 - protein, 341 aa, Glycine max
  unsure (1)..(341): unsure at all Xaa locations
  Clone ID: PAT_MRT3847_129954C.1.pep
MLSNIATMIGALHQTLLSSIKSIAMMIAISATFMIFFLCSPSVAILITRLPLPSPVTGPESVAFDRNGGGPYVGVSDGRILKYAGPTEGFKEYAFTSPNRNKTICDGLADFSELQATCGRPLGLRFNHQTNELYVADAIYKHXQENVNTTLQFLDGLDVDVNTGIVYFTQASANYGFKDAQALQSSRDQSGSLFSLDPKTNQTRVLMRGLALASGVAVSRDGSFVLVSEYLANRIQRFWLRGPRANSSELFLQLTGRPDNIRSNQRGQFWVAVNGALGPNPPPRPTILPGGLRISENGVILQILSLVKEFGSEAASEVHEHNGTLYSGSLRASYVPISSMI

SEQ ID NO: 176009 - protein, 157 aa, Glycine max
  Clone ID: PAT_MRT3847_129955C.1.pep
WAILITRLPLPLPVTGPESVAFYLNGGRAYVGVSDGRILKYAGPTEGFKEYAFTSPNRNKTICDGLADFSELQATCGRPLGLRFNHQTNELYVADAYSGLIKIGPNGGAPTQCFKDIQPQQENVNTTLGFLDGLDVDVNSGVVYFTQASANYRFKDA

SEQ ID NO: 176010 - protein, 33 aa, Glycine max
  Clone ID: PAT_MRT3847_129956C.1.pep
VKGLHALKGIMKQLFLPPHRQTFYTGPWRHETF

SEQ ID NO: 176011 - protein, 50 aa, Glycine max
  Clone ID: PAT_MRT3847_129957C.1.pep
SQRIINTIFLIFFLCFFSTDFQKPKAKTTARMNSRHRPPSVVFSQPYSSR

SEQ ID NO: 176012 - protein, 71 aa, Glycine max
  unsure (1)..(71): unsure at all Xaa locations
  Clone ID: PAT_MRT3847_129958C.1.pep
XXSRXXXRPLVXLCVXVVXFXTXFXXXAWAXXXSFLXLVXXVSXXLCXXXXXVXARAXXPXFXLXAVXXXV

SEQ ID NO: 176013 - protein, 116 aa, Glycine max
  unsure (1)..(116): unsure at all Xaa locations
  Clone ID: PAT_MRT3847_129959C.1.pep
MSGILIRKIDTDEEWCLXAKGLVYGIRHSPYTELLKGQFQLHHSGYAQVQEGTAKTSVESLFAVGDVHDHEWRHAITAAGSGCHSSQSIERYLVSNDLSIEHHQPQTGYGSKEQTD

SEQ ID NO: 176014 - protein, 97 aa, Glycine max
  unsure (1)..(97): unsure at all Xaa locations
  Clone ID: PAT_MRT3847_12995C.1.pep
RSSPNACAFIPASSERLFGQAGILVCLIHCHSMDLSPGRPERSRPFHFPXPCLSFIRSFPPLQSSLLVPIYLYVIACVQGRALPSLLVLPCVSQPGM

SEQ ID NO: 176015 - protein, 32 aa, Glycine max
  Clone ID: PAT_MRT3847_129960C.1.pep
EYGPFNNKPGIDVGLVSISSFIKRGFRFSLFF

SEQ ID NO: 176016 - protein, 75 aa, Glycine max
  Clone ID: PAT_MRT3847_129961C.1.pep
SNSEIDQSHTCNKKKVSVTSGGVASNTEIQFDEHVPFSIYWRSKINGGARSLGMVVVRVVSRSKDRPFCRLLAAV

SEQ ID NO: 176017 - protein, 61 aa, Glycine max
  Clone ID: PAT_MRT3847_129962C.1.pep
LLFLPSTRIPQFCVSFPPLPSPLNFRFIVNRAGMTVCPPIYRWKKISFSVAIGKKRDEKGA

SEQ ID NO: 176018 - protein, 94 aa, Glycine max
  Clone ID: PAT_MRT3847_129963C.1.pep
LTIKYLIRNTLQGISSRNFNLCNLLLTITPLQKITVERNYQNVLVELQVGRETNLTDATPSRKLKLHSRINSFGNGKRKMCYATRYVKILLDSL

SEQ ID NO: 176019 - protein, 113 aa, Glycine max
  Clone ID: PAT_MRT3847_129964C.1.pep
EFSKHGWILFSTSHVCLPDNRHSKGTLPLPLTCLLPSFNSLRVGTIFFARIFCQYNKFSPEPDKIDDKEMQPGRPRRPSRTRSIKKLMVFVDRREADIKEILRENKKRRLSIG

SEQ ID NO: 176020 - protein, 92 aa, Glycine max
  Clone ID: PAT_MRT3847_129965C.1.pep
LRVPVPDNSRVRPTRPETSKPFDRSGSLLFARCGYDLIDLRLIHRISLSGIANPICYIKKRRWIDTFWTRACVHLPGNPLTRDEIELIKDRL

SEQ ID NO: 176021 - protein, 74 aa, Glycine max
  Clone ID: PAT_MRT3847_129966C.1.pep
RAARRALFFFFPKWVSYHYTILSRDYKLTKSKTKPATPFGLFELKLHSHWFWLFEISSPGILGSGFRTSREING

SEQ ID NO: 176022 - protein, 48 aa, Glycine max
  Clone ID: PAT_MRT3847_129967C.1.pep
SSQNQEYQILLQFNNHVISLLWQTERKNTLHYLFVVAYRKTHYIVSWL

SEQ ID NO: 176023 - protein, 56 aa, Glycine max
  Clone ID: PAT_MRT3847_129968C.1.pep
TFLLTSESVNEGQSDKLCVHISDDVLDACLEQDPDRKVAYDTCTKTNLVMVFGEIT

SEQ ID NO: 176024 - protein, 49 aa, Glycine max
  Clone ID: PAT_MRT3847_129969C.1.pep
RPDYYFIINLAVRKSNKNRGYYYFLHFSFAENILTPILGLQTYLIDRNL

SEQ ID NO: 176025 - protein, 226 aa, Glycine max
  unsure (1)..(226): unsure at all Xaa locations
  Clone ID: PAT_MRT3847_12996C.1.pep
GFVGGNIAKELCVSKAAASPVSQESFANRRVVTSPSTTVVKKSGSPLNPEEMVESSNVGISECILNAGGXDPRTILQFHILQLLKMAGWSIEKRQRPSRRYPESVYRTPEGKTIREFTKAWRLCGELLSVEKCNFMCRDYKEWTDISQFWSDLSSTLINVEKTKMQSEDPAAVLAYRWWLLDPFVVVIFFDRKIGVLKKGEAVKATWSLVSSKYMGACAPICSSSG

SEQ ID NO: 176026 - protein, 90 aa, Glycine max
  Clone ID: PAT_MRT3847_129970C.1.pep
QGDDGISRSSQRRSKQIIHFLLSHQPKGCLHSVDRVRRHKTLFPNKKVPEVLKFRVPSQRPFGPLGSIVHRQNPYNKSLEPLIKIHKGGH

SEQ ID NO: 176027 - protein, 40 aa, Glycine max
  unsure (1)..(40): unsure at all Xaa locations
  Clone ID: PAT_MRT3847_129971C.1.pep
XCNXLXIGDEVXTISMTRTVFREDTAAAHSPTXXXSXSSR

SEQ ID NO: 176028 - protein, 89 aa, Glycine max
  Clone ID: PAT_MRT3847_129972C.1.pep
QALLSLMDQPHQSLSLCFCLGLGQWKRFLQQLQSTSSPFAGTLNSRSSTYTTQVPHINQKVDKSYTKMNKTAESTSACECKYRILEEVR

SEQ ID NO: 176029 - protein, 227 aa, Glycine max
  Clone ID: PAT_MRT3847_129973C.1.pep
SSSSLFQCSLSLCTTRLKTLNIFFILRSLSSPLILSYIIIFYLLAKNTSCGVDPKFLACPPTTCANNNQSISYPFYIQGKQEPFCGNPGFGISCGPNGFPILNLSNTQYIIHQIFYENQTLRVSNAAFSVSRSNTTNSKGCLPLPLTQNLTLPSTPEFDIAPNQSNMRLFYGCESLPWLEEHKVGCFNETSSVLALYKEDKNISFVSKNCKGEVVDTIVEDGIIRRE

SEQ ID NO: 176030 - protein, 97 aa, Glycine max
  unsure (1)..(97): unsure at all Xaa locations
  Clone ID: PAT_MRT3847_129974C.1.pep
EFVDQPPVLSPLSIILRLGHYAPEGSNAPHTHLSGTYIHIIHDYSHYIKYXLSIKIKNXLLTTKHNKGNLKKITLGLIHHQHTLVYVNAPVHAALNS

SEQ ID NO: 176031 - protein, 78 aa, Glycine max
  Clone ID: PAT_MRT3847_129975C.1.pep
FRFLSTWNPSRFLGMLPELYVTVTVPCDFMSLSVLRNSIERSIKFREPKSVASKGKRAYLGLSVLKIYAENLNQHQLI

SEQ ID NO: 176032 - protein, 79 aa, Glycine max
  Clone ID: PAT_MRT3847_129976C.1.pep
AFSLILCHNLFNFVSQSFLFKFFLLKRWRVRRKVSDPLTMPGLSAVGSFTVFALNLFLHKGTVLFAFMQFPVSNNVPCF

SEQ ID NO: 176033 - protein, 198 aa, Glycine max
  Clone ID: PAT_MRT3847_129977C.1.pep
SNYIDHLGFASLTVWNMKTWKAMTVLPLGEDPPAITSLCFNHNGKILAASAVDGMIHMFDMSAGLQITGWPAHDSSISSILFGPDETSIFSLGCDGKIFEWSLQNQGQILWSRDCSRFCYPLNDSKYCRHEMALDANGRRLLVTSSSFRAPIYQVHGHLSGWRTLPHGAPITAVDWHPTLPIFLTGSADNSVRVTSLS

SEQ ID NO: 176034 - protein, 119 aa, Glycine max
  Clone ID: PAT_MRT3847_129978C.1.pep
LHSTQHITKITCLDACWFTIVVEQPTSRKGNEQHHQTQSMNTKLQVIPFTTNMNPTRPLSNHHKSPPTQIFLLSTTHLLLYSSSSSQISNPKKNQTIQNNNLPMSRFCYHCSSVITINV

SEQ ID NO: 176035 - protein, 77 aa, Glycine max
  unsure (1)..(77): unsure at all Xaa locations
  Clone ID: PAT_MRT3847_129979C.1.pep
MVGIGVPICVQCGNTSNPRWHKVVGPTLGFLAFAAAAVVEWPVGALVYCFRHSKGSQNXMGHPATVIYPSVTNAIPI

SEQ ID NO: 176036 - protein, 84 aa, Glycine max
  Clone ID: PAT_MRT3847_12997C.1.pep
EEEEKQVKRFQVLTHLFCFIFFTFQILFLSILSRKLISLSEVNFFHRTQQTTTRARRTRFCLCVYFSCQIWIGAGKYQRLGTGI

SEQ ID NO: 176037 - protein, 82 aa, Glycine max
  unsure (1)..(82): unsure at all Xaa locations
  Clone ID: PAT_MRT3847_129980C.1.pep
LRGGFVLPPPPPPVLVGFXRVGRLLXLPPLRKKEIHSSTPSSAGPRRTDVMASSGIFSLRGCVGNQANLYLPFCARVXFATT

SEQ ID NO: 176038 - protein, 58 aa, Glycine max
  Clone ID: PAT_MRT3847_129981C.1.pep
GEFHVVHKKRIVFIAEKKRQLSQRPFYRQAQDKGPFCITIRITLTQAFPKMVPGPKGR

SEQ ID NO: 176039 - protein, 240 aa, Glycine max
  Clone ID: PAT_MRT3847_129982C.1.pep
VVSFPGSPGSFKWEGVQGSFSPLTSVKRISQKKDYDIALVGAFRREKDKEMELQALRDEIQASMKLVKQREDEIQSLKMRLRFREAGIKRLETVASEKISAETHLLKEKEEHLKEIEVLRAQVDRNNEATRFAMENLQLKEEIRRLKSFCMEGERERMSEQIMVLENKLLEALDWKFMHETDLKTNSDLMMEDVHNDGNLISKQESSPKSRWQSLLREENEFLKIQAIQNQAEMDTICKK

SEQ ID NO: 176040 - protein, 54 aa, Glycine max
  Clone ID: PAT_MRT3847_129983C.1.pep
LLNNDTGTSSYIYCSTATISFITETYIHINFTAEKETTLSMHLAYQNILEASFS

SEQ ID NO: 176041 - protein, 66 aa, Glycine max
  Clone ID: PAT_MRT3847_129984C.1.pep
YVNNFLGALYIYNELRLLIDQYWNTRHCLTDLISILISQVSNYSKEVEEMKHVTKQEFIASLRRFA

SEQ ID NO: 176042 - protein, 71 aa, Glycine max
  Clone ID: PAT_MRT3847_129985C.1.pep
RKAMPKNHNILREPEIQFSRWAKIKIKSQPILEPTGWGRITWTQRVQTSILIPLKVYSGNRTFPFKYFHFF

SEQ ID NO: 176043 - protein, 175 aa, Glycine max
  unsure (1)..(175): unsure at all Xaa locations
  Clone ID: PAT_MRT3847_129986C.1.pep
MDSEFPNKALTSTRFSDLNPPLSEPVLQALSHSGFEFCTPVQAATIPLLCSFKDVAVDAATGSGKTLAFVVPLVEILRRSSSHPKPHQXVKADLKKIEEEGANILIGTPGRLYDIMNRMDVLDLKNLEILILDEADRLLDMGFQKQITSIITLLPKLRRTGLVSATQTEAXEELA

SEQ ID NO: 176044 - protein, 540 aa, Glycine max
  Clone ID: PAT_MRT3847_129987C.1.pep
MDSEFPNKALTSTRFSDLNPPLSEPVLQALSHSGFEFCTPVQAATIPLLCSFKDVAVDAATGSGKTLAFVVPLVEILRRSSSHPKPHQVLGIIISPTRELSTQIYHVAQPFISTLANVKSMLLVGGAEVKADLKKIEEEGANILIGTPGRLYDIMNRMDVLDLKNLEILILDEADRLLDMGFQKQITSIITLLPKLRRTGLFSATQTEAIEELAKAGLRNPVRVEVRAETKSENGPASSKQPESSKTPSGLHIEYLECEADKKPSQLSAREKALASFTSLSNGILLCTDVAARGLDIPGVDCIVQYDPPQDPNVFIHRVGRTARLGKQGHAVVFLLPKEESYVEFLRIRRVPLQERICADEASDVVPQIRSAAKKDRDVMEKGIKAFVSYIRAYKEHHCSYIFRWKELEIGKLATGFGLLQLPSMPEVKHHSLSIDGFEPVEDINLGDIKYRDKSREKQRKKNLQAKKEAKEKEPKPQKPKKTPNAPTDMRKKTARQRRAQQTMEDEEELMHEYRLLKKLKKGTIDENEYAKLTGTEELL

SEQ ID NO: 176045 - protein, 49 aa, Glycine max
  Clone ID: PAT_MRT3847_129988C.1.pep
TRIFWLNICRFGLFIQMHFFYVTMHSHWSKTCNWLMGAKRRKQVIFFLD

SEQ ID NO: 176046 - protein, 799 aa, Glycine max
  unsure (1)..(799): unsure at all Xaa locations
  Clone ID: PAT_MRT3847_129989C.1.pep
MANEGSDIDEVNYALDGVGEEEEDENAAQEEDDNDMEEDEEEYTFRFKTGMNPLDFVDDNDDSGIQPYQRFVRLEREALADKKRKAPEQCHSEEPPSKMAREGDISGAKIAEIMEAMDYYGMRKRSRKPKKRGRRKGSKNRVDPKLTQMQGDATFHYACGDYDRAKAVLCEVIRLAPNLHESYHTLGLVYTSLQDYKRAMALYLIAAHLDPKESPLWKTIFTWSIEQGYVDQAGYCLLKAIKADPKDVTLRFHLARLYAELGHYQKAAVTYEQVHKLCCENIDALKAAAKFYKKCGQVEYSIQILEDYIKSQPVGANVSVVDLLGTVLMETKAHDRALQHIEHAQTVNARKELPLNLKIKETTGICHAHLGNMERAQALFNDLKPENASKHIDLVTKVADSLMGLEHYNPALNYYLMLEGNIEKENGLLYLKIARCYMSLKERSQAILFYSKEKSXLQERICADEASDVVPQIRSAAKKDRDVMEKGIKAFVSYIRAYKEHHCSYIFRWKELEIDINLVDIKYRDKSREKQRKKNLQAKKEAKEKEPKPQKPKKTPNAPTDMRKKTARQRPQMAYNTTDPKHGFDCVKYIVQQHPHGVAAWNCYYKVISRLENRDTRHYKFVRGMQGKFVDCVPPILISGHQFTICSHHQDAARKYLEAYKLLPENPLVNLCVGTALINLALGFRLQNKHQCVVQGLAFLYNNMRICENSQESLYNIARAFHHVGLVTLAAFYYEKVIAICEKDYPIPKLPNENPDSIETHKPGYCDLRREAAYNLHLIYKKSGALDLARQVLKDHCTL

SEQ ID NO: 176047 - protein, 133 aa, Glycine max
  Clone ID: PAT_MRT3847_12998C.1.pep
SFFFFFLSGIPSLPAYGSCHYIPLKFKPHTRPPTRPPTRPEEEPVFVGLFQLPLMDRSGQIPAFGNWDYANELPITQYFESARQAGLVRYSSSSGESDPYVRADRDLYAVDFKKPIRNIPTSTLKKATRRQGG

SEQ ID NO: 176048 - protein, 589 aa, Glycine max
  Clone ID: PAT_MRT3847_129990C.1.pep
MDSEFPNKALTSTRFSDLNPPLSEPVLQALSHSGFEFCTPVQAATIPLLCSFKDVAVDAATGSGKTLAFVVPLVEILRRSSSHPKPHQVLGIIISPTRELSTQIYHVAQPFISTLANVKSMLLVGGAEVKADLKKIEEEGANILIGTPGRLYDIMNRMDVLDLKNLEILILDEADRLLDMGFQKQITSIITLLPKLRRTGLFSATQTEAIEELAKAGLRNPVRVEVRAETKSENGPASSKQPESSKTPSGLHIEYLECEADKKPSQLVHILIKNLSKKIIIYFMTCACVDYWGAVLPCLSVLKGFSLIPLHGKMKQSAREKALASFTSLSNGILLCTDVAARGLDIPGVDCIVQYDPPQDPNVFIHRVGRTARLGKQGHAVVFLLPKEESYVEFLRIRRVPLQERICADEASDVVPQIRSAAKKDRDVMEKGIKAFVSYIRAYKEHHCSYIFRWKELEIGKLATGFGLLQLPSMPEVKHHSLSIDGFEPVEDINLGDIKYRDKSREKQRKKNLQAKKEAKEKEPKPQKPKKTPNAPTDMRKKTARQRRAQQTMEDEEELMHEYRLLKKLKKGTIDENEYAKLTGTEELL

SEQ ID NO: 176049 - protein, 57 aa, Glycine max
  Clone ID: PAT_MRT3847_129991C.1.pep
PQQQKTLSPLTSLLASTTSLQMAHSHIYCCNAHHTQLSFGKGTYGSISHGIHMLPQQ

SEQ ID NO: 176050 - protein, 73 aa, Glycine max
  Clone ID: PAT_MRT3847_129992C.1.pep
SNMSSVLSIDKRSNMYTETIAHQLRSRYLDSTAENPWFYLLSAEMVMRIKGPQLRIVKEQSHSSIGIIARIIP

SEQ ID NO: 176051 - protein, 153 aa, Glycine max
  Clone ID: PAT_MRT3847_129993C.1.pep
SALKAEREKEQRILRDENKGLQSQLKDTAEAVQAAGELLLRLKEAEEAVTTAQKQAMDAEQEAAKAYKQIDKLKNKHEKEIITLNELLAEARLPKESVLPTYDDDGVMPSYDNSKEPNSVNDQFEPFTNNAEYGELAKLAEPSWFSGYDRCNI

SEQ ID NO: 176052 - protein, 210 aa, Glycine max
  Clone ID: PAT_MRT3847_129994C.1.pep
MKRLSTLVDGFLVLALFSCSTWTVWSSSCCNQINSYEVRPHSVSITEFGAVGDGITLNTIAFQNAIFYLNSFADKGGAKLFVPAGRWLTGSFDLISHLTLWLDNDAVILGSMNSDDWPVVDPLPSYGHGRELPGGRHRSLIYGRNLTDVVITGNNGTIDGQWSIWWNNFWNKTLNYTRPHLVELMNSTGVLISNVTFMNSPFWTIHPVYC

SEQ ID NO: 176053 - protein, 307 aa, Glycine max
  unsure (1)..(307): unsure at all Xaa locations
  Clone ID: PAT_MRT3847_129995C.1.pep
FGVTKGMEGQVTTLGLIPFFHIYGITGICCATLKSKGKVVVMGRFELKTFLNALITHEVTFAPIVPPIILTLVKNPIVDEFDLRKLKLQAIMTAAAPLAPELLNAFEHKFPGVAVQEAYGLTEHSCITLTYVQKGLGSTNKNSVGFILPNLEVKFVDPDTGRSLPRNTPGELCVRSQCVMQGYYKQEDETAQTIDKNGWLHXVAPAELEAILLSHSSVEDAAVVPLPDEETGEIPAASVILSPGAKESEEDIMNYVASNAAHYKKVRVVHFVDAIPKSPSGKIMRRLVKEKMVEKMKTKSLTKSKNI

SEQ ID NO: 176054 - protein, 53 aa, Glycine max
  Clone ID: PAT_MRT3847_129996C.1.pep
SWFSAFLCDSIIVFKMDQVTWSLPLAVSHFVSFSSFPFGFLCTTYLELGMELC

SEQ ID NO: 176055 - protein, 147 aa, Glycine max
  unsure (1)..(147): unsure at all Xaa locations
  Clone ID: PAT_MRT3847_129997C.1.pep
XSKERLSYGELNARANRLAHHLIELGVKPDQPVAICLERSLAMVVGLLAILKAGGAYLPLDPAYPSARLRQIVGDAEPKLLLCDVAGRTALGAEAVADVTVVDLETATPTWGERPPSNPDPGALGLSSRHLAYVIYTSGSTGIPKGA

SEQ ID NO: 176056 - protein, 88 aa, Glycine max
  Clone ID: PAT_MRT3847_129998C.1.pep
GQDRNQLAGADQCKDKMKELDSICNPIIDTMYQGARAALLSVCMDEDWSDIGRRWSYTPLCTNQIRSVNFLDGLGLSGTYLASTSYFR

SEQ ID NO: 176057 - protein, 100 aa, Glycine max
  Clone ID: PAT_MRT3847_129999C.1.pep
PQAVENIPLLPKKTGPPGFSPGGGPFYFWAKFFAGLPGIIRKGGGGFLGVPPPKNGVGFSAPGKNGVWNPLVKGFGINRGFLLIFFLKKGAPPVGVGEKT

SEQ ID NO: 176058 - protein, 179 aa, Glycine max
  Clone ID: PAT_MRT3847_12999C.1.pep
MDRSGQIPAFGNWDYANELPITQYFESARQAGLVRYSSSSGESDPYVRADRDLYAVDFKKPPIRNMPPSTLKKATRNRGRRCVVVKEKEKEKESVKMNMRKQGKVCDVTEQARKPVTVSKEMMRLHDAVPRSPLPRGVRLPKPVDEDLYKIPPELLRTTKRKKMLGFISKCLVPAACVS

SEQ ID NO: 176059 - protein, 112 aa, Glycine max
  Clone ID: PAT_MRT3847_1299C.1.pep
MSTAGQVIKCRAAVAWEAGKPLSIETIEVAPPQKGEVRLKILFNSLCRTDVYWWDAKGQTPLFPRILGHEASGIVESVGKGVTHLKPGDHALPIFTGECGECTYCKSEENTC

SEQ ID NO: 176060 - protein, 73 aa, Glycine max
  Clone ID: PAT_MRT3847_129C.1.pep
EIKGWTLASAIFYWSLMSYAILVVIMVFLVNALVTSSVGVSRLGSYEALAIWGSPTTALGCHINIWAFPGTQV

SEQ ID NO: 176061 - protein, 62 aa, Glycine max
  Clone ID: PAT_MRT3847_12C.1.pep
SVILYSQYTHAHCRTYTPCISEIGFHAVIPLSFRRVCIQASIRYVNPRSLRALAPPIRVFEP

SEQ ID NO: 176062 - protein, 47 aa, Glycine max
  unsure (1)..(47): unsure at all Xaa locations
  Clone ID: PAT_MRT3847_130000C.1.pep
AXSKXLXXGDTSPAXCPHVXAMMCMVVAMSVTPMAQAAITCRRPART

SEQ ID NO: 176063 - protein, 98 aa, Glycine max
  unsure (1)..(98): unsure at all Xaa locations
  Clone ID: PAT_MRT3847_130001C.1.pep
MDLMANEDFQHILRVLNTNVDGKLKIMIAMTFINGIXRRFDNIACKKADVDMNKRAGKLTAAERDSVMTVVANPRHFRIPXWFLNRWKDYRDGEYSQC

SEQ ID NO: 176064 - protein, 69 aa, Glycine max
  Clone ID: PAT_MRT3847_130002C.1.pep
QTIMVTISHRSVCAVQELIDIDGHDEITRSAEDETLDEPNTEEARKAAVKNVNEHEPGKACDQATDAED

SEQ ID NO: 176065 - protein, 52 aa, Glycine max
  unsure (1)..(52): unsure at all Xaa locations
  Clone ID: PAT_MRT3847_130003C.1.pep
GLPFFPFRGFLVPXPLKKKGNPSRASPKEKYFFFGFSIVPRLKGGQIPGHAN

SEQ ID NO: 176066 - protein, 116 aa, Glycine max
  Clone ID: PAT_MRT3847_130004C.1.pep
IRSKYVEKRWASKGGLQPASKSAEIIFNSNESPAARAKSATQRNRRLSLEESILVKHVAQIRPPVTRYHEGSSDFQKNSPPPPLRKPSASFDFDYTRGKNNGIVDHFDLFSIHDDK

SEQ ID NO: 176067 - protein, 181 aa, Glycine max
  Clone ID: PAT_MRT3847_130005C.1.pep
KSCLQCYCACFSHTIVSILGFNSPSQSSHVKCIERERQALLNFKKKSKISQSISVGFGGRIPHQPGNLSKLEYLDLKINSLDGAIPSQLGKLTSLRYLDLSHNYRIHGEIPYQLGYLSQLRYPALQKISLSGVIPFQVGNLPILHTLRLDGNFDLKINSAKWLSSLSSLTTLVQESLSTNN

SEQ ID NO: 176068 - protein, 68 aa, Glycine max
  unsure (1)..(68): unsure at all Xaa locations
  Clone ID: PAT_MRT3847_130006C.1.pep
LIGLELSFTGIIYLGFISSQCRTWVFANIHTHGLQVIRKXVMFLVFYVVCQMMLEDGVGDTQVFSEDM

SEQ ID NO: 176069 - protein, 55 aa, Glycine max
  Clone ID: PAT_MRT3847_130007C.1.pep
PTLPFLRSFFPILITQYISYHPLLYSTYKLSYMTDIYILFIPLITYTVPSNSHYN

SEQ ID NO: 176070 - protein, 63 aa, Glycine max
  Clone ID: PAT_MRT3847_130008C.1.pep
AGIYSPFEVRHDNTHRHAALRRLEATCEVHVMRRQCAKELPQIQQTSTLHLRCWPDSINAEHA

SEQ ID NO: 176071 - protein, 132 aa, Glycine max
  unsure (1)..(132): unsure at all Xaa locations
  Clone ID: PAT_MRT3847_130009C.1.pep
RIWPTSPGRRRSPTTSRPWCPPTTAPTVLRWAPRWRAVSRTTKRSSPTSAXRAXPTGLRSSPPPRRSRRPGSLPSSRPTATPGRRSSSSSRISATCSRRTRTGPRTSPPTRRSSPMSPPWPASRTCGKRSTR

SEQ ID NO: 176072 - protein, 77 aa, Glycine max
  Clone ID: PAT_MRT3847_13000C.1.pep
LPFACMMSIARYLKNGPDTGCLRQISRFIGWVPKKSDCVSHSQYDCFPNSGKCRKTETWVLLAPFYISILVLQESKI

SEQ ID NO: 176073 - protein, 64 aa, Glycine max
  Clone ID: PAT_MRT3847_130010C.1.pep
GWARARVGLSCCTLRLSSRSALRPISSRSQELRCARAAIDYEKKGFVENYEHGHVMEKKLVAMA

SEQ ID NO: 176074 - protein, 71 aa, Glycine max
  Clone ID: PAT_MRT3847_130011C.1.pep
AARRQQKDTAARRLQKGTAARGRQKGTVARRRQKGTAARRRQKGHTNFITVGVLELNMNIKQWSLIKLELL

SEQ ID NO: 176075 - protein, 101 aa, Glycine max
  Clone ID: PAT_MRT3847_130012C.1.pep
HTSGQIHALVFNRPISATTTRITTRLTSFILLLHLLLLPLAQLLLVFLQYPYFFFCFSLFYHVMVQKPIFVLLVMCTVQKEKSFKWGFLSFSCLWSTLARA

SEQ ID NO: 176076 - protein, 73 aa, Glycine max
  Clone ID: PAT_MRT3847_130013C.1.pep
KEKNNKSSPPGGESPFWFIKGPQGPSFQNFVTRKHRQILIFLNKFGRKALCQNSHMPYESETPSTGGGKKEVL

SEQ ID NO: 176077 - protein, 56 aa, Glycine max
  Clone ID: PAT_MRT3847_130014C.1.pep
ELGIRLELLFFRIFCIVARGVSLCGGLFKIAEAVPPSQRDTSTILTVTWCYWSIIR

SEQ ID NO: 176078 - protein, 244 aa, Glycine max
  Clone ID: PAT_MRT3847_130015C.1.pep
MCATFNILVLLLSLLLTSSSSFLQPRRVLHQPLFPTISVPPAEAPSYLPPEPQPKQQHQPKIPFSSISSSSPPPPQKPFFPSYHSPPLPPSPAVVATFPANISSLLLPHPVSRHHRSAAALAVSLSLCSLALLAAVVAFLLHHHRRTHSSSDDNDDDKASRSDSLRLFPPNTDASDGADRKPHDKASPTSELLYLGTVANSVITTTTTTTTTTIDSSSSHHEIFRPAYQKFGDSPELNPLPPLP

SEQ ID NO: 176079 - protein, 69 aa, Glycine max
  Clone ID: PAT_MRT3847_130016C.1.pep
RLTVLVLCLCNRLHGSRRFTAKALIAHLHLILAFAGRIGYLQSSYGSFKLYGVHSFSHLPPLAPPPPPQ

SEQ ID NO: 176080 - protein, 76 aa, Glycine max
  unsure (1)..(76): unsure at all Xaa locations
  Clone ID: PAT_MRT3847_130017C.1.pep
KVVPPCDCVIIHQELYVTRWCCRYLLXHSPLPLFPNGLXSSFLPTGPGXXPLGPXNIYGNWGLPGKNNXXKGEXLX

SEQ ID NO: 176081 - protein, 231 aa, Glycine max
  Clone ID: PAT_MRT3847_130018C.1.pep
MAQALSTSSLLLSQKTGSYVKPQNNVIVPCMASFPSRKEFPRLGRVRAQASGDNKDNSVEVQHVNKGDQGTAVEKKPRRTAMDISPFGILDPWSPMRSMRQILDTMDRVFEDTMTFPGRNIGGGEIRAPWDIKDEEHEIRMRFDMPGLAKEDVKVSVEDDMLVIKGGHKSEQEHGGDDSWSSRTYSSYDTRLKLPDNCEKDKVKAELKNGVLYITIPKTKVERKVIDVQVQ

SEQ ID NO: 176082 - protein, 87 aa, Glycine max
  Clone ID: PAT_MRT3847_130019C.1.pep
IIIKRNIPGCITSHLLTNIPDRNNPINVYNLSHNLVSSCSCYINSAWFIHNLYTDSYSQTSASFIVQCTVESFPFIYQVKHDTDIFV

SEQ ID NO: 176083 - protein, 142 aa, Glycine max
  unsure (1)..(142): unsure at all Xaa locations
  Clone ID: PAT_MRT3847_13001C.1.pep
FPFHTNTSHHCHCSLSLSLSLVRTQFLMGIYLSTPKTXKGPLERRGWEEKPGNXKAFSAFSGGFGALFPNWPQGGAFLGPPFSPPFFPPHWGGEKKKKKKPPRGXKKTLYKPPPLFFFFFFFFFFWGGGGFFSNKKTPFLKK

SEQ ID NO: 176084 - protein, 103 aa, Glycine max
  Clone ID: PAT_MRT3847_130020C.1.pep
LQQHPSYKKMASLRFLFLASFFIVLSLSINIGEVQGANRKLLAPTFPDLGNIPGLEYPPLPPITNWPEYRLPSYLRPNYPAIPASYYRYTPPAKTTTITSSKP

SEQ ID NO: 176085 - protein, 51 aa, Glycine max
  Clone ID: PAT_MRT3847_130021C.1.pep
QAFVFIHEKQIGHAVYAEVPERYDERNGRYTRIIRTLPRQCDNAPMAYIEL

SEQ ID NO: 176086 - protein, 50 aa, Glycine max
  Clone ID: PAT_MRT3847_130022C.1.pep
AFLVFSNPVLCSDKEDIVFKGITSYRQPRTLEPLTQFSKAPFLANKFPKK

SEQ ID NO: 176087 - protein, 43 aa, Glycine max
  Clone ID: PAT_MRT3847_130023C.1.pep
KWVFLRPFCGLTDSKMLYNGPKRLGNPQSKKNPPQKLNPAQKK

SEQ ID NO: 176088 - protein, 389 aa, Glycine max
  Clone ID: PAT_MRT3847_130024C.1.pep
MELSLSPTSHRVPSTIPTLNFAKLSSTKATKSQQPLFLRFSKHFNSIGLHHHSHRCCSNAVPERPQRPSSIRACTGVGASGSDRPLAERLLDLKDACWRFLRPHTIRGTALGSFALVARALIENTNLIKWSLFFKAFCGLFALICGNGYIVGINQIYDISIDKVNKPYLPIAAGDLSVQSAWFLVIFFAAAGLSIVGLNFGPFIFSLYTLGLFLGTIYSVPPFRMKRFPVAAFLIIATVRGFLLNFGVYYATRAALGLAFEWSSPVVFITTFVTFFALVIAITKDLPDVEGDRKYQISTFATKLGVRNIAFLGSGILLVNYIVSVLAAIYMPQAFRRWLLIPAHTIFAISLIYQAWILEQANYTKDAISGFYRFIWNLFYAEYAIFPFI

SEQ ID NO: 176089 - protein, 109 aa, Glycine max
  unsure (1)..(109): unsure at all Xaa locations
  Clone ID: PAT_MRT3847_130025C.1.pep
RXXKPRXXXNPXTXXCXXXXPXXVXXXDXXXXGXRXXXIXXLRXXLXTXXXXXXXGXXXXXXXXVXRVLXXLXXXXXAXXEXVNLHXRXXXXXPFXXRAEFRAYVXFXY

SEQ ID NO: 176090 - protein, 73 aa, Glycine max
  Clone ID: PAT_MRT3847_130026C.1.pep
LSLRVERIRVRTRLAIRKEIRVGFENEVENEAQVRPQDKQLDMADSDAVIVTVKGNGRGKEWVEHIWPHKWSA

SEQ ID NO: 176091 - protein, 154 aa, Glycine max
  Clone ID: PAT_MRT3847_130027C.1.pep
MASSLSLSTPPLCHPRVCKHFKLYNGLHKFSFNGHGSDFAVVRHNSKVPNAGGRIRATLTSGGGGDLGSYLKSSGFVTNHFRTGAQLDVIAFGTLRADTAVPAGSGFSDDEDDHDFDSPTEGFASIPEGHEDIMNGKMVVVVDDEDQENERDLI

SEQ ID NO: 176092 - protein, 65 aa, Glycine max
  Clone ID: PAT_MRT3847_130028C.1.pep
VLMSSYLFPYGLFLCEERAITLWSSSGCKSSSGGQRIVSSHLALVVTSLIKKIGCLKNQGDAALR

SEQ ID NO: 176093 - protein, 72 aa, Glycine max
  Clone ID: PAT_MRT3847_130029C.1.pep
FRACNISNIIFFVMVHTPTRAVIICLSIFTIKNMINSPVPYIRKVCPLEFSIFENERYLLRRYQKAKSFDKP

SEQ ID NO: 176094 - protein, 69 aa, Glycine max
  unsure (1)..(69): unsure at all Xaa locations
  Clone ID: PAT_MRT3847_13002C.1.pep
MCDDDVAALVVDNGSGMCKAGFAGDDAPRAVFPSIVGRXRYQGFMVGMGHKDSYVCDXXQFKHGILTVN

SEQ ID NO: 176095 - protein, 107 aa, Glycine max
  Clone ID: PAT_MRT3847_130030C.1.pep
SPSGWERFKKKKAFSPVPPKRVWDFFYLLPSAFGAPFKKLSFPPKCLRITHFVFPKRKRNLGSCFNFRSLFLGCSPNFKGPPSFFLGKAAPFFGGIRFRPLRGLFFF

SEQ ID NO: 176096 - protein, 108 aa, Glycine max
  Clone ID: PAT_MRT3847_130031C.1.pep
LLYKLLDLELPFPVSQSCPPETTITRDRLTLSMRKRPSISAYDSALDIGSSICSCAARPRSSSQVGLKPESGFILNCTIADSVRSFSYQGGYPPQGHYQQPQQPYYPT

SEQ ID NO: 176097 - protein, 405 aa, Glycine max
  unsure (1)..(405): unsure at all Xaa locations
  Clone ID: PAT_MRT3847_130032C.1.pep
MESLKGEEVKCVWVQGPIIVGAGPSGLAVAACLSHHGVPYVILERSHCITSLWQHRTYDRLKLHLPKHFCELPLMPFPLHFPKYPSKNQFISYLNSYASRFNIRPRFNQSVQTAEFDPSSQLWLVRTNGFQYISPWLVDATGENAEPVVPSISGMDMFHGPIVHTSVYKSGSDYNNQRVLVIGCGNSGMEVSLDLCRHNANPYMVARNTVHVLPREMLGXSTFGIAMALLKWLPIKVVDKLVLAAARLMLGDTARYGVRRPKTGPIELKLVTGKTPVLDVGQVAQIRSGNIKVMEGVKEITRNGAKFMDGQEKEFSAIILATGYKSNVPTWLKSCESFTKDGMPKTPFPMGWKGENGLYTVGFTRRGLLGTASDAVKIAKDIADQWMTVKDKSYRNSHIILLKST

SEQ ID NO: 176098 - protein, 66 aa, Glycine max
  Clone ID: PAT_MRT3847_130033C.1.pep
SSNQVPHAKNSASFPETLPKAPAFPKFSPIGTEGVVKSDDNRHHVLEGGVCSHKLLKRTVRNSCLI

SEQ ID NO: 176099 - protein, 163 aa, Glycine max
  Clone ID: PAT_MRT3847_130034C.1.pep
RGEAGPENPGRPTRPASRPPEPTKGRGGHTDPKAQTKTPQDHQAAGQQAHKEGKRHGGSPQPNAPATNIGDQQQAPRNGPKKSGRHRAAGKAEENQGAQRPQTHRPNDKAKRSPKNHAPNKEPKPNTEEPQRQNTTRRHGAGTKTKNTARNSPRTRNHKSENG

SEQ ID NO: 176100 - protein, 47 aa, Glycine max
  Clone ID: PAT_MRT3847_130035C.1.pep
DFSMEILKFPIPKEKEKRSLNYQPLLTPLEGLILKHKESYNGLIKEI

SEQ ID NO: 176101 - protein, 81 aa, Glycine max
  unsure (1)..(81): unsure at all Xaa locations
  Clone ID: PAT_MRT3847_130036C.1.pep
KKKKILKKKKTKTKKEKIKKKLWTTTGPSRLSNLTYPSLPRHSLSILXPNLNSLHCPLQHNDWKNPSLTXLNLLALHPILV

SEQ ID NO: 176102 - protein, 91 aa, Glycine max
  Clone ID: PAT_MRT3847_130037C.1.pep
TVAYDSDSDLGLAFLDSAFHDEPDLVPDHASWPLSLVLLIKPLISLLSYRWKHQPEPLEIPEPTNKATGNDYGSLDSRNASSGHIPLHDPS

SEQ ID NO: 176103 - protein, 89 aa, Glycine max
  Clone ID: PAT_MRT3847_130038C.1.pep
QIVRDARGILVLCSYHLLGLLVSFYHSKYCLQQVLPFYRMYLQNGLHLGLSFPILRIHYRCQSRYLSLWDSPIDLCGTYKADCEPPPDI

SEQ ID NO: 176104 - protein, 101 aa, Glycine max
  Clone ID: PAT_MRT3847_130039C.1.pep
MDNQNAIEFFEGQNLGDMQIFGNLRPVCLMWACELGIPDIISNHGKPITLLELVSALQIPPSKVGFVKRFMRFLAHNRIFDIHESQEDHHELALWQVIPEW

SEQ ID NO: 176105 - protein, 483 aa, Glycine max
  Clone ID: PAT_MRT3847_13003C.1.pep
HSSAHASAHACAHASGHGKDPPHKGEKEVPEGAPDCLAGLTFVISGTLDSLEREEAEDLIKRHGGRVTGSVSKKTNYLLCDEDIGGRKSEKAKQLGTSFLTEDGLFDMIRGSKPAKAPSQEDKKPVNKAVAVASQSKVSPKSQVKVPLSSRSPSKQAKPKTATTVQSSLMWTEKYRPKDPKDIIGNQSLVLQLRNWLKAWNEHFLDTGNKKQGKKQNDSGLKKAVLLSGTPGIGKTTSAKLVCQELGFQAIEVNASDSRGKADSKIEKGISGSKTNSVKELVTNEAIGVNMERSKHYKSVLIMDEVDGMSAGDRGGVADLIASIKISKIPIICICNDRYSQKLKSLVNYCLLLSFRKPTKQQMAKRLMDVSKAERLQVNEIALEELAERVNGDMRMALNQLQYMSLSMSVINYDEIRQRFLTNAKDEDISPFTAVDKLFGFNAGKLKMDERINLSMSDPDLGPLIIQENYINYRPSLAGKDDS

SEQ ID NO: 176106 - protein, 42 aa, Glycine max
  Clone ID: PAT_MRT3847_130040C.1.pep
EMRKSCGFFFLLLLLVFAYHVVVQTEGRLCESQSHGFHGLCK

SEQ ID NO: 176107 - protein, 48 aa, Glycine max
  Clone ID: PAT_MRT3847_130041C.1.pep
ERGACIPTTLMHPITLDHASTIVFCGRSCMHYVSTDLQLTHRTLSYLI

SEQ ID NO: 176108 - protein, 100 aa, Glycine max
  unsure (1)..(100): unsure at all Xaa locations
  Clone ID: PAT_MRT3847_130042C.1.pep
AEQDIVKLVDTFPGQSIDFFGALRARVYDDEVRKWISGVGXCXVGKXLVXXXDGAXSFGPAWMALXXLLLFGXVLVLYLVVVWRVQWVREYLNGAALVNA

SEQ ID NO: 176109 - protein, 35 aa, Glycine max
  Clone ID: PAT_MRT3847_130043C.1.pep
FWTPLIASEPYLQTCRCPILTTYPQMPSQKPVGFK

SEQ ID NO: 176110 - protein, 85 aa, Glycine max
  unsure (1)..(85): unsure at all Xaa locations
  Clone ID: PAT_MRT3847_130044C.1.pep
KGGSPRXQEGPWGGIPQFAFYSKPPIGRGFTFLAPNGNKTSFGPPGVDKFLQNIFCNFSFKKGPPPKTTGFLFYPSLTCXGVLDA

SEQ ID NO: 176111 - protein, 178 aa, Glycine max
  Clone ID: PAT_MRT3847_130045C.1.pep
MSLPQVTSKVSQVGNSLKIKSNSLPISIDFSKGCIGSLSAREIELSEDYTCIISHGPNPKRTHIFGDCILECHNHDFTEFSKKEEPAFSYSQVPSFSDGSAPYPSDNVLSFCYSCNKKLVKEEDIYRYRGEKAFCSFECGSEEILTGEELEKTCTNSAESSPDSSYHDLFLTGLLLSK

SEQ ID NO: 176112 - protein, 55 aa, Glycine max
  Clone ID: PAT_MRT3847_130046C.1.pep
RTLGIRLEIILMGSGYCRLLFIYMLPHSYIYQWLFAVLDADFWMFSSIMILYPYL

SEQ ID NO: 176113 - protein, 221 aa, Glycine max
  Clone ID: PAT_MRT3847_130047C.1.pep
MAEANVVLLDFWPSSYGMRVKIALAEKGISYECKQEDLEARSSLLLEMNPVHKMIPVLIHNGKPICESLNIVQYIDETWNHKPSSLLPSDPYKRSQARFWGDYIDKNVYNAVKRVWTGKGKEQEEFKKQFIQCLKTLEYELGDKPYFGGEDFGYVDVALVPFTSWFYTVETCGKLSIEKECPKLMAWAKRCMEKESVATPLPHPHQIYAFAMQYKQRHGLE

SEQ ID NO: 176114 - protein, 99 aa, Glycine max
  unsure (1)..(99): unsure at all Xaa locations
  Clone ID: PAT_MRT3847_130048C.1.pep
MGSSKLSVIIDLERVTISYVIIDXRVAKARALPEPSVLPGKGDMPTDDPHALVALLTYXAVTFPAEHDLPAVSKAPVAVVIDNNLQVIPRVPMIDPDTT

SEQ ID NO: 176115 - protein, 65 aa, Glycine max
  Clone ID: PAT_MRT3847_130049C.1.pep
SAISSMISSSPNDTTTYCVLSFVHAPHFDIFKHYPACLSGSVAYIPLRCQINCDNEICDHNIQIM

SEQ ID NO: 176116 - protein, 111 aa, Glycine max
  unsure (1)..(111): unsure at all Xaa locations
  Clone ID: PAT_MRT3847_13004C.1.pep
XGSPAXXCXAXSFXXAFLXAXXGXFASXXPXALXXFXPPPPXXXXXSXASSFWXLXAPVXXLLXLXXLLWXXXXRXXXXRAXXXXXAXAVIFPSXXVAVFFFLFXXXXAWV

SEQ ID NO: 176117 - protein, 70 aa, Glycine max
  unsure (1)..(70): unsure at all Xaa locations
  Clone ID: PAT_MRT3847_130050C.1.pep
FGSSSSPRAARAGFGSERVDPFPVALLAVLSGVKGEVRSSNATNPMLTRLLENCKSLKXVVDECPSAFVN

SEQ ID NO: 176118 - protein, 93 aa, Glycine max
  Clone ID: PAT_MRT3847_130051C.1.pep
SISSTEGPAVILAKAMKDLLPAIDKKETPRPNSIRRGPLTLQFHFFNTALDRVVEVAVAETSPNTGNGNLVCNLSPTKLVILSHFTQQHMPSS

SEQ ID NO: 176119 - protein, 58 aa, Glycine max
  Clone ID: PAT_MRT3847_130052C.1.pep
ISKNVLFNEILSIPLSLTLSPTIFHFVISSFSTISSHSHIVLPPSSSTASSDCQDVLN

SEQ ID NO: 176120 - protein, 97 aa, Glycine max
  Clone ID: PAT_MRT3847_130053C.1.pep
LALARASPSVSAYSSACFFQFSFPHLSAWGSLSFCACLYVSLTSRGYSSPTCCVLVCALPTACLLCCSTLISSPLLARSYPPLFSFMFFDVVSPSLS

SEQ ID NO: 176121 - protein, 108 aa, Glycine max
  Clone ID: PAT_MRT3847_130054C.1.pep
VHSNPPEHLFNGQHPRGKCRLARSTIISGHIMGCHKRPSRIIDFRPNEKNIYSRIVAIEYHPNLDAYLCLIYYVDGEPKYILHLTRAIIGYPSVSGTEVPMSLGNALP

SEQ ID NO: 176122 - protein, 95 aa, Glycine max
  unsure (1)..(95): unsure at all Xaa locations
  Clone ID: PAT_MRT3847_130055C.1.pep
GGXXGGLXSPXXYGSXXSCGAFVHLXHXLXRSQVHAGXRXIHAXXRLLSSRTAXPTSXFSXXXXYSAXXPYTTXXASXXXXIWTSXQRARXRRVV

SEQ ID NO: 176123 - protein, 62 aa, Glycine max
  unsure (1)..(62): unsure at all Xaa locations
  Clone ID: PAT_MRT3847_130056C.1.pep
AAEGASLDSLVGRRVRTRWPDDNXFYEAVYLRLQSIRSLHALFYDLGTXNESWEWVNLSELG

SEQ ID NO: 176124 - protein, 37 aa, Glycine max
  Clone ID: PAT_MRT3847_130057C.1.pep
SALLCAMSVSNFPKSISANAPPNSQANRNPPGFLAFC

SEQ ID NO: 176125 - protein, 108 aa, Glycine max
  unsure (1)..(108): unsure at all Xaa locations
  Clone ID: PAT_MRT3847_130058C.1.pep
APIIFDGRLEKFYWAPTRDDRIGVXTGIDSTDSIPEQVLVNIVDTLSGQSIDLYGALKVKIYDDXMRKWITSDGVHCIQKKLVNINNGPPTYAHTKTTLEKHLTDWNM

SEQ ID NO: 176126 - protein, 72 aa, Glycine max
  Clone ID: PAT_MRT3847_130059C.1.pep
DCSFILKLPQFPFLFSCQSTRHGPLCPLHEFIIRSIDHESLMLLILCILHHIAQLIFSEINVATIPFCRLLA

SEQ ID NO: 176127 - protein, 90 aa, Glycine max
  unsure (1)..(90): unsure at all Xaa locations
  Clone ID: PAT_MRT3847_13005C.1.pep
VSGKFRGGFVRXVVSTPSSVIKTRVIHLRVKPGKAPPYAGALNCSLNTCAREGXPMALYKGFILPISXQGPFTVAVFVPLDQVRKLLKDF

SEQ ID NO: 176128 - protein, 70 aa, Glycine max
  Clone ID: PAT_MRT3847_130060C.1.pep
MGPDITMNLQVHCESGISDVTTIFEWYYDPRAILIGPITISCYLSSIIFSYVKILSSLMFLVTFTFVFFF

SEQ ID NO: 176129 - protein, 74 aa, Glycine max
  Clone ID: PAT_MRT3847_130061C.1.pep
KISSKTPFYGFPSKDLVAWYNNNPFFENVIAGLVIFRPKIGAVYWGLPTLFLEMRDISKEVFFLAVPNTIDAVK

SEQ ID NO: 176130 - protein, 59 aa, Glycine max
  Clone ID: PAT_MRT3847_130062C.1.pep
SFPRQNRKEICKYLFQEGVCFAKKDYNLAKHPEIDVPNLHVIKRVQSLKCREYVRETFA

SEQ ID NO: 176131 - protein, 39 aa, Glycine max
  Clone ID: PAT_MRT3847_130063C.1.pep
FEGTSASQKGLAFWKKSECSILDVADECTFNLIRLLFSE

SEQ ID NO: 176132 - protein, 48 aa, Glycine max
  Clone ID: PAT_MRT3847_130064C.1.pep
LGFNKLRGNNWQVSFLAIWQDKALLILASRHTMSIVNLANHKAYLSIF

SEQ ID NO: 176133 - protein, 49 aa, Glycine max
  Clone ID: PAT_MRT3847_130065C.1.pep
CLVWLAQTGNCYAFLFRWTGHPVKHDCLCVMRLIETVIPCTSSDPRFVN

SEQ ID NO: 176134 - protein, 20 aa, Glycine max
  Clone ID: PAT_MRT3847_130066C.1.pep
FSVFICSLILMRLTPWASFS

SEQ ID NO: 176135 - protein, 42 aa, Glycine max
  Clone ID: PAT_MRT3847_130067C.1.pep
ALWLVVVIAVLSLLFLLFYLPKRKRKISFVSQGNIVKFMNTY

SEQ ID NO: 176136 - protein, 50 aa, Glycine max
  Clone ID: PAT_MRT3847_130068C.1.pep
KNLKIFMLKNQQKKTYTTFASFNLSRGERNRLESLTVQSREHLGKEKLKI

SEQ ID NO: 176137 - protein, 62 aa, Glycine max
  Clone ID: PAT_MRT3847_130069C.1.pep
QTKTGKNKKKKFLGPKDYKQQGFKGPRGKNPSKINFKNPKKKGGKKKSSQSPPWYKHPTKKI

SEQ ID NO: 176138 - protein, 120 aa, Glycine max
  Clone ID: PAT_MRT3847_13006C.1.pep
FSFFDFFFFFCFFLFSTLNALEYSPKKTKIRGEFPPRPLENHGFKRRLDFIQLGGVASLLNFQIWPNEIPTTPCRSVYMVPGTATTGFQEASPPRRHTLRLSSLCKVAKNPCHSLVRNGT

SEQ ID NO: 176139 - protein, 125 aa, Glycine max
  unsure (1)..(125): unsure at all Xaa locations
  Clone ID: PAT_MRT3847_130070C.1.pep
TFTEYIAIEGLAKKKKKKGPKGGGGLKIMDSPGWRKFILRLFITANSKGGPXPISPKRGRNNRGXMGGGLTRPGWEKPGGNPINWLGRHSPFRRWGNNEKGRNDWPFQKVGKLEGEWKMERVIIW

SEQ ID NO: 176140 - protein, 89 aa, Glycine max
  Clone ID: PAT_MRT3847_130071C.1.pep
KAWKETFPSHASMAARSSVFSFVLSTCHHLFLAPLHTMASFHIIMHQQHQIWGKGLPFPLRYACFSNEELGYEIHVVTVYSRSWHHGLR

SEQ ID NO: 176141 - protein, 159 aa, Glycine max
  Clone ID: PAT_MRT3847_130072C.1.pep
VCSVMDCQKSSREACAHAAQNDRLPVQMVVQVLYYEQQRLRDSMDSSAGWDSPNFLDKVNSSPNELSILRRENQDLKLEIVKLKMRLKEFERTSIRSASSSPVIYASRSADKPPLPRKSFINSVSKKLGRLSPFSRGDAATIPPKGRVKPDKNRRHSIS

SEQ ID NO: 176142 - protein, 67 aa, Glycine max
  Clone ID: PAT_MRT3847_130073C.1.pep
ACLGEHVASGGSLQQAWESWAATSSPIFSINGHWRLRGMGSTSWVFRFHLKLVKRRRKEKIKGEALL

SEQ ID NO: 176143 - protein, 70 aa, Glycine max
  Clone ID: PAT_MRT3847_130074C.1.pep
FTGCSSLNFRKFKMPLNHILTYLLLMTLIHILKISRLNKLIKSDLISCYIFKNNDCINSLFTIFYVFLIF

SEQ ID NO: 176144 - protein, 66 aa, Glycine max
  Clone ID: PAT_MRT3847_130075C.1.pep
PLPQPWMPSLNGRGALCFFFFFFSPKSALSTRTLEDINSPGLIMDQRRLLISRALPSRKLFYTSPW

SEQ ID NO: 176145 - protein, 140 aa, Glycine max
  unsure (1)..(140): unsure at all Xaa locations
  Clone ID: PAT_MRT3847_130076C.1.pep
TSGAVSLCNPFNLVVADEDFRKGFNIIYDKVLSKALRKIFNKHVLLFEDIGGEYNIPLAANAKSVKEFDDALTHVSFRFKSVDKYYSNSSNSDSIKHIRTPLLYIHTANNPIAPNEEIPHKDIGKNPNYLLIXTPKSNHL

SEQ ID NO: 176146 - protein, 67 aa, Glycine max
  Clone ID: PAT_MRT3847_130077C.1.pep
KKHWRNRSCCVLYFSEIDCEVMESIFECFYSKIKLMIKLSSVIYLRQKYSIAQTQINFGSRINYVVL

SEQ ID NO: 176147 - protein, 64 aa, Glycine max
  Clone ID: PAT_MRT3847_130078C.1.pep
CYSSALLGGFGILIAVSESLLKCSMAHTTMGTGVKVCGSGLVPILFALMILSISCYWDNLMHPM

SEQ ID NO: 176148 - protein, 78 aa, Glycine max
  Clone ID: PAT_MRT3847_130079C.1.pep
LTALGKPSVTSSGQILANESDHDSYDNQHGPIRYGLPIISALTPVVTVLMHTVESTSKLQQHVGGSKALQIVPSSWMQ

SEQ ID NO: 176149 - protein, 80 aa, Glycine max
  Clone ID: PAT_MRT3847_13007C.1.pep
PGSTHASADILDRRTRLRFQDITHFSHRKVTTDSLFMDRLYKSLSFATDIATMMCYVHESHSDAVPNLVFTYSVADGLHV

SEQ ID NO: 176150 - protein, 86 aa, Glycine max
  unsure (1)..(86): unsure at all Xaa locations
  Clone ID: PAT_MRT3847_130080C.1.pep
VALDTSVGFSHVLXRTNGEYGKRRFVSGDGEXMTXLIPVTMGEXAHNKLVSVLEISVPTLCVIKCAKDEQGLCLNITEVAKTTVIE

SEQ ID NO: 176151 - protein, 188 aa, Glycine max
  Clone ID: PAT_MRT3847_130081C.1.pep
MASLVCLLFSLHFMVIMSGSLPANSEVFTKESPMSLSTKPVERLTQLHFYFHNNKMGEHPTAMKIVEPPKASISGFGTIYMMDDPLTEGPSPTSKLVGRCQGIYAEASQHEPAILMVTNLFFTEGIYNGSTLSILGRNPMLQSVKEMPIVGGSGIFKYARGSSVLKTHVHDAKAGVAIVEYNVSVLHV

SEQ ID NO: 176152 - protein, 188 aa, Glycine max
  Clone ID: PAT_MRT3847_130082C.1.pep
MASLVCLLFSLHFMVIMSGSLPANSEVFTKESPMSLSTKPVERLTQLHFYFHNNKMGEHPTAMKIVEPPKASISGFGTIYMMDDPLTEGPSPTSKLVGRCQGIYAEASQHEPAILMVTNLFFTEGIYNGSTLSILGRNPMLQSVKEMPIVGGTGIFKYARGSAVLTTYMFDYKAGVAIVEYNVTVLHV

SEQ ID NO: 176153 - protein, 83 aa, Glycine max
  Clone ID: PAT_MRT3847_130083C.1.pep
KALLSRYQRVRISSRTHTSTSPPSPFFFFFYLFYFSCRKKHHTEHGAPTIKIFPDNLKIAVTAPFYSTSLSGEILVKTQLNPF

SEQ ID NO: 176154 - protein, 59 aa, Glycine max
  unsure (1)..(59): unsure at all Xaa locations
  Clone ID: PAT_MRT3847_130084C.1.pep
PKVNQLHQFLKQSQSAPLTVXXHIITIYTLTNGYLDSLXIVHVMKFLFQLPSYLNTNKP

SEQ ID NO: 176155 - protein, 78 aa, Glycine max
  Clone ID: PAT_MRT3847_130085C.1.pep
TRASWKTLLLQLSISLFTNLLRTQDLFQTVNRPKTYLMISKHKTETNALKLITANRFIISTKKQLPTDFCDESLVQKR

SEQ ID NO: 176156 - protein, 249 aa, Glycine max
  unsure (1)..(249): unsure at all Xaa locations
  Clone ID: PAT_MRT3847_130086C.1.pep
QRAFLTRAWSHPYKTMERISRVVANVGRTNPLQTMAELRRARQQVQYTGKVGDARYPHPSHWGKVCFLTTPDGENCGLVKNLSVTGLVSTDVTDVTESILLKLVDCGMQELVDDTSTHLGSMDKVLLNGDWVGVCPDSSSFVAELRSRRRRNELPHQVEIKRDQSQHEVRIYSDAGRILRPLLVVGNLLKIKGFKSDRYSFQSLXDKGVIELIGPEEXEDCCTAGVLSXIWKRRKRSVKYTHCELDMSF

SEQ ID NO: 176157 - protein, 47 aa, Glycine max
  Clone ID: PAT_MRT3847_130087C.1.pep
ALKLNLNLSFLWIFVYCGGSPITPCCNVLILWAGCAYSRTIHLCFST

SEQ ID NO: 176158 - protein, 594 aa, Glycine max
  unsure (1)..(594): unsure at all Xaa locations
  Clone ID: PAT_MRT3847_130088C.1.pep
GTAFPTRPIRPRTSFPSLSLRHAPPCQSHTPSSSASSPLPPPPFPPTTTSLPPPSSSRAPPTAASXSLRASFSPETLVSDNNGAPSPPPPSDPSSIEVDSVTEAELKENGFRSTRRTKLVCTVGPATCGFEQLEALAVGGMNVARINMCHGTREWHKEVIDRVRRLNHEKGFAVAIMMDTEGSEIHMGDLGGASSAKADDGEIWTFSVRAFDSGLPQRTINVNYEGFAEDVKVGDELLVDGGMVRFEVIQMIWTDVKCRRTDPGLLLPRANLTFWRNGSLVRERNAMLPTISSKDWLDIDFGISEGVDFIAISFVKSAEVITHLKSYIAARSRDSDISVIAKIESIDSLKNLEEIVLAADGAMVARGDLGAQIPLEQVPSAQQRIVQVCRQLNKPVIVASQLLESMIEYPTPTRAEVADVSEAVRQRADALMLSGESAMGQYPDKALTVLRSVSLRIERWWREEKRYEAMLLPSVGSYFSEKISEEICNSAAKMANNLEVDALFVYTKTGHMASLLSRCRPDCPIFAFTTTSSVRRRLNLQWGLIPFRLSFTDDMESNLNRTFSLLKARNLIKSGDLVIAVSDMLQSIQVMNVP

SEQ ID NO: 176159 - protein, 74 aa, Glycine max
  unsure (1)..(74): unsure at all Xaa locations
  Clone ID: PAT_MRT3847_130089C.1.pep
MSGIIHKIEXXXHVGGXKXXEHKGEHHGEHKGEHKGEHHXEHKGEHKGEXXHGXXXEXLVDKIXDXIHGVGHDX

SEQ ID NO: 176160 - protein, 71 aa, Glycine max
  Clone ID: PAT_MRT3847_13008C.1.pep
RIPCQLTLFNPGLHRNNTSSDDAGDRTLSIDEIVYSIHTERGRTIPRTNRRNLQERELSAGCRRGDDPSLY

SEQ ID NO: 176161 - protein, 61 aa, Glycine max
  Clone ID: PAT_MRT3847_130090C.1.pep
VQNVDNCVVENMRPIITLAMITTRSSRNSLSVKISLLFVGILINQFPRCVCQTVSNGDVEM

SEQ ID NO: 176162 - protein, 52 aa, Glycine max
  unsure (1)..(52): unsure at all Xaa locations
  Clone ID: PAT_MRT3847_130091C.1.pep
XTNLLGWQCMQSKSGTXGHHCMXSXSLXXHVVNDVQLHTINLNIYIFXQRCR

SEQ ID NO: 176163 - protein, 99 aa, Glycine max
  unsure (1)..(99): unsure at all Xaa locations
  Clone ID: PAT_MRT3847_130092C.1.pep
PSQVELALLQRSYHDLASQINLILVERLXYVMLEQFLMKYVWSASGLLMVAVPIITATGYSESGETHGFKRIQARGLSPIPLGAELTRAQLSQPVAHLC

SEQ ID NO: 176164 - protein, 261 aa, Glycine max
  Clone ID: PAT_MRT3847_130093C.1.pep
MVLAVTMENYYDSGWHMGNSSWAQCSDHSSSSFAVPTQILPHHVTDSASLQFGEFHSWALPIEGAAEERAISASKSHSQAEKRRRDRINAQLATLRKLIPKSDKMDKAALLGSVIDQVKDLKRKAMDVSRAFTVPTEIDEVSIDYDHVQDESCTKVNKLKDNIVIKASVCCDDRPELFPELIQVLKGLRLTAVKADIASVGGRIKSILVLCSKDREDSVCLATLKQSLKSAVTKIASSSMASSCPARSKRQRFFLPSHCLQ

SEQ ID NO: 176165 - protein, 51 aa, Glycine max
  Clone ID: PAT_MRT3847_130094C.1.pep
LFFFFLTETWLSERVSLLSEVLILEKLQLSLSQALASLAKMMHLKYRGACA

SEQ ID NO: 176166 - protein, 181 aa, Glycine max
  Clone ID: PAT_MRT3847_130095C.1.pep
VELDRIPVELSKGENLIERHSREFTSTVGDIESFKSLQKMAESGNVYVHDVDHHCGFPDRLVLPIGHKAGLPLTLFVMVTPYGSEEQQQHGDYYHNDNIVHHQGQNVVSCNGLMTVVDNRPLGFPFDRQIDNYGKFTVPNMYFKNVAVYHKDSTVSHQQQQYYYQHAEVANDFDHLPKYVS

SEQ ID NO: 176167 - protein, 254 aa, Glycine max
  Clone ID: PAT_MRT3847_130096C.1.pep
MLGIFKDKLVNPPEELNSPASLNSSKRSKLPNEILQEFQSYNPSNVFSVSFGNDALLAYSPSNKPSIHHGFCVLDNIYCIFLGSLNNLSKLIKQYGLSKGTNDAMFIIEAYRTLRDRGPYPADQVLKELEGSFGFVIYDNKDGTVFTASGSNGQIELFWGVAADGSVVISENLELIKASCAKSFAPFPAGCMLHSGHGLMSYEHPSRKMKPMPRTDSQGFMCGANFLVDSQSRKSMMPRVGSEANWAPWGGSQA

SEQ ID NO: 176168 - protein, 68 aa, Glycine max
  Clone ID: PAT_MRT3847_130097C.1.pep
SRSPIRQSGTSFYGQYYIQLLSGWDNMALELCFQLPRLAYHILYQSDGPISLYESLRLVCESGSASSS

SEQ ID NO: 176169 - protein, 126 aa, Glycine max
  Clone ID: PAT_MRT3847_130098C.1.pep
MGARKRLSCSEPPCSSAPASNENTSSTARPTITDPTIAPPKRGLLVKLSLFLLPYLNLLFHHYLIEPELRSSILINDGMSLTGLLDKAKMIPVACRYVQKRKLCGYDINKNGTPQGTAQVPESLGI

SEQ ID NO: 176170 - protein, 41 aa, Glycine max
  Clone ID: PAT_MRT3847_130099C.1.pep
VFSFIVRLISTTTLPSGDSNFPCFVPLRIFHSGKHLHPDSV

SEQ ID NO: 176171 - protein, 56 aa, Glycine max
  Clone ID: PAT_MRT3847_13009C.1.pep
IEHNIRGHLVSSVKGNRYRKIRLYIKQHLGIKMDRYPVRCVGSHPRVSNPPSDKVE

SEQ ID NO: 176172 - protein, 97 aa, Glycine max
  Clone ID: PAT_MRT3847_1300C.1.pep
MGDTVSLPNLSTKVVAIAAGEAHTLLLTGDGRVYSWGRGILGRLGQGSEHDKHFPVEVKFGSEEDSVRIVGIAAGAYHSLALAGFSTDVDNAPGSGT

SEQ ID NO: 176173 - protein, 28 aa, Glycine max
  Clone ID: PAT_MRT3847_130100C.1.pep
TRSFYCILPYNDLRLNINNSLFSHLITD

SEQ ID NO: 176174 - protein, 114 aa, Glycine max
  unsure (1)..(114): unsure at all Xaa locations
  Clone ID: PAT_MRT3847_130101C.1.pep
GGGSGTAGGDSGTGSSSGVXRAIVKDRFKAFNIMFEELHQKQSQWTVPDSELRESLRLAVAEVLLPAYRSFVKRFGPLVESGKNPQKYIKYSAEDLDRMLGEFFEGKNMSETKR

SEQ ID NO: 176175 - protein, 80 aa, Glycine max
  unsure (1)..(80): unsure at all Xaa locations
  Clone ID: PAT_MRT3847_130102C.1.pep
SFKSFNIMXEELHQKQSQWTVPDTELRESLRLAVAEVLLPAYRSFVKRFGPLVESGKNPQKYIKYSAEDLDRMLGEFFEV

SEQ ID NO: 176176 - protein, 132 aa, Glycine max
  unsure (1)..(132): unsure at all Xaa locations
  Clone ID: PAT_MRT3847_130103C.1.pep
AIHPPEAPXXXXXXXLXXXXXXFXXYFLXFFFSXXIXXPFGGGLYTISHLSFPPLPSLYNQPHLIISTKTSNHTTTTTTTKPKKDMATFPPKRYNPRSKKIPPPQPWKYPLNNYDSKTPISSSPKTSNPKLE

SEQ ID NO: 176177 - protein, 77 aa, Glycine max
  Clone ID: PAT_MRT3847_130104C.1.pep
WQLAQKELQKINMYKAPRDKLVCILNCCRVISNLLLNASVASRENPPGADEFLPVLIYVTIKVIQCSITNNTCIIFE

SEQ ID NO: 176178 - protein, 161 aa, Glycine max
  Clone ID: PAT_MRT3847_130105C.1.pep
KAPPSLSLSLSLKFPNQRHHNSLSLFNIKMMKTQALLVLMLLVNFVFFMGSEARPLSIIETEKSVTGGEVVDFFDWLSLGAMKDSGPSPGVGHKFTNSETLGGIKDSGPSSGGPGHQFTNSQTLGGIKNSGPSPGGEGHKFTNSETLGEMKDSGPSPGQGH

SEQ ID NO: 176179 - protein, 32 aa, Glycine max
  Clone ID: PAT_MRT3847_130106C.1.pep
CGVKDPHLTYLNYLNLDNITLKYTTKMLIEKS

SEQ ID NO: 176180 - protein, 42 aa, Glycine max
  Clone ID: PAT_MRT3847_130107C.1.pep
PSYRYIMISNSLDTKSEYSQKNCNHYIPQHKLCRVTLKSNRH

SEQ ID NO: 176181 - protein, 128 aa, Glycine max
  unsure (1)..(128): unsure at all Xaa locations
  Clone ID: PAT_MRT3847_130108C.1.pep
MALPEAWVETAPFTRYLPTFLLRTACCSIGXALPVYSTFKAIENNDPYEQQRCLLYWAAYGSFSAAEMFAEKLFSWIPLYHHMKFAFLVWLQLPTLDGARQMYSSHLHPFLLKHQARMDLIVEFVYDF

SEQ ID NO: 176182 - protein, 695 aa, Glycine max
  unsure (1)..(695): unsure at all Xaa locations
  Clone ID: PAT_MRT3847_130109C.1.pep
MEIESSAAATDNNNWGGRGVEREMPYSGFDRGTFLAWQDLRVVIPNFGKGPTKRLLNGLNGYAEPGRIMAIMGPSGSGKSTLLDSLAGRLSKNVVMTGNVLLNGKKKGIGAGYGVVAYVTQEDVLLGTLTVKETISYSAHLRLPTSMSKEEVNSIIDGTIIEMGLQDCADRLIGNWHLRGISGGEKKRLSIALEILTRPRLLFLDEPTSGLDSASAFFVVQTLRNVARDGRTVISSIHQPSSEVFALFDDLFLLSGGETXYFGEAKSAIEFFAEAGFPCPRKRNPSDHFLRCINSDFDIVTATLKGSQRIHDVPNSADPFMNLATAEIKATLVEKYRRSTYARRAKNRIQELSTDEGLQPPTQHGSQASWWKQLSTLTKRSFVNMCRDVGYYWLRIIIYIIVSICVGTVYFDVGYSYTSILARGACGAFISGFMTFMSIGGFPSFIEEMKVFYRERLNGYYGVAAYILANFLSSFPFLVAIALTTSTITYNMVKFRPGISHFVFFFLNIYSCISVIESLMMVVASLVPNFLMGIITGAGIIGIMMMTSGFFRLLSDLPKPVWRYPISYISYGSWAIQGSYKNDLLGLEFDPLLPGDPKLTGEYVITHMLGIELNHSKWWDLAALFVILICYRLLFFTVLKFKERASPLFQTLYAKRTIQQLEKRPSFRKMPSFPSQRHQSLHSLSSQDGLDSPLH

SEQ ID NO: 176183 - protein, 65 aa, Glycine max
  Clone ID: PAT_MRT3847_13010C.1.pep
KKLTDGGLDINRLENISLVNREGNAVIRRHLESLPLESFDSILILADESVEDSAIQADSRSLATL

SEQ ID NO: 176184 - protein, 160 aa, Glycine max
  Clone ID: PAT_MRT3847_130110C.1.pep
MADIEGSPGSSMHGVTGREQTFIASVASPMVPTDTTANFALPVDSEHKAKIFKLFSLANPHMRTFHVSWISFFTCFVSTFAAAPLVPIIRDNLNLTKGDIGNAGVASVSGSIFSRLTMGAVCDLLGPRYGCALLIMLSAPTVFCMSYVNDAGGYIAVRFM

SEQ ID NO: 176185 - protein, 54 aa, Glycine max
  Clone ID: PAT_MRT3847_130111C.1.pep
CMNIHRTNLDMLFSRFYLDTSRGVLFIQRIIRCFLGENIKFECKSDVCFFKISC

SEQ ID NO: 176186 - protein, 116 aa, Glycine max
  Clone ID: PAT_MRT3847_130112C.1.pep
VLWRRASCFFLAVGCWLLWGRPSSPSSPLCGSSSAVLCVLWSLCWVGSFWPACAGACGAVPFLVWAPFASSVALLVSWLVVGSLRSGRLLGLPSPSVVVGLLFRRVDRPGGSGPVP

SEQ ID NO: 176187 - protein, 114 aa, Glycine max
  unsure (1)..(114): unsure at all Xaa locations
  Clone ID: PAT_MRT3847_130113C.1.pep
SRFLLLSTTTNGDFVQGKDLAMDKVNVACAAVGSTSSYTPTPLFESGXQKDRGFIVAYFGRMSYAAYNVNQPQEKDLPVGNFSFAIKTRSXLEKASSSKAQIASXKTLKYEIIG

SEQ ID NO: 176188 - protein, 42 aa, Glycine max
  unsure (1)..(42): unsure at all Xaa locations
  Clone ID: PAT_MRT3847_130114C.1.pep
TSGGCGCQTPPVHLPPPIYMPTPIYLPPQQQXPQPWQYPTQP

SEQ ID NO: 176189 - protein, 520 aa, Glycine max
  Clone ID: PAT_MRT3847_130115C.1.pep
MAKRSQRFPVNYEKDQSGCMWGFISIFDFRHARFTRKLIADRRHGSKHAVGAALTKNKFEVLSNLDEEYEGNFDRGESKRLTLTNDADKLSVKKLIEEEMIIDQDEIKDQGNADVESKQSRLGHEGPPKTDSKRKKKSRKKSRDMDSHDLNSDATLKSEFSHKPHSRQQSKDNLDLNKIMDDFCHVEAACSMMNDDHGKIDEQSNQKHVISENLANAIHEFANQMRLNGKDLPEDGQLLSSHELMEALQVISSDKQLFLRLLQDPNSHLLKYIQELENAQGRGGKECSSVTSSNCSEHELVKLKQTRETANRKHRNFFRKRVKSQPKDSTNENEKTEFSNRIVILKPALTGMQISESGNNLASTLNSHDIAQYKNPSVRVGSHFSLTEIKRKLKCAMGKERHGNPELIPRKLPVERQNKLPRGKCKDNAGMRSPNKDHFFIEKITRPMFNVVKGNKTGTMKDSELNVEHESGIPNQSVSNIYIEARKHLCEMLDNADENTNISSRQMPKTLGRILSLPEY

SEQ ID NO: 176190 - protein, 71 aa, Glycine max
  Clone ID: PAT_MRT3847_130116C.1.pep
RRLGPPFWPIPFTSDPIRFSELSDLQNPCFFLKKKVFFPWGGGYSTPLGGGGGFQLMERGVPFLFPNSPKL

SEQ ID NO: 176191 - protein, 57 aa, Glycine max
  unsure (1)..(57): unsure at all Xaa locations
  Clone ID: PAT_MRT3847_130117C.1.pep
LSAYNLGDVIGFMRPLYLXGFGMKNMVTHLKVDAMMEKASREHEEARAKDDAVSDTK

SEQ ID NO: 176192 - protein, 73 aa, Glycine max
  Clone ID: PAT_MRT3847_130118C.1.pep
QFIRLKQNIFSPNRGTYATRGTMGPFSPLDSTGVFIISHQEFKLYIIGGGIPTTWEFIGAFIFLALIGVTFIL

SEQ ID NO: 176193 - protein, 451 aa, Glycine max
  unsure (1)..(451): unsure at all Xaa locations
  Clone ID: PAT_MRT3847_130119C.1.pep
MLRREAQIPMRRMHRRTDHRESLNIPPRRQPHPRGPLSILQNKMKSLLFSLFLFLFLASSAVATVPAHNITRMLAAHPGFSTFNHYLSVTHLAEEINRRQTITVLALDNAAMSSLLDKHLSLPTIKNVLSLHILVDYFGAKKLHQINNSTTLVSSMFQATGSASGTAGYVNITNLKAGKVGFAAEDNDGSLHSFYVKSVKEMPYYISVLQISAAISSADAEAPTAAPSAIDLISIMSKQGCKAFADLLRGSKALPSFKENVDGXGLTVFCPTDSAVSGFAPKYKNLTXLRRFTLXLYHATSVYEXLQMLKSSNGIMNTLATEGANKYDFTVQSEGEDVSLKTKVNTASIVGTLIDQDPFVAYKINRVLMPRELFKASDAADAPAQSPKPAKKKNKNKNNSHAADAPADGPSDDDADSEDQKAADEDSNGVSGLHVRFFMVFFSLIMAFLAL

SEQ ID NO: 176194 - protein, 41 aa, Glycine max
  Clone ID: PAT_MRT3847_13011C.1.pep
IIRVTLAPLRVMCRQKWKKARGAWLEPGIGARGRQAYSLSL

SEQ ID NO: 176195 - protein, 77 aa, Glycine max
  Clone ID: PAT_MRT3847_130120C.1.pep
HTLYFIYYPLNNNFTLKTYIPNILYLLNKKTHYYIPKLFKKFVFNNIIYFQTIIIHIMTYFYHNPHIKTPLKNIHIL

SEQ ID NO: 176196 - protein, 111 aa, Glycine max
  unsure (1)..(111): unsure at all Xaa locations
  Clone ID: PAT_MRT3847_130121C.1.pep
XXTXXAGIRSXXXQHHXXXLAWWEPXQCIXXTGILLXGFSPGXVATXTFXXQAXMGLGAILXRRXQAXXXQLHGXQXXPLTPTXQVRERFMXXTQXPXRQQEXQXQLFKMA

SEQ ID NO: 176197 - protein, 48 aa, Glycine max
  Clone ID: PAT_MRT3847_130122C.1.pep
MYFCCSGCCIYEMAAHRPAFKAFDMAGLISKINRSSIGPLPPCYSPSL

SEQ ID NO: 176198 - protein, 59 aa, Glycine max
  Clone ID: PAT_MRT3847_130123C.1.pep
NPFFFLARKLAGGPTFPFVKFPPWAPPKVPIFFSAPPPPRGGLFSAVSPPPPPEDDEFF

SEQ ID NO: 176199 - protein, 64 aa, Glycine max
  unsure (1)..(64): unsure at all Xaa locations
  Clone ID: PAT_MRT3847_130124C.1.pep
XEEXRIEXXDSDEDXGXRNGRDLXXXXXPTXLXQXSXSLHQXHXATLXXFXXRPEFXPXXXLXX

SEQ ID NO: 176200 - protein, 80 aa, Glycine max
  unsure (1)..(80): unsure at all Xaa locations
  Clone ID: PAT_MRT3847_130125C.1.pep
NYVSLHQIIDLSLPYYYPFPSCFAFXALSEDVEQVVDISGNPIFPGGTYYIMPSTWGAAGXXLKLGRTXNSNCPXTVLQX

SEQ ID NO: 176201 - protein, 228 aa, Glycine max
  unsure (1)..(228): unsure at all Xaa locations
  Clone ID: PAT_MRT3847_130126C.1.pep
MEQNLMLAAEAEREKSKAMSDSDERMKETLALSSEAERDRDKSMSDFDDSDSEDEAQQNLQLESLQTELVTNPSNYDAHLQYITLLRRMGDVDKLSRAREAMSELFPLSPAIWRQWIKDELSLNTATRPEAFSRILKLYERGVFDYLSVSLWCDYINFVQEFDPMVRQCSPTGISKARDLFESALTAAGLHVAEGSKIWEAYQXYEQDILLTFDDTDEQAKEKQFTHS

SEQ ID NO: 176202 - protein, 63 aa, Glycine max
  Clone ID: PAT_MRT3847_130127C.1.pep
NEAPSKTEFSTDEILSGFAVVCGAKMMHPRCLRSILLSGFTFFSHIVLILCKLSNWLPQCSCN

SEQ ID NO: 176203 - protein, 61 aa, Glycine max
  Clone ID: PAT_MRT3847_130128C.1.pep
NTLNKVPRVHGRYTERKNKMTFRPCKKFDLNKWEEKRRGFINYMERDGSVLTSMRTISFTK

SEQ ID NO: 176204 - protein, 91 aa, Glycine max
  unsure (1)..(91): unsure at all Xaa locations
  Clone ID: PAT_MRT3847_130129C.1.pep
KRTAPGKNFKGVFTNRQNKCWTEHERRXALTEGERMEEARHRGISAEELAKRAYEYEKHGAHQSLRDQTPAEDKMXSTNDEKLAKNMNLIQ

SEQ ID NO: 176205 - protein, 57 aa, Glycine max
  unsure (1)..(57): unsure at all Xaa locations
  Clone ID: PAT_MRT3847_13012C.1.pep
SPKEDQDLQKLAERHGHKICLLISMSIPGPPGKLCKLLWCNXLSLQVQLRAYTLEED

SEQ ID NO: 176206 - protein, 77 aa, Glycine max
  Clone ID: PAT_MRT3847_130130C.1.pep
RGFFPKSLSLIAGTLYFKAPFFSFVQTLLFQHKGLGPRTSDWAEPVFTRGYIQKWLPTFFFTKSFTFWCLSGRGVFW

SEQ ID NO: 176207 - protein, 67 aa, Glycine max
  Clone ID: PAT_MRT3847_130131C.1.pep
FLWVLHVLSYQNCLKIEGCDQWIEHLIVEWMSSCGAIETMIRKYKMQFQEGMDTSSFYECGNIPRVR

SEQ ID NO: 176208 - protein, 73 aa, Glycine max
  unsure (1)..(73): unsure at all Xaa locations
  Clone ID: PAT_MRT3847_130132C.1.pep
HVWDREDESNKQMSDVKVNSVRYYLETPXTDIDSYWIIHAWEISQYNGTFLYHARNSSDSHGIHTANLLIAHY

SEQ ID NO: 176209 - protein, 151 aa, Glycine max
  Clone ID: PAT_MRT3847_130133C.1.pep
FPYYTLHPLSSSLTPSSKGSVHLCPCSSTRSRSLPQFPSKLRRKATIKPRLLTIIDPILLFNGVATTFYFDTQTLIVTVSVLAAIALSLFLGLKGDPVPCERCGGNGGTKCVFCNDGKMKQEMGLINCKVCKGSGLIFCKKCGGSGYSRRL

SEQ ID NO: 176210 - protein, 241 aa, Glycine max
  Clone ID: PAT_MRT3847_130134C.1.pep
MPATMSSSPAPCSRSWSISEDSLRRYVQFASESCIQELLAASVTNKGNGNDGWKVLTLENGVEISKRRSDSLHTFRSRWVLRSVSPQQFITVANAIDAAKQWDSDLVEARYIKDLEDNLSIIRLRFGDNSKPLFRNREFIVYERRETMEDGTLVVAVASLPKEIAAGLHPEQSNAIRGLLLQSGWVVEKLEDDSCVVTYVVQLDPAGWLPKCFVNRFNTKLVMIIENLKKLAQACPSEGEI

SEQ ID NO: 176211 - protein, 61 aa, Glycine max
  unsure (1)..(61): unsure at all Xaa locations
  Clone ID: PAT_MRT3847_130135C.1.pep
RWLVPCWGGVVXAFLGLLCWSFLGGGLFLLGCXPCXLPGGWWAWLVSVWCRLLLRLGGHXN

SEQ ID NO: 176212 - protein, 98 aa, Glycine max
  Clone ID: PAT_MRT3847_130136C.1.pep
LVLDRERPPVLNCFSDLRKMGSKALLVLVVFLAFVLVLSGEVAPEDMDENFHANDVGVADTNMVDEMKYSYSSWRTGAALPCPPNCCYVFHGKCIPCC

SEQ ID NO: 176213 - protein, 63 aa, Glycine max
  Clone ID: PAT_MRT3847_130137C.1.pep
TKTIIKRRNHLLARQSSHSNKPKPCHTIVIYTVFHKANNTISSDYMNLCQRITESSSCSSAEA

SEQ ID NO: 176214 - protein, 56 aa, Glycine max
  Clone ID: PAT_MRT3847_130138C.1.pep
KQSRVNVDPYAQTIAKEKNHCLAQCPVLHIWHPRTHQLMKISRVFLRKIIFWECNV

SEQ ID NO: 176215 - protein, 90 aa, Glycine max
  unsure (1)..(90): unsure at all Xaa locations
  Clone ID: PAT_MRT3847_130139C.1.pep
GKKSSLEKSKTASAGFLEGVDLLKLRVQSEKRNNMSEREKGAKGTFRGRLLLLMHEVALSEGHKMWGLNGTDKMSKALXIGATKDGVKFE

SEQ ID NO: 176216 - protein, 135 aa, Glycine max
  unsure (1)..(135): unsure at all Xaa locations
  Clone ID: PAT_MRT3847_13013C.1.pep
MLEFHVVVSRNTLFPINRYHNGSXQCYKGNSEDNKELVFSVQRTLKTITRVELEVLFEAERSNDECCDLKVKCCPFKRSCCIYKHVDLVAQSCLMYRPLQIHVSRGKFRLTIFHGTIDHALIIALLRVFLSGRNY

SEQ ID NO: 176217 - protein, 70 aa, Glycine max
  Clone ID: PAT_MRT3847_130140C.1.pep
ITVLGGGGTLKLPRTIFKLFNFSTPNTAHAPTGSGGFFSHAFSTSSKNGAKKFLHGGGKEFTQFISPGLK

SEQ ID NO: 176218 - protein, 81 aa, Glycine max
  Clone ID: PAT_MRT3847_130141C.1.pep
TSSVVQLFLLLHDTRVSSSHNSSKKQLETSILTAAGVLTNPRDIHKLGLNQWHAHWKRLNFIIKIVTVFFILGSYARAQGS

SEQ ID NO: 176219 - protein, 170 aa, Glycine max
  Clone ID: PAT_MRT3847_130142C.1.pep
MASWPPKPTEIFCVHAREKAMASSPCDCWPHLSPPSSIEHVWNDIKLDSLSNSPVDIDFNNNHSVSDSSFLNLTSTSSSVFHKHDHDHSLLSVSNTSFEASGSKKTTLLDQRHARIIKNRESAVRSRARKQAYRKGLEVEIARLTEENSRLKRQLKELQCCLSSSDNPPT

SEQ ID NO: 176220 - protein, 46 aa, Glycine max
  Clone ID: PAT_MRT3847_130143C.1.pep
ISDTLVPRSMYFGTHLDSANAHYAGSSPPESVHQCNAKTSVRRSNS

SEQ ID NO: 176221 - protein, 161 aa, Glycine max
  Clone ID: PAT_MRT3847_130144C.1.pep
MFGQLEHELELHVPASEAWDLFGALEIGKLVAQELPELFQKVELTEGDGGVGTVLKLTFAPGVPGPAGYKEKFTKIDNEKRIKETEVVEGGYLELGFTLFRVRLEVIEKGEESSIIKSTIEYEVKEENAANASLVTIQPVATIAELAKNYLNKNKAAKEAN

SEQ ID NO: 176222 - protein, 53 aa, Glycine max
  Clone ID: PAT_MRT3847_130145C.1.pep
FLQNSFLNISHNVYISFTFKLIYIFYSILTKFILLYKTHSHTFFQKHLFPLIT

SEQ ID NO: 176223 - protein, 152 aa, Glycine max
  Clone ID: PAT_MRT3847_130146C.1.pep
KKKKKKNKIQKRTLKLCRRHSLFVRVRDARSYAYCVAFTGWWSCVSVCHLCGVVQVRVSSLLRAGWSPLVRCLGAGWCVWVVLLCYVLCVLPPRFCTSISGKVGSGQPNTYRAKNQKNICYSAMTTIPTRHATSIRWHFFKFPPRFSTMAAI

SEQ ID NO: 176224 - protein, 67 aa, Glycine max
  Clone ID: PAT_MRT3847_130147C.1.pep
SSDSFGSDLHYVIRPIITCFVRLVFFSLRILEQWLLVVAPIHGVRKTKMKFIPPWGRCVVVTKKSYV

SEQ ID NO: 176225 - protein, 91 aa, Glycine max
  unsure (1)..(91): unsure at all Xaa locations
  Clone ID: PAT_MRT3847_130148C.1.pep
MDGTTPMYSKARYDEIVMEVSSYLKKVGYNPDKIPFVPISGFEGDNMIERSTKHESFXGPTLLDALDQISEPKMPSDKSLRLPLQDCRKIG

SEQ ID NO: 176226 - protein, 24 aa, Glycine max
  Clone ID: PAT_MRT3847_130149C.1.pep
LEPYCFTKTVVGYLYLCKLHFQFE

SEQ ID NO: 176227 - protein, 41 aa, Glycine max
  Clone ID: PAT_MRT3847_13014C.1.pep
GRINPYMLFPCHIELILFEKKELVKKEPEIKLQQSKKSQVL

SEQ ID NO: 176228 - protein, 82 aa, Glycine max
  Clone ID: PAT_MRT3847_130150C.1.pep
PGPLQGLVEKKLGVIFGHPPFKIPLPGERTSSWLFSTNFKKGLRKTRGDGGFFVFSKKRSPLFYQEERNKTPFFFPQVIPVP

SEQ ID NO: 176229 - protein, 61 aa, Glycine max
  Clone ID: PAT_MRT3847_130151C.1.pep
SNIFSICLYFFIFIIFHCGLLMEKRFYTIPISSSTLSITAANPCTLPRPVISFYKKTATNL

SEQ ID NO: 176230 - protein, 40 aa, Glycine max
  Clone ID: PAT_MRT3847_130152C.1.pep
FQKPPKGPPHWQTLTPRDCLKNRGLYHIRNSLYFIRSHDS

SEQ ID NO: 176231 - protein, 86 aa, Glycine max
  Clone ID: PAT_MRT3847_130153C.1.pep
QCRSMFAQRTLATYNHSRDLIMYIPSTRVLHKMTPFFPYDKIVILDSEHALKLNSCSKGEKGVNLPPTPRRIFLSGPMTLPKGGSL

SEQ ID NO: 176232 - protein, 533 aa, Glycine max
  Clone ID: PAT_MRT3847_130154C.1.pep
MGWSFPLSPLVTTITIVLLLCVTLQTKVVKAFPLYTQNRWIVDGNATRVKLACVNWVSHLEYMVAEGLGERPLDGIAKEIKSMGFNCVRLTWPIYLITNDSLATLTVRQSFNNLGLPQAISAVQVNNPSLIDLPLIKAYQDVVKGLGDKGLMVILDNHVSKPQWCCSNDDGNGFFGDQYFDPDLWIKGLTKMATLFKGVTNVVAMSLRNELRGPRQNANDWFKYMPKGAEAVHGANPDVLVIMSGLNYDLDLSFLRKQQVKLSFSRKLVFELHWYSFSDGDSWTTENPNQVCGKVTGRVMRSAGYLLEQGYPLVLSEFGWDLRGTNQNDNSYFNCLLPLAAQLDFDWAYWTLAGSYYLREGTVGLIEVYGILTQNTTLPTTTFLLQRISAIQLPYRGPGLSEVEAHKVIFHPLTGLCISGKLEPLKLGPCSNSEGWEYTAQKVLSVKGRNSTCLQAEGEGKEAKLGNECSVWEIVSDSKLHLSSKINNASDVCLDVDSNNNIVTNACKCLSGDKTCDPASQWFKLVDSTRKST

SEQ ID NO: 176233 - protein, 161 aa, Glycine max
  unsure (1)..(161): unsure at all Xaa locations
  Clone ID: PAT_MRT3847_130155C.1.pep
GLRELANLKLQEGVVIALAQHSXLNSVRQSELDFKSHGDVKYSQAFKVSEEETEYALFKEAWLKYFWRTALFHWVEEDIAEERLQFWNDRSGQSPSSHKAVDVERGLLELRNAEYRSYNFGKASTEGILIKLQAVSEMLIHKTCLLTVTASSLIVIRPLVV

SEQ ID NO: 176234 - protein, 76 aa, Glycine max
  Clone ID: PAT_MRT3847_130156C.1.pep
MGRPKQNLSPSMQELNQQAKKELGQGQHREQEQHQEQEQHHQQEQKHNQDQKKRDQNRTQTQHQHQHRHQKQNQKQ

SEQ ID NO: 176235 - protein, 113 aa, Glycine max
  Clone ID: PAT_MRT3847_130157C.1.pep
KKIIMTHINTKLNIIIIYPLLQNLPNCITRHLNVCDHHMTILRKFEPLLQWNVIVLDIGIDQTYVLQPWYQFLEDSNFSHDDEISFYYKHHEQIWEIIIRRQKNWNNNDNDND

SEQ ID NO: 176236 - protein, 52 aa, Glycine max
  Clone ID: PAT_MRT3847_130158C.1.pep
IEFKILDNALMMTQFIMRVLLGRATQSVPVDIDLGIPFCRLLAAVSSRIGSR

SEQ ID NO: 176237 - protein, 73 aa, Glycine max
  Clone ID: PAT_MRT3847_130159C.1.pep
KPMHRQEYQQVWSEGGIILIFTLKLSLGLERTMLADTYKKCSLLLPELKCCNRKPFSIGFFYFCSQLPNWQHA

SEQ ID NO: 176238 - protein, 325 aa, Glycine max
  Clone ID: PAT_MRT3847_13015C.1.pep
TLMAAFLRRFARATPILFAAQSNSSHTNLRLPFTAIAAISGGVSFLYYHSSPNFAHSQEAEQVESKNIALVPDKWVEFKLQDTARVSHNTQLFRFSFDPTQKLGLDIASCILTRAPLGQDAEGKPKFVIRPYTPISDPESNGYFDLLIKVYPEGKMSQHFASLKPGDVVEVKGPIEKLRYTPNMKKHIGMIAGGTGITPMLQVIEAILRNPDDKTQISLLYANVSPDDILLKQKLDILATSHPNLKIFYTVDNPTKNWRGGAGYISKDVVVKGLPSPSDDTLILVCGPPGMMKAISGEKAKDWTQGEVSGILKEAGYTEQMVYKF

SEQ ID NO: 176239 - protein, 161 aa, Glycine max
  Clone ID: PAT_MRT3847_130160C.1.pep
KAWLADKDAEALRCQKQLVEEEEAAQKRQAEILERKRQKKLRQKEQKAREQRHQAEAEIKGDIDSTVKALSPAEASLDTYNFEAHNPSTFSDNAASPVPFQCPDTSEEINGDIHSESETITDQDIVRQSAHGHKHKRQAVARQQGLPKLQWAVANGLHTKQ

SEQ ID NO: 176240 - protein, 92 aa, Glycine max
  Clone ID: PAT_MRT3847_130161C.1.pep
PPPKDPLFKGFFFLSLPPKTFFSRFWPRGCLGKTPKAFPWFFHILFFLRTFFFFSFFQKKTKTGFFNGALFFPLAHGGGGPPPIWVLAGVFP

SEQ ID NO: 176241 - protein, 95 aa, Glycine max
  Clone ID: PAT_MRT3847_130162C.1.pep
MGAYKYVSELWRKKQSDVMRFLQRVRCWEYRQQPSIVRLTRSTRPDKARRLGFKAKQGYVIYRVRVRRGGRKRPVPKGIVYGKPTNPSVTQLKFQ

SEQ ID NO: 176242 - protein, 109 aa, Glycine max
  Clone ID: PAT_MRT3847_130163C.1.pep
YSKMNPWNMRTSKSLSQQVSYPPYLFVEEIPNMGNSSVVTKDARGSQLTIFYGGQVLVFDDIQAKKAKDILSFAGKGMSQNQNDYANTFPATTSSNHTHPSSSDHLSCL

SEQ ID NO: 176243 - protein, 87 aa, Glycine max
  Clone ID: PAT_MRT3847_130164C.1.pep
HRRSIPSMLCSVVTKDARGSQLTIFYGGQVLVFDDIQAKKAKDILSFAGKGMSQNQNDYANTFPATTSANPTRPFPFLMNIIPTSAN

SEQ ID NO: 176244 - protein, 123 aa, Glycine max
  unsure (1)..(123): unsure at all Xaa locations
  Clone ID: PAT_MRT3847_130165C.1.pep
FFPFFFFFFFFFFFFFFFFFGKKTGEVPPPYKNPIRGEKKPPKRGPQGGHFHKAAGKKIFFFQKTGRGXQTKGGGAKEKKTGETNLTPAETKGQKKERKKQRGGETQKEKTLPSKGSKAILWG

SEQ ID NO: 176245 - protein, 99 aa, Glycine max
  unsure (1)..(99): unsure at all Xaa locations
  Clone ID: PAT_MRT3847_130166C.1.pep
MGQKINPVGFRAWTTQRHESIGFAQPTNYSESIQEEKKIRECVKNYIQKNIRVSSGVEGVGQIKSQKRIELIQVIIYMGVPRXLIEGKAQKIEELQTSM

SEQ ID NO: 176246 - protein, 33 aa, Glycine max
  Clone ID: PAT_MRT3847_130167C.1.pep
ELGRRLLQLASPQRMHLIYKILLRTHLYSSYNY

SEQ ID NO: 176247 - protein, 127 aa, Glycine max
  Clone ID: PAT_MRT3847_130168C.1.pep
ILRVFIFPHLLLSVFCHEKGKKMQSVLVMSILIVLDALVCIPCPVTALMFVIIVCFGAWLCEMTNILFEVFLNLLHCIAGWTIERSVQQVHNAHQIHFAELEWVGSSIMVTFLFRKLNTNLMSSCIG

SEQ ID NO: 176248 - protein, 62 aa, Glycine max
  Clone ID: PAT_MRT3847_130169C.1.pep
LWNHPNGPYTIHLWAPTSERGLSIVNIVDFSKPPDILFYTLEIAVATPVIILTRYTLYLPSK

SEQ ID NO: 176249 - protein, 168 aa, Glycine max
  Clone ID: PAT_MRT3847_13016C.1.pep
NFQQICLKCGDPGHKIRNCPKEHTSQRKYNRLDVWQNNRIDKKHKSEDVNKFESDSLAKLQSNLEPLSLRHQRDGRRLSGSRHHHAPWRNESFPGARETDRHKKKEYVGKKRSRNDIELPKQSNAKISKRSVSSSLLSDYSASHFLSNSQSSKTLRRTSSHSRVDPQA

SEQ ID NO: 176250 - protein, 76 aa, Glycine max
  Clone ID: PAT_MRT3847_130170C.1.pep
QNQGSNLPRLFWGAFKPNTIIREVSCGPVHVVALSEEGLLQAWGYNEYGQLGRGVTCEGLQGACIISSYAKFLDEA

SEQ ID NO: 176251 - protein, 47 aa, Glycine max
  Clone ID: PAT_MRT3847_130171C.1.pep
GSAFFFIRKNILAEHNSWLGMVIGLIMLHNVGKITRCNVFQLLPVRV

SEQ ID NO: 176252 - protein, 385 aa, Glycine max
  Clone ID: PAT_MRT3847_130172C.1.pep
MEAPLKSTSNKVGNPSKSTSKVKASSKRTTNMVKTSSQLSSLKGKEMKLSEKHVNSLNSSSVRRKQISSMNSSEGVGGQRYSKIKTEKEVTSSNSKAASKKLMAPSKALLTPRPSLIRVASINSRKHKSLKIASHLKNQRTARKVEHEEHNNNVLEEKTLHVIKMESENKTLQSDQNASYDDESYLPQLSSPKSSVSSISKSLSQEDQEESEYTTSEFEQDSFSGNHEIECMENEETLGVEKKGKPKKDGVVYSRGKGNQMIKLKFRRGKVVENQTEISSPRRLKFRRARVLGEKANGKVNVRKSFEGNEACDDSNGATTGPEKVVLRHQDMQDKKDAQGLLNNVIEETASKLVEARKSKVKALVGAFETVISLHEKKPSADTVS

SEQ ID NO: 176253 - protein, 67 aa, Glycine max
  Clone ID: PAT_MRT3847_130173C.1.pep
NFQEKEKKKVHVTLKISPIPTSIFIAYNSKSRNAEPETHTSIQLSPQHTLLWQRSAAYKLQPVIPLI

SEQ ID NO: 176254 - protein, 79 aa, Glycine max
  Clone ID: PAT_MRT3847_130174C.1.pep
VQRHSYLGKLGNKYRGHIVVHRQLPLGYQPEYQRSSKLSNMPSSTSISPHEKLQVFTIKVYAPPCNIKYPPWATSMPWL

SEQ ID NO: 176255 - protein, 114 aa, Glycine max
  unsure (1)..(114): unsure at all Xaa locations
  Clone ID: PAT_MRT3847_130175C.1.pep
DLVGGGIVVHKTGDWLTLIQKSPISNLLRAASLDKGCLMVHIVMCXMPAINKSDWASLXQVLLTYSSXTHHCDACKWTXSEPHSCELIFPIQVCGPNTGSEMWRSEWANQTSWH

SEQ ID NO: 176256 - protein, 76 aa, Glycine max
  Clone ID: PAT_MRT3847_130176C.1.pep
PSSRIWYVLILCPLFQKQSVSICLKSLASVIIWTLNIILFIQGSHIPLGVILFIRCPLPFIPKTNPWPANIEDPSL

SEQ ID NO: 176257 - protein, 65 aa, Glycine max
  unsure (1)..(65): unsure at all Xaa locations
  Clone ID: PAT_MRT3847_130177C.1.pep
LPEVXYIGNCLSSSMTFPGISKPQLRRRLRWLSISQVXIQLPISQVYIDICFFERXKXKWREEKX

SEQ ID NO: 176258 - protein, 226 aa, Glycine max
  Clone ID: PAT_MRT3847_130178C.1.pep
RQGAQNDCEGSSKDARHSDSSAEQYLKCLKTLAGPSLQRKINFIEAIKLEIERLKLNLSAAERDRALLSVGMDPATLNPNTLLDEAYTGRLSKVASNLALLGEASLEDKIVGAIGLGTVDDNPIDFWNIIRIGETCSGGKCEVRAEIRKAVHSSNTMSSAGASEAVFLCSQCERKACRVCCAGRGALLLVGYNSREVQVDFPVNRLLAQDGIICKRCCQDIVLHAL

SEQ ID NO: 176259 - protein, 113 aa, Glycine max
  unsure (1)..(113): unsure at all Xaa locations
  Clone ID: PAT_MRT3847_130179C.1.pep
GPGSFKGPATSYFYTVWCXHCESWNSSYTKAITIVIKPNPFSDTCNSELPKQTLFNCDIICVTGRTSDPTHDVXLQLIDLLSLTNIVPRPIXESNTPNPFVLNTLMGKYTLPH

SEQ ID NO: 176260 - protein, 67 aa, Glycine max
  Clone ID: PAT_MRT3847_13017C.1.pep
FGWEFAPRPEKSHLHLLSHGLIISLCYQNRVIILLPTSLTREVPKIDSSLIWIEQNGKRSIIPNKVG

SEQ ID NO: 176261 - protein, 524 aa, Glycine max
  Clone ID: PAT_MRT3847_130180C.1.pep
MAAVKPEEISHPPMDQLQGLEYCIDSNPSWAETIALGFQHYILALGTAVMIPSFLVPVMGGSDDDKVRVVQTLLFVEGINTLLQTLFGTRLPTVVGGSYAFMVPVISIIRDPSFATIEDPHLRFLSTMRAVQGALIVASSIQIILGFSQIWAICSRFFSPLGMVPVIALVGFGLFDRGFLVVGTCVEIGIPMLILFIAFSQYLKNFQIRQVPILERFALLISTTVIWAYAHLLTASGAYKHRPDLTQHSCRTDRANLISSAPWIKIPYPLEWGAPTFDAGHAFGMMAAVLVSLVESTGAYKAASRLASATPPPAHVLSRGIGWQGIGILLNGLFGTLTGSTVSVENVGLLGSNRIGSRRVIQVSAGFMIFFSMLGKFGALFASIPFPMFAAVYCVLFGIVASVGLSFLQFTNMNSMRNLFICGVSLFLGLSIPEYFREYTIRAFHGPAHTNAGWFNDFLNTIFFSSPTVALIVAVFLDNTLDYKDSAKDRGMPWWAKFRTFKGDSRNEEFYTLPFNLNRFFPPS

SEQ ID NO: 176262 - protein, 125 aa, Glycine max
  Clone ID: PAT_MRT3847_130181C.1.pep
MDILVSECSARLLQQEEEIKSLTAEIDRLKNCGCLGAFSKLEQLQEENLKLKYRLNILRKSLQAERNKPTKNMINIISRLQEVFGHAIKAAYPDLENPPLLVTPSQQAKFGDYQCNSAMGISQML

SEQ ID NO: 176263 - protein, 85 aa, Glycine max
  Clone ID: PAT_MRT3847_130182C.1.pep
FVCCHQMRETSHKETITESLSLTLHAVCVTLSLCLVFYPLCSCLVSEERFFFFFLMSLCLFLVAVIVVQVSVTTTTTTTCPCPFN

SEQ ID NO: 176264 - protein, 46 aa, Glycine max
  Clone ID: PAT_MRT3847_130183C.1.pep
FLHWLLTYLISICSQPPTSPGIHHPKLHTPIIGYPLMPPHFHLHSP

SEQ ID NO: 176265 - protein, 56 aa, Glycine max
  Clone ID: PAT_MRT3847_130184C.1.pep
RLWGPWLLIVTSTPSKARTKFKSLDTTGIPAIFNFKKLYRKKPSLTYSKKAKSLTG

SEQ ID NO: 176266 - protein, 87 aa, Glycine max
  Clone ID: PAT_MRT3847_130185C.1.pep
MSSAPSMRVSEQEHFHLEDTSDIERSIWVLNPPNPPPLRNKLFSPLKKTVSFFSSKKKTCLGHAVSFLESLFPILTWFTNYKACKCK

SEQ ID NO: 176267 - protein, 96 aa, Glycine max
  Clone ID: PAT_MRT3847_130186C.1.pep
NAGIRRRSRVWWSRMFNISERKRILICLRFIVRITWRLPSVKSLKIEKVSSMRTTTLIRSLANQNITVPYDTLNREYVTRQRPPKVQLTVFHAQLN

SEQ ID NO: 176268 - protein, 64 aa, Glycine max
  Clone ID: PAT_MRT3847_130187C.1.pep
STHKTNAMNSTEATSSCSPEYEMWLKRASEQTPERACQWCYGHHLLHKTVNYRMLLAQKQRLCH

SEQ ID NO: 176269 - protein, 31 aa, Glycine max
  Clone ID: PAT_MRT3847_130188C.1.pep
HMYIIAQHFQYLLLYALYMVLHIRLMQALVS

SEQ ID NO: 176270 - protein, 137 aa, Glycine max
  Clone ID: PAT_MRT3847_130189C.1.pep
MVVLSRVGMIIRYFAHLIMIHELLVMFKIPTQFTFFVGFCGMNQCLTLEPNHQQALTNLGNIYMECGHVEDAVKSYKQALILRPDFPEATCNLLHTYQCVCCWEDRDKMFKEVEAIIMRQINMSVIPSVQPFHAIAY

SEQ ID NO: 176271 - protein, 59 aa, Glycine max
  Clone ID: PAT_MRT3847_13018C.1.pep
LQEKNLLKGSLSITMGRERLKFDFLIGKVYPKGANSSLYESRNWPGPRGKLLTSFYICN

SEQ ID NO: 176272 - protein, 278 aa, Glycine max
  Clone ID: PAT_MRT3847_130190C.1.pep
MHAPFLPDQYQTPRATIRLERELEMEKSRVLIVGGTGYIGKRLVKASLAQGHETFVLHRPEIGVDIEKVQLLLSFKRFLPSEFGTDPARMAHALEPGRVTFDDKMVVRKAIQEAHIPFTYISANCFAGYFLGGLCQPGFIIPPMDSVILFGDGNVKAIYVDEDDIAMYTIKTIDDPRTRNKTVYIRPPENILSQREVVQIWEKLIGKELHKSSISAQQFLSSMEGQPYEQQVGMGHYYHVCFEGCLTNFEIGEEGVEACGLYPQIKYTTVQDFMKRYV

SEQ ID NO: 176273 - protein, 37 aa, Glycine max
  Clone ID: PAT_MRT3847_130191C.1.pep
LDSCHHCQFTNYLCHVCANSCHLALWLVSLVMLTVYA

SEQ ID NO: 176274 - protein, 77 aa, Glycine max
  Clone ID: PAT_MRT3847_130192C.1.pep
NSILLFSKQSSTYFHASKFKSFSFIIFTTALLESSPSVAFFWVETVFPPWFPFPNILSSHPMHSITFLVSAATRKIF

SEQ ID NO: 176275 - protein, 501 aa, Glycine max
  Clone ID: PAT_MRT3847_130193C.1.pep
MGSLIVPGEHDHKLKLVSLPFVSTSHLIPVVDIARLFAIHGVDVTIITTTATAAIFQSSIDRDRDRGHAIRTHVVKFPCEQVGLPEGVESFNSNTPRDLVHKIYQGLTILQDQYQQLFHDLQPDFLFTDMFYPWTVDAAAKLGIPRLIYVGGGYLAHSSQNTIEQFLPHTKVDSDTESFLLPGLPHELKMTRLQLPDWLRAPTGYTYLMNMMKDSERKSYGSLLNTFYELEGDYEEHYKKAMGTKSWSVGPVSFWVNQDALDKADRGHAKEEQGEGEEGWQTRLDSKTENSVLYLSFGSMNKFPTPQLVEIAHALEDSDHDFIWVVRKKGESEDGEGNDFLQEFDKRVKASNKGYLIWGWAPQLLILEHHAIGAVVTHCGWNTIIESVNAGLPMATWPLFAEQFYNEKLLAEVLRIGVPVGAKEWRNWNEFGDEVVKREEIGNAIGVLMGGEESIEMRRRAKALSDAAKKAIQVGGSSHNNLKELIQELKSLKLQKANHKS

SEQ ID NO: 176276 - protein, 51 aa, Glycine max
  Clone ID: PAT_MRT3847_130194C.1.pep
SSKSWLTHFSLIIGARAPPHQLHYDQLTNAVPPPDCSPSLYPSCQEQISSL

SEQ ID NO: 176277 - protein, 87 aa, Glycine max
  Clone ID: PAT_MRT3847_130195C.1.pep
ILRFGSSRMVVSLVHPKNGFLTQGCSFTGNLFFGHSLKSPSYIYKPLFPKLGFFVPVAKLPLPFRYKWSRPLKPLFTFLLSPPIFTP

SEQ ID NO: 176278 - protein, 59 aa, Glycine max
  Clone ID: PAT_MRT3847_130196C.1.pep
SVLGLSKERNGAKRNAIEESVRVLEPPLHSYQNPADALRSGILEKEEDDDGTCSDPGVE

SEQ ID NO: 176279 - protein, 419 aa, Glycine max
  Clone ID: PAT_MRT3847_130197C.1.pep
MASTSCVGNTSLSMKDSASRYSAYPLPLAKYEKRMDNPQLFMSTLEKLHAAMGTKFMIPIVGGRELDLHRLFVEVSSRGGIAKIIRERKWKDVTSVFNFPSTATNASFVLRKYYVSLLYHYEQIYFFKAREWDPIAPDVSQNQSTLPVPPPKMQFQQPLSETQPAVFQLSNVNAAKLPEAMAASSAGSPVIGVIDGKFESGYLVTVTIGSEKLKGVLYQAPQNPVLTASHHSASANNNNASASLGVHRRRRRKKSEIKRRDPAHPKPNRSGYNFFFAEQHARLKLLHHGKDREISRMIGELWNKLKESEKTVYQEKAMKDKERYRVEMEDYREKLKMGPVISDAVPLQQRLPEPDTDMLDEAEGDSPQTPEESSSGGSDYEDYNKTAERGFDMDALPVIGMGAETSYLGSEEKLSKGGL

SEQ ID NO: 176280 - protein, 121 aa, Glycine max
  unsure (1)..(121): unsure at all Xaa locations
  Clone ID: PAT_MRT3847_130198C.1.pep
MEAEAENNDVKKEENSNDNNNNNNNESNSKIGNSSEGLSKPKRQMKTPFQLETLEKAYAVENYPSETMRXELSEKLGLSDRQLQMWFCHRRLKDKKELPSKKPRKGSGVAGFSGGGAQVGA

SEQ ID NO: 176281 - protein, 55 aa, Glycine max
  Clone ID: PAT_MRT3847_130199C.1.pep
SCYRLAGTCSGYYPSRSHCVSFFSSTLIYCPLFFGSYVGGVYMLGYSSILYSIYL

SEQ ID NO: 176282 - protein, 227 aa, Glycine max
  Clone ID: PAT_MRT3847_13019C.1.pep
GSGDVKLLSFWVSPFGKRVEWALKLKGIEYEYIEEDIFNKSNLLLQLNPVHKKVPVLVHAHKPIAESFIILEYIDETWKQYPLLPCHPHQRALARFWATSVEQKLGKAGWVAMSTSGEEQEKAVKEAIEMMEKIEEEIKGKKFFGGDNIGYLDIALGWIAYLVPVWEEVGSMQIIDPLKFPATFAWITNFLSHPVIKDSLPPRDKMLVYYHNRKNNLPSVFRNLVKD

SEQ ID NO: 176283 - protein, 94 aa, Glycine max
  Clone ID: PAT_MRT3847_130200C.1.pep
MHGQDLDDCNTTVNEAPTVASVVVVDMVVGVTAGVNAIDAAESAYQGSLAELSTHSPNHNKSSIYLPPLYTKRECVIQILPQNCRMDRKNHSLQ

SEQ ID NO: 176284 - protein, 93 aa, Glycine max
  unsure (1)..(93): unsure at all Xaa locations
  Clone ID: PAT_MRT3847_130201C.1.pep
MARNRLIDGEAELAQGVGEEVSNFHFDSEIIAAGSGGIRAARFSSNLXANVLIYELSFHTINSDSIRRVGCTCVIRGCAPKQILVYGASFGGD

SEQ ID NO: 176285 - protein, 44 aa, Glycine max
  Clone ID: PAT_MRT3847_130202C.1.pep
FVIFIFIFLMMIYARNLHAIVTGQNRIKGLAPGKPIKKKKKGGP

SEQ ID NO: 176286 - protein, 330 aa, Glycine max
  unsure (1)..(330): unsure at all Xaa locations
  Clone ID: PAT_MRT3847_130203C.1.pep
HASATASVVPXHWQPNSGLLMTNDVTGVNLDEAVPCIALSKNDSYVMSACGGKISLFNMMTFKVMTTFMPPPPASTFLAFHPQDNNIIAIGMEDSTIHIYNVRVDEVKSKLKGHQKRITGLAFSTCLNILVSSGADAQLCVWSIDTWEKRKSVPIQLPAGKAPVGDTRVQFHLDQIRLLVAHETQLAIYDASKMDRIRQWVPQDVLAAPISYAAYSCNSQLIYATFCDGNTGVFDADSLRLRCRIALSTYFSPPAALSGNQSAYPVAIAAHPLEPNQFAVGLTDGSVKVIEPSESEGKWGTSPPMDNGILNGRAASTSITSNLTPDQAQR

SEQ ID NO: 176287 - protein, 36 aa, Glycine max
  unsure (1)..(36): unsure at all Xaa locations
  Clone ID: PAT_MRT3847_130204C.1.pep
RRSYITYETLKMNTAPCSRMEAXQYNCRPNTQANPY

SEQ ID NO: 176288 - protein, 81 aa, Glycine max
  Clone ID: PAT_MRT3847_130205C.1.pep
NIYIGIYACGGFGGGVEAACIISSTFLLSVSLLVQEDLKFIVLILQLDIFCITKELVVYTCAKVMFGLFFCPKSYFKIKIK

SEQ ID NO: 176289 - protein, 150 aa, Glycine max
  unsure (1)..(150): unsure at all Xaa locations
  Clone ID: PAT_MRT3847_130206C.1.pep
GHDSEKERFVMEMEAIIQEQASLENQLASLGTLISNLASEVEEQRSTVAAARDNLDQVQSQLKSVRLKMKECDKEISAIIKDQQKLGHXISERDLEREKMGNEVKRMELEQKDCSVRVDKLIEKHAWIASEKQLFGRSGTDYDFFFRDPT

SEQ ID NO: 176290 - protein, 49 aa, Glycine max
  Clone ID: PAT_MRT3847_130207C.1.pep
WVVLVHQRLSMLLLLLGEGVLAPNLRKWLKCGCFLPDPCFKTLFPFRFF

SEQ ID NO: 176291 - protein, 42 aa, Glycine max
  unsure (1)..(42): unsure at all Xaa locations
  Clone ID: PAT_MRT3847_130208C.1.pep
LIXSYXLSTWMNSMNSPEIISAYFEILNLNYVIIFSEXNYES

SEQ ID NO: 176292 - protein, 385 aa, Glycine max
  unsure (1)..(385): unsure at all Xaa locations
  Clone ID: PAT_MRT3847_130209C.1.pep
MGNNRFRLSDMMPNAWFYKLKDMSKSRKRNGPHVMKNKVASPTTSQRSQPRYSHYFSIEPNIAGKLYNSPIFYTKHSDNTFTDSPRRSSKRRAGRKTIYKPSPTVVSSPVIESFGCHSTNNWIKPNQLQSPDYYALLHRDFFFXSNLNDEYVSSESECDKFTIPDLLNGVASECSCRVSSSTNDIIIDMKNEPFNGNSENLDGFDTISQLGLAPILTKPVKFDDKVIETTELRRSAKFDELKSHQSLSVIVSKEECSRTKRERKTSPVARVSSANSPGIKLRVNSPKLASKKVQAYARRSVSSRACKASMNSGFPEGFAVVKSSLDPQRDFRESMVEMIVENNIHASKDLENLLACYLSLNSREYHDLIVKAFEQIWYDMAQLRM

SEQ ID NO: 176293 - protein, 128 aa, Glycine max
  unsure (1)..(128): unsure at all Xaa locations
  Clone ID: PAT_MRT3847_13020C.1.pep
LRAPWPEAKTAQETKLYTTASVTQGRPGRAXDQRNEAVLHASAEQDPDALEAREACTKTNMEEVXGENTTKAHRGTEKEERDARKNKGCDTHDERREADNRKALLHIDQQKTELAQGVHRHHPKRPRG

SEQ ID NO: 176294 - protein, 111 aa, Glycine max
  Clone ID: PAT_MRT3847_130210C.1.pep
DSIHVSECRSSDSQVESQLDNLPLVCLLFRINPYQFTFHFCFNGFRLHNRTDMDFSFFIGCHGVTIFPIAEGGSTSACGHSNNGIPGVFALVASDLFLLAWIIGRLISQEL

SEQ ID NO: 176295 - protein, 53 aa, Glycine max
  Clone ID: PAT_MRT3847_130211C.1.pep
VKLSPKINAFTPCENGFHQKNDAFSPLSKRTQDPFQLSAIALSIVNMLINGDK

SEQ ID NO: 176296 - protein, 85 aa, Glycine max
  Clone ID: PAT_MRT3847_130212C.1.pep
PPPPFSPQPHAPHPTPPPPPPPPSPPPPPATAFSPAPPPRPPGPQPRAPPHLAAPASSSPWAPAPLPPATAPAQPRPLGGAPVLR

SEQ ID NO: 176297 - protein, 152 aa, Glycine max
  Clone ID: PAT_MRT3847_130213C.1.pep
MPVPSKPINTFTITIMLTFTFFLLFFSGFLHFPSASSSSFPPITRPTTTPPTAEPFSDLVAAFRKWDSQVGCARFKQKPNGVPLNHSKVASLQEVSDCGGLKLNHVSVLVKGWTWIPDNLDNLYSCSCGLSCLWTKSPVLADKPDALLFESS

SEQ ID NO: 176298 - protein, 50 aa, Glycine max
  Clone ID: PAT_MRT3847_130214C.1.pep
RLIVPIHEKEKENQRTKHDLMIVVIKLGNAMAPMNTIKANDLREENQNRT

SEQ ID NO: 176299 - protein, 63 aa, Glycine max
  Clone ID: PAT_MRT3847_130215C.1.pep
ISCAFFQIGVGALFWGPFPQFGFLPKKKKKKQKKKKKKKKKKKKKKKKKKKKKKKKKKQRAAA

SEQ ID NO: 176300 - protein, 147 aa, Glycine max
  Clone ID: PAT_MRT3847_130216C.1.pep
LEEAFLQEEPLGPEDMWYCPGCKEHRQASKKLDLWRLPEILVIHLKRFQYSRYLKNKLETYVDFPVDNLDLSAYITYGNDESYHYTLYAVSNHYGSMGGGHYTAFVHRGGDQWYDFDDSHVNPISKEKIKSSAAYVLFYRRNFEVST

SEQ ID NO: 176301 - protein, 63 aa, Glycine max
  unsure (1)..(63): unsure at all Xaa locations
  Clone ID: PAT_MRT3847_130217C.1.pep
DILCSTLLLLTGPPWVLSXVTLRDSGCALGKPTQTLTLTFTFSGISLSAGGMSVTCIRQPSGK

SEQ ID NO: 176302 - protein, 104 aa, Glycine max
  Clone ID: PAT_MRT3847_130218C.1.pep
GCQKKNKNPLKTLGIVITQQNPHLCSMKLGTMAFEKKSIGVYSNQHPEHCGVCEHHSLPQQQHCCRRWFPSALPEAKYIVTMPYKFGSVVGGFMGGCGGNVEVS

SEQ ID NO: 176303 - protein, 195 aa, Glycine max
  unsure (1)..(195): unsure at all Xaa locations
  Clone ID: PAT_MRT3847_130219C.1.pep
LPHHGASQTLXIFVGGQAFHVHHQLGYQWVXAIVLGAISIPIGIIIRLVPDEFAAKCCPAIIKRYANRKQKDDLIVTDEENPWQFNQGLMDIKEELAWLRKYKGGRLRSLKFAVAHPKELLLGSRSPSRSRASSEAPGTPHMDDAASQVSHSPAPPTPESRRRRNRSRSGSNVAFAGAAMAGIVAGSIGGWSPIE

SEQ ID NO: 176304 - protein, 47 aa, Glycine max
  Clone ID: PAT_MRT3847_13021C.1.pep
KNNPKRTGALKKSFFLHTSFVHNGLLNQEVQSDVVSKYTSLSNRIIR

SEQ ID NO: 176305 - protein, 136 aa, Glycine max
  unsure (1)..(136): unsure at all Xaa locations
  Clone ID: PAT_MRT3847_130220C.1.pep
LMQHHEQIAEYFRIHGVSLIFLFRRNLLHQMVSVLANEYDRNANILNGTHKSHVHSPQKAEILTKYKPTINSTLLIAQLKQVNKTTTKALKYFKSTQHILLYYEDVVKNRTRLXNVXNVLKRPQMNLKNRGLKIQQ

SEQ ID NO: 176306 - protein, 143 aa, Glycine max
  unsure (1)..(143): unsure at all Xaa locations
  Clone ID: PAT_MRT3847_130221C.1.pep
RACTCLNSGRRDTLEFVRDGLKSMRVNPGLSVFAADPQVTWGLMAELANSGTGDPRESCGETDIMLMATEXMRCWTHESMKGFWRSARRXLRDVRFKLRDEWASXVITGSDKXMYACVVAYYALGTIGCDPLETTEIIELGGA

SEQ ID NO: 176307 - protein, 299 aa, Glycine max
  Clone ID: PAT_MRT3847_130222C.1.pep
MEKGRTVVVSALQFACTDDVSTNVATAERLVRAAHKQGANIILIQELFEGYYFCQAQREEFIQRAKPHKDHPTILRMQKLAKELGVVIPVSFFEEANNAHYNSTAIIDADGTDLGIYRKSHIPDGPGYEEKFYFNPGDTGFKVFQTKFAKIGVAICWDQWFPEAARAMVLQGAEILFYPTAIGSEPHDGSIDSRDHWKRVMQGHAGANLVPLVASNRIGKEIIETEHGKSEITFYGNSFIAGPTGEIVSIADDKEEAVLIAQFDLDNIKSMRHCWGVFRDRRPDLYKVLLTLDGNNPVQ

SEQ ID NO: 176308 - protein, 90 aa, Glycine max
  Clone ID: PAT_MRT3847_130223C.1.pep
VQYPLLFLSGIDFSTGYSFLFSLPFFFSGSDIICSSFSWLMSSSLSPPLLRNIFVAFLRYLPKLSEAGPLILPGLLPLASCHSASSPASS

SEQ ID NO: 176309 - protein, 299 aa, Glycine max
  Clone ID: PAT_MRT3847_130224C.1.pep
MEKGKPWWVSALQFACTDDISTNVATAERLVRAAHKQGANIILIQELFEGYYFCQAQREDFIQRAKPHKDHPTILRMQKLAKELGVVIPVSFFEEANNAHYNSIAIIDADGTDLGIYRKSHIPDGPGYEEKFYFNPGDTGFKVFQTKLAKIGVAICWDQWFPEAARAMVLQGAEILFYPTAIGSEPQDGSIDSRDHWKRVMQGHAGANLVPLVASNRIGKEIIETEHGKSEITFYGNSFIAGPTGEIISTADDKDEAVLIAQFDLDKIKSMRHCWGVFRDRRPDLYKVLLTLDGINPVQ

SEQ ID NO: 176310 - protein, 61 aa, Glycine max
  unsure (1)..(61): unsure at all Xaa locations
  Clone ID: PAT_MRT3847_130225C.1.pep
AIVEPKFNTLTVVSHXKTWENHDVTQHNSLEQNAQIVSWRKSEQAHTNRPAQNVRILNGKR

SEQ ID NO: 176311 - protein, 113 aa, Glycine max
  Clone ID: PAT_MRT3847_130226C.1.pep
PHRPKTNQPISDPASGNLAMTRLNPADQHPRCENKSFKEGLNNPALTGGSETTGSEQTSLVSQPRPDRNNRIRRIRRVMNTPSSALSLDKNTSSQLTYKTNYFLRKTWFPSPQ

SEQ ID NO: 176312 - protein, 90 aa, Glycine max
  Clone ID: PAT_MRT3847_130227C.1.pep
RADSARAKLQSCLAGHNITITDGIDKTSAALQFRKLADWDCLKRNFKQMSNVLWVAPEDNASLWPQLHYGSGHNLEMQEAYVVNLGNVLR

SEQ ID NO: 176313 - protein, 51 aa, Glycine max
  Clone ID: PAT_MRT3847_130228C.1.pep
ALFHPRGLTPSPHQLRAYVSKLTFKQMGLELFIPHFTIISPNQRIYVPRTK

SEQ ID NO: 176314 - protein, 131 aa, Glycine max
  Clone ID: PAT_MRT3847_130229C.1.pep
SARGHIEMPTIVKGSISILSDAGLGMAMFSLGLFMALQPKIIACGKSVAAFSMAVRFLTGPAVIAATSIGIGLRGVLLHVAIVQAALPQGIVPFVFAKEYNLHADILSTAVIFGMLIALPITILYYVLLGV

SEQ ID NO: 176315 - protein, 54 aa, Glycine max
  Clone ID: PAT_MRT3847_13022C.1.pep
GMWNKRAQNLGRQDLGPQLYLGGEPPSRSWRDENPVPKKGFLFGRANGCSPRPF

SEQ ID NO: 176316 - protein, 84 aa, Glycine max
  Clone ID: PAT_MRT3847_130230C.1.pep
SWHSIKEGFSFQPKLRSPRRLNSSPRVPVSPLKFSPFEGFRPSPSLPEPTELPLPPLLPPPPPSTTAPLPIRPPSGTKKPKRGR

SEQ ID NO: 176317 - protein, 108 aa, Glycine max
  Clone ID: PAT_MRT3847_130231C.1.pep
WQMVSRGVSMPMKELPCSNLHPCLVPHNNIIIVAATAVVNINIKRVLSGDLAVFYNCIQSQRLVVVQIYHKQLLCIRISYLDAAIYNLVSLAPNKIAPFAGLLVLFKK

SEQ ID NO: 176318 - protein, 73 aa, Glycine max
  Clone ID: PAT_MRT3847_130232C.1.pep
QFGSSSSRIGSSTAARRRQKGGPIDLTPTPQVCVFLPEGEADCTCGSMIVCICLPESAAQKFTQALQLLDSVS

SEQ ID NO: 176319 - protein, 107 aa, Glycine max
  unsure (1)..(107): unsure at all Xaa locations
  Clone ID: PAT_MRT3847_130233C.1.pep
NTINYEINLSGSLQSIHSLPLKTSLRIKYSQTDKRXSAANRTILHDLYKKERHSPXYNNLCRPSTDLLGLIAKYITDMTSDRAMVEKAISSSNACDDQVKERGQSRK

SEQ ID NO: 176320 - protein, 422 aa, Glycine max
  Clone ID: PAT_MRT3847_130234C.1.pep
MAIAKSASILIILCFALACNADNAGKPDPVAGPDMFSNKNVAKDVLLPGEQIVNVQDFGAKGDGKFDCTESFMQAWAKTCHQSSGPARLYVPAGRFVVSSMYFNGPCNATSITIQVQGTVLATTDISEYENGDWLFFQNHNGLKIVGGGTFDGQGKDSWQYAQNCESANDGSCARNPSNLYFSGNSNLVVQNIRSVNPKGFHIFVTKCTNVRLRKLKLVAPGTSPNTDGIHVSHSDTVIMSRNTIATGDDCVSLIPGLRNIFINKLKCGPGHGISIGSLGKYADEGDVRGVRIKNCSLTGTTNGLRIKAWPERYPGAASDVSFSDIIMKDVKNPIIIDQEYECYPDCKKKPSLVKLQNIHFSNIRGTTISPLAVDLRCSGLFPCQGVTIRDIDLKIGLTPTTSRCVNTRPLFGGLLMPPACA

SEQ ID NO: 176321 - protein, 66 aa, Glycine max
  Clone ID: PAT_MRT3847_130235C.1.pep
AAVRAWSSFFFFFFFFFFFCCQTIIFKMILFSCLVLFNNLEFIWGHICYWKDFDNLFQCKGWRFQN

SEQ ID NO: 176322 - protein, 85 aa, Glycine max
  Clone ID: PAT_MRT3847_130236C.1.pep
TEPERKLGYPMGNLLTGEKVTHTIPQKKSQNPKVKTRGPKRKKQTLVALRNGPITKEETRPPPRNKKKKNRPPQRSYNKNSPPPP

SEQ ID NO: 176323 - protein, 75 aa, Glycine max
  Clone ID: PAT_MRT3847_130237C.1.pep
IIIFLVSSMKDLVYLSFSPKFICRYKLTHHIKIRNAKILGQNKCQSISSNEFIQIPFLGSLENNHFSMHYFLNII

SEQ ID NO: 176324 - protein, 174 aa, Glycine max
  unsure (1)..(174): unsure at all Xaa locations
  Clone ID: PAT_MRT3847_130238C.1.pep
MVILNLGRKEEQGVRLGKYELGKTLGEGNFGKVKLARDTHSGKLFAVKILDKSKIIDLNNIDQIKREISTLKLLKHPNVVRLYEVLASKTKIYMVLEYVNGGELFDKIASKGKLKEAEGRKIFQQLIDCVSFCXNKGVFTGISTGDVLVDAKGNIRNRXNLSALPQHLGRWGAA

SEQ ID NO: 176325 - protein, 152 aa, Glycine max
  unsure (1)..(152): unsure at all Xaa locations
  Clone ID: PAT_MRT3847_130239C.1.pep
XXIXXXXNXCQXIQXHXXXXXXXQXXXLXIXLHXXLXXXXFXNXFTXXXXIXTXXSXTXSXTQXXXSXXHXRSXXQHXTKXXXXXYIPRSQXLXHTHXRXRXXXXXIHSRXXDLSXRXXMXSPXXNXHQSXQLFIXXXXTAPFXLPRXXTFL

SEQ ID NO: 176326 - protein, 88 aa, Glycine max
  Clone ID: PAT_MRT3847_13023C.1.pep
KRHTLFGKAKNRPPSKYFPFVTKKANPSPPPQGSHLIPIKQNIRLRGLPPFFFKKKDNFVLVQNFPIRGKKFFSLKRGEAVIHFFFFL

SEQ ID NO: 176327 - protein, 48 aa, Glycine max
  Clone ID: PAT_MRT3847_130240C.1.pep
EGRERLHVHPDELEGFDLYFSEFLLYFISLTLLVIKSSGQNIISSMKY

SEQ ID NO: 176328 - protein, 49 aa, Glycine max
  Clone ID: PAT_MRT3847_130241C.1.pep
VYSNIEHLSSNIIRPTEETRPTKEFDIVVVFNKIGDQMHYVQGMRCALT

SEQ ID NO: 176329 - protein, 109 aa, Glycine max
  unsure (1)..(109): unsure at all Xaa locations
  Clone ID: PAT_MRT3847_130242C.1.pep
MALDDAAQASVGAPXIIEHCPMDQRVHLNLWRRLKIPXTTIDLIXLSNQPEWFLGETPEGKVPVALXLIGNWEAHSHANVGILEEKNPGPCVQAALNSPSRDLCNLALL

SEQ ID NO: 176330 - protein, 81 aa, Glycine max
  Clone ID: PAT_MRT3847_130243C.1.pep
PGKIRGEKKKGFFKDIIFTFTKGEKPSPFLGGGKTLPTGKTSLAFTPGKTPPPRPQGGKKKALGFIYLINKKKGQGDHKKH

SEQ ID NO: 176331 - protein, 100 aa, Glycine max
  unsure (1)..(100): unsure at all Xaa locations
  Clone ID: PAT_MRT3847_130244C.1.pep
LPXKERLFYFFFPKDGAIWLISDVQFKILHSLKIYTNMLISQCLCLHKKKKHQCXKVWGTXXXXXKPKKAPRGGGAGDTKGNPPKPKTEGKRKDRRERTG

SEQ ID NO: 176332 - protein, 60 aa, Glycine max
  Clone ID: PAT_MRT3847_130245C.1.pep
GRGCVHHSASGSLSSRRLVKHPRVIRILGSWVSKRRGRLSKGSAARWSWCSMNHRDSCRW

SEQ ID NO: 176333 - protein, 493 aa, Glycine max
  Clone ID: PAT_MRT3847_130246C.1.pep
EDVEMILENLPAQRQSMLFSATMPSWVKKLARKYLNNPLTIDLVGDEEEKLAEGIKLYAIAATATSKRTILSDLVTVYAKGGKTIVFTQTKRDADEVSLSLTNSIMSEALHGDISQHQRERTLNGFRQGKFTVLVATDVAARGLDIPNVDLIIHYELPNDPETFVHRSGRTGRAGKQGNAILLYTSSQRRTVRSLERDVGCKFEFVSAPAMEEVLESSAEQVVATLGGVHPESVQFFTPTAQRLIEEQGTSALAAALAQLSGFSRPPSSRSLITHEQGWITLQLTRDSDSRRYFSARSITGFLSDVYPAAADEVGKIHLIADEKVQGAVFDLPEEIAKELLNRDIPPGNTVSKITKLPSLQDDGPPSDFYGRFSDRDRSSRRGSTSRGGFSSRGGSASRDRRGFKSSRGWDGEDSDDDDFGDRSSWRGGRNFKTGNSWSRAAGRSSGDDWLIGGSRRSSRPSSSDRFGGACFNCGESGHRASDCPNPSNRRSF

SEQ ID NO: 176334 - protein, 94 aa, Glycine max
  unsure (1)..(94): unsure at all Xaa locations
  Clone ID: PAT_MRT3847_130247C.1.pep
KILLILNIPSQYIYTNYNYTYLNQYYNNYKYQYLYILSLSYNQFIHHQPXITHQIIHFIYNSYKSKFPILYNIXTNPYNYTPYYKFFKYYKSLI

SEQ ID NO: 176335 - protein, 32 aa, Glycine max
  Clone ID: PAT_MRT3847_130248C.1.pep
RCIWLSHSITHERLTHCRCNEHVHYSLLVFVT

SEQ ID NO: 176336 - protein, 246 aa, Glycine max
  unsure (1)..(246): unsure at all Xaa locations
  Clone ID: PAT_MRT3847_130249C.1.pep
MALPSLSFLFIFTSFIVSVSHSIPFIVIHGIGDQCSNRGVKKFTQQLSSFSGAEGYCVEVGNGSWDSWFEPLKEQAEIVCEKVKQMKELKEGYNIVGLSQGNLIGRGVVEFCEGGPPVKNFISLAGPHAGTASVPLCGSSIFCVLADTLHQGEVYSXILQEHLAPSGYLKLPNAIPDYLENCRFLPVLNNEIPDKRNSTYKERFSSLQNLVLIMLEHDTVLIPRETSWFGYYPDGYFKPVLPPQSI

SEQ ID NO: 176337 - protein, 1129 aa, Glycine max
  Clone ID: PAT_MRT3847_13024C.1.pep
RPRVRPRVRNDSEVINMIAHSSEFENIAVREEEQNELEMLARTSCPLEIKGGPSNKHGKISILIQLYISRGSIDSFSLVSDASYISASLARITRALFEICLRRGWCEMSLFMLEYCKAVDRQVWPHQHPLRQFDKDLSAEILRKLEERGADLDRLYEMEEKDIGALIRYAPGGRLVKQHLGYFPSLQLSATVSPITRTVLKVDLVITPVFIWKDRFHGTAQRWWILVEDSENDHIYHSELFTLTKRMARGEPYKLSFTVPIFEPHPPQYYIHAISDSWLHAEAFYTITFHNLPLPEARTAHTELLDLKPLPMSSLGNSTYEALYKFSHFNPIQTQTFHVLYHTDNNVLLGAPTGSGKTISAELAMLRLFNTQPDMKVIYIAPLKAIVRERMSDWQKRLVSQLGKKMVEMTGDYTPDLTALLSANIIISTPEKWDGISRNWHSRSYVTKVGLMILDEIHLLGADRGPILEVIVSRMRYISSQTERAVRFVGLSTALANAGDLADWLGVEEIGLFNFKPSVRPVPLEVHIQGYPGKYYCPRMNSMNKPAYAAICTHSPAKPVLIFVSSRRQTRLTALDLIQFAASDEQSRQFLNLPEETLQMVLSQVSDLNLRHTLQFGIGLHHAGLNDKDRSLVEELFANNKIQILVCTSTLAWGVNLPAHLVIIKGTEYYDGKAKRYVDFPITDILQMMGRAGRPQFDQHGKAVILVHEPKKSFYKKFLYEPFPVESSLREQLHDHINAEIISGTICHKQDAVHYLTWTYLFRRLMVNPAYYGLEDAESEFLNTYLSSLVQTTFEDLEDSGCIKMDEDKVEPMMLGTIASQYYLSYMTVSMFGSNIGPDTSLEVFLHILSAASEFDELPVRHNEEKYNEALSEKVKYPVDKNRLDDPHIKALLLFQAHFSQLELPISDYVTDLKSVLDQSIRVIQAMIDICANSGWLSSSITCMHLLQMVMQGLWFDKESSLWMLPCMNTDLISSLSRRGISSVQELLDIPKAALQTVTANFPASRLYQDLQHFPHVKMKLKVQRKDTDGDRSRILSVRLEKTNSRRHSSRAFVPRFPKIKEEQWWLVLGNTSTSELYALKRVSVSDHLVTSMKLPLTPANLQGVKLILVSDCYIGFEQEHSIEELDVC

SEQ ID NO: 176338 - protein, 97 aa, Glycine max
  Clone ID: PAT_MRT3847_130250C.1.pep
MPVVIRNFHPLNILGIFGTLIAWLYLNSVFGLPYLMAGIGDQCSNRGVKKFTQQLSSFSGAEGYCVEVGNGSWDSWFEPLKEHAEIVCEKGEANERI

SEQ ID NO: 176339 - protein, 104 aa, Glycine max
  Clone ID: PAT_MRT3847_130251C.1.pep
PLKLRPPRHCARFGTSWLAPHLVVQCAVTVILRFYSFFSPPPYVPIYFNRASGGCFFIYVNLIGDLYCIVIFYLLALVLLRLPFLQLPLSHVLSQPKIAPLSVL

SEQ ID NO: 176340 - protein, 35 aa, Glycine max
  Clone ID: PAT_MRT3847_130252C.1.pep
RSEHQILTSSGYIKAITTYKPRSEYLYHHTLKVDF

SEQ ID NO: 176341 - protein, 105 aa, Glycine max
  Clone ID: PAT_MRT3847_130253C.1.pep
PFYFLQVGQHLDSCVFLGANSSYSALEDDHVYLEELVESPQSRSLRGSVDELPSQNSAVNNSTELIIELQAVGPELTFYNTSKDVGGLLNLSNKLLLAQLDAFCR

SEQ ID NO: 176342 - protein, 62 aa, Glycine max
  Clone ID: PAT_MRT3847_130254C.1.pep
TKQGGRSDSLKTPKCDNRDHDEGDMANIQKKQEEESALRDLSARAQQKGIFRGCGLKKSGEI

SEQ ID NO: 176343 - protein, 56 aa, Glycine max
  Clone ID: PAT_MRT3847_130255C.1.pep
LVTFTSHYNVSQGNVICFSRWNTFIQIQIMKSSILSSFHLIYIVLYNIVPKPQSIS

SEQ ID NO: 176344 - protein, 88 aa, Glycine max
  Clone ID: PAT_MRT3847_130256C.1.pep
MPPTLSKRRTTPSLALLPPSSLFVRASPLRNTFLPPHLCCQKCLFYHGLVVRCEVVVAGKDKATRENFEYTKMRWIFNQFVELLKMFD

SEQ ID NO: 176345 - protein, 132 aa, Glycine max
  Clone ID: PAT_MRT3847_130257C.1.pep
IATCAEAGDVASKELRWCAEQLNKSVKAFDGATVRRNLENWEREPKCFELGNHDGATVQMGSSPRFPMYDNDFGWGRPLAVRSGGANKFDGKMSAFPGRNGGGAVDLEVVLAPETMARLESDSEFMFYVSGW

SEQ ID NO: 176346 - protein, 76 aa, Glycine max
  Clone ID: PAT_MRT3847_130258C.1.pep
FQTQYPIHSFYSSNSYYYISNIYINFFIQLSNITYPQSTFYINLSILFLIPLSLSLLLLTSLTFFILHYLLHYYFI

SEQ ID NO: 176347 - protein, 52 aa, Glycine max
  unsure (1)..(52): unsure at all Xaa locations
  Clone ID: PAT_MRT3847_130259C.1.pep
SFNLPCVSTERLSTPGVSKTGTPXKTYYYTYTHQHHHHNHHNPIPSTLKNNL

SEQ ID NO: 176348 - protein, 62 aa, Glycine max
  unsure (1)..(62): unsure at all Xaa locations
  Clone ID: PAT_MRT3847_13025C.1.pep
MMTTPFQQPPQTVRRLVVEVVDARNLLLKDGQGSSSPYLVXDFDGQRKRTSTRFKEPDLFCN

SEQ ID NO: 176349 - protein, 108 aa, Glycine max
  Clone ID: PAT_MRT3847_130260C.1.pep
LIFPSARPLDLDKCRFVLITTGLIALIYVAANFVPSIWDAFQFTGATATVCLGFIFPAAIALRDPHGIATKKDKILSIVMIFLAVFSNVVAIYSNADAMFRKHVDPHQ

SEQ ID NO: 176350 - protein, 108 aa, Glycine max
  unsure (1)..(108): unsure at all Xaa locations
  Clone ID: PAT_MRT3847_130261C.1.pep
APXXQIIPLAPXKXXRXLFQXPXXQXGPTXFWXXNLXVXGXLXXFKXXGVTXFLRXXKFXXXGFAXXXXKVKXVKGXXARDLELVSSRIGSRARXRXXFRAYVRVXAT

SEQ ID NO: 176351 - protein, 90 aa, Glycine max
  Clone ID: PAT_MRT3847_130262C.1.pep
AGRLFFFFLDILVKKNWPPREPPLRWWGWDLGPKPLPLQPHLGATSKKHTHLASSGPYFPGLPRTTKLGFLIILISIFLITIETIIRFRL

SEQ ID NO: 176352 - protein, 118 aa, Glycine max
  Clone ID: PAT_MRT3847_130263C.1.pep
MSERRRGAGAGTGTRKDEVVTREYTINLHKRLHGCTFKKKAPNAIKEIRKFAQKTMGTTDVRIDVKLNKHVWSSGIRSVPRRVRVRIARKRNDEEDAKEGQYSLVTVAEIPPEGLKGL

SEQ ID NO: 176353 - protein, 149 aa, Glycine max
  unsure (1)..(149): unsure at all Xaa locations
  Clone ID: PAT_MRT3847_130264C.1.pep
RVFFHFGSRPPLIPGAVPLEHVQKSVAYDRSSAPKDPRVFXALQENNPDSAINAKKMLLLADFSYGLQNSNGPSFKVLNSAAFGVIIAVRVAFSSSHGGPSHACIFRFKVHGHEPYSCFYVGTGVIRASGLLCRLSLCVCLPRVFSLDV

SEQ ID NO: 176354 - protein, 127 aa, Glycine max
  Clone ID: PAT_MRT3847_130265C.1.pep
PRVRRLREDDRRGVEKHDVMEAFRLLEVAMQQSATDHSTGTIDMDLITTGVSASERMRRESLQQATRNIIMEKMQIGGPSMRLLELLEELKKQDTGSEVHLNDLRNAIATLATEGFVTMHGDIVKRS

SEQ ID NO: 176355 - protein, 57 aa, Glycine max
  Clone ID: PAT_MRT3847_130266C.1.pep
YARGSVHSYQCPLQCSTRSSLTHYHMLCMFFCQKCSKTCLCVPSEYDGNIAVCSCYN

SEQ ID NO: 176356 - protein, 40 aa, Glycine max
  Clone ID: PAT_MRT3847_130267C.1.pep
FKLLHKAAYLLWLTVVNMMNLLQGQLMQMYHDASSVLISI

SEQ ID NO: 176357 - protein, 191 aa, Glycine max
  Clone ID: PAT_MRT3847_130268C.1.pep
MGSNGVTGNPGPSYSPPGGCTGRVPLGGALAPGEIDILDDGYRWRKYGQKVVKGNPNPRSYYKCVAPGCPVRKHVERASHDMKAVITTYEGKHIHDVPLGRGNSSYSMNRNSLNNTSNNTNTSNVTAPAPIRPSALTNYSNSASFTNSLHDTKQPTSAGQEPFPMDLLLSPGSIGFSANDSFLQSFLSKNF

SEQ ID NO: 176358 - protein, 61 aa, Glycine max
  Clone ID: PAT_MRT3847_130269C.1.pep
MAKSKNHTAHNQSYKAHKNGIKKPKRHRHTSTKGMDPKFLRNQRYARKHNKKSGETATEEE

SEQ ID NO: 176359 - protein, 220 aa, Glycine max
  unsure (1)..(220): unsure at all Xaa locations
  Clone ID: PAT_MRT3847_13026C.1.pep
WTASCLWQMVNPAYYGLEDAESEFLNTYLSSLVQTTFEDLEDSGCIXMDEDKVEPMMLGTIASQYYLSYMTVSMFGSNIGPDTSLEVFLHILSAASEFDELPVRHNEEKYNEALSEKVKYPVDKNRLDDPHIKALLLFQAHFSQLELPISDYVTDLKSVLDQSIRVIQAMIDICANSGWLSSSITCMHLLQMVMQGXWFDRESXLWMLPCMNTDLISSLS

SEQ ID NO: 176360 - protein, 39 aa, Glycine max
  Clone ID: PAT_MRT3847_130270C.1.pep
KPKRHRHTSTKGMDPKFLRNQRYARKHNKKSGETATEEE

SEQ ID NO: 176361 - protein, 46 aa, Glycine max
  Clone ID: PAT_MRT3847_130271C.1.pep
LCFYLCPFFKYDAVSLFILFFLISAPIFCLCSLFFFTGYIMRQKEY

SEQ ID NO: 176362 - protein, 59 aa, Glycine max
  Clone ID: PAT_MRT3847_130272C.1.pep
MGEVEKGYVIGVHTVDEWKLHLENAQYSNTLIVVDFTASWCGPCRFIDPVLCRQCISNS

SEQ ID NO: 176363 - protein, 55 aa, Glycine max
  Clone ID: PAT_MRT3847_130273C.1.pep
MAALSGSSELESAASEDRSGRWARTTFKIILSFHGGPFDGWQKQPGLNTRQSIVE

SEQ ID NO: 176364 - protein, 81 aa, Glycine max
  Clone ID: PAT_MRT3847_130274C.1.pep
NSDLKSPHYTLKFSKNSEYTNSLGNPPGHQFTQTSSTGRIIGPLGKLTLLYWITMVTNDFRSNNQFRPALNRTSPSQIRFY

SEQ ID NO: 176365 - protein, 87 aa, Glycine max
  unsure (1)..(87): unsure at all Xaa locations
  Clone ID: PAT_MRT3847_130275C.1.pep
SASVTQNPSGACFLRSAFAGAIKIESQVKHALGGKGMGRTGSKGQVTQVRVKFWXSEPHIMRNGKGPVRERDILTLLESEREAXRLP

SEQ ID NO: 176366 - protein, 138 aa, Glycine max
  Clone ID: PAT_MRT3847_130276C.1.pep
GSGGFRPIRGFPPPERGGSKKNGPPPGEWVPPKNGENGWGLSPAPNWFFWEPWFSKGPPKTTKGFWGESPQGKNFCGAEPPRKGGVFFFRGFKCHGLKRGWGKGNFHFKILFPNSPHCFCSPPQGAKNGGGEKNPPGG

SEQ ID NO: 176367 - protein, 456 aa, Glycine max
  Clone ID: PAT_MRT3847_130277C.1.pep
IRLEISRSPSKGYRKLQAVLKTIMLRRTKGSLLDGEPIISLPPKSVELKKVEFSQEERDFYSKLEADSRAQFQEYADAGTVKQNYVNILLMLLRLRQACDHPLLVKRYNSNSLWKSSVEMAKKLPQEKRLCLLKCLEASLALCGICNDPPEDAVVSVCGHVFCNQCICEYLTGDDNQCPAPNCKTRLSTPSVFSKVTLNSSFSDQPCDNLPDYSGCEVEESEFCSQAQPYDSSKIKAALEVLQSLSKPQCFASQNNSVQSTSGESTDGLGSSSSADRMKSLNEIPESQNVLEERSSNNSVGVGEKAIVFSQWTRMLDILEACLKNSSIQYRRLDGTMSVTARDKAVKDFNTLPEVSVMIMSLKAASLGLNMVAACHVLMLDLWWNPTTEDQAIDRAHRIGQTRPVTVLRLTVRDTVEDRILALQVSVGCSFWWKQKKQGAENFVAWPLLTLDMKII

SEQ ID NO: 176368 - protein, 549 aa, Glycine max
  unsure (1)..(549): unsure at all Xaa locations
  Clone ID: PAT_MRT3847_130278C.1.pep
YDDHAVSSKKRKCPPSSKSGKKGLDSAMLEAVARPLAKVAWFRVVLDEAQSIKNHRTQVARACWGLRAKRRWCLSGTPIQNAIDDLYSYFRFLRYDPYAVYTSFCSTIKIPISRSPSKGYRKLQAVLKTIMLRRTKATLLDGEPIISLPPKSVELKKVEFSPEERDFYSRLEADSRAQFQEYADAGTVKQNYVNILLMLLRLRQACDHHLLVKRDNSKSLSKSSFEAPQNNSSKIKSGLEMXFSWCLNHNVVLPKTILNILLFEMVLMAFVVSVLVMXNEAIEFSQGTNMKDILSTPSVFSKVTLNSSFSDQAGDNLPDYSGCEVEESEFFSQAQPCYSSKIKAALEVLQSLSKPQCFASQNNSVQSTSGESTDGLGIKMCFEERSSNNSVGVGEKAIVFSQWTRMLDILEACLKNSSIQYRRLDGTMSVTARDKAVKDFNTLPEVSVMIMSLKAASLGLNMVAACHVLMLDLWWNPTTEDQAIDRAHRIGQTRPVTVLRLTVRDTVEDRILALQQKKRKMVASAFGEDGTGGCQSRLTVDDLKYLFMM

SEQ ID NO: 176369 - protein, 113 aa, Glycine max
  Clone ID: PAT_MRT3847_130279C.1.pep
MAKSLRSKREKRLRAIRREIVEPFYDKKEAAKLAAQEAALAAPKLEVPSKPNTAMEASASTDNTNMDVEVADGSQSMASLKPVGGIGKKSKKKLKIAKNKRRGNGKHRRTRKI

SEQ ID NO: 176370 - protein, 115 aa, Glycine max
  unsure (1)..(115): unsure at all Xaa locations
  Clone ID: PAT_MRT3847_13027C.1.pep
ILRKLEERGADLDRLYEMEEKDIGALIRYAPGGRLVKQHLGYFPSLQLSATVSPITRTVLKVDLVITPVFIWKDRFHGTAQRWWILVEDSENDHIYHSELXTLTKRMARGEPYKL

SEQ ID NO: 176371 - protein, 79 aa, Glycine max
  Clone ID: PAT_MRT3847_130280C.1.pep
LPYTPWRTTLTGTYGVAGTYRHPHDNRILSLTIHPHGFNTLLLIALFVLLPCNALLLNAIEPLIASLFTLKRTIILTLI

SEQ ID NO: 176372 - protein, 90 aa, Glycine max
  Clone ID: PAT_MRT3847_130281C.1.pep
MGTLGRAFYAVGFWIRETGQAIDRLGSRLQGNYLFQEQLSRHRPLMNLFDKAPSVHRDAFVAPSASLLGDVHVGPASSIWYGCVLRGLGR

SEQ ID NO: 176373 - protein, 270 aa, Glycine max
  Clone ID: PAT_MRT3847_130282C.1.pep
MGTLGRAFYAVGFWIRETGQAIDRLGSRLQGNYLFQEQLSRHRPLMNLFDKAPSVHRDAFVAPSASLLGDVHVGPASSIWYGCVLRGDVNSITIGSGTNIQDNSLVHVAKSNLSGKVLPTIIGDNVTVGHSAVLQGCTVEDEAFIGMGATLLDGVYVEKHAMVAAGALVRQNTRIPYGEVWGGNPARFLRKLTEDEMTFFSQSALNYSNLAQAHSAENAKGLDETEFVKVLHKKFARHGDEYHSVLGGVQETPTELKSSDNVLLDKVPKA

SEQ ID NO: 176374 - protein, 81 aa, Glycine max
  Clone ID: PAT_MRT3847_130283C.1.pep
SVGEAGSSSYKDVLLLANSSRYRCSTLNYIQPILQSIASIRCQFNPNQRENPVKVRVSAQRELSELKGVFVRVSPCALPRD

SEQ ID NO: 176375 - protein, 286 aa, Glycine max
  Clone ID: PAT_MRT3847_130284C.1.pep
MMVASLFYLSLSLSLILTLSSAAHHKPPHSPSKPPANPAVTAASPAIEQACAATLFPQQCEASLSQSQNLPPNPTPLQLLQSAIALSSDNLATAQTMAKSLLDASADSRNRTVAAATCIEILANSHHRISLASDALPRGRTKDARAWLGAALAYQYDCWNSLKYANDTQMVGKTMSFIDNLEILSSNALSMAFSFDAFGNDIASWKPPATERVGFWGTVGSGGPGPAGGVPLNLTPDVTVCKNGGDGCYKTVQEAVNAAPDNGNRTKRFVIHIKEGVYQETVRVPL

SEQ ID NO: 176376 - protein, 270 aa, Glycine max
  Clone ID: PAT_MRT3847_130285C.1.pep
MGTLGRVFYAVGFWIRETGQAIDRLGSRLQGNYLFQEQLSRHRPLMNLFDKAPSVHRDAFVAPSASLLGDVHVGPASSIWYGCVLRGDVNSITIGSGTNIQDNSLVHVAKSNLSGKVLPTIIGDNVTVGHSAVLQGCTVEDEAFIGMGATLLDGVYVEKHAMVAAGALVRQNTRIPYGEVWGGNPARFLRKLTEDEMTFFSQSALNYSNLAQAHAAENAKGLDETEFVKVLYKKFARRGEEYHSVLGGVQETPAELNVPDNVLLDKVPKA

SEQ ID NO: 176377 - protein, 70 aa, Glycine max
  Clone ID: PAT_MRT3847_130286C.1.pep
LKQRIRGGVYKSPNAYHTLYIPCNYTPIAFKKSPDMLQSQLLTQPCGSRNFFSAKRFPIVVRNFSNNIKQ

SEQ ID NO: 176378 - protein, 61 aa, Glycine max
  Clone ID: PAT_MRT3847_130287C.1.pep
CALKLNNKTKTLLLLLLMAATLFCMPIVFYAVSNVNIQDHVTNIPELAKGPNLTLLIFVDR

SEQ ID NO: 176379 - protein, 56 aa, Glycine max
  unsure (1)..(56): unsure at all Xaa locations
  Clone ID: PAT_MRT3847_130288C.1.pep
YKQXXXXIXXXXGVCXTXIXIKFILYIFLMQMLIFYTFSPSTINRGKLCIISKYFF

SEQ ID NO: 176380 - protein, 41 aa, Glycine max
  Clone ID: PAT_MRT3847_130289C.1.pep
SSLTCSRSIGALLHSGEPNRYVTRFPKPDHQSWTRVGHESA

SEQ ID NO: 176381 - protein, 31 aa, Glycine max
  Clone ID: PAT_MRT3847_13028C.1.pep
ALNIDCQLRRESTTAKLRQGSACMFGRVARP

SEQ ID NO: 176382 - protein, 168 aa, Glycine max
  Clone ID: PAT_MRT3847_130290C.1.pep
ARGDGDGSAKESGRVQNSRVRVASITCIQDLCQADSKSLSMQWSLLLPTSDVLQPRMHDATLMTCLLFDPCLKPRMASASTLVAMLDGLSSIFLQVAEYKESNKFGSFMALSSSLGKILMELHRGLLYLIEHEAHSKLLTLLFKILRLLILSTPYSRMPNLLPIVVTS

SEQ ID NO: 176383 - protein, 103 aa, Glycine max
  unsure (1)..(103): unsure at all Xaa locations
  Clone ID: PAT_MRT3847_130291C.1.pep
HNHHSITIQCLEALQFLQSWXIIHCDLKPENILVKSYXQRCEVKVVDLGSSYFETEHLCSYVQSKSYHAPIGXKVILWLLYDKKIDIWSLGCILAELYTYNVV

SEQ ID NO: 176384 - protein, 73 aa, Glycine max
  Clone ID: PAT_MRT3847_130292C.1.pep
YNSLYSSEVCYTSSHFFSPTARSQFDPIGFSTVMNVKHGYVICYKIAFEATNLQNYIFQSENQAIQITLNQLS

SEQ ID NO: 176385 - protein, 50 aa, Glycine max
  Clone ID: PAT_MRT3847_130293C.1.pep
IIDLVSIVLLRYFSLPGAKGVNPGVERTDPRKLGLQGSITKTKWPIGKWE

SEQ ID NO: 176386 - protein, 58 aa, Glycine max
  unsure (1)..(58): unsure at all Xaa locations
  Clone ID: PAT_MRT3847_130294C.1.pep
VYILKLPFIVLKKKCKLNCYYPNNLXQTDKTQRAKYDSLPKATRHFCPRPLKHVYGGK

SEQ ID NO: 176387 - protein, 75 aa, Glycine max
  unsure (1)..(75): unsure at all Xaa locations
  Clone ID: PAT_MRT3847_130295C.1.pep
NNRSRSLTVSRRLPWTSPLCIMIRFVFIKSSEGAICTCNLIVTSLGLEHVVRXSGHGSPMSSIHLARSHSANHLP

SEQ ID NO: 176388 - protein, 37 aa, Glycine max
  Clone ID: PAT_MRT3847_130296C.1.pep
LAMIIRHYENLQTQERNGSPAHIIPEIAQLLQFHTTY

SEQ ID NO: 176389 - protein, 224 aa, Glycine max
  Clone ID: PAT_MRT3847_130297C.1.pep
MVATNVKAETMSLMDKRSALEAEMNSIIARLSQPGAPGLSGNLVDSEGFPRSDIDIPVVRAERRRLAELRSDHNEVTEKINLNIQILHSARLGNRSFKNSAMNTQVSSNMDTVASTPSQNVLLIRSPNSMDVNVLISRPFAMVDEIADASPAVEDGLQLGDQILKFGNVEAGDNLLQRLSSEAQSNLGCAVPVVIMRQGTVINLTITPRPWQARGLLGCHFRIL

SEQ ID NO: 176390 - protein, 98 aa, Glycine max
  unsure (1)..(98): unsure at all Xaa locations
  Clone ID: PAT_MRT3847_130298C.1.pep
MSWFRHLSTKFSAITTTSTHRLSLLPRFSTSTAPVRHAGLEPTQAHEKPTVVVLGSGWAGCRLMXGLDTQIYDVVCVSPRNHMVFTPLLASTCVGTLE

SEQ ID NO: 176391 - protein, 266 aa, Glycine max
  unsure (1)..(266): unsure at all Xaa locations
  Clone ID: PAT_MRT3847_130299C.1.pep
AQLDPSGSTFLGLDDNRLCRWDMRDRNGMVQNLADSNAPVLNWAQGHQFSRGTNFQCFATTGDGSIVVGSLDGKIRLYSVNTMRQAKTAFPGLGSPVTHVDVTFDGKWIVGTTDSYLILICTLYTDKDGTTKTGFAGRGGGMLAPGRLLKLIPLDSHLDGAXNNKFRNAQFSWVTENGKQERHIVAXVGKFSVIWNFQQVKDGSHECYRNQQGLKSCFCYKIVLRDDSIVESRFMHDKFAVTDSPEAPLVIATPMKVSSFSISSKR

SEQ ID NO: 176392 - protein, 66 aa, Glycine max
  Clone ID: PAT_MRT3847_1302C.1.pep
SSDGEDDRLATVNCPSLRFHYSDASASLEGKTLLRARRVLRHLRSTGIMPPFLDGASTSDASHCGG

SEQ ID NO: 176393 - protein, 67 aa, Glycine max
  Clone ID: PAT_MRT3847_130300C.1.pep
TPLLTLHKIPRCSCCEKNCRGRMVERDGYPLKPSCMNILHPCCSCSCIECFDMIRHGANCHKILVHK

SEQ ID NO: 176394 - protein, 84 aa, Glycine max
  Clone ID: PAT_MRT3847_130301C.1.pep
MKLCLLLVLLLVTFTVALSGNVSYDGRSLLIDGQRKLLISASIHYPRSVPAMWPGLVQTAKEGGVDVIETYVFWNGHELSPGNV

SEQ ID NO: 176395 - protein, 37 aa, Glycine max
  unsure (1)..(37): unsure at all Xaa locations
  Clone ID: PAT_MRT3847_130302C.1.pep
XCLGLKETQDARXGLSKXAAYFTKXWSNXSLAEXRLC

SEQ ID NO: 176396 - protein, 88 aa, Glycine max
  unsure (1)..(88): unsure at all Xaa locations
  Clone ID: PAT_MRT3847_130303C.1.pep
MSLTMRDLGISFLRLVTRPDAYSEYILGWLINGSFGLMAVIYDDVKWYQRISINRIKVVVGEKKKVXKKFKVSXSEHLWVEDFNYREQ

SEQ ID NO: 176397 - protein, 67 aa, Glycine max
  unsure (1)..(67): unsure at all Xaa locations
  Clone ID: PAT_MRT3847_130304C.1.pep
LNYFHPXTLXSLLXTXFSXXASXVGCLSFLSFNLIERWXAWXXAREGXPXXKKNGRPQXWGQTXXKK

SEQ ID NO: 176398 - protein, 350 aa, Glycine max
  Clone ID: PAT_MRT3847_130305C.1.pep
NNLDPANKIGEGGFGPVYKGVLSDGHVIAVKQLSSKSKQGNREFVNEIGMISALQHPNLVKLYGCCIEGNQLLLIYEYMENNSLAHALFGEQEQKLHLDWPTRMKICVGIARGLAYLHEESRLKIVHRDIKATNVLLDKDLNAKISDFGLAKLDEEENTHISTRIAGTIGYMAPEYAMRGYLTDKADVYSFGVVALEIVSGKSNTKYRPKEEFVYLLDWAYVLQEQGNLLELVDPNLGSKYSPEEAMRMLSLALLCTNPSPTLRPTMSSVVSMLEGKIPIQAPIIKRSESNQDVRFKAFELLSQDSQTLVSSAYSQESMKQRHISEDGPWVDSSISLPSGDDYSSTSKLV

SEQ ID NO: 176399 - protein, 149 aa, Glycine max
  Clone ID: PAT_MRT3847_130306C.1.pep
PNCTKQTRRGLHSEPNTIVFSLSEKIVPPKNKMNKGLSFVLLILLIHYNNVVNANNKNCVTEDCLIGNNDLESEFYFGSHVARMLYDVSQSVSGQTGNSNNKAVNCPQSNGYRTCLPSKNGGGPNQCWGDYTRGRERDEGGAFTLNQIP

SEQ ID NO: 176400 - protein, 75 aa, Glycine max
  Clone ID: PAT_MRT3847_130307C.1.pep
FLLVQVFKAPILLGSCSNHEFSTVRPIWTQTLIECPSFLDTHVYIYFSWAILPSGEVSLKKKNKYMVDRINSKQH

SEQ ID NO: 176401 - protein, 61 aa, Glycine max
  unsure (1)..(61): unsure at all Xaa locations
  Clone ID: PAT_MRT3847_130308C.1.pep
ASAGVSPASGVRDVNASSVAVERLPDXMNGMKITDEMEMESTVVHGNGTDTGHMIVTTIAG

SEQ ID NO: 176402 - protein, 83 aa, Glycine max
  Clone ID: PAT_MRT3847_130309C.1.pep
EREARISGASYRPLEKAKKKGANLKPYKIEECVVEVFAPAPVRRKASFYDTVFSFFFSPLYFKKKTQIANEGYYENGMLPPKY

SEQ ID NO: 176403 - protein, 65 aa, Glycine max
  unsure (1)..(65): unsure at all Xaa locations
  Clone ID: PAT_MRT3847_13030C.1.pep
CLCCLPVTIVCIDYIPHLFGGRSKMEPSPLDLRYRAVRCXVXSPPPPAPSEVILYAYSSLPNRLY

SEQ ID NO: 176404 - protein, 86 aa, Glycine max
  unsure (1)..(86): unsure at all Xaa locations
  Clone ID: PAT_MRT3847_130310C.1.pep
XASLGXWTSTXPYXEXFWXHRGXCTCLGMXXMXNGQVLQXCMHIPYDXFXQAVFQXAIWVXXPXSFDYXQELLDGRLXXXVPHLGA

SEQ ID NO: 176405 - protein, 294 aa, Glycine max
  Clone ID: PAT_MRT3847_130311C.1.pep
FLPSLLSDVVIHFLHLHYPLCFPSILFFFSFDPNDKSIIYEGAPTIQLTRNQMDKGMIGSIGRATYYQPMQLWDKATGNLTDFTTHFSFVIDSQNRSKYGDGIAFFLAPAGSKIPNATKGASMGLTLDNQQLNSTDNSFVAVEFDIYQNGWDPPHEHVGIDINSMRSASNVTWLADIKEGKLNEAWISYNSSSLNLSVVFTGFNNDTDHTIQQQHLSAIVDLRLHLPELVSFGFSAATGNATAIHSLYSWDFTSTLAAQENITKGADPVARSPTSNIAPSQKKKNTGLAVGLSI

SEQ ID NO: 176406 - protein, 52 aa, Glycine max
  unsure (1)..(52): unsure at all Xaa locations
  Clone ID: PAT_MRT3847_130312C.1.pep
XLXIXTXARNSARXGTXWLXXXXGXTXXMSLCTXTXXDIDDGXKXKXWXXRX

SEQ ID NO: 176407 - protein, 125 aa, Glycine max
  Clone ID: PAT_MRT3847_130313C.1.pep
MALCSVFLNLHLLLFVCLTKEALGVAKPSVASYLSQEILAEQEADRVHGLPGQPPVKFKQYAGYITVNETHGRALFYWFFEATHKPEQKPVLLWLNGGIFFFLLTQLFMYIFILQSFLFSVHSHD

SEQ ID NO: 176408 - protein, 81 aa, Glycine max
  unsure (1)..(81): unsure at all Xaa locations
  Clone ID: PAT_MRT3847_130314C.1.pep
YDPFTDNSPYLRXVYTSFQELATFMAHGNTAQLSNEGGDPVLARLCWTIASYEMPHDNTFLRIVEKLLEIDPTGAIVAIRN

SEQ ID NO: 176409 - protein, 57 aa, Glycine max
  Clone ID: PAT_MRT3847_130315C.1.pep
DKIFIQLRMIMYNRVYSSMSISNCNNEVMLYMMMRINKLSSIVRAIMHKHVRAYRSL

SEQ ID NO: 176410 - protein, 123 aa, Glycine max
  Clone ID: PAT_MRT3847_130316C.1.pep
NSPLFSKMRGFSTIICINRAGRVITDETTVITSSSPPACFIRQLWSMFLSFRIAQCYHWSSYEKLKTMFSGDQFLSEEVKVKSKVRGSHLYLIGGQGFFVGYRGSIVDALCFPIISRQPRWCP

SEQ ID NO: 176411 - protein, 147 aa, Glycine max
  Clone ID: PAT_MRT3847_130317C.1.pep
VLVLFVSGLRMRSGVLLYGPPGTGKTLLAKAVATECSLNFLSVKGPELINMYIGESEKNVRDIFQKARSARPCVIFFDELDSLAPARGASGDSGGVMDRVVSQMLAEIDGLSDSTQDLFIIGASNRPDLIDPALLRPGRFDKLLYVG

SEQ ID NO: 176412 - protein, 105 aa, Glycine max
  Clone ID: PAT_MRT3847_130318C.1.pep
WCMHFSWAFAMSFPDGEASCFSQGCECLSLAFYKSSRCLSLVGKTLFQSFHGLLGSMVGLFPPRFLLPPLFSPTTRRCSSRWLLSSRFFIPLPLPWPSVCLLLCF

SEQ ID NO: 176413 - protein, 60 aa, Glycine max
  Clone ID: PAT_MRT3847_130319C.1.pep
DLRSFLVRVRALICLSRISLNVFLYILNVLDYIVFCCVLWYVMAASTCQKKKKKKQKPIS

SEQ ID NO: 176414 - protein, 59 aa, Glycine max
  Clone ID: PAT_MRT3847_13031C.1.pep
SQSEKIDDSPRLWTAQSSTFHAVWVRSHISSKQVPDFHNQPPIAYVPGSNVRLPVLAEN

SEQ ID NO: 176415 - protein, 94 aa, Glycine max
  Clone ID: PAT_MRT3847_130320C.1.pep
AMEEPKHFNFRATVVIPHIQIASAAKSLNEKHNIPPNKLQKRWAIRHYQRGPLRLNTENKRFSTFPNQRKEKVPIKRETIIYQRILIPHTPSVS

SEQ ID NO: 176416 - protein, 141 aa, Glycine max
  unsure (1)..(141): unsure at all Xaa locations
  Clone ID: PAT_MRT3847_130321C.1.pep
TRILIISLIFPLLSFSEAFVLNFGVANNAGPIGPAGYSCRRPXRVTANDFVNRGLGIVGTTXNIIKVAGPLALEAKLVGLNGLGISEERLDXPPGGVLQFNTNPEAXRXLVVIEGGILAGLILLATIVYLKTLKKGDVMAF

SEQ ID NO: 176417 - protein, 125 aa, Glycine max
  unsure (1)..(125): unsure at all Xaa locations
  Clone ID: PAT_MRT3847_130322C.1.pep
YTQFKNTPYPNSPFCRGVLESNIKISDVGMNNKGVDEYPFCVHLVIWDKDNVSIEVLXAVHIACNMYMDXLAGKGCLNYIVRVHPYNVLMINXMLSYSSANMLQTVMKGAFRNAQDAYTTNAVKQ

SEQ ID NO: 176418 - protein, 55 aa, Glycine max
  Clone ID: PAT_MRT3847_130323C.1.pep
YIKILYINTTQTTNNNISILKCITHALWTYLIHLNGLNCELNLQQKSNKFYQTLI

SEQ ID NO: 176419 - protein, 31 aa, Glycine max
  Clone ID: PAT_MRT3847_130324C.1.pep
FEAFWWIVLPELNTVWRGVYLTIQVSFWHVP

SEQ ID NO: 176420 - protein, 71 aa, Glycine max
  Clone ID: PAT_MRT3847_130325C.1.pep
LWCPRDKQQATLLRCMHASQRFPRFFTRCSMHLSSILFYHDGDNRILINGKLGQVSHDPFPIHLGLVVSNL

SEQ ID NO: 176421 - protein, 88 aa, Glycine max
  Clone ID: PAT_MRT3847_130326C.1.pep
FPPLVKGGCFPRRFFWGPPGFFPSRVCKTPPRKLNFGAPKKRFSLSMPGFLNPEFGPREKGSPPGGFGVMKFNLTPKILTLGLSSPPL

SEQ ID NO: 176422 - protein, 145 aa, Glycine max
  Clone ID: PAT_MRT3847_130327C.1.pep
MGFIQLLSVASFPVIKVLLVTAIGLFLALDDISILGEDSRKKVNQLVFYVFNPSLVGSNLAKTITFESIVQLWFMPLNILCTFILGSALGWILIKMTRPPKHMEGLILGCCSAGNLGNLLIVIISAICKESGNPFGDSDVCYQYG

SEQ ID NO: 176423 - protein, 301 aa, Glycine max
  Clone ID: PAT_MRT3847_130328C.1.pep
MGFIQLLSVASFPVIKVLLVTAIGLFLALDDISILGEDSRKRVNQLVFYVFNPALVGSNLAKTITFESIVQLWFMPLNILCTFILGSALGWILIKMTRPPKHMEGLILGCCSAGNLGNLLIVIIPAICKESGNPFGDSDVCYQYGMAYAALSMAIGAVFIWSYVYNIMRISSSRIQKEDNTGNGINILKASAEASESRTDNFSETLNPTKDATDDAYTLLLPHAKPEEKVSISRKIKHHLGVISSNLNFKAMFAPSTLGAIAGFIIGVISPMRNFIIGSSAPLHVVEESVFMLGYASQKLF

SEQ ID NO: 176424 - protein, 93 aa, Glycine max
  Clone ID: PAT_MRT3847_130329C.1.pep
KKKKKKKKILKKKKQTKKRGAYKKSQLTYTFIQHKKVSSFKTSILPSASFLLTTPSLNSLNFPFLSIFLQLPTLKTPFLPKITLLKFLPIFST

SEQ ID NO: 176425 - protein, 74 aa, Glycine max
  Clone ID: PAT_MRT3847_13032C.1.pep
SNWIYNTFPLHVVRDLLVGFSKFNLPASLFDDKETYIDYFQTKITKTSRWMISDFSTATLFWYEIECFCIQHPL

SEQ ID NO: 176426 - protein, 45 aa, Glycine max
  Clone ID: PAT_MRT3847_130330C.1.pep
GHAGLPAEFKHINKRAIKKKNYNIKAGALDDPNLRTRACNVISFL

SEQ ID NO: 176427 - protein, 57 aa, Glycine max
  Clone ID: PAT_MRT3847_130331C.1.pep
FPCLPTRSVLDKPVLTGWGSFKTGIGCNSHSISRISQCLPTTLCTIFLRERKPLSVL

SEQ ID NO: 176428 - protein, 78 aa, Glycine max
  Clone ID: PAT_MRT3847_130332C.1.pep
NDRFFELLLGISSKGKVSIRSGGSRRHCNDTISEKGDHSPCGSRSPSPFKVARCLSFIDRAYAQPLPLTGLHPLSVGP

SEQ ID NO: 176429 - protein, 76 aa, Glycine max
  unsure (1)..(76): unsure at all Xaa locations
  Clone ID: PAT_MRT3847_130333C.1.pep
LGVIFIPAVAYXLLAXFYLXXSPRWLVSKGRLLEAERVLKRLRGIEXVSXEWRCWSEGLSPGGEATSIEXXVVAPS

SEQ ID NO: 176430 - protein, 79 aa, Glycine max
  unsure (1)..(79): unsure at all Xaa locations
  Clone ID: PAT_MRT3847_130334C.1.pep
PGRPRVTPPTLSSLVLLLAALILSPQVLANYENPPVXQASTEKPPVYKPXVEKPPAYKPPAXNPPFYKPPQRSTLAPAL

SEQ ID NO: 176431 - protein, 105 aa, Glycine max
  Clone ID: PAT_MRT3847_130335C.1.pep
QFNLGPFKRQLSLTVKAIQSEKPPYKGIKPINGDPLIGGLETPVPSSPLIAWNLSNLPEYKTEVGPLLKGIEGGLAHGYLLWGPFWKAGPFRNTKIAGQAAFLAA

SEQ ID NO: 176432 - protein, 92 aa, Glycine max
  Clone ID: PAT_MRT3847_130336C.1.pep
KFNYLPVTSTCFLLLKKKHGLIAFFLLPTISIDSASQPWTQCLSDERYLGLQRPLVHPRSHRPCLSRVPCFLFPLFDVVTRGCRRLRRAASR

SEQ ID NO: 176433 - protein, 54 aa, Glycine max
  Clone ID: PAT_MRT3847_130337C.1.pep
FDAAFCIISVLTRFDNYGLYVAGTECEIQTRSLYNIGSLKTMPLKNLGLNENYS

SEQ ID NO: 176434 - protein, 80 aa, Glycine max
  unsure (1)..(80): unsure at all Xaa locations
  Clone ID: PAT_MRT3847_130338C.1.pep
ITLAHRFNMQIVVKTLTGKTITLDVEMSYTVVNVEAKIQYXEGIPLYQHRLIYAGKQLEDGRTLDDYNIQKESTLHFVFR

SEQ ID NO: 176435 - protein, 65 aa, Glycine max
  Clone ID: PAT_MRT3847_130339C.1.pep
IRAFKALVSALHTFEFEIDFAMGMVMVRGQKTTFPELLEPLACKASSPFLYPTKAVSTGSMVSPQ

SEQ ID NO: 176436 - protein, 107 aa, Glycine max
  unsure (1)..(107): unsure at all Xaa locations
  Clone ID: PAT_MRT3847_13033C.1.pep
GRSGGGRVFLNGRRLLLSRKSLLAERAAAAARGGCRPASRWSSSPRTSRRTLATLVGRAGLKVAAQSGLRDRRKACCRNRDPDRRPRXISGDLGISSRRHAHMLRRG

SEQ ID NO: 176437 - protein, 75 aa, Glycine max
  Clone ID: PAT_MRT3847_130340C.1.pep
SSITLSYSIFTRLPHFSRTVYNKKWAGQILFCQCKLINHIHPKARIVNEHLMLNHQQLLLLNPIYPSIPRITFIL

SEQ ID NO: 176438 - protein, 91 aa, Glycine max
  unsure (1)..(91): unsure at all Xaa locations
  Clone ID: PAT_MRT3847_130341C.1.pep
MVSEVIALHRFIRXEYGPDDSDESLFKVYGARKGKDRATTTAINGIARLQALQHLRKLLDDPTKLVQFSYLQNAPHGDIVLQTLADNYWGG

SEQ ID NO: 176439 - protein, 454 aa, Glycine max
  unsure (1)..(454): unsure at all Xaa locations
  Clone ID: PAT_MRT3847_130342C.1.pep
GSLLGKMKEVNAFEQELLEHIDMIKLAREENHADLESLGTHFIFSXESLKALLNMRRNAKEKELEALLSGEQDSCSCYIEVQAGAGGIESMDWAAMVMXMYKLWAQRRGYKVTVVDEMXRATIKVDGEFAFGYAKAEIGVHRLAPXRIRLREDDRKGRQSMSRFLGKSLRTKGPLFLHKILGISSESHNILVLSRYRRHFSHSLPHNTSNLVPSTGSLQIRFFASEAAAATTEPSTSDGLTVQGILANNWNILDENDGDWKSHATAIAQSIHLIKRRLHWEKLKXVERSPFDSNKHRHTSFAAVAVIPIPGDGSTHVQINESDLRIERCRAGGQHVNTTESAVRIVHIPTPGTATCQNERPQHQNKASAMAVLQSRLDQLEMARQAQFNAQHTQSLTDITWGSQIRSYVLHPYRMVKDLRTNYEVSDPDSVLEGDLDSFILSYLSASLDKDDDA

SEQ ID NO: 176440 - protein, 61 aa, Glycine max
  Clone ID: PAT_MRT3847_130343C.1.pep
AIWHAHDCLPWASSCSSLHDFNELLPHAASIATKAKKELKNHGTSFMTLSLYNLPREHFTT

SEQ ID NO: 176441 - protein, 258 aa, Glycine max
  Clone ID: PAT_MRT3847_130344C.1.pep
MALSVSLMQLSCVSLLHNNPSSSSSPVTLLPKSLFPCGISLKLKGLVFWSKSSSVCGRRRVGVGSISVNASLVEAPVLWAGRLCIFYALLKAGLAGSQANPLVSDLEIGDTNDESAPAAATDLGFSKWAQTILGKPAKEAANGRKLVSKWHPTTKGTLRRNYRVPSKLEGRRLLKAIASLLSDDDHFVDATSHKGCQIRRESAHGESVCCNNVRALFDELPTPHIIVEITPFPAGPLNDNDYIKAEKLEKVLRSSPSV

SEQ ID NO: 176442 - protein, 64 aa, Glycine max
  unsure (1)..(64): unsure at all Xaa locations
  Clone ID: PAT_MRT3847_130345C.1.pep
LRGTKPPQGLSFYFKYFFWGAHWKRPENGKTRAFECIRXFIFVPKKKKKQKKQTKKKKKXQKKK

SEQ ID NO: 176443 - protein, 47 aa, Glycine max
  Clone ID: PAT_MRT3847_130346C.1.pep
PLLIPHNKNSIRLYIFCTPTKHALFPTFYVQLKPLLKQHNNRYKFPH

SEQ ID NO: 176444 - protein, 88 aa, Glycine max
  Clone ID: PAT_MRT3847_130347C.1.pep
TEQAKGRPSTTTHTAFLRVYSDSPDRTPADARRISARDCDRWSVAKNEMNYLHTIIHMLRKLPFPRSGRSKGSHPKSACMLRRIAPRV

SEQ ID NO: 176445 - protein, 50 aa, Glycine max
  unsure (1)..(50): unsure at all Xaa locations
  Clone ID: PAT_MRT3847_130348C.1.pep
LTIVLKVSFCSIAHNPYLSRINXARPYASKKKDTNDPSGTFIKHKSKLTN

SEQ ID NO: 176446 - protein, 121 aa, Glycine max
  Clone ID: PAT_MRT3847_130349C.1.pep
MASVTARAPVAALRPSSASLKSSSAFLGHSSRLGRTASPTRRSLKAEAKGEWLPGLPSPSYLDGSLAGDNGFDPLGLAEDPENLRWFVQAELVNGRWAMLGVAGMLIPEVLTKAGLINAPQ

SEQ ID NO: 176447 - protein, 49 aa, Glycine max
  Clone ID: PAT_MRT3847_13034C.1.pep
GASMNPAVSCGLYFVIWPWFNHWVYGAGPFAGPTNAQVVSEVFFLSPST

SEQ ID NO: 176448 - protein, 95 aa, Glycine max
  Clone ID: PAT_MRT3847_130350C.1.pep
MADSDNDSGGAHNAGKGSEMSPREQDRFLPIANVSRIMKKALPANAKISKDAKETVQECVSEFISFITGEASDKCQREKRKTINGDDLLWAMTTL

SEQ ID NO: 176449 - protein, 76 aa, Glycine max
  Clone ID: PAT_MRT3847_130351C.1.pep
AQNGKKGFHICTLKNCHGLGPPSILNFECASKATKGNKSVAITPLILWPIKIILYKTFLVSPIDIEPPFDVCAGFS

SEQ ID NO: 176450 - protein, 92 aa, Glycine max
  unsure (1)..(92): unsure at all Xaa locations
  Clone ID: PAT_MRT3847_130352C.1.pep
LFLGLVLAPGVFSSRRPLLSVLSLPASPLVVSLLXLGRGCARVLLXPAGPVXXASLSLGXVSSPLWFWPPSSGCLAPGPPAPPPLPGXLSPA

SEQ ID NO: 176451 - protein, 140 aa, Glycine max
  Clone ID: PAT_MRT3847_130353C.1.pep
MGSRYEVEVKPLSARALKNVNWRHGPNLPYVVRWADRSYLLSTSVDENGNTDANWNETLTIPLPAKPLEDQNLFIHVVHAGSGEDTKSLIGKAWLRLVDIVNDFGIGERVRCTLSLKRPSGRPQGKAEVSVTIRESSYGA

SEQ ID NO: 176452 - protein, 325 aa, Glycine max
  Clone ID: PAT_MRT3847_130354C.1.pep
MGGWAIAVHGGAGVDPNLPLERQEEAKQLLTHCLNLGISALNSNLPAIDVVELVRELETDPLFNSGRGSALTEKGTVEMEASIMDGPKRRCGAVSGLTTVKNPISLARLVMDKSPHSYLAFSGAEEFARQQGVEVVDNEYFITPDNVGMLKLAKEANTILFDYRIPTSGYETCGSNVESPLQMNGLPISVYAPETVGCVVVDREGRCAAATSTGGLMNKMTGRIGDSPLIGAGTYACDVCGVSCTGEGEAIIRGTLAREVATVMEYKGLKLQEAVDFVIKHRLEEGMAGLIAVSNAGEVAYGFNCNGMFRGCATENGFMEVGIWE

SEQ ID NO: 176453 - protein, 231 aa, Glycine max
  Clone ID: PAT_MRT3847_130355C.1.pep
MAFSPDSANAKGDQQPECKGEQLDLGVRLGLLKLVSGISGLTQDDLPETLSLNFLRLRSVQAQIQKIIVISTSILIRGQVLLSEKAVASPADMENLVSKCAAQLLDLLNRVEDADIEDIVEVICNLPTVDGEDTGKLESRKVVAASMLGKSLQAGDVVFERVFNAVYSALRGVVLGGSGIRGRKLAEMALMKVGAGILTDKVVETAGVLIVAATISVSVHGPWYKHLTDNL

SEQ ID NO: 176454 - protein, 326 aa, Glycine max
  Clone ID: PAT_MRT3847_130356C.1.pep
MGGWAIAVHGGAGVDPNLPLERQEEAKQLLTRCLNLGISALNSNLPAIDVVELVVRELETDPLFNSGRGSALTEKGTVEMEASIMDGPKRRCGAVSGLTTVKNPISLARLVMDKSPHSYLAFSGAEEFARQQGVEVVDNEYFITPDNVGMLKLAKEANTILFDYRIPTSGYETCGSGVESPLQMNGLPISVYAPETVGCVVVDREGRCAAATSTGGLMNKMTGRIGDSPLIGAGTYACDVCGVSCTGEGEAIIRGTLAREVAAVMEYKGLKLQEAVDFVIKHRLDEGMAGLIAVSNAGEVAYGFNCNGMFRGCATENGFMEVGIWE

SEQ ID NO: 176455 - protein, 71 aa, Glycine max
  Clone ID: PAT_MRT3847_130357C.1.pep
TAPPLGKVLRSGPFFINPSGEKGICYHAFTFVNPKFFPHPNLLYSRPSLRHSRPNNISVDIAYTDDKARPL

SEQ ID NO: 176456 - protein, 86 aa, Glycine max
  unsure (1)..(86): unsure at all Xaa locations
  Clone ID: PAT_MRT3847_130358C.1.pep
SDTTTERGQKPLNGSPYSRGYYTCNSVKRSPTRTHMDRTPDDPAMSTVTYEXEHRHSIPENISGRVCLRFNHSQGSCKLNLTLVHQ

SEQ ID NO: 176457 - protein, 64 aa, Glycine max
  Clone ID: PAT_MRT3847_130359C.1.pep
PLGLITDCSDRTTDVKIAHWWLATKAHRIICDDTITDECIVLPMDSMRGELDRSDSRPVNQLIY

SEQ ID NO: 176458 - protein, 97 aa, Glycine max
  Clone ID: PAT_MRT3847_13035C.1.pep
PMAHAAITCGQVTNSLINCIGYLQNGGTPPSGCCNGVKSLNAAAKTTADRHTASNCLKFAACQIYGFKANNAVSLPGRCGVSIPYIIGTCTNCATIK

SEQ ID NO: 176459 - protein, 70 aa, Glycine max
  Clone ID: PAT_MRT3847_130360C.1.pep
QKHKKAIFNWGRYTNNWRTASKILNIIWLPSTYELPDPKQSPCFLLLLWSLLKWTSTYLSAFFLMIPTNI

SEQ ID NO: 176460 - protein, 109 aa, Glycine max
  unsure (1)..(109): unsure at all Xaa locations
  Clone ID: PAT_MRT3847_130361C.1.pep
MANMIVASTKPLVPVGTRVPVPPHPXVPILHISLPKSPTLKLILPISKPHMLSLLVGIAPLFLIXPFLAYEIDKASLLDFNLTLPIIMLEFLLLMVALDKILFNPLVKF

SEQ ID NO: 176461 - protein, 149 aa, Glycine max
  Clone ID: PAT_MRT3847_130362C.1.pep
KLERSVRREPKKTNPMGGCATKPKVSQDDPDGKPKAPQPEPEPEPEHQQPNNKDTLQTKVPQVEQGAAHKDHNNLNVNEIVDDDQANKPRSLSSLFKQNEDKRGSTENEKNKVEESVKEEVLEVKIPAEDTKSNEPTVKQESLKPEEKL

SEQ ID NO: 176462 - protein, 77 aa, Glycine max
  Clone ID: PAT_MRT3847_130363C.1.pep
GSKTELFIIQNSSRRVFSEVLPVYDGLNVLLIASVNSYSTHSSNLSMVKIVDNLPRHKLVSPPVILITPPLDYGFKR

SEQ ID NO: 176463 - protein, 164 aa, Glycine max
  Clone ID: PAT_MRT3847_130364C.1.pep
MSGLSFRGFTYMLLIAFLIWSFNFEACIARRGKHWRQSRDVSASVYKKKGKNYGNAHNKYHGGGSKSKPPSSHKGTPTLPKAPPQHKNTPSPPYPTPPSDDTPTTPPPKAYNGGGHSSATTFNVLDFGAKGDGKSDDTKSKSKTGSEKYRKVKTQEQARGVGPT

SEQ ID NO: 176464 - protein, 181 aa, Glycine max
  Clone ID: PAT_MRT3847_130365C.1.pep
MSGLSFRGFTYMLLIAFLIWSFNFEACIARRGKHWRQSRDVSASVYKKKGKNYGNAHNKYHGGGSKSKPPSSHKGTPTLPKAPPQHKNTPSPPYPTPPSDDTPTTPPPKAYNGGGHSSATTFNVLDFGAKGDGKSDDTKAIRSIKNCFLLSSLFGMLLMPLKKVYRDHRVRAKQVVKNTEK

SEQ ID NO: 176465 - protein, 56 aa, Glycine max
  Clone ID: PAT_MRT3847_130366C.1.pep
EHLPLYIPFYGYSVTISLNILYTNLFCCNLGSTNTFDECRVHMCDTDTLQTHDRQC

SEQ ID NO: 176466 - protein, 539 aa, Glycine max
  unsure (1)..(539): unsure at all Xaa locations
  Clone ID: PAT_MRT3847_130367C.1.pep
MSGLSFKGFTYMFLIAFLIWSFNFEACIARRGKHWRQSRDVSASLYKKKGKNYSNAHNKNHGGGSKSKPPSSHKGTPTLPKPPPQHKNTPSPPYPTPPSDDTPTTPPPKGPDMVVAIXPTTTFNVLDFGAXEIENLLTQKQFNXSPAEACKVESSTMLVPADYVFFVGPISFSGPYCKPSIVFQLDGTIVAPTSPNAWGKGLLQWLEFSKLVGITIQGNGIIDGRGSVWWQDNPYDDPIDDEEKLIVPLNHTIGSPSPPLPIQSEMGGKMPSVKPTALRFYGSFNPTVTGITIQNSPQCHLKFDSCNGVMVHNVTISSPGDSPNTDGIHLQNSKDVLIYGSTMACGDDCISIQTGCSNVYVHNVNCGPGHGISIGSLGKDNTRACVSNITVRDVNMHNTMNGVRIKTWQGGSGSVQGVLFSNIQVSEVELPIVIDQFYCDKRTCKNQTSAVSLAGINYERIRGTYTVKPVHFACSDSLPCVDVSLTSVELKPIQEKYHLYNPFCWQTYGELKTPTVPPIDCLQIGKPTNNRIQTDHDLC

SEQ ID NO: 176467 - protein, 36 aa, Glycine max
  Clone ID: PAT_MRT3847_130368C.1.pep
YTVYLLVVSSSSSLSITRKGVQVAQVAFIDLSSAWM

SEQ ID NO: 176468 - protein, 83 aa, Glycine max
  Clone ID: PAT_MRT3847_130369C.1.pep
SESIKSPAVSSPELAPERNKRENTVPTEYETVADRAKSGACIEGNSSVHSAELTGRFPEWKMGRAVEKRISPPLERGAPSLAR

SEQ ID NO: 176469 - protein, 112 aa, Glycine max
  Clone ID: PAT_MRT3847_13036C.1.pep
GGNPHHFFWGKWGPFPRGVIFQVRQKKGSAYVTIDSQNSPKDFFEKFFTGGVFPSGGEPRGQEIDPGGPRFIPPQLFSGHHQKTRGGLLSFCFLSKPTRFSIRNRPPQKTRP

SEQ ID NO: 176470 - protein, 63 aa, Glycine max
  unsure (1)..(63): unsure at all Xaa locations
  Clone ID: PAT_MRT3847_130370C.1.pep
DVLIILPPLXSACTGXXAFLFDTXPYXTXXSXQAXAXMPPKIYSYXHXXXIDVVELNLKSXXK

SEQ ID NO: 176471 - protein, 77 aa, Glycine max
  Clone ID: PAT_MRT3847_130371C.1.pep
SAGKQKRKQKKKKKKKKKKKRRTKKIKTKKRKKKKNKTQQKRPPKRIQPYVPLQATSKPFKRGTKIQSTGRRLTTPQ

SEQ ID NO: 176472 - protein, 63 aa, Glycine max
  unsure (1)..(63): unsure at all Xaa locations
  Clone ID: PAT_MRT3847_130372C.1.pep
IGLYDSSRXSKYLENVQQFVGSDQAKPRVRSSQLSLKGTMVDSADYDELFYFHETPGQEFGMD

SEQ ID NO: 176473 - protein, 69 aa, Glycine max
  Clone ID: PAT_MRT3847_130373C.1.pep
ANPRVIHIITDSSIFAKHVIHKDAVNGASYRQHPSCHYSSDHLSLSMYWTCWFQYHDLLMLLNSTNVCH

SEQ ID NO: 176474 - protein, 51 aa, Glycine max
  Clone ID: PAT_MRT3847_130374C.1.pep
TRLVFNHFRKTLKIGVGWKHLCETLSLTVDMGIVFEFIDPNVNRVLYWAYL

SEQ ID NO: 176475 - protein, 73 aa, Glycine max
  unsure (1)..(73): unsure at all Xaa locations
  Clone ID: PAT_MRT3847_130375C.1.pep
TMPLEGESSDTIYNGKAXSQDKAGMPPDQAHVIVDGEQMEDGRTLSDYDMHKEXTLHLVLRLQGGMHMFHKTL

SEQ ID NO: 176476 - protein, 68 aa, Glycine max
  Clone ID: PAT_MRT3847_130376C.1.pep
FSNFDKATLGPRFTLSLFFSVRVQRLFFFSKFIPLPCMRFHFFSATPFYPQSKSWGGSRLRFDDYCYA

SEQ ID NO: 176477 - protein, 50 aa, Glycine max
  Clone ID: PAT_MRT3847_130377C.1.pep
AHVPRLYTCGLQCGECEYGEMVPPNSLLDQQLRMVDLIALQGRLSGQNSS

SEQ ID NO: 176478 - protein, 85 aa, Glycine max
  Clone ID: PAT_MRT3847_130378C.1.pep
GIIEALDLAEKYDVVSAADFLSYGGVKGTTTSWQYRGLAKTPKTVIGYLRKTLSLALRVGRPCTSIVFWNKARRAPSPIGFIPHF

SEQ ID NO: 176479 - protein, 121 aa, Glycine max
  Clone ID: PAT_MRT3847_130379C.1.pep
VLQPFPFNYFKNLYRKNIQGCQLWLQNSIMATNCSNQFSATGFHSACFLGWHGETFGRRIFSLRYLSIILQMLPKHSFSIPFFVFLIFIPQKSEPVSGILTNDFSPSVLSYHTDPFCRLLA

SEQ ID NO: 176480 - protein, 304 aa, Glycine max
  Clone ID: PAT_MRT3847_13037C.1.pep
MNVKVHSSDDTKKDEEVVLPGFRFHPTDEELVGFYLQRKVDKKPLKIELIKQVDIYKYDPWDLPKVNSFGDKEWYFFCIRGRKYRNSVRPNRVTRSGFWKATGIDKSIYCVKEPHECIGLKKSLVYYRGSAGKGTKTDWMMHEFRLPPNAKSSPNDVQEAEVWTLCRIFKRIPSFKKYAPNLKDSTPATKPNPVNSNASTLDSDNCCKPYLICRDPMMMQQIERKPVIGQVDEKKHLFLGQFGPLSHLQAPSTTPYPNFWNQNNVEDHAFANENWDDLRSVVQFAIDPSTVFDCTETYIPPYFS

SEQ ID NO: 176481 - protein, 53 aa, Glycine max
  Clone ID: PAT_MRT3847_130380C.1.pep
MHIGCPFRVALADFLLSGTRPNRILIRGVWSVAVSYHSQSLQRLVGPDNPSLW

SEQ ID NO: 176482 - protein, 66 aa, Glycine max
  unsure (1)..(66): unsure at all Xaa locations
  Clone ID: PAT_MRT3847_130381C.1.pep
CLVHQFNETGLFSSLGALTNYLLQNSQHFCLNLGISTILKQMCQYQYIWKXLFSLESQISLVPKCL

SEQ ID NO: 176483 - protein, 113 aa, Glycine max
  unsure (1)..(113): unsure at all Xaa locations
  Clone ID: PAT_MRT3847_130382C.1.pep
RRPFLRPRVRNYERFIMKKRDKLSXQDGINPYCMEGTGLANXIPSKGNANPCCXDAASFDGLITNQVMSKMAEMINXLCAGDEKWMRARTHLMLSRESRIATCKKDDSQDACG

SEQ ID NO: 176484 - protein, 117 aa, Glycine max
  Clone ID: PAT_MRT3847_130383C.1.pep
SAKYASRKNVGVRMPDDAICQAILKEMDAPLICTSIKFQKEDEWMIDPVMIADTYGPEGLDFVVDGGVRVADPSTVVDMTKLPPKVLRQGKGPILHWMELEDDQKTDVDKDLIPAGI

SEQ ID NO: 176485 - protein, 214 aa, Glycine max
  Clone ID: PAT_MRT3847_130384C.1.pep
MQTVCVCGDKLWRYDAVSFFGSHVSFTSTRVSFCPPRRRSGLVSMVAKRSPKRLKYTSASRFTKEDGLVYIEADPSASDSWKLEPIANLLKQGAVGVIPTDTMYAIVCDLRSQSAIERLRRIKNIEASKPLSILCHSFRDIDKYTAGFPRGDGQGHANLFKAVKHYLPGPYTFILIASKELPKQCIRFGTSSAKYASRKKRGVRMPDDAICQAI

SEQ ID NO: 176486 - protein, 116 aa, Glycine max
  Clone ID: PAT_MRT3847_130385C.1.pep
FYNILIYSPDWKSHIMHLTAVLDVLKKERLVANRKKCYFSQTTIEYLGHVISKDCVAMDSNKVKSVIEWPVPKNVKRVCSFLRLTGYYRKFIKDYGKLAPRPLTDLTKNDGFKWGD

SEQ ID NO: 176487 - protein, 121 aa, Glycine max
  unsure (1)..(121): unsure at all Xaa locations
  Clone ID: PAT_MRT3847_130386C.1.pep
LVAYXPLLHXLMEYLEIRPYXXXIEPGTTMSFWVPSETITKPKKNDEKPRIRAKPSKPAVILVHGFSAEGIVTWQFQVGALTKKYAVYVPDLLFFGGSTTDKAERSPKLQAECLVAALRKL

SEQ ID NO: 176488 - protein, 205 aa, Glycine max
  Clone ID: PAT_MRT3847_130387C.1.pep
SHIASANSESEKGFQWGKQGRDSFKKNRFEGSQGRGSNAGDWKNRNRPPRAPGQRLDIYSSGEQDVLKDIEPMMQGRGRIMQQQGYSDGDPLAAEDQLFVLENVFEHHPDKETKMGAGIDYVMVNKHSSFQESRCFYVVCKDGQSKDFSYRKCLANYISKKYPDLAESFLGKYFRKPRARGDQTATLGGDQTATPAQDEAATSGE

SEQ ID NO: 176489 - protein, 72 aa, Glycine max
  unsure (1)..(72): unsure at all Xaa locations
  Clone ID: PAT_MRT3847_130388C.1.pep
EKDLFKGGYLVNPQSVVSVNSSFVGELIALFEPAEGGIFLVXLGLVXPNCLSSSLKWCIVGTNFTDGHTFEF

SEQ ID NO: 176490 - protein, 44 aa, Glycine max
  Clone ID: PAT_MRT3847_130389C.1.pep
LILFFTPTQTSLNLYKSRIQLLDPIKLILFLIPYHFNSYFQQPI

SEQ ID NO: 176491 - protein, 104 aa, Glycine max
  unsure (1)..(104): unsure at all Xaa locations
  Clone ID: PAT_MRT3847_13038C.1.pep
VFTHSTCTEHSDSCNCTSSNPHSSQLIFPIYVCGPHHGFVMWSSTWANQCSWHXLSFLIDNPSQSTVLDNLLGSSQDFDIAGNTLMPARSVPQVIDRSSGTRQS

SEQ ID NO: 176492 - protein, 62 aa, Glycine max
  Clone ID: PAT_MRT3847_130390C.1.pep
RDDSYFWTHDPDRDLIKRGPYYFWGLSSAFLILLLTPHSIPKILAPFSKKLWCPFTYPSITP

SEQ ID NO: 176493 - protein, 240 aa, Glycine max
  Clone ID: PAT_MRT3847_130391C.1.pep
WKEIEGEKGESSNWRTIDAHTVVPIDRPPIAEPDRPLWFPGSTPPPWLDGTLPGDFGFDPLGLGSDPESLRWNVQAELVHCRWAMLGAAGIFIPEFLTKIGVLNTPSWYSAGELEYFTDTTTLFIVELFFIGWAEGRRWADIIKPGCVNTDPIFPNNKLTGTDVGYPGGLWFDPLGWGTGSPQKIKDLRTKEIKNGRLAMLAVMGAWFQHIYTATGPIDNLFAHLADPGHATIFAAFTPK

SEQ ID NO: 176494 - protein, 164 aa, Glycine max
  Clone ID: PAT_MRT3847_130392C.1.pep
MAKDRTIGVALDFSKSSKNALKWAFENLADKGDTIYVIHINPNSLDESRNKLWAKSGSPLIPLVEFREPEIMKKYDVEIDIEVLDMLDTASRQKEIHIVTKIYWGDAREKLLDAIEDLKLDSLVMGSRGLSTIQRIILGSVSNFVMTNAPCPVTIVKEPPSSSK

SEQ ID NO: 176495 - protein, 54 aa, Glycine max
  Clone ID: PAT_MRT3847_130393C.1.pep
FFYAKNYVFLSSYDHITLIKIRRRFTRQNFEEQKNHRCDIFFFCIVHIKVHLIS

SEQ ID NO: 176496 - protein, 294 aa, Glycine max
  unsure (1)..(294): unsure at all Xaa locations
  Clone ID: PAT_MRT3847_130394C.1.pep
MFSPSGQKNGSGGCFLSGRKLRVKKERAAIGGRSMGTTVCAVAEPDRPLWFPGSTPPPWLDGTLPGDFGFDPLGLGSDPESLRWNVQAELVHCRWAMLGAAGIFIPEFLTKIGVLNTPSWYSAGELEYFTDTTTLFIVELFFIGWAEGRRWADIIKPGCVNTDPIFPNNKLTGXTDVGYPGGLWFDPLGWGTGSPQKIKDLRTKEIKNGRLAMLAVMGAWFQHIYTATGPIDNLFAHLADPGHATIFAVSLFITTTSYTNHSAFLFSYSLFLYYRLSPLSEKAKINNQITSCLG

SEQ ID NO: 176497 - protein, 56 aa, Glycine max
  Clone ID: PAT_MRT3847_130395C.1.pep
NLVANVNNIEIFVLGGATNPKEGPDIFQSQKYKKPHCNKRWSQTLVTRREFLFVEG

SEQ ID NO: 176498 - protein, 77 aa, Glycine max
  Clone ID: PAT_MRT3847_130396C.1.pep
SCNSCNRSNSIWHDRLGHPNSHVLQPVLKHCNIPTINKNLLEFCSACAAGKFNRLPSFPSNSVNSFRLELVYSDLGG

SEQ ID NO: 176499 - protein, 124 aa, Glycine max
  unsure (1)..(124): unsure at all Xaa locations
  Clone ID: PAT_MRT3847_130397C.1.pep
MTVTTDNEKKHEEKEEPKQVANPWEVSAKGKVDYDKLIDRXLDEALIWCVXCITSYTPHVFLRCGIFLAHRYLHAFSPFTLCILDAYERGDRFYFYTGHGPCSEVLHLGHLIPFMFTNHLIMER

SEQ ID NO: 176500 - protein, 83 aa, Glycine max
  Clone ID: PAT_MRT3847_130398C.1.pep
STEKGRACHIHGAGTRYGPDGGLSRGGPRYGTESLWSPLRFIESTRGRNRTPHLTSCKVKRQECHNVGLRAPEGKHGGLSVRP

SEQ ID NO: 176501 - protein, 48 aa, Glycine max
  Clone ID: PAT_MRT3847_130399C.1.pep
AAGMFSIAYINCCSISRKITVSITGLTPFNHIVVYTTTCLRTCRMFTT

SEQ ID NO: 176502 - protein, 56 aa, Glycine max
  Clone ID: PAT_MRT3847_13039C.1.pep
KCYHIRSMLHHVSSDSIHWVVCTICISATATATKSGWFIILDGVQFDDGTSMLVGL

SEQ ID NO: 176503 - protein, 97 aa, Glycine max
  unsure (1)..(97): unsure at all Xaa locations
  Clone ID: PAT_MRT3847_1303C.1.pep
EXESXXXXXXXXAXXXXXXXXXXXXEGXXXXXXXGGXXXAGXXXXXGXXXGXXXXGRXKXXGXXXXXRXXEXXKXXXXEETXKGXXEXGEXXXXXDX

SEQ ID NO: 176504 - protein, 94 aa, Glycine max
  Clone ID: PAT_MRT3847_130400C.1.pep
RKREPSKPRFLGKLFYLFPNLPWVVANSNLFYFYLKGQFFEIFWLPGGFFNKNFLKESRMDPAKILTQGWLIWGQRMGTKRVKNHLVHTRKNSF

SEQ ID NO: 176505 - protein, 44 aa, Glycine max
  Clone ID: PAT_MRT3847_130401C.1.pep
DPFYFKTPYTIQHIIYSSFLIPKPKYYLIISIPTIIFQSTQSNY

SEQ ID NO: 176506 - protein, 65 aa, Glycine max
  Clone ID: PAT_MRT3847_130402C.1.pep
WSNGREPEKPSEINNQCPGKNLVGLLCRLFLVDLFLRYETFRSIKTQAGLGRIFTIKSLIKAYTI

SEQ ID NO: 176507 - protein, 92 aa, Glycine max
  Clone ID: PAT_MRT3847_130403C.1.pep
ILKVGQHDKTMGATGDTNVLAQMIDEAEGLEKIENLQSHDNNEIYEKAVKLLETYWMEEEDDAMATAGEAAPAVFDFNQGGNPPGAGGLNFN

SEQ ID NO: 176508 - protein, 84 aa, Glycine max
  unsure (1)..(84): unsure at all Xaa locations
  Clone ID: PAT_MRT3847_130404C.1.pep
KGXXVIVVCFEXXGXXXXGXSXXXXDSXVXKXLFGDGXXXXIVGFXXIXKVEKFLFEXVWNGXKIGXKIEGVIDGKXXEVGXKF

SEQ ID NO: 176509 - protein, 122 aa, Glycine max
  Clone ID: PAT_MRT3847_130405C.1.pep
CHTKPNIYSFVMTLLKRSKYLWLCPQINPTTKPNMKQDQVLGSTSHISLLPHEQHHFFLPGKTLLTTSKQQKKFKTYPLIIHFFLKCQLFYTNPPPSYLFNHYFFMGHLRVCRVHIKITTTL

SEQ ID NO: 176510 - protein, 64 aa, Glycine max
  Clone ID: PAT_MRT3847_130406C.1.pep
YFLISLLQNPLFRGTADRVRGRVRVFPHIISLAICFYHCPLIFSVTVFKCNSYALWLPLLFLVL

SEQ ID NO: 176511 - protein, 50 aa, Glycine max
  Clone ID: PAT_MRT3847_130407C.1.pep
PYLFVMSFLIHVNELKIGINIVLKCLSWHSFMIEKKGVKIINILLLAPAS

SEQ ID NO: 176512 - protein, 40 aa, Glycine max
  Clone ID: PAT_MRT3847_130408C.1.pep
CWKHYLPVMVSGVLSYQKSTVGPIPILFPFFLFILQFESV

SEQ ID NO: 176513 - protein, 55 aa, Glycine max
  Clone ID: PAT_MRT3847_130409C.1.pep
GPRSQRQGLIKIGVEGPLNQKRGGALKKPKVFILTKKTQPETFSNPWPKLTPLRP

SEQ ID NO: 176514 - protein, 80 aa, Glycine max
  Clone ID: PAT_MRT3847_13040C.1.pep
SILKLGNRSVICEQELVLFNFKYIFKTHAHKKDLKKWYIVYSIVLYAFVKVSYILMKSIHTMNSTGQHLAKFYLLIQELA

SEQ ID NO: 176515 - protein, 41 aa, Glycine max
  Clone ID: PAT_MRT3847_130410C.1.pep
EFHGRPTRPVFRYSEPREIQAVCTVTGAGLGNTWSLNFVHN

SEQ ID NO: 176516 - protein, 169 aa, Glycine max
  Clone ID: PAT_MRT3847_130411C.1.pep
MASFSITSSPPTLHKATITDPSSSSSHAFPHRSPFVLRMPHGSRRPQTPLVLPKIQSLRNETRAIPVTKDLWDNSILKSEIPVLVIFYANWCGPCRMVHRIIDEIATEYAGKLKCFIVNTDTDMQIAEDYEIKAVPVVLMFKNGKKCDSVIGTMPKEFYVAAIEGVLKP

SEQ ID NO: 176517 - protein, 76 aa, Glycine max
  unsure (1)..(76): unsure at all Xaa locations
  Clone ID: PAT_MRT3847_130412C.1.pep
FGFLLPFSSVLCXXSRFXCLXSRPFVPRGPXSSLAVAXALVLPPSGVFXVSVXLLVFLFALSALPACAPLSXLSSP

SEQ ID NO: 176518 - protein, 89 aa, Glycine max
  Clone ID: PAT_MRT3847_130413C.1.pep
SVATIIGKPPAFVMIVLKGSVPIPFGGNATPPAYGELVSLGGFNPRVTQELSSAIASILETKLSGPQSRFFLKFFAPQGSPFGWKGFPF

SEQ ID NO: 176519 - protein, 57 aa, Glycine max
  Clone ID: PAT_MRT3847_130414C.1.pep
EKVFLILTSLSLLPEQESDSGVLFNVLHCIKAVADDGKLSLFIRCLLLFSIIVSFYL

SEQ ID NO: 176520 - protein, 225 aa, Glycine max
  Clone ID: PAT_MRT3847_130415C.1.pep
EGEKQGICHRIQRRTRTQAIKQKEDWDDSTVSSYVSKMRMQNRMEASTRRERALAYAFSQQLRICSKRRSPKFNRMESNMSWSWLERWMATRLPETSSVESHAMKQYDPSNGSHKFTIMTRFLDAAGEEKESCGSNEVPLHFDNYSINSREEKFSFKPHTPKTNFKARRTVSRRKTVPSYQFHEEQPKVSKRDGSGNASKEIKQKQKQVGNRDEITLSTSKASNV

SEQ ID NO: 176521 - protein, 90 aa, Glycine max
  Clone ID: PAT_MRT3847_130416C.1.pep
PARCQRNRTAARPPAASDCTAAPAEEVKQERHLVLAHKLSLLSHSSVDDLSKVALRAAVLDTVKSDDMATLFESLFAGGVLDGDAACWPT

SEQ ID NO: 176522 - protein, 329 aa, Glycine max
  unsure (1)..(329): unsure at all Xaa locations
  Clone ID: PAT_MRT3847_130417C.1.pep
MGGSSEDFSVVVLASDLGVDARPFLEHDQQQEEENWHDCSQYLSPDEDFSDLDQLQFLRLQGSDKNSNRILRIVGKYFPATVVSAERLKRYVFNKIIRCRNRMITNTSLSEKRHDTTQHKLYSFFFASSVQHPRLKMIDLARVQKELVECSKDAEGSGIKVCPKSDNLVLLIGTIPGPVGTPYEGGIFQIDITLPDGYPFEPPKMKFKTKVWHPNISSQSGAICLDILKDQWSPALTLKTALLSVQALLSAPQPDDPQVSVVAQQXYLKDYQTFVXTARYWTESFAKASSRXIEDKVEKLVAMGFPDALVSSILEAVSGHEKLHSKKLL

SEQ ID NO: 176523 - protein, 61 aa, Glycine max
  Clone ID: PAT_MRT3847_130418C.1.pep
SASCHLGASLSLITVTLTVESHYSFNCCVIPGSRKTLLPCIVHGLSLWTLLDYLNFLMPVT

SEQ ID NO: 176524 - protein, 109 aa, Glycine max
  Clone ID: PAT_MRT3847_130419C.1.pep
SFCYQLGGRFLHWSNLLTNLLSLLPYFLVHFSVLFTFSFLLSFRASDKADDGSHLYYIVYDFGLDLLFFLISYQLIYHRCSAYWGQCDVNWYICLYKCPSENHLENLLL

SEQ ID NO: 176525 - protein, 45 aa, Glycine max
  Clone ID: PAT_MRT3847_13041C.1.pep
IVRVSDHFNKTKPAMMLRYRRRLFHLFKRVLNVCVLKTKRKKTPQ

SEQ ID NO: 176526 - protein, 49 aa, Glycine max
  unsure (1)..(49): unsure at all Xaa locations
  Clone ID: PAT_MRT3847_130420C.1.pep
VDMXGTHGSYVVSRVTTATIIEIVRSSXNYPDFMSIINRIYLKIFMETR

SEQ ID NO: 176527 - protein, 495 aa, Glycine max
  Clone ID: PAT_MRT3847_130421C.1.pep
MAVASSSSLITLKVKPCIFGSPRRSAVVRNCAKSTAGTISTSWSLDSWRAKKALQLPEYPDANELDLVLQTLSSFPPIVFAGEARNLEEKLAQAAMGNAFLLQGGDCAESFKEFTANNIRDTFRVILQMGVVLMFGGQMPVIKVGRMAGQFAKPRSDSFEEKNGVTLPSYRGDNVNGDAFDAASRIPDPQRMIRAYCQSVSTLNLLRAFATGGYAAMQRVNQWNLDFMEHSEQGDRYRELAHRVDEALGFMNVAGLTADHPIMSTTDFWTSHECLLLPYEQALTREDSTTGLHYDCSAHMLWVGERTRQLDGAHVEFLRGVANPLGIKVSDKMVPDELVKLIDILNPKNKPGRITVIVRMGAENMRVKLPHLIRAVRRAGQIVTWVSDPMHGNTIKAPSGLKTRSFDAIRAELRAFFDVHDQEGSYPGGVHLEMTGQNVTECVGGSRTITYDDLSSRYHTHCDPRLNASQSLELAFNIADRLRKRRLNSTRSLGI

SEQ ID NO: 176528 - protein, 86 aa, Glycine max
  Clone ID: PAT_MRT3847_130422C.1.pep
KSFWLFVNSWAEISRGSLKISKFPSLKRCFLDGVDRPIRFLFTKELEKEPSKNLQPQTRPVRVFHFTKEKIADLKSKANAEANTDK

SEQ ID NO: 176529 - protein, 130 aa, Glycine max
  unsure (1)..(130): unsure at all Xaa locations
  Clone ID: PAT_MRT3847_130423C.1.pep
GSSSSRIGWRQHRPHEEEEEDEDEKPQCKGKDRHCPRSRGSQSISRRNWLDETICTMRLXHNIWQTLSPDFYHPQAGCVTTGTSLDFPALSRLRLSAELGCLRMNAMFVSHYNLSANSIIYALNGQSWIQ

SEQ ID NO: 176530 - protein, 83 aa, Glycine max
  unsure (1)..(83): unsure at all Xaa locations
  Clone ID: PAT_MRT3847_130424C.1.pep
SLSPIDKRECFFFQEQDSSLXTVSGYDAEGGVVKVGKEEKKIKVGDERNGDNKGKALEXPKEIGSLGEYTAAEKRLWGKKVKK

SEQ ID NO: 176531 - protein, 63 aa, Glycine max
  unsure (1)..(63): unsure at all Xaa locations
  Clone ID: PAT_MRT3847_130425C.1.pep
SRGKGISSSALPYKRTPPSWLKISSQDXVEDNIWNFWKDVTPSEIGVILRRSHGTELFQASLA

SEQ ID NO: 176532 - protein, 44 aa, Glycine max
  Clone ID: PAT_MRT3847_130426C.1.pep
EHVVTNRHIYIVTGIYLRVVMELLFYSMDKIRRDRVLQSCLPLR

SEQ ID NO: 176533 - protein, 62 aa, Glycine max
  unsure (1)..(62): unsure at all Xaa locations
  Clone ID: PAT_MRT3847_130427C.1.pep
LAVXCYCSSLALGLCVRVPFRLTGWLLLFGLTASSSVSPSLLFLLWGSWSFWGWGWLSVLLS

SEQ ID NO: 176534 - protein, 161 aa, Glycine max
  Clone ID: PAT_MRT3847_130428C.1.pep
HSATKSLHLISFSSCTVITFVFSMAKIWIEVCLISARGVRGSPSLWKRQWYAVGWVDPKSKYCTKVDASGNANPVWRTKFALQVDNSEPDLALHVEVYSRDPVFLTEKLHGSATVVLREVLTNEVHNNSEEVGSYQVRKSRSNKPSGFVDVSIRVSEDKEE

SEQ ID NO: 176535 - protein, 205 aa, Glycine max
  Clone ID: PAT_MRT3847_130429C.1.pep
MNKYNLIGDLPKKSWPKKLKQMKQFWLGQRLKASRAYLKTLFNKSGCSDKFCASAAASNNIGAEKKSSRCKECQNKYMKVARRNPFESFYDGKHQVTCSIMKSIKREMLEVEDDFCDHRRSFSGVGQRHCSTKASSLSTSSSGSSSSSSSFSFSSAGYYDLQLFKRSISANYELESSIEGAIAHCKQSLQQCGSKNGSDDSRICS

SEQ ID NO: 176536 - protein, 162 aa, Glycine max
  unsure (1)..(162): unsure at all Xaa locations
  Clone ID: PAT_MRT3847_13042C.1.pep
GSSGRLIKVRDGGTDWGWGVAVNVVKKPSGGGYIVDTLLHCSPVSNENSFRSKPCPPXPVEKGEMHVASVQLPLISALGQLRVSIPSDLRPLEARQSILLAXQELGNRFSQGLPKLNPVKDMDVRDSEIAELVNQVDELEIKLTTRPMHKHQDMDQIRCFER

SEQ ID NO: 176537 - protein, 165 aa, Glycine max
  Clone ID: PAT_MRT3847_130430C.1.pep
MAATNAGLAAADSASADEAAAKTAQKRYEGLLMVRNKAIKGKGAWYWTHLEPLLVHNTETGLPKAVKLRCTLCDAVFSASNPSRTASEHLKRGTCPNFNSAAKPISSVSPVLLPSSTSPPPSASPFNHRKRTTTSPSASGSGSGSLYHAPSRFGSSLIPQQQHLM

SEQ ID NO: 176538 - protein, 44 aa, Glycine max
  Clone ID: PAT_MRT3847_130431C.1.pep
FLDKSFFIHLLWWVANDQNEGEKDLPLLHAINRNYFHVIMDPTT

SEQ ID NO: 176539 - protein, 60 aa, Glycine max
  Clone ID: PAT_MRT3847_130432C.1.pep
VTFYKNEVLLQGKKNLATTDGSERVAQAMASNSGLRGSSQDVLEGSPHVSGSTRLNVGSG

SEQ ID NO: 176540 - protein, 60 aa, Glycine max
  Clone ID: PAT_MRT3847_130433C.1.pep
NIFHFHHIIHPIPISPTMTFVIPFYPKPFHSTVDRIHKTQNHLIFSFPLILFAASRTCSI

SEQ ID NO: 176541 - protein, 106 aa, Glycine max
  Clone ID: PAT_MRT3847_130434C.1.pep
TCKPCTYNFMKFYLILLPVCLNNMESLFAGRQQTGTKLAEFCAHALLTLEVLIHPRALPMVDYAYANNSSFGEAHSNLQHEYFGWSNSTPYGLPQDPPDYDDDLCA

SEQ ID NO: 176542 - protein, 121 aa, Glycine max
  Clone ID: PAT_MRT3847_130435C.1.pep
LREDDRRGRKRMDNITASEVAGFGVGAVLLCATVAATKVDAFFSSSQRSSLGMCKRCGNLRRLACSTCKGTGSIREGGILGIKLVEDLFETIGNSEPKVKQIACVKCQAKGYFSCPNCSEL

SEQ ID NO: 176543 - protein, 117 aa, Glycine max
  Clone ID: PAT_MRT3847_130436C.1.pep
ISLFFTIKDPGFYCHAQPHYFGRPKLKGGGTKSFFFWPKALSKKTLGLCPLFWFGAGFFFFPFLPRSKKFIIGGFGGNFGAGPVKLIWGFGKAFFWEPNPLGRGVTFGTKKKVFFFV

SEQ ID NO: 176544 - protein, 34 aa, Glycine max
  Clone ID: PAT_MRT3847_130437C.1.pep
SALHSSFSDASSQSPSTSCQLFLVQYSPPVSIVQ

SEQ ID NO: 176545 - protein, 52 aa, Glycine max
  Clone ID: PAT_MRT3847_130438C.1.pep
LVHIQRTHKHAPYLTSNPTSENYLLQDKLFSMFMHIPPNLQQNTHDQRLNSM

SEQ ID NO: 176546 - protein, 142 aa, Glycine max
  unsure (1)..(142): unsure at all Xaa locations
  Clone ID: PAT_MRT3847_130439C.1.pep
ASSQEEGTLLGSYLEAHCECKGHMRPQARKENNSLLXXKIXXRNKRERVIKXNPGHKKGPARIHTEKPLAESLVIVEYIDETWKNNPIEPSDPYQRALARFWSKFIDDKVLGAAXKSVCTADEKEREKNVEEAIEASQVLEN

SEQ ID NO: 176547 - protein, 326 aa, Glycine max
  Clone ID: PAT_MRT3847_13043C.1.pep
MMMEMAKRNAVVAALAALVLLAASVAVDAQENSDVKTLVKYKHGKKYCDKGWECKGWSIYCCNLTITDYFQTYQFENLFSKRNSPVAHAVGFWDYHSFIAAAALFEPEGFGTTGNKTMQMMEIAAFFGHVGSKTSCGYGVATGGPLAWGLCYNHEMSPMQSYCDDYFKLTYPCTPGADYYGRGAIPIFWNYNYGAVGEALKIDLLSHPEYIEQNATLAFQAAIWRWMTPMKKSQPSAHDAFVGSWKPTKNDTMENRVPGFGTTMNILYGDGVCGQGDVDSMNNIVSHYLYYLDLLGVGREQAGPHDILTCAEQVPFNPSSKPASSS

SEQ ID NO: 176548 - protein, 154 aa, Glycine max
  Clone ID: PAT_MRT3847_130440C.1.pep
AAYSKHASLGTLRKPGDALLNGQKQLVQPPPEWVRGNGLNEVVNLAEMLQLQSRDWFLGFVERLVSSDGNTIVRDNDQIAGMLTQLKSVNDWLDEIGSSKDEGESCEISAETIDRLRKKIYEYLLTHVESAAAALSGGSQSSPQVQTIQSKAKR

SEQ ID NO: 176549 - protein, 51 aa, Glycine max
  Clone ID: PAT_MRT3847_130441C.1.pep
LNFHFSCKLIIKTNISHHTNSNTSKIFCKHPNNQLYIFTPKPFFHLLKFQS

SEQ ID NO: 176550 - protein, 90 aa, Glycine max
  unsure (1)..(90): unsure at all Xaa locations
  Clone ID: PAT_MRT3847_130442C.1.pep
XXXXXPIXPXPXTXPFXSVSIGXXTXLHFWLQCYXMVVVXXPMAHXSXYTCGQVTNXLMQLXRLPPVXDXRRRRDAXTVXSSLNAADKTT

SEQ ID NO: 176551 - protein, 97 aa, Glycine max
  Clone ID: PAT_MRT3847_130443C.1.pep
CFFPKIFFFWPTPLGSKLFLACPRLVWSLLNPFWFPKGPPNFGLGPPPGPFPGPKFWPLKKGGLPTPGPKLGPPGPGPSPLGPPQKGSPLTPEKNPP

SEQ ID NO: 176552 - protein, 117 aa, Glycine max
  Clone ID: PAT_MRT3847_130444C.1.pep
MTSSEWRVERRQSSTNESPLSRDLEHATETGSLSIVVLGASGDLAKKKTFPALFNLYRQGFLLPDEVCIFGYATVALTGDELRYLLHGYSRGSKDGYSGHWVDGSHLWRLISYVCGS

SEQ ID NO: 176553 - protein, 168 aa, Glycine max
  unsure (1)..(168): unsure at all Xaa locations
  Clone ID: PAT_MRT3847_130445C.1.pep
MDVRGDGIFPDEVVIQILARLPVKSLFRVKVRASCNGLLCCSSIPDKGVFYVCNPVTREYRLLPKSRERHVTRFYPDGEATLVGLACDSAYRKFNVVLAGYHRMFGHRPDGSFICLVFDSELNKWRKFVSFQDDHFTHMNKNQVGFVNNALHWLTAXSTYILVLDLSC

SEQ ID NO: 176554 - protein, 359 aa, Glycine max
  unsure (1)..(359): unsure at all Xaa locations
  Clone ID: PAT_MRT3847_130446C.1.pep
MDVRGDGIFPDEVVIQILARLPVKSLFRFKTVCKLWYRLSLDKYFXSTLQVSRKNPMILVEISDSSESKTSLICVDNLRGVSEFSLNFLNDRVKVRASCNGLLCCSSIPDKGVFYVCNPVTREYRLLPKSRERHVTRFYPDGEATLVGLACDSAHRRFNVGLAGYHRMFGHRPDGSFKFLVFDSELNKWRKFVSFQDDHFTHMNKNQVVFVNNALHWLTASSTYILVLDLSCEVWRKMQLPYDLICGTGNRIYLLDFDGCLSVIKISEAWMNIWVLKDYWKDEWCMVDKVSLRCIRGMVPGIFPISQTGECVFLATHKQILVYHRKTQIWKEMYSVKYRSTLPLWFSAHAYRSTMFSCN

SEQ ID NO: 176555 - protein, 213 aa, Glycine max
  Clone ID: PAT_MRT3847_130447C.1.pep
MSSWRSLLLRIGDKSPEYGPSSDYKDHIDTCFGALRRELDHSQSEILEFLLMCAEQLPHKIPLYGTLIGLINLENEDFVKQLVEKTQSKFQDALDSGNCNGVRILMRLLTVMMSSKVLQPSSLVAVFETFLSSAATTVDDEKGNPLWQPCADFYITCILSCLPWGGAELTEQVPEDIERVMVGVKAYLSIRKHTSDTGLSFFENDDENGGRSY

SEQ ID NO: 176556 - protein, 101 aa, Glycine max
  Clone ID: PAT_MRT3847_130448C.1.pep
MDVRGDGIFPDEVVIQILARLPVKSLFRFKTVCKLWYRLSLDKYFIQLYNEVSRKNPMILVEISDSSESKTSLICVDKLRGVSEFSLNFLNDRVKVRASCN

SEQ ID NO: 176557 - protein, 106 aa, Glycine max
  Clone ID: PAT_MRT3847_130449C.1.pep
ILPPLQHSSPKFSAFASWQIVQQQLSFLNLQEAPLLGAFNPKKGDTVLCLFGADKSWYRAMVVNGPRGPVESPNDMFEVFYIDYGNQEEVPYSQLRPIDPSVSAAP

SEQ ID NO: 176558 - protein, 329 aa, Glycine max
  Clone ID: PAT_MRT3847_13044C.1.pep
MMETTAKRNAVVAPIAALLLVVLLAASVVVEAQENSDVKTLVKHMHGKKYCDKGWECKGWSIYCCNLTITDYFQTYQFENLFSKRNSPVAHAVGFWDYHSFIAAAALFEPQGFGTTGNKTMQMMEIAAFLGHVGSKTSCGYGVATGGPLAWGLCYNHEMSPMQSYCDDYFKLTYPCTPGAEYYGRGAIPIFWNYNYGAVGEALKIDLLSHPEYIEQNATLAFQAAIWRWMTPMKKSQPSAHDAFVGNWKPSKNDTMENRLPGFGTTMNILYGDGVCGQGDVDSMNNIVSHYQYYLDLLGVGREQAGPHEILTCAEQVPFNPSSKPASSS

SEQ ID NO: 176559 - protein, 65 aa, Glycine max
  Clone ID: PAT_MRT3847_130450C.1.pep
TKDLSSSWCRIRRVHYLVILAGVDPLILLLVGIGDSSFWMIWFRGKRIRAHGEQIGSVKEAQKKE

SEQ ID NO: 176560 - protein, 83 aa, Glycine max
  unsure (1)..(83): unsure at all Xaa locations
  Clone ID: PAT_MRT3847_130451C.1.pep
VPNDILIGGPDSLKVLQGLEANHARTMDEPVVDRTEILAAPDEPGTXLATIYAVISTPQGRFLYDLILYKPPTSDIKPDDTGT

SEQ ID NO: 176561 - protein, 50 aa, Glycine max
  Clone ID: PAT_MRT3847_130452C.1.pep
AVFSLKGRVYDFKRGLFVQTFIFSSPIRGFPPHGCHQNHPVYRGGFFFFF

SEQ ID NO: 176562 - protein, 91 aa, Glycine max
  Clone ID: PAT_MRT3847_130453C.1.pep
LCNCWPRSVERGNNGGLIMAFLLYKIKRRTFTKYKAHVFIHLERFSLRECHKLCREGRTTKNQIDQGDTEAWHFCASSYKMDMISIFMMKS

SEQ ID NO: 176563 - protein, 58 aa, Glycine max
  Clone ID: PAT_MRT3847_130454C.1.pep
DHSPFQCHLLFAHPSSSSHSRFGSSHSSHSPSGSTPATMTTVTPTPTPPSTLRARVLT

SEQ ID NO: 176564 - protein, 167 aa, Glycine max
  Clone ID: PAT_MRT3847_130455C.1.pep
NCCPKQGQIITIVITRQRSQSRTKLLGTQLKRVQLISRIKYSTFGYSTQTDPIQRQTLSFPWSTDLISHQFQDTRQSNLAFAVIDLQCIAIVHFPTSLFVVGCGKSNNVTPRVGTHMEKNRNFNVFIAETRVKDLIGNSVVVPAEEHGYAASEDVEARLLLLCNPIS

SEQ ID NO: 176565 - protein, 416 aa, Glycine max
  unsure (1)..(416): unsure at all Xaa locations
  Clone ID: PAT_MRT3847_130456C.1.pep
GNSGKVFKDVVSDSPMLESNSSFGSGSSVPPNLPPIKVHVEIEEQFAQLGVGQKQQEDEGFVAPVPVMEFSTNRLVSDDERSDHGVPLGHRKSPTPPLQPQPHQFQQKSPHGVVDLPSPDSLSSDSSLSNAMLRPKPAIYQDQVQIQYGSSQVPSNASVDPKLCVTDQQGWIQMQQHVQEAGYVLQPQFDQLPLPQQHQTQPPFAAAXPQQYIHNTHLIHHTLSGSVPIPAAPDPVCQQQLHTQHLHHLDQQYPVYYVQARQAQPYNLSVQLANAAESATTMPSSQSQNQPSSAAYNSTRNPNFEMAAGACRTAPATPQLVQVSSSKHQQQYVAHSQIYHRHPQSMPPKSAVPANYAYNYADPALAQVFYSQPLAPFMPSHYQTMTAASVMRTEVSAKLPSDSMKKPQQVTTSQPL

SEQ ID NO: 176566 - protein, 87 aa, Glycine max
  Clone ID: PAT_MRT3847_130457C.1.pep
CCRFWHLYHSDPFVDSYHSDPFFHLYQPFGRLGGRPGNPGNFPPGLPGLPILSIMRAIRTHGNNGHRCEMGKSAIRYTLYTPYASGA

SEQ ID NO: 176567 - protein, 43 aa, Glycine max
  Clone ID: PAT_MRT3847_130458C.1.pep
SHININKQPPLVYFSTFITWPTSAGLQFIKHHLFPICSLFHIN

SEQ ID NO: 176568 - protein, 116 aa, Glycine max
  unsure (1)..(116): unsure at all Xaa locations
  Clone ID: PAT_MRT3847_130459C.1.pep
RKKXEXXKEREKXQEERKXGDNRQRQKXXEGGEXPXVEREXEEXXXAGGGGRXAPPPXXRKXQERKEERKXXDKEKKXAKXTANRGXAGXAXEGKEAXXKXKPDKQXXEERRXXQG

SEQ ID NO: 176569 - protein, 237 aa, Glycine max
  unsure (1)..(237): unsure at all Xaa locations
  Clone ID: PAT_MRT3847_13045C.1.pep
MASQMSKKRKFVADGVFFAELNEVLTRELAEDGYSGVEVRVTPMRTEIIIRATRTQAVLGEKGRRIRELTSVVQKRFKFPENSVELYAEKVNNRGLXCAIAQAESLRYKLLGGXLAVRRACYGVLRFVMESGAKGCEVIVSGKLRAQRAKSMKFKDGYMISSGQPVKDYIDSAVRHVLLRQGVLGIKVKIMLDWDPKGKQGPKTPLPDLVTIHTPKEEEEYARPAAVLATDIEVPVA

SEQ ID NO: 176570 - protein, 68 aa, Glycine max
  Clone ID: PAT_MRT3847_130460C.1.pep
TQSSSILLCPSTLGMSLWNHQLIFVTSDEWAIWCSSRFNHTCGLICQPQEQYVDKDVFCSRALQNTLN

SEQ ID NO: 176571 - protein, 56 aa, Glycine max
  Clone ID: PAT_MRT3847_130461C.1.pep
PLGGLFCFDHPEHFKRGVNPYRVNLPPNRGGPFVGEIKNLSLIVPPNLGFLPLFSK

SEQ ID NO: 176572 - protein, 72 aa, Glycine max
  unsure (1)..(72): unsure at all Xaa locations
  Clone ID: PAT_MRT3847_130462C.1.pep
LVQSMAFMDPNESRXGEVVGETTLNICYTAIXSPEWXTVPGCDPKNAQRSHPNGGSCSTLRWMETGACMKTG

SEQ ID NO: 176573 - protein, 123 aa, Glycine max
  Clone ID: PAT_MRT3847_130463C.1.pep
ITSVAVSSSQLAKVKQFHPDLNRDANARTFSDAMIRRVIQAYRILSNCTPSELIESVSCIHYVTPSQRILLEELLDSTLEAPYDTSAEADLLYSLITKAKFENNRYQKPKKQPKSSSQHVDWF

SEQ ID NO: 176574 - protein, 56 aa, Glycine max
  Clone ID: PAT_MRT3847_130464C.1.pep
VVSDVNSPSQGSGKVIPLKMSTRQSDAREEAISGIVTSCADKTMEFVETIVLSIRR

SEQ ID NO: 176575 - protein, 161 aa, Glycine max
  unsure (1)..(161): unsure at all Xaa locations
  Clone ID: PAT_MRT3847_130465C.1.pep
QYIFGILTQSQGNPSVHFFGVYDGHGEYGGQCIYFVKDRLVENLARDIALLEDSVYAYTLAFLTTYDDLSNNEMDDSSIGTTALSALVIGITLYVANVGDSRAALAVMDGNRVAAEDXSSDQTLCXRDEYEIVXLCAARVLIVDLVRRHRDSHYYSWRDDE

SEQ ID NO: 176576 - protein, 64 aa, Glycine max
  Clone ID: PAT_MRT3847_130466C.1.pep
FILEEKIFINQIQWDFAIGNRPFQLFSECFVRKDLKKFIENFYVLFGGKFQKKKKGGVPLIFFS

SEQ ID NO: 176577 - protein, 160 aa, Glycine max
  Clone ID: PAT_MRT3847_130467C.1.pep
MGSEIYSEVHENPRAFFSSSSPILWILLSNTLGGLFHLECIIPNLGVLSLKDLDIEDLSSDSKEVNSNSKSSDDETNSHTSEGQTPPKPFHFPPPKLLRKKNLPKVKETEDSFDEAMKLPGEKKLKTKSKWLTNLLPQTKRLLSNNLKLCKLILFILMLT

SEQ ID NO: 176578 - protein, 162 aa, Glycine max
  unsure (1)..(162): unsure at all Xaa locations
  Clone ID: PAT_MRT3847_130468C.1.pep
MAWSPLLLTLLAHCTGSWAQSVLPQPPSVSGAPGQRVTIACSGSNSNIGAGHDVYWYQQLQEQPRKLVISAKNNRPSGVPDRFSASKSGTSASLAITGLQAEDEADYHCQPYDRILDGAIFGGGTKLTVLGQSKADPSGTLFPPSSDELQANXASLVCLISD

SEQ ID NO: 176579 - protein, 40 aa, Glycine max
  Clone ID: PAT_MRT3847_130469C.1.pep
IHRTTLHEYEVLIKGIISYATLIPHLILYQKLIKMDHIIL

SEQ ID NO: 176580 - protein, 59 aa, Glycine max
  Clone ID: PAT_MRT3847_13046C.1.pep
GVLRVFLGFSFGRWCCFGLPLVSPQFVLVCLSLREWLGTSRRCFYSAPRSVPLLWPCRS

SEQ ID NO: 176581 - protein, 374 aa, Glycine max
  unsure (1)..(374): unsure at all Xaa locations
  Clone ID: PAT_MRT3847_130470C.1.pep
MEEIEGVNCCSESESRSSSETRPPNPNPPSYRQCKLVRHASLQMNTKLSDVSAEPEHVTEDCQSDFFPMLRSGACTDIGFRSNMEDAYVCVDNFMEDYGLKNHIDGPSAFYGVFDGHGGKHAADFACLHLPKFIVDDKDFPRDIERIVASAFLQADNAFAEACSLDAALASGTTALATLVIGSFXCRLLVVANAGDCRAVLCRRGKAIEMSRDHKPGCNKEKKRIEASGGYVYDGYLNGQLNVARALGDWHMEGMKSKDGGPLTAEPELMTTKLTAEDEFLIIGCDGIWDVFRSQNAVDFARRRLQEHNDPAMCSKDLVDEALKRKSGDNLAAVVVCFQQQPPPNLVAPRSRVQRSFSAEGLKELQSFLDSLGN

SEQ ID NO: 176582 - protein, 122 aa, Glycine max
  Clone ID: PAT_MRT3847_130471C.1.pep
AGEISESVVEGETATTDPHMHRSLKGRQISMIAIAGTIGTGLFLGSGRALANGGPVGALIGYTVVGILVGCMMYSLGEMMVYDPSAGGFIEFSARYVDPAVGFAVGWQFWFQTAITAPVEVV

SEQ ID NO: 176583 - protein, 179 aa, Glycine max
  Clone ID: PAT_MRT3847_130472C.1.pep
NLKLNSIEQVTKAVSEEGSPLFHSLEKWNPRVRVGDRLTWVYVWGVPLQAWSSKHLRKITAAVGEFVDMDDEAEDRRRLDRARVLIKTSWMPQIQHTIDVAIGEETFKVTVTEECGGGDRSKYGSNTSVGGSSEEIDSDESYLDGTNLVAARLNNLETTLENLPEFVPLEDHGVLAERS

SEQ ID NO: 176584 - protein, 77 aa, Glycine max
  unsure (1)..(77): unsure at all Xaa locations
  Clone ID: PAT_MRT3847_130473C.1.pep
MEYSKEIHSNDNANGSLNHSRGCADPLNXGMAAEALTGTHLDEVKRMMYDYRNPVLNLCGKSHTVYKVAWVATRHHS

SEQ ID NO: 176585 - protein, 126 aa, Glycine max
  Clone ID: PAT_MRT3847_130474C.1.pep
MRIMQESQSFIIPTTILLLALCYTTSGQLSPIQPPTTSPSLPSPPLSQPSPPSPALHSPPATAPAPGFNTVPLVPVTPSGAPTPTTIIPKGPTIDIVQILRKAKRFSVLTRLLKTTQLINQLTHSS

SEQ ID NO: 176586 - protein, 472 aa, Glycine max
  Clone ID: PAT_MRT3847_130475C.1.pep
MARLSSDQVLKDNNAADPTSVTTLHLTHKALSDITCLANFVNLEKLDLKLNNLTSLEGLRSCVNLKWLSVVENKLESLEGIQGLTKLTVLNAGKNKLKSIDQVMSVVSLRALILNENEISSICKLDQLKDLNTLVLSKNPIRKIGEALMKVKSITKLSLSYCELQGIGTSLKSCVELSELRLAHNEIKSLPAELKLNSKLRSLDLGNNVITRWSELKVLELLTNLRNLNLQGNPAATVNKVMRKIKKALSKLQIFNARPVDKDTENKKGSIVDGTRDFSVDQNENDHIEAADDLDSGRKSSKKRKRTVDASKKEDRVVDEENKGHKKDKADRKKESLITNVDPGMENKSTKKKAKKDDKPLDKGFALEENVSKVEKKLKKQHKNDEQSELDVIDDAEASFAELFKINDAENLNLADEMKAQDKAPKDVMKLAGDPVTSFAKHKNAKIQNMESLSAPVAEIGMGGPSTWGDEL

SEQ ID NO: 176587 - protein, 79 aa, Glycine max
  unsure (1)..(79): unsure at all Xaa locations
  Clone ID: PAT_MRT3847_130476C.1.pep
NAEQGIXLVVYASDFVQHFGYGLSLLVSLYYSYSCFPVKCFKKLIRQRVHLGIQLGTFSISILHXNLYHSLTVKLTDMX

SEQ ID NO: 176588 - protein, 156 aa, Glycine max
  Clone ID: PAT_MRT3847_130477C.1.pep
TVIDRVLKELFIEGIQFSDFANSGHKISRAIKGAPLGSLFAQFCLHSLWFGNCNIRAIAVLWIEFVREVRWCWEESQLLPRMPANGSIDLSTCLINQKLQMLAICIERKCQLSEDYQDCIGSLDQIDSMSEEESVVGDDSFSLQTPSEEFSGKVDR

SEQ ID NO: 176589 - protein, 138 aa, Glycine max
  Clone ID: PAT_MRT3847_130478C.1.pep
MSIVPINQGHSQDSWDQFIDFPLPPSISSFFPGFEFGFGSSVVNTRVDWRETPRAHVWKVVLPGFTNEDVLVELQDQRVLQVSVESGNFLTRFKIPDNGNLEQLKTNMRHGILLVTVPKFHQPTSNRNVRVVEIEGTD

SEQ ID NO: 176590 - protein, 55 aa, Glycine max
  Clone ID: PAT_MRT3847_130479C.1.pep
FSSYLHLLRSYFYFLLYIFSQSDIYPLTPFTVWAMFLEYLNTCTSTSSIIVLKYL

SEQ ID NO: 176591 - protein, 236 aa, Glycine max
  Clone ID: PAT_MRT3847_13047C.1.pep
MATQMSKKRKFVADGVFFAELNEVLTRELAEDGYSGVEVRVTPMRTEIIIRATRTQAVLGEKGRRIRELTSVVQKRFKFPENSVELYAEKVNNRGLCAIAQAESLRYKLLGGLAVRRACYGVLRFVMESGAKGCEVIVSGKLRAQRAKSMKFKDGYMISSGQPVKDYIDSAVRHVLLRQGVLGIKVKIMLDWDPKGKQGPKTPLPDLVTIHTPKEEEEYARPAAVLATNIEVPVAS

SEQ ID NO: 176592 - protein, 97 aa, Glycine max
  Clone ID: PAT_MRT3847_130480C.1.pep
LCGCYQNYSSWSSETQNSADREIKPYNGRFLGAGVPDDDGLLGLPSWAETLLSQRAGLVSASFRLIPLEPVHMYCIDCMSSASWLLWLAYHKDIRAI

SEQ ID NO: 176593 - protein, 300 aa, Glycine max
  Clone ID: PAT_MRT3847_130481C.1.pep
LARSKSDVQSCAHQEMATAEAEIADMRQKLEDSKRQMCDLSDVLKSKNKQNENYMSEIESIGQAYDDMQTQNQHLLQQITERDDYNIKLVLEGVRARQKQDSLLMEKRVIEHEIQQANISLNVYDVKATRIEDQLKFCLDQLQKLAEDKLQSSVTLENTQRRLSNVRRQSQQVTDMVVEMQSKIGSNRVTRMELQVELEKERFAKKRVEENLEVARRKFTCLKEQNEGFLVTEKLQQELEEYREIIKCSICQDRAKEVVITKCYHLFCYSCIQKVAGSRHRKCPQCGTSFGANDVKSVYL

SEQ ID NO: 176594 - protein, 73 aa, Glycine max
  Clone ID: PAT_MRT3847_130482C.1.pep
TPGGIKNQLQNPLAFLQVFQNGGLLPGAVLKNFTKFTRFFGLPYERRGVNPTPHGLWKPWKMIWGEKVKSPNK

SEQ ID NO: 176595 - protein, 348 aa, Glycine max
  Clone ID: PAT_MRT3847_130483C.1.pep
MKLEGNKVTFRHSNIGLEPESQAFVFIDDDQVSDGYKLQNQKVKEYENVVPAFLENNEQGLDSSQYNMESADCMKNEYEAKVKDIVEPVSHSTKDMESFMKFPNDIESVKRSLTSPISNPAEGRDLPRNSVDGYMDKTVTECEPHLEVCYKESNYHVVKDICVDEGVLNKDKVMFVNTVDEKAHNFFHSESYENKEKQKDNTSIKALSLTPTEEKAHNFFLSESYENKEKQKDNISINVLSLTPTEEKAHNFFPSESKEKQKDNTSINVLSLTPTEESDEVHANHDQPKGLMHKDGDATEKISGNVNKEMKPLPEDKVLLQDLLTEDSVSSDDKGEQISNEPELHSQS

SEQ ID NO: 176596 - protein, 57 aa, Glycine max
  Clone ID: PAT_MRT3847_130484C.1.pep
FNVLSYDSFYLSFILRYCHKIYESFSLVFIIIMVSSVLLIHFYILLKFNYAAGLEFP

SEQ ID NO: 176597 - protein, 97 aa, Glycine max
  Clone ID: PAT_MRT3847_130485C.1.pep
GEKNPGALKTMKAPLTFLGFLGPPEKKRGGTPSGAWKTLPRKGGIKNGGGKGGRKGKKKKGWGLQRKTPQGELFLLGWLKKAWKPSGGPFSGGAPLS

SEQ ID NO: 176598 - protein, 59 aa, Glycine max
  unsure (1)..(59): unsure at all Xaa locations
  Clone ID: PAT_MRT3847_130486C.1.pep
LHFSQQHSNTAXDXKIGIGXNGFGRIGRLXARVXLQRNDVELVXVNXPFITTDXXTVRH

SEQ ID NO: 176599 - protein, 81 aa, Glycine max
  unsure (1)..(81): unsure at all Xaa locations
  Clone ID: PAT_MRT3847_130487C.1.pep
ALTRPKVCSTKAQFVSGKTFKYELMGAGTHSLXDFTDXDDLDPLTTIVAILIQRIXPNYNEVQAQMESSXLKLSVDDVETS

SEQ ID NO: 176600 - protein, 330 aa, Glycine max
  Clone ID: PAT_MRT3847_130488C.1.pep
MGSHLQLSFLVLVMVTLATFMIPTFAQLTPNYYDKVCPKALPIIKSIVKQAIIREKRIGASLLRLHFHDCFVNGCDGSVLLDDTPSFLGEKTALPNLNSIRGFEVVDEIKVAVDKACNRPVVSCADILAVAARDSVAILGGAQYWYQVLLGRRDAIYASKDAANANLPPPFFNFPQLLASFQSHGLDLKDLVVLSGGHTIGLAKCITFRDRIFNETHIDPNFAATLRDSCPRRSGDGDTNLTPLDASSPSQFDNTYYKALLHKKGLLHSDQELFKGGDDGGESDRLVQLYSYDPYAFARDFGVSMIKMGNLKPLTGYEGEIRYNCRKVNY

SEQ ID NO: 176601 - protein, 107 aa, Glycine max
  unsure (1)..(107): unsure at all Xaa locations
  Clone ID: PAT_MRT3847_130489C.1.pep
CYVGSHAKLDCRRLMDPITGYKWSVSNGSKKMRLKHIEIXAVTDASSKEEXEIDTETGGPVCLGMYQILDANQVRDDLLLAKECYNYQESLEIFPLSSFLMRHSTPT

SEQ ID NO: 176602 - protein, 236 aa, Glycine max
  Clone ID: PAT_MRT3847_13048C.1.pep
MATQMSKKRKFVADGVFFAELNEVLTRELAEDGYSGVEVRVTPMRTEIIIRATRTQAVLGEKGRRIRELTSVVQKRFKFPENSVELYAEKVNNRGLCAIAQAESLRYKLLGGLAVRRACYGVLRFVMESGAKGCEVIVSGKLRAQRAKSMKFKDGYMISSGQPVKDYIDSAVRHVLLRQGVLGIKVKIMLDWDPKGKQGPKTPLPDLVTIHTPKEEEEYNRPPAVLANDIEVVPVA

SEQ ID NO: 176603 - protein, 133 aa, Glycine max
  unsure (1)..(133): unsure at all Xaa locations
  Clone ID: PAT_MRT3847_130490C.1.pep
TLPESFQYDNLLSTTNRISPAARVFQTLLAFIPRVNRGIHSSMIPREGQPHQQQQQASSLEDALVNRSFRIDFFEAIVRTASLYNCLSETNLHATVPCLXFNTRGKIRDIYYTDDYLVFMTTDLHNTIDQNSC

SEQ ID NO: 176604 - protein, 59 aa, Glycine max
  Clone ID: PAT_MRT3847_130491C.1.pep
CQIPSRAKNFKAGHLILNKPVLAIQLYWEQSMLRLGPHRMQGENRRPYMFAAHTRCWEF

SEQ ID NO: 176605 - protein, 52 aa, Glycine max
  unsure (1)..(52): unsure at all Xaa locations
  Clone ID: PAT_MRT3847_130492C.1.pep
XFNSPMFASVLSWLDDVDXXXCTNLGSLCXXTSLPSSAXSICISLXFLXTLY

SEQ ID NO: 176606 - protein, 110 aa, Glycine max
  Clone ID: PAT_MRT3847_130493C.1.pep
AILHVISATTSHHHERQHHQNLPYSNNSLPVVRPDASAFQRYRQDLGSNMASNFRRQSLMKRSLVFFRNMNFMRMRERVQATSRPTNTQLHHMISERRRREKLNENFQAL

SEQ ID NO: 176607 - protein, 43 aa, Glycine max
  Clone ID: PAT_MRT3847_130494C.1.pep
ATTNVDNRTPRTKLLHTLLDTDSLPGTLNYNRSYFESECEDAI

SEQ ID NO: 176608 - protein, 68 aa, Glycine max
  Clone ID: PAT_MRT3847_130495C.1.pep
SRMLQLTLLIPVCYNLAEGSVVLDMVMVLASSAYPSHPNDLKSKYHGDIKFLPWVPFLFKSIGYEKTF

SEQ ID NO: 176609 - protein, 71 aa, Glycine max
  Clone ID: PAT_MRT3847_130496C.1.pep
TSHSRALLMLHPSLTLLLLLLLFHPNAGDPNDAKILRQLRNGLDNPEQLPWPDEGDDPCGWKYIFCDTTNA

SEQ ID NO: 176610 - protein, 125 aa, Glycine max
  Clone ID: PAT_MRT3847_130497C.1.pep
GVPNFCILFRVLQKISCQWHTWRRYIHFEPKPSHLVKKNLFFPRGTSFSACCGAGAGEGDSKGGVTSLTGFGETLLALKLFVSKEFVFEFDMMGSRSDLELDFLSQTLCFVFPSLFCSLSTGGLP

SEQ ID NO: 176611 - protein, 104 aa, Glycine max
  Clone ID: PAT_MRT3847_130498C.1.pep
ARGRKGQEQFTMRNELLENELVSNLSDDGSTEKGKFNSTTFVLNKKTHEHSTSLVIDDKTVDVTNVKSTSQSAENYGMFSSNQTHIQAEEHYTTHDGYGGTLLP

SEQ ID NO: 176612 - protein, 124 aa, Glycine max
  Clone ID: PAT_MRT3847_130499C.1.pep
SAANTARGGQQGHHVFFLAVFRPLERENGSFTVWQTRVLHNPLLRHLYVYVTTYTKELIRGRNGSRSLIYTWSQARDNMAEEDDEGQYPRSHIALLIHSYATCKPALISLGIHIEPLIIPNGHT

SEQ ID NO: 176613 - protein, 42 aa, Glycine max
  Clone ID: PAT_MRT3847_13049C.1.pep
PKIARTASGSGDQQTHRIDLRFEAKRMATSELMYEDKGQCTV

SEQ ID NO: 176614 - protein, 130 aa, Glycine max
  unsure (1)..(130): unsure at all Xaa locations
  Clone ID: PAT_MRT3847_1304C.1.pep
SLFLSNLKLVHYMKIPPLFMYSSHLIXTLLSYILNLSLSXFIFYIINYICIDHKLHHYTPFTYPNYILTFYASFIFPLILPNNLFLPHXLYINLLFLFLIXTFLPLPILFFIKIFPYNKFIPLINIPFIT

SEQ ID NO: 176615 - protein, 224 aa, Glycine max
  Clone ID: PAT_MRT3847_130500C.1.pep
PRVRQKISVLDSSNESQDYIDSLFKRCLLASDKTTNKDWKEMELRREEMSCKSGNVYWWVGRNITKALNCQVDVAQPEIPESNAPVAGGNISVDTSTPALANESDVSSPNSITHETQSLYNAATLNTRIVSPLCSDYFLQAVPDTCQILSSSICADYHINSLASYNSASNQCQHEIDDNKSLEIQRRHFLDIADDEPKVQTSATHLKPCNYQAKQETCFSGALA

SEQ ID NO: 176616 - protein, 129 aa, Glycine max
  unsure (1)..(129): unsure at all Xaa locations
  Clone ID: PAT_MRT3847_130501C.1.pep
KDFNTMAEAGGVGKNLTKELAVDVDDGTLEIHLYWAGKGTTAIPDRGVYGPLISAIEMIPNFENPSKGMSTGFIAGIVAASCGLVILTLILLWKMGSIRXERSDRLSXLELKTGDSNSRQTKAATNNFD

SEQ ID NO: 176617 - protein, 49 aa, Glycine max
  Clone ID: PAT_MRT3847_130502C.1.pep
NELTQFSTQVYIKKEKKNSFAFTSLKVFLIMAIAPYLLNCESSFYYNTA

SEQ ID NO: 176618 - protein, 67 aa, Glycine max
  Clone ID: PAT_MRT3847_130503C.1.pep
WEHRFLVCVFSVKIINFSRNTRSTLPLTGLPPSTDPCLTSSPTTSCSSTTTAITVLIPPKLALKPRQ

SEQ ID NO: 176619 - protein, 57 aa, Glycine max
  unsure (1)..(57): unsure at all Xaa locations
  Clone ID: PAT_MRT3847_130504C.1.pep
MRVFQQTAXEYIKGQRFLFPRSSNPVHVPCVKLTIIFLLVVLFRILPSIIYVWETAL

SEQ ID NO: 176620 - protein, 324 aa, Glycine max
  unsure (1)..(324): unsure at all Xaa locations
  Clone ID: PAT_MRT3847_130505C.1.pep
YDRFEDGRFQPRPGDRGGGGVRDRAPGDLGSVLFAIFGGVGIACLPLGLIFSFIRRPKAVITRSQYIKEATELGKKARELKKAAEALHQEDRXVSKGRKFRKNVKEVEKELFQLEEDVKLLEEVYPQGEKAETTWALTVLGYLAKFVLGILGLIVSVAWVAHIIIYLLIDPPLSPFLNEVFIKLDDDWGLLGTAAFAFFCFYLLLAVIAGAMMLGLRLVFITIHAMKWGXATLMNSFLFNVGLILLCPISVIQFCSTAFAYYAQATAAQEIFGHTLESLRGIKYLYKYNVFQIAFVVLAGLTFVYYAAFGWRRKKPSGRFQLST

SEQ ID NO: 176621 - protein, 508 aa, Glycine max
  unsure (1)..(508): unsure at all Xaa locations
  Clone ID: PAT_MRT3847_130506C.1.pep
MGDFNLALVIVAVVVCVIVFLVNVYLLVNYQHPDDANQAYFPKFVVVLGLSVAAISILMLPADVANRQACRHAIYNGACSLTLPMKDLWLAVYILDAVLVFFVIPFAMFFYEGDQDKSVGKRIKSALMWMVTTAIVCALVLGILYGLVGKVDFTIRHLSSSTTSFPSTWTFSSGQPCIGXAHQCSAFSASPSSEKTWTMRTTFPEYVVALATIVGSVLFAIFGGVGIACLPLGLIFSFIRRPKAVITRSQYIKEATELGKKARELKKAAEALHQEERSGSKGRKFRKNVKEVEKELFQLEEDVKLLEEMYPQGEKAETTWALTVLGYLAKFVLGILGLIVSVAWVAHIIIYLLIDPPLSPFLNEVFIKLDDVWGLLGTAAFAFFCFYLLLAVIAGAMMLGLRLVFITIHPMKWGATLMNSFLFNVGLILLCSISVIQFCSTAFAYYAQATAAQEIFGHTLESLRGIKYLYKYNVFQIAFVALAGLTFVYYAALGWRRKKPSGRFQLST

SEQ ID NO: 176622 - protein, 47 aa, Glycine max
  Clone ID: PAT_MRT3847_130507C.1.pep
SLRGIKYLYKYNVFQIAFVALAGLTFVYYAAFGWRRKKPSGRFQLSS

SEQ ID NO: 176623 - protein, 99 aa, Glycine max
  Clone ID: PAT_MRT3847_130508C.1.pep
MGDFNLALVIVAVVVCVIVFLVNVYLLVNYQHPDDANQAYFPKFVVVLGLSVAAISILILPADVANRQVPIVYMRYGVAWKSTFWSEPSGIPCIILECF

SEQ ID NO: 176624 - protein, 77 aa, Glycine max
  Clone ID: PAT_MRT3847_130509C.1.pep
GLSDSRAASFEYVLTLELERMKWRILSESPKPVIEVFKISFSSVKVLKSIVWMFKERKKLTTRYAYIIMDWSMMKLG

SEQ ID NO: 176625 - protein, 54 aa, Glycine max
  Clone ID: PAT_MRT3847_13050C.1.pep
KIINKLLLEWLPTLRLDQIKNANGLKKQHYPPVWKMESAEHLRTLKPLTQWPTN

SEQ ID NO: 176626 - protein, 35 aa, Glycine max
  Clone ID: PAT_MRT3847_130510C.1.pep
PKVESNTFSLPTFNQCGKGEASCSYSILLSSASSR

SEQ ID NO: 176627 - protein, 52 aa, Glycine max
  Clone ID: PAT_MRT3847_130511C.1.pep
IRRKNHVNHTRKTFNNVKSTIKWFSLKTKLPYHCHTLGRPTAGKFRSRKSNT

SEQ ID NO: 176628 - protein, 510 aa, Glycine max
  unsure (1)..(510): unsure at all Xaa locations
  Clone ID: PAT_MRT3847_130512C.1.pep
MGQKHLVTVFCLWALTCSLLPSFSFGILRIGLKKRPLDLDSINAARKAREGLRSVRPMMGAHDQFIGKSKGEDIVPLKNYLDAQYFGEIGIGTPPQPFTVVFDTGSSNLWVPSSKCYFTLACYTHNWYTAKKSKTHVKNGTSCKINYGTGSISGFFSQDNVKVGSAVGKYQDFNKASNEGSLTFLSAKNDGILGLGYREISVEIAVPIXFKMVEQKLISEKVFSFWLNGDPNAKKDGELVFGLVLTENTYKXNHTYVPITEKRYWLIEMGDFFVGCVSQVFVRDDCTAIVXSGTSLLACSNPVVXAEINHAIGAERVLSXDYGNVQVEYGEXLWDLLVSGVKPDDICSQVGLCSSKRHQSKSAGIEMVTEKEQGELSAKDTPLCSSCQMLVLWIQNQLKQKATKDRVFNYVNQLCESLPSPSGESVISCNSLSKMPNITFTIGNKPFVLTPEQYILRTGEGITEVCLSGFIAFDVPPPKGPLWILGDVFMRAYHTVFDYGNLQVGFAEAV

SEQ ID NO: 176629 - protein, 302 aa, Glycine max
  Clone ID: PAT_MRT3847_130513C.1.pep
MSNISMVEAKLPPGFRFHPRDEELVCDYLMKKVQHNDSLLLIDVDLNKCEPWDIPETACVGGKEWYFYTQRDRKYATGLRTNRATASGYWKATGKDRPILRKGTHVGMRKTLVFYQGRAPKGRKTEWVMHEFRIEGPHGPPKISSSKEDWVLCRVFYKNREVSAKPRMGSCYEDTGSSTLPALMDSYISFDQTQTHADEFEQVPCFSIFSQNQTSPIFNHMTTMEPKFPLNHATTTYGGAPNLGYCLDPLSCDRKMLKAVLNQITKMERNPLNQSLKGSPSLGEGSSESYLSEVGMPHVWNY

SEQ ID NO: 176630 - protein, 103 aa, Glycine max
  unsure (1)..(103): unsure at all Xaa locations
  Clone ID: PAT_MRT3847_130514C.1.pep
YVNQLCESLPSPXGESVISCNSLSKMPXTLPFTIGNKPFVLTPXEQYILKTGEGITEVCLSGFIAFDVPPPKGPLWILGDVFMRAYHTVFDYGNLQVGFAEAV

SEQ ID NO: 176631 - protein, 275 aa, Glycine max
  Clone ID: PAT_MRT3847_130515C.1.pep
MGQKHLVTVLCLWALTCSLLPSFSFGILRIGLKKRPLDIDSINAARKAREGLRSGRSMMGAHDQYIGKSKGEDLVPLKNYMDAQYFGEIGIGTPPQPFTVVFDTGSSNLWVPSSKCYFTLACYTHNWYTAKKSKTHAKNGTSCKISYGTGSISGFFSQDNVKVGSAVVKHQDFIEATHEGSLTFLSAKFDGILGLGFQEISVENSVPVWYKMVEQKLISEKVFSFWLNGDPNAKKGGELVFGGVDPKHFKGNHTYVPITEKGYWQIEIGDFFIGG

SEQ ID NO: 176632 - protein, 64 aa, Glycine max
  Clone ID: PAT_MRT3847_130516C.1.pep
MFFLCFQYILRTGEGITEVCLSGFIAFDVPPPKGPLWILGDVFMRAYHTVFDYGNLQVGFAEAV

SEQ ID NO: 176633 - protein, 66 aa, Glycine max
  Clone ID: PAT_MRT3847_130517C.1.pep
HYERRSRFRNTTIAPLEYGHLLHPNTLQHCLTLDQTLMRDWTHRQDLAARGQDRELMVPERESWVI

SEQ ID NO: 176634 - protein, 306 aa, Glycine max
  unsure (1)..(306): unsure at all Xaa locations
  Clone ID: PAT_MRT3847_130518C.1.pep
PRVRKIPPVLPSYXWAWYLALTQPMKALLQAKEDLKEVDKEITGGELADATNMSIIQVRKAIEVGRAARNKLIKHNLRLVLFVINKYFQDFASGPRFQDLCQAGVKGLITAIDRFEPKRRLQLSTYSLFWIRHSIVRSITLSSFTRVPFGLERVRVDIQRTKLKLTFELQRSPTEEELVERVHISLERYHDVMKASKSILSLNSRHITTQEEFINGIVDDDGVNGDNRKQPALLRLALDDVLDSLKPKESLVIRQRFGLDGKGDRTLGEIAGNLNISREMVRKHEVKALMKLKHSARLDYLRRYVV

SEQ ID NO: 176635 - protein, 507 aa, Glycine max
  unsure (1)..(507): unsure at all Xaa locations
  Clone ID: PAT_MRT3847_130519C.1.pep
MGVVTVSSSAARTPLGLNTKFCNNRLKRPLIVAFKGDKHNDSALVATQEKXLCPVETAKKKQKKRVGKTNELLKRERTSPCTLDVDYNEAAAKLENIYKLSPVSDTCNVEDIDSKIERVLRRRKKVSEERDXEIVIMWFRNQNKKGRPKRLSLDKRIALKNNAKEEVIDQTQKKRNVKNRVQNIDVLIRDYSASTDLVSMDWKKMKIPPVLPSSEHAWLFKLMQPMKALLQAKEDLQEVEKEITDGELADATNMSIIQVRKAIEVGRAARNKLIKHNLRLVLFVISKYFQDFASGPRFQDLCQAGVKGLITAIDRFEPKRRLQLSTYSLFWIRHSIVRSITLSSFTRVPFGLERVRVDIQRTKLKLTFELQRSPTEEELVERIGISLERYHEVMKASKPILSLHSRHITTQEEYINGITDVDGVNGDNRRQLAVLRLALDDVLDSLKPKESLVIRQRYGLDGKGDRTLGEIAGNLNISREIVRKHEVKALMKLKHPARLDYLRRYVV

SEQ ID NO: 176636 - protein, 73 aa, Glycine max
  Clone ID: PAT_MRT3847_13051C.1.pep
EFPKMIPYNTLYDNTDIHNQCRCKKRVTQHYTFLQWTQMIRDEQWLSACLIKLVWTSLSLCMKSYRRLAMVAL

SEQ ID NO: 176637 - protein, 151 aa, Glycine max
  Clone ID: PAT_MRT3847_130520C.1.pep
MGDGGVACMHLQYIMERLPSSEKTVCGGKSGNGFNSKLRKFAGNERRKMKPRKSELGLDRVSKRSSSSNDVENGGEVEKQQHEKVQKEEVEEGELGTLKWPRADLENGEFVPEMPPPPRRGEVENGEIVSEKWKGRELEKAEIGSGKWRKE

SEQ ID NO: 176638 - protein, 53 aa, Glycine max
  Clone ID: PAT_MRT3847_130521C.1.pep
FCSIDGGFHVPNMKVHFGICFFHEHVYFLCEPYVQRASLGSVRKWQSLLLNDC

SEQ ID NO: 176639 - protein, 82 aa, Glycine max
  unsure (1)..(82): unsure at all Xaa locations
  Clone ID: PAT_MRT3847_130522C.1.pep
MVINQASLWVGAVSNPIGNGFYQGPAKVSTQTAXACPWVYGKRAYPGYSGDLSVDFSAGPNYKAPGANGTKSLLPALDDPPG

SEQ ID NO: 176640 - protein, 85 aa, Glycine max
  unsure (1)..(85): unsure at all Xaa locations
  Clone ID: PAT_MRT3847_130523C.1.pep
PPGFKXGIHSPPPAVVPGGDFPKVQRAVCIISHSPRVGGVFFPLGPKFALMYPKRAFVPWYFGRGMEKGEFFXAREDLSPLEKDF

SEQ ID NO: 176641 - protein, 50 aa, Glycine max
  unsure (1)..(50): unsure at all Xaa locations
  Clone ID: PAT_MRT3847_130524C.1.pep
LSVVATDGKNKHIVDSHVAGSTRXQGFADLMPYVDPVGLSLSAVVNFDFM

SEQ ID NO: 176642 - protein, 66 aa, Glycine max
  unsure (1)..(66): unsure at all Xaa locations
  Clone ID: PAT_MRT3847_130525C.1.pep
AYSSLIFXXHALELEXVLESDASPFXXNAGFVSPSESPIKASVSTLSLSGXXGPGEGVTGSGEGGV

SEQ ID NO: 176643 - protein, 78 aa, Glycine max
  Clone ID: PAT_MRT3847_130526C.1.pep
YHKNVQFVFSDEFRSHFLWHQHRRNKTSHHSSSYMNIFASVSLENVLLKFHEKYRSHYIRLQDRPNNYTYNPNSYISI

SEQ ID NO: 176644 - protein, 39 aa, Glycine max
  Clone ID: PAT_MRT3847_130527C.1.pep
LTYVDACTMHIQNFGYDITYVFPIMLHSTFDLNQMLTTL

SEQ ID NO: 176645 - protein, 147 aa, Glycine max
  Clone ID: PAT_MRT3847_130528C.1.pep
TFETLHNLVHKGVKVVMDIPYELWNETSAEVADLKKQCDVLVEEFEEVIEDWYRNHQEEDLTEFLCANHVLKGKDTSCLAEQWSGKKGDTAALGGKKSKKKSSRAKAAGGRSSSSKPRKELGGPEGDPNPQEDEGLPKGFPFTHKPP

SEQ ID NO: 176646 - protein, 149 aa, Glycine max
  unsure (1)..(149): unsure at all Xaa locations
  Clone ID: PAT_MRT3847_130529C.1.pep
VTQGLSTYDYIIAMREQEQEQLGNGGQQSPQMSTVSSFTGLSSASSFTTLHRGAWCTPPRLLLQDQFDVVPPETASCSSVGKKTMREDPLKKKXSWEQFKISPWTLARLNAEGMSKAAAEARTESXVLQPVTRHGEAIRLEPRSSXSTV

SEQ ID NO: 176647 - protein, 49 aa, Glycine max
  Clone ID: PAT_MRT3847_13052C.1.pep
CNLTYSFHICRTLEHSHFKCSIVGFMIISILVGLKMFFPFTCKLFHLFN

SEQ ID NO: 176648 - protein, 138 aa, Glycine max
  Clone ID: PAT_MRT3847_130530C.1.pep
CSRCPILPKTQDADNKLFKGSAMTKRGAFVAVSYMSCAVLLVIWYVPSLHLYLLRCWRMISFSTGEPLHISENSSKFVSLKTLKHTLQFLRNLFYMLVTMESVRGDQSSNYLIVCSPIVFDELLAYLCKMWLLTSTVF

SEQ ID NO: 176649 - protein, 187 aa, Glycine max
  Clone ID: PAT_MRT3847_130531C.1.pep
MAAGSDGVDINDAASPKTTTSKRGRFTTSTESRRQTLTSSSSHTHTLPIELIQEILQRLPVKFLLQLRCVCKSWKSLISHPQFAKNHLHSSPTATRLIAGFTNPAREFILRAYPLSDVFNAVAVNATELRYPFNNRKCYDFIVGSCDGILCFAVDQRRALLWNPSIGKFKKLPPLDNERRNGRYTIH

SEQ ID NO: 176650 - protein, 69 aa, Glycine max
  Clone ID: PAT_MRT3847_130532C.1.pep
RSSLNLSLCTPEVKVDLFLDEEYLTTGLMVPPEAGMGPGKATHRCHPSLALPARGPYWPIWTSTTVPPA

SEQ ID NO: 176651 - protein, 73 aa, Glycine max
  unsure (1)..(73): unsure at all Xaa locations
  Clone ID: PAT_MRT3847_130533C.1.pep
XLSSXWLLXLPXYFKLXLXPXGFCXSKXLXRHXXLKLTRRLXRDRAPGWRXNXAXKPFMXGGVGVGQPAMFGX

SEQ ID NO: 176652 - protein, 35 aa, Glycine max
  unsure (1)..(35): unsure at all Xaa locations
  Clone ID: PAT_MRT3847_130534C.1.pep
PGXTHASDESHIYPSLLEINIECAVLQENNVNYKK

SEQ ID NO: 176653 - protein, 36 aa, Glycine max
  Clone ID: PAT_MRT3847_130535C.1.pep
VRPCSWSANEVLAPASAHPPDVDIILKLSRIAYAYA

SEQ ID NO: 176654 - protein, 183 aa, Glycine max
  Clone ID: PAT_MRT3847_130536C.1.pep
MFYLITMTNNALLTTSSFSSAKFSLFRKPNTFTVNSNILCSESKLAHKLTNLTSEFTSLTQPIDRVKRLLHYASLLPPFADNERIPANRVGGCASQVWVVAEVDERRRMRFRADSDSEISKGFCWCLVWILDGAKPEEVLSVHRDDLANINVGLGMSLKAHSRTNTWHNVLFSMQTAAKGFLL

SEQ ID NO: 176655 - protein, 88 aa, Glycine max
  Clone ID: PAT_MRT3847_130537C.1.pep
IKNMYQKHGDYPLWQLVVMEPSRHSTTLDFPLGFRTLSWFYGSRITWYLAFKALWFCRYMSDFARNIGALFGTKWTFIKQFQGLGFLE

SEQ ID NO: 176656 - protein, 321 aa, Glycine max
  unsure (1)..(321): unsure at all Xaa locations
  Clone ID: PAT_MRT3847_130538C.1.pep
PVPAKNQVVASNLNSASLPFYPSGSSNKDNNLAQRREVQTGGSSRNISPVVVDEGFPVQQNNAQLRGKNVVDSISMAKLYIDESIPPPSVGKPGYSAVSASQXSSSQEEIERGASIPIQMNYQRAPSQNKGSPSQFQVIQTSSAPGRNSTSVQATAPQLGNRPDSGSQSSSPLETSMPISSHDSGEVDAASESGKVKGAMVGKGREGSQGAGRGSFIYGGAQVMGTTGNAAVSHGDPNFPAFLPVMQFGGQHPGGMGVPAVGMAFPGYVGQPQLGLGKSEMTWLPVLAGPAGALGATYPFLPVDGASSRQSGQASAMGTSS

SEQ ID NO: 176657 - protein, 104 aa, Glycine max
  Clone ID: PAT_MRT3847_130539C.1.pep
GSFQPGNFVYDAEDIPFGTLWWFFYAGISCLLVLFAGIMSGLTLGLMSLGLVDLEILQQSGSSTEKKQAAAILPVVQKQHQLLVTLLLCNACAMEVSVTSFLGN

SEQ ID NO: 176658 - protein, 65 aa, Glycine max
  Clone ID: PAT_MRT3847_13053C.1.pep
YTRLRSLRPSVSPPPLELAAAEPTLASAEAEKWRTTARYVPTVRSNVSVFLNCIIIPEKILALKP

SEQ ID NO: 176659 - protein, 64 aa, Glycine max
  Clone ID: PAT_MRT3847_130540C.1.pep
KKNHHESWEKEERNSITNVIKSCLVYTLQLRHECFASFHCSWRSRWRFICRMRCLFLLRMHCSS

SEQ ID NO: 176660 - protein, 143 aa, Glycine max
  Clone ID: PAT_MRT3847_130541C.1.pep
MRRTGFHRRQSGGGSGFKGMIVKLSVAAVVLLICTLSLFFSSTGTSSNLQSNYRSEIRLEELWSNADSGGWRPSSAPRTHWPPPSNESNGYLRVRCNGGLNQQRSAISNAGLAARIMNATLVLPELDANSLWHDDSRWHGIYD

SEQ ID NO: 176661 - protein, 109 aa, Glycine max
  unsure (1)..(109): unsure at all Xaa locations
  Clone ID: PAT_MRT3847_130542C.1.pep
MAAAPKPPNHFIILTPFSGLTSNPHATAPQSETCALEHSGGLGPCIDEYGAHXEQKSTVNSPNQAGYYNTTPKAFTLAEREGLQRSEQIYGWEWEDNTDNPCRENATSS

SEQ ID NO: 176662 - protein, 340 aa, Glycine max
  unsure (1)..(340): unsure at all Xaa locations
  Clone ID: PAT_MRT3847_130543C.1.pep
SYPFSDFVKQGSDAFDEGTICNSLRQRYXYATWKADGTRYMMLSTCDVCYLIDRKILIQRICKQYPYRYNKRGTPERNHHYTLLDGEMIIDTDPHTHKQERRYPIYDLMAINQVSLTELPFYERWKFLEKEVIEPRKXERTGLSRSINPYYRYDLEPFNVRRKGFLLVSTMSKKIRKFLSHLAHSYHVLVFQSXFEPFFSLTYSRFQEYICSNSNSVAFLXQVGAGDRPLLFLFERGRKKLMEENVIFKDASDISSYSGKIIECYWDSAEHHWVCMRIRIDKAAPNDINTYRKVMRSIKDNITEEVLLNEINQIIRLPLYADRIQRDIKAHQHMISSRRK

SEQ ID NO: 176663 - protein, 268 aa, Glycine max
  Clone ID: PAT_MRT3847_130544C.1.pep
ISLSLSSSLLSEAKTDKYRDLRALLQLLSSLCSKDMIDFSSDSIEAQGTNISQVVYFGLHMVTPLISMDLLKYPKLCHDYFSLLTHMLEVYPETFAQLNSEAFAHILGTLDFGLHHQDADVVSKCLRALQALASYHYKETGSGNIGLGAHTVGHKDSSGNVQEGLLNRFLRSLLQLLLFEDYSSDLISVAADALLPLILCEQGLYQRLGNELIERQPNATLKSRLANALHTLTSANQLSSSLDRINYQRFRKNLNSFLVQVRGFLRTM

SEQ ID NO: 176664 - protein, 86 aa, Glycine max
  Clone ID: PAT_MRT3847_130545C.1.pep
KLFGLSEAIAKAEKLSKDLSSNSVTKWLLRHILFCQVASLCRYTLLSLSLAGASISTAQARNSFRSRDVKVLNHSKVYANVSFEGS

SEQ ID NO: 176665 - protein, 62 aa, Glycine max
  Clone ID: PAT_MRT3847_130546C.1.pep
MGRGRVQLKRIENKINRQVTFSKRRAGLLKKAHEISVLCDAEVALIVFSHKGKLFEYATDSW

SEQ ID NO: 176666 - protein, 48 aa, Glycine max
  Clone ID: PAT_MRT3847_130547C.1.pep
LIICMGHAQVACPKVMGAIPHVKSCYEPGKCVAFSAWCVPLLSSSRNS

SEQ ID NO: 176667 - protein, 50 aa, Glycine max
  unsure (1)..(50): unsure at all Xaa locations
  Clone ID: PAT_MRT3847_130548C.1.pep
FXFSXXIHPPSYXCXDXNXFNXXGXHEESXAVXMKXXSLXKXXVVLIVRD

SEQ ID NO: 176668 - protein, 48 aa, Glycine max
  unsure (1)..(48): unsure at all Xaa locations
  Clone ID: PAT_MRT3847_130549C.1.pep
PQEVESIYETXEDSSGPGPLKIISGTILATILGTXFWKLFSFLRDAGN

SEQ ID NO: 176669 - protein, 53 aa, Glycine max
  Clone ID: PAT_MRT3847_13054C.1.pep
RLSNPLFRINSFSFSFIKYHNSFRLSAFIKQTLVKGNITMHNFRQSCWVNSNK

SEQ ID NO: 176670 - protein, 128 aa, Glycine max
  unsure (1)..(128): unsure at all Xaa locations
  Clone ID: PAT_MRT3847_130550C.1.pep
LSQWLSRFPPWLSCSTLLLFRSLHSPGVEEVLSGSPHRVADGDATSPGAFLGSSSHRSLSGIPWPRGSSPSYLCFWFKLPSSCSVGRFPSPPISSSVVFFGGHFCSVLCWCVCPQDSPLVMEQCXSVE

SEQ ID NO: 176671 - protein, 71 aa, Glycine max
  Clone ID: PAT_MRT3847_130551C.1.pep
ASSSSTSTLHHLYGCSTFTIRTIPTCACPRNSHITPHKSMVVVAWQWHSDTHPGDISHGFPTPSSPRRRST

SEQ ID NO: 176672 - protein, 149 aa, Glycine max
  unsure (1)..(149): unsure at all Xaa locations
  Clone ID: PAT_MRT3847_130552C.1.pep
LTFSTFAAGQSLGPSSLHSPFGLSLDASFLGTAAAPPPGRLGSDPPPGTASXPRLPYLDGILYLDYGFDSLWDFLTLLEQDDLIVPKWLTYREIITGHHAXLDASVALAPEILRXALLIPHETALPWFTTAVLPPARTYSYWTHSYTLF

SEQ ID NO: 176673 - protein, 50 aa, Glycine max
  Clone ID: PAT_MRT3847_130553C.1.pep
SVGIESLQIKIRLFNIYLVELISGVKKKFILNLINIFKLKCNIFFMISII

SEQ ID NO: 176674 - protein, 63 aa, Glycine max
  Clone ID: PAT_MRT3847_130554C.1.pep
LRATHSPTHYPYAITHLTSRPQCDHLDYTLTKRLPSRGLAASSGFPTSSLSLARSRIPHSLYY

SEQ ID NO: 176675 - protein, 270 aa, Glycine max
  Clone ID: PAT_MRT3847_130555C.1.pep
LEQEDKKALERLTKLKESALLEAERILRSALDRALVVEEVRNQNIDLKRQIEICQEENKLLEKNHRQKILEVEKLSQTIQELEEVILASGATANAVRDYQQQISELQEEKRTLERELARVKVSTNRIANAVANEWKDENHKVMPVRQWLEERRIMQAEIQRLKDKQAISERTAKAESQLKDKLKLRLKTLEEGLKHFSNNPITSNVSYASQKAEKSNILGFLTTSAGLRKRSTSQPRACTVGSSLVQTPNIKNNRGDIVAGNFRKLGEPL

SEQ ID NO: 176676 - protein, 66 aa, Glycine max
  Clone ID: PAT_MRT3847_130556C.1.pep
QSSSGRPCERTKLSPRVITILVEFCRTECQLFYSVCLGASGFSCSPREDRVHLVHLSSALLDIKRG

SEQ ID NO: 176677 - protein, 98 aa, Glycine max
  unsure (1)..(98): unsure at all Xaa locations
  Clone ID: PAT_MRT3847_130557C.1.pep
SCPRPHFHLSPRIIHLNLNFTNLSMFLNYHPPETHFLQNKPNGFRRKNQFLYISDQLQPTWAYRRILIMTXXINIYFSKKRKIARGGVFIPTSVILDS

SEQ ID NO: 176678 - protein, 59 aa, Glycine max
  Clone ID: PAT_MRT3847_130558C.1.pep
MLVWFDCSAAISRILGKVRLFNRGSHVHVLSLSLCSCLCCSICVNFYKRLMPPPPIFLL

SEQ ID NO: 176679 - protein, 66 aa, Glycine max
  Clone ID: PAT_MRT3847_130559C.1.pep
GPGCDIHPYCVLQYATFRCLCVCVRVVFGDGAGPSQISLYRHIFLAFRIVLINLFEMCMKGSSYKN

SEQ ID NO: 176680 - protein, 78 aa, Glycine max
  Clone ID: PAT_MRT3847_13055C.1.pep
TQQKIRAFAKEVRQNRRRVTPLQVVNRTAMLGQPPWTEQNGLKRETTPRGLMICYCCNRKRFYFNERVGRAGNSEPVL

SEQ ID NO: 176681 - protein, 209 aa, Glycine max
  Clone ID: PAT_MRT3847_130560C.1.pep
SLNFSSRGRAVPGCKNQSGSDEESGWTSYLEDFSKGIEPSYCSSLDGSSLLSDAASCAAWKFSHQNFKVSTAPNLPKKLSFKKARAKQISEDDPLEDTASSPVNSPKVRDLNPAEMSSRKVDDQLEGSMGKEFITSSEHYSDLKMDDNEHELKFNGKNIDCTDLKKRGLSLAPLSLLYIYIYIYIYIYIYIYTPPFLCVLLCGSSYGIV

SEQ ID NO: 176682 - protein, 131 aa, Glycine max
  Clone ID: PAT_MRT3847_130561C.1.pep
WAITNYTSGGTVEQIVYLVHCGIIEPLMNLLSAKDTKIIQVILDAISNIFQAAEKLGETEKLSIMIEECGGLDKIEALQRHENESVYKASLNLIEKYFSVEEEEDQNVVPETTSEGFAFQVQDGAPGTFNF

SEQ ID NO: 176683 - protein, 82 aa, Glycine max
  Clone ID: PAT_MRT3847_130562C.1.pep
MKSVECIFPQQSLFKTLPFKRRALNNGAPFQLSFSSSFACDFRLSFLCKNWKILVHASGRPFLNGGPNTRPFPRSFKMVWAT

SEQ ID NO: 176684 - protein, 85 aa, Glycine max
  Clone ID: PAT_MRT3847_130563C.1.pep
NIPPLLFWDMESSRSPLPRGPLIVVCGYSHYLFLVPWALILPMGLGVFPFPPLLSLYCPRGKCLGTQEPSGIPNFLCYRICYLLT

SEQ ID NO: 176685 - protein, 56 aa, Glycine max
  Clone ID: PAT_MRT3847_130564C.1.pep
GAGTEKTTEGRVVGVMTNWAGVSIGHDTQGGRDPNERKAKEEENNSGKEGPNGATR

SEQ ID NO: 176686 - protein, 41 aa, Glycine max
  Clone ID: PAT_MRT3847_130565C.1.pep
TMSGFFTRKTDIDINYMASHGLRVACMQAWTANDEFNSENS

SEQ ID NO: 176687 - protein, 100 aa, Glycine max
  unsure (1)..(100): unsure at all Xaa locations
  Clone ID: PAT_MRT3847_130566C.1.pep
LSFVRGLIRRIMDDNQRDQEADGADFATLEEEAAEXGGSTLGXVLKHLMTAYGKIHRRNLRIGYDATGTLHEAAGGELNQPGYLDFHTPPLIDRWHELPN

SEQ ID NO: 176688 - protein, 70 aa, Glycine max
  Clone ID: PAT_MRT3847_130567C.1.pep
MSITLHVSAATMPNPKVVWDMNICDQSAGRIMMELYAHVTHRTAENFRALCNGDNGLWRSDNPHQYNGSS

SEQ ID NO: 176689 - protein, 70 aa, Glycine max
  Clone ID: PAT_MRT3847_130568C.1.pep
KGTKSYHIISYDYHTLTLSFTSLPTLLPSPRTHSQHVTPKTMVQPLKFSMCSVHAPHLRRQEYSHGLRLS

SEQ ID NO: 176690 - protein, 60 aa, Glycine max
  Clone ID: PAT_MRT3847_130569C.1.pep
YGCEKTTEGGITLVYFETLKFAPLHVFCLLVSPIFVSRSIELEKRHESGFNQPFISVLKL

SEQ ID NO: 176691 - protein, 204 aa, Glycine max
  Clone ID: PAT_MRT3847_13056C.1.pep
MGSKGAKNLALSSALLLLLVGFATSDINQDKAECTDKLLGLAGCLSYVGGEAKVPTMDCCSGIKEVINKSKRCLCILIKDRDDPSLGLKINVTLALNLPDVCETPTNITQCVDLLHLAPKSQEAKVFEGFEKALTNKTSPSPVLSANNTTAKGTSTSANNNSGGGWGKRWLVAEVVLYCLFPLVIFCLSVCPSPAVCVINSPTN

SEQ ID NO: 176692 - protein, 163 aa, Glycine max
  unsure (1)..(163): unsure at all Xaa locations
  Clone ID: PAT_MRT3847_130570C.1.pep
LSTLTGKTITGQFGTWDTLNNVKALMHDKERIPPDQRRLIFAGLQLADGPSLAVYNLQKEPTLRLELHLRGGMQIFDKTLSGKTFPLEVHSSDTVDNXRLTFMTHXGFPTDQQTLIFAGKQLEDGRSLADYILHMEPTLHWGLRLRGGMQIVGETLSGKTFPL

SEQ ID NO: 176693 - protein, 129 aa, Glycine max
  Clone ID: PAT_MRT3847_130571C.1.pep
TAATLSHHNKLLCKRPLKYSRSIEPPRSSEGIWTTPVGRLGLLVRDRAVTSDHDSGHEKEDAYGGSVAAEEKPTNSATDTEKLKKALVDSVCGTHRGLRAARLTRAATGVLIAEFAAKNPNPGTTDAMT

SEQ ID NO: 176694 - protein, 119 aa, Glycine max
  unsure (1)..(119): unsure at all Xaa locations
  Clone ID: PAT_MRT3847_130572C.1.pep
MSRRPPLPRLLLNNVSCMRNAQQVLRHVNVSLHDGGALVLTGANGSGKTTFLRMLAGFSRPSAGEILWNGHDIQQSTIFHQYKLQLNWLSLXDAIDIRCQFLXNVQWVELLETRKEGYG

SEQ ID NO: 176695 - protein, 142 aa, Glycine max
  unsure (1)..(142): unsure at all Xaa locations
  Clone ID: PAT_MRT3847_130573C.1.pep
MGTIVEADNTYTKILGRWPVFYYGMGHMLNDITAACWFTYLLLFLTDIGLSPRNAAVVMLSGQVADGFVTIFVGELIDRFGHFKIWHGAGSLLVAISFSSVFGGWLPCKLFSSNSGTFETLSYSMYAAIFNVGWAATXVSHM

SEQ ID NO: 176696 - protein, 165 aa, Glycine max
  Clone ID: PAT_MRT3847_130574C.1.pep
MGTIVEADDTYTKILGRWPVFYYGMGHMLNDITAACWFTYLLLFLTDIGLSPRNAAAVMLSGQVADGFATILVGELIDRFGHFKIWHGAGSLLVAISFSSVFGGCLPCKLFSSNSCTFETVSYSVFAAIFNLGWAATQVSHMSMVSCITLNFSSRVALASCRIAF

SEQ ID NO: 176697 - protein, 152 aa, Glycine max
  unsure (1)..(152): unsure at all Xaa locations
  Clone ID: PAT_MRT3847_130575C.1.pep
TTKVYIVYYSTYRHVEKLPREIKKRTTSIKKVEAELITIPKTLPKEVLTKLKAPPKSNIPIITPNKLPKTNSFLFNFPTRFKSITTQFKAFFNPTKDLVHTLTLSRRTTEFFYSTXSQRENQXTTPLTSITQLIHHELICVPIIYTLRHNIF

SEQ ID NO: 176698 - protein, 102 aa, Glycine max
  unsure (1)..(102): unsure at all Xaa locations
  Clone ID: PAT_MRT3847_130576C.1.pep
KINSCFKKTSMKKPAFGRLKFYGTFINNAIDFNCNQLLDLKSLKKNVVCFYNLLRFLVKKLKKKNFFFFFLNSFCCYNILIIXIFKXXFXXXLIXFIXXIFK

SEQ ID NO: 176699 - protein, 154 aa, Glycine max
  unsure (1)..(154): unsure at all Xaa locations
  Clone ID: PAT_MRT3847_130577C.1.pep
FRSHSISAIRCVEFLSHSIRVQAFCSLSLSLSHSIPSKLGFLFPIQRTSPDSNSQDRXFLLXSASRFPRCRAXSKHXIEQAXSSRDAREHFRLGARFRRQGSEEQGGEWRRREEGFEFRGEAEAGFEGRARERGVFRRVRVVVEAAXRRRRRRG

SEQ ID NO: 176700 - protein, 79 aa, Glycine max
  unsure (1)..(79): unsure at all Xaa locations
  Clone ID: PAT_MRT3847_130578C.1.pep
LFFLRGPLTLKEKITFFLDISGQAVFGGNFEPTFTFSFFPWPFLSTFKGLDFLEPLGCNFFXLSPNLIYYGPILKLKSL

SEQ ID NO: 176701 - protein, 85 aa, Glycine max
  Clone ID: PAT_MRT3847_130579C.1.pep
SFNLTATLLQAKSHLKCRQNNVSLLNNLNQMSTIRKHATMALITHHLNLIFPPQSLLCFVLQQQPFQRCVLCAFLNHSKSYLTSS

SEQ ID NO: 176702 - protein, 28 aa, Glycine max
  Clone ID: PAT_MRT3847_13057C.1.pep
YTIHDSFRHPATKWLKNAATYRERTGRK

SEQ ID NO: 176703 - protein, 34 aa, Glycine max
  Clone ID: PAT_MRT3847_130580C.1.pep
SPQHQTHPVYTMTPIQTPYSLSFTTYLDLILHLH

SEQ ID NO: 176704 - protein, 65 aa, Glycine max
  Clone ID: PAT_MRT3847_130581C.1.pep
LPFFYFLFFIAYIYNDMHITRMEVIAVHTSHYNVYIYTGHNYIPLLRLSNHMTIYKAPPVARLTT

SEQ ID NO: 176705 - protein, 88 aa, Glycine max
  Clone ID: PAT_MRT3847_130582C.1.pep
MYFEFNSRCTCIAWVPGGDGSFVVSHTDGNLYVYEKNKDGAGDSSFPVVKDQTQFSVAHARYSKSNPIARWHICQCSINSISFPMGWA

SEQ ID NO: 176706 - protein, 141 aa, Glycine max
  unsure (1)..(141): unsure at all Xaa locations
  Clone ID: PAT_MRT3847_130583C.1.pep
QVLFNPQVQGARSIPVEESNLGKAQMGLXLKPKIPPPFKNLRANMDWVRCEKSRLWGQPQGFGFGTAIKNFFFGEGPKNSSSSLPLQXRNRVMPLRTLSNGFQNLVKFIQKMGPPLEKFRKGGLFLVHPKPLISPGKKIWS

SEQ ID NO: 176707 - protein, 78 aa, Glycine max
  unsure (1)..(78): unsure at all Xaa locations
  Clone ID: PAT_MRT3847_130584C.1.pep
XXXVSXLVTKXILXFFLQPSXATSXTPLXXXNLRETPRXXGSXXEGATSXFLFFXXXAXXXPXCXLXPXSXRLRVHSC

SEQ ID NO: 176708 - protein, 115 aa, Glycine max
  unsure (1)..(115): unsure at all Xaa locations
  Clone ID: PAT_MRT3847_130585C.1.pep
VGVGPALVLEIVIPLGLVYPXYPLPVAPKKGNLGIIAPLPIGFIVGAHILLGGAFSGAPHDPXAVPFGPAVVSWPVATXWIXWAGPXLLGGGIAGLISEVVFLTHPQEQLPRTDY

SEQ ID NO: 176709 - protein, 301 aa, Glycine max
  Clone ID: PAT_MRT3847_130586C.1.pep
MEKEASSTDDPSSFTLLVSCPSGLSPSQVSVAFSDAYDRIPHSDVILENTISEIWKQRSQKNNSLFNGKKFRYGGCVLHAKDGSDHECEPHLCLHLGLTDYRTFVGTNLSPLWERFLVPSEDDSVLCQHTFNPLGNGALVETNDNKILVLQRSDNVGEFPGHFVFPGGHPEPQEIGITSHQYNKELTESINTKVSQEMFDSIVREVVEEIGVPASSLSIPAFIGISRRNLNVRPAAFFFIKCGLDSKEVRQFYSSAQDGYESTQLYAVPMIEIENMTSRMPGCHRGGFALYKLMVDTRKIT

SEQ ID NO: 176710 - protein, 75 aa, Glycine max
  Clone ID: PAT_MRT3847_130587C.1.pep
STEHFDACKWTKSEPHSWELIFPIEVCGPNNGFEKWRFEWANQTSWPLRFLIGNSQQFSGFDIFLGIFQDFENGG

SEQ ID NO: 176711 - protein, 69 aa, Glycine max
  Clone ID: PAT_MRT3847_130588C.1.pep
KLFLLANPSIKEGILFPRRAQPEHAFHQVLNGLARKLPHDRSVFLKPGEKALNWTAGPLGDLKPLKLTI

SEQ ID NO: 176712 - protein, 97 aa, Glycine max
  unsure (1)..(97): unsure at all Xaa locations
  Clone ID: PAT_MRT3847_130589C.1.pep
TKHNISIIFFDQIEDYQRDEKXHKRPIFNWRMISIHSGTQIANSVLVYIQDNGGWTLEXALTTHGHLVIIKILEAGTPYYRHKVPAGRTVTRMARRG

SEQ ID NO: 176713 - protein, 49 aa, Glycine max
  Clone ID: PAT_MRT3847_13058C.1.pep
FFHQVVITPNRDHIYLFPKDRNSYRIFSCINIACAYFMPPGHLARQIDA

SEQ ID NO: 176714 - protein, 61 aa, Glycine max
  Clone ID: PAT_MRT3847_130590C.1.pep
KKKLVSKGLKRSKTLGKNWDQLPNRLNRCGKALLTLRNKKENTFCECFWFKNPVLCKIEFC

SEQ ID NO: 176715 - protein, 80 aa, Glycine max
  unsure (1)..(80): unsure at all Xaa locations
  Clone ID: PAT_MRT3847_130591C.1.pep
FGYLEKRKGTERARICIIGGTEYIGKLIVEASVKNGHPTFLWERENTVTKPGKSPLIDNLKGLGVXNIDLRDLYDHQKLE

SEQ ID NO: 176716 - protein, 99 aa, Glycine max
  unsure (1)..(99): unsure at all Xaa locations
  Clone ID: PAT_MRT3847_130592C.1.pep
LAFSIIQKGSTLHVIIRMWCGIQFRVKTLAGKTVVLXVECSTAIDNVKGNIQPKAWYPPMSNXRLLFSGKXLENGSPPAVFNFHKECARHLVLCVWGGF

SEQ ID NO: 176717 - protein, 93 aa, Glycine max
  unsure (1)..(93): unsure at all Xaa locations
  Clone ID: PAT_MRT3847_130593C.1.pep
EVILFQAQTPINYTYHHXSNLKPQHYTLYTIANLIIIYSNFHXXHQAPSPYGCIEVELLFSLKSINYDQFSFFQCKDRRALDSIQYQLFPMLL

SEQ ID NO: 176718 - protein, 60 aa, Glycine max
  Clone ID: PAT_MRT3847_130594C.1.pep
SFLMTNPPTHDFRASGPKIPLTIVTRTKIQKNLDTVTGGSCCDPPKINVLLNYLYGFTNP

SEQ ID NO: 176719 - protein, 112 aa, Glycine max
  unsure (1)..(112): unsure at all Xaa locations
  Clone ID: PAT_MRT3847_130595C.1.pep
SEGGEHEGVHAPAVMVVNIVDPFRPQERPAFYNKQFVPSMKGFITILTPKLHAKRLLLFQXRHQGAPKCLLSYTKGFQFXVGQSIQEDPCXAFALYIDGVADTTLLSFAYGL

SEQ ID NO: 176720 - protein, 93 aa, Glycine max
  unsure (1)..(93): unsure at all Xaa locations
  Clone ID: PAT_MRT3847_130596C.1.pep
MLNMSVELCRARPGTAYGVNKNEKGRVVPNHMSNKINMARSRGTSSRRLSMLQNFGSEEDMHATMADHGKKKRMIVIRXTGRRTRMLKQIHLD

SEQ ID NO: 176721 - protein, 88 aa, Glycine max
  Clone ID: PAT_MRT3847_130597C.1.pep
VLVAGGSEIIGLLGGPVGALPGNRLGPGLVAACGPEIDDHGVVALPTRTVRIRFKIGSGVGWFHLFTSPSFVLIPGLCPHSLLCTGPR

SEQ ID NO: 176722 - protein, 216 aa, Glycine max
  Clone ID: PAT_MRT3847_130598C.1.pep
MAATESTVTSNPSNRERPKPKPKLLVITGPTASGKSKLAVDLASHFPVELINADSMQVYRGLDVLTNKLPLSHQNGVPHHLLGTVSPNVEFTAKAFRDSAIPIIDDILARRVGGLIGGGTNYYIQALVSPFLLDDSAEDMDESCLGDPTGSGNNFIGENDCSNNSYDLLKDIDPVAANRIHPNNHRKINQYINLYNRTGVLSSNIFQERQQKKGSR

SEQ ID NO: 176723 - protein, 76 aa, Glycine max
  Clone ID: PAT_MRT3847_130599C.1.pep
MVGIGVPICVQCGNTSNPCRCKVVGPTLGFLAFAAAAVVEWPVGALVYCFRHTKGRKIMGHPATVIYPSVTNAIPI

SEQ ID NO: 176724 - protein, 107 aa, Glycine max
  Clone ID: PAT_MRT3847_13059C.1.pep
SFSLETHKPEKPITPTGVKSNGKSLFFHDLVNQGLNLIGKRCLHLVSDVSNRIGSKEEKPITIPELATVYLDREAKKSVSCPSLPPSPTPYRLYDSWGEETLLKRNL

SEQ ID NO: 176725 - protein, 38 aa, Glycine max
  Clone ID: PAT_MRT3847_1305C.1.pep
FVHNSIIVIMGSLTVTGENDDKLKRVSLPFVSTGHLIP

SEQ ID NO: 176726 - protein, 146 aa, Glycine max
  Clone ID: PAT_MRT3847_130600C.1.pep
SCRISARGRSNTRDLFQQPFRKRGPVKLSTYLEIYKCGDYVDIKANPSIHKGMPHKYYHGKTGRVWNVTPRAIGVQINKPVGNRIMKKRIHVRVEHLQKSACRTHFLERLVENEKYKALVRQGKAPRKSLKRDPGTPNPSKFVKGS

SEQ ID NO: 176727 - protein, 72 aa, Glycine max
  Clone ID: PAT_MRT3847_130601C.1.pep
VLLFCAFFSQAQPHWHKKCSTGLPSLKLQWFCTFPGFGLNVLRLFTSHDFDALYSSPFTLMFRVRQMIRFQP

SEQ ID NO: 176728 - protein, 49 aa, Glycine max
  Clone ID: PAT_MRT3847_130602C.1.pep
IKIQMREREREIICMDRLISGESGVFISNYYSIILIAAREKSNSVMARR

SEQ ID NO: 176729 - protein, 63 aa, Glycine max
  Clone ID: PAT_MRT3847_130603C.1.pep
SDIFSHNFIPKSRIDLHCQQLWIAKNMNLNNLINCVKKKKKKKKKKKKKKKKKKKKKKKKKKK

SEQ ID NO: 176730 - protein, 60 aa, Glycine max
  Clone ID: PAT_MRT3847_130604C.1.pep
SVVECHAEHHPVHLISVNIIIFHVLGDFTGGCMCPSCVKIRQSLSIQVGGSIRCYNPYTC

SEQ ID NO: 176731 - protein, 71 aa, Glycine max
  unsure (1)..(71): unsure at all Xaa locations
  Clone ID: PAT_MRT3847_130605C.1.pep
SHSYIRVPDYLVNIIIWFPSEAVHTVPSYSIPWSIFLHNRLLQLVNXXSLLXVHXITYHNVYXIISHIQSN

SEQ ID NO: 176732 - protein, 167 aa, Glycine max
  unsure (1)..(167): unsure at all Xaa locations
  Clone ID: PAT_MRT3847_130606C.1.pep
MGSDDNLKTWVSDKLMSLLGYSQPTVVQYMIGLSKQATSPAHLVGKLVEFGISSMDTHAFAEEIYSRVPHRSSGINQYQKPEREAAMLARKQKTYXSILKADDDSDDDYVDKSSVTTASSRRSDNHKKCFRKKTEVQDDQDDEGILRKEKERQVKRRTSPDEVSDSE

SEQ ID NO: 176733 - protein, 84 aa, Glycine max
  Clone ID: PAT_MRT3847_130607C.1.pep
RVPLFYFLVPHPDKMSKKAANFCLFGKKNSFFGEKMTNNMILNPFFIHHIFGLKLSKPKIKGLPKFFTFKSPKTVCGNKITLFT

SEQ ID NO: 176734 - protein, 57 aa, Glycine max
  Clone ID: PAT_MRT3847_130608C.1.pep
LVTLSAGESLSSPSMAFSNANGIYSTQKALSARFPAVSRPIQKYTGLVNTRPIQTTP

SEQ ID NO: 176735 - protein, 66 aa, Glycine max
  Clone ID: PAT_MRT3847_130609C.1.pep
TLGHPWSSKIIFRHVPNSLTCIGVRKLKPKIQDDGISKSQNKWECSFSSNKQSGVGGTNALENFHT

SEQ ID NO: 176736 - protein, 84 aa, Glycine max
  Clone ID: PAT_MRT3847_13060C.1.pep
EPIQAKLRLSRRSHPFLFAPKILFHNPNSKSKMEQPPKPETVTESHVPNGFSTTTTTVPNGSGSESQAPKEHTASSSSSTKKSV

SEQ ID NO: 176737 - protein, 103 aa, Glycine max
  Clone ID: PAT_MRT3847_130610C.1.pep
MDMSNPSVFVNAQLIPNFIGKKVRAVVQVSQCDGGVTTAKSTDDCQLTIKGLPQVPLMNYIEVIGIAETSLSISCDNWPMVDLRVCFSRYIKECRVSNWMGFV

SEQ ID NO: 176738 - protein, 133 aa, Glycine max
  Clone ID: PAT_MRT3847_130611C.1.pep
FFLLCRSIHVSKAVLYIGYMRLLVSLVSSLFFAYQYMMVVTGQLFSDHWINQVTARFMSQAMMSICLQVIVVVLMVHGVKAEKKSLLLPFIAYAAIALLAGSIKVMSDLGYLDTSVYKNNEAESRAAKVQFSH

SEQ ID NO: 176739 - protein, 103 aa, Glycine max
  unsure (1)..(103): unsure at all Xaa locations
  Clone ID: PAT_MRT3847_130612C.1.pep
NLAVFVNAQLIPTLIGKKVRPLVQVSQCDGGVATPKXPPDDCQYVMKGLPQVPLMNYIEVIGIAESNTSIDAEIWTDFGSTFDPFSYNQLCQLANGEFKGLFL

SEQ ID NO: 176740 - protein, 122 aa, Glycine max
  Clone ID: PAT_MRT3847_130613C.1.pep
CNLLAVLLPRFYWETPGITLLFPFLAPSHFTPFCLAGVARKGPPPIPFPNLFADWVAPCTPPLTPPYAVVTGSLPATFPIPLPPPYFPFFPFFFVPFSGFPRVALNRVFPWGFLLGAYWGLD

SEQ ID NO: 176741 - protein, 90 aa, Glycine max
  unsure (1)..(90): unsure at all Xaa locations
  Clone ID: PAT_MRT3847_130614C.1.pep
MDTSNPAVFVNAQLIPNFIGKKVRTVVQVSQCDGGXPQVPLMNYIEVIGIAESNNSIDAEIWTDFGSTFDTFSYNQLCQLANGEFKGLFL

SEQ ID NO: 176742 - protein, 200 aa, Glycine max
  Clone ID: PAT_MRT3847_130615C.1.pep
MTFQPVPTLLLLLLLASANSHFALAGKRKVHIPDELDDVFDDEEDDAWREWGKKPEPPFPSSDISKLDPSQIQQEMMKRHAGPVIGFVKLRPGSRRTPDMVAEFAMKWTHVLRTGAVGVRFMGVDLNTIMFNLESIKDLEELKEFVLDQSEAYEIKMGDQFFRRSGDPPLDEVIEKYNSEKAKADNADSEEIDPNVKTEL

SEQ ID NO: 176743 - protein, 40 aa, Glycine max
  unsure (1)..(40): unsure at all Xaa locations
  Clone ID: PAT_MRT3847_130616C.1.pep
KLTDDXEXHTPPXLMTSKEEKRKRXCGFXXSLGVXERXGQ

SEQ ID NO: 176744 - protein, 58 aa, Glycine max
  unsure (1)..(58): unsure at all Xaa locations
  Clone ID: PAT_MRT3847_130617C.1.pep
TKWTLDLXVCSLYDSFFVXLLKASSTMSSRANGSKELNAXHRKRLEGLLRLPXNMVLC

SEQ ID NO: 176745 - protein, 70 aa, Glycine max
  unsure (1)..(70): unsure at all Xaa locations
  Clone ID: PAT_MRT3847_130618C.1.pep
THPXHKXNXTGRKPSTQHKRDRQNQNTTDPPXLRQHNGQGQDKTRRRRQPRKERKKAKKLTSLVPPQLGG

SEQ ID NO: 176746 - protein, 55 aa, Glycine max
  Clone ID: PAT_MRT3847_130619C.1.pep
SYSYCCTTSVHVTCLDGLWNVNYLLTIAVLLGISMTTPGQCRLKNRSCCEADVDV

SEQ ID NO: 176747 - protein, 104 aa, Glycine max
  Clone ID: PAT_MRT3847_13061C.1.pep
NPKREKFIAFPDDGVPGGSDFCVDGRVVYKTRSARFGSNPLFHPCLITACPGVLFLAAIVAGSIHPILLFMFPPENQSSDLSKEHVICHRQSQSERGHPERRRR

SEQ ID NO: 176748 - protein, 120 aa, Glycine max
  unsure (1)..(120): unsure at all Xaa locations
  Clone ID: PAT_MRT3847_130620C.1.pep
LACAMNSSXRGRAKCDRDTICSQDWEXWNPACTXAMTMPFNPNPCSDAWSSEFMKRTGLHCDIICVTGWTGTPMQDGQDTMDRVTSSQECVPRTYSARNPHNPSGLNRTRGKLTHPQGTS

SEQ ID NO: 176749 - protein, 84 aa, Glycine max
  Clone ID: PAT_MRT3847_130621C.1.pep
LALGFGVGANILSGGPFYGGSINPGRGFGPAMVGWRWASPWFFWGGPFFGGALAALLFEYVMVPNKPPLPPPLGGEDYKFIWGL

SEQ ID NO: 176750 - protein, 89 aa, Glycine max
  unsure (1)..(89): unsure at all Xaa locations
  Clone ID: PAT_MRT3847_130622C.1.pep
XAXXLXXXTHFSTSXXAXTXXHSXTKXSVVGLTQCXXXXVHLXASXALAALAGSFRNHSYHRSRHFQVRXXTXTNTEQQKKKNELQQQT

SEQ ID NO: 176751 - protein, 78 aa, Glycine max
  Clone ID: PAT_MRT3847_130623C.1.pep
ETTSLVYKMEGGIFMHNLLFPISWGKGDQGGNSRLSWPKKLIGPRFTHRPHPRKLIPWPRKRMGQHNNWHFFPKNLGN

SEQ ID NO: 176752 - protein, 53 aa, Glycine max
  Clone ID: PAT_MRT3847_130624C.1.pep
LHRLFFPGQSQTGNKQNHACKSPMRANSRSFLPNREPKLPSKIAIILKSIIIT

SEQ ID NO: 176753 - protein, 41 aa, Glycine max
  Clone ID: PAT_MRT3847_130625C.1.pep
LLRRRQRGAAARSHQKGTAFRRRQKGTHSLVYSIAQHLLPT

SEQ ID NO: 176754 - protein, 82 aa, Glycine max
  unsure (1)..(82): unsure at all Xaa locations
  Clone ID: PAT_MRT3847_130626C.1.pep
MMEGKEKGHVKVDIIVHVNGHKDSTTGNITYHLIYILKRIIERVIERSDKMNTKTNKNAFKHDXLLAKLKAGLTRGITLDNA

SEQ ID NO: 176755 - protein, 58 aa, Glycine max
  unsure (1)..(58): unsure at all Xaa locations
  Clone ID: PAT_MRT3847_130627C.1.pep
MGRLEWASQISGAXGFLIDNSTQSTAFDIFLGVSQDFATGGKNFTPAFFVPQETAGFF

SEQ ID NO: 176756 - protein, 75 aa, Glycine max
  Clone ID: PAT_MRT3847_130628C.1.pep
SSEWGAQVSWHVRSRIGKPNQFAVCYSLLAVSHLFTNHGNIFKPAFFVTQAVASSFENAESSPGHGISVFLPRVV

SEQ ID NO: 176757 - protein, 68 aa, Glycine max
  Clone ID: PAT_MRT3847_130629C.1.pep
GWGNALYGEMPVPGAGAFPAGNFHVPSQNPKGEKGILVLICCPTQVIKPFVKKLDQNMHVSKASSLIN

SEQ ID NO: 176758 - protein, 71 aa, Glycine max
  Clone ID: PAT_MRT3847_13062C.1.pep
APEIKQHGHFHKNHPQSLNIDLTKKETPPTRNYKQRFKGFKHYPSKDEQGLIAHKPPVVTVFPQHQQNHHT

SEQ ID NO: 176759 - protein, 144 aa, Glycine max
  unsure (1)..(144): unsure at all Xaa locations
  Clone ID: PAT_MRT3847_130630C.1.pep
GSRGKRTCKICPQILDWNKAPTLLDALGQIREPERPFDKPVRLPLKDVYTSGCIGTVPVGRVETGVLKPGMVVTFAPAGLTTEDKSVERHHESVTEAHTGDNEGFNVKKXAVKDLQRGYVASXSKDDPXKEAANFTAHVIIMNH

SEQ ID NO: 176760 - protein, 284 aa, Glycine max
  unsure (1)..(284): unsure at all Xaa locations
  Clone ID: PAT_MRT3847_130631C.1.pep
ARDLKKLLKVVPVHACGWCSEIHVGPVGHPFKSCKGTQANIRKGLHEWTNAHVEDILIPIEAYHLFDRLGKRITHEERFSIPRIPAVVELCIQAGVEIPEFPTKRRRKPIIRIGRKEFIDADESDLPDKISEGPLKPLLAEIPDXLSIVPLAEETLQAWNXVRKGAKRLMRMYNVRVCGYCPEIHVGAQGLKAKNCEAHKHQQRNGQHGWQSAVLDDLIPPRFVWHVPDVNALLERELRNSYGQAHVEVEMCIQAGAALPEQYKSTMRLDVGIPSTLKEADMVV

SEQ ID NO: 176761 - protein, 95 aa, Glycine max
  Clone ID: PAT_MRT3847_130632C.1.pep
RFIYVNVYGIMQNIISNPSSFGVRVTNVGCCRVASNNGQSTCVPLQTPCLNRNEYLYWDASNPTETANTIIARRAYNAQSTSDAFPIDINRLAQI

SEQ ID NO: 176762 - protein, 206 aa, Glycine max
  Clone ID: PAT_MRT3847_130633C.1.pep
MGSNPSFVPEIGSDGLPRQSSVITYTEQIIEAEQLQLKKYIQENYTKIRDVERELANLGLEMKLTSGPKKAALEHMRKKIEASTEKIRVAKIQEEQARKVWESASKTVQEEEAIKQKLCEDLSKLDGRSSSLDSAIQGGSAGNVPYQNNGLKVPVTNEHKPQPPSEEGRNKKKVNYQRGKGIGAVPKTRSSTPDWTGAGFDVDGRT

SEQ ID NO: 176763 - protein, 65 aa, Glycine max
  Clone ID: PAT_MRT3847_130634C.1.pep
IARFGSTGEVVFYGYNKSWFLAPGFSFLGSLFFGHSFKFPPSFCNFCSQNWVFYSRWQNPLYHFV

SEQ ID NO: 176764 - protein, 82 aa, Glycine max
  Clone ID: PAT_MRT3847_130635C.1.pep
GLHKLTQNDRPDNLFVLDCLYKLVNRIFSYGRSDQFIKTSLEGAVRVWFKSFRRKLKKIYIFFFNFNLYQTWWKKLISTLTI

SEQ ID NO: 176765 - protein, 239 aa, Glycine max
  Clone ID: PAT_MRT3847_130636C.1.pep
MGSNPSFVPEIGSDGLPRQSSVITYTEQIIEAEQLQLKKYIQENYTKIRDVERELANLGLEMKLTSGPKKAALEHMRKKIEASTEKIRVAKIQEEQARKVWESASKTVQEEEAIKQKLCEDLSKLVEESNNSQLSRLEDLKRRLEAMNPNRSSTSLHSDGRSSSLDSAIQGGSAGNVPYQNNGLKVPVTNEHKPQPPSEEGRNKKKVNYQRGKGIGAVPKTRSSTPDWTGAGFDVDGRT

SEQ ID NO: 176766 - protein, 92 aa, Glycine max
  Clone ID: PAT_MRT3847_130637C.1.pep
CSTLKRCSIHPVVFWFRSQIRQGCFCNQSVPIFWVCFYGFIGQQRPSLVFLFSVIVLVSQHFLVYRDKIAILEGSLPLGKAMFCEYPWSENV

SEQ ID NO: 176767 - protein, 502 aa, Glycine max
  Clone ID: PAT_MRT3847_130638C.1.pep
RAASWWRSALLWRTFFTTAVVAIVLRVAIQFCATGKCGLFGEGGLIMYDVSSANITYSASGIFAVLLLGAIAGILGSIYNYLVDKVVRTYSIINGKGAFSKISLVVTIALLTSCCYYFLPWIAKCIRCPSNSTVICPSVDESGDYKSFQCPPGYYNDLASLFLNTNDDAIRNLFSPRIIKEFHITSLFIYFATIYCLGIITYGIAIPSGLFIPVILAGAAYGRLFGRLFETITELDRGLFALLGAASFLGGTMRMTVSICVILLELTNDLLLLPLVMLVLLVSKTVADSFNKGVYDQILKIKGLPYLEAHAEPYMRNLVTRDVVSGPLITFSGIEKVANILQALNTTGHNGFPVIDEPPFSDSPELCGLVLRSHLLVLLKEKIFSRDRGFANQRIFQRISTLDFGKAGSGKGIKLEDLDIQEEEMDMYVDLHPITNASPYTVVETMSLAKAAILFRQHGLRHMCVVPKSQGRPPVVGILTRHDFMPEHVLGLHPDIMPHKWK

SEQ ID NO: 176768 - protein, 103 aa, Glycine max
  unsure (1)..(103): unsure at all Xaa locations
  Clone ID: PAT_MRT3847_130639C.1.pep
PPPRCTPFFSPPSHPGQCCFFSPPPFFPPPFKSKNGYPPPPLFGMFSPPFAFVXXXTXFFRLQXNKSSGGPVICFYPKLVTNYYSFFGPKKKKKKKKKKKKKK

SEQ ID NO: 176769 - protein, 51 aa, Glycine max
  Clone ID: PAT_MRT3847_13063C.1.pep
HGHKINYPSYKLPCLATREGVAIRGYANLQLAKENRTWMPFLVDHTENLPY

SEQ ID NO: 176770 - protein, 124 aa, Glycine max
  Clone ID: PAT_MRT3847_130640C.1.pep
GYLDLLSCTLFSSIKCFYNFYITTSWGVQRAGSGGFRFKISNPHKLNHLISWPISDRTFHWIRWVTGLQVMGRNGWIESISTSICTRILCFECHLPCKRSYWFKSALRVPYVCGRTHHRWWCEF

SEQ ID NO: 176771 - protein, 49 aa, Glycine max
  Clone ID: PAT_MRT3847_130641C.1.pep
VCSVVFSAVTLEDTISIGSLAGMFLMFTGLYLVLWAKGKEGHAGGDGLE

SEQ ID NO: 176772 - protein, 53 aa, Glycine max
  Clone ID: PAT_MRT3847_130642C.1.pep
YTSTLSVCSKVSYSQSRCLFLQWHTHPVHLTTRALPGNLMIGLYNHPRQSQRN

SEQ ID NO: 176773 - protein, 72 aa, Glycine max
  Clone ID: PAT_MRT3847_130643C.1.pep
QYLFSSVNLATESIVSVCFVTGHGRACCTTVNGPRLICIFSRMFLSCSVGSDSTSVFRLKDSICYKTKMLKQ

SEQ ID NO: 176774 - protein, 116 aa, Glycine max
  unsure (1)..(116): unsure at all Xaa locations
  Clone ID: PAT_MRT3847_130644C.1.pep
PEVTSGGIALKIFASVLLEGRAAGKITSAKGDEEIGLKVRLRVQKIMGSRPYKIAEFEIIFGEGISKVGCILDCAEMTDIVSKKGSWYSYGDHRMGQXTDKAIQDLKENTHLLEEI

SEQ ID NO: 176775 - protein, 117 aa, Glycine max
  unsure (1)..(117): unsure at all Xaa locations
  Clone ID: PAT_MRT3847_130645C.1.pep
SALIREVFIAAGAAAALCFAALVAVAVRQGEVDPPRLTDLRCWQEVXQDIPLDACRPVLDSYLTRGGSSGRLGPYRWGTGLRMRCXPLLPDGSRECPCAAVPSMILGYEEALPPVEK

SEQ ID NO: 176776 - protein, 59 aa, Glycine max
  unsure (1)..(59): unsure at all Xaa locations
  Clone ID: PAT_MRT3847_130646C.1.pep
CSHVKFSLLKKKKKGRPPXNXLVDPGXNXGPXPAXVPXFXXVSRIXXWXNHGXXVXCXK

SEQ ID NO: 176777 - protein, 60 aa, Glycine max
  Clone ID: PAT_MRT3847_130647C.1.pep
KGSPQPTFFFFLLEICQPDRISEVNLLLLILNLSLYHFSLTRDIHEKPPVIHRGALQETN

SEQ ID NO: 176778 - protein, 60 aa, Glycine max
  Clone ID: PAT_MRT3847_130648C.1.pep
MVSALGFGKPVVFPSKEHQLPVALRLVRISIKNVILSTFANDLVVTHRHNSCKSVKYLAN

SEQ ID NO: 176779 - protein, 53 aa, Glycine max
  unsure (1)..(53): unsure at all Xaa locations
  Clone ID: PAT_MRT3847_130649C.1.pep
QCCDHCMCTHYMPPEGTCXILRCFRATDIVRAXLIARSRPGQCYCLNSNDYCY

SEQ ID NO: 176780 - protein, 84 aa, Glycine max
  Clone ID: PAT_MRT3847_13064C.1.pep
VFTRPPLLITLSSKQNIILSFFFFFPKKKKKPFSPPPVSPTIILELVHIMESKIGVGVVAPATVTINSAGFMPMFGDMNTGSNG

SEQ ID NO: 176781 - protein, 58 aa, Glycine max
  Clone ID: PAT_MRT3847_130650C.1.pep
AKKKEQSYCSTFISDIFSISFDSLNLSYLNSLLAAVSHELLLSWLALSCFSPNYHSLA

SEQ ID NO: 176782 - protein, 74 aa, Glycine max
  unsure (1)..(74): unsure at all Xaa locations
  Clone ID: PAT_MRT3847_130651C.1.pep
HPYLRMSHFQARTPXPEKRTLARTPHXRLRVHLRYRAKQLLRTVISLAWRGNVNPLPFRQPDGPTAQAQKSRNP

SEQ ID NO: 176783 - protein, 55 aa, Glycine max
  Clone ID: PAT_MRT3847_130652C.1.pep
FASFSLGRVKSKKFNYNKAFLFVSSFGPRDMSAIAKVWNFQSTFTGMSHKTTNWV

SEQ ID NO: 176784 - protein, 49 aa, Glycine max
  unsure (1)..(49): unsure at all Xaa locations
  Clone ID: PAT_MRT3847_130653C.1.pep
IHQSFSFXDNCRCIWRGFNPKMEKSSDICYXSFLSIMXELISWQRIAFT

SEQ ID NO: 176785 - protein, 73 aa, Glycine max
  Clone ID: PAT_MRT3847_130654C.1.pep
ARTQPSCSSLSQSAHLPEGRHCGPLLSSCRLTTISSTDSSEVDAYIPDLVRRSSLGDESHGEGCLVRSLDSSF

SEQ ID NO: 176786 - protein, 116 aa, Glycine max
  Clone ID: PAT_MRT3847_130655C.1.pep
MELSLDLSLGFVPKPLSLFFADVSANRDKVATLDGFVQRLEEELKKVEAFKRELPLCILLLNDAIARLKEEKVKWSGMQDPPLKTRSGGNKNESSEKMNWMSSAQLWSTQKTKSRN

SEQ ID NO: 176787 - protein, 160 aa, Glycine max
  unsure (1)..(160): unsure at all Xaa locations
  Clone ID: PAT_MRT3847_130656C.1.pep
GSSGGCNDYNGGDSVIGYAGTRGVRSRVLXFTGAVFNVLNAIVGAYSENLPLICIAGGPNFNDYGTCRILHHTMGLPDFRQELRCFQTITCFQAAETNLKEAHESFDTAFSTALKESMPVFISMSXHLPGISYPTFERDPVPFSXPPRLSYMMGLEAVVD

SEQ ID NO: 176788 - protein, 54 aa, Glycine max
  Clone ID: PAT_MRT3847_130657C.1.pep
ILCFSGTFNWKEKSVTKTGIKNIYVAILQRTLIIRESEFIHKNDFLSFVTENLS

SEQ ID NO: 176789 - protein, 54 aa, Glycine max
  Clone ID: PAT_MRT3847_130658C.1.pep
IIHKQEFPIFKPKLCCHEQTNLHVVLAPLSALKSVVELIDRFGQGRCHCAPDFV

SEQ ID NO: 176790 - protein, 110 aa, Glycine max
  Clone ID: PAT_MRT3847_130659C.1.pep
PAGRAFEPGSLVTQTPPLGATIPRPSVDSCDTRVRLAVLRSSIPTSSWMMTFNYVLNFSILLAYFLMSVDVERYIFILIEPCYIWGWTHPAESYHCIKICSDSNTFKPGV

SEQ ID NO: 176791 - protein, 68 aa, Glycine max
  Clone ID: PAT_MRT3847_13065C.1.pep
VGEGSFAISYEINDREKPPANRAQFSSIYSLWTSLKISHLVSSQKISLAQMSCSIFRTSLAVYPCCQI

SEQ ID NO: 176792 - protein, 440 aa, Glycine max
  unsure (1)..(440): unsure at all Xaa locations
  Clone ID: PAT_MRT3847_130660C.1.pep
AGVFPSVQPSSRFSADSFLGNSVLCRRXWVGSICCPYVPKSREMSSRVAVVCLTLGIMILLAMVIVAFYRSSQSKRLRKGSSRTGQGPPKLVILHMDMAIHTLDDIMRSTENLNEKYIIGYGASSTVYKCVLKNSRPIAIKRLYNQQAHNLREFETELETVGSIRHRNLVTLHGYALTPYGNLLFYDYMANGSLWDLLHGPLKVKLDWETRLRIAVGAAEGLAYLHHDCNPRIVHRDIKSSNILLDETFEAHLSDFGTAKCISTAKTHASTYVLGTIGYIDPEYARTSRLNEKSDVYSFGIVLLELLTGKKAVDNESNLHQLILSKADSNTVMETVDPEVSITCIDLAHVKKTFQLALLCTKKNPSERPTMHEVARVLVSLLPSPLSKILAPPAKKFDYAHFVIEKGQQRKVEEQKPQQDNILPNAQWFVRFGDVISKST

SEQ ID NO: 176793 - protein, 239 aa, Glycine max
  Clone ID: PAT_MRT3847_130661C.1.pep
ARNDRRGETRLRIAVGAAEGLAYLHHDCNPRIVHRDIKSSNILLDENFEAHLSDFGTAKCISTAKTHASTYVLGTIGYIDPEYARTSRLNEKSDVYSFGIVLLELLTGKKAVDNESNLHQLILSKADNNTVMEAVDPEVSITCTDLAHVKKTFQLALLCTKKNPSERPSMHEVARVLVSLLPSPPSKILAPPAKKFDYAHFVIEKGQQRKMEEQKPQQDNNSSNAQWFVRFGDVISKST

SEQ ID NO: 176794 - protein, 154 aa, Glycine max
  unsure (1)..(154): unsure at all Xaa locations
  Clone ID: PAT_MRT3847_130662C.1.pep
MATVTSQACDSILPPCASNSRVLTGSSRXPHREVTIKPLWRPSSASFXWKPIWEQWLPGLAYTTYLNGTLAGDNGLNPLGLAEDPENLMRHGQSDLGNGHQALLGAARLLLPEVCTXIEIINATLXYDAGNSEYFDVSSNLLRIRCMLFHYARD

SEQ ID NO: 176795 - protein, 148 aa, Glycine max
  Clone ID: PAT_MRT3847_130663C.1.pep
TRPVGGDNEVQRTMLEIVNQLDGFDARGNIKVLMATNRPDTLDPALLRPGRLDRKVEFGLPDLESRTQIFKIHTRTMNCERDIRFELLARLCPNSTGADIRSVCTEAGMYAIRARRKTVTEKDFLDAVNKVIKGYQKFSATPKYMVYN

SEQ ID NO: 176796 - protein, 31 aa, Glycine max
  Clone ID: PAT_MRT3847_130664C.1.pep
AQVQVATNYSICSAHMTMDGKIDSQVIRILT

SEQ ID NO: 176797 - protein, 72 aa, Glycine max
  Clone ID: PAT_MRT3847_130665C.1.pep
MNCERDIRFELLARLCPNSTGADIRSVCTEAGMYAIRARRLEVTEKDFLDAVNKVIKGYQKFSATPKYMVYN

SEQ ID NO: 176798 - protein, 87 aa, Glycine max
  unsure (1)..(87): unsure at all Xaa locations
  Clone ID: PAT_MRT3847_130666C.1.pep
GANAKTXQGTKDDARXHEPKGRETARGAPRPDGEEKRSLEDKKQAQKEQPRAESRLAQARTADGRRTATNETGQDLSYYGNMEGRGR

SEQ ID NO: 176799 - protein, 38 aa, Glycine max
  Clone ID: PAT_MRT3847_130667C.1.pep
DDTEDFYEDFANSMIKMGNIQPLTGNQGEIRVNCRNVN

SEQ ID NO: 176800 - protein, 426 aa, Glycine max
  Clone ID: PAT_MRT3847_130668C.1.pep
MAIEHEDDLKDEKNPRPLDEDDIALLKTYGLGPYSTSIKKAEKEIKDMAKKVNDLCGIKESDTGLAAPSQWDLVSDKQMMQEEQPLQVARCTKIINPNSEDAKYVINVKQIAKFVVGLGDKVSPTDIEEGMRVGVDRNKYQIQIPLPPKIDPSVTMMTVEEKPDVTYNDVGGCKEQIEKMREVVELPMLHPEKFVKLGIDPPKGVLCYGPPGTGKTLLARAVANRTDACFIRVIGSELVQKYVGEGARMVRELFQMARSKKACIVFFDEVDAIGGARFDDGVGGDNEVQRTMLEIVNQLDGFDARGNIKVLMATNRPDTLDPALLRPGRLDRKVEFGLPDLESRTQIFKIHTRTMNCERDIRFELLARLCPNSTGADIRSVCTEAGMYAIRARRKTVTEKDFLDAVNKVIKGYQKFSATPKYMVYN

SEQ ID NO: 176801 - protein, 145 aa, Glycine max
  unsure (1)..(145): unsure at all Xaa locations
  Clone ID: PAT_MRT3847_130669C.1.pep
GSRPIWMRQPYQITDEEYAAFYKRLTNDCEXLLAVQHFSVEDYLDSKACLSIHXRAPFHLCDTDKTPSNIQLYVRRVFVMDSCADLMPEYLSFVKGIXDSRDLTLNIPREMLXQNKIHGVINENLRNKCIEMYYEIAENTEYYSM

SEQ ID NO: 176802 - protein, 120 aa, Glycine max
  unsure (1)..(120): unsure at all Xaa locations
  Clone ID: PAT_MRT3847_13066C.1.pep
LISIVGNAHVDSERCTTTGHLLHKLECIDNRVIERFEKVVDEMNKRSLKFACVLDXLSAERERGITIDIAVWKIVTTKSXCTFIDASVHMDLINNMITGTYQSDCADLIIGSTTSRFEAG

SEQ ID NO: 176803 - protein, 59 aa, Glycine max
  Clone ID: PAT_MRT3847_130670C.1.pep
DQRGNKGLRPSKAQQETTWRVLGGFTRLTHMTLTDITKPSFCSYHNSAPYHTLLRTNWS

SEQ ID NO: 176804 - protein, 46 aa, Glycine max
  Clone ID: PAT_MRT3847_130671C.1.pep
YRGIKSVSSGKVEISLYHKRWHPSSPFFIHSSQYLLNEVMDFVPCF

SEQ ID NO: 176805 - protein, 372 aa, Glycine max
  unsure (1)..(372): unsure at all Xaa locations
  Clone ID: PAT_MRT3847_130672C.1.pep
YNEADTETDTFRLKVKPGKTYLLRLINAALNDELFFSIANHTLVTVEADATYVKPFESEIIXIGPGQTSNFLLKTKPEYPNVNFLMLARPYFTGMGTFDNSTVAGILEYKKPLVAPKNTIPTLKPSLPAINDTSLVANFSSKFLSLNTDKYPAKVPQTVDKSFFFTIGLGTSPCPKNQTCQGPNNSSKFAASMNNISFTLPSIALLQQHFFGQANNGFYTTDFPAMPLMPFNYTGTPPNNTRVSNGTKTVVIPFNTRVQVVLQDTSILGAESHPLHLHGFNFYVVGQGFASFNPNTDPPKFNLVDPVERNTVGVPSGGWVAIRFLADNPGVWLMHCHFDVHLSWGLRMAWIVEDGKLPNQKLPPPPADLPKC

SEQ ID NO: 176806 - protein, 53 aa, Glycine max
  Clone ID: PAT_MRT3847_130673C.1.pep
ARAPSLHLQPWVLPLTLGPPDAPGFTIPLNRRTDCLSQYPAHLLLFASNDSSI

SEQ ID NO: 176807 - protein, 344 aa, Glycine max
  Clone ID: PAT_MRT3847_130674C.1.pep
EERVKQKGEPGTKTITTPTTKNPLTGEKVGEGEPTEKVTKQPVDEITEYGGEEIKPGHKDEFDPNAPKGSQEDVPGKPGVKNPDTGEVVTPPVDDVTKYGPVDGDPITSTEEIPFDKKREFDPNLAPGTEKVVQKGEPGTKTITTPTTKNPLTGEKVGEGEPTEKVTKQPVDEIVHYGGEEIKPGHKDEFDPNAPKGSQEDVPGKPGVKNPDTGEVVTPPVDDVTKYGPVDGDPITSTEEIPFDKKREFDPNLAPGTEKVVQKGEPGTKTITTPTTKNPLTGEKVGEGEPTEKITKQPVDEIVHYGGEQIPQGHKDEFDPNAPVDSKTEVPGKPGVKMMNYCTI

SEQ ID NO: 176808 - protein, 65 aa, Glycine max
  Clone ID: PAT_MRT3847_130675C.1.pep
TQALDRFEPQYIFLLLPPPYIGTMKLNFHANFVLSVGFCAKRAFGLHYGLFRALSLSCTLSADTR

SEQ ID NO: 176809 - protein, 51 aa, Glycine max
  unsure (1)..(51): unsure at all Xaa locations
  Clone ID: PAT_MRT3847_130676C.1.pep
NGNIIVNYIIILFNKVFSLCXLIVRWKKVEIRNSERAAIELMILIFFKCVV

SEQ ID NO: 176810 - protein, 84 aa, Glycine max
  Clone ID: PAT_MRT3847_130677C.1.pep
GDANYISRRWKLVNGSSRAIQMVITLHSDLRFMLIIYRDPCNRSTEALEHINDPNFSLGVPIKAHNICRRSKLNNVGSCEMHMV

SEQ ID NO: 176811 - protein, 212 aa, Glycine max
  unsure (1)..(212): unsure at all Xaa locations
  Clone ID: PAT_MRT3847_130678C.1.pep
GLIETESQFWKPGTERPQGRVVDDEEGGVLFLSGSHHSSSSSRYGYASIDKQRQRLPVFKYRTAILYLVETRATTIIVGETGSGKTTQIPQYLKEAGWAAGGRLIACTQPRRLAVQAVASRVAEEMGVKLGEEVGYTIRFEDVTKPDVTVLKFLTDGVLLKEMMGRSSFDQYSVIMLDEAHERSISTDIXLGLLKKIQRRRPSLRXIISSAT

SEQ ID NO: 176812 - protein, 66 aa, Glycine max
  Clone ID: PAT_MRT3847_130679C.1.pep
MLNRNVLKHVCLMKDDDSYHLSLPNIDLLHPSWISRSMPWFEPIHITRTKMIPIKDYISLEYLLSL

SEQ ID NO: 176813 - protein, 136 aa, Glycine max
  Clone ID: PAT_MRT3847_13067C.1.pep
MDWFSWLSRTSLEPSLIYEYGLAFARNELQLEDAIYFNHEFLQSMGVSIAKHRLEILKLAKKEDGGVVVRSSIKFSIKKCLRKCFSKLVSREDHHEAMIMLKDMPPEPNWYQGKWRRARHNGNNEELGENNNNNKG

SEQ ID NO: 176814 - protein, 184 aa, Glycine max
  Clone ID: PAT_MRT3847_130680C.1.pep
MTRALRYLGERNSATDSAVVDSDFVVIFAALLCALICILGLVAVTRCGCLRRLRLSSSNATPQPPPASANKGVKKKVLRSLPKVTASAESAVKFADCAICLTEFAAGDEIRVLPQCGHGFHVSCIDAWLRSHSSCPSCRQILVVSRCDKCGGIPAPASSSSAPPLADSGDRLKGREEDANRFLP

SEQ ID NO: 176815 - protein, 75 aa, Glycine max
  Clone ID: PAT_MRT3847_130681C.1.pep
LKLIKHLFFNFDQLMGPHSRDARSALLLFKLNKTRHFYYSLPPKVIVTLYYFIQTHYKLINEKNDIFIKINLYHH

SEQ ID NO: 176816 - protein, 113 aa, Glycine max
  Clone ID: PAT_MRT3847_130682C.1.pep
FFWVSIPPTLYKQDGFKKKFTTPPQYKKWVIPFPQPLNLKNCFWPVLGGGALLRPKKKSICPTERFFGFFFNRETNGEPLGLTPNFFWRPTTYLSRNFPFFFHKKGKPGRIFK

SEQ ID NO: 176817 - protein, 76 aa, Glycine max
  Clone ID: PAT_MRT3847_130683C.1.pep
FTVPSKPSLITRPISILASSLLLSSFYSPHTSSLPFSVLVSALSPPPPPPPPPPPPPPPPPPPPRRQHSYTCSTAN

SEQ ID NO: 176818 - protein, 89 aa, Glycine max
  Clone ID: PAT_MRT3847_130684C.1.pep
GHFPLPKKIVAPFTQKKKGGKVFFTKNFHGGNFFLGAIFFLGRPSLGVIRGRGPENFPLVYWAPSLETWKKWVPPRLRSSLLIFFGGPL

SEQ ID NO: 176819 - protein, 74 aa, Glycine max
  Clone ID: PAT_MRT3847_130685C.1.pep
RNSARAGNKDAQIAIGTFDVEEINRSSHRYYRYVGSLTTPPCKEGVTWNILGKVTNYYICSPLVGKYEYTHKEG

SEQ ID NO: 176820 - protein, 197 aa, Glycine max
  unsure (1)..(197): unsure at all Xaa locations
  Clone ID: PAT_MRT3847_130686C.1.pep
HASGTTPGVNFSQGSGLGFTSRKSAKCYSLCPFHSSSGGLAGGVLAGISTWSSNKDFLLLGILCVCYILPKKEGMEERICSQKNPGRTLLEVKNDEASGDSAAEGGTNTIGIRVNKSAEFSYEELANATNNFSLANKIGQGGFGVVYYAELNGEKAAIKKMDIQATREFLAELKVLTHVHHLNLVRLIGYXXVEGSL

SEQ ID NO: 176821 - protein, 49 aa, Glycine max
  Clone ID: PAT_MRT3847_130687C.1.pep
VSKSRLWVSWRLFLSFKFYKIFTCPRLMLGVCLSKRQEGFFFFFNVKVS

SEQ ID NO: 176822 - protein, 88 aa, Glycine max
  Clone ID: PAT_MRT3847_130688C.1.pep
VRSAERRQRRGNELLPLKHILASNVKAVRWLRELLTTKLPSGSYSLKVTMPVVLTVRVAVTSTKFEDLLPVEKYLQARIKSYAFAQCK

SEQ ID NO: 176823 - protein, 364 aa, Glycine max
  unsure (1)..(364): unsure at all Xaa locations
  Clone ID: PAT_MRT3847_130689C.1.pep
MSCPKHHTLTPRMLEGQATMRTWARMCDTCRSVPSTVFCRSHTAFLCATCDTRLHVSLTWHERVWVCEACERAPAAFLCKADAVCLCAYCDADIHACNPLASSHHPVPILPIHARHNNNNDDDDVADVDDEDETASWLLLNPIKSATVPNTNNHNNNNGFLYNEEVDEYLDLIDNCXSCLDNNHFASAAATTDHYAQHQHFAGVSQKSYAGDSVVPVQQHQHFQLGLEFDNSKPAFSYNGSVSQSVSVSSMDIGVVPESPMRDVSIAHTRPPKGTIDLFSGPPIQVPSHFSPMDREARVLRYREKKKMRKFEKTIRYASRKAYAETRPRIKGRFAKRTDVEAEVDQMFSTTLITEVGYGIVPSF

SEQ ID NO: 176824 - protein, 113 aa, Glycine max
  unsure (1)..(113): unsure at all Xaa locations
  Clone ID: PAT_MRT3847_13068C.1.pep
FCATFHSITDGNGWTAFRLQNITHIPTKAGIVGKVSHRNGASLRKQIKKMEKPQHSPSXCEFCTKYAVQMKALRIWRCKDCCQTKAHAAYTMNTARAVTVQSTIWRFYAQTDS

SEQ ID NO: 176825 - protein, 45 aa, Glycine max
  Clone ID: PAT_MRT3847_130690C.1.pep
YAKLVISVFRLRGRFAKRTDVEAEVDQMFSTTLITEVGYGIVPSF

SEQ ID NO: 176826 - protein, 119 aa, Glycine max
  Clone ID: PAT_MRT3847_130691C.1.pep
LPLVRGRSPRGGLYTSTRELTPHYMNSGTPLAPDTGSEPDAEAKTTTADEEPETKEMEAASRAKRGEGRRAHTARSPLAPGAPDPDVLYGPNVEKHKKKTQSTQRGRETKPPWNSLHKC

SEQ ID NO: 176827 - protein, 47 aa, Glycine max
  Clone ID: PAT_MRT3847_130692C.1.pep
VLLPVSIKTIYLQVKYWGSRKSFHCEVAFRFLSCAYSYTISLFILYH

SEQ ID NO: 176828 - protein, 57 aa, Glycine max
  Clone ID: PAT_MRT3847_130693C.1.pep
IIFTRKPKWGDTSYFVSAHTGLQIYLTLTTQVMMLWSLIGKAYRICDNDTQNMFSPK

SEQ ID NO: 176829 - protein, 62 aa, Glycine max
  Clone ID: PAT_MRT3847_130694C.1.pep
LQVGYKNPLFVNAFVVQFVRMTCFVLTMAVLINKEFAFTRLIHGSSTRLLCQGERGELVHCT

SEQ ID NO: 176830 - protein, 105 aa, Glycine max
  unsure (1)..(105): unsure at all Xaa locations
  Clone ID: PAT_MRT3847_130695C.1.pep
AYALVTAYKKCKFNMAHIDVLAPLTTQRSYYNDTEPHAKHXYYQRTYNGSLLITETTDACHTALXYTRTPGILTKNHVEAXEHIVEPVYAKCRCFFCQIWHQAYG

SEQ ID NO: 176831 - protein, 55 aa, Glycine max
  Clone ID: PAT_MRT3847_130696C.1.pep
RRLTLAGIRTLTPHQYSFGRLPKSLNFGRGDQGSLTPNFQICGPGDTLNFFLKGN

SEQ ID NO: 176832 - protein, 45 aa, Glycine max
  Clone ID: PAT_MRT3847_130697C.1.pep
KWFGGDFKLTLLKVNQAFYARYKMSFKEAVAFNLKGGIRRFWAPL

SEQ ID NO: 176833 - protein, 429 aa, Glycine max
  Clone ID: PAT_MRT3847_130698C.1.pep
MASVSSQQQFRYTQPPSKVLHLRNLPWECTEEELIELGKPFGKVVNTKCNVGANRNQAFIEFADLNQAIAMISYYASSSEPAQVRGKTVYLQYSNRQEIVNNKTAADVAGNVLLVTIEGEDARLVSIDVLHLVFSAFGFVHKITTFEKTAGFQALVQFSDAETATSAKDALDGRSIPRYLLPEHMGPCSLKITYSGHSDLSVKFQSHFGPRRPKAYNALSKSSWVGKGPWLHGGQILPLQGVGRGQCRVSIEFTCFLALCHVLWPLICNFRLVQKIAMFDQSGGLQALIQYPDIQTAVVAKETLEGHCIYDGGFCKLHISYSRHTDLSIKVNNERSRDYTIPNVPPPVVNAQPSILGQHPVPMTGPPPQHYNGAQYAPVTEQTLMSHSQAGWGTGPPQSMQQMHNHPYTPSAMVPPQTTPGMQFPSHIQ

SEQ ID NO: 176834 - protein, 143 aa, Glycine max
  Clone ID: PAT_MRT3847_130699C.1.pep
MASVSSQPQFRYTQPPSKVLHLRNLPWECTEEELIELGKPFGKVVNTKCNVGANRNQAFIEFADLNQAIAMISYYASSSEPAQVRGKTVYLQYSNRQEIVNNKTTADVPGNVLLVTIEGADARLVSIDVLHLVSSCTCVLVMC

SEQ ID NO: 176835 - protein, 80 aa, Glycine max
  Clone ID: PAT_MRT3847_13069C.1.pep
IKSNVYVLVVEHNCKHFQEILDQCQYLDHVVHSQVLVETPEVDLQHPSSGTNVSLTSSKEFYAVISILDPILDLIGDCSS

SEQ ID NO: 176836 - protein, 265 aa, Glycine max
  Clone ID: PAT_MRT3847_1306C.1.pep
YGYPKRSLHGHSHIVSDCVISSDGAYALSSSWDKTLRLWELSTGQTTRRFVGHNNDVLSVSFSADNRQIVSGSRDRTIKLWNTLGDCKYTITDKGHTEWVSCVRFSPNPQNPVIVSAGWDKFVKVWELATCRIQTDHIGHTGYINTVTISPDGSLCASGGKDGTTMLWDLNESKHLYSLTAGDEIHALVFSPNRYWLCAPTSSSIIVFDLEKKSKVDELKPEYVEVGKKAREPECISLAWSADGQTLFAGYTDNKIRAWGVMSRA

SEQ ID NO: 176837 - protein, 83 aa, Glycine max
  Clone ID: PAT_MRT3847_130700C.1.pep
GSSRYLLPEHIGPCGLKITYSGHSDLSVKFQSHRSRDYTNPYLPVAQSAMEGSGQPMVGLDGKRLEAESNVLFASIEKMLYNF

SEQ ID NO: 176838 - protein, 102 aa, Glycine max
  Clone ID: PAT_MRT3847_130701C.1.pep
MASVSSQQQFRYTQPPSKVLHLRNLPWECTEEELIELGKPFGKVVNTKCNVGANRNQAFIEFADLNQAIAMISYYASSSEPAQVPGKTVYLQYFNRPEIVDT

SEQ ID NO: 176839 - protein, 340 aa, Glycine max
  unsure (1)..(340): unsure at all Xaa locations
  Clone ID: PAT_MRT3847_130702C.1.pep
MASVSSQPQFRYTQPPSKVLHLRNLPWECTEEELIELGKPFGKVVNTKCNVGANRNQAFIEFADLNQAIAMISYYASSSEPAQVRGKTVYLQYSNRQEIVNNKTAADVPGNVLLVTIEGADARLVSIDVLHLVFSAFGFVHKITTFEKTAGFQALVQFSDAEPATLPKDALDGSIPRYLLPEHMGPCTLRITYSGHSEFKXXKTVXXEAGTRPTXPXXXFLXXXLCXRPKQRLEAESNVLLASIENMQYAVTLDVLHMVFSAFGPVQKIAMFDKNGGLQALIQFPDTQTAVVAKEALEGHCIYDGGFCKLHISYSRHTDLSIKVNNDRSRDYTIPNVPPL

SEQ ID NO: 176840 - protein, 94 aa, Glycine max
  unsure (1)..(94): unsure at all Xaa locations
  Clone ID: PAT_MRT3847_130703C.1.pep
XXRXXXXXXXXXXVXXWXXXPXXXRXXXXXXWXXLXXGSVXXNXVXAXTGXMGAPPNXFGXGLXWXETXPEPXYXPXXXXXSGLXRXXXXXLXV

SEQ ID NO: 176841 - protein, 298 aa, Glycine max
  Clone ID: PAT_MRT3847_130704C.1.pep
AFGFVHKITTFEKTAGFQALVQFSDAETATSAKDALDGRSIPRYLLPEHVGPCTLRITYSGHSDLSVKFQSHRSRDYTNPYLPVAPSAVEGSGQAMVGLDGKRLETESNVLLASIENMQYAVTLDVLHMVFSAFGPVQKIAMFDKNGGLQALIQYPDTQTAVVAKEALEGHCIYDGGFCKLHISYSRHTDLSIKVNNDRSRDYTIPNTPAVNVQPSILGQQSVPMMGPPQQPYNGSQAGWGTAPPATTVQSMPMQMHNNVYMPSGTMPQQMAPGMQFPSYNTAQPTTTLPSYRSDRTQ

SEQ ID NO: 176842 - protein, 169 aa, Glycine max
  unsure (1)..(169): unsure at all Xaa locations
  Clone ID: PAT_MRT3847_130705C.1.pep
MATAPFIHARCAYSPRISNRNNKPSSQQGPLASSSSHASSSSSPSSSSFSHPSGTNSGQRHQGLRAQAMSTVTLGNSIASIGNLKNDPDHLLVLVHGILASTADWTYAEAELKRRLGKNFIIYVSSSNTXTKTLTAIDGCGKRLADERXLIVKKTKSLKRIFFLAHSLG

SEQ ID NO: 176843 - protein, 84 aa, Glycine max
  Clone ID: PAT_MRT3847_130706C.1.pep
VEAGLYGGKFGAVGVGLAKCLGSASYVRMGRAWQNTEYRICVHGIHGGVCIVRSWNACVCVDFIMSTSAESTELVDGIVESRVA

SEQ ID NO: 176844 - protein, 143 aa, Glycine max
  unsure (1)..(143): unsure at all Xaa locations
  Clone ID: PAT_MRT3847_130707C.1.pep
AARAFPLRAERVRQWMLFSRQWHAIDADRQDVWKLANKVAKHLSGWSKPIHHPHTDCGDHVVVVNLSAVSMHAFDWKHTHFFFNRLYPKSKADIPAYQIHEYDPCRVVWMCIGRELAFSDXNRVVQRRCFERLHVFPDLEVPD

SEQ ID NO: 176845 - protein, 50 aa, Glycine max
  Clone ID: PAT_MRT3847_130708C.1.pep
KTTEWGKWWCLSMNGDADLSERFIFMNLKSNLSISFSHQSIHSYSTYLLA

SEQ ID NO: 176846 - protein, 254 aa, Glycine max
  Clone ID: PAT_MRT3847_130709C.1.pep
ILRDFVILGSSGVAPFSSSSTPHHQHRHPIKPPHKPSLPKLAPFSSNWNISCALQAPLALSHCADSKLVQEFEVVFEDFIDSGVVDAELLAKVVLLGIRGKKVRSVIHALNKVQGRRISLSTHLNGSDIIAKECCRLVTCSHVEEAVELMEVLARFQISIRELVQPSDIIKRCVLSRNPILAVRYACLLPHAHILFCNIISEFGKRRDLVSALKAYEASKKHLNTPNMYIYRATIDTCGLCRDYMKSKYIYEDL

SEQ ID NO: 176847 - protein, 38 aa, Glycine max
  Clone ID: PAT_MRT3847_13070C.1.pep
RRVSRHVSQAQQAACPTYGVRLKIDHSLNTQWASTSLP

SEQ ID NO: 176848 - protein, 42 aa, Glycine max
  Clone ID: PAT_MRT3847_130710C.1.pep
SRSPARGFDAPGGVYIDLKILQTSNAYLINPTGYASPAAHDR

SEQ ID NO: 176849 - protein, 38 aa, Glycine max
  unsure (1)..(38): unsure at all Xaa locations
  Clone ID: PAT_MRT3847_130711C.1.pep
FLFPSPFIHYKXCLXHSYLSLSPSNILKLLFILETXYH

SEQ ID NO: 176850 - protein, 82 aa, Glycine max
  unsure (1)..(82): unsure at all Xaa locations
  Clone ID: PAT_MRT3847_130712C.1.pep
CYPTISTNYQKAGEKAXKKLESFIAEKKYAPVILRXSXHSTXTFDKNTKTGEPFGTIKHGCELGHSANNXLYIACELGEPLK

SEQ ID NO: 176851 - protein, 54 aa, Glycine max
  Clone ID: PAT_MRT3847_130713C.1.pep
WNCACFDSALGSNYVTVLYRIMDLPILRVLLGTEGDHLQLACENLHFYEALHAN

SEQ ID NO: 176852 - protein, 395 aa, Glycine max
  unsure (1)..(395): unsure at all Xaa locations
  Clone ID: PAT_MRT3847_130714C.1.pep
ESLVVKLLSHFKHLEDVFSLDQFPEILDVMYGKSQDVVFLHILNMATRNGRISDPTSIQLLFEISLALHNNIEFMNMKDDDGQVACSIARFVHMVDYGTEMEHHLAFLVDCRGAFGRLNELKETLVHSSNSLAIQALKCAKKHLNFVKSCVTFSEVTIPSISAHRQFDLFLETAXVXAFLGGLVSHSDGLIDSAISCLHTLDIIDGFRTPTDVEGLVSSIRKLCGFLIMVPGGTLSLPVTYFPNSLFTLISSRSWFEPKMRAQIFSAIILLLTTLSQKRLPYHANSQIPGNDMLYYGDSSYNQELVSLSKLVLENLLSAVQQEPSQAARGIMALEACNCIASSFMLSNELLSSCLTLVETAKSCLSAKDRYLQSTIQLLNKQSPTSVGTMVSTFV

SEQ ID NO: 176853 - protein, 93 aa, Glycine max
  unsure (1)..(93): unsure at all Xaa locations
  Clone ID: PAT_MRT3847_130715C.1.pep
RTTTRFRSVSVGSEQHNGEFCLRCCVGRXGKFGREFLEFEFRPDGELRCADDSDCGDDAVVREEVCLTPAVLRECRRVVADSEIVKEDDDGWP

SEQ ID NO: 176854 - protein, 74 aa, Glycine max
  unsure (1)..(74): unsure at all Xaa locations
  Clone ID: PAT_MRT3847_130716C.1.pep
QDLVYGKSSFEIKSRPRTGKDFSTQTQLGSGKTFKYDVIGAPSQSSRDFPGTGDHEIPXKIYSRLCQRIGPPFH

SEQ ID NO: 176855 - protein, 223 aa, Glycine max
  Clone ID: PAT_MRT3847_130717C.1.pep
MENSTMGSNCLTTCCTGNFFKKKKSLPIDTIFKLPVPVANSSWPQGGNFASGIIDLGGLQVSQISTFNKVWGTYGGGPDNQGFTMFEASGIPQGFFMLGSYCQPNNKPLFGWVLVAKDVSKSTSNPTLKQPIDYTLVWNSASMKINQDGPIYVWLPTAPDGYKALGHVVTTTPNKPSFDKIRCVRLDLTDQCETSLLIWESGSFNVYDVRPSNRGIQAPGVRV

SEQ ID NO: 176856 - protein, 62 aa, Glycine max
  Clone ID: PAT_MRT3847_130718C.1.pep
WRVCLVLGPFRPRILNCFYFWKRGTAAEVKLGEEFLINSPWVVKIFRRFLPKAEVLPTPGQN

SEQ ID NO: 176857 - protein, 458 aa, Glycine max
  Clone ID: PAT_MRT3847_130719C.1.pep
MEKLHASVLALVFLLVILFQEGLVTCMKNEDGSEEWGYVQVRPKAHLFWWLYRSPYRVENPSKPWPIILWLQGGPGSSGVGFGNFGEVGPLDANLKPRNFTWLRKADLLFVDNPVGTGYSYVEDSNLYAKTDEEATTDLTTLLVELFNNDASLQKSPLFIVAESYGGKFAVALALSALKAIQHGTLKLTLGGVVLGDTWISPEDFVFSWGPLLKDLSRIDDNGLQKANSIAERIKQQLEAGQFVDATYSWADLENEIVASSNNVDFYNFLQDSKSDSDTLNAMELGLFKEVSMMRYSKYLSSKTSYLGSEDDDLERLLNGVIRKKLKIIPENVTYAVQSLDAFESLVPDFMKPRISEVDELLALGVNVTVYSGQVDLICATKGTEAWLKKLEWTGLQNFLEKDRTPLYCGSDKTTKGFFKSYKNLQFYWILGAGHFVPTDQPCVALDMVGAITQSPAA

SEQ ID NO: 176858 - protein, 98 aa, Glycine max
  unsure (1)..(98): unsure at all Xaa locations
  Clone ID: PAT_MRT3847_13071C.1.pep
EQAIIKYCVYISTFINSNFMTNAEKLWFKRTXLSEGQWFCDVESRCSSNNNIYYWATMNTFPRVIGQHGKPIFIRHTLRIFCSRHVTVSTKFPNTEDT

SEQ ID NO: 176859 - protein, 89 aa, Glycine max
  Clone ID: PAT_MRT3847_130720C.1.pep
LNQRVQPNGRVGATAAVFLASILENLTSKVLNLAGNLTKIFKVKRIPPRPLQLAIRGDEKLSPLIKGPLPGGGVIPPIPKPLINKVAKK

SEQ ID NO: 176860 - protein, 68 aa, Glycine max
  Clone ID: PAT_MRT3847_130721C.1.pep
GLEGREEPREIKLLEKAESEVTERGKKKLFNFLPLFYSLSLRYPYLSSSSLASSELILLLLLILLSYN

SEQ ID NO: 176861 - protein, 77 aa, Glycine max
  Clone ID: PAT_MRT3847_130722C.1.pep
FTPLLGPTYYHYAPLGFYFRASRNITTGGSFGFYPIFNLLQFPQRFLMNSTFQDRGFKFSNFLFSLLKVLQKKGKSF

SEQ ID NO: 176862 - protein, 73 aa, Glycine max
  Clone ID: PAT_MRT3847_130723C.1.pep
NLLFVLFIYFCFNLSNCFFPILLLYPRPKSSLQRVRLFIDVFLVSEGDDITFTSIDAVLCCSRNEINGTFLLR

SEQ ID NO: 176863 - protein, 97 aa, Glycine max
  unsure (1)..(97): unsure at all Xaa locations
  Clone ID: PAT_MRT3847_130724C.1.pep
GDWYPAINKPAAVLHWLNHVNIDAEFIVILDADMILRGPITPWEFKAARGRPXSTPYXYXIGCDNDXLXKLHTSHPEXCDXGGGVIICILMPEFAGN

SEQ ID NO: 176864 - protein, 97 aa, Glycine max
  Clone ID: PAT_MRT3847_130725C.1.pep
IEKRLVASTSYFDLGLTGSISSADGRVKRSTTSSKMKDESSGTNEDGHEENSRVRLQRVLDNRKAMLCKEQAMAYARALVAGYYPESVDDLICFADA

SEQ ID NO: 176865 - protein, 67 aa, Glycine max
  unsure (1)..(67): unsure at all Xaa locations
  Clone ID: PAT_MRT3847_130726C.1.pep
MTTGSLYFGAVRLAGPKWGPFXSXCCAWLXTIGLIAGIGTQAFAGSQTSQSIILTXTGTNEGGGILR

SEQ ID NO: 176866 - protein, 181 aa, Glycine max
  Clone ID: PAT_MRT3847_130727C.1.pep
MGLSFTKLFSRLFAKKEMRILMVGLDAAGKTTILYKLKLGEIVTTIPTIGFNVETVEYKNISFTVWDVGGQDKIRPLWRHYFQNTQGLIFVVDSNDRDRVVEARDELHRMLNEDELRDAVLLVFANKQDLPNAMNAAEITDKLGLHSLRQRHWYIQSTCATSGEGLYEGLDWLSNNIASKA

SEQ ID NO: 176867 - protein, 108 aa, Glycine max
  unsure (1)..(108): unsure at all Xaa locations
  Clone ID: PAT_MRT3847_130728C.1.pep
NISFTVWDVGGQDKIRPLWRHYFQNTQGLIFVVDSNDRDRVVEARDELHRMLNEDELRDAGVLVFANQQELPYAMDACEINXKLGTSFLRQPPLVIQSTFSTFWERLY

SEQ ID NO: 176868 - protein, 74 aa, Glycine max
  Clone ID: PAT_MRT3847_130729C.1.pep
LKVLANLSNHTNPSYTKEENTSSKHSAITTLTRKDKHLSSRTAILSRKSPDKTKNFQMSHALLAMLLESQSKPS

SEQ ID NO: 176869 - protein, 75 aa, Glycine max
  Clone ID: PAT_MRT3847_13072C.1.pep
VFNPEIHLNLSTWLWNPHFRENSSRHPLIPFFVGTNKLFANRNHTHHPGNFGKNRNPGPPGSRTPSVVFLQPDGR

SEQ ID NO: 176870 - protein, 80 aa, Glycine max
  Clone ID: PAT_MRT3847_130730C.1.pep
FPGPPLPMFLNLPGNATSPGLFFSPPPGESLYESPSNNTPRVNIPSHPAFKLRASFTFPVNPGAPTLVLNSQNLGLDKSV

SEQ ID NO: 176871 - protein, 130 aa, Glycine max
  unsure (1)..(130): unsure at all Xaa locations
  Clone ID: PAT_MRT3847_130731C.1.pep
PRVRPRVRMFAKNEMRILMVGVYAGGXTTILYKLKLGEIVTTIPTIRFNVETVEYKNISFTEXDVGGQDKIRPLWRHYFQNTQGLIFVVDINDRDRVGXARDELXQRLNEDKLXRDAVLLVFANKQDLSN

SEQ ID NO: 176872 - protein, 181 aa, Glycine max
  unsure (1)..(181): unsure at all Xaa locations
  Clone ID: PAT_MRT3847_130732C.1.pep
MGLSFTKLFSRLFAKKEMRILMAGHDAAGKTTILYKLKLGEHRTTIPTIGFNVDTVEYKNIIFTVWDVGGHDKIRPLWRHYFQNTQGLIFVVDINDRDRVAYATDDLHRMLNEDELIDAVLLAFANXQELSNALNAAYITDKLVLHTLRQRHWYIQSTCVSFGXGFYDGMDWLLYNIASKA

SEQ ID NO: 176873 - protein, 71 aa, Glycine max
  Clone ID: PAT_MRT3847_130733C.1.pep
GEIFRRHILSACNEPHAILMTCEHHRRPKCYQLQVIFTISYVTECLKIHCNFSESVINMYCKRHKVSVTAL

SEQ ID NO: 176874 - protein, 179 aa, Glycine max
  Clone ID: PAT_MRT3847_130734C.1.pep
MGLSFTKLFSRLFAKKEMRILMVGLDAAGKTTILYKLKLGEIVTTIPTIGFNVETVEYKNISFTVWDVGGQDKIRPLWRHYFQNTQGLIFVVDSNDRDRVVEARDELHRMLNEDELIDAVLLVIANKQDLPNAMNAADITDKLGLHSLRRRHWFIQSTCATSGEGLYDVLDWPFYNIAS

SEQ ID NO: 176875 - protein, 181 aa, Glycine max; identical to SEQ ID NO: 176866
  Clone ID: PAT_MRT3847_130735C.1.pep

SEQ ID NO: 176876 - protein, 48 aa, Glycine max
  Clone ID: PAT_MRT3847_130736C.1.pep
LKLTPPVCFTPHPYFREWQRKNIPHMWGYALIQTKSNFPFPYEINYFF

SEQ ID NO: 176877 - protein, 51 aa, Glycine max
  Clone ID: PAT_MRT3847_130737C.1.pep
KNICFPPNLFSFNFTKVLNPPNFKTPQTGVEFFLSLFKIKTKCLHFQPLFF

SEQ ID NO: 176878 - protein, 182 aa, Glycine max
  unsure (1)..(182): unsure at all Xaa locations
  Clone ID: PAT_MRT3847_130738C.1.pep
MAVINKEIIDEPYEQEECIDYEQLKKRMWKDRVLLQKLKEKREKQEPDVEAKQEASRRKKMSRAQDSVLKYMVKIMDDCNAPVFFSRFFPXKLKPXSTSSFFLPEWWKDQIPFAPPPCLSPSPSLPLHPFPSFFPSSPLPPFPTPSLSLLSPPLPSFAPPPHRFLCLEPFSTSSPMGGSFPL

SEQ ID NO: 176879 - protein, 40 aa, Glycine max
  Clone ID: PAT_MRT3847_130739C.1.pep
MWMMQINWLLPYNKIVSRLLPFSYDYVLFIFILDRVDLIK

SEQ ID NO: 176880 - protein, 45 aa, Glycine max
  Clone ID: PAT_MRT3847_13073C.1.pep
ICTTSFFVKSESSISWKASCYLCNCVAAGWWGSMNFFVNITRFCR

SEQ ID NO: 176881 - protein, 91 aa, Glycine max
  Clone ID: PAT_MRT3847_130740C.1.pep
KKKKNTAYLKFLWPPNLTLIKLKLKIFLPNHNITNTLPIYKTPAPFPLPNLSKYNSPKKKPKPPFLHSFFFLSYSKANLFSHLHYCSVNNS

SEQ ID NO: 176882 - protein, 69 aa, Glycine max
  Clone ID: PAT_MRT3847_130741C.1.pep
GPLNICKLNGAITGHTPTEGKRLIFKLGNNGWATTKSTMATFGGQTALRGNKFFGTKNLGQLPKFYLHP

SEQ ID NO: 176883 - protein, 37 aa, Glycine max
  Clone ID: PAT_MRT3847_130742C.1.pep
SDYILFFLNAISIHMFNLDSQLLCNLIHFSNTYTIHI

SEQ ID NO: 176884 - protein, 140 aa, Glycine max
  Clone ID: PAT_MRT3847_130743C.1.pep
AMHHYRSCKADTTLTRFSGRATSSRATSLNSRTPPSLHFDSKRAASSFVIFSFTLIPPDSSPSLLHLPFTNFFSLVSSPKMEGSESAKRTLFFTNALLGTVEGFFLVINSSLYTAFVTLRFSSTFLLRHANMVSIMFRMT

SEQ ID NO: 176885 - protein, 149 aa, Glycine max
  unsure (1)..(149): unsure at all Xaa locations
  Clone ID: PAT_MRT3847_130744C.1.pep
ASHSSMALYCPSLAGKAMKLGPSSPQFWRVTMRKTFTKHASSGCPXYSPHRVKYLGPFSGQPPSYLTGEFPADYRWDTDGLSADLDTLARNRELQVIHSMWAMLVALGCVFPELXSRIGVKYAEAVWFKYGFQIFSEGRLDYLCNPSLV

SEQ ID NO: 176886 - protein, 36 aa, Glycine max
  Clone ID: PAT_MRT3847_130745C.1.pep
YILSVTTRTSFNTSSSPFAKVNSSASLSWQMVRMMC

SEQ ID NO: 176887 - protein, 53 aa, Glycine max
  unsure (1)..(53): unsure at all Xaa locations
  Clone ID: PAT_MRT3847_130746C.1.pep
XILIXRXHRXPHLKTXNXSXXYLVSRXXXFLPXXLCTSSXGKEXHARCGPXXS

SEQ ID NO: 176888 - protein, 56 aa, Glycine max
  Clone ID: PAT_MRT3847_130747C.1.pep
FVIHLKPIYQHYFLLLKAYLALRRILIHNKYSRECGINRSTVYSVMDLHRLIDYYL

SEQ ID NO: 176889 - protein, 52 aa, Glycine max
  Clone ID: PAT_MRT3847_130748C.1.pep
ILVIDIIIYLYILDFIIANFYIYIYYLSNPFCRLLAAVGRVAGRVGGRVGNF

SEQ ID NO: 176890 - protein, 352 aa, Glycine max
  Clone ID: PAT_MRT3847_130749C.1.pep
MGEVDPAFIQDPQHRPKLSTIQAEGIPIIDLSPITNHTVSDPSAIENLVKEIGSACNEWGFFQVTNHGVPLTLRQNIEKASRLFFAQSSEEKRKVSRNESSPAGYYDTEHTKNIRDWKEVFDFLAKEPTFIPVTSDEHDDRVTQWTNQSPEYPLNFRVVTQEYIQEMEKLSFKLLELIALSLGLEAKRFEEFFIKDQTSFIRLNHYPPCPYPDLALGVGRHKDPGALTILAQDEVGGLEVKRKADQEWIRVKPTPDAYIINIGDTVQVWSNDAYESVDHRVVVNSEKERFSIPFFFFPAHDTEVKPLEELINEQNPSKYRPYKWGKFLVHRGNSNFKKQNEENIQIYHYKIA

SEQ ID NO: 176891 - protein, 81 aa, Glycine max
  Clone ID: PAT_MRT3847_13074C.1.pep
AIILVLVVLVSVFLWKYHSRKKTGQEVLLKIVHDNSTTGVPSEILANARFISQTVKLGTQTTSTCRHFSIEELKEATKNFD

SEQ ID NO: 176892 - protein, 72 aa, Glycine max
  Clone ID: PAT_MRT3847_130750C.1.pep
THLNNVLPRRIIAGHKHTQYYSLKKNAWSCSSFHITMLSTIHHPPPQLLFSDAISHSTLASHNGDSFLLLSA

SEQ ID NO: 176893 - protein, 45 aa, Glycine max
  Clone ID: PAT_MRT3847_130751C.1.pep
AYALDPKLIGEVRMASLITFPLRESVYRTLSMTPTYCILYRLHRM

SEQ ID NO: 176894 - protein, 74 aa, Glycine max
  Clone ID: PAT_MRT3847_130752C.1.pep
RHLICHGLWTVTLLNNHSQCLSSTTDDILWRRPLATKEQRHGAGYAANIAWIHIKCCDSTLAAETACARNGKGI

SEQ ID NO: 176895 - protein, 69 aa, Glycine max
  Clone ID: PAT_MRT3847_130753C.1.pep
EHAPTTQALGGLHLTESVRSTELAGPYWWKEPCCVLLVSIFFVAPCILLFHVYTFWHTISCIPYLSILV

SEQ ID NO: 176896 - protein, 203 aa, Glycine max
  unsure (1)..(203): unsure at all Xaa locations
  Clone ID: PAT_MRT3847_130754C.1.pep
MDFDDLEEAPIKATSRVSKFAPKSSKLKPKPKSEPAPPKPEPQPPISKPEPQEFVAATVKKNEDDGVETVPPTHTKPELDATVKMEEAEDEPESVRDDPIDEDIPEEDTVVREIDVFFSPSVDAQTQLYVFQYPLRPSWRPYDLDEQCEEVRLKTKTSEVEIDLSIDLDSDHIDKEFATKYNITXQTLSTTWKPSHANGCAVG

SEQ ID NO: 176897 - protein, 302 aa, Glycine max
  Clone ID: PAT_MRT3847_130755C.1.pep
MREFPSCFGENGVQVADSSSSSTTRAAQNVVTCVYQCKLRGHSSLITVSWTKTLIGQGLSVEIDDLGKHCLCKVEIKPWLFSKRKGSKNLEVQSGKVDIFWDLSSAKFGSGPEPMEGFYLAVVFNKEMVLLLGDLKKEACKKIESDCACFSHSGAVCIAKREHIFGKKFYGAKAQFCDKGQVHDVRIECDTLGLNDPCLVIRIDSKTVMQVKQLKWKFRGNHTIVVDGISVEVFWDVHNWLFGNAMGNAVFMFQTCISTEKLWSSQSVSDPSVPTWAYSQQFRDSQLQGLGFSLILYAWKNE

SEQ ID NO: 176898 - protein, 331 aa, Glycine max
  unsure (1)..(331): unsure at all Xaa locations
  Clone ID: PAT_MRT3847_130756C.1.pep
LLLFNSFLFILPSPVASSRNLPVMPFEDGYTPLFGDHNLAIHRDGKSVHLSLDERTGSGFVSHDLYLHGYFSAYQVACLLITLAGVVVHYFYIHGDMFQNNHDEIDFEFLGNIRGKDWRIQTNVYGNGSTNIGXREERYGLWFDPADDFHQYTIVWTDSQIIFYVDNVPIREVKRTESMGGDFPSKPMTLYATIWDASDWATNGGKYRVNYKYAPYVAEFSDLVLHGCAVDPIEHVAKCDSALGSEEVPSGVTQVQITKMRNFRLRHMTYSYCYDTVRYKVPPPECVISHQEAERLRKFDPITFGNGRRHRGKRHHHSSRGSQEEITASSF

SEQ ID NO: 176899 - protein, 232 aa, Glycine max
  unsure (1)..(232): unsure at all Xaa locations
  Clone ID: PAT_MRT3847_130757C.1.pep
MRLSIVGIEAMHRAISFLIQPRCLLLIVVLSIFLILALSGSKRVEEKEEELEITDRVFLDVDIDGQRLGRILIGLYGKVVPKTVENFRALCTGGERKDCQWCKTYYKGIPFHRIISRLXFRXGDIVHHDGRGYESIYGGTFLDENFKINHSXAGVVSMVNSGLDSNGSQFLMTTVKXAWLDGEHVVFGKVVQGMDTVFAIEGGAGTYNGKPRKKVVIADSGEIPKSQWDMER

SEQ ID NO: 176900 - protein, 137 aa, Glycine max
  Clone ID: PAT_MRT3847_130758C.1.pep
APRVFPFFFSAFFFLGILGGKNFSPGKSFFLFFPKGPFSPPKREKKLGVGGPLFFFFFFFFFFFFFFFFFFFFFFFFFFFFFFFFFFFFFPKRRKIFAFVIYYYFHKKITKRTSKEEQAVTVTAMVVCFSFSLLSNQ

SEQ ID NO: 176901 - protein, 44 aa, Glycine max
  unsure (1)..(44): unsure at all Xaa locations
  Clone ID: PAT_MRT3847_130759C.1.pep
TLSKSISKMTLPPVLNIRERKNIFFLVSNIRKFQLTILFNAXNI

SEQ ID NO: 176902 - protein, 73 aa, Glycine max
  Clone ID: PAT_MRT3847_13075C.1.pep
TVCVSSLLASPPETPHSSQTCLSNPTLNKFQELSKSCYCVMMTFLSETHHRKRGTIYIFYLLWNGECKHEKIN

SEQ ID NO: 176903 - protein, 59 aa, Glycine max
  Clone ID: PAT_MRT3847_130760C.1.pep
EQVKLIELLCLVSNCHSIFSSGCLEILKTIKSSSLFYFVFHICPRKCYLLIYLGLSCDI

SEQ ID NO: 176904 - protein, 60 aa, Glycine max
  Clone ID: PAT_MRT3847_130761C.1.pep
RWERHLFQISLWAPCASMFSRFQRGRRLRDITVFGVYKVNAFDPHPKAIVQYIGKKKRRP

SEQ ID NO: 176905 - protein, 88 aa, Glycine max
  Clone ID: PAT_MRT3847_130762C.1.pep
VTWGDGRAKILKQGTICVHSLSLGGQRTGYGGSHVQTTRYLLWARSDDANSTLVAREIASRTLIDRPIHSVHQEGIKSGARDWTYEFL

SEQ ID NO: 176906 - protein, 52 aa, Glycine max
  Clone ID: PAT_MRT3847_130763C.1.pep
QNFKCGKTLVRDSTYTQPLNKEINFADQFNHLNDINILKINECCVFQNFPPP

SEQ ID NO: 176907 - protein, 87 aa, Glycine max
  Clone ID: PAT_MRT3847_130764C.1.pep
ILRKLYTAQSIFSNKNKLHKNKSYKIFPDKRKFSFSQNHFSSPARQFSPWMLVPSSHSSSLACLLALKSSNFSHRDNNLSPISVGSG

SEQ ID NO: 176908 - protein, 51 aa, Glycine max
  Clone ID: PAT_MRT3847_130765C.1.pep
TPTRCVRVTSNKLAWYSGVVQSCGGGNVTYHSWPSSKPLGFNQSSATLLAD

SEQ ID NO: 176909 - protein, 50 aa, Glycine max
  Clone ID: PAT_MRT3847_130766C.1.pep
IRLEVSVKRLVRQRASMRDSLTYRSISQSSTIYDALHPIRFSILISLQTT

SEQ ID NO: 176910 - protein, 70 aa, Glycine max
  Clone ID: PAT_MRT3847_130767C.1.pep
SLLERAGPTALQPWPSPCYLVFCPCEFWSAAGCALAQRPFVHSTFYYDPGLLILAGSQQQLAELHTVEEL

SEQ ID NO: 176911 - protein, 103 aa, Glycine max
  Clone ID: PAT_MRT3847_130768C.1.pep
TTETKTRMVFFLLPPPFREGGATRKTPNLGWFPTTEKNGNKFALPPLFWGAEQIQNHPCLGEKKGGGTPFINPWAPHKIFLHRLKNPGWGNPLGIPPNLGTRN

SEQ ID NO: 176912 - protein, 56 aa, Glycine max
  Clone ID: PAT_MRT3847_130769C.1.pep
QDKNIDKTSIIIHHLKKIKVYFFQSPYKQQKRHILHLLRKLINFVNSTQLKALTLL

SEQ ID NO: 176913 - protein, 61 aa, Glycine max
  Clone ID: PAT_MRT3847_13076C.1.pep
MDSVPRRSRGGGVFESLYKVLMRRNSVYVTFIIAGAFLGERAVDYGVHKIWEHNNVGTFLY

SEQ ID NO: 176914 - protein, 142 aa, Glycine max
  unsure (1)..(142): unsure at all Xaa locations
  Clone ID: PAT_MRT3847_130770C.1.pep
QQKEDHCLLEDGISNDDHHQKSKAIVLYNSNAHSYEALPNPSETLVVEEEQDQDDGXDGYYNYDCDDDDEKYPDLTHTLFESEDLDXXGSVIDLVKNSKEEAGKEFKLEDEIDLAADLFILKFRRQMVLQKQESLKRKRENA

SEQ ID NO: 176915 - protein, 67 aa, Glycine max
  unsure (1)..(67): unsure at all Xaa locations
  Clone ID: PAT_MRT3847_130771C.1.pep
QSMEGKTHTLYMDTQYNXGNDSIADHXKRRYHRTQCGYGGQTKSVLHKKAKTTKKIALRLQYSCCKH

SEQ ID NO: 176916 - protein, 82 aa, Glycine max
  Clone ID: PAT_MRT3847_130772C.1.pep
MYTSRKKIHKDKDAEPTEFEESVGQALFDLENTNQELKSDLKDLYINSAVQIDVSGNRKAVVIHVPYRLRKGFRKIHVRLVR

SEQ ID NO: 176917 - protein, 44 aa, Glycine max
  Clone ID: PAT_MRT3847_130773C.1.pep
KGPIYGFGPGLRKKAEVFPLAESIGSGESYTAPPLEEPALLNVK

SEQ ID NO: 176918 - protein, 79 aa, Glycine max
  unsure (1)..(79): unsure at all Xaa locations
  Clone ID: PAT_MRT3847_130774C.1.pep
PSAAEDTEGGLKILWEPLFYLFSLFLLCAKQLEAMGRGXSHASFTMCCDACGGELSXPCDSCGVHHCGGSKELLHPXST

SEQ ID NO: 176919 - protein, 114 aa, Glycine max
  unsure (1)..(114): unsure at all Xaa locations
  Clone ID: PAT_MRT3847_130775C.1.pep
MSSLNERLNKPDINSSIYENILEHIGRTPMVKLNRIPQKYGLECELVAKCEYFNAGGSVKDRIGKRMILDAEKSGRIKPGDTLIEPHXYTGXGXALTAAVRGYNMIITYAEKMS

SEQ ID NO: 176920 - protein, 396 aa, Glycine max
  Clone ID: PAT_MRT3847_130776C.1.pep
MLVPHPSMLIAPQNTVENHDNIMEGQKLHFDGSLMPNQSNIPSQFIWPDHEKPCLTPPELQIPPIDLKCFLSADPQALSTVCAELSEACKKHGFFLVVNHGVDSKLIAQAHKLIDDFFCMQLSQKQKAQRKIGEHCGYANSFIGRFSSKLPWKETLSFHYSADKSRKTVEDYFLNVMGEDFKQFGSVFQEYCEAMSKLSLGIMELLGMSLGVGRECFRDFFEGNESVMRLNYYPPCQKPELALGTGPHCDPTSLTILHQDQVEGLQVFVDGRWYSVAPKEDAFVVNIGDTFMALSNGMFKSCLHRAVVNNKIVRKSLAFFLCPNRDKVVTPPKDLISYENSRTYPDFTWPSLLEFTQKHYRSDTKTLDAFSRWLLEKNNPNRGAPTNVPWPTKSIN

SEQ ID NO: 176921 - protein, 58 aa, Glycine max
  Clone ID: PAT_MRT3847_130777C.1.pep
CLAFFSSNFSSKKQLRHEENIHRALQSAFFRLISVPMLVYMNFSKSFSEHKYFCLLLS

SEQ ID NO: 176922 - protein, 53 aa, Glycine max
  Clone ID: PAT_MRT3847_130778C.1.pep
LELEEAPVSVTFDSTIDQKRVQRINLDHPRFQYCYETIVASNEFITSECIHMG

SEQ ID NO: 176923 - protein, 78 aa, Glycine max
  Clone ID: PAT_MRT3847_130779C.1.pep
GVVMRDYTPTVLMSLVGDTLLIYHDGGIYLITVLTAEDLDSESGSDCEKHAKTMSNLLSLDVMMMILAHEHHFLLLLY

SEQ ID NO: 176924 - protein, 88 aa, Glycine max
  Clone ID: PAT_MRT3847_13077C.1.pep
WFFVFYVQIINDRETGRSRGFGFVTFASEQSMKDAIEGMNGQNLDGRNITVNEAQSRGGGGGGGGGGGGYGGGSGGGYGQCDAGLQRS

SEQ ID NO: 176925 - protein, 59 aa, Glycine max
  unsure (1)..(59): unsure at all Xaa locations
  Clone ID: PAT_MRT3847_130780C.1.pep
GPKFSKSGDAXIVDMVPGKPMCXXSFXDYPPLGRFAXRDMRQTXAVGVIKXVDKKAAGA

SEQ ID NO: 176926 - protein, 96 aa, Glycine max
  unsure (1)..(96): unsure at all Xaa locations
  Clone ID: PAT_MRT3847_130781C.1.pep
DSSMISYPADTTDNPAXAEMTAPFTDLNALHVLPTIKTNNELTSIASNPGKLLCMQVCTPLVNKKFETLSYLPDLDDATFEDEPEYLLMNGWIPCL

SEQ ID NO: 176927 - protein, 82 aa, Glycine max
  unsure (1)..(82): unsure at all Xaa locations
  Clone ID: PAT_MRT3847_130782C.1.pep
RYVSPIAKCVAAFAAKILVGAWVPAVNVSESTLHHAKFYESRLLPDXSLMEITKAYPLDAVLDNLDDAPDDIKAHNRYAISS

SEQ ID NO: 176928 - protein, 79 aa, Glycine max
  Clone ID: PAT_MRT3847_130783C.1.pep
NWLTDRGSVPITVTHRNNDPIIVFFPHFYCTPYATLYALSLLLLSLQKYMPLIITSIHTIVLHLFTLPTTLTPNTHPYL

SEQ ID NO: 176929 - protein, 102 aa, Glycine max
  unsure (1)..(102): unsure at all Xaa locations
  Clone ID: PAT_MRT3847_130784C.1.pep
GSCXFVXXIXXXLVXSVVCXXVXFEXXXXYWXXXXSXVVCXXXSXVLXXXWXCXXGXCXXFGVXLXXGFVXFLCFXSLXXLLWVIXXXSXAIWXPSCVXWGG

SEQ ID NO: 176930 - protein, 65 aa, Glycine max
  unsure (1)..(65): unsure at all Xaa locations
  Clone ID: PAT_MRT3847_130785C.1.pep
GLRFTEKGAMRNRLSTFHRKACRSRQITPISDIGEVSDNXIINTRASCESCVHCNEVHILNPLTE

SEQ ID NO: 176931 - protein, 258 aa, Glycine max
  Clone ID: PAT_MRT3847_130786C.1.pep
MSSITGIQGQPLEVTVVSCSKLKDTEWISRQDPYVCVEYGSTKFRTRTCTDGGKNPVFQEKFIFPLIEGLRELNVLVWNSNTLTFDDFIGSGKIQLHKVLSQGFDDSAWPLQTKTGRYAGEVKVILHYAIANQRHKLVSGHAPSAPPYVATATPPVPSSYSTSYPPPPSATSYPPPPSPPSATPYHTTGSYSYPPPPPPPTAYPPYSSHSSPYPPSSYPPQPSSYPPPPPPSSYPPASAYPYPPPAGYPSGIYPPPPY

SEQ ID NO: 176932 - protein, 403 aa, Glycine max
  Clone ID: PAT_MRT3847_130787C.1.pep
HASASAASCRSPIRCRIKEIRYSRSPSPYKRYSRSVSRSLSRTSSRSRSRSLSRDAENPGNNLYVTGLSPRITKRELEKHFSAEGKVIDVHLVVDPWTRESRGFGFVTMETLEEADRCVKYLNRSVLEGRVITVEKAKRRRGRTPTPGKYLGLRTIRAQRRSPSDSPRRSPSYCPYRRSYSRTIRARRRSPSDSPRRSPSYSPFRRSYSRSPYSSDRSRSRSYSPDYRRRKSNSPYHSRRRSYSPYYSRYRSYSRYDRHRSYSRSRSPYSRSPVSMHDRSYSPYEIRYDSPDAHSYRRHRYRSVSRSASPDDPYYGRHRYRSVSRSASPRPRRRSRRSYSRSATPVSKRSNSRNVSPRSRRSHSRSSKRSGKCEKRYSRSSSVNASSRSVSRSNTPRSTSPST

SEQ ID NO: 176933 - protein, 306 aa, Glycine max
  unsure (1)..(306): unsure at all Xaa locations
  Clone ID: PAT_MRT3847_130788C.1.pep
MSYSRRSRYSRSPSPYKRYSRSVSRSLSRTSSRSRSRSLSRDAENPGNNLYVTGLSPRITKRELEKHFSAEGKVIDVHLVVDPWTRESRGFGFVTMETLEEADRCVKYLNRSVLEGRVITIIGVAKRRRGRTPTPGKYLGLRTIRAQRRSPSXLPRRSPSYSPYRRSYSRSPYSSDRSRKNWRPSAHASAHASAHAFAHAFRKSYSPSPSPSPYKRYGRSVSGSLSISRSRSRSRSLSRDAENPGNNLYVTGLSPRITKRELEKHFAAEGKVIDVHLVVDPWTRESRGFGFVTMETLEEAERCVKI

SEQ ID NO: 176934 - protein, 91 aa, Glycine max
  Clone ID: PAT_MRT3847_130789C.1.pep
RLSDSNNLSPGNLRTPIVFPNTRDKRDTHNTAALLGIRATTTAPRARNINLIPSLARAPHSLARHDLRVARALVRKTVCPLLSSSHDHAST

SEQ ID NO: 176935 - protein, 97 aa, Glycine max
  unsure (1)..(97): unsure at all Xaa locations
  Clone ID: PAT_MRT3847_13078C.1.pep
TTCIKGSFHIQRRRNFXFXPIFITTSNFKLPPDHSIPIIMARHYTHLPPLKGSLQERLSLIEYASQPCPASLXFLCCNRPMYFIYRNQLNNFMEQSS

SEQ ID NO: 176936 - protein, 153 aa, Glycine max
  Clone ID: PAT_MRT3847_130790C.1.pep
MSYSRRSRYSPSPSPSPYKRYGRSVSRSLSISRSRSRSRSLSRDAENPGNNLYVTGLSPRITKRELEKHFAAEGKVIDVHLVVDPWTRESRGFGFVTMETLEEAERCVKYLNRSVLEGRVITVEKVKDVRYNLPRLFALLLHLYLIILCIVNM

SEQ ID NO: 176937 - protein, 125 aa, Glycine max
  unsure (1)..(125): unsure at all Xaa locations
  Clone ID: PAT_MRT3847_130791C.1.pep
FDGGEEGIASTDVSFTLNVNQRGQQQAAQNDDDGLDSAHAIDQDSWQQERLALVTSXNRGSILSCSKMVMWPLGWTWSIICLIVVGLYTAYADRLSSACDFIHDRRFIRYTDLMGYVYSKSMYHL

SEQ ID NO: 176938 - protein, 78 aa, Glycine max
  unsure (1)..(78): unsure at all Xaa locations
  Clone ID: PAT_MRT3847_130792C.1.pep
QIFVQTPTGXTITLEVERSDPIGHVKAKIPGQEGIPPGQQRVNFAGQQVKEGRTLAGFHIQKEATLALGVGSRWGVLT

SEQ ID NO: 176939 - protein, 81 aa, Glycine max
  Clone ID: PAT_MRT3847_130793C.1.pep
SASISFPVSIHKPLVVIHIFPYKVFSADPSKILGHTSSMLMPMMPFKAIHSPSSMKRSLDVPNALSPSQYFTCKFSFPREI

SEQ ID NO: 176940 - protein, 89 aa, Glycine max
  Clone ID: PAT_MRT3847_130794C.1.pep
QGCRSIVFDITTTPPSIGGAAMILPELLYLLLKPTLHTKWHISWPCYLLALLLFMTTIVSESLAARKDLDLNLRGLGVRLVLCLSQVIG

SEQ ID NO: 176941 - protein, 48 aa, Glycine max
  Clone ID: PAT_MRT3847_130795C.1.pep
IKTLKSNSTTTDLQPFNCENPHLPLINHKLLHYPFIDFFKKHEALSLS

SEQ ID NO: 176942 - protein, 111 aa, Glycine max
  Clone ID: PAT_MRT3847_130796C.1.pep
PASVSYAPIPPKAIPAPCPQVGRGGFFPQPIGLRFLFFAGIFPYGPRICEGLFFSKRPRCHNPPSPPRGFWPPAPQFLGAGFSPPPLPSGPFPPLEPVFNVFKKRIEPLPL

SEQ ID NO: 176943 - protein, 48 aa, Glycine max
  Clone ID: PAT_MRT3847_130797C.1.pep
DRLPKEHEREAGKFNITVGKKSYILVSPNSNTPHVMKIPTLFNKAYTS

SEQ ID NO: 176944 - protein, 87 aa, Glycine max
  Clone ID: PAT_MRT3847_130798C.1.pep
DAKYLSSLLPRERQLCSGLQRWLAMATARWRSPSPGDSGSGLERLCSVTVPFLRVQAGMKPIIYCFPFCRMMCVCVSVWPLFIPLLS

SEQ ID NO: 176945 - protein, 85 aa, Glycine max
  unsure (1)..(85): unsure at all Xaa locations
  Clone ID: PAT_MRT3847_130799C.1.pep
TXTXXXPXWTSFXLGXPXFDXHLSXXXSWWGILDXNPPLXTSYVLARIGHGDFVDFXGXKPNXSSAXLEHARXGXASAVXAKPXX

SEQ ID NO: 176946 - protein, 63 aa, Glycine max
  Clone ID: PAT_MRT3847_13079C.1.pep
WGFIRPYPFYSLSFLPVMHFPLVSLLPVLFMVLNVKLFLPCLGFIRLLPPPPPPPPPPPPPKQ

SEQ ID NO: 176947 - protein, 51 aa, Glycine max
  Clone ID: PAT_MRT3847_1307C.1.pep
GKPRKVKVLTGTGNVTVIQPDYAIAARDFLGTFRSGRLGQVMLDRDIIPAC

SEQ ID NO: 176948 - protein, 73 aa, Glycine max
  Clone ID: PAT_MRT3847_130800C.1.pep
SPWRPKVGSSAVELLNACWATFIISPGVSEENLYLSPEAVAKSSLHAVVSKVKQAYSQVLAFRMRMAVNTGSG

SEQ ID NO: 176949 - protein, 36 aa, Glycine max
  Clone ID: PAT_MRT3847_130801C.1.pep
SVFLDVVFFCFAQSVVIHKHARSHNRHALFYIYSRW

SEQ ID NO: 176950 - protein, 53 aa, Glycine max
  Clone ID: PAT_MRT3847_130802C.1.pep
KAFTCKKRIQALCSKIFYGCKLTTMTKSHGIVVPGQSRTIEYKYGDPTANRVV

SEQ ID NO: 176951 - protein, 168 aa, Glycine max
  Clone ID: PAT_MRT3847_130803C.1.pep
LMVVQLFNTAIIMDEKVETLKAELQRVREENNTLRLMLEVLNSKCTKLEIHLQDINKAQHKGMSSNQIGSVTVPPMFDTNKRPRLELPTAKKPLQIFVRTHPKDDSLIVKAGHQYNNNGGSNIRIEEYVSSLIKNPDFSMSLAEAVVRTITGQQKQQDINLNLDLPEE

SEQ ID NO: 176952 - protein, 72 aa, Glycine max
  unsure (1)..(72): unsure at all Xaa locations
  Clone ID: PAT_MRT3847_130804C.1.pep
HSGIPFSFLASALFALIIHXANRXNLLFNNRGCIKNPPSVVASSTLSFGHKSNLLLITTSQATQNFIDHQLV

SEQ ID NO: 176953 - protein, 174 aa, Glycine max
  Clone ID: PAT_MRT3847_130805C.1.pep
AAEKSANKQWGFDGLRKWKKSDTDDDTVPLSLNERSDSVAYLLSYQLSSTIPYGELSMKNKLHSGLSPSDFSMDDKKELSRTPTEMRSTNTNLNFSRDQKQANSTKLPDYYKAELESDFPKPLDVVKKQFKDSVGEFENMHNDAENSMGWTTFEDEENLHPNLFVHQEKSLRKQ

SEQ ID NO: 176954 - protein, 94 aa, Glycine max
  Clone ID: PAT_MRT3847_130806C.1.pep
EHNYQHNQSFLYIGRISQGVHKYFCLGMKGCSIRIKVQALGTTDLGWGSEDIVGGFNTFIHPNRYYQTCSLACTPQKISFASGPKLKYVVRKEK

SEQ ID NO: 176955 - protein, 95 aa, Glycine max
  Clone ID: PAT_MRT3847_130807C.1.pep
FWTQSACGLGWELKSVWKQTNNRRRNRRCSTDYRISKLGTDHSLACTTIITRSRFLGRTFSAAPTGWERWFLAAEIICGLRAHFSWEVWKMKNHS

SEQ ID NO: 176956 - protein, 48 aa, Glycine max
  Clone ID: PAT_MRT3847_130808C.1.pep
WRARKCYCKYKVNPKLECEILLMCLSNVNCYYYFFTILGGYINWTVLR

SEQ ID NO: 176957 - protein, 84 aa, Glycine max
  Clone ID: PAT_MRT3847_130809C.1.pep
LKKHAMKVLMLLQKNAREKLGMKCQIFLKMKWEPFFKTFSLKLKICSQRGLKIFLFKHFEATCAMKVSQKFTTTKPKSKQNHLR

SEQ ID NO: 176958 - protein, 45 aa, Glycine max
  Clone ID: PAT_MRT3847_13080C.1.pep
QFGPKNLDIFIFKGNSRQPQIGQKFFIRVFLVQYFKLELGVREFF

SEQ ID NO: 176959 - protein, 371 aa, Glycine max
  Clone ID: PAT_MRT3847_130810C.1.pep
MANQVVPRESHPYAFHVSGPRKFTSLNWRDLIISSWKDANYKRTVIACFIQAVYLLELDRQEKRTQGNALAPNWWIPFKYKLKQTLIDERDGSIFGTILEWDRSAALADLIPIRPSGAPRAVLALRGTLLKSPTMRRDIEDDLRFVAWESLKGSVRFKAALEVLKSICGKYGSNNVCIAGHSLGAGFALQVGKELAKEGTYVEAHLFNPSSVSLAMSLKTIGEKAEFVWNRLKSMLPYSGEAQISNDVDKTSSSVGLKSRMPQLSGSGLKDASLGVAKWVPYLYVNNGDYICCYYNDGAGTSTKVNVGTTNGQVSAKLFVVSKEKQKFLEAHGLEQWWSSDAELQQVIHSSNLISRQLRSLYTAAPSQVNL

SEQ ID NO: 176960 - protein, 47 aa, Glycine max
  Clone ID: PAT_MRT3847_130811C.1.pep
LEHPHPPPPSKKPYYYHSPAPPVHPQPYPHPQPEPQTYPQYHPTRTI

SEQ ID NO: 176961 - protein, 152 aa, Glycine max
  unsure (1)..(152): unsure at all Xaa locations
  Clone ID: PAT_MRT3847_130812C.1.pep
KGPFPQSNPFRYXSEKKXVMYAYSXXLDXFXXKAIXSLKAYQXLAREFFKVWKRFSLRPFLAFFKSGEISRFFLSPKIPDQEPCDRSGYIFSQKWCKACVLLNGLNRGFLNLGIGQIGASVVFNNGNESKVEKTFQANQGPPLAFCFPPSPL

SEQ ID NO: 176962 - protein, 48 aa, Glycine max
  Clone ID: PAT_MRT3847_130813C.1.pep
GKEKCQERKECKKLEIKGYLFLDLPEMYREAESVVLYHCSFYFLYFIL

SEQ ID NO: 176963 - protein, 265 aa, Glycine max
  unsure (1)..(265): unsure at all Xaa locations
  Clone ID: PAT_MRT3847_130814C.1.pep
MSVIDILTRVDSICKKYDKYDVDKHRDANVSGDDAFARLYASVDADIEALLQKAESASKEKGKASAVAINAEIRRTKARLLEEVPKLQRLAVKKVKGLSSQEFAARNDLVLALPDRIQAIPDGAPPVPKQTGGWAASASRPEIKFDSDGRFDDEYFQQSEHSNQFRQEYXMRRXTXIRFWDVIAEGLDTLKNMAHDMNEELDRQXPLMDEIDTKVDKAXSDLKNTNVRLKDTVNQLRSSRNFCIDIVLLIIILGIAAYLYNVLKK

SEQ ID NO: 176964 - protein, 133 aa, Glycine max
  unsure (1)..(133): unsure at all Xaa locations
  Clone ID: PAT_MRT3847_130815C.1.pep
SLIFYFFKVYLALCNLLECEVSKLMNDSVYPQVKGLSSQEFAARNDLVLALPDRIQAIPDGAPAVPKQTGGWAASASRPEIKFDSHGRFDDEYFQQSEQSNQFXHEYEMRFLKQNKTFIMIAIRQISSSMMSH

SEQ ID NO: 176965 - protein, 45 aa, Glycine max
  unsure (1)..(45): unsure at all Xaa locations
  Clone ID: PAT_MRT3847_130816C.1.pep
IFSNFMNLMNIYFASGIKKLINXMNLMNMHLXXKYYWYNFKYIYY

SEQ ID NO: 176966 - protein, 252 aa, Glycine max
  Clone ID: PAT_MRT3847_130817C.1.pep
MGKYDKYDVEKHRDANVSGDDAFARLYASVDADIVALLQKAESASKEKGKASAVAINAEIRRTKARLLEEVPKLQRLAVKKVKGLSSQEFAARNDLVLALPDRIQAIPDGAPPVPKQTGGWAASASRPEIKFDSDGRFDDEYFQQSEQSSQFRQEYEMRRMKQDQGLDVIAEGLDTLKNMAHDMNEELDRQVPLMDEIDTKVDKASSDLKNTNVRLKDTVNQLRSSRNFCIDIVLLIIILGIAAYLYNVLKK

SEQ ID NO: 176967 - protein, 166 aa, Glycine max
  Clone ID: PAT_MRT3847_130818C.1.pep
HLHDKNNVDKSSSVLNSWRMRIKVALDASRGIEYLHNYAVPSIIHRDIKSSNILIDATWTARVSDFGLSLMSPESNHDFRPMKAAGTVGYIDPEYYGLNVLTAKSDVYGLGVVLLELLTGKRAIFKNDENGGTPVSVVDFAVPLIMAGELAKVVDPRVELPEMNET

SEQ ID NO: 176968 - protein, 85 aa, Glycine max
  Clone ID: PAT_MRT3847_130819C.1.pep
YNARCLEELKLSLESSGACKVAFNPITLNTMKKILFRICQMEHCDVTAEYVDLIAKTSGGDIRHAITSLQFFCLKPSTCYRGALK

SEQ ID NO: 176969 - protein, 81 aa, Glycine max
  Clone ID: PAT_MRT3847_13081C.1.pep
QFFFFFFFFFFFIFFFFFFFFFSTGKVLFFPLMVCYNNVHGSLINFTSPTVIALLDTVYGPSLFCDYIGYNKPFQMPAKRN

SEQ ID NO: 176970 - protein, 107 aa, Glycine max
  unsure (1)..(107): unsure at all Xaa locations
  Clone ID: PAT_MRT3847_130820C.1.pep
LRWXWLXSLXRPCXCWSWCXSHRXPCCQGPVXGXIEHCXRDLVAQLVGVXXVXXXRCXXXGFLCXLSSXXTSXXXXXXVEXXKXTXWKQSVQNXTXXRAXFRASXXV

SEQ ID NO: 176971 - protein, 94 aa, Glycine max
  Clone ID: PAT_MRT3847_130821C.1.pep
DGVNQKKERKGRYCMITNSGRPTATELSNQIVKHRPDHTYMTVKGNVCKNKRGPMESIHKLQARNGKKENLAPTIRGQTCQEQGQHTKKKCPEG

SEQ ID NO: 176972 - protein, 82 aa, Glycine max
  Clone ID: PAT_MRT3847_130822C.1.pep
TFCLSSMGGFSPQESGGLSLTLDVWRGARNGHIKPKRSIAFWPKRPRSNAIEGPNGKGPKCSWSITMTVSMSMSYRVHGPFK

SEQ ID NO: 176973 - protein, 82 aa, Glycine max
  Clone ID: PAT_MRT3847_130823C.1.pep
RTSPPIKEWFPRASFVNSKVLVLKYKVLWVKIKKQTWHAKDLQFKGGVAPGGLKFDSFSKNPQFGWELAWVIFNKNGEGFFF

SEQ ID NO: 176974 - protein, 71 aa, Glycine max
  unsure (1)..(71): unsure at all Xaa locations
  Clone ID: PAT_MRT3847_130824C.1.pep
HQVQKDGRVLSHRANWKRSFWLWLSRSSQVQKKRYVLKKIRLGKQTEKXKRTAHQEMNLIAKLNNPYIGDY

SEQ ID NO: 176975 - protein, 103 aa, Glycine max
  unsure (1)..(103): unsure at all Xaa locations
  Clone ID: PAT_MRT3847_130825C.1.pep
DRNLQQRLKVQQQQALMQKAVLQQHQMYHPGMLAVAMSKMEPDTRGNVPTGFDTSACRSAYVRNIHVNDTEKLFAHDYXSAGTLAGCXVIRKEKCWYGCVDYH

SEQ ID NO: 176976 - protein, 80 aa, Glycine max
  unsure (1)..(80): unsure at all Xaa locations
  Clone ID: PAT_MRT3847_130826C.1.pep
YISVLSFFFNSHNTLTXLLSHMSFFSPLSFFSPPPCFILLSPILHFKFTTLTNPPFTLSCIHKKKKFTQRKIKLIKLNFH

SEQ ID NO: 176977 - protein, 70 aa, Glycine max
  unsure (1)..(70): unsure at all Xaa locations
  Clone ID: PAT_MRT3847_130827C.1.pep
MIQIIXNQNQEQKISERMVSWQXTYPRXEXVXXPNYDKXXSHNHIXXLXXXXXVSGELXXASPXRXSXAS

SEQ ID NO: 176978 - protein, 74 aa, Glycine max
  Clone ID: PAT_MRT3847_130828C.1.pep
RMRIVHLYDDHDKLNFTTVAIMLNATNFMREGEQYPGDQNFTFKPGHYSPNYFFNNLISLTLKLSDCDTLTGTH

SEQ ID NO: 176979 - protein, 60 aa, Glycine max
  Clone ID: PAT_MRT3847_130829C.1.pep
SYLLSFVKFIITLETSKVINLTSLKVDNLSSLTTKELSRWTKIPLSKSQKQTPLSLRTRG

SEQ ID NO: 176980 - protein, 81 aa, Glycine max
  Clone ID: PAT_MRT3847_13082C.1.pep
VGVPPAWGGGGGGGGGGGGGGGGGGGHPKSQGKKASPSLKCEGSGLRWPAAIERVKPKADKGKSTVNPLESRAQASPKEKP
